United States Patent Application Publication US 2021/0180091 A1 - sequence listing, part 5

SEQ ID NO: 90135 - DNA, 22 bp, Artificial Sequence
  Synthetic oligonucleotide; TTG chr11 5257991 5258012 5258008 5258013 +
attaaaaatgcatattaccgac

SEQ ID NO: 90136 - DNA, 22 bp, Artificial Sequence
  Synthetic oligonucleotide; TTA chr11 5257995 5258016 5258012 5258017 +
aaaatgcatattaccgacaaat

SEQ ID NO: 90137 - DNA, 22 bp, Artificial Sequence
  Synthetic oligonucleotide; TTA chr11 5258008 5258029 5258025 5258030 +
ccgacaaattagagggtgatgg

SEQ ID NO: 90138 - DNA, 22 bp, Artificial Sequence
  Synthetic oligonucleotide; TTA chr11 5258019 5258040 5258036 5258041 +
gagggtgatggcagatgggagg

SEQ ID NO: 90139 - DNA, 22 bp, Artificial Sequence
  Synthetic oligonucleotide; TTG chr11 5258057 5258078 5258074 5258079 +
cagctcccactcggatgcacag

SEQ ID NO: 90140 - DNA, 22 bp, Artificial Sequence
  Synthetic oligonucleotide; CTC chr11 5258063 5258084 5258080 5258085 +
ccactcggatgcacagagcagc

SEQ ID NO: 90141 - DNA, 22 bp, Artificial Sequence
  Synthetic oligonucleotide; CTC chr11 5258069 5258090 5258086 5258091 +
ggatgcacagagcagcatgtga

SEQ ID NO: 90142 - DNA, 22 bp, Artificial Sequence
  Synthetic oligonucleotide; CTC chr11 5258097 5258118 5258114 5258119 +
ccatcaggaattttttttgcag

SEQ ID NO: 90143 - DNA, 22 bp, Artificial Sequence
  Synthetic oligonucleotide; TTT chr11 5258110 5258131 5258127 5258132 +
tttttgcagaaccacctgcaga

SEQ ID NO: 90144 - DNA, 22 bp, Artificial Sequence
  Synthetic oligonucleotide; TTT chr11 5258111 5258132 5258128 5258133 +
ttttgcagaaccacctgcagaa

SEQ ID NO: 90145 - DNA, 22 bp, Artificial Sequence
  Synthetic oligonucleotide; TTT chr11 5258112 5258133 5258129 5258134 +
tttgcagaaccacctgcagaaa

SEQ ID NO: 90146 - DNA, 22 bp, Artificial Sequence
  Synthetic oligonucleotide; TTT chr11 5258113 5258134 5258130 5258135 +
ttgcagaaccacctgcagaaat

SEQ ID NO: 90147 - DNA, 22 bp, Artificial Sequence
  Synthetic oligonucleotide; TTT chr11 5258114 5258135 5258131 5258136 +
tgcagaaccacctgcagaaata

SEQ ID NO: 90148 - DNA, 22 bp, Artificial Sequence
  Synthetic oligonucleotide; TTT chr11 5258115 5258136 5258132 5258137 +
gcagaaccacctgcagaaataa

SEQ ID NO: 90149 - DNA, 22 bp, Artificial Sequence
  Synthetic oligonucleotide; TTG chr11 5258116 5258137 5258133 5258138 +
cagaaccacctgcagaaataaa

SEQ ID NO: 90150 - DNA, 22 bp, Artificial Sequence
  Synthetic oligonucleotide; CTG chr11 5258128 5258149 5258145 5258150 +
cagaaataaatcaagaaagctg

SEQ ID NO: 90151 - DNA, 22 bp, Artificial Sequence
  Synthetic oligonucleotide; CTG chr11 5258150 5258171 5258167 5258172 +
agagaacgcacacaccctctga

SEQ ID NO: 90152 - DNA, 22 bp, Artificial Sequence
  Synthetic oligonucleotide; CTC chr11 5258169 5258190 5258186 5258191 +
tgaaagaagcagattgctcctg

SEQ ID NO: 90153 - DNA, 22 bp, Artificial Sequence
  Synthetic oligonucleotide; CTG chr11 5258171 5258192 5258188 5258193 +
aaagaagcagattgctcctgca

SEQ ID NO: 90154 - DNA, 22 bp, Artificial Sequence
  Synthetic oligonucleotide; TTG chr11 5258185 5258206 5258202 5258207 +
ctcctgcaggacccgggaaaca

SEQ ID NO: 90155 - DNA, 22 bp, Artificial Sequence
  Synthetic oligonucleotide; CTC chr11 5258188 5258209 5258205 5258210 +
ctgcaggacccgggaaacaccc

SEQ ID NO: 90156 - DNA, 22 bp, Artificial Sequence
  Synthetic oligonucleotide; CTG chr11 5258191 5258212 5258208 5258213 +
caggacccgggaaacaccccaa

SEQ ID NO: 90157 - DNA, 22 bp, Artificial Sequence
  Synthetic oligonucleotide; TTG chr11 5258219 5258240 5258236 5258241 +
tgagtgcccaaactgtggaagt

SEQ ID NO: 90158 - DNA, 22 bp, Artificial Sequence
  Synthetic oligonucleotide; CTG chr11 5258234 5258255 5258251 5258256 +
tggaagtggaaaagggggaccg

SEQ ID NO: 90159 - DNA, 22 bp, Artificial Sequence
  Synthetic oligonucleotide; CTA chr11 5258260 5258281 5258277 5258282 +
cccccaaacacacatcctcact

SEQ ID NO: 90160 - DNA, 22 bp, Artificial Sequence
  Synthetic oligonucleotide; CTC chr11 5258279 5258300 5258296 5258301 +
actggggaacctgaagatctag

SEQ ID NO: 90161 - DNA, 22 bp, Artificial Sequence
  Synthetic oligonucleotide; CTG chr11 5258283 5258304 5258300 5258305 +
gggaacctgaagatctagacca

SEQ ID NO: 90162 - DNA, 22 bp, Artificial Sequence
  Synthetic oligonucleotide; CTG chr11 5258292 5258313 5258309 5258314 +
aagatctagaccacaggagaag

SEQ ID NO: 90163 - DNA, 22 bp, Artificial Sequence
  Synthetic oligonucleotide; CTA chr11 5258300 5258321 5258317 5258322 +
gaccacaggagaagattctgac

SEQ ID NO: 90164 - DNA, 22 bp, Artificial Sequence
  Synthetic oligonucleotide; TTC chr11 5258318 5258339 5258335 5258340 +
tgaccttacctggagctgagtc

SEQ ID NO: 90165 - DNA, 22 bp, Artificial Sequence
  Synthetic oligonucleotide; CTG chr11 5258320 5258341 5258337 5258342 +
accttacctggagctgagtcaa

SEQ ID NO: 90166 - DNA, 22 bp, Artificial Sequence
  Synthetic oligonucleotide; CTT chr11 5258325 5258346 5258342 5258347 +
acctggagctgagtcaatttag

SEQ ID NO: 90167 - DNA, 22 bp, Artificial Sequence
  Synthetic oligonucleotide; TTA chr11 5258326 5258347 5258343 5258348 +
cctggagctgagtcaatttaga

SEQ ID NO: 90168 - DNA, 22 bp, Artificial Sequence
  Synthetic oligonucleotide; CTG chr11 5258330 5258351 5258347 5258352 +
gagctgagtcaatttagagggc

SEQ ID NO: 90169 - DNA, 22 bp, Artificial Sequence
  Synthetic oligonucleotide; CTG chr11 5258336 5258357 5258353 5258358 +
agtcaatttagagggccaagca

SEQ ID NO: 90170 - DNA, 22 bp, Artificial Sequence
  Synthetic oligonucleotide; TTT chr11 5258345 5258366 5258362 5258367 +
agagggccaagcaaaatacagg

SEQ ID NO: 90171 - DNA, 22 bp, Artificial Sequence
  Synthetic oligonucleotide; TTA chr11 5258346 5258367 5258363 5258368 +
gagggccaagcaaaatacaggg

SEQ ID NO: 90172 - DNA, 22 bp, Artificial Sequence
  Synthetic oligonucleotide; CTG chr11 5258395 5258416 5258412 5258417 +
tgggctctctgggtcccctagg

SEQ ID NO: 90173 - DNA, 22 bp, Artificial Sequence
  Synthetic oligonucleotide; CTC chr11 5258402 5258423 5258419 5258424 +
tctgggtcccctaggaagccat

SEQ ID NO: 90174 - DNA, 22 bp, Artificial Sequence
  Synthetic oligonucleotide; CTC chr11 5258404 5258425 5258421 5258426 +
tgggtcccctaggaagccattt

SEQ ID NO: 90175 - DNA, 22 bp, Artificial Sequence
  Synthetic oligonucleotide; CTG chr11 5258406 5258427 5258423 5258428 +
ggtcccctaggaagccatttct

SEQ ID NO: 90176 - DNA, 22 bp, Artificial Sequence
  Synthetic oligonucleotide; CTA chr11 5258415 5258436 5258432 5258437 +
ggaagccatttctgccttgcct

SEQ ID NO: 90177 - DNA, 22 bp, Artificial Sequence
  Synthetic oligonucleotide; TTT chr11 5258426 5258447 5258443 5258448 +
ctgccttgcctcacaggggtca

SEQ ID NO: 90178 - DNA, 22 bp, Artificial Sequence
  Synthetic oligonucleotide; TTC chr11 5258427 5258448 5258444 5258449 +
tgccttgcctcacaggggtcat

SEQ ID NO: 90179 - DNA, 22 bp, Artificial Sequence
  Synthetic oligonucleotide; CTG chr11 5258429 5258450 5258446 5258451 +
ccttgcctcacaggggtcattt

SEQ ID NO: 90180 - DNA, 22 bp, Artificial Sequence
  Synthetic oligonucleotide; CTT chr11 5258433 5258454 5258450 5258455 +
gcctcacaggggtcatttggga

SEQ ID NO: 90181 - DNA, 22 bp, Artificial Sequence
  Synthetic oligonucleotide; TTG chr11 5258434 5258455 5258451 5258456 +
cctcacaggggtcatttgggag

SEQ ID NO: 90182 - DNA, 22 bp, Artificial Sequence
  Synthetic oligonucleotide; CTC chr11 5258438 5258459 5258455 5258460 +
acaggggtcatttgggagggct

SEQ ID NO: 90183 - DNA, 22 bp, Artificial Sequence
  Synthetic oligonucleotide; TTT chr11 5258451 5258472 5258468 5258473 +
gggagggctgccagaggaactg

SEQ ID NO: 90184 - DNA, 22 bp, Artificial Sequence
  Synthetic oligonucleotide; TTG chr11 5258452 5258473 5258469 5258474 +
ggagggctgccagaggaactgg

SEQ ID NO: 90185 - DNA, 22 bp, Artificial Sequence
  Synthetic oligonucleotide; CTG chr11 5258461 5258482 5258478 5258483 +
ccagaggaactgggaaaagatg

SEQ ID NO: 90186 - DNA, 22 bp, Artificial Sequence
  Synthetic oligonucleotide; CTG chr11 5258473 5258494 5258490 5258495 +
ggaaaagatgacaggaaaaaga

SEQ ID NO: 90187 - DNA, 22 bp, Artificial Sequence
  Synthetic oligonucleotide; CTC chr11 5258502 5258523 5258519 5258524 +
cacctggccagatctaggggct

SEQ ID NO: 90188 - DNA, 22 bp, Artificial Sequence
  Synthetic oligonucleotide; CTG chr11 5258508 5258529 5258525 5258530 +
gccagatctaggggctgggcag

SEQ ID NO: 90189 - DNA, 22 bp, Artificial Sequence
  Synthetic oligonucleotide; CTA chr11 5258518 5258539 5258535 5258540 +
ggggctgggcagtgggggggtt

SEQ ID NO: 90190 - DNA, 22 bp, Artificial Sequence
  Synthetic oligonucleotide; CTG chr11 5258525 5258546 5258542 5258547 +
ggcagtgggggggttggtgggg

SEQ ID NO: 90191 - DNA, 22 bp, Artificial Sequence
  Synthetic oligonucleotide; TTG chr11 5258541 5258562 5258558 5258563 +
gtggggggacatgaatttggtg

SEQ ID NO: 90192 - DNA, 22 bp, Artificial Sequence
  Synthetic oligonucleotide; TTT chr11 5258559 5258580 5258576 5258581 +
ggtgtgcagactccactggcag

SEQ ID NO: 90193 - DNA, 22 bp, Artificial Sequence
  Synthetic oligonucleotide; TTG chr11 5258560 5258581 5258577 5258582 +
gtgtgcagactccactggcagg

SEQ ID NO: 90194 - DNA, 22 bp, Artificial Sequence
  Synthetic oligonucleotide; CTC chr11 5258572 5258593 5258589 5258594 +
cactggcagggaagtaggacag

SEQ ID NO: 90195 - DNA, 22 bp, Artificial Sequence
  Synthetic oligonucleotide; CTG chr11 5258577 5258598 5258594 5258599 +
gcagggaagtaggacagcccta

SEQ ID NO: 90196 - DNA, 22 bp, Artificial Sequence
  Synthetic oligonucleotide; CTA chr11 5258599 5258620 5258616 5258621 +
cttggtttcgcagctggtagcc

SEQ ID NO: 90197 - DNA, 22 bp, Artificial Sequence
  Synthetic oligonucleotide; CTT chr11 5258602 5258623 5258619 5258624 +
ggtttcgcagctggtagcctgg

SEQ ID NO: 90198 - DNA, 22 bp, Artificial Sequence
  Synthetic oligonucleotide; TTG chr11 5258603 5258624 5258620 5258625 +
gtttcgcagctggtagcctggg

SEQ ID NO: 90199 - DNA, 22 bp, Artificial Sequence
  Synthetic oligonucleotide; TTT chr11 5258607 5258628 5258624 5258629 +
cgcagctggtagcctggggcaa

SEQ ID NO: 90200 - DNA, 22 bp, Artificial Sequence
  Synthetic oligonucleotide; TTC chr11 5258608 5258629 5258625 5258630 +
gcagctggtagcctggggcaag

SEQ ID NO: 90201 - DNA, 22 bp, Artificial Sequence
  Synthetic oligonucleotide; CTG chr11 5258615 5258636 5258632 5258637 +
gtagcctggggcaagttctcag

SEQ ID NO: 90202 - DNA, 22 bp, Artificial Sequence
  Synthetic oligonucleotide; CTG chr11 5258623 5258644 5258640 5258645 +
gggcaagttctcagccttgctc

SEQ ID NO: 90203 - DNA, 22 bp, Artificial Sequence
  Synthetic oligonucleotide; TTC chr11 5258633 5258654 5258650 5258655 +
tcagccttgctcactgactgca

SEQ ID NO: 90204 - DNA, 22 bp, Artificial Sequence
  Synthetic oligonucleotide; CTC chr11 5258635 5258656 5258652 5258657 +
agccttgctcactgactgcatg

SEQ ID NO: 90205 - DNA, 22 bp, Artificial Sequence
  Synthetic oligonucleotide; CTT chr11 5258641 5258662 5258658 5258663 +
gctcactgactgcatggaaaca

SEQ ID NO: 90206 - DNA, 22 bp, Artificial Sequence
  Synthetic oligonucleotide; TTG chr11 5258642 5258663 5258659 5258664 +
ctcactgactgcatggaaacag

SEQ ID NO: 90207 - DNA, 22 bp, Artificial Sequence
  Synthetic oligonucleotide; CTC chr11 5258645 5258666 5258662 5258667 +
actgactgcatggaaacagatt

SEQ ID NO: 90208 - DNA, 22 bp, Artificial Sequence
  Synthetic oligonucleotide; CTG chr11 5258649 5258670 5258666 5258671 +
actgcatggaaacagattcggt

SEQ ID NO: 90209 - DNA, 22 bp, Artificial Sequence
  Synthetic oligonucleotide; CTG chr11 5258653 5258674 5258670 5258675 +
catggaaacagattcggtgctg

SEQ ID NO: 90210 - DNA, 22 bp, Artificial Sequence
  Synthetic oligonucleotide; TTC chr11 5258668 5258689 5258685 5258690 +
ggtgctgttgcgggggagggtg

SEQ ID NO: 90211 - DNA, 22 bp, Artificial Sequence
  Synthetic oligonucleotide; CTG chr11 5258675 5258696 5258692 5258697 +
ttgcgggggagggtgcacgctg

SEQ ID NO: 90212 - DNA, 22 bp, Artificial Sequence
  Synthetic oligonucleotide; TTG chr11 5258678 5258699 5258695 5258700 +
cgggggagggtgcacgctggaa

SEQ ID NO: 90213 - DNA, 22 bp, Artificial Sequence
  Synthetic oligonucleotide; CTG chr11 5258697 5258718 5258714 5258719 +
gaagtgagaccaaccttttgag

SEQ ID NO: 90214 - DNA, 22 bp, Artificial Sequence
  Synthetic oligonucleotide; CTT chr11 5258714 5258735 5258731 5258736 +
ttgagttgcatgggagctgggc

SEQ ID NO: 90215 - DNA, 22 bp, Artificial Sequence
  Synthetic oligonucleotide; TTT chr11 5258715 5258736 5258732 5258737 +
tgagttgcatgggagctgggca

SEQ ID NO: 90216 - DNA, 22 bp, Artificial Sequence
  Synthetic oligonucleotide; TTT chr11 5258716 5258737 5258733 5258738 +
gagttgcatgggagctgggcaa

SEQ ID NO: 90217 - DNA, 22 bp, Artificial Sequence
  Synthetic oligonucleotide; TTG chr11 5258717 5258738 5258734 5258739 +
agttgcatgggagctgggcaag

SEQ ID NO: 90218 - DNA, 22 bp, Artificial Sequence
  Synthetic oligonucleotide; TTG chr11 5258722 5258743 5258739 5258744 +
catgggagctgggcaagtcacg

SEQ ID NO: 90219 - DNA, 22 bp, Artificial Sequence
  Synthetic oligonucleotide; CTG chr11 5258733 5258754 5258750 5258755 +
ggcaagtcacgtgactgcttgc

SEQ ID NO: 90220 - DNA, 22 bp, Artificial Sequence
  Synthetic oligonucleotide; CTG chr11 5258750 5258771 5258767 5258772 +
cttgctttcccccactttcctg

SEQ ID NO: 90221 - DNA, 22 bp, Artificial Sequence
  Synthetic oligonucleotide; CTT chr11 5258753 5258774 5258770 5258775 +
gctttcccccactttcctgatg

SEQ ID NO: 90222 - DNA, 22 bp, Artificial Sequence
  Synthetic oligonucleotide; TTG chr11 5258754 5258775 5258771 5258776 +
ctttcccccactttcctgatga

SEQ ID NO: 90223 - DNA, 22 bp, Artificial Sequence
  Synthetic oligonucleotide; CTT chr11 5258757 5258778 5258774 5258779 +
tcccccactttcctgatgacct

SEQ ID NO: 90224 - DNA, 22 bp, Artificial Sequence
  Synthetic oligonucleotide; TTT chr11 5258758 5258779 5258775 5258780 +
cccccactttcctgatgacctg

SEQ ID NO: 90225 - DNA, 22 bp, Artificial Sequence
  Synthetic oligonucleotide; TTC chr11 5258759 5258780 5258776 5258781 +
ccccactttcctgatgacctgc

SEQ ID NO: 90226 - DNA, 22 bp, Artificial Sequence
  Synthetic oligonucleotide; CTT chr11 5258767 5258788 5258784 5258789 +
tcctgatgacctgcatgacaca

SEQ ID NO: 90227 - DNA, 22 bp, Artificial Sequence
  Synthetic oligonucleotide; TTT chr11 5258768 5258789 5258785 5258790 +
cctgatgacctgcatgacacag

SEQ ID NO: 90228 - DNA, 22 bp, Artificial Sequence
  Synthetic oligonucleotide; TTC chr11 5258769 5258790 5258786 5258791 +
ctgatgacctgcatgacacagc

SEQ ID NO: 90229 - DNA, 22 bp, Artificial Sequence
  Synthetic oligonucleotide; CTG chr11 5258772 5258793 5258789 5258794 +
atgacctgcatgacacagcaga

SEQ ID NO: 90230 - DNA, 22 bp, Artificial Sequence
  Synthetic oligonucleotide; CTG chr11 5258780 5258801 5258797 5258802 +
catgacacagcagaggcagcca

SEQ ID NO: 90231 - DNA, 22 bp, Artificial Sequence
  Synthetic oligonucleotide; TTG chr11 5258808 5258829 5258825 5258830 +
tcctaggaacataaatccattg

SEQ ID NO: 90232 - DNA, 22 bp, Artificial Sequence
  Synthetic oligonucleotide; CTA chr11 5258813 5258834 5258830 5258835 +
ggaacataaatccattgacctg

SEQ ID NO: 90233 - DNA, 22 bp, Artificial Sequence
  Synthetic oligonucleotide; TTG chr11 5258830 5258851 5258847 5258852 +
acctggaaactacacccccatc

SEQ ID NO: 90234 - DNA, 22 bp, Artificial Sequence
  Synthetic oligonucleotide; CTG chr11 5258835 5258856 5258852 5258857 +
gaaactacacccccatcctccc

SEQ ID NO: 90235 - DNA, 22 bp, Artificial Sequence
  Synthetic oligonucleotide; CTA chr11 5258842 5258863 5258859 5258864 +
cacccccatcctcccacagtag

SEQ ID NO: 90236 - DNA, 22 bp, Artificial Sequence
  Synthetic oligonucleotide; CTC chr11 5258855 5258876 5258872 5258877 +
ccacagtagccacagaaagacc

SEQ ID NO: 90237 - DNA, 22 bp, Artificial Sequence
  Synthetic oligonucleotide; CTG chr11 5258879 5258900 5258896 5258901 +
cccaaggagactctgagctcag

SEQ ID NO: 90238 - DNA, 22 bp, Artificial Sequence
  Synthetic oligonucleotide; CTC chr11 5258892 5258913 5258909 5258914 +
tgagctcagacacgactagtcc

SEQ ID NO: 90239 - DNA, 22 bp, Artificial Sequence
  Synthetic oligonucleotide; CTG chr11 5258894 5258915 5258911 5258916 +
agctcagacacgactagtcctg

SEQ ID NO: 90240 - DNA, 22 bp, Artificial Sequence
  Synthetic oligonucleotide; CTC chr11 5258899 5258920 5258916 5258921 +
agacacgactagtcctgccccc

SEQ ID NO: 90241 - DNA, 22 bp, Artificial Sequence
  Synthetic oligonucleotide; CTA chr11 5258910 5258931 5258927 5258932 +
gtcctgcccccacctgatggtc

SEQ ID NO: 90242 - DNA, 22 bp, Artificial Sequence
  Synthetic oligonucleotide; CTG chr11 5258916 5258937 5258933 5258938 +
cccccacctgatggtccttcct

SEQ ID NO: 90243 - DNA, 22 bp, Artificial Sequence
  Synthetic oligonucleotide; CTG chr11 5258926 5258947 5258943 5258948 +
atggtccttccttactcaccct

SEQ ID NO: 90244 - DNA, 22 bp, Artificial Sequence
  Synthetic oligonucleotide; CTT chr11 5258935 5258956 5258952 5258957 +
ccttactcaccctggtagctga

SEQ ID NO: 90245 - DNA, 22 bp, Artificial Sequence
  Synthetic oligonucleotide; TTC chr11 5258936 5258957 5258953 5258958 +
cttactcaccctggtagctgaa

SEQ ID NO: 90246 - DNA, 22 bp, Artificial Sequence
  Synthetic oligonucleotide; CTT chr11 5258939 5258960 5258956 5258961 +
actcaccctggtagctgaagac

SEQ ID NO: 90247 - DNA, 22 bp, Artificial Sequence
  Synthetic oligonucleotide; TTA chr11 5258940 5258961 5258957 5258962 +
ctcaccctggtagctgaagaca

SEQ ID NO: 90248 - DNA, 22 bp, Artificial Sequence
  Synthetic oligonucleotide; CTC chr11 5258943 5258964 5258960 5258965 +
accctggtagctgaagacaaag

SEQ ID NO: 90249 - DNA, 22 bp, Artificial Sequence
  Synthetic oligonucleotide; CTG chr11 5258949 5258970 5258966 5258971 +
gtagctgaagacaaagggcata

SEQ ID NO: 90250 - DNA, 22 bp, Artificial Sequence
  Synthetic oligonucleotide; CTG chr11 5258956 5258977 5258973 5258978 +
aagacaaagggcatatattctt

SEQ ID NO: 90251 - DNA, 22 bp, Artificial Sequence
  Synthetic oligonucleotide; TTC chr11 5258976 5258997 5258993 5258998 +
ttgggagttctagggtgcccca

SEQ ID NO: 90252 - DNA, 22 bp, Artificial Sequence
  Synthetic oligonucleotide; CTT chr11 5258978 5258999 5258995 5259000 +
gggagttctagggtgccccagc

SEQ ID NO: 90253 - DNA, 22 bp, Artificial Sequence
  Synthetic oligonucleotide; TTG chr11 5258979 5259000 5258996 5259001 +
ggagttctagggtgccccagcc

SEQ ID NO: 90254 - DNA, 22 bp, Artificial Sequence
  Synthetic oligonucleotide; TTC chr11 5258986 5259007 5259003 5259008 +
tagggtgccccagcccccccag

SEQ ID NO: 90255 - DNA, 22 bp, Artificial Sequence
  Synthetic oligonucleotide; CTA chr11 5258988 5259009 5259005 5259010 +
gggtgccccagcccccccagcc

SEQ ID NO: 90256 - DNA, 22 bp, Artificial Sequence
  Synthetic oligonucleotide; CTG chr11 5259021 5259042 5259038 5259043 +
actgcctctgctgatgctttct

SEQ ID NO: 90257 - DNA, 22 bp, Artificial Sequence
  Synthetic oligonucleotide; CTG chr11 5259025 5259046 5259042 5259047 +
cctctgctgatgctttctagaa

SEQ ID NO: 90258 - DNA, 22 bp, Artificial Sequence
  Synthetic oligonucleotide; CTC chr11 5259029 5259050 5259046 5259051 +
tgctgatgctttctagaaagtg

SEQ ID NO: 90259 - DNA, 22 bp, Artificial Sequence
  Synthetic oligonucleotide; CTG chr11 5259031 5259052 5259048 5259053 +
ctgatgctttctagaaagtgcc

SEQ ID NO: 90260 - DNA, 22 bp, Artificial Sequence
  Synthetic oligonucleotide; CTG chr11 5259034 5259055 5259051 5259056 +
atgctttctagaaagtgccacc

SEQ ID NO: 90261 - DNA, 22 bp, Artificial Sequence
  Synthetic oligonucleotide; CTT chr11 5259040 5259061 5259057 5259062 +
tctagaaagtgccacctcctgg

SEQ ID NO: 90262 - DNA, 22 bp, Artificial Sequence
  Synthetic oligonucleotide; TTT chr11 5259041 5259062 5259058 5259063 +
ctagaaagtgccacctcctggc

SEQ ID NO: 90263 - DNA, 22 bp, Artificial Sequence
  Synthetic oligonucleotide; TTC chr11 5259042 5259063 5259059 5259064 +
tagaaagtgccacctcctggca

SEQ ID NO: 90264 - DNA, 22 bp, Artificial Sequence
  Synthetic oligonucleotide; CTA chr11 5259044 5259065 5259061 5259066 +
gaaagtgccacctcctggcagg

SEQ ID NO: 90265 - DNA, 22 bp, Artificial Sequence
  Synthetic oligonucleotide; CTC chr11 5259058 5259079 5259075 5259080 +
ctggcaggaggccaaccagcac

SEQ ID NO: 90266 - DNA, 22 bp, Artificial Sequence
  Synthetic oligonucleotide; CTG chr11 5259061 5259082 5259078 5259083 +
gcaggaggccaaccagcacaaa

SEQ ID NO: 90267 - DNA, 22 bp, Artificial Sequence
  Synthetic oligonucleotide; TTG chr11 5259095 5259116 5259112 5259117 +
aacaaccaaaagtaaggaccct

SEQ ID NO: 90268 - DNA, 22 bp, Artificial Sequence
  Synthetic oligonucleotide; CTC chr11 5259118 5259139 5259135 5259140 +
acagagtccatttcatcctctg

SEQ ID NO: 90269 - DNA, 22 bp, Artificial Sequence
  Synthetic oligonucleotide; TTT chr11 5259131 5259152 5259148 5259153 +
catcctctgccacctccattgg

SEQ ID NO: 90270 - DNA, 22 bp, Artificial Sequence
  Synthetic oligonucleotide; TTC chr11 5259132 5259153 5259149 5259154 +
atcctctgccacctccattgga

SEQ ID NO: 90271 - DNA, 22 bp, Artificial Sequence
  Synthetic oligonucleotide; CTC chr11 5259138 5259159 5259155 5259160 +
tgccacctccattggagcaggt

SEQ ID NO: 90272 - DNA, 22 bp, Artificial Sequence
  Synthetic oligonucleotide; CTG chr11 5259140 5259161 5259157 5259162 +
ccacctccattggagcaggtgg

SEQ ID NO: 90273 - DNA, 22 bp, Artificial Sequence
  Synthetic oligonucleotide; CTC chr11 5259147 5259168 5259164 5259169 +
cattggagcaggtggttgtatc

SEQ ID NO: 90274 - DNA, 22 bp, Artificial Sequence
  Synthetic oligonucleotide; TTG chr11 5259152 5259173 5259169 5259174 +
gagcaggtggttgtatctatgg

SEQ ID NO: 90275 - DNA, 22 bp, Artificial Sequence
  Synthetic oligonucleotide; TTG chr11 5259165 5259186 5259182 5259187 +
tatctatggctgagagacccac

SEQ ID NO: 90276 - DNA, 22 bp, Artificial Sequence
  Synthetic oligonucleotide; CTA chr11 5259171 5259192 5259188 5259193 +
tggctgagagacccacagatgg

SEQ ID NO: 90277 - DNA, 22 bp, Artificial Sequence
  Synthetic oligonucleotide; CTG chr11 5259177 5259198 5259194 5259199 +
agagacccacagatggttcacg

SEQ ID NO: 90278 - DNA, 22 bp, Artificial Sequence
  Synthetic oligonucleotide; TTC chr11 5259196 5259217 5259213 5259218 +
acgtcacaagactctgtgcaga

SEQ ID NO: 90279 - DNA, 22 bp, Artificial Sequence
  Synthetic oligonucleotide; CTC chr11 5259210 5259231 5259227 5259232 +
tgtgcagacaaaccccagtacc

SEQ ID NO: 90280 - DNA, 22 bp, Artificial Sequence
  Synthetic oligonucleotide; CTG chr11 5259212 5259233 5259229 5259234 +
tgcagacaaaccccagtaccag

SEQ ID NO: 90281 - DNA, 22 bp, Artificial Sequence
  Synthetic oligonucleotide; CTG chr11 5259238 5259259 5259255 5259260 +
gagtctggtagacctgatgggt

SEQ ID NO: 90282 - DNA, 22 bp, Artificial Sequence
  Synthetic oligonucleotide; CTG chr11 5259245 5259266 5259262 5259267 +
gtagacctgatgggtggctaga

SEQ ID NO: 90283 - DNA, 22 bp, Artificial Sequence
  Synthetic oligonucleotide; CTG chr11 5259254 5259275 5259271 5259276 +
atgggtggctagatccagaaga

SEQ ID NO: 90284 - DNA, 22 bp, Artificial Sequence
  Synthetic oligonucleotide; CTA chr11 5259265 5259286 5259282 5259287 +
gatccagaagagagataacaat

SEQ ID NO: 90285 - DNA, 22 bp, Artificial Sequence
  Synthetic oligonucleotide; CTA chr11 5259292 5259313 5259309 5259314 +
cagttcggctctcaggaagccc

SEQ ID NO: 90286 - DNA, 22 bp, Artificial Sequence
  Synthetic oligonucleotide; TTC chr11 5259298 5259319 5259315 5259320 +
ggctctcaggaagccccacgcc

SEQ ID NO: 90287 - DNA, 22 bp, Artificial Sequence
  Synthetic oligonucleotide; CTC chr11 5259303 5259324 5259320 5259325 +
tcaggaagccccacgcctagga

SEQ ID NO: 90288 - DNA, 22 bp, Artificial Sequence
  Synthetic oligonucleotide; CTC chr11 5259305 5259326 5259322 5259327 +
aggaagccccacgcctaggaaa

SEQ ID NO: 90289 - DNA, 22 bp, Artificial Sequence
  Synthetic oligonucleotide; CTA chr11 5259322 5259343 5259339 5259344 +
ggaaaagggggactgtgctaca

SEQ ID NO: 90290 - DNA, 22 bp, Artificial Sequence
  Synthetic oligonucleotide; CTG chr11 5259337 5259358 5259354 5259359 +
tgctacatcaagggaacacctc

SEQ ID NO: 90291 - DNA, 22 bp, Artificial Sequence
  Synthetic oligonucleotide; CTA chr11 5259342 5259363 5259359 5259364 +
catcaagggaacacctcatggg

SEQ ID NO: 90292 - DNA, 22 bp, Artificial Sequence
  Synthetic oligonucleotide; CTC chr11 5259359 5259380 5259376 5259381 +
atgggacaaaagtctcagcctt

SEQ ID NO: 90293 - DNA, 22 bp, Artificial Sequence
  Synthetic oligonucleotide; CTC chr11 5259375 5259396 5259392 5259397 +
agccttgaggcctagactttcc

SEQ ID NO: 90294 - DNA, 22 bp, Artificial Sequence
  Synthetic oligonucleotide; CTT chr11 5259381 5259402 5259398 5259403 +
gaggcctagactttccctctga

SEQ ID NO: 90295 - DNA, 22 bp, Artificial Sequence
  Synthetic oligonucleotide; TTG chr11 5259382 5259403 5259399 5259404 +
aggcctagactttccctctgac

SEQ ID NO: 90296 - DNA, 22 bp, Artificial Sequence
  Synthetic oligonucleotide; CTA chr11 5259389 5259410 5259406 5259411 +
gactttccctctgacagagcct

SEQ ID NO: 90297 - DNA, 22 bp, Artificial Sequence
  Synthetic oligonucleotide; CTT chr11 5259394 5259415 5259411 5259416 +
tccctctgacagagcctaccca

SEQ ID NO: 90298 - DNA, 22 bp, Artificial Sequence
  Synthetic oligonucleotide; TTT chr11 5259395 5259416 5259412 5259417 +
ccctctgacagagcctacccaa

SEQ ID NO: 90299 - DNA, 22 bp, Artificial Sequence
  Synthetic oligonucleotide; TTC chr11 5259396 5259417 5259413 5259418 +
cctctgacagagcctacccaag

SEQ ID NO: 90300 - DNA, 22 bp, Artificial Sequence
  Synthetic oligonucleotide; CTC chr11 5259400 5259421 5259417 5259422 +
tgacagagcctacccaagtgag

SEQ ID NO: 90301 - DNA, 22 bp, Artificial Sequence
  Synthetic oligonucleotide; CTG chr11 5259402 5259423 5259419 5259424 +
acagagcctacccaagtgagaa

SEQ ID NO: 90302 - DNA, 22 bp, Artificial Sequence
  Synthetic oligonucleotide; CTA chr11 5259412 5259433 5259429 5259434 +
cccaagtgagaaggaaccagaa

SEQ ID NO: 90303 - DNA, 22 bp, Artificial Sequence
  Synthetic oligonucleotide; CTA chr11 5259439 5259460 5259456 5259461 +
actctggtaatatgaaaaacaa

SEQ ID NO: 90304 - DNA, 22 bp, Artificial Sequence
  Synthetic oligonucleotide; CTC chr11 5259443 5259464 5259460 5259465 +
tggtaatatgaaaaacaaggtt

SEQ ID NO: 90305 - DNA, 22 bp, Artificial Sequence
  Synthetic oligonucleotide; CTG chr11 5259445 5259466 5259462 5259467 +
gtaatatgaaaaacaaggttct

SEQ ID NO: 90306 - DNA, 22 bp, Artificial Sequence
  Synthetic oligonucleotide; TTC chr11 5259466 5259487 5259483 5259488 +
tttaacaccccccaaaaaatca

SEQ ID NO: 90307 - DNA, 22 bp, Artificial Sequence
  Synthetic oligonucleotide; CTT chr11 5259468 5259489 5259485 5259490 +
taacaccccccaaaaaatcata

SEQ ID NO: 90308 - DNA, 22 bp, Artificial Sequence
  Synthetic oligonucleotide; TTT chr11 5259469 5259490 5259486 5259491 +
aacaccccccaaaaaatcatac

SEQ ID NO: 90309 - DNA, 22 bp, Artificial Sequence
  Synthetic oligonucleotide; TTA chr11 5259470 5259491 5259487 5259492 +
acaccccccaaaaaatcatact

SEQ ID NO: 90310 - DNA, 22 bp, Artificial Sequence
  Synthetic oligonucleotide; CTA chr11 5259493 5259514 5259510 5259515 +
gctcaccagcaatgcatccaaa

SEQ ID NO: 90311 - DNA, 22 bp, Artificial Sequence
  Synthetic oligonucleotide; CTC chr11 5259497 5259518 5259514 5259519 +
accagcaatgcatccaaaccaa

SEQ ID NO: 90312 - DNA, 22 bp, Artificial Sequence
  Synthetic oligonucleotide; CTG chr11 5259532 5259553 5259549 5259554 +
atttacctgaaaaataattcag

SEQ ID NO: 90313 - DNA, 22 bp, Artificial Sequence
  Synthetic oligonucleotide; TTT chr11 5259536 5259557 5259553 5259558 +
acctgaaaaataattcagaagg

SEQ ID NO: 90314 - DNA, 22 bp, Artificial Sequence
  Synthetic oligonucleotide; TTA chr11 5259537 5259558 5259554 5259559 +
cctgaaaaataattcagaaggt

SEQ ID NO: 90315 - DNA, 22 bp, Artificial Sequence
  Synthetic oligonucleotide; CTG chr11 5259541 5259562 5259558 5259563 +
aaaaataattcagaaggtcagt

SEQ ID NO: 90316 - DNA, 22 bp, Artificial Sequence
  Synthetic oligonucleotide; TTC chr11 5259552 5259573 5259569 5259574 +
agaaggtcagttattaagctaa

SEQ ID NO: 90317 - DNA, 22 bp, Artificial Sequence
  Synthetic oligonucleotide; TTA chr11 5259565 5259586 5259582 5259587 +
ttaagctaatcaaggaggcatc

SEQ ID NO: 90318 - DNA, 22 bp, Artificial Sequence
  Synthetic oligonucleotide; TTA chr11 5259568 5259589 5259585 5259590 +
agctaatcaaggaggcatccga

SEQ ID NO: 90319 - DNA, 22 bp, Artificial Sequence
  Synthetic oligonucleotide; CTA chr11 5259573 5259594 5259590 5259595 +
atcaaggaggcatccgaggaag

SEQ ID NO: 90320 - DNA, 22 bp, Artificial Sequence
  Synthetic oligonucleotide; TTT chr11 5259609 5259630 5259626 5259631 +
taaaaaaaccaaaaatatgata

SEQ ID NO: 90321 - DNA, 22 bp, Artificial Sequence
  Synthetic oligonucleotide; TTT chr11 5259610 5259631 5259627 5259632 +
aaaaaaaccaaaaatatgatac

SEQ ID NO: 90322 - DNA, 22 bp, Artificial Sequence
  Synthetic oligonucleotide; TTA chr11 5259611 5259632 5259628 5259633 +
aaaaaaccaaaaatatgataca

SEQ ID NO: 90323 - DNA, 22 bp, Artificial Sequence
  Synthetic oligonucleotide; CTT chr11 5259654 5259675 5259671 5259676 +
cagttaaagagatagcataaat

SEQ ID NO: 90324 - DNA, 22 bp, Artificial Sequence
  Synthetic oligonucleotide; TTC chr11 5259655 5259676 5259672 5259677 +
agttaaagagatagcataaata

SEQ ID NO: 90325 - DNA, 22 bp, Artificial Sequence
  Synthetic oligonucleotide; TTA chr11 5259660 5259681 5259677 5259682 +
aagagatagcataaataaaaaa

SEQ ID NO: 90326 - DNA, 22 bp, Artificial Sequence
  Synthetic oligonucleotide; TTC chr11 5259687 5259708 5259704 5259709 +
aaaacttcaggaaacaatggat

SEQ ID NO: 90327 - DNA, 22 bp, Artificial Sequence
  Synthetic oligonucleotide; CTT chr11 5259694 5259715 5259711 5259716 +
caggaaacaatggatgaatgga

SEQ ID NO: 90328 - DNA, 22 bp, Artificial Sequence
  Synthetic oligonucleotide; TTC chr11 5259695 5259716 5259712 5259717 +
aggaaacaatggatgaatggat

SEQ ID NO: 90329 - DNA, 22 bp, Artificial Sequence
  Synthetic oligonucleotide; CTT chr11 5259723 5259744 5259740 5259745 +
atagaaatgcaaaatgctctag

SEQ ID NO: 90330 - DNA, 22 bp, Artificial Sequence
  Synthetic oligonucleotide; TTA chr11 5259724 5259745 5259741 5259746 +
tagaaatgcaaaatgctctaga

SEQ ID NO: 90331 - DNA, 22 bp, Artificial Sequence
  Synthetic oligonucleotide; CTC chr11 5259742 5259763 5259759 5259764 +
tagaaagtctcagcaatagaat

SEQ ID NO: 90332 - DNA, 22 bp, Artificial Sequence
  Synthetic oligonucleotide; CTA chr11 5259744 5259765 5259761 5259766 +
gaaagtctcagcaatagaatcc

SEQ ID NO: 90333 - DNA, 22 bp, Artificial Sequence
  Synthetic oligonucleotide; CTC chr11 5259753 5259774 5259770 5259775 +
agcaatagaatccaagcagaag

SEQ ID NO: 90334 - DNA, 22 bp, Artificial Sequence
  Synthetic oligonucleotide; TTC chr11 5259781 5259802 5259798 5259803 +
agagcttgaagacaaagttttt

SEQ ID NO: 90335 - DNA, 22 bp, Artificial Sequence
  Synthetic oligonucleotide; CTT chr11 5259788 5259809 5259805 5259810 +
gaagacaaagtttttgaattaa

SEQ ID NO: 90336 - DNA, 22 bp, Artificial Sequence
  Synthetic oligonucleotide; TTG chr11 5259789 5259810 5259806 5259811 +
aagacaaagtttttgaattaac

SEQ ID NO: 90337 - DNA, 22 bp, Artificial Sequence
  Synthetic oligonucleotide; TTT chr11 5259801 5259822 5259818 5259823 +
ttgaattaacccaatccaacaa

SEQ ID NO: 90338 - DNA, 22 bp, Artificial Sequence
  Synthetic oligonucleotide; TTT chr11 5259802 5259823 5259819 5259824 +
tgaattaacccaatccaacaaa

SEQ ID NO: 90339 - DNA, 22 bp, Artificial Sequence
  Synthetic oligonucleotide; TTT chr11 5259803 5259824 5259820 5259825 +
gaattaacccaatccaacaaag

SEQ ID NO: 90340 - DNA, 22 bp, Artificial Sequence
  Synthetic oligonucleotide; TTG chr11 5259804 5259825 5259821 5259826 +
aattaacccaatccaacaaaga

SEQ ID NO: 90341 - DNA, 22 bp, Artificial Sequence
  Synthetic oligonucleotide; TTA chr11 5259809 5259830 5259826 5259831 +
acccaatccaacaaagacaaag

SEQ ID NO: 90342 - DNA, 22 bp, Artificial Sequence
  Synthetic oligonucleotide; CTC chr11 5259863 5259884 5259880 5259885 +
caagaaatctgggattatgtta

SEQ ID NO: 90343 - DNA, 22 bp, Artificial Sequence
  Synthetic oligonucleotide; CTG chr11 5259874 5259895 5259891 5259896 +
ggattatgttaaacaatcaaac

SEQ ID NO: 90344 - DNA, 22 bp, Artificial Sequence
  Synthetic oligonucleotide; TTA chr11 5259880 5259901 5259897 5259902 +
tgttaaacaatcaaacctaaga

SEQ ID NO: 90345 - DNA, 22 bp, Artificial Sequence
  Synthetic oligonucleotide; TTA chr11 5259885 5259906 5259902 5259907 +
aacaatcaaacctaagaataat

SEQ ID NO: 90346 - DNA, 22 bp, Artificial Sequence
  Synthetic oligonucleotide; CTA chr11 5259899 5259920 5259916 5259921 +
agaataatcagcattcctgaga

SEQ ID NO: 90347 - DNA, 22 bp, Artificial Sequence
  Synthetic oligonucleotide; TTC chr11 5259915 5259936 5259932 5259937 +
ctgagaaagaagagaaatctaa

SEQ ID NO: 90348 - DNA, 22 bp, Artificial Sequence
  Synthetic oligonucleotide; CTG chr11 5259918 5259939 5259935 5259940 +
agaaagaagagaaatctaaaag

SEQ ID NO: 90349 - DNA, 22 bp, Artificial Sequence
  Synthetic oligonucleotide; CTA chr11 5259936 5259957 5259953 5259958 +
aaagtttggaaaacttatccag

SEQ ID NO: 90350 - DNA, 22 bp, Artificial Sequence
  Synthetic oligonucleotide; TTT chr11 5259943 5259964 5259960 5259965 +
ggaaaacttatccagggaaata

SEQ ID NO: 90351 - DNA, 22 bp, Artificial Sequence
  Synthetic oligonucleotide; TTG chr11 5259944 5259965 5259961 5259966 +
gaaaacttatccagggaaataa

SEQ ID NO: 90352 - DNA, 22 bp, Artificial Sequence
  Synthetic oligonucleotide; CTT chr11 5259952 5259973 5259969 5259974 +
atccagggaaataatcaaggaa

SEQ ID NO: 90353 - DNA, 22 bp, Artificial Sequence
  Synthetic oligonucleotide; TTA chr11 5259953 5259974 5259970 5259975 +
tccagggaaataatcaaggaaa

SEQ ID NO: 90354 - DNA, 22 bp, Artificial Sequence
  Synthetic oligonucleotide; CTT chr11 5259979 5260000 5259996 5260001 +
cccccaccttgctagagaccta

SEQ ID NO: 90355 - DNA, 22 bp, Artificial Sequence
  Synthetic oligonucleotide; TTC chr11 5259980 5260001 5259997 5260002 +
ccccaccttgctagagacctag

SEQ ID NO: 90356 - DNA, 22 bp, Artificial Sequence
  Synthetic oligonucleotide; CTT chr11 5259989 5260010 5260006 5260011 +
gctagagacctagatatccaaa

SEQ ID NO: 90357 - DNA, 22 bp, Artificial Sequence
  Synthetic oligonucleotide; TTG chr11 5259990 5260011 5260007 5260012 +
ctagagacctagatatccaaat

SEQ ID NO: 90358 - DNA, 22 bp, Artificial Sequence
  Synthetic oligonucleotide; CTA chr11 5259993 5260014 5260010 5260015 +
gagacctagatatccaaataca

SEQ ID NO: 90359 - DNA, 22 bp, Artificial Sequence
  Synthetic oligonucleotide; CTA chr11 5260001 5260022 5260018 5260023 +
gatatccaaatacaagaagctc

SEQ ID NO: 90360 - DNA, 22 bp, Artificial Sequence
  Synthetic oligonucleotide; CTC chr11 5260023 5260044 5260040 5260045 +
aataaacacctgggaaattcat

SEQ ID NO: 90361 - DNA, 22 bp, Artificial Sequence
  Synthetic oligonucleotide; CTG chr11 5260035 5260056 5260052 5260057 +
ggaaattcattgcaaaaatatc

SEQ ID NO: 90362 - DNA, 22 bp, Artificial Sequence
  Synthetic oligonucleotide; TTC chr11 5260043 5260064 5260060 5260065 +
attgcaaaaatatcattgccta

SEQ ID NO: 90363 - DNA, 22 bp, Artificial Sequence
  Synthetic oligonucleotide; TTG chr11 5260047 5260068 5260064 5260069 +
caaaaatatcattgcctaggta

SEQ ID NO: 90364 - DNA, 22 bp, Artificial Sequence
  Synthetic oligonucleotide; TTG chr11 5260061 5260082 5260078 5260083 +
cctaggtacattgtcatcagag

SEQ ID NO: 90365 - DNA, 22 bp, Artificial Sequence
  Synthetic oligonucleotide; CTA chr11 5260065 5260086 5260082 5260087 +
ggtacattgtcatcagagtatc

SEQ ID NO: 90366 - DNA, 22 bp, Artificial Sequence
  Synthetic oligonucleotide; TTG chr11 5260074 5260095 5260091 5260096 +
tcatcagagtatccaaagttat

SEQ ID NO: 90367 - DNA, 22 bp, Artificial Sequence
  Synthetic oligonucleotide; TTA chr11 5260095 5260116 5260112 5260117 +
tctaaagacaaagagaatctta

SEQ ID NO: 90368 - DNA, 22 bp, Artificial Sequence
  Synthetic oligonucleotide; CTA chr11 5260099 5260120 5260116 5260121 +
aagacaaagagaatcttaagag

SEQ ID NO: 90369 - DNA, 22 bp, Artificial Sequence
  Synthetic oligonucleotide; CTT chr11 5260116 5260137 5260133 5260138 +
aagagctgtgaggtgaaactac

SEQ ID NO: 90370 - DNA, 22 bp, Artificial Sequence
  Synthetic oligonucleotide; TTA chr11 5260117 5260138 5260134 5260139 +
agagctgtgaggtgaaactacc

SEQ ID NO: 90371 - DNA, 22 bp, Artificial Sequence
  Synthetic oligonucleotide; CTG chr11 5260124 5260145 5260141 5260146 +
tgaggtgaaactaccaggtaac

SEQ ID NO: 90372 - DNA, 22 bp, Artificial Sequence
  Synthetic oligonucleotide; CTA chr11 5260137 5260158 5260154 5260159 +
ccaggtaacctatgaaagaaaa

SEQ ID NO: 90373 - DNA, 22 bp, Artificial Sequence
  Synthetic oligonucleotide; CTA chr11 5260149 5260170 5260166 5260171 +
tgaaagaaaacctatcagatta

SEQ ID NO: 90374 - DNA, 22 bp, Artificial Sequence
  Synthetic oligonucleotide; CTA chr11 5260163 5260184 5260180 5260185 +
tcagattaacagcagatttctc

SEQ ID NO: 90375 - DNA, 22 bp, Artificial Sequence
  Synthetic oligonucleotide; TTA chr11 5260171 5260192 5260188 5260193 +
acagcagatttctcagcagaaa

SEQ ID NO: 90376 - DNA, 22 bp, Artificial Sequence
  Synthetic oligonucleotide; TTT chr11 5260182 5260203 5260199 5260204 +
ctcagcagaaaccgtaaaagct

SEQ ID NO: 90377 - DNA, 22 bp, Artificial Sequence
  Synthetic oligonucleotide; TTC chr11 5260183 5260204 5260200 5260205 +
tcagcagaaaccgtaaaagcta

SEQ ID NO: 90378 - DNA, 22 bp, Artificial Sequence
  Synthetic oligonucleotide; CTC chr11 5260185 5260206 5260202 5260207 +
agcagaaaccgtaaaagctaga

SEQ ID NO: 90379 - DNA, 22 bp, Artificial Sequence
  Synthetic oligonucleotide; CTA chr11 5260205 5260226 5260222 5260227 +
gaagtgaatatggccctatctt

SEQ ID NO: 90380 - DNA, 22 bp, Artificial Sequence
  Synthetic oligonucleotide; CTA chr11 5260223 5260244 5260240 5260245 +
tcttcagccttcttaaacaaaa

SEQ ID NO: 90381 - DNA, 22 bp, Artificial Sequence
  Synthetic oligonucleotide; CTT chr11 5260227 5260248 5260244 5260249 +
cagccttcttaaacaaaacaat

SEQ ID NO: 90382 - DNA, 22 bp, Artificial Sequence
  Synthetic oligonucleotide; TTC chr11 5260228 5260249 5260245 5260250 +
agccttcttaaacaaaacaatt

SEQ ID NO: 90383 - DNA, 22 bp, Artificial Sequence
  Synthetic oligonucleotide; CTT chr11 5260234 5260255 5260251 5260256 +
cttaaacaaaacaattatcagc

SEQ ID NO: 90384 - DNA, 22 bp, Artificial Sequence
  Synthetic oligonucleotide; TTC chr11 5260235 5260256 5260252 5260257 +
ttaaacaaaacaattatcagcc

SEQ ID NO: 90385 - DNA, 22 bp, Artificial Sequence
  Synthetic oligonucleotide; CTT chr11 5260237 5260258 5260254 5260259 +
aaacaaaacaattatcagccaa

SEQ ID NO: 90386 - DNA, 22 bp, Artificial Sequence
  Synthetic oligonucleotide; TTA chr11 5260238 5260259 5260255 5260260 +
aacaaaacaattatcagccaag

SEQ ID NO: 90387 - DNA, 22 bp, Artificial Sequence
  Synthetic oligonucleotide; TTA chr11 5260251 5260272 5260268 5260273 +
tcagccaagaattttatatcca

SEQ ID NO: 90388 - DNA, 22 bp, Artificial Sequence
  Synthetic oligonucleotide; TTT chr11 5260265 5260286 5260282 5260287 +
tatatccagtgaaactaagctt

SEQ ID NO: 90389 - DNA, 22 bp, Artificial Sequence
  Synthetic oligonucleotide; TTT chr11 5260266 5260287 5260283 5260288 +
atatccagtgaaactaagcttc

SEQ ID NO: 90390 - DNA, 22 bp, Artificial Sequence
  Synthetic oligonucleotide; TTA chr11 5260267 5260288 5260284 5260289 +
tatccagtgaaactaagcttca

SEQ ID NO: 90391 - DNA, 22 bp, Artificial Sequence
  Synthetic oligonucleotide; CTA chr11 5260282 5260303 5260299 5260304 +
agcttcacaaatgaagaaaata

SEQ ID NO: 90392 - DNA, 22 bp, Artificial Sequence
  Synthetic oligonucleotide; CTT chr11 5260287 5260308 5260304 5260309 +
cacaaatgaagaaaatacacag

SEQ ID NO: 90393 - DNA, 22 bp, Artificial Sequence
  Synthetic oligonucleotide; TTC chr11 5260288 5260309 5260305 5260310 +
acaaatgaagaaaatacacagt

SEQ ID NO: 90394 - DNA, 22 bp, Artificial Sequence
  Synthetic oligonucleotide; TTT chr11 5260314 5260335 5260331 5260336 +
ttcagaaaaacaaatgctgaga

SEQ ID NO: 90395 - DNA, 22 bp, Artificial Sequence
  Synthetic oligonucleotide; TTT chr11 5260315 5260336 5260332 5260337 +
tcagaaaaacaaatgctgagag

SEQ ID NO: 90396 - DNA, 22 bp, Artificial Sequence
  Synthetic oligonucleotide; TTT chr11 5260316 5260337 5260333 5260338 +
cagaaaaacaaatgctgagaga

SEQ ID NO: 90397 - DNA, 22 bp, Artificial Sequence
  Synthetic oligonucleotide; TTC chr11 5260317 5260338 5260334 5260339 +
agaaaaacaaatgctgagagaa

SEQ ID NO: 90398 - DNA, 22 bp, Artificial Sequence
  Synthetic oligonucleotide; CTG chr11 5260333 5260354 5260350 5260355 +
agagaattcggcactaccaagc

SEQ ID NO: 90399 - DNA, 22 bp, Artificial Sequence
  Synthetic oligonucleotide; TTC chr11 5260342 5260363 5260359 5260364 +
ggcactaccaagccaacactac

SEQ ID NO: 90400 - DNA, 22 bp, Artificial Sequence
  Synthetic oligonucleotide; CTA chr11 5260349 5260370 5260366 5260371 +
ccaagccaacactacaagaact

SEQ ID NO: 90401 - DNA, 22 bp, Artificial Sequence
  Synthetic oligonucleotide; CTA chr11 5260363 5260384 5260380 5260385 +
caagaactgataaaaggagctc

SEQ ID NO: 90402 - DNA, 22 bp, Artificial Sequence
  Synthetic oligonucleotide; CTG chr11 5260372 5260393 5260389 5260394 +
ataaaaggagctctaaatcttg

SEQ ID NO: 90403 - DNA, 22 bp, Artificial Sequence
  Synthetic oligonucleotide; CTC chr11 5260385 5260406 5260402 5260407 +
taaatcttgaaataaaccctgg

SEQ ID NO: 90404 - DNA, 22 bp, Artificial Sequence
  Synthetic oligonucleotide; CTA chr11 5260387 5260408 5260404 5260409 +
aatcttgaaataaaccctggaa

SEQ ID NO: 90405 - DNA, 22 bp, Artificial Sequence
  Synthetic oligonucleotide; CTT chr11 5260393 5260414 5260410 5260415 +
gaaataaaccctggaagcacat

SEQ ID NO: 90406 - DNA, 22 bp, Artificial Sequence
  Synthetic oligonucleotide; TTG chr11 5260394 5260415 5260411 5260416 +
aaataaaccctggaagcacatc

SEQ ID NO: 90407 - DNA, 22 bp, Artificial Sequence
  Synthetic oligonucleotide; CTG chr11 5260406 5260427 5260423 5260428 +
gaagcacatcaaaacagaacct

SEQ ID NO: 90408 - DNA, 22 bp, Artificial Sequence
  Synthetic oligonucleotide; CTC chr11 5260429 5260450 5260446 5260451 +
tttaaagcataaatcccatagg

SEQ ID NO: 90409 - DNA, 22 bp, Artificial Sequence
  Synthetic oligonucleotide; CTT chr11 5260431 5260452 5260448 5260453 +
taaagcataaatcccataggac

SEQ ID NO: 90410 - DNA, 22 bp, Artificial Sequence
  Synthetic oligonucleotide; TTT chr11 5260432 5260453 5260449 5260454 +
aaagcataaatcccataggaca

SEQ ID NO: 90411 - DNA, 22 bp, Artificial Sequence
  Synthetic oligonucleotide; TTA chr11 5260433 5260454 5260450 5260455 +
aagcataaatcccataggacat

SEQ ID NO: 90412 - DNA, 22 bp, Artificial Sequence
  Synthetic oligonucleotide; CTC chr11 5260522 5260543 5260539 5260544 +
acacctcaatactgatgttgaa

SEQ ID NO: 90413 - DNA, 22 bp, Artificial Sequence
  Synthetic oligonucleotide; CTC chr11 5260529 5260550 5260546 5260551 +
aatactgatgttgaatgtaaat

SEQ ID NO: 90414 - DNA, 22 bp, Artificial Sequence
  Synthetic oligonucleotide; CTG chr11 5260536 5260557 5260553 5260558 +
atgttgaatgtaaatggactaa

SEQ ID NO: 90415 - DNA, 22 bp, Artificial Sequence
  Synthetic oligonucleotide; TTG chr11 5260542 5260563 5260559 5260564 +
aatgtaaatggactaaatgctc

SEQ ID NO: 90416 - DNA, 22 bp, Artificial Sequence
  Synthetic oligonucleotide; CTA chr11 5260557 5260578 5260574 5260579 +
aatgctccacttaaaagataca

SEQ ID NO: 90417 - DNA, 22 bp, Artificial Sequence
  Synthetic oligonucleotide; CTC chr11 5260564 5260585 5260581 5260586 +
cacttaaaagatacagaattgc

SEQ ID NO: 90418 - DNA, 22 bp, Artificial Sequence
  Synthetic oligonucleotide; CTT chr11 5260569 5260590 5260586 5260591 +
aaaagatacagaattgcagaat

SEQ ID NO: 90419 - DNA, 22 bp, Artificial Sequence
  Synthetic oligonucleotide; TTA chr11 5260570 5260591 5260587 5260592 +
aaagatacagaattgcagaatg

SEQ ID NO: 90420 - DNA, 22 bp, Artificial Sequence
  Synthetic oligonucleotide; TTG chr11 5260585 5260606 5260602 5260607 +
cagaatgaataagaattcacca

SEQ ID NO: 90421 - DNA, 22 bp, Artificial Sequence
  Synthetic oligonucleotide; TTC chr11 5260603 5260624 5260620 5260625 +
accaaccagttatctgccgcct

SEQ ID NO: 90422 - DNA, 22 bp, Artificial Sequence
  Synthetic oligonucleotide; TTA chr11 5260615 5260636 5260632 5260637 +
tctgccgccttcaggagactca

SEQ ID NO: 90423 - DNA, 22 bp, Artificial Sequence
  Synthetic oligonucleotide; CTG chr11 5260619 5260640 5260636 5260641 +
ccgccttcaggagactcaccta

SEQ ID NO: 90424 - DNA, 22 bp, Artificial Sequence
  Synthetic oligonucleotide; CTT chr11 5260626 5260647 5260643 5260648 +
caggagactcacctaacacata

SEQ ID NO: 90425 - DNA, 22 bp, Artificial Sequence
  Synthetic oligonucleotide; TTC chr11 5260627 5260648 5260644 5260649 +
aggagactcacctaacacataa

SEQ ID NO: 90426 - DNA, 22 bp, Artificial Sequence
  Synthetic oligonucleotide; CTC chr11 5260636 5260657 5260653 5260658 +
acctaacacataaggactcaca

SEQ ID NO: 90427 - DNA, 22 bp, Artificial Sequence
  Synthetic oligonucleotide; CTA chr11 5260641 5260662 5260658 5260663 +
acacataaggactcacataaac

SEQ ID NO: 90428 - DNA, 22 bp, Artificial Sequence
  Synthetic oligonucleotide; CTC chr11 5260655 5260676 5260672 5260677 +
acataaacttaaggtaaagggg

SEQ ID NO: 90429 - DNA, 22 bp, Artificial Sequence
  Synthetic oligonucleotide; CTT chr11 5260665 5260686 5260682 5260687 +
aaggtaaaggggtggaaaatga

SEQ ID NO: 90430 - DNA, 22 bp, Artificial Sequence
  Synthetic oligonucleotide; TTA chr11 5260666 5260687 5260683 5260688 +
aggtaaaggggtggaaaatgac

SEQ ID NO: 90431 - DNA, 22 bp, Artificial Sequence
  Synthetic oligonucleotide; TTC chr11 5260692 5260713 5260709 5260714 +
cacacaaatggacaccaaaagc

SEQ ID NO: 90432 - DNA, 22 bp, Artificial Sequence
  Synthetic oligonucleotide; CTA chr11 5260729 5260750 5260746 5260751 +
ttcttatgtcagacaaaacaaa

SEQ ID NO: 90433 - DNA, 22 bp, Artificial Sequence
  Synthetic oligonucleotide; TTC chr11 5260732 5260753 5260749 5260754 +
ttatgtcagacaaaacaaactt

SEQ ID NO: 90434 - DNA, 22 bp, Artificial Sequence
  Synthetic oligonucleotide; CTT chr11 5260734 5260755 5260751 5260756 +
atgtcagacaaaacaaacttta

SEQ ID NO: 90435 - DNA, 22 bp, Artificial Sequence
  Synthetic oligonucleotide; TTA chr11 5260735 5260756 5260752 5260757 +
tgtcagacaaaacaaactttaa

SEQ ID NO: 90436 - DNA, 22 bp, Artificial Sequence
  Synthetic oligonucleotide; CTT chr11 5260754 5260775 5260771 5260776 +
taaagaaacagcagttaaaaaa

SEQ ID NO: 90437 - DNA, 22 bp, Artificial Sequence
  Synthetic oligonucleotide; TTT chr11 5260755 5260776 5260772 5260777 +
aaagaaacagcagttaaaaaag

SEQ ID NO: 90438 - DNA, 22 bp, Artificial Sequence
  Synthetic oligonucleotide; TTA chr11 5260756 5260777 5260773 5260778 +
aagaaacagcagttaaaaaaga

SEQ ID NO: 90439 - DNA, 22 bp, Artificial Sequence
  Synthetic oligonucleotide; TTA chr11 5260771 5260792 5260788 5260793 +
aaaaagacaaagagggacatca

SEQ ID NO: 90440 - DNA, 22 bp, Artificial Sequence
  Synthetic oligonucleotide; CTT chr11 5260812 5260833 5260829 5260834 +
gtccaatgggagaatattacaa

SEQ ID NO: 90441 - DNA, 22 bp, Artificial Sequence
  Synthetic oligonucleotide; TTG chr11 5260813 5260834 5260830 5260835 +
tccaatgggagaatattacaat

SEQ ID NO: 90442 - DNA, 22 bp, Artificial Sequence
  Synthetic oligonucleotide; TTA chr11 5260831 5260852 5260848 5260853 +
caattcttaatatatatgcatc

SEQ ID NO: 90443 - DNA, 22 bp, Artificial Sequence
  Synthetic oligonucleotide; TTC chr11 5260837 5260858 5260854 5260859 +
ttaatatatatgcatctaatac

SEQ ID NO: 90444 - DNA, 22 bp, Artificial Sequence
  Synthetic oligonucleotide; CTT chr11 5260839 5260860 5260856 5260861 +
aatatatatgcatctaatactg

SEQ ID NO: 90445 - DNA, 22 bp, Artificial Sequence
  Synthetic oligonucleotide; TTA chr11 5260840 5260861 5260857 5260862 +
atatatatgcatctaatactgg

SEQ ID NO: 90446 - DNA, 22 bp, Artificial Sequence
  Synthetic oligonucleotide; CTA chr11 5260855 5260876 5260872 5260877 +
atactggagatcccaaatttat

SEQ ID NO: 90447 - DNA, 22 bp, Artificial Sequence
  Synthetic oligonucleotide; CTG chr11 5260861 5260882 5260878 5260883 +
gagatcccaaatttataaaaca

SEQ ID NO: 90448 - DNA, 22 bp, Artificial Sequence
  Synthetic oligonucleotide; TTT chr11 5260875 5260896 5260892 5260897 +
ataaaacaattactactagact

SEQ ID NO: 90449 - DNA, 22 bp, Artificial Sequence
  Synthetic oligonucleotide; TTA chr11 5260876 5260897 5260893 5260898 +
taaaacaattactactagacta

SEQ ID NO: 90450 - DNA, 22 bp, Artificial Sequence
  Synthetic oligonucleotide; TTA chr11 5260887 5260908 5260904 5260909 +
ctactagactagacagcaacat

SEQ ID NO: 90451 - DNA, 22 bp, Artificial Sequence
  Synthetic oligonucleotide; CTA chr11 5260890 5260911 5260907 5260912 +
ctagactagacagcaacataat

SEQ ID NO: 90452 - DNA, 22 bp, Artificial Sequence
  Synthetic oligonucleotide; CTA chr11 5260893 5260914 5260910 5260915 +
gactagacagcaacataataat

SEQ ID NO: 90453 - DNA, 22 bp, Artificial Sequence
  Synthetic oligonucleotide; CTA chr11 5260898 5260919 5260915 5260920 +
gacagcaacataataatagtgg

SEQ ID NO: 90454 - DNA, 22 bp, Artificial Sequence
  Synthetic oligonucleotide; CTT chr11 5260927 5260948 5260944 5260949 +
caatactccactgactgcacta

SEQ ID NO: 90455 - DNA, 22 bp, Artificial Sequence
  Synthetic oligonucleotide; TTC chr11 5260928 5260949 5260945 5260950 +
aatactccactgactgcactag

SEQ ID NO: 90456 - DNA, 22 bp, Artificial Sequence
  Synthetic oligonucleotide; CTC chr11 5260935 5260956 5260952 5260957 +
cactgactgcactaggcaggtc

SEQ ID NO: 90457 - DNA, 22 bp, Artificial Sequence
  Synthetic oligonucleotide; CTG chr11 5260940 5260961 5260957 5260962 +
actgcactaggcaggtcatcaa

SEQ ID NO: 90458 - DNA, 22 bp, Artificial Sequence
  Synthetic oligonucleotide; CTG chr11 5260944 5260965 5260961 5260966 +
cactaggcaggtcatcaagaca

SEQ ID NO: 90459 - DNA, 22 bp, Artificial Sequence
  Synthetic oligonucleotide; CTA chr11 5260949 5260970 5260966 5260971 +
ggcaggtcatcaagacagtcta

SEQ ID NO: 90460 - DNA, 22 bp, Artificial Sequence
  Synthetic oligonucleotide; CTA chr11 5260971 5260992 5260988 5260993 +
caaagaaacaatggatttaaag

SEQ ID NO: 90461 - DNA, 22 bp, Artificial Sequence
  Synthetic oligonucleotide; TTT chr11 5260989 5261010 5261006 5261011 +
aaagaacaaatggacttaacag

SEQ ID NO: 90462 - DNA, 22 bp, Artificial Sequence
  Synthetic oligonucleotide; TTA chr11 5260990 5261011 5261007 5261012 +
aagaacaaatggacttaacaga

SEQ ID NO: 90463 - DNA, 22 bp, Artificial Sequence
  Synthetic oligonucleotide; CTT chr11 5261006 5261027 5261023 5261028 +
aacagatatttacaggacattc

SEQ ID NO: 90464 - DNA, 22 bp, Artificial Sequence
  Synthetic oligonucleotide; TTA chr11 5261007 5261028 5261024 5261029 +
acagatatttacaggacattct

SEQ ID NO: 90465 - DNA, 22 bp, Artificial Sequence
  Synthetic oligonucleotide; TTT chr11 5261017 5261038 5261034 5261039 +
acaggacattctacccaacaac

SEQ ID NO: 90466 - DNA, 22 bp, Artificial Sequence
  Synthetic oligonucleotide; TTA chr11 5261018 5261039 5261035 5261040 +
caggacattctacccaacaact

SEQ ID NO: 90467 - DNA, 22 bp, Artificial Sequence
  Synthetic oligonucleotide; TTC chr11 5261028 5261049 5261045 5261050 +
tacccaacaactgcagaataca

SEQ ID NO: 90468 - DNA, 22 bp, Artificial Sequence
  Synthetic oligonucleotide; CTA chr11 5261030 5261051 5261047 5261052 +
cccaacaactgcagaatacaca

SEQ ID NO: 90469 - DNA, 22 bp, Artificial Sequence
  Synthetic oligonucleotide; CTG chr11 5261041 5261062 5261058 5261063 +
cagaatacacattctattcatc

SEQ ID NO: 90470 - DNA, 22 bp, Artificial Sequence
  Synthetic oligonucleotide; TTC chr11 5261055 5261076 5261072 5261077 +
tattcatcagcacatggaactt

SEQ ID NO: 90471 - DNA, 22 bp, Artificial Sequence
  Synthetic oligonucleotide; CTA chr11 5261057 5261078 5261074 5261079 +
ttcatcagcacatggaactttc

SEQ ID NO: 90472 - DNA, 22 bp, Artificial Sequence
  Synthetic oligonucleotide; TTC chr11 5261060 5261081 5261077 5261082 +
atcagcacatggaactttctcc

SEQ ID NO: 90473 - DNA, 22 bp, Artificial Sequence
  Synthetic oligonucleotide; CTT chr11 5261077 5261098 5261094 5261099 +
tctccaagataggccatatgat

SEQ ID NO: 90474 - DNA, 22 bp, Artificial Sequence
  Synthetic oligonucleotide; TTT chr11 5261078 5261099 5261095 5261100 +
ctccaagataggccatatgata

SEQ ID NO: 90475 - DNA, 22 bp, Artificial Sequence
  Synthetic oligonucleotide; TTC chr11 5261079 5261100 5261096 5261101 +
tccaagataggccatatgatat

SEQ ID NO: 90476 - DNA, 22 bp, Artificial Sequence
  Synthetic oligonucleotide; CTC chr11 5261081 5261102 5261098 5261103 +
caagataggccatatgatatgc

SEQ ID NO: 90477 - DNA, 22 bp, Artificial Sequence
  Synthetic oligonucleotide; CTC chr11 5261118 5261139 5261135 5261140 +
aataaatttttaaaaattgaaa

SEQ ID NO: 90478 - DNA, 22 bp, Artificial Sequence
  Synthetic oligonucleotide; TTT chr11 5261127 5261148 5261144 5261149 +
ttaaaaattgaaattatatcaa

SEQ ID NO: 90479 - DNA, 22 bp, Artificial Sequence
  Synthetic oligonucleotide; TTT chr11 5261128 5261149 5261145 5261150 +
taaaaattgaaattatatcaag

SEQ ID NO: 90480 - DNA, 22 bp, Artificial Sequence
  Synthetic oligonucleotide; TTT chr11 5261129 5261150 5261146 5261151 +
aaaaattgaaattatatcaagc

SEQ ID NO: 90481 - DNA, 22 bp, Artificial Sequence
  Synthetic oligonucleotide; TTA chr11 5261130 5261151 5261147 5261152 +
aaaattgaaattatatcaagca

SEQ ID NO: 90482 - DNA, 22 bp, Artificial Sequence
  Synthetic oligonucleotide; TTG chr11 5261137 5261158 5261154 5261159 +
aaattatatcaagcactctctc

SEQ ID NO: 90483 - DNA, 22 bp, Artificial Sequence
  Synthetic oligonucleotide; TTA chr11 5261143 5261164 5261160 5261165 +
tatcaagcactctctcagacca

SEQ ID NO: 90484 - DNA, 22 bp, Artificial Sequence
  Synthetic oligonucleotide; CTC chr11 5261155 5261176 5261172 5261177 +
tctcagaccacagtagaataaa

SEQ ID NO: 90485 - DNA, 22 bp, Artificial Sequence
  Synthetic oligonucleotide; CTC chr11 5261157 5261178 5261174 5261179 +
tcagaccacagtagaataaaat

SEQ ID NO: 90486 - DNA, 22 bp, Artificial Sequence
  Synthetic oligonucleotide; CTC chr11 5261159 5261180 5261176 5261181 +
agaccacagtagaataaaattg

SEQ ID NO: 90487 - DNA, 22 bp, Artificial Sequence
  Synthetic oligonucleotide; TTG chr11 5261181 5261202 5261198 5261203 +
gaaatcaactacaaaaggaacc

SEQ ID NO: 90488 - DNA, 22 bp, Artificial Sequence
  Synthetic oligonucleotide; CTA chr11 5261192 5261213 5261209 5261214 +
caaaaggaaccttcaaaaccat

SEQ ID NO: 90489 - DNA, 22 bp, Artificial Sequence
  Synthetic oligonucleotide; CTT chr11 5261205 5261226 5261222 5261227 +
caaaaccatgcaaatacaggga

SEQ ID NO: 90490 - DNA, 22 bp, Artificial Sequence
  Synthetic oligonucleotide; TTC chr11 5261206 5261227 5261223 5261228 +
aaaaccatgcaaatacagggaa

SEQ ID NO: 90491 - DNA, 22 bp, Artificial Sequence
  Synthetic oligonucleotide; TTA chr11 5261232 5261253 5261249 5261254 +
aataacctgctcctgaatgatc

SEQ ID NO: 90492 - DNA, 22 bp, Artificial Sequence
  Synthetic oligonucleotide; CTG chr11 5261241 5261262 5261258 5261263 +
ctcctgaatgatcattgggtca

SEQ ID NO: 90493 - DNA, 22 bp, Artificial Sequence
  Synthetic oligonucleotide; CTC chr11 5261244 5261265 5261261 5261266 +
ctgaatgatcattgggtcaaca

SEQ ID NO: 90494 - DNA, 22 bp, Artificial Sequence
  Synthetic oligonucleotide; CTG chr11 5261247 5261268 5261264 5261269 +
aatgatcattgggtcaacaatg

SEQ ID NO: 90495 - DNA, 22 bp, Artificial Sequence
  Synthetic oligonucleotide; TTG chr11 5261258 5261279 5261275 5261280 +
ggtcaacaatgaaatcaagatg

SEQ ID NO: 90496 - DNA, 22 bp, Artificial Sequence
  Synthetic oligonucleotide; TTT chr11 5261287 5261308 5261304 5261309 +
aaaaatcatttgctttgaaaac

SEQ ID NO: 90497 - DNA, 22 bp, Artificial Sequence
  Synthetic oligonucleotide; TTA chr11 5261288 5261309 5261305 5261310 +
aaaatcatttgctttgaaaacc

SEQ ID NO: 90498 - DNA, 22 bp, Artificial Sequence
  Synthetic oligonucleotide; TTT chr11 5261298 5261319 5261315 5261320 +
gctttgaaaaccggcacaagac

SEQ ID NO: 90499 - DNA, 22 bp, Artificial Sequence
  Synthetic oligonucleotide; TTG chr11 5261299 5261320 5261316 5261321 +
ctttgaaaaccggcacaagaca

SEQ ID NO: 90500 - DNA, 22 bp, Artificial Sequence
  Synthetic oligonucleotide; CTT chr11 5261302 5261323 5261319 5261324 +
tgaaaaccggcacaagacaagg

SEQ ID NO: 90501 - DNA, 22 bp, Artificial Sequence
  Synthetic oligonucleotide; TTT chr11 5261303 5261324 5261320 5261325 +
gaaaaccggcacaagacaagga

SEQ ID NO: 90502 - DNA, 22 bp, Artificial Sequence
  Synthetic oligonucleotide; TTG chr11 5261304 5261325 5261321 5261326 +
aaaaccggcacaagacaaggat

SEQ ID NO: 90503 - DNA, 22 bp, Artificial Sequence
  Synthetic oligonucleotide; CTC chr11 5261332 5261353 5261349 5261354 +
tcgccactcttactcaacatag

SEQ ID NO: 90504 - DNA, 22 bp, Artificial Sequence
  Synthetic oligonucleotide; CTC chr11 5261334 5261355 5261351 5261356 +
gccactcttactcaacatagta

SEQ ID NO: 90505 - DNA, 22 bp, Artificial Sequence
  Synthetic oligonucleotide; CTC chr11 5261341 5261362 5261358 5261363 +
ttactcaacatagtattggaag

SEQ ID NO: 90506 - DNA, 22 bp, Artificial Sequence
  Synthetic oligonucleotide; CTT chr11 5261343 5261364 5261360 5261365 +
actcaacatagtattggaagtt

SEQ ID NO: 90507 - DNA, 22 bp, Artificial Sequence
  Synthetic oligonucleotide; TTA chr11 5261344 5261365 5261361 5261366 +
ctcaacatagtattggaagttc

SEQ ID NO: 90508 - DNA, 22 bp, Artificial Sequence
  Synthetic oligonucleotide; CTC chr11 5261347 5261368 5261364 5261369 +
aacatagtattggaagttctcg

SEQ ID NO: 90509 - DNA, 22 bp, Artificial Sequence
  Synthetic oligonucleotide; TTG chr11 5261359 5261380 5261376 5261381 +
gaagttctcgccaggacaatca

SEQ ID NO: 90510 - DNA, 22 bp, Artificial Sequence
  Synthetic oligonucleotide; TTC chr11 5261366 5261387 5261383 5261388 +
tcgccaggacaatcaggcaaga

SEQ ID NO: 90511 - DNA, 22 bp, Artificial Sequence
  Synthetic oligonucleotide; CTC chr11 5261368 5261389 5261385 5261390 +
gccaggacaatcaggcaagaga

SEQ ID NO: 90512 - DNA, 22 bp, Artificial Sequence
  Synthetic oligonucleotide; TTC chr11 5261408 5261429 5261425 5261430 +
aaataggaagagaggaagtcaa

SEQ ID NO: 90513 - DNA, 22 bp, Artificial Sequence
  Synthetic oligonucleotide; TTG chr11 5261434 5261455 5261451 5261456 +
tctctgtttgcagatgacatga

SEQ ID NO: 90514 - DNA, 22 bp, Artificial Sequence
  Synthetic oligonucleotide; CTC chr11 5261438 5261459 5261455 5261460 +
tgtttgcagatgacatgattgt

SEQ ID NO: 90515 - DNA, 22 bp, Artificial Sequence
  Synthetic oligonucleotide; CTG chr11 5261440 5261461 5261457 5261462 +
tttgcagatgacatgattgtat

SEQ ID NO: 90516 - DNA, 22 bp, Artificial Sequence
  Synthetic oligonucleotide; TTT chr11 5261443 5261464 5261460 5261465 +
gcagatgacatgattgtatatt

SEQ ID NO: 90517 - DNA, 22 bp, Artificial Sequence
  Synthetic oligonucleotide; TTG chr11 5261444 5261465 5261461 5261466 +
cagatgacatgattgtatattt

SEQ ID NO: 90518 - DNA, 22 bp, Artificial Sequence
  Synthetic oligonucleotide; TTG chr11 5261459 5261480 5261476 5261481 +
tatatttagaagaccctgtcat

SEQ ID NO: 90519 - DNA, 22 bp, Artificial Sequence
  Synthetic oligonucleotide; TTT chr11 5261466 5261487 5261483 5261488 +
agaagaccctgtcatctcagcc

SEQ ID NO: 90520 - DNA, 22 bp, Artificial Sequence
  Synthetic oligonucleotide; TTA chr11 5261467 5261488 5261484 5261489 +
gaagaccctgtcatctcagccc

SEQ ID NO: 90521 - DNA, 22 bp, Artificial Sequence
  Synthetic oligonucleotide; CTG chr11 5261477 5261498 5261494 5261499 +
tcatctcagcccaaaatcttaa

SEQ ID NO: 90522 - DNA, 22 bp, Artificial Sequence
  Synthetic oligonucleotide; CTC chr11 5261484 5261505 5261501 5261506 +
agcccaaaatcttaagctgata

SEQ ID NO: 90523 - DNA, 22 bp, Artificial Sequence
  Synthetic oligonucleotide; CTT chr11 5261497 5261518 5261514 5261519 +
aagctgataaacagcttcagca

SEQ ID NO: 90524 - DNA, 22 bp, Artificial Sequence
  Synthetic oligonucleotide; TTA chr11 5261498 5261519 5261515 5261520 +
agctgataaacagcttcagcaa

SEQ ID NO: 90525 - DNA, 22 bp, Artificial Sequence
  Synthetic oligonucleotide; CTG chr11 5261503 5261524 5261520 5261525 +
ataaacagcttcagcaaagtct

SEQ ID NO: 90526 - DNA, 22 bp, Artificial Sequence
  Synthetic oligonucleotide; CTT chr11 5261514 5261535 5261531 5261536 +
cagcaaagtctcaagatacaaa

SEQ ID NO: 90527 - DNA, 22 bp, Artificial Sequence
  Synthetic oligonucleotide; TTC chr11 5261515 5261536 5261532 5261537 +
agcaaagtctcaagatacaaaa

SEQ ID NO: 90528 - DNA, 22 bp, Artificial Sequence
  Synthetic oligonucleotide; CTC chr11 5261526 5261547 5261543 5261548 +
aagatacaaaatcagtgtgcag

SEQ ID NO: 90529 - DNA, 22 bp, Artificial Sequence
  Synthetic oligonucleotide; TTC chr11 5261563 5261584 5261580 5261585 +
ctatacaccaataatagacaag

SEQ ID NO: 90530 - DNA, 22 bp, Artificial Sequence
  Synthetic oligonucleotide; CTA chr11 5261566 5261587 5261583 5261588 +
tacaccaataatagacaagcag

SEQ ID NO: 90531 - DNA, 22 bp, Artificial Sequence
  Synthetic oligonucleotide; CTC chr11 5261611 5261632 5261628 5261633 +
ccattcacaattgctgcaaaga

SEQ ID NO: 90532 - DNA, 22 bp, Artificial Sequence
  Synthetic oligonucleotide; TTC chr11 5261617 5261638 5261634 5261639 +
acaattgctgcaaagagaataa

SEQ ID NO: 90533 - DNA, 22 bp, Artificial Sequence
  Synthetic oligonucleotide; TTG chr11 5261624 5261645 5261641 5261646 +
ctgcaaagagaataaaataaaa

SEQ ID NO: 90534 - DNA, 22 bp, Artificial Sequence
  Synthetic oligonucleotide; CTG chr11 5261627 5261648 5261644 5261649 +
caaagagaataaaataaaatac

SEQ ID NO: 90535 - DNA, 22 bp, Artificial Sequence
  Synthetic oligonucleotide; CTA chr11 5261652 5261673 5261669 5261674 +
gaaatacaacttctaagggatg

SEQ ID NO: 90536 - DNA, 22 bp, Artificial Sequence
  Synthetic oligonucleotide; CTT chr11 5261664 5261685 5261681 5261686 +
ctaagggatgtgaagaacctct

SEQ ID NO: 90537 - DNA, 22 bp, Artificial Sequence
  Synthetic oligonucleotide; TTC chr11 5261665 5261686 5261682 5261687 +
taagggatgtgaagaacctctt

SEQ ID NO: 90538 - DNA, 22 bp, Artificial Sequence
  Synthetic oligonucleotide; CTA chr11 5261667 5261688 5261684 5261689 +
agggatgtgaagaacctcttca

SEQ ID NO: 90539 - DNA, 22 bp, Artificial Sequence
  Synthetic oligonucleotide; CTC chr11 5261685 5261706 5261702 5261707 +
ttcaaggagagctacaaaccac

SEQ ID NO: 90540 - DNA, 22 bp, Artificial Sequence
  Synthetic oligonucleotide; CTT chr11 5261687 5261708 5261704 5261709 +
caaggagagctacaaaccactc

SEQ ID NO: 90541 - DNA, 22 bp, Artificial Sequence
  Synthetic oligonucleotide; TTC chr11 5261688 5261709 5261705 5261710 +
aaggagagctacaaaccactca

SEQ ID NO: 90542 - DNA, 22 bp, Artificial Sequence
  Synthetic oligonucleotide; CTA chr11 5261699 5261720 5261716 5261721 +
caaaccactcactgctcaagga

SEQ ID NO: 90543 - DNA, 22 bp, Artificial Sequence
  Synthetic oligonucleotide; CTC chr11 5261709 5261730 5261726 5261731 +
actgctcaaggaaataagagag

SEQ ID NO: 90544 - DNA, 22 bp, Artificial Sequence
  Synthetic oligonucleotide; CTG chr11 5261713 5261734 5261730 5261735 +
ctcaaggaaataagagaggaca

SEQ ID NO: 90545 - DNA, 22 bp, Artificial Sequence
  Synthetic oligonucleotide; CTC chr11 5261716 5261737 5261733 5261738 +
aaggaaataagagaggacacaa

SEQ ID NO: 90546 - DNA, 22 bp, Artificial Sequence
  Synthetic oligonucleotide; TTC chr11 5261756 5261777 5261773 5261778 +
catgctcatagatagaaagaat

SEQ ID NO: 90547 - DNA, 22 bp, Artificial Sequence
  Synthetic oligonucleotide; CTC chr11 5261763 5261784 5261780 5261785 +
atagatagaaagaatcaatatc

SEQ ID NO: 90548 - DNA, 22 bp, Artificial Sequence
  Synthetic oligonucleotide; CTT chr11 5261787 5261808 5261804 5261809 +
taaaatggccatactgcccaaa

SEQ ID NO: 90549 - DNA, 22 bp, Artificial Sequence
  Synthetic oligonucleotide; TTT chr11 5261788 5261809 5261805 5261810 +
aaaatggccatactgcccaaag

SEQ ID NO: 90550 - DNA, 22 bp, Artificial Sequence
  Synthetic oligonucleotide; TTA chr11 5261789 5261810 5261806 5261811 +
aaatggccatactgcccaaagt

SEQ ID NO: 90551 - DNA, 22 bp, Artificial Sequence
  Synthetic oligonucleotide; CTG chr11 5261803 5261824 5261820 5261825 +
cccaaagtaatttatagattca

SEQ ID NO: 90552 - DNA, 22 bp, Artificial Sequence
  Synthetic oligonucleotide; TTT chr11 5261816 5261837 5261833 5261838 +
atagattcaatgctatccccat

SEQ ID NO: 90553 - DNA, 22 bp, Artificial Sequence
  Synthetic oligonucleotide; TTA chr11 5261817 5261838 5261834 5261839 +
tagattcaatgctatccccatc

SEQ ID NO: 90554 - DNA, 22 bp, Artificial Sequence
  Synthetic oligonucleotide; TTC chr11 5261824 5261845 5261841 5261846 +
aatgctatccccatcaagctac

SEQ ID NO: 90555 - DNA, 22 bp, Artificial Sequence
  Synthetic oligonucleotide; CTA chr11 5261831 5261852 5261848 5261853 +
tccccatcaagctaccactgac

SEQ ID NO: 90556 - DNA, 22 bp, Artificial Sequence
  Synthetic oligonucleotide; CTA chr11 5261845 5261866 5261862 5261867 +
ccactgacttttttcaaagaat

SEQ ID NO: 90557 - DNA, 22 bp, Artificial Sequence
  Synthetic oligonucleotide; CTG chr11 5261851 5261872 5261868 5261873 +
acttttttcaaagaattagaaa

SEQ ID NO: 90558 - DNA, 22 bp, Artificial Sequence
  Synthetic oligonucleotide; CTT chr11 5261855 5261876 5261872 5261877 +
ttttcaaagaattagaaaaaac

SEQ ID NO: 90559 - DNA, 22 bp, Artificial Sequence
  Synthetic oligonucleotide; TTT chr11 5261856 5261877 5261873 5261878 +
tttcaaagaattagaaaaaact

SEQ ID NO: 90560 - DNA, 22 bp, Artificial Sequence
  Synthetic oligonucleotide; TTT chr11 5261857 5261878 5261874 5261879 +
ttcaaagaattagaaaaaacta

SEQ ID NO: 90561 - DNA, 22 bp, Artificial Sequence
  Synthetic oligonucleotide; TTT chr11 5261858 5261879 5261875 5261880 +
tcaaagaattagaaaaaactac

SEQ ID NO: 90562 - DNA, 22 bp, Artificial Sequence
  Synthetic oligonucleotide; TTT chr11 5261859 5261880 5261876 5261881 +
caaagaattagaaaaaactact

SEQ ID NO: 90563 - DNA, 22 bp, Artificial Sequence
  Synthetic oligonucleotide; TTC chr11 5261860 5261881 5261877 5261882 +
aaagaattagaaaaaactactt

SEQ ID NO: 90564 - DNA, 22 bp, Artificial Sequence
  Synthetic oligonucleotide; TTA chr11 5261869 5261890 5261886 5261891 +
gaaaaaactactttaaatgtca

SEQ ID NO: 90565 - DNA, 22 bp, Artificial Sequence
  Synthetic oligonucleotide; CTA chr11 5261879 5261900 5261896 5261901 +
ctttaaatgtcatatggaatca

SEQ ID NO: 90566 - DNA, 22 bp, Artificial Sequence
  Synthetic oligonucleotide; CTT chr11 5261882 5261903 5261899 5261904 +
taaatgtcatatggaatcaaaa

SEQ ID NO: 90567 - DNA, 22 bp, Artificial Sequence
  Synthetic oligonucleotide; TTT chr11 5261883 5261904 5261900 5261905 +
aaatgtcatatggaatcaaaaa

SEQ ID NO: 90568 - DNA, 22 bp, Artificial Sequence
  Synthetic oligonucleotide; TTA chr11 5261884 5261905 5261901 5261906 +
aatgtcatatggaatcaaaaaa

SEQ ID NO: 90569 - DNA, 22 bp, Artificial Sequence
  Synthetic oligonucleotide; CTA chr11 5261932 5261953 5261949 5261954 +
aacaaaaagaacaaagctggag

SEQ ID NO: 90570 - DNA, 22 bp, Artificial Sequence
  Synthetic oligonucleotide; CTG chr11 5261951 5261972 5261968 5261973 +
gaggcatgatgctacctgactt

SEQ ID NO: 90571 - DNA, 22 bp, Artificial Sequence
  Synthetic oligonucleotide; CTA chr11 5261965 5261986 5261982 5261987 +
cctgacttcaaactatactaca

SEQ ID NO: 90572 - DNA, 22 bp, Artificial Sequence
  Synthetic oligonucleotide; CTG chr11 5261969 5261990 5261986 5261991 +
acttcaaactatactacaaggc

SEQ ID NO: 90573 - DNA, 22 bp, Artificial Sequence
  Synthetic oligonucleotide; CTT chr11 5261973 5261994 5261990 5261995 +
caaactatactacaaggctaca

SEQ ID NO: 90574 - DNA, 22 bp, Artificial Sequence
  Synthetic oligonucleotide; TTC chr11 5261974 5261995 5261991 5261996 +
aaactatactacaaggctacag

SEQ ID NO: 90575 - DNA, 22 bp, Artificial Sequence
  Synthetic oligonucleotide; CTA chr11 5261980 5262001 5261997 5262002 +
tactacaaggctacagtaacaa

SEQ ID NO: 90576 - DNA, 22 bp, Artificial Sequence
  Synthetic oligonucleotide; CTA chr11 5261985 5262006 5262002 5262007 +
caaggctacagtaacaaaaaca

SEQ ID NO: 90577 - DNA, 22 bp, Artificial Sequence
  Synthetic oligonucleotide; CTA chr11 5261993 5262014 5262010 5262015 +
cagtaacaaaaacagcatggta

SEQ ID NO: 90578 - DNA, 22 bp, Artificial Sequence
  Synthetic oligonucleotide; CTG chr11 5262018 5262039 5262035 5262040 +
gtaccaaaacagatatatagac

SEQ ID NO: 90579 - DNA, 22 bp, Artificial Sequence
  Synthetic oligonucleotide; CTC chr11 5262063 5262084 5262080 5262085 +
agaaataatgccacacatctac

SEQ ID NO: 90580 - DNA, 22 bp, Artificial Sequence
  Synthetic oligonucleotide; CTA chr11 5262084 5262105 5262101 5262106 +
cgaccatctgatctttgacaaa

SEQ ID NO: 90581 - DNA, 22 bp, Artificial Sequence
  Synthetic oligonucleotide; CTG chr11 5262094 5262115 5262111 5262116 +
atctttgacaaacatcacaaaa

SEQ ID NO: 90582 - DNA, 22 bp, Artificial Sequence
  Synthetic oligonucleotide; CTT chr11 5262099 5262120 5262116 5262121 +
tgacaaacatcacaaaagcaat

SEQ ID NO: 90583 - DNA, 22 bp, Artificial Sequence
  Synthetic oligonucleotide; TTT chr11 5262100 5262121 5262117 5262122 +
gacaaacatcacaaaagcaatg

SEQ ID NO: 90584 - DNA, 22 bp, Artificial Sequence
  Synthetic oligonucleotide; TTG chr11 5262101 5262122 5262118 5262123 +
acaaacatcacaaaagcaatgg

SEQ ID NO: 90585 - DNA, 22 bp, Artificial Sequence
  Synthetic oligonucleotide; TTC chr11 5262134 5262155 5262151 5262156 +
cctatttaataaatggtgctgg

SEQ ID NO: 90586 - DNA, 22 bp, Artificial Sequence
  Synthetic oligonucleotide; CTA chr11 5262138 5262159 5262155 5262160 +
tttaataaatggtgctggaaaa

SEQ ID NO: 90587 - DNA, 22 bp, Artificial Sequence
  Synthetic oligonucleotide; TTT chr11 5262141 5262162 5262158 5262163 +
aataaatggtgctggaaaaact

SEQ ID NO: 90588 - DNA, 22 bp, Artificial Sequence
  Synthetic oligonucleotide; TTA chr11 5262142 5262163 5262159 5262164 +
ataaatggtgctggaaaaactg

SEQ ID NO: 90589 - DNA, 22 bp, Artificial Sequence
  Synthetic oligonucleotide; CTG chr11 5262155 5262176 5262172 5262177 +
gaaaaactggctagcaatatgc

SEQ ID NO: 90590 - DNA, 22 bp, Artificial Sequence
  Synthetic oligonucleotide; CTG chr11 5262164 5262185 5262181 5262186 +
gctagcaatatgcataaaactg

SEQ ID NO: 90591 - DNA, 22 bp, Artificial Sequence
  Synthetic oligonucleotide; CTA chr11 5262168 5262189 5262185 5262190 +
gcaatatgcataaaactgaaac

SEQ ID NO: 90592 - DNA, 22 bp, Artificial Sequence
  Synthetic oligonucleotide; CTG chr11 5262186 5262207 5262203 5262208 +
aaactgtaccccttccttacac

SEQ ID NO: 90593 - DNA, 22 bp, Artificial Sequence
  Synthetic oligonucleotide; CTG chr11 5262192 5262213 5262209 5262214 +
taccccttccttacaccttata

SEQ ID NO: 90594 - DNA, 22 bp, Artificial Sequence
  Synthetic oligonucleotide; CTT chr11 5262200 5262221 5262217 5262222 +
ccttacaccttatacaaaaatt

SEQ ID NO: 90595 - DNA, 22 bp, Artificial Sequence
  Synthetic oligonucleotide; TTC chr11 5262201 5262222 5262218 5262223 +
cttacaccttatacaaaaatta

SEQ ID NO: 90596 - DNA, 22 bp, Artificial Sequence
  Synthetic oligonucleotide; CTT chr11 5262204 5262225 5262221 5262226 +
acaccttatacaaaaattaact

SEQ ID NO: 90597 - DNA, 22 bp, Artificial Sequence
  Synthetic oligonucleotide; TTA chr11 5262205 5262226 5262222 5262227 +
caccttatacaaaaattaactc

SEQ ID NO: 90598 - DNA, 22 bp, Artificial Sequence
  Synthetic oligonucleotide; CTT chr11 5262211 5262232 5262228 5262233 +
atacaaaaattaactcaaggtg

SEQ ID NO: 90599 - DNA, 22 bp, Artificial Sequence
  Synthetic oligonucleotide; TTA chr11 5262212 5262233 5262229 5262234 +
tacaaaaattaactcaaggtgg

SEQ ID NO: 90600 - DNA, 22 bp, Artificial Sequence
  Synthetic oligonucleotide; TTA chr11 5262223 5262244 5262240 5262245 +
actcaaggtggattaaagactt

SEQ ID NO: 90601 - DNA, 22 bp, Artificial Sequence
  Synthetic oligonucleotide; CTC chr11 5262227 5262248 5262244 5262249 +
aaggtggattaaagacttaaat

SEQ ID NO: 90602 - DNA, 22 bp, Artificial Sequence
  Synthetic oligonucleotide; TTA chr11 5262238 5262259 5262255 5262260 +
aagacttaaatgtgcaacctaa

SEQ ID NO: 90603 - DNA, 22 bp, Artificial Sequence
  Synthetic oligonucleotide; CTT chr11 5262245 5262266 5262262 5262267 +
aaatgtgcaacctaaaaccata

SEQ ID NO: 90604 - DNA, 22 bp, Artificial Sequence
  Synthetic oligonucleotide; TTA chr11 5262246 5262267 5262263 5262268 +
aatgtgcaacctaaaaccataa

SEQ ID NO: 90605 - DNA, 22 bp, Artificial Sequence
  Synthetic oligonucleotide; CTA chr11 5262259 5262280 5262276 5262281 +
aaaccataaaaatcctagaaga

SEQ ID NO: 90606 - DNA, 22 bp, Artificial Sequence
  Synthetic oligonucleotide; CTA chr11 5262276 5262297 5262293 5262298 +
gaagataacctaggcaatacca

SEQ ID NO: 90607 - DNA, 22 bp, Artificial Sequence
  Synthetic oligonucleotide; CTA chr11 5262288 5262309 5262305 5262310 +
ggcaataccattcaggacatag

SEQ ID NO: 90608 - DNA, 22 bp, Artificial Sequence
  Synthetic oligonucleotide; TTC chr11 5262301 5262322 5262318 5262323 +
aggacataggcatgggcaaaaa

SEQ ID NO: 90609 - DNA, 22 bp, Artificial Sequence
  Synthetic oligonucleotide; TTC chr11 5262326 5262347 5262343 5262348 +
acgactaaaacatcaaaagcaa

SEQ ID NO: 90610 - DNA, 22 bp, Artificial Sequence
  Synthetic oligonucleotide; CTA chr11 5262333 5262354 5262350 5262355 +
aaacatcaaaagcaatgacaac

SEQ ID NO: 90611 - DNA, 22 bp, Artificial Sequence
  Synthetic oligonucleotide; TTG chr11 5262369 5262390 5262386 5262391 +
acatatgggatctaattaaact

SEQ ID NO: 90612 - DNA, 22 bp, Artificial Sequence
  Synthetic oligonucleotide; CTA chr11 5262383 5262404 5262400 5262405 +
attaaactaaagagcttctgca

SEQ ID NO: 90613 - DNA, 22 bp, Artificial Sequence
  Synthetic oligonucleotide; TTA chr11 5262387 5262408 5262404 5262409 +
aactaaagagcttctgcacagc

SEQ ID NO: 90614 - DNA, 22 bp, Artificial Sequence
  Synthetic oligonucleotide; CTA chr11 5262392 5262413 5262409 5262414 +
aagagcttctgcacagcaaaag

SEQ ID NO: 90615 - DNA, 22 bp, Artificial Sequence
  Synthetic oligonucleotide; CTT chr11 5262400 5262421 5262417 5262422 +
ctgcacagcaaaagactatcat

SEQ ID NO: 90616 - DNA, 22 bp, Artificial Sequence
  Synthetic oligonucleotide; TTC chr11 5262401 5262422 5262418 5262423 +
tgcacagcaaaagactatcatc

SEQ ID NO: 90617 - DNA, 22 bp, Artificial Sequence
  Synthetic oligonucleotide; CTG chr11 5262403 5262424 5262420 5262425 +
cacagcaaaagactatcatcag

SEQ ID NO: 90618 - DNA, 22 bp, Artificial Sequence
  Synthetic oligonucleotide; CTA chr11 5262418 5262439 5262435 5262440 +
tcatcagagtgaacaggcaacc

SEQ ID NO: 90619 - DNA, 22 bp, Artificial Sequence
  Synthetic oligonucleotide; CTA chr11 5262442 5262463 5262459 5262464 +
cagaatgggagaaaatttttgc

SEQ ID NO: 90620 - DNA, 22 bp, Artificial Sequence
  Synthetic oligonucleotide; TTT chr11 5262460 5262481 5262477 5262482 +
ttgcaatctatccatctgacaa

SEQ ID NO: 90621 - DNA, 22 bp, Artificial Sequence
  Synthetic oligonucleotide; TTT chr11 5262461 5262482 5262478 5262483 +
tgcaatctatccatctgacaaa

SEQ ID NO: 90622 - DNA, 22 bp, Artificial Sequence
  Synthetic oligonucleotide; TTT chr11 5262462 5262483 5262479 5262484 +
gcaatctatccatctgacaaag

SEQ ID NO: 90623 - DNA, 22 bp, Artificial Sequence
  Synthetic oligonucleotide; TTG chr11 5262463 5262484 5262480 5262485 +
caatctatccatctgacaaagg

SEQ ID NO: 90624 - DNA, 22 bp, Artificial Sequence
  Synthetic oligonucleotide; CTA chr11 5262470 5262491 5262487 5262492 +
tccatctgacaaagggctaaca

SEQ ID NO: 90625 - DNA, 22 bp, Artificial Sequence
  Synthetic oligonucleotide; CTG chr11 5262478 5262499 5262495 5262500 +
acaaagggctaacatccaaaat

SEQ ID NO: 90626 - DNA, 22 bp, Artificial Sequence
  Synthetic oligonucleotide; CTA chr11 5262489 5262510 5262506 5262511 +
acatccaaaatctacaaagaac

SEQ ID NO: 90627 - DNA, 22 bp, Artificial Sequence
  Synthetic oligonucleotide; CTA chr11 5262503 5262524 5262520 5262525 +
caaagaacttcaacaaatttac

SEQ ID NO: 90628 - DNA, 22 bp, Artificial Sequence
  Synthetic oligonucleotide; CTT chr11 5262513 5262534 5262530 5262535 +
caacaaatttacaagaaaaaac

SEQ ID NO: 90629 - DNA, 22 bp, Artificial Sequence
  Synthetic oligonucleotide; TTC chr11 5262514 5262535 5262531 5262536 +
aacaaatttacaagaaaaaacc

SEQ ID NO: 90630 - DNA, 22 bp, Artificial Sequence
  Synthetic oligonucleotide; TTT chr11 5262523 5262544 5262540 5262545 +
acaagaaaaaacctaacgaccc

SEQ ID NO: 90631 - DNA, 22 bp, Artificial Sequence
  Synthetic oligonucleotide; TTA chr11 5262524 5262545 5262541 5262546 +
caagaaaaaacctaacgacccc

SEQ ID NO: 90632 - DNA, 22 bp, Artificial Sequence
  Synthetic oligonucleotide; CTA chr11 5262538 5262559 5262555 5262560 +
acgaccccatcaaaaagtggac

SEQ ID NO: 90633 - DNA, 22 bp, Artificial Sequence
  Synthetic oligonucleotide; CTT chr11 5262581 5262602 5262598 5262603 +
ctctaaagaagtcatttatgtg

SEQ ID NO: 90634 - DNA, 22 bp, Artificial Sequence
  Synthetic oligonucleotide; TTC chr11 5262582 5262603 5262599 5262604 +
tctaaagaagtcatttatgtgg

SEQ ID NO: 90635 - DNA, 22 bp, Artificial Sequence
  Synthetic oligonucleotide; CTC chr11 5262584 5262605 5262601 5262606 +
taaagaagtcatttatgtggcc

SEQ ID NO: 90636 - DNA, 22 bp, Artificial Sequence
  Synthetic oligonucleotide; CTA chr11 5262586 5262607 5262603 5262608 +
aagaagtcatttatgtggccaa

SEQ ID NO: 90637 - DNA, 22 bp, Artificial Sequence
  Synthetic oligonucleotide; TTT chr11 5262598 5262619 5262615 5262620 +
atgtggccaagaaacacatgaa

SEQ ID NO: 90638 - DNA, 22 bp, Artificial Sequence
  Synthetic oligonucleotide; TTA chr11 5262599 5262620 5262616 5262621 +
tgtggccaagaaacacatgaaa

SEQ ID NO: 90639 - DNA, 22 bp, Artificial Sequence
  Synthetic oligonucleotide; CTC chr11 5262629 5262650 5262646 5262651 +
atcatcactggtcattagagaa

SEQ ID NO: 90640 - DNA, 22 bp, Artificial Sequence
  Synthetic oligonucleotide; CTG chr11 5262639 5262660 5262656 5262661 +
gtcattagagaaatgcaaatca

SEQ ID NO: 90641 - DNA, 22 bp, Artificial Sequence
  Synthetic oligonucleotide; TTA chr11 5262646 5262667 5262663 5262668 +
gagaaatgcaaatcaaaaccac

SEQ ID NO: 90642 - DNA, 22 bp, Artificial Sequence
  Synthetic oligonucleotide; CTC chr11 5262684 5262705 5262701 5262706 +
atgccagttagaatggcaatta

SEQ ID NO: 90643 - DNA, 22 bp, Artificial Sequence
  Synthetic oligonucleotide; TTA chr11 5262694 5262715 5262711 5262716 +
gaatggcaattattaaaaagtc

SEQ ID NO: 90644 - DNA, 22 bp, Artificial Sequence
  Synthetic oligonucleotide; TTA chr11 5262706 5262727 5262723 5262728 +
ttaaaaagtcaggaaacaaaag

SEQ ID NO: 90645 - DNA, 22 bp, Artificial Sequence
  Synthetic oligonucleotide; TTA chr11 5262709 5262730 5262726 5262731 +
aaaagtcaggaaacaaaaggtg

SEQ ID NO: 90646 - DNA, 22 bp, Artificial Sequence
  Synthetic oligonucleotide; CTG chr11 5262734 5262755 5262751 5262756 +
gagaggatgtggaagaatagga

SEQ ID NO: 90647 - DNA, 22 bp, Artificial Sequence
  Synthetic oligonucleotide; TTT chr11 5262763 5262784 5262780 5262785 +
tacactgttgatgggtgtgtaa

SEQ ID NO: 90648 - DNA, 22 bp, Artificial Sequence
  Synthetic oligonucleotide; TTT chr11 5262764 5262785 5262781 5262786 +
acactgttgatgggtgtgtaaa

SEQ ID NO: 90649 - DNA, 22 bp, Artificial Sequence
  Synthetic oligonucleotide; TTA chr11 5262765 5262786 5262782 5262787 +
cactgttgatgggtgtgtaaat

SEQ ID NO: 90650 - DNA, 22 bp, Artificial Sequence
  Synthetic oligonucleotide; CTG chr11 5262770 5262791 5262787 5262792 +
ttgatgggtgtgtaaattagtt

SEQ ID NO: 90651 - DNA, 22 bp, Artificial Sequence
  Synthetic oligonucleotide; TTG chr11 5262773 5262794 5262790 5262795 +
atgggtgtgtaaattagttcaa

SEQ ID NO: 90652 - DNA, 22 bp, Artificial Sequence
  Synthetic oligonucleotide; TTA chr11 5262789 5262810 5262806 5262811 +
gttcaaccattgtggaagacag

SEQ ID NO: 90653 - DNA, 22 bp, Artificial Sequence
  Synthetic oligonucleotide; TTC chr11 5262793 5262814 5262810 5262815 +
aaccattgtggaagacagtgtg

SEQ ID NO: 90654 - DNA, 22 bp, Artificial Sequence
  Synthetic oligonucleotide; TTG chr11 5262801 5262822 5262818 5262823 +
tggaagacagtgtggcgattcc

SEQ ID NO: 90655 - DNA, 22 bp, Artificial Sequence
  Synthetic oligonucleotide; TTC chr11 5262822 5262843 5262839 5262844 +
ctcaaggatctagaaccagaaa

SEQ ID NO: 90656 - DNA, 22 bp, Artificial Sequence
  Synthetic oligonucleotide; CTC chr11 5262825 5262846 5262842 5262847 +
aaggatctagaaccagaaatac

SEQ ID NO: 90657 - DNA, 22 bp, Artificial Sequence
  Synthetic oligonucleotide; CTA chr11 5262834 5262855 5262851 5262856 +
gaaccagaaatactgtttgacc

SEQ ID NO: 90658 - DNA, 22 bp, Artificial Sequence
  Synthetic oligonucleotide; CTG chr11 5262849 5262870 5262866 5262871 +
tttgacccagcaatcccattac

SEQ ID NO: 90659 - DNA, 22 bp, Artificial Sequence
  Synthetic oligonucleotide; TTT chr11 5262852 5262873 5262869 5262874 +
gacccagcaatcccattactgg

SEQ ID NO: 90660 - DNA, 22 bp, Artificial Sequence
  Synthetic oligonucleotide; TTG chr11 5262853 5262874 5262870 5262875 +
acccagcaatcccattactggg

SEQ ID NO: 90661 - DNA, 22 bp, Artificial Sequence
  Synthetic oligonucleotide; TTA chr11 5262870 5262891 5262887 5262892 +
ctgggtatatacccaaagaatt

SEQ ID NO: 90662 - DNA, 22 bp, Artificial Sequence
  Synthetic oligonucleotide; CTG chr11 5262873 5262894 5262890 5262895 +
ggtatatacccaaagaattaga

SEQ ID NO: 90663 - DNA, 22 bp, Artificial Sequence
  Synthetic oligonucleotide; TTA chr11 5262893 5262914 5262910 5262915 +
gaaatcattctactataaagac

SEQ ID NO: 90664 - DNA, 22 bp, Artificial Sequence
  Synthetic oligonucleotide; TTC chr11 5262903 5262924 5262920 5262925 +
tactataaagacacgtgcacac

SEQ ID NO: 90665 - DNA, 22 bp, Artificial Sequence
  Synthetic oligonucleotide; CTA chr11 5262905 5262926 5262922 5262927 +
ctataaagacacgtgcacacgt

SEQ ID NO: 90666 - DNA, 22 bp, Artificial Sequence
  Synthetic oligonucleotide; CTA chr11 5262908 5262929 5262925 5262930 +
taaagacacgtgcacacgtatg

SEQ ID NO: 90667 - DNA, 22 bp, Artificial Sequence
  Synthetic oligonucleotide; TTT chr11 5262933 5262954 5262950 5262955 +
attgtggcactattcacaatag

SEQ ID NO: 90668 - DNA, 22 bp, Artificial Sequence
  Synthetic oligonucleotide; TTA chr11 5262934 5262955 5262951 5262956 +
ttgtggcactattcacaatagc

SEQ ID NO: 90669 - DNA, 22 bp, Artificial Sequence
  Synthetic oligonucleotide; TTG chr11 5262937 5262958 5262954 5262959 +
tggcactattcacaatagcaaa

SEQ ID NO: 90670 - DNA, 22 bp, Artificial Sequence
  Synthetic oligonucleotide; CTA chr11 5262945 5262966 5262962 5262967 +
ttcacaatagcaaagacttgga

SEQ ID NO: 90671 - DNA, 22 bp, Artificial Sequence
  Synthetic oligonucleotide; TTC chr11 5262948 5262969 5262965 5262970 +
acaatagcaaagacttggaacc

SEQ ID NO: 90672 - DNA, 22 bp, Artificial Sequence
  Synthetic oligonucleotide; CTT chr11 5262964 5262985 5262981 5262986 +
ggaaccaacccaaatggccatc

SEQ ID NO: 90673 - DNA, 22 bp, Artificial Sequence
  Synthetic oligonucleotide; TTG chr11 5262965 5262986 5262982 5262987 +
gaaccaacccaaatggccatca

SEQ ID NO: 90674 - DNA, 22 bp, Artificial Sequence
  Synthetic oligonucleotide; CTA chr11 5263037 5263058 5263054 5263059 +
tgcagccataaaaatgatgagt

SEQ ID NO: 90675 - DNA, 22 bp, Artificial Sequence
  Synthetic oligonucleotide; TTC chr11 5263061 5263082 5263078 5263083 +
atgtctttgcagggacatggat

SEQ ID NO: 90676 - DNA, 22 bp, Artificial Sequence
  Synthetic oligonucleotide; CTT chr11 5263068 5263089 5263085 5263090 +
tgcagggacatggatgaaggtg

SEQ ID NO: 90677 - DNA, 22 bp, Artificial Sequence
  Synthetic oligonucleotide; TTT chr11 5263069 5263090 5263086 5263091 +
gcagggacatggatgaaggtgg

SEQ ID NO: 90678 - DNA, 22 bp, Artificial Sequence
  Synthetic oligonucleotide; TTG chr11 5263070 5263091 5263087 5263092 +
cagggacatggatgaaggtgga

SEQ ID NO: 90679 - DNA, 22 bp, Artificial Sequence
  Synthetic oligonucleotide; TTC chr11 5263103 5263124 5263120 5263125 +
tgagcaaactaacacaggaaca

SEQ ID NO: 90680 - DNA, 22 bp, Artificial Sequence
  Synthetic oligonucleotide; CTG chr11 5263105 5263126 5263122 5263127 +
agcaaactaacacaggaacaga

SEQ ID NO: 90681 - DNA, 22 bp, Artificial Sequence
  Synthetic oligonucleotide; CTA chr11 5263114 5263135 5263131 5263136 +
acacaggaacagagaaaccaaa

SEQ ID NO: 90682 - DNA, 22 bp, Artificial Sequence
  Synthetic oligonucleotide; TTC chr11 5263148 5263169 5263165 5263170 +
tcactcataagtgggagttgaa

SEQ ID NO: 90683 - DNA, 22 bp, Artificial Sequence
  Synthetic oligonucleotide; CTC chr11 5263150 5263171 5263167 5263172 +
actcataagtgggagttgaaca

SEQ ID NO: 90684 - DNA, 22 bp, Artificial Sequence
  Synthetic oligonucleotide; CTC chr11 5263154 5263175 5263171 5263176 +
ataagtgggagttgaacaatga

SEQ ID NO: 90685 - DNA, 22 bp, Artificial Sequence
  Synthetic oligonucleotide; TTG chr11 5263168 5263189 5263185 5263190 +
aacaatgagaacacatggacac

SEQ ID NO: 90686 - DNA, 22 bp, Artificial Sequence
  Synthetic oligonucleotide; CTG chr11 5263220 5263241 5263237 5263242 +
tcggggggtgagggggttagga

SEQ ID NO: 90687 - DNA, 22 bp, Artificial Sequence
  Synthetic oligonucleotide; TTA chr11 5263239 5263260 5263256 5263261 +
ggagagggataacattaaaaga

SEQ ID NO: 90688 - DNA, 22 bp, Artificial Sequence
  Synthetic oligonucleotide; TTA chr11 5263256 5263277 5263273 5263278 +
aaagaaatacctaatgtagatg

SEQ ID NO: 90689 - DNA, 22 bp, Artificial Sequence
  Synthetic oligonucleotide; CTA chr11 5263269 5263290 5263286 5263291 +
atgtagatgacaggttgatggg

SEQ ID NO: 90690 - DNA, 22 bp, Artificial Sequence
  Synthetic oligonucleotide; TTG chr11 5263286 5263307 5263303 5263308 +
atgggtgcagcaaaccaccatg

SEQ ID NO: 90691 - DNA, 22 bp, Artificial Sequence
  Synthetic oligonucleotide; CTA chr11 5263317 5263338 5263334 5263339 +
tacctatgtaacaaacctgcac

SEQ ID NO: 90692 - DNA, 22 bp, Artificial Sequence
  Synthetic oligonucleotide; CTA chr11 5263323 5263344 5263340 5263345 +
tgtaacaaacctgcacattctg

SEQ ID NO: 90693 - DNA, 22 bp, Artificial Sequence
  Synthetic oligonucleotide; CTG chr11 5263336 5263357 5263353 5263358 +
cacattctgcacatgtatccca

SEQ ID NO: 90694 - DNA, 22 bp, Artificial Sequence
  Synthetic oligonucleotide; TTC chr11 5263343 5263364 5263360 5263365 +
tgcacatgtatcccagaactta

SEQ ID NO: 90695 - DNA, 22 bp, Artificial Sequence
  Synthetic oligonucleotide; CTG chr11 5263345 5263366 5263362 5263367 +
cacatgtatcccagaacttaaa

SEQ ID NO: 90696 - DNA, 22 bp, Artificial Sequence
  Synthetic oligonucleotide; CTT chr11 5263364 5263385 5263381 5263386 +
aaagtataataagaacaacaaa

SEQ ID NO: 90697 - DNA, 22 bp, Artificial Sequence
  Synthetic oligonucleotide; TTA chr11 5263365 5263386 5263382 5263387 +
aagtataataagaacaacaaaa

SEQ ID NO: 90698 - DNA, 22 bp, Artificial Sequence
  Synthetic oligonucleotide; TTA chr11 5263390 5263411 5263407 5263412 +
cttgaactgaccgacaatagtg

SEQ ID NO: 90699 - DNA, 22 bp, Artificial Sequence
  Synthetic oligonucleotide; CTT chr11 5263393 5263414 5263410 5263415 +
gaactgaccgacaatagtgaca

SEQ ID NO: 90700 - DNA, 22 bp, Artificial Sequence
  Synthetic oligonucleotide; TTG chr11 5263394 5263415 5263411 5263416 +
aactgaccgacaatagtgacac

SEQ ID NO: 90701 - DNA, 22 bp, Artificial Sequence
  Synthetic oligonucleotide; CTG chr11 5263399 5263420 5263416 5263421 +
accgacaatagtgacacaacct

SEQ ID NO: 90702 - DNA, 22 bp, Artificial Sequence
  Synthetic oligonucleotide; CTA chr11 5263422 5263443 5263439 5263444 +
tcaaaacctctaggatacagca

SEQ ID NO: 90703 - DNA, 22 bp, Artificial Sequence
  Synthetic oligonucleotide; CTC chr11 5263432 5263453 5263449 5263454 +
taggatacagcaaagatggtgc

SEQ ID NO: 90704 - DNA, 22 bp, Artificial Sequence
  Synthetic oligonucleotide; CTA chr11 5263434 5263455 5263451 5263456 +
ggatacagcaaagatggtgcta

SEQ ID NO: 90705 - DNA, 22 bp, Artificial Sequence
  Synthetic oligonucleotide; CTA chr11 5263456 5263477 5263473 5263478 +
aaaggaaagttcacagccctaa

SEQ ID NO: 90706 - DNA, 22 bp, Artificial Sequence
  Synthetic oligonucleotide; TTC chr11 5263468 5263489 5263485 5263490 +
acagccctaaatgtcgatgtca

SEQ ID NO: 90707 - DNA, 22 bp, Artificial Sequence
  Synthetic oligonucleotide; CTA chr11 5263477 5263498 5263494 5263499 +
aatgtcgatgtcaaagagtctg

SEQ ID NO: 90708 - DNA, 22 bp, Artificial Sequence
  Synthetic oligonucleotide; CTG chr11 5263499 5263520 5263516 5263521 +
aaagaggacagacagacaatat

SEQ ID NO: 90709 - DNA, 22 bp, Artificial Sequence
  Synthetic oligonucleotide; CTA chr11 5263543 5263564 5263560 5263565 +
gagaaacaaaaacaaacagaac

SEQ ID NO: 90710 - DNA, 22 bp, Artificial Sequence
  Synthetic oligonucleotide; CTA chr11 5263595 5263616 5263612 5263617 +
agataagaggagaactaaatga

SEQ ID NO: 90711 - DNA, 22 bp, Artificial Sequence
  Synthetic oligonucleotide; CTA chr11 5263612 5263633 5263629 5263634 +
aatgaaattaaaacaactgcaa

SEQ ID NO: 90712 - DNA, 22 bp, Artificial Sequence
  Synthetic oligonucleotide; TTA chr11 5263622 5263643 5263639 5263644 +
aaacaactgcaaaaaaatacaa

SEQ ID NO: 90713 - DNA, 22 bp, Artificial Sequence
  Synthetic oligonucleotide; CTG chr11 5263631 5263652 5263648 5263653 +
caaaaaaatacaaaagctaaat

SEQ ID NO: 90714 - DNA, 22 bp, Artificial Sequence
  Synthetic oligonucleotide; CTA chr11 5263650 5263671 5263667 5263672 +
aatgaaataaaaagctggttct

SEQ ID NO: 90715 - DNA, 22 bp, Artificial Sequence
  Synthetic oligonucleotide; CTG chr11 5263667 5263688 5263684 5263689 +
gttctttgaaaagataaataaa

SEQ ID NO: 90716 - DNA, 22 bp, Artificial Sequence
  Synthetic oligonucleotide; TTC chr11 5263671 5263692 5263688 5263693 +
tttgaaaagataaataaaactg

SEQ ID NO: 90717 - DNA, 22 bp, Artificial Sequence
  Synthetic oligonucleotide; CTT chr11 5263673 5263694 5263690 5263695 +
tgaaaagataaataaaactgat

SEQ ID NO: 90718 - DNA, 22 bp, Artificial Sequence
  Synthetic oligonucleotide; TTT chr11 5263674 5263695 5263691 5263696 +
gaaaagataaataaaactgata

SEQ ID NO: 90719 - DNA, 22 bp, Artificial Sequence
  Synthetic oligonucleotide; TTG chr11 5263675 5263696 5263692 5263697 +
aaaagataaataaaactgatag

SEQ ID NO: 90720 - DNA, 22 bp, Artificial Sequence
  Synthetic oligonucleotide; CTG chr11 5263693 5263714 5263710 5263715 +
atagaccattagcaagattaac

SEQ ID NO: 90721 - DNA, 22 bp, Artificial Sequence
  Synthetic oligonucleotide; TTA chr11 5263704 5263725 5263721 5263726 +
gcaagattaaccaagaaaagag

SEQ ID NO: 90722 - DNA, 22 bp, Artificial Sequence
  Synthetic oligonucleotide; TTA chr11 5263713 5263734 5263730 5263735 +
accaagaaaagaggagagaagt

SEQ ID NO: 90723 - DNA, 22 bp, Artificial Sequence
  Synthetic oligonucleotide; CTC chr11 5263747 5263768 5263764 5263769 +
aattagaaacaaaacaggagat

SEQ ID NO: 90724 - DNA, 22 bp, Artificial Sequence
  Synthetic oligonucleotide; TTA chr11 5263752 5263773 5263769 5263774 +
gaaacaaaacaggagatactat

SEQ ID NO: 90725 - DNA, 22 bp, Artificial Sequence
  Synthetic oligonucleotide; CTA chr11 5263773 5263794 5263790 5263795 +
ttactgataccacagaaataca

SEQ ID NO: 90726 - DNA, 22 bp, Artificial Sequence
  Synthetic oligonucleotide; TTA chr11 5263776 5263797 5263793 5263798 +
ctgataccacagaaatacaaaa

SEQ ID NO: 90727 - DNA, 22 bp, Artificial Sequence
  Synthetic oligonucleotide; CTG chr11 5263779 5263800 5263796 5263801 +
ataccacagaaatacaaaagat

SEQ ID NO: 90728 - DNA, 22 bp, Artificial Sequence
  Synthetic oligonucleotide; TTA chr11 5263803 5263824 5263820 5263825 +
ttcaaggctactatgaacacct

SEQ ID NO: 90729 - DNA, 22 bp, Artificial Sequence
  Synthetic oligonucleotide; TTC chr11 5263806 5263827 5263823 5263828 +
aaggctactatgaacaccttta

SEQ ID NO: 90730 - DNA, 22 bp, Artificial Sequence
  Synthetic oligonucleotide; CTA chr11 5263813 5263834 5263830 5263835 +
ctatgaacacctttacatgcat

SEQ ID NO: 90731 - DNA, 22 bp, Artificial Sequence
  Synthetic oligonucleotide; CTA chr11 5263816 5263837 5263833 5263838 +
tgaacacctttacatgcataaa

SEQ ID NO: 90732 - DNA, 22 bp, Artificial Sequence
  Synthetic oligonucleotide; CTT chr11 5263826 5263847 5263843 5263848 +
tacatgcataaactagaaaacc

SEQ ID NO: 90733 - DNA, 22 bp, Artificial Sequence
  Synthetic oligonucleotide; TTT chr11 5263827 5263848 5263844 5263849 +
acatgcataaactagaaaacct

SEQ ID NO: 90734 - DNA, 22 bp, Artificial Sequence
  Synthetic oligonucleotide; TTA chr11 5263828 5263849 5263845 5263850 +
catgcataaactagaaaaccta

SEQ ID NO: 90735 - DNA, 22 bp, Artificial Sequence
  Synthetic oligonucleotide; CTA chr11 5263841 5263862 5263858 5263863 +
gaaaacctaaaggagacgttcg

SEQ ID NO: 90736 - DNA, 22 bp, Artificial Sequence
  Synthetic oligonucleotide; CTA chr11 5263850 5263871 5263867 5263872 +
aaggagacgttcgaattcctgg

SEQ ID NO: 90737 - DNA, 22 bp, Artificial Sequence
  Synthetic oligonucleotide; TTC chr11 5263862 5263883 5263879 5263884 +
gaattcctggaaagatacaggg

SEQ ID NO: 90738 - DNA, 22 bp, Artificial Sequence
  Synthetic oligonucleotide; TTC chr11 5263868 5263889 5263885 5263890 +
ctggaaagatacagggctctag

SEQ ID NO: 90739 - DNA, 22 bp, Artificial Sequence
  Synthetic oligonucleotide; CTG chr11 5263871 5263892 5263888 5263893 +
gaaagatacagggctctagctt

SEQ ID NO: 90740 - DNA, 22 bp, Artificial Sequence
  Synthetic oligonucleotide; CTC chr11 5263887 5263908 5263904 5263909 +
tagcttaagtcaggaagaatta

SEQ ID NO: 90741 - DNA, 22 bp, Artificial Sequence
  Synthetic oligonucleotide; CTA chr11 5263889 5263910 5263906 5263911 +
gcttaagtcaggaagaattaga

SEQ ID NO: 90742 - DNA, 22 bp, Artificial Sequence
  Synthetic oligonucleotide; CTT chr11 5263893 5263914 5263910 5263915 +
aagtcaggaagaattagatacc

SEQ ID NO: 90743 - DNA, 22 bp, Artificial Sequence
  Synthetic oligonucleotide; TTA chr11 5263894 5263915 5263911 5263916 +
agtcaggaagaattagataccc

SEQ ID NO: 90744 - DNA, 22 bp, Artificial Sequence
  Synthetic oligonucleotide; TTA chr11 5263909 5263930 5263926 5263931 +
gataccctgaacagaccagtaa

SEQ ID NO: 90745 - DNA, 22 bp, Artificial Sequence
  Synthetic oligonucleotide; CTG chr11 5263918 5263939 5263935 5263940 +
aacagaccagtaataagcagca

SEQ ID NO: 90746 - DNA, 22 bp, Artificial Sequence
  Synthetic oligonucleotide; CTG chr11 5263946 5263967 5263963 5263968 +
aaatgataataaaaatttacca

SEQ ID NO: 90747 - DNA, 22 bp, Artificial Sequence
  Synthetic oligonucleotide; TTT chr11 5263964 5263985 5263981 5263986 +
accaacaacaaaaaagtccagg

SEQ ID NO: 90748 - DNA, 22 bp, Artificial Sequence
  Synthetic oligonucleotide; TTA chr11 5263965 5263986 5263982 5263987 +
ccaacaacaaaaaagtccagga

SEQ ID NO: 90749 - DNA, 22 bp, Artificial Sequence
  Synthetic oligonucleotide; TTC chr11 5263999 5264020 5264016 5264021 +
acagctgaattctaccagacat

SEQ ID NO: 90750 - DNA, 22 bp, Artificial Sequence
  Synthetic oligonucleotide; CTG chr11 5264006 5264027 5264023 5264028 +
aattctaccagacattcaaaga

SEQ ID NO: 90751 - DNA, 22 bp, Artificial Sequence
  Synthetic oligonucleotide; TTC chr11 5264011 5264032 5264028 5264033 +
taccagacattcaaagaagaat

SEQ ID NO: 90752 - DNA, 22 bp, Artificial Sequence
  Synthetic oligonucleotide; CTA chr11 5264013 5264034 5264030 5264035 +
ccagacattcaaagaagaattg

SEQ ID NO: 90753 - DNA, 22 bp, Artificial Sequence
  Synthetic oligonucleotide; TTC chr11 5264023 5264044 5264040 5264045 +
aaagaagaattgataccaatcc

SEQ ID NO: 90754 - DNA, 22 bp, Artificial Sequence
  Synthetic oligonucleotide; TTG chr11 5264035 5264056 5264052 5264057 +
ataccaatcctattgacagtat

SEQ ID NO: 90755 - DNA, 22 bp, Artificial Sequence
  Synthetic oligonucleotide; CTA chr11 5264047 5264068 5264064 5264069 +
ttgacagtattctacaagatag

SEQ ID NO: 90756 - DNA, 22 bp, Artificial Sequence
  Synthetic oligonucleotide; TTG chr11 5264050 5264071 5264067 5264072 +
acagtattctacaagatagaga

SEQ ID NO: 90757 - DNA, 22 bp, Artificial Sequence
  Synthetic oligonucleotide; TTC chr11 5264059 5264080 5264076 5264081 +
tacaagatagagaaagagagaa

SEQ ID NO: 90758 - DNA, 22 bp, Artificial Sequence
  Synthetic oligonucleotide; CTA chr11 5264061 5264082 5264078 5264083 +
caagatagagaaagagagaatc

SEQ ID NO: 90759 - DNA, 22 bp, Artificial Sequence
  Synthetic oligonucleotide; CTC chr11 5264086 5264107 5264103 5264108 +
cctaaatcattctatgaagcca

SEQ ID NO: 90760 - DNA, 22 bp, Artificial Sequence
  Synthetic oligonucleotide; CTA chr11 5264090 5264111 5264107 5264112 +
aatcattctatgaagccagtat

SEQ ID NO: 90761 - DNA, 22 bp, Artificial Sequence
  Synthetic oligonucleotide; TTC chr11 5264098 5264119 5264115 5264120 +
tatgaagccagtatcaccttaa

SEQ ID NO: 90762 - DNA, 22 bp, Artificial Sequence
  Synthetic oligonucleotide; CTA chr11 5264100 5264121 5264117 5264122 +
tgaagccagtatcaccttaata

SEQ ID NO: 90763 - DNA, 22 bp, Artificial Sequence
  Synthetic oligonucleotide; CTT chr11 5264118 5264139 5264135 5264140 +
aataccaaaactgggaaagaac

SEQ ID NO: 90764 - DNA, 22 bp, Artificial Sequence
  Synthetic oligonucleotide; TTA chr11 5264119 5264140 5264136 5264141 +
ataccaaaactgggaaagaaca

SEQ ID NO: 90765 - DNA, 22 bp, Artificial Sequence
  Synthetic oligonucleotide; CTG chr11 5264131 5264152 5264148 5264153 +
ggaaagaacataaccaaaaaaa

SEQ ID NO: 90766 - DNA, 22 bp, Artificial Sequence
  Synthetic oligonucleotide; CTA chr11 5264163 5264184 5264180 5264185 +
cagatcaatatccctgatgaac

SEQ ID NO: 90767 - DNA, 22 bp, Artificial Sequence
  Synthetic oligonucleotide; CTG chr11 5264179 5264200 5264196 5264201 +
atgaacatagatgccaacatcc

SEQ ID NO: 90768 - DNA, 22 bp, Artificial Sequence
  Synthetic oligonucleotide; CTT chr11 5264203 5264224 5264220 5264225 +
gacaaaatactagctaatagca

SEQ ID NO: 90769 - DNA, 22 bp, Artificial Sequence
  Synthetic oligonucleotide; TTG chr11 5264204 5264225 5264221 5264226 +
acaaaatactagctaatagcat

SEQ ID NO: 90770 - DNA, 22 bp, Artificial Sequence
  Synthetic oligonucleotide; CTA chr11 5264215 5264236 5264232 5264237 +
gctaatagcatccgacagcata

SEQ ID NO: 90771 - DNA, 22 bp, Artificial Sequence
  Synthetic oligonucleotide; CTA chr11 5264219 5264240 5264236 5264241 +
atagcatccgacagcatatcaa

SEQ ID NO: 90772 - DNA, 22 bp, Artificial Sequence
  Synthetic oligonucleotide; TTT chr11 5264262 5264283 5264279 5264284 +
catgcgagggatgcacggatgg

SEQ ID NO: 90773 - DNA, 22 bp, Artificial Sequence
  Synthetic oligonucleotide; TTC chr11 5264263 5264284 5264280 5264285 +
atgcgagggatgcacggatggt

SEQ ID NO: 90774 - DNA, 22 bp, Artificial Sequence
  Synthetic oligonucleotide; TTT chr11 5264287 5264308 5264304 5264309 +
aacatacgcaagtcaataagtg

SEQ ID NO: 90775 - DNA, 22 bp, Artificial Sequence
  Synthetic oligonucleotide; TTA chr11 5264288 5264309 5264305 5264310 +
acatacgcaagtcaataagtgt

SEQ ID NO: 90776 - DNA, 22 bp, Artificial Sequence
  Synthetic oligonucleotide; TTG chr11 5264333 5264354 5264350 5264355 +
gaaacaaaaatcatgtgattat

SEQ ID NO: 90777 - DNA, 22 bp, Artificial Sequence
  Synthetic oligonucleotide; TTA chr11 5264354 5264375 5264371 5264376 +
tctcaatagccacagaaactgc

SEQ ID NO: 90778 - DNA, 22 bp, Artificial Sequence
  Synthetic oligonucleotide; CTC chr11 5264358 5264379 5264375 5264380 +
aatagccacagaaactgcattc

SEQ ID NO: 90779 - DNA, 22 bp, Artificial Sequence
  Synthetic oligonucleotide; CTG chr11 5264375 5264396 5264392 5264397 +
cattcaacaaaattcaacatca

SEQ ID NO: 90780 - DNA, 22 bp, Artificial Sequence
  Synthetic oligonucleotide; TTC chr11 5264380 5264401 5264397 5264402 +
aacaaaattcaacatcacttta

SEQ ID NO: 90781 - DNA, 22 bp, Artificial Sequence
  Synthetic oligonucleotide; TTC chr11 5264390 5264411 5264407 5264412 +
aacatcactttatgactaaaac

SEQ ID NO: 90782 - DNA, 22 bp, Artificial Sequence
  Synthetic oligonucleotide; CTT chr11 5264400 5264421 5264417 5264422 +
tatgactaaaactcagcaaaat

SEQ ID NO: 90783 - DNA, 22 bp, Artificial Sequence
  Synthetic oligonucleotide; TTT chr11 5264401 5264422 5264418 5264423 +
atgactaaaactcagcaaaatc

SEQ ID NO: 90784 - DNA, 22 bp, Artificial Sequence
  Synthetic oligonucleotide; TTA chr11 5264402 5264423 5264419 5264424 +
tgactaaaactcagcaaaatcg

SEQ ID NO: 90785 - DNA, 22 bp, Artificial Sequence
  Synthetic oligonucleotide; CTA chr11 5264408 5264429 5264425 5264430 +
aaactcagcaaaatcggtttac

SEQ ID NO: 90786 - DNA, 22 bp, Artificial Sequence
  Synthetic oligonucleotide; CTC chr11 5264414 5264435 5264431 5264436 +
agcaaaatcggtttacaaagga

SEQ ID NO: 90787 - DNA, 22 bp, Artificial Sequence
  Synthetic oligonucleotide; TTT chr11 5264428 5264449 5264445 5264450 +
acaaaggacatacctcaatgta

SEQ ID NO: 90788 - DNA, 22 bp, Artificial Sequence
  Synthetic oligonucleotide; TTA chr11 5264429 5264450 5264446 5264451 +
caaaggacatacctcaatgtaa

SEQ ID NO: 90789 - DNA, 22 bp, Artificial Sequence
  Synthetic oligonucleotide; CTC chr11 5264444 5264465 5264461 5264466 +
aatgtaataaaagccagctatg

SEQ ID NO: 90790 - DNA, 22 bp, Artificial Sequence
  Synthetic oligonucleotide; CTA chr11 5264464 5264485 5264481 5264486 +
tggtaaacacacagccaacatt

SEQ ID NO: 90791 - DNA, 22 bp, Artificial Sequence
  Synthetic oligonucleotide; TTA chr11 5264487 5264508 5264504 5264509 +
tattgaatgggaaaaagttaaa

SEQ ID NO: 90792 - DNA, 22 bp, Artificial Sequence
  Synthetic oligonucleotide; TTG chr11 5264492 5264513 5264509 5264514 +
aatgggaaaaagttaaaagcat

SEQ ID NO: 90793 - DNA, 22 bp, Artificial Sequence
  Synthetic oligonucleotide; TTA chr11 5264507 5264528 5264524 5264529 +
aaagcattctgtctgaaaactg

SEQ ID NO: 90794 - DNA, 22 bp, Artificial Sequence
  Synthetic oligonucleotide; TTC chr11 5264516 5264537 5264533 5264538 +
tgtctgaaaactggaatgagac

SEQ ID NO: 90795 - DNA, 22 bp, Artificial Sequence
  Synthetic oligonucleotide; CTG chr11 5264518 5264539 5264535 5264540 +
tctgaaaactggaatgagacaa

SEQ ID NO: 90796 - DNA, 22 bp, Artificial Sequence
  Synthetic oligonucleotide; CTG chr11 5264522 5264543 5264539 5264544 +
aaaactggaatgagacaaggat

SEQ ID NO: 90797 - DNA, 22 bp, Artificial Sequence
  Synthetic oligonucleotide; CTG chr11 5264529 5264550 5264546 5264551 +
gaatgagacaaggatacccact

SEQ ID NO: 90798 - DNA, 22 bp, Artificial Sequence
  Synthetic oligonucleotide; CTC chr11 5264552 5264573 5264569 5264574 +
tcaccacttctctttaacatat

SEQ ID NO: 90799 - DNA, 22 bp, Artificial Sequence
  Synthetic oligonucleotide; CTC chr11 5264554 5264575 5264571 5264576 +
accacttctctttaacatatta

SEQ ID NO: 90800 - DNA, 22 bp, Artificial Sequence
  Synthetic oligonucleotide; CTT chr11 5264561 5264582 5264578 5264583 +
ctctttaacatattactggaag

SEQ ID NO: 90801 - DNA, 22 bp, Artificial Sequence
  Synthetic oligonucleotide; TTC chr11 5264562 5264583 5264579 5264584 +
tctttaacatattactggaagt

SEQ ID NO: 90802 - DNA, 22 bp, Artificial Sequence
  Synthetic oligonucleotide; CTC chr11 5264564 5264585 5264581 5264586 +
tttaacatattactggaagtcc

SEQ ID NO: 90803 - DNA, 22 bp, Artificial Sequence
  Synthetic oligonucleotide; CTT chr11 5264566 5264587 5264583 5264588 +
taacatattactggaagtccta

SEQ ID NO: 90804 - DNA, 22 bp, Artificial Sequence
  Synthetic oligonucleotide; TTT chr11 5264567 5264588 5264584 5264589 +
aacatattactggaagtcctag

SEQ ID NO: 90805 - DNA, 22 bp, Artificial Sequence
  Synthetic oligonucleotide; TTA chr11 5264568 5264589 5264585 5264590 +
acatattactggaagtcctagc

SEQ ID NO: 90806 - DNA, 22 bp, Artificial Sequence
  Synthetic oligonucleotide; TTA chr11 5264576 5264597 5264593 5264598 +
ctggaagtcctagcaagagcaa

SEQ ID NO: 90807 - DNA, 22 bp, Artificial Sequence
  Synthetic oligonucleotide; CTG chr11 5264579 5264600 5264596 5264601 +
gaagtcctagcaagagcaatca

SEQ ID NO: 90808 - DNA, 22 bp, Artificial Sequence
  Synthetic oligonucleotide; CTA chr11 5264588 5264609 5264605 5264610 +
gcaagagcaatcagacaagaga

SEQ ID NO: 90809 - DNA, 22 bp, Artificial Sequence
  Synthetic oligonucleotide; TTG chr11 5264634 5264655 5264651 5264656 +
ttaaagagaaagtcaaactgtc

SEQ ID NO: 90810 - DNA, 22 bp, Artificial Sequence
  Synthetic oligonucleotide; TTA chr11 5264637 5264658 5264654 5264659 +
aagagaaagtcaaactgtcact

SEQ ID NO: 90811 - DNA, 22 bp, Artificial Sequence
  Synthetic oligonucleotide; CTG chr11 5264654 5264675 5264671 5264676 +
tcactgtttgctgatgatatga

SEQ ID NO: 90812 - DNA, 22 bp, Artificial Sequence
  Synthetic oligonucleotide; CTG chr11 5264660 5264681 5264677 5264682 +
tttgctgatgatatgattgtgt

SEQ ID NO: 90813 - DNA, 22 bp, Artificial Sequence
  Synthetic oligonucleotide; TTT chr11 5264663 5264684 5264680 5264685 +
gctgatgatatgattgtgtatg

SEQ ID NO: 90814 - DNA, 22 bp, Artificial Sequence
  Synthetic oligonucleotide; TTG chr11 5264664 5264685 5264681 5264686 +
ctgatgatatgattgtgtatgt

SEQ ID NO: 90815 - DNA, 22 bp, Artificial Sequence
  Synthetic oligonucleotide; CTG chr11 5264667 5264688 5264684 5264689 +
atgatatgattgtgtatgtaga

SEQ ID NO: 90816 - DNA, 22 bp, Artificial Sequence
  Synthetic oligonucleotide; TTG chr11 5264679 5264700 5264696 5264701 +
tgtatgtagaaaactctaaaga

SEQ ID NO: 90817 - DNA, 22 bp, Artificial Sequence
  Synthetic oligonucleotide; CTC chr11 5264695 5264716 5264712 5264717 +
taaagactcctccaaaaccccc

SEQ ID NO: 90818 - DNA, 22 bp, Artificial Sequence
  Synthetic oligonucleotide; CTA chr11 5264697 5264718 5264714 5264719 +
aagactcctccaaaacccccta

SEQ ID NO: 90819 - DNA, 22 bp, Artificial Sequence
  Synthetic oligonucleotide; CTC chr11 5264704 5264725 5264721 5264726 +
ctccaaaaccccctagaactga

SEQ ID NO: 90820 - DNA, 22 bp, Artificial Sequence
  Synthetic oligonucleotide; CTC chr11 5264707 5264728 5264724 5264729 +
caaaaccccctagaactgataa

SEQ ID NO: 90821 - DNA, 22 bp, Artificial Sequence
  Synthetic oligonucleotide; CTA chr11 5264719 5264740 5264736 5264741 +
gaactgataaaataattcagca

SEQ ID NO: 90822 - DNA, 22 bp, Artificial Sequence
  Synthetic oligonucleotide; CTG chr11 5264725 5264746 5264742 5264747 +
ataaaataattcagcaaagttt

SEQ ID NO: 90823 - DNA, 22 bp, Artificial Sequence
  Synthetic oligonucleotide; TTC chr11 5264737 5264758 5264754 5264759 +
agcaaagtttctggatacaaaa

SEQ ID NO: 90824 - DNA, 22 bp, Artificial Sequence
  Synthetic oligonucleotide; TTT chr11 5264747 5264768 5264764 5264769 +
ctggatacaaaattaacgtaca

SEQ ID NO: 90825 - DNA, 22 bp, Artificial Sequence
  Synthetic oligonucleotide; TTC chr11 5264748 5264769 5264765 5264770 +
tggatacaaaattaacgtacac

SEQ ID NO: 90826 - DNA, 22 bp, Artificial Sequence
  Synthetic oligonucleotide; CTG chr11 5264750 5264771 5264767 5264772 +
gatacaaaattaacgtacacca

SEQ ID NO: 90827 - DNA, 22 bp, Artificial Sequence
  Synthetic oligonucleotide; TTA chr11 5264762 5264783 5264779 5264784 +
acgtacaccaatgagttgcttt

SEQ ID NO: 90828 - DNA, 22 bp, Artificial Sequence
  Synthetic oligonucleotide; TTG chr11 5264780 5264801 5264797 5264802 +
ctttcttacataccagcaatga

SEQ ID NO: 90829 - DNA, 22 bp, Artificial Sequence
  Synthetic oligonucleotide; CTT chr11 5264783 5264804 5264800 5264805 +
tcttacataccagcaatgacca

SEQ ID NO: 90830 - DNA, 22 bp, Artificial Sequence
  Synthetic oligonucleotide; TTT chr11 5264784 5264805 5264801 5264806 +
cttacataccagcaatgaccaa

SEQ ID NO: 90831 - DNA, 22 bp, Artificial Sequence
  Synthetic oligonucleotide; TTC chr11 5264785 5264806 5264802 5264807 +
ttacataccagcaatgaccaag

SEQ ID NO: 90832 - DNA, 22 bp, Artificial Sequence
  Synthetic oligonucleotide; CTT chr11 5264787 5264808 5264804 5264809 +
acataccagcaatgaccaagct

SEQ ID NO: 90833 - DNA, 22 bp, Artificial Sequence
  Synthetic oligonucleotide; TTA chr11 5264788 5264809 5264805 5264810 +
cataccagcaatgaccaagctg

SEQ ID NO: 90834 - DNA, 22 bp, Artificial Sequence
  Synthetic oligonucleotide; CTG chr11 5264810 5264831 5264827 5264832 +
agaataaaatcaagaactcaac

SEQ ID NO: 90835 - DNA, 22 bp, Artificial Sequence
  Synthetic oligonucleotide; CTC chr11 5264829 5264850 5264846 5264851 +
aaccccttttacaatagctgca

SEQ ID NO: 90836 - DNA, 22 bp, Artificial Sequence
  Synthetic oligonucleotide; CTT chr11 5264837 5264858 5264854 5264859 +
ttacaatagctgcaaaaaacaa

SEQ ID NO: 90837 - DNA, 22 bp, Artificial Sequence
  Synthetic oligonucleotide; TTT chr11 5264838 5264859 5264855 5264860 +
tacaatagctgcaaaaaacaaa

SEQ ID NO: 90838 - DNA, 22 bp, Artificial Sequence
  Synthetic oligonucleotide; TTT chr11 5264839 5264860 5264856 5264861 +
acaatagctgcaaaaaacaaaa

SEQ ID NO: 90839 - DNA, 22 bp, Artificial Sequence
  Synthetic oligonucleotide; TTA chr11 5264840 5264861 5264857 5264862 +
caatagctgcaaaaaacaaaac

SEQ ID NO: 90840 - DNA, 22 bp, Artificial Sequence
  Synthetic oligonucleotide; CTG chr11 5264849 5264870 5264866 5264871 +
caaaaaacaaaacaaaacaaaa

SEQ ID NO: 90841 - DNA, 22 bp, Artificial Sequence
  Synthetic oligonucleotide; CTT chr11 5264880 5264901 5264897 5264902 +
aggaatatatacctaaccaagg

SEQ ID NO: 90842 - DNA, 22 bp, Artificial Sequence
  Synthetic oligonucleotide; TTA chr11 5264881 5264902 5264898 5264903 +
ggaatatatacctaaccaagga

SEQ ID NO: 90843 - DNA, 22 bp, Artificial Sequence
  Synthetic oligonucleotide; CTA chr11 5264895 5264916 5264912 5264917 +
accaaggaggtgaaagacatct

SEQ ID NO: 90844 - DNA, 22 bp, Artificial Sequence
  Synthetic oligonucleotide; CTA chr11 5264918 5264939 5264935 5264940 +
caaggaaaactacaaaacacgg

SEQ ID NO: 90845 - DNA, 22 bp, Artificial Sequence
  Synthetic oligonucleotide; CTA chr11 5264930 5264951 5264947 5264952 +
caaaacacggctgaaagtaatc

SEQ ID NO: 90846 - DNA, 22 bp, Artificial Sequence
  Synthetic oligonucleotide; CTG chr11 5264943 5264964 5264960 5264965 +
aaagtaatcatataagacacaa

SEQ ID NO: 90847 - DNA, 22 bp, Artificial Sequence
  Synthetic oligonucleotide; TTC chr11 5264988 5265009 5265005 5265010 +
tcatagatgggtagaatcaata

SEQ ID NO: 90848 - DNA, 22 bp, Artificial Sequence
  Synthetic oligonucleotide; CTC chr11 5264990 5265011 5265007 5265012 +
atagatgggtagaatcaatatt

SEQ ID NO: 90849 - DNA, 22 bp, Artificial Sequence
  Synthetic oligonucleotide; TTG chr11 5265013 5265034 5265030 5265035 +
tgaaaatggccataatgccaga

SEQ ID NO: 90850 - DNA, 22 bp, Artificial Sequence
  Synthetic oligonucleotide; CTA chr11 5265044 5265065 5265061 5265066 +
caaattcattgcaattcccatc

SEQ ID NO: 90851 - DNA, 22 bp, Artificial Sequence
  Synthetic oligonucleotide; TTC chr11 5265051 5265072 5265068 5265073 +
attgcaattcccatcaaaatac

SEQ ID NO: 90852 - DNA, 22 bp, Artificial Sequence
  Synthetic oligonucleotide; TTG chr11 5265055 5265076 5265072 5265077 +
caattcccatcaaaataccacc

SEQ ID NO: 90853 - DNA, 22 bp, Artificial Sequence
  Synthetic oligonucleotide; TTC chr11 5265061 5265082 5265078 5265083 +
ccatcaaaataccaccattagt

SEQ ID NO: 90854 - DNA, 22 bp, Artificial Sequence
  Synthetic oligonucleotide; TTA chr11 5265081 5265102 5265098 5265103 +
gtcttcacagaactagaaaaaa

SEQ ID NO: 90855 - DNA, 22 bp, Artificial Sequence
  Synthetic oligonucleotide; CTT chr11 5265086 5265107 5265103 5265108 +
cacagaactagaaaaaacaatc

SEQ ID NO: 90856 - DNA, 22 bp, Artificial Sequence
  Synthetic oligonucleotide; TTC chr11 5265087 5265108 5265104 5265109 +
acagaactagaaaaaacaatcc

SEQ ID NO: 90857 - DNA, 22 bp, Artificial Sequence
  Synthetic oligonucleotide; CTA chr11 5265096 5265117 5265113 5265118 +
gaaaaaacaatcctaaaattct

SEQ ID NO: 90858 - DNA, 22 bp, Artificial Sequence
  Synthetic oligonucleotide; CTA chr11 5265111 5265132 5265128 5265133 +
aaattcttatggaaccaaaaaa

SEQ ID NO: 90859 - DNA, 22 bp, Artificial Sequence
  Synthetic oligonucleotide; TTC chr11 5265117 5265138 5265134 5265139 +
ttatggaaccaaaaaagagccc

SEQ ID NO: 90860 - DNA, 22 bp, Artificial Sequence
  Synthetic oligonucleotide; CTT chr11 5265119 5265140 5265136 5265141 +
atggaaccaaaaaagagcccaa

SEQ ID NO: 90861 - DNA, 22 bp, Artificial Sequence
  Synthetic oligonucleotide; TTA chr11 5265120 5265141 5265137 5265142 +
tggaaccaaaaaagagcccaat

SEQ ID NO: 90862 - DNA, 22 bp, Artificial Sequence
  Synthetic oligonucleotide; CTA chr11 5265157 5265178 5265174 5265179 +
aaaaaaagaacaaatctgaagg

SEQ ID NO: 90863 - DNA, 22 bp, Artificial Sequence
  Synthetic oligonucleotide; CTG chr11 5265175 5265196 5265192 5265197 +
aaggcattacattacctcattt

SEQ ID NO: 90864 - DNA, 22 bp, Artificial Sequence
  Synthetic oligonucleotide; TTA chr11 5265184 5265205 5265201 5265206 +
cattacctcatttcaaactata

SEQ ID NO: 90865 - DNA, 22 bp, Artificial Sequence
  Synthetic oligonucleotide; TTA chr11 5265189 5265210 5265206 5265211 +
cctcatttcaaactatacaata

SEQ ID NO: 90866 - DNA, 22 bp, Artificial Sequence
  Synthetic oligonucleotide; CTC chr11 5265193 5265214 5265210 5265215 +
atttcaaactatacaataaggc

SEQ ID NO: 90867 - DNA, 22 bp, Artificial Sequence
  Synthetic oligonucleotide; TTT chr11 5265197 5265218 5265214 5265219 +
caaactatacaataaggccata

SEQ ID NO: 90868 - DNA, 22 bp, Artificial Sequence
  Synthetic oligonucleotide; TTC chr11 5265198 5265219 5265215 5265220 +
aaactatacaataaggccatag

SEQ ID NO: 90869 - DNA, 22 bp, Artificial Sequence
  Synthetic oligonucleotide; CTA chr11 5265204 5265225 5265221 5265226 +
tacaataaggccatagtcacca

SEQ ID NO: 90870 - DNA, 22 bp, Artificial Sequence
  Synthetic oligonucleotide; CTG chr11 5265242 5265263 5265259 5265264 +
gtgtacaaataggcacatcgac

SEQ ID NO: 90871 - DNA, 22 bp, Artificial Sequence
  Synthetic oligonucleotide; CTC chr11 5265299 5265320 5265316 5265321 +
aaatacttacatccaactgatc

SEQ ID NO: 90872 - DNA, 22 bp, Artificial Sequence
  Synthetic oligonucleotide; CTT chr11 5265307 5265328 5265324 5265329 +
acatccaactgatctttgacaa

SEQ ID NO: 90873 - DNA, 22 bp, Artificial Sequence
  Synthetic oligonucleotide; TTA chr11 5265308 5265329 5265325 5265330 +
catccaactgatctttgacaaa

SEQ ID NO: 90874 - DNA, 22 bp, Artificial Sequence
  Synthetic oligonucleotide; CTG chr11 5265318 5265339 5265335 5265340 +
atctttgacaaagcaaacaaaa

SEQ ID NO: 90875 - DNA, 22 bp, Artificial Sequence
  Synthetic oligonucleotide; CTT chr11 5265323 5265344 5265340 5265345 +
tgacaaagcaaacaaaaacata

SEQ ID NO: 90876 - DNA, 22 bp, Artificial Sequence
  Synthetic oligonucleotide; TTT chr11 5265324 5265345 5265341 5265346 +
gacaaagcaaacaaaaacataa

SEQ ID NO: 90877 - DNA, 22 bp, Artificial Sequence
  Synthetic oligonucleotide; TTG chr11 5265325 5265346 5265342 5265347 +
acaaagcaaacaaaaacataaa

SEQ ID NO: 90878 - DNA, 22 bp, Artificial Sequence
  Synthetic oligonucleotide; CTA chr11 5265366 5265387 5265383 5265388 +
ttcaacaaatggtgcggggata

SEQ ID NO: 90879 - DNA, 22 bp, Artificial Sequence
  Synthetic oligonucleotide; TTC chr11 5265369 5265390 5265386 5265391 +
aacaaatggtgcggggatagct

SEQ ID NO: 90880 - DNA, 22 bp, Artificial Sequence
  Synthetic oligonucleotide; CTG chr11 5265392 5265413 5265409 5265414 +
gcaagctacatgtaggagaatg

SEQ ID NO: 90881 - DNA, 22 bp, Artificial Sequence
  Synthetic oligonucleotide; CTA chr11 5265400 5265421 5265417 5265422 +
catgtaggagaatgaaactgga

SEQ ID NO: 90882 - DNA, 22 bp, Artificial Sequence
  Synthetic oligonucleotide; CTG chr11 5265420 5265441 5265437 5265442 +
gatcttcatctctcaccttata

SEQ ID NO: 90883 - DNA, 22 bp, Artificial Sequence
  Synthetic oligonucleotide; CTT chr11 5265426 5265447 5265443 5265448 +
catctctcaccttatacaaaaa

SEQ ID NO: 90884 - DNA, 22 bp, Artificial Sequence
  Synthetic oligonucleotide; TTC chr11 5265427 5265448 5265444 5265449 +
atctctcaccttatacaaaaat

SEQ ID NO: 90885 - DNA, 22 bp, Artificial Sequence
  Synthetic oligonucleotide; CTC chr11 5265432 5265453 5265449 5265454 +
tcaccttatacaaaaatcaact

SEQ ID NO: 90886 - DNA, 22 bp, Artificial Sequence
  Synthetic oligonucleotide; CTC chr11 5265434 5265455 5265451 5265456 +
accttatacaaaaatcaactca

SEQ ID NO: 90887 - DNA, 22 bp, Artificial Sequence
  Synthetic oligonucleotide; CTT chr11 5265439 5265460 5265456 5265461 +
atacaaaaatcaactcaagatg

SEQ ID NO: 90888 - DNA, 22 bp, Artificial Sequence
  Synthetic oligonucleotide; TTA chr11 5265440 5265461 5265457 5265462 +
tacaaaaatcaactcaagatgg

SEQ ID NO: 90889 - DNA, 22 bp, Artificial Sequence
  Synthetic oligonucleotide; CTC chr11 5265455 5265476 5265472 5265477 +
aagatggatcaaggacttaaat

SEQ ID NO: 90890 - DNA, 22 bp, Artificial Sequence
  Synthetic oligonucleotide; CTT chr11 5265473 5265494 5265490 5265495 +
aaatctaagccctgaaactgta

SEQ ID NO: 90891 - DNA, 22 bp, Artificial Sequence
  Synthetic oligonucleotide; TTA chr11 5265474 5265495 5265491 5265496 +
aatctaagccctgaaactgtaa

SEQ ID NO: 90892 - DNA, 22 bp, Artificial Sequence
  Synthetic oligonucleotide; CTA chr11 5265480 5265501 5265497 5265502 +
agccctgaaactgtaacaattc

SEQ ID NO: 90893 - DNA, 22 bp, Artificial Sequence
  Synthetic oligonucleotide; CTG chr11 5265487 5265508 5265504 5265509 +
aaactgtaacaattctagaaaa

SEQ ID NO: 90894 - DNA, 22 bp, Artificial Sequence
  Synthetic oligonucleotide; CTG chr11 5265493 5265514 5265510 5265515 +
taacaattctagaaaataacat

SEQ ID NO: 90895 - DNA, 22 bp, Artificial Sequence
  Synthetic oligonucleotide; TTC chr11 5265502 5265523 5265519 5265524 +
tagaaaataacatcggaaaaac

SEQ ID NO: 90896 - DNA, 22 bp, Artificial Sequence
  Synthetic oligonucleotide; CTA chr11 5265504 5265525 5265521 5265526 +
gaaaataacatcggaaaaaccc

SEQ ID NO: 90897 - DNA, 22 bp, Artificial Sequence
  Synthetic oligonucleotide; CTT chr11 5265528 5265549 5265545 5265550 +
ctacacattggcttaggaaagg

SEQ ID NO: 90898 - DNA, 22 bp, Artificial Sequence
  Synthetic oligonucleotide; TTC chr11 5265529 5265550 5265546 5265551 +
tacacattggcttaggaaagga

SEQ ID NO: 90899 - DNA, 22 bp, Artificial Sequence
  Synthetic oligonucleotide; CTA chr11 5265531 5265552 5265548 5265553 +
cacattggcttaggaaaggatt

SEQ ID NO: 90900 - DNA, 22 bp, Artificial Sequence
  Synthetic oligonucleotide; TTG chr11 5265538 5265559 5265555 5265560 +
gcttaggaaaggatttcatgac

SEQ ID NO: 90901 - DNA, 22 bp, Artificial Sequence
  Synthetic oligonucleotide; CTT chr11 5265542 5265563 5265559 5265564 +
aggaaaggatttcatgaccaag

SEQ ID NO: 90902 - DNA, 22 bp, Artificial Sequence
  Synthetic oligonucleotide; TTA chr11 5265543 5265564 5265560 5265565 +
ggaaaggatttcatgaccaaga

SEQ ID NO: 90903 - DNA, 22 bp, Artificial Sequence
  Synthetic oligonucleotide; TTT chr11 5265554 5265575 5265571 5265576 +
catgaccaagaacacaaatgca

SEQ ID NO: 90904 - DNA, 22 bp, Artificial Sequence
  Synthetic oligonucleotide; TTC chr11 5265555 5265576 5265572 5265577 +
atgaccaagaacacaaatgcaa

SEQ ID NO: 90905 - DNA, 22 bp, Artificial Sequence
  Synthetic oligonucleotide; CTG chr11 5265603 5265624 5265620 5265625 +
ggactaaattaaactaaagagc

SEQ ID NO: 90906 - DNA, 22 bp, Artificial Sequence
  Synthetic oligonucleotide; CTA chr11 5265609 5265630 5265626 5265631 +
aattaaactaaagagcttttgc

SEQ ID NO: 90907 - DNA, 22 bp, Artificial Sequence
  Synthetic oligonucleotide; TTA chr11 5265614 5265635 5265631 5265636 +
aactaaagagcttttgcatggc

SEQ ID NO: 90908 - DNA, 22 bp, Artificial Sequence
  Synthetic oligonucleotide; CTA chr11 5265619 5265640 5265636 5265641 +
aagagcttttgcatggcaaaag

SEQ ID NO: 90909 - DNA, 22 bp, Artificial Sequence
  Synthetic oligonucleotide; CTT chr11 5265627 5265648 5265644 5265649 +
ttgcatggcaaaaggaagagtc

SEQ ID NO: 90910 - DNA, 22 bp, Artificial Sequence
  Synthetic oligonucleotide; TTT chr11 5265628 5265649 5265645 5265650 +
tgcatggcaaaaggaagagtct

SEQ ID NO: 90911 - DNA, 22 bp, Artificial Sequence
  Synthetic oligonucleotide; TTT chr11 5265629 5265650 5265646 5265651 +
gcatggcaaaaggaagagtctg

SEQ ID NO: 90912 - DNA, 22 bp, Artificial Sequence
  Synthetic oligonucleotide; TTG chr11 5265630 5265651 5265647 5265652 +
catggcaaaaggaagagtctgc

SEQ ID NO: 90913 - DNA, 22 bp, Artificial Sequence
  Synthetic oligonucleotide; CTG chr11 5265651 5265672 5265668 5265673 +
cagaataaacagacaacccaca

SEQ ID NO: 90914 - DNA, 22 bp, Artificial Sequence
  Synthetic oligonucleotide; CTT chr11 5265690 5265711 5265707 5265712 +
cacaatctatacatctgacaaa

SEQ ID NO: 90915 - DNA, 22 bp, Artificial Sequence
  Synthetic oligonucleotide; TTC chr11 5265691 5265712 5265708 5265713 +
acaatctatacatctgacaaaa

SEQ ID NO: 90916 - DNA, 22 bp, Artificial Sequence
  Synthetic oligonucleotide; CTA chr11 5265699 5265720 5265716 5265721 +
tacatctgacaaaagaataata

SEQ ID NO: 90917 - DNA, 22 bp, Artificial Sequence
  Synthetic oligonucleotide; CTG chr11 5265707 5265728 5265724 5265729 +
acaaaagaataatatccaggct

SEQ ID NO: 90918 - DNA, 22 bp, Artificial Sequence
  Synthetic oligonucleotide; CTC chr11 5265730 5265751 5265747 5265752 +
taaaatgaacacaaatagatta

SEQ ID NO: 90919 - DNA, 22 bp, Artificial Sequence
  Synthetic oligonucleotide; CTA chr11 5265732 5265753 5265749 5265754 +
aaatgaacacaaatagattatc

SEQ ID NO: 90920 - DNA, 22 bp, Artificial Sequence
  Synthetic oligonucleotide; TTA chr11 5265752 5265773 5265769 5265774 +
tcaagaaaataacaaacaatcc

SEQ ID NO: 90921 - DNA, 22 bp, Artificial Sequence
  Synthetic oligonucleotide; CTA chr11 5265791 5265812 5265808 5265813 +
aggacatgaacagacaattctc

SEQ ID NO: 90922 - DNA, 22 bp, Artificial Sequence
  Synthetic oligonucleotide; TTC chr11 5265811 5265832 5265828 5265833 +
tcagaaaaagatatacaaatga

SEQ ID NO: 90923 - DNA, 22 bp, Artificial Sequence
  Synthetic oligonucleotide; CTC chr11 5265813 5265834 5265830 5265835 +
agaaaaagatatacaaatgacc

SEQ ID NO: 90924 - DNA, 22 bp, Artificial Sequence
  Synthetic oligonucleotide; TTC chr11 5265856 5265877 5265873 5265878 +
tcaacatcactaatgatcaggg

SEQ ID NO: 90925 - DNA, 22 bp, Artificial Sequence
  Synthetic oligonucleotide; CTC chr11 5265858 5265879 5265875 5265880 +
aacatcactaatgatcagggaa

SEQ ID NO: 90926 - DNA, 22 bp, Artificial Sequence
  Synthetic oligonucleotide; CTA chr11 5265868 5265889 5265885 5265890 +
atgatcagggaaatgcaaatca

SEQ ID NO: 90927 - DNA, 22 bp, Artificial Sequence
  Synthetic oligonucleotide; CTA chr11 5265896 5265917 5265913 5265918 +
caatgagatatctacttactct

SEQ ID NO: 90928 - DNA, 22 bp, Artificial Sequence
  Synthetic oligonucleotide; CTA chr11 5265910 5265931 5265927 5265932 +
cttactctagttaaaacggcta

SEQ ID NO: 90929 - DNA, 22 bp, Artificial Sequence
  Synthetic oligonucleotide; CTT chr11 5265913 5265934 5265930 5265935 +
actctagttaaaacggctatta

SEQ ID NO: 90930 - DNA, 22 bp, Artificial Sequence
  Synthetic oligonucleotide; TTA chr11 5265914 5265935 5265931 5265936 +
ctctagttaaaacggctattaa

SEQ ID NO: 90931 - DNA, 22 bp, Artificial Sequence
  Synthetic oligonucleotide; CTC chr11 5265917 5265938 5265934 5265939 +
tagttaaaacggctattaacaa

SEQ ID NO: 90932 - DNA, 22 bp, Artificial Sequence
  Synthetic oligonucleotide; CTA chr11 5265919 5265940 5265936 5265941 +
gttaaaacggctattaacaaaa

SEQ ID NO: 90933 - DNA, 22 bp, Artificial Sequence
  Synthetic oligonucleotide; TTA chr11 5265923 5265944 5265940 5265945 +
aaacggctattaacaaaaaaga

SEQ ID NO: 90934 - DNA, 22 bp, Artificial Sequence
  Synthetic oligonucleotide; CTA chr11 5265932 5265953 5265949 5265954 +
ttaacaaaaaagacaaaaaata

SEQ ID NO: 90935 - DNA, 22 bp, Artificial Sequence
  Synthetic oligonucleotide; TTA chr11 5265935 5265956 5265952 5265957 +
acaaaaaagacaaaaaataaca

SEQ ID NO: 90936 - DNA, 22 bp, Artificial Sequence
  Synthetic oligonucleotide; CTT chr11 5265964 5265985 5265981 5265986 +
gtgaggatatggagaaaaggga

SEQ ID NO: 90937 - DNA, 22 bp, Artificial Sequence
  Synthetic oligonucleotide; TTG chr11 5265965 5265986 5265982 5265987 +
tgaggatatggagaaaagggaa

SEQ ID NO: 90938 - DNA, 22 bp, Artificial Sequence
  Synthetic oligonucleotide; CTC chr11 5265990 5266011 5266007 5266012 +
tttcttacacactgttggtggg

SEQ ID NO: 90939 - DNA, 22 bp, Artificial Sequence
  Synthetic oligonucleotide; CTT chr11 5265992 5266013 5266009 5266014 +
tcttacacactgttggtgggaa

SEQ ID NO: 90940 - DNA, 22 bp, Artificial Sequence
  Synthetic oligonucleotide; TTT chr11 5265993 5266014 5266010 5266015 +
cttacacactgttggtgggaat

SEQ ID NO: 90941 - DNA, 22 bp, Artificial Sequence
  Synthetic oligonucleotide; TTC chr11 5265994 5266015 5266011 5266016 +
ttacacactgttggtgggaatg

SEQ ID NO: 90942 - DNA, 22 bp, Artificial Sequence
  Synthetic oligonucleotide; CTT chr11 5265996 5266017 5266013 5266018 +
acacactgttggtgggaatgta

SEQ ID NO: 90943 - DNA, 22 bp, Artificial Sequence
  Synthetic oligonucleotide; TTA chr11 5265997 5266018 5266014 5266019 +
cacactgttggtgggaatgtaa

SEQ ID NO: 90944 - DNA, 22 bp, Artificial Sequence
  Synthetic oligonucleotide; CTG chr11 5266004 5266025 5266021 5266026 +
ttggtgggaatgtaaaatagta

SEQ ID NO: 90945 - DNA, 22 bp, Artificial Sequence
  Synthetic oligonucleotide; TTG chr11 5266007 5266028 5266024 5266029 +
gtgggaatgtaaaatagtacaa

SEQ ID NO: 90946 - DNA, 22 bp, Artificial Sequence
  Synthetic oligonucleotide; TTA chr11 5266035 5266056 5266052 5266057 +
tggaaaacagtatgaagatttc

SEQ ID NO: 90947 - DNA, 22 bp, Artificial Sequence
  Synthetic oligonucleotide; TTT chr11 5266056 5266077 5266073 5266078 +
ctcagtaaactaaaaacagaac

SEQ ID NO: 90948 - DNA, 22 bp, Artificial Sequence
  Synthetic oligonucleotide; TTC chr11 5266057 5266078 5266074 5266079 +
tcagtaaactaaaaacagaact

SEQ ID NO: 90949 - DNA, 22 bp, Artificial Sequence
  Synthetic oligonucleotide; CTC chr11 5266059 5266080 5266076 5266081 +
agtaaactaaaaacagaactat

SEQ ID NO: 90950 - DNA, 22 bp, Artificial Sequence
  Synthetic oligonucleotide; CTA chr11 5266068 5266089 5266085 5266090 +
aaaacagaactatcatacaatc

SEQ ID NO: 90951 - DNA, 22 bp, Artificial Sequence
  Synthetic oligonucleotide; CTA chr11 5266080 5266101 5266097 5266102 +
tcatacaatccagcaatctcac

SEQ ID NO: 90952 - DNA, 22 bp, Artificial Sequence
  Synthetic oligonucleotide; CTC chr11 5266100 5266121 5266117 5266122 +
actagtggttatttatccaaaa

SEQ ID NO: 90953 - DNA, 22 bp, Artificial Sequence
  Synthetic oligonucleotide; CTA chr11 5266104 5266125 5266121 5266126 +
gtggttatttatccaaaagaaa

SEQ ID NO: 90954 - DNA, 22 bp, Artificial Sequence
  Synthetic oligonucleotide; TTA chr11 5266111 5266132 5266128 5266133 +
tttatccaaaagaaaggaaatc

SEQ ID NO: 90955 - DNA, 22 bp, Artificial Sequence
  Synthetic oligonucleotide; TTT chr11 5266114 5266135 5266131 5266136 +
atccaaaagaaaggaaatcagt

SEQ ID NO: 90956 - DNA, 22 bp, Artificial Sequence
  Synthetic oligonucleotide; TTA chr11 5266115 5266136 5266132 5266137 +
tccaaaagaaaggaaatcagta

SEQ ID NO: 90957 - DNA, 22 bp, Artificial Sequence
  Synthetic oligonucleotide; TTA chr11 5266155 5266176 5266172 5266177 +
cactcatgtttattgaagcact

SEQ ID NO: 90958 - DNA, 22 bp, Artificial Sequence
  Synthetic oligonucleotide; CTC chr11 5266160 5266181 5266177 5266182 +
atgtttattgaagcactattca

SEQ ID NO: 90959 - DNA, 22 bp, Artificial Sequence
  Synthetic oligonucleotide; TTT chr11 5266166 5266187 5266183 5266188 +
attgaagcactattcacaatag

SEQ ID NO: 90960 - DNA, 22 bp, Artificial Sequence
  Synthetic oligonucleotide; TTA chr11 5266167 5266188 5266184 5266189 +
ttgaagcactattcacaatagt

SEQ ID NO: 90961 - DNA, 22 bp, Artificial Sequence
  Synthetic oligonucleotide; TTG chr11 5266170 5266191 5266187 5266192 +
aagcactattcacaatagttaa

SEQ ID NO: 90962 - DNA, 22 bp, Artificial Sequence
  Synthetic oligonucleotide; CTA chr11 5266178 5266199 5266195 5266200 +
ttcacaatagttaaggtttggg

SEQ ID NO: 90963 - DNA, 22 bp, Artificial Sequence
  Synthetic oligonucleotide; TTC chr11 5266181 5266202 5266198 5266203 +
acaatagttaaggtttgggatc

SEQ ID NO: 90964 - DNA, 22 bp, Artificial Sequence
  Synthetic oligonucleotide; TTA chr11 5266191 5266212 5266208 5266213 +
aggtttgggatcaacctaagtg

SEQ ID NO: 90965 - DNA, 22 bp, Artificial Sequence
  Synthetic oligonucleotide; TTT chr11 5266197 5266218 5266214 5266219 +
gggatcaacctaagtgtctatc

SEQ ID NO: 90966 - DNA, 22 bp, Artificial Sequence
  Synthetic oligonucleotide; TTG chr11 5266198 5266219 5266215 5266220 +
ggatcaacctaagtgtctatca

SEQ ID NO: 90967 - DNA, 22 bp, Artificial Sequence
  Synthetic oligonucleotide; CTA chr11 5266209 5266230 5266226 5266231 +
agtgtctatcaacagatgaacg

SEQ ID NO: 90968 - DNA, 22 bp, Artificial Sequence
  Synthetic oligonucleotide; CTA chr11 5266217 5266238 5266234 5266239 +
tcaacagatgaacggattaaaa

SEQ ID NO: 90969 - DNA, 22 bp, Artificial Sequence
  Synthetic oligonucleotide; TTA chr11 5266236 5266257 5266253 5266258 +
aaaaattgtatttttgcacagt

SEQ ID NO: 90970 - DNA, 22 bp, Artificial Sequence
  Synthetic oligonucleotide; TTG chr11 5266244 5266265 5266261 5266266 +
tatttttgcacagtactatttt

SEQ ID NO: 90971 - DNA, 22 bp, Artificial Sequence
  Synthetic oligonucleotide; TTT chr11 5266249 5266270 5266266 5266271 +
ttgcacagtactattttgccat

SEQ ID NO: 90972 - DNA, 22 bp, Artificial Sequence
  Synthetic oligonucleotide; TTT chr11 5266250 5266271 5266267 5266272 +
tgcacagtactattttgccatg

SEQ ID NO: 90973 - DNA, 22 bp, Artificial Sequence
  Synthetic oligonucleotide; TTT chr11 5266251 5266272 5266268 5266273 +
gcacagtactattttgccatga

SEQ ID NO: 90974 - DNA, 22 bp, Artificial Sequence
  Synthetic oligonucleotide; TTG chr11 5266252 5266273 5266269 5266274 +
cacagtactattttgccatgaa

SEQ ID NO: 90975 - DNA, 22 bp, Artificial Sequence
  Synthetic oligonucleotide; CTA chr11 5266262 5266283 5266279 5266284 +
ttttgccatgaaaaagaatgaa

SEQ ID NO: 90976 - DNA, 22 bp, Artificial Sequence
  Synthetic oligonucleotide; TTT chr11 5266265 5266286 5266282 5266287 +
tgccatgaaaaagaatgaaatc

SEQ ID NO: 90977 - DNA, 22 bp, Artificial Sequence
  Synthetic oligonucleotide; TTT chr11 5266266 5266287 5266283 5266288 +
gccatgaaaaagaatgaaatct

SEQ ID NO: 90978 - DNA, 22 bp, Artificial Sequence
  Synthetic oligonucleotide; TTG chr11 5266267 5266288 5266284 5266289 +
ccatgaaaaagaatgaaatctt

SEQ ID NO: 90979 - DNA, 22 bp, Artificial Sequence
  Synthetic oligonucleotide; CTT chr11 5266289 5266310 5266306 5266311 +
gtcatttgtagcaacatggatg

SEQ ID NO: 90980 - DNA, 22 bp, Artificial Sequence
  Synthetic oligonucleotide; TTG chr11 5266290 5266311 5266307 5266312 +
tcatttgtagcaacatggatgg

SEQ ID NO: 90981 - DNA, 22 bp, Artificial Sequence
  Synthetic oligonucleotide; TTT chr11 5266296 5266317 5266313 5266318 +
gtagcaacatggatggaaccag

SEQ ID NO: 90982 - DNA, 22 bp, Artificial Sequence
  Synthetic oligonucleotide; TTG chr11 5266297 5266318 5266314 5266319 +
tagcaacatggatggaaccaga

SEQ ID NO: 90983 - DNA, 22 bp, Artificial Sequence
  Synthetic oligonucleotide; TTA chr11 5266327 5266348 5266344 5266349 +
tgttaattgaaagccctgaagc

SEQ ID NO: 90984 - DNA, 22 bp, Artificial Sequence
  Synthetic oligonucleotide; TTA chr11 5266332 5266353 5266349 5266354 +
attgaaagccctgaagcagaac

SEQ ID NO: 90985 - DNA, 22 bp, Artificial Sequence
  Synthetic oligonucleotide; TTG chr11 5266336 5266357 5266353 5266358 +
aaagccctgaagcagaacaaaa

SEQ ID NO: 90986 - DNA, 22 bp, Artificial Sequence
  Synthetic oligonucleotide; CTG chr11 5266345 5266366 5266362 5266367 +
aagcagaacaaaaacaaactct

SEQ ID NO: 90987 - DNA, 22 bp, Artificial Sequence
  Synthetic oligonucleotide; CTC chr11 5266366 5266387 5266383 5266388 +
ttggtatgccaaagagatagat

SEQ ID NO: 90988 - DNA, 22 bp, Artificial Sequence
  Synthetic oligonucleotide; CTT chr11 5266368 5266389 5266385 5266390 +
ggtatgccaaagagatagataa

SEQ ID NO: 90989 - DNA, 22 bp, Artificial Sequence
  Synthetic oligonucleotide; TTG chr11 5266369 5266390 5266386 5266391 +
gtatgccaaagagatagataat

SEQ ID NO: 90990 - DNA, 22 bp, Artificial Sequence
  Synthetic oligonucleotide; TTT chr11 5266430 5266451 5266447 5266452 +
ttattcatctgtgggagctaaa

SEQ ID NO: 90991 - DNA, 22 bp, Artificial Sequence
  Synthetic oligonucleotide; TTT chr11 5266431 5266452 5266448 5266453 +
tattcatctgtgggagctaaaa

SEQ ID NO: 90992 - DNA, 22 bp, Artificial Sequence
  Synthetic oligonucleotide; TTT chr11 5266432 5266453 5266449 5266454 +
attcatctgtgggagctaaaaa

SEQ ID NO: 90993 - DNA, 22 bp, Artificial Sequence
  Synthetic oligonucleotide; TTA chr11 5266433 5266454 5266450 5266455 +
ttcatctgtgggagctaaaaaa

SEQ ID NO: 90994 - DNA, 22 bp, Artificial Sequence
  Synthetic oligonucleotide; TTC chr11 5266436 5266457 5266453 5266458 +
atctgtgggagctaaaaaagtg

SEQ ID NO: 90995 - DNA, 22 bp, Artificial Sequence
  Synthetic oligonucleotide; CTG chr11 5266441 5266462 5266458 5266463 +
tgggagctaaaaaagtgggtct

SEQ ID NO: 90996 - DNA, 22 bp, Artificial Sequence
  Synthetic oligonucleotide; CTA chr11 5266450 5266471 5266467 5266472 +
aaaaagtgggtctcatggtggt

SEQ ID NO: 90997 - DNA, 22 bp, Artificial Sequence
  Synthetic oligonucleotide; CTC chr11 5266464 5266485 5266481 5266486 +
atggtggtagagagtagaatga

SEQ ID NO: 90998 - DNA, 22 bp, Artificial Sequence
  Synthetic oligonucleotide; TTA chr11 5266492 5266513 5266509 5266514 +
tcagaggctggaaaaagtgtga

SEQ ID NO: 90999 - DNA, 22 bp, Artificial Sequence
  Synthetic oligonucleotide; CTG chr11 5266502 5266523 5266519 5266524 +
gaaaaagtgtgagtgtgtatgg

SEQ ID NO: 91000 - DNA, 22 bp, Artificial Sequence
  Synthetic oligonucleotide; TTT chr11 5266534 5266555 5266551 5266556 +
aagagatgttggttaataggta

SEQ ID NO: 91001 - DNA, 22 bp, Artificial Sequence
  Synthetic oligonucleotide; TTA chr11 5266535 5266556 5266552 5266557 +
agagatgttggttaataggtac

SEQ ID NO: 91002 - DNA, 22 bp, Artificial Sequence
  Synthetic oligonucleotide; TTG chr11 5266545 5266566 5266562 5266567 +
gttaataggtacaaacacagtt

SEQ ID NO: 91003 - DNA, 22 bp, Artificial Sequence
  Synthetic oligonucleotide; TTA chr11 5266549 5266570 5266566 5266571 +
ataggtacaaacacagttggat

SEQ ID NO: 91004 - DNA, 22 bp, Artificial Sequence
  Synthetic oligonucleotide; TTG chr11 5266568 5266589 5266585 5266590 +
gatagaaggattaagccataat

SEQ ID NO: 91005 - DNA, 22 bp, Artificial Sequence
  Synthetic oligonucleotide; TTA chr11 5266581 5266602 5266598 5266603 +
agccataatgtttgatatttga

SEQ ID NO: 91006 - DNA, 22 bp, Artificial Sequence
  Synthetic oligonucleotide; TTT chr11 5266594 5266615 5266611 5266616 +
gatatttgagtagggtgactat

SEQ ID NO: 91007 - DNA, 22 bp, Artificial Sequence
  Synthetic oligonucleotide; TTG chr11 5266595 5266616 5266612 5266617 +
atatttgagtagggtgactata

SEQ ID NO: 91008 - DNA, 22 bp, Artificial Sequence
  Synthetic oligonucleotide; TTT chr11 5266601 5266622 5266618 5266623 +
gagtagggtgactatagttaat

SEQ ID NO: 91009 - DNA, 22 bp, Artificial Sequence
  Synthetic oligonucleotide; TTG chr11 5266602 5266623 5266619 5266624 +
agtagggtgactatagttaatt

SEQ ID NO: 91010 - DNA, 22 bp, Artificial Sequence
  Synthetic oligonucleotide; CTA chr11 5266615 5266636 5266632 5266637 +
tagttaattactatttattata

SEQ ID NO: 91011 - DNA, 22 bp, Artificial Sequence
  Synthetic oligonucleotide; TTA chr11 5266621 5266642 5266638 5266643 +
attactatttattatatatttc

SEQ ID NO: 91012 - DNA, 22 bp, Artificial Sequence
  Synthetic oligonucleotide; TTA chr11 5266625 5266646 5266642 5266647 +
ctatttattatatatttcaaaa

SEQ ID NO: 91013 - DNA, 22 bp, Artificial Sequence
  Synthetic oligonucleotide; CTA chr11 5266628 5266649 5266645 5266650 +
tttattatatatttcaaaatgg

SEQ ID NO: 91014 - DNA, 22 bp, Artificial Sequence
  Synthetic oligonucleotide; TTT chr11 5266631 5266652 5266648 5266653 +
attatatatttcaaaatggcta

SEQ ID NO: 91015 - DNA, 22 bp, Artificial Sequence
  Synthetic oligonucleotide; TTA chr11 5266632 5266653 5266649 5266654 +
ttatatatttcaaaatggctag

SEQ ID NO: 91016 - DNA, 22 bp, Artificial Sequence
  Synthetic oligonucleotide; TTA chr11 5266635 5266656 5266652 5266657 +
tatatttcaaaatggctagaaa

SEQ ID NO: 91017 - DNA, 22 bp, Artificial Sequence
  Synthetic oligonucleotide; TTT chr11 5266642 5266663 5266659 5266664 +
caaaatggctagaaatgaggat

SEQ ID NO: 91018 - DNA, 22 bp, Artificial Sequence
  Synthetic oligonucleotide; TTC chr11 5266643 5266664 5266660 5266665 +
aaaatggctagaaatgaggatt

SEQ ID NO: 91019 - DNA, 22 bp, Artificial Sequence
  Synthetic oligonucleotide; CTA chr11 5266653 5266674 5266670 5266675 +
gaaatgaggatttgaaattttc

SEQ ID NO: 91020 - DNA, 22 bp, Artificial Sequence
  Synthetic oligonucleotide; TTT chr11 5266666 5266687 5266683 5266688 +
gaaattttctcaatacatagaa

SEQ ID NO: 91021 - DNA, 22 bp, Artificial Sequence
  Synthetic oligonucleotide; TTG chr11 5266667 5266688 5266684 5266689 +
aaattttctcaatacatagaaa

SEQ ID NO: 91022 - DNA, 22 bp, Artificial Sequence
  Synthetic oligonucleotide; TTT chr11 5266673 5266694 5266690 5266695 +
tctcaatacatagaaatgataa

SEQ ID NO: 91023 - DNA, 22 bp, Artificial Sequence
  Synthetic oligonucleotide; TTT chr11 5266674 5266695 5266691 5266696 +
ctcaatacatagaaatgataaa

SEQ ID NO: 91024 - DNA, 22 bp, Artificial Sequence
  Synthetic oligonucleotide; TTC chr11 5266675 5266696 5266692 5266697 +
tcaatacatagaaatgataaat

SEQ ID NO: 91025 - DNA, 22 bp, Artificial Sequence
  Synthetic oligonucleotide; CTC chr11 5266677 5266698 5266694 5266699 +
aatacatagaaatgataaatgc

SEQ ID NO: 91026 - DNA, 22 bp, Artificial Sequence
  Synthetic oligonucleotide; CTC chr11 5266701 5266722 5266718 5266723 +
aaagcaatggatatcctaaata

SEQ ID NO: 91027 - DNA, 22 bp, Artificial Sequence
  Synthetic oligonucleotide; CTA chr11 5266719 5266740 5266736 5266741 +
aatatctagacttaatcatcac

SEQ ID NO: 91028 - DNA, 22 bp, Artificial Sequence
  Synthetic oligonucleotide; CTA chr11 5266727 5266748 5266744 5266749 +
gacttaatcatcacatgttcta

SEQ ID NO: 91029 - DNA, 22 bp, Artificial Sequence
  Synthetic oligonucleotide; CTT chr11 5266732 5266753 5266749 5266754 +
aatcatcacatgttctaggcat

SEQ ID NO: 91030 - DNA, 22 bp, Artificial Sequence
  Synthetic oligonucleotide; TTA chr11 5266733 5266754 5266750 5266755 +
atcatcacatgttctaggcatg

SEQ ID NO: 91031 - DNA, 22 bp, Artificial Sequence
  Synthetic oligonucleotide; TTC chr11 5266747 5266768 5266764 5266769 +
taggcatgtaagtatcacatgt

SEQ ID NO: 91032 - DNA, 22 bp, Artificial Sequence
  Synthetic oligonucleotide; CTA chr11 5266749 5266770 5266766 5266771 +
ggcatgtaagtatcacatgtac

SEQ ID NO: 91033 - DNA, 22 bp, Artificial Sequence
  Synthetic oligonucleotide; TTG chr11 5266812 5266833 5266829 5266834 +
ctcccatttgttgactgactag

SEQ ID NO: 91034 - DNA, 22 bp, Artificial Sequence
  Synthetic oligonucleotide; CTC chr11 5266815 5266836 5266832 5266837 +
ccatttgttgactgactaggtg

SEQ ID NO: 91035 - DNA, 22 bp, Artificial Sequence
  Synthetic oligonucleotide; TTT chr11 5266821 5266842 5266838 5266843 +
gttgactgactaggtgaaaata

SEQ ID NO: 91036 - DNA, 22 bp, Artificial Sequence
  Synthetic oligonucleotide; TTG chr11 5266822 5266843 5266839 5266844 +
ttgactgactaggtgaaaatat

SEQ ID NO: 91037 - DNA, 22 bp, Artificial Sequence
  Synthetic oligonucleotide; TTG chr11 5266825 5266846 5266842 5266847 +
actgactaggtgaaaatattta

SEQ ID NO: 91038 - DNA, 22 bp, Artificial Sequence
  Synthetic oligonucleotide; CTG chr11 5266829 5266850 5266846 5266851 +
actaggtgaaaatatttagtgc

SEQ ID NO: 91039 - DNA, 22 bp, Artificial Sequence
  Synthetic oligonucleotide; CTA chr11 5266833 5266854 5266850 5266855 +
ggtgaaaatatttagtgccatg

SEQ ID NO: 91040 - DNA, 22 bp, Artificial Sequence
  Synthetic oligonucleotide; TTT chr11 5266846 5266867 5266863 5266868 +
agtgccatgaataatccctgtt

SEQ ID NO: 91041 - DNA, 22 bp, Artificial Sequence
  Synthetic oligonucleotide; TTA chr11 5266847 5266868 5266864 5266869 +
gtgccatgaataatccctgttt

SEQ ID NO: 91042 - DNA, 22 bp, Artificial Sequence
  Synthetic oligonucleotide; CTG chr11 5266866 5266887 5266883 5266888 +
tttactctgtttatgggcatat

SEQ ID NO: 91043 - DNA, 22 bp, Artificial Sequence
  Synthetic oligonucleotide; TTT chr11 5266869 5266890 5266886 5266891 +
actctgtttatgggcatattga

SEQ ID NO: 91044 - DNA, 22 bp, Artificial Sequence
  Synthetic oligonucleotide; TTA chr11 5266870 5266891 5266887 5266892 +
ctctgtttatgggcatattgaa

SEQ ID NO: 91045 - DNA, 22 bp, Artificial Sequence
  Synthetic oligonucleotide; CTC chr11 5266873 5266894 5266890 5266895 +
tgtttatgggcatattgaaagg

SEQ ID NO: 91046 - DNA, 22 bp, Artificial Sequence
  Synthetic oligonucleotide; CTG chr11 5266875 5266896 5266892 5266897 +
tttatgggcatattgaaaggtt

SEQ ID NO: 91047 - DNA, 22 bp, Artificial Sequence
  Synthetic oligonucleotide; TTT chr11 5266878 5266899 5266895 5266900 +
atgggcatattgaaaggttata

SEQ ID NO: 91048 - DNA, 22 bp, Artificial Sequence
  Synthetic oligonucleotide; TTA chr11 5266879 5266900 5266896 5266901 +
tgggcatattgaaaggttataa

SEQ ID NO: 91049 - DNA, 22 bp, Artificial Sequence
  Synthetic oligonucleotide; TTG chr11 5266890 5266911 5266907 5266912 +
aaaggttataaggctcagagag

SEQ ID NO: 91050 - DNA, 22 bp, Artificial Sequence
  Synthetic oligonucleotide; TTA chr11 5266898 5266919 5266915 5266920 +
taaggctcagagagaccagtat

SEQ ID NO: 91051 - DNA, 22 bp, Artificial Sequence
  Synthetic oligonucleotide; CTC chr11 5266906 5266927 5266923 5266928 +
agagagaccagtattgttgata

SEQ ID NO: 91052 - DNA, 22 bp, Artificial Sequence
  Synthetic oligonucleotide; TTG chr11 5266922 5266943 5266939 5266944 +
ttgatagcctgcaactacaata

SEQ ID NO: 91053 - DNA, 22 bp, Artificial Sequence
  Synthetic oligonucleotide; TTG chr11 5266925 5266946 5266942 5266947 +
atagcctgcaactacaataatt

SEQ ID NO: 91054 - DNA, 22 bp, Artificial Sequence
  Synthetic oligonucleotide; CTG chr11 5266933 5266954 5266950 5266955 +
caactacaataattatttgtct

SEQ ID NO: 91055 - DNA, 22 bp, Artificial Sequence
  Synthetic oligonucleotide; CTA chr11 5266939 5266960 5266956 5266961 +
caataattatttgtctctctcc

SEQ ID NO: 91056 - DNA, 22 bp, Artificial Sequence
  Synthetic oligonucleotide; TTA chr11 5266948 5266969 5266965 5266970 +
tttgtctctctcccatattctg

SEQ ID NO: 91057 - DNA, 22 bp, Artificial Sequence
  Synthetic oligonucleotide; TTT chr11 5266951 5266972 5266968 5266973 +
gtctctctcccatattctggat

SEQ ID NO: 91058 - DNA, 22 bp, Artificial Sequence
  Synthetic oligonucleotide; TTG chr11 5266952 5266973 5266969 5266974 +
tctctctcccatattctggata

SEQ ID NO: 91059 - DNA, 22 bp, Artificial Sequence
  Synthetic oligonucleotide; CTC chr11 5266956 5266977 5266973 5266978 +
tctcccatattctggatatata

SEQ ID NO: 91060 - DNA, 22 bp, Artificial Sequence
  Synthetic oligonucleotide; CTC chr11 5266958 5266979 5266975 5266980 +
tcccatattctggatatataca

SEQ ID NO: 91061 - DNA, 22 bp, Artificial Sequence
  Synthetic oligonucleotide; CTC chr11 5266960 5266981 5266977 5266982 +
ccatattctggatatatacagc

SEQ ID NO: 91062 - DNA, 22 bp, Artificial Sequence
  Synthetic oligonucleotide; TTC chr11 5266968 5266989 5266985 5266990 +
tggatatatacagccaaattca

SEQ ID NO: 91063 - DNA, 22 bp, Artificial Sequence
  Synthetic oligonucleotide; CTG chr11 5266970 5266991 5266987 5266992 +
gatatatacagccaaattcaaa

SEQ ID NO: 91064 - DNA, 22 bp, Artificial Sequence
  Synthetic oligonucleotide; TTC chr11 5266989 5267010 5267006 5267011 +
aaaagtaattcacaggaaaaag

SEQ ID NO: 91065 - DNA, 22 bp, Artificial Sequence
  Synthetic oligonucleotide; TTC chr11 5267000 5267021 5267017 5267022 +
acaggaaaaagtctgatcaatg

SEQ ID NO: 91066 - DNA, 22 bp, Artificial Sequence
  Synthetic oligonucleotide; CTG chr11 5267015 5267036 5267032 5267037 +
atcaatgtgagagcactataaa

SEQ ID NO: 91067 - DNA, 22 bp, Artificial Sequence
  Synthetic oligonucleotide; CTA chr11 5267033 5267054 5267050 5267055 +
taaaattactaataaagttata

SEQ ID NO: 91068 - DNA, 22 bp, Artificial Sequence
  Synthetic oligonucleotide; TTA chr11 5267041 5267062 5267058 5267063 +
ctaataaagttatatttgccaa

SEQ ID NO: 91069 - DNA, 22 bp, Artificial Sequence
  Synthetic oligonucleotide; CTA chr11 5267044 5267065 5267061 5267066 +
ataaagttatatttgccaaaat

SEQ ID NO: 91070 - DNA, 22 bp, Artificial Sequence
  Synthetic oligonucleotide; TTA chr11 5267053 5267074 5267070 5267075 +
tatttgccaaaatatggcactc

SEQ ID NO: 91071 - DNA, 22 bp, Artificial Sequence
  Synthetic oligonucleotide; TTT chr11 5267058 5267079 5267075 5267080 +
gccaaaatatggcactctaact

SEQ ID NO: 91072 - DNA, 22 bp, Artificial Sequence
  Synthetic oligonucleotide; TTG chr11 5267059 5267080 5267076 5267081 +
ccaaaatatggcactctaactt

SEQ ID NO: 91073 - DNA, 22 bp, Artificial Sequence
  Synthetic oligonucleotide; CTC chr11 5267075 5267096 5267092 5267097 +
taacttggaaaatgcaaaggtt

SEQ ID NO: 91074 - DNA, 22 bp, Artificial Sequence
  Synthetic oligonucleotide; CTA chr11 5267077 5267098 5267094 5267099 +
acttggaaaatgcaaaggttcc

SEQ ID NO: 91075 - DNA, 22 bp, Artificial Sequence
  Synthetic oligonucleotide; CTT chr11 5267081 5267102 5267098 5267103 +
ggaaaatgcaaaggttccttga

SEQ ID NO: 91076 - DNA, 22 bp, Artificial Sequence
  Synthetic oligonucleotide; TTG chr11 5267082 5267103 5267099 5267104 +
gaaaatgcaaaggttccttgat

SEQ ID NO: 91077 - DNA, 22 bp, Artificial Sequence
  Synthetic oligonucleotide; TTC chr11 5267098 5267119 5267115 5267120 +
cttgatatgaaagacacaagac

SEQ ID NO: 91078 - DNA, 22 bp, Artificial Sequence
  Synthetic oligonucleotide; CTT chr11 5267101 5267122 5267118 5267123 +
gatatgaaagacacaagacctg

SEQ ID NO: 91079 - DNA, 22 bp, Artificial Sequence
  Synthetic oligonucleotide; TTG chr11 5267102 5267123 5267119 5267124 +
atatgaaagacacaagacctga

SEQ ID NO: 91080 - DNA, 22 bp, Artificial Sequence
  Synthetic oligonucleotide; CTG chr11 5267123 5267144 5267140 5267145 +
aaggtcaaaactccctgaccaa

SEQ ID NO: 91081 - DNA, 22 bp, Artificial Sequence
  Synthetic oligonucleotide; CTC chr11 5267136 5267157 5267153 5267158 +
cctgaccaatctagcacttcct

SEQ ID NO: 91082 - DNA, 22 bp, Artificial Sequence
  Synthetic oligonucleotide; CTG chr11 5267140 5267161 5267157 5267162 +
accaatctagcacttcctaaaa

SEQ ID NO: 91083 - DNA, 22 bp, Artificial Sequence
  Synthetic oligonucleotide; CTA chr11 5267149 5267170 5267166 5267171 +
gcacttcctaaaaagtaaatct

SEQ ID NO: 91084 - DNA, 22 bp, Artificial Sequence
  Synthetic oligonucleotide; CTT chr11 5267155 5267176 5267172 5267177 +
cctaaaaagtaaatctgttaat

SEQ ID NO: 91085 - DNA, 22 bp, Artificial Sequence
  Synthetic oligonucleotide; TTC chr11 5267156 5267177 5267173 5267178 +
ctaaaaagtaaatctgttaata

SEQ ID NO: 91086 - DNA, 22 bp, Artificial Sequence
  Synthetic oligonucleotide; CTA chr11 5267159 5267180 5267176 5267181 +
aaaagtaaatctgttaatatcc

SEQ ID NO: 91087 - DNA, 22 bp, Artificial Sequence
  Synthetic oligonucleotide; CTG chr11 5267172 5267193 5267189 5267194 +
ttaatatccctctacccttcac

SEQ ID NO: 91088 - DNA, 22 bp, Artificial Sequence
  Synthetic oligonucleotide; TTA chr11 5267175 5267196 5267192 5267197 +
atatccctctacccttcacaca

SEQ ID NO: 91089 - DNA, 22 bp, Artificial Sequence
  Synthetic oligonucleotide; CTC chr11 5267184 5267205 5267201 5267206 +
tacccttcacacatgagagtca

SEQ ID NO: 91090 - DNA, 22 bp, Artificial Sequence
  Synthetic oligonucleotide; CTA chr11 5267186 5267207 5267203 5267208 +
cccttcacacatgagagtcacc

SEQ ID NO: 91091 - DNA, 22 bp, Artificial Sequence
  Synthetic oligonucleotide; CTT chr11 5267191 5267212 5267208 5267213 +
cacacatgagagtcaccaggtc

SEQ ID NO: 91092 - DNA, 22 bp, Artificial Sequence
  Synthetic oligonucleotide; TTC chr11 5267192 5267213 5267209 5267214 +
acacatgagagtcaccaggtca

SEQ ID NO: 91093 - DNA, 22 bp, Artificial Sequence
  Synthetic oligonucleotide; TTT chr11 5267225 5267246 5267242 5267247 +
cctcctgttatcttcaccagtc

SEQ ID NO: 91094 - DNA, 22 bp, Artificial Sequence
  Synthetic oligonucleotide; TTC chr11 5267226 5267247 5267243 5267248 +
ctcctgttatcttcaccagtct

SEQ ID NO: 91095 - DNA, 22 bp, Artificial Sequence
  Synthetic oligonucleotide; CTC chr11 5267229 5267250 5267246 5267251 +
ctgttatcttcaccagtctggg

SEQ ID NO: 91096 - DNA, 22 bp, Artificial Sequence
  Synthetic oligonucleotide; CTG chr11 5267232 5267253 5267249 5267254 +
ttatcttcaccagtctgggagc

SEQ ID NO: 91097 - DNA, 22 bp, Artificial Sequence
  Synthetic oligonucleotide; TTA chr11 5267235 5267256 5267252 5267257 +
tcttcaccagtctgggagcttt

SEQ ID NO: 91098 - DNA, 22 bp, Artificial Sequence
  Synthetic oligonucleotide; CTT chr11 5267239 5267260 5267256 5267261 +
caccagtctgggagctttcagt

SEQ ID NO: 91099 - DNA, 22 bp, Artificial Sequence
  Synthetic oligonucleotide; TTC chr11 5267240 5267261 5267257 5267262 +
accagtctgggagctttcagtc

SEQ ID NO: 91100 - DNA, 22 bp, Artificial Sequence
  Synthetic oligonucleotide; CTG chr11 5267249 5267270 5267266 5267271 +
ggagctttcagtcatttatcac

SEQ ID NO: 91101 - DNA, 22 bp, Artificial Sequence
  Synthetic oligonucleotide; CTT chr11 5267256 5267277 5267273 5267278 +
tcagtcatttatcacctccttc

SEQ ID NO: 91102 - DNA, 22 bp, Artificial Sequence
  Synthetic oligonucleotide; TTT chr11 5267257 5267278 5267274 5267279 +
cagtcatttatcacctccttct

SEQ ID NO: 91103 - DNA, 22 bp, Artificial Sequence
  Synthetic oligonucleotide; TTC chr11 5267258 5267279 5267275 5267280 +
agtcatttatcacctccttctt

SEQ ID NO: 91104 - DNA, 22 bp, Artificial Sequence
  Synthetic oligonucleotide; TTT chr11 5267266 5267287 5267283 5267288 +
atcacctccttcttccttctca

SEQ ID NO: 91105 - DNA, 22 bp, Artificial Sequence
  Synthetic oligonucleotide; TTA chr11 5267267 5267288 5267284 5267289 +
tcacctccttcttccttctcat

SEQ ID NO: 91106 - DNA, 22 bp, Artificial Sequence
  Synthetic oligonucleotide; CTC chr11 5267274 5267295 5267291 5267296 +
cttcttccttctcatctcccac

SEQ ID NO: 91107 - DNA, 22 bp, Artificial Sequence
  Synthetic oligonucleotide; CTT chr11 5267277 5267298 5267294 5267299 +
cttccttctcatctcccacagt

SEQ ID NO: 91108 - DNA, 22 bp, Artificial Sequence
  Synthetic oligonucleotide; TTC chr11 5267278 5267299 5267295 5267300 +
ttccttctcatctcccacagtc

SEQ ID NO: 91109 - DNA, 22 bp, Artificial Sequence
  Synthetic oligonucleotide; CTT chr11 5267280 5267301 5267297 5267302 +
ccttctcatctcccacagtcag

SEQ ID NO: 91110 - DNA, 22 bp, Artificial Sequence
  Synthetic oligonucleotide; TTC chr11 5267281 5267302 5267298 5267303 +
cttctcatctcccacagtcagt

SEQ ID NO: 91111 - DNA, 22 bp, Artificial Sequence
  Synthetic oligonucleotide; CTT chr11 5267284 5267305 5267301 5267306 +
ctcatctcccacagtcagtcga

SEQ ID NO: 91112 - DNA, 22 bp, Artificial Sequence
  Synthetic oligonucleotide; TTC chr11 5267285 5267306 5267302 5267307 +
tcatctcccacagtcagtcgaa

SEQ ID NO: 91113 - DNA, 22 bp, Artificial Sequence
  Synthetic oligonucleotide; CTC chr11 5267287 5267308 5267304 5267309 +
atctcccacagtcagtcgaata

SEQ ID NO: 91114 - DNA, 22 bp, Artificial Sequence
  Synthetic oligonucleotide; CTC chr11 5267292 5267313 5267309 5267314 +
ccacagtcagtcgaatactatg

SEQ ID NO: 91115 - DNA, 22 bp, Artificial Sequence
  Synthetic oligonucleotide; CTA chr11 5267312 5267333 5267329 5267334 +
tgtctttctcaccccacctttg

SEQ ID NO: 91116 - DNA, 22 bp, Artificial Sequence
  Synthetic oligonucleotide; CTT chr11 5267318 5267339 5267335 5267340 +
tctcaccccacctttgtccatc

SEQ ID NO: 91117 - DNA, 22 bp, Artificial Sequence
  Synthetic oligonucleotide; TTT chr11 5267319 5267340 5267336 5267341 +
ctcaccccacctttgtccatcc

SEQ ID NO: 91118 - DNA, 22 bp, Artificial Sequence
  Synthetic oligonucleotide; TTC chr11 5267320 5267341 5267337 5267342 +
tcaccccacctttgtccatcct

SEQ ID NO: 91119 - DNA, 22 bp, Artificial Sequence
  Synthetic oligonucleotide; CTC chr11 5267322 5267343 5267339 5267344 +
accccacctttgtccatccttc

SEQ ID NO: 91120 - DNA, 22 bp, Artificial Sequence
  Synthetic oligonucleotide; CTT chr11 5267332 5267353 5267349 5267354 +
tgtccatccttcaaattccaca

SEQ ID NO: 91121 - DNA, 22 bp, Artificial Sequence
  Synthetic oligonucleotide; TTT chr11 5267333 5267354 5267350 5267355 +
gtccatccttcaaattccacag

SEQ ID NO: 91122 - DNA, 22 bp, Artificial Sequence
  Synthetic oligonucleotide; TTG chr11 5267334 5267355 5267351 5267356 +
tccatccttcaaattccacaga

SEQ ID NO: 91123 - DNA, 22 bp, Artificial Sequence
  Synthetic oligonucleotide; CTT chr11 5267343 5267364 5267360 5267365 +
caaattccacagactcactgct

SEQ ID NO: 91124 - DNA, 22 bp, Artificial Sequence
  Synthetic oligonucleotide; TTC chr11 5267344 5267365 5267361 5267366 +
aaattccacagactcactgctc

SEQ ID NO: 91125 - DNA, 22 bp, Artificial Sequence
  Synthetic oligonucleotide; TTC chr11 5267350 5267371 5267367 5267372 +
cacagactcactgctcctcttg

SEQ ID NO: 91126 - DNA, 22 bp, Artificial Sequence
  Synthetic oligonucleotide; CTC chr11 5267359 5267380 5267376 5267381 +
actgctcctcttgggtttgaac

SEQ ID NO: 91127 - DNA, 22 bp, Artificial Sequence
  Synthetic oligonucleotide; CTG chr11 5267363 5267384 5267380 5267385 +
ctcctcttgggtttgaaccatt

SEQ ID NO: 91128 - DNA, 22 bp, Artificial Sequence
  Synthetic oligonucleotide; CTC chr11 5267366 5267387 5267383 5267388 +
ctcttgggtttgaaccattgta

SEQ ID NO: 91129 - DNA, 22 bp, Artificial Sequence
  Synthetic oligonucleotide; CTC chr11 5267369 5267390 5267386 5267391 +
ttgggtttgaaccattgtatct

SEQ ID NO: 91130 - DNA, 22 bp, Artificial Sequence
  Synthetic oligonucleotide; CTT chr11 5267371 5267392 5267388 5267393 +
gggtttgaaccattgtatctgt

SEQ ID NO: 91131 - DNA, 22 bp, Artificial Sequence
  Synthetic oligonucleotide; TTG chr11 5267372 5267393 5267389 5267394 +
ggtttgaaccattgtatctgtc

SEQ ID NO: 91132 - DNA, 22 bp, Artificial Sequence
  Synthetic oligonucleotide; TTT chr11 5267377 5267398 5267394 5267399 +
gaaccattgtatctgtcccctt

SEQ ID NO: 91133 - DNA, 22 bp, Artificial Sequence
  Synthetic oligonucleotide; TTG chr11 5267378 5267399 5267395 5267400 +
aaccattgtatctgtccccttg

SEQ ID NO: 91134 - DNA, 22 bp, Artificial Sequence
  Synthetic oligonucleotide; TTG chr11 5267386 5267407 5267403 5267408 +
tatctgtccccttgaatcatca

SEQ ID NO: 91135 - DNA, 22 bp, Artificial Sequence
  Synthetic oligonucleotide; CTG chr11 5267392 5267413 5267409 5267414 +
tccccttgaatcatcatccata

SEQ ID NO: 91136 - DNA, 22 bp, Artificial Sequence
  Synthetic oligonucleotide; CTT chr11 5267399 5267420 5267416 5267421 +
gaatcatcatccatattttatt

SEQ ID NO: 91137 - DNA, 22 bp, Artificial Sequence
  Synthetic oligonucleotide; TTG chr11 5267400 5267421 5267417 5267422 +
aatcatcatccatattttattt

SEQ ID NO: 91138 - DNA, 22 bp, Artificial Sequence
  Synthetic oligonucleotide; TTT chr11 5267417 5267438 5267434 5267439 +
tattttatctgcaaacttgaat

SEQ ID NO: 91139 - DNA, 22 bp, Artificial Sequence
  Synthetic oligonucleotide; TTT chr11 5267418 5267439 5267435 5267440 +
attttatctgcaaacttgaatc

SEQ ID NO: 91140 - DNA, 22 bp, Artificial Sequence
  Synthetic oligonucleotide; TTA chr11 5267419 5267440 5267436 5267441 +
ttttatctgcaaacttgaatcc

SEQ ID NO: 91141 - DNA, 22 bp, Artificial Sequence
  Synthetic oligonucleotide; TTT chr11 5267422 5267443 5267439 5267444 +
tatctgcaaacttgaatccatt

SEQ ID NO: 91142 - DNA, 22 bp, Artificial Sequence
  Synthetic oligonucleotide; TTT chr11 5267423 5267444 5267440 5267445 +
atctgcaaacttgaatccattt

SEQ ID NO: 91143 - DNA, 22 bp, Artificial Sequence
  Synthetic oligonucleotide; TTA chr11 5267424 5267445 5267441 5267446 +
tctgcaaacttgaatccatttt

SEQ ID NO: 91144 - DNA, 22 bp, Artificial Sequence
  Synthetic oligonucleotide; CTG chr11 5267428 5267449 5267445 5267450 +
caaacttgaatccattttgtgc

SEQ ID NO: 91145 - DNA, 22 bp, Artificial Sequence
  Synthetic oligonucleotide; CTT chr11 5267435 5267456 5267452 5267457 +
gaatccattttgtgcacataag

SEQ ID NO: 91146 - DNA, 22 bp, Artificial Sequence
  Synthetic oligonucleotide; TTG chr11 5267436 5267457 5267453 5267458 +
aatccattttgtgcacataagc

SEQ ID NO: 91147 - DNA, 22 bp, Artificial Sequence
  Synthetic oligonucleotide; TTT chr11 5267445 5267466 5267462 5267467 +
tgtgcacataagcagattactt

SEQ ID NO: 91148 - DNA, 22 bp, Artificial Sequence
  Synthetic oligonucleotide; TTT chr11 5267446 5267467 5267463 5267468 +
gtgcacataagcagattacttt

SEQ ID NO: 91149 - DNA, 22 bp, Artificial Sequence
  Synthetic oligonucleotide; TTG chr11 5267447 5267468 5267464 5267469 +
tgcacataagcagattactttt

SEQ ID NO: 91150 - DNA, 22 bp, Artificial Sequence
  Synthetic oligonucleotide; TTA chr11 5267464 5267485 5267481 5267486 +
ctttttcccaaaatcttatttc

SEQ ID NO: 91151 - DNA, 22 bp, Artificial Sequence
  Synthetic oligonucleotide; CTT chr11 5267467 5267488 5267484 5267489 +
tttcccaaaatcttatttcctg

SEQ ID NO: 91152 - DNA, 22 bp, Artificial Sequence
  Synthetic oligonucleotide; TTT chr11 5267468 5267489 5267485 5267490 +
ttcccaaaatcttatttcctga

SEQ ID NO: 91153 - DNA, 22 bp, Artificial Sequence
  Synthetic oligonucleotide; TTT chr11 5267469 5267490 5267486 5267491 +
tcccaaaatcttatttcctgag

SEQ ID NO: 91154 - DNA, 22 bp, Artificial Sequence
  Synthetic oligonucleotide; TTT chr11 5267470 5267491 5267487 5267492 +
cccaaaatcttatttcctgagt

SEQ ID NO: 91155 - DNA, 22 bp, Artificial Sequence
  Synthetic oligonucleotide; TTC chr11 5267471 5267492 5267488 5267493 +
ccaaaatcttatttcctgagtc

SEQ ID NO: 91156 - DNA, 22 bp, Artificial Sequence
  Synthetic oligonucleotide; CTT chr11 5267481 5267502 5267498 5267503 +
atttcctgagtcacttaacatc

SEQ ID NO: 91157 - DNA, 22 bp, Artificial Sequence
  Synthetic oligonucleotide; TTA chr11 5267482 5267503 5267499 5267504 +
tttcctgagtcacttaacatcc

SEQ ID NO: 91158 - DNA, 22 bp, Artificial Sequence
  Synthetic oligonucleotide; TTT chr11 5267485 5267506 5267502 5267507 +
cctgagtcacttaacatcctaa

SEQ ID NO: 91159 - DNA, 22 bp, Artificial Sequence
  Synthetic oligonucleotide; TTC chr11 5267486 5267507 5267503 5267508 +
ctgagtcacttaacatcctaat

SEQ ID NO: 91160 - DNA, 22 bp, Artificial Sequence
  Synthetic oligonucleotide; CTG chr11 5267489 5267510 5267506 5267511 +
agtcacttaacatcctaatgct

SEQ ID NO: 91161 - DNA, 22 bp, Artificial Sequence
  Synthetic oligonucleotide; CTT chr11 5267497 5267518 5267514 5267519 +
aacatcctaatgcttatcgttt

SEQ ID NO: 91162 - DNA, 22 bp, Artificial Sequence
  Synthetic oligonucleotide; TTA chr11 5267498 5267519 5267515 5267520 +
acatcctaatgcttatcgttta

SEQ ID NO: 91163 - DNA, 22 bp, Artificial Sequence
  Synthetic oligonucleotide; CTA chr11 5267506 5267527 5267523 5267528 +
atgcttatcgtttagtattgca

SEQ ID NO: 91164 - DNA, 22 bp, Artificial Sequence
  Synthetic oligonucleotide; CTT chr11 5267512 5267533 5267529 5267534 +
atcgtttagtattgcaatagca

SEQ ID NO: 91165 - DNA, 22 bp, Artificial Sequence
  Synthetic oligonucleotide; TTA chr11 5267513 5267534 5267530 5267535 +
tcgtttagtattgcaatagcat

SEQ ID NO: 91166 - DNA, 22 bp, Artificial Sequence
  Synthetic oligonucleotide; TTT chr11 5267519 5267540 5267536 5267541 +
agtattgcaatagcatagtaaa

SEQ ID NO: 91167 - DNA, 22 bp, Artificial Sequence
  Synthetic oligonucleotide; TTA chr11 5267520 5267541 5267537 5267542 +
gtattgcaatagcatagtaaaa

SEQ ID NO: 91168 - DNA, 22 bp, Artificial Sequence
  Synthetic oligonucleotide; TTG chr11 5267526 5267547 5267543 5267548 +
caatagcatagtaaaagcttgt

SEQ ID NO: 91169 - DNA, 22 bp, Artificial Sequence
  Synthetic oligonucleotide; CTT chr11 5267546 5267567 5267563 5267568 +
gtatttttgtagccaggccctg

SEQ ID NO: 91170 - DNA, 22 bp, Artificial Sequence
  Synthetic oligonucleotide; TTG chr11 5267547 5267568 5267564 5267569 +
tatttttgtagccaggccctgt

SEQ ID NO: 91171 - DNA, 22 bp, Artificial Sequence
  Synthetic oligonucleotide; TTT chr11 5267552 5267573 5267569 5267574 +
ttgtagccaggccctgtactat

SEQ ID NO: 91172 - DNA, 22 bp, Artificial Sequence
  Synthetic oligonucleotide; TTT chr11 5267553 5267574 5267570 5267575 +
tgtagccaggccctgtactatc

SEQ ID NO: 91173 - DNA, 22 bp, Artificial Sequence
  Synthetic oligonucleotide; TTT chr11 5267554 5267575 5267571 5267576 +
gtagccaggccctgtactatct

SEQ ID NO: 91174 - DNA, 22 bp, Artificial Sequence
  Synthetic oligonucleotide; TTG chr11 5267555 5267576 5267572 5267577 +
tagccaggccctgtactatctg

SEQ ID NO: 91175 - DNA, 22 bp, Artificial Sequence
  Synthetic oligonucleotide; CTG chr11 5267568 5267589 5267585 5267590 +
tactatctggtctttcctagtc

SEQ ID NO: 91176 - DNA, 22 bp, Artificial Sequence
  Synthetic oligonucleotide; CTA chr11 5267573 5267594 5267590 5267595 +
tctggtctttcctagtcctcta

SEQ ID NO: 91177 - DNA, 22 bp, Artificial Sequence
  Synthetic oligonucleotide; CTG chr11 5267577 5267598 5267594 5267599 +
gtctttcctagtcctctacgta

SEQ ID NO: 91178 - DNA, 22 bp, Artificial Sequence
  Synthetic oligonucleotide; CTT chr11 5267582 5267603 5267599 5267604 +
tcctagtcctctacgtatgtct

SEQ ID NO: 91179 - DNA, 22 bp, Artificial Sequence
  Synthetic oligonucleotide; TTT chr11 5267583 5267604 5267600 5267605 +
cctagtcctctacgtatgtctt

SEQ ID NO: 91180 - DNA, 22 bp, Artificial Sequence
  Synthetic oligonucleotide; TTC chr11 5267584 5267605 5267601 5267606 +
ctagtcctctacgtatgtctta

SEQ ID NO: 91181 - DNA, 22 bp, Artificial Sequence
  Synthetic oligonucleotide; CTA chr11 5267587 5267608 5267604 5267609 +
gtcctctacgtatgtcttactc

SEQ ID NO: 91182 - DNA, 22 bp, Artificial Sequence
  Synthetic oligonucleotide; CTC chr11 5267593 5267614 5267610 5267615 +
tacgtatgtcttactctccctt

SEQ ID NO: 91183 - DNA, 22 bp, Artificial Sequence
  Synthetic oligonucleotide; CTA chr11 5267595 5267616 5267612 5267617 +
cgtatgtcttactctcccttct

SEQ ID NO: 91184 - DNA, 22 bp, Artificial Sequence
  Synthetic oligonucleotide; CTT chr11 5267605 5267626 5267622 5267627 +
actctcccttctacttccagag

SEQ ID NO: 91185 - DNA, 22 bp, Artificial Sequence
  Synthetic oligonucleotide; TTA chr11 5267606 5267627 5267623 5267628 +
ctctcccttctacttccagaga

SEQ ID NO: 91186 - DNA, 22 bp, Artificial Sequence
  Synthetic oligonucleotide; CTC chr11 5267609 5267630 5267626 5267631 +
tcccttctacttccagagagcc

SEQ ID NO: 91187 - DNA, 22 bp, Artificial Sequence
  Synthetic oligonucleotide; CTC chr11 5267611 5267632 5267628 5267633 +
ccttctacttccagagagccag

SEQ ID NO: 91188 - DNA, 22 bp, Artificial Sequence
  Synthetic oligonucleotide; CTT chr11 5267615 5267636 5267632 5267637 +
ctacttccagagagccagtttc

SEQ ID NO: 91189 - DNA, 22 bp, Artificial Sequence
  Synthetic oligonucleotide; TTC chr11 5267616 5267637 5267633 5267638 +
tacttccagagagccagtttca

SEQ ID NO: 91190 - DNA, 22 bp, Artificial Sequence
  Synthetic oligonucleotide; CTA chr11 5267618 5267639 5267635 5267640 +
cttccagagagccagtttcatg

SEQ ID NO: 91191 - DNA, 22 bp, Artificial Sequence
  Synthetic oligonucleotide; CTT chr11 5267621 5267642 5267638 5267643 +
ccagagagccagtttcatgcaa

SEQ ID NO: 91192 - DNA, 22 bp, Artificial Sequence
  Synthetic oligonucleotide; TTC chr11 5267622 5267643 5267639 5267644 +
cagagagccagtttcatgcaag

SEQ ID NO: 91193 - DNA, 22 bp, Artificial Sequence
  Synthetic oligonucleotide; TTT chr11 5267636 5267657 5267653 5267658 +
catgcaagtcacgaagccctag

SEQ ID NO: 91194 - DNA, 22 bp, Artificial Sequence
  Synthetic oligonucleotide; TTC chr11 5267637 5267658 5267654 5267659 +
atgcaagtcacgaagccctagc

SEQ ID NO: 91195 - DNA, 22 bp, Artificial Sequence
  Synthetic oligonucleotide; CTA chr11 5267657 5267678 5267674 5267679 +
gcttgctggttttagaatttaa

SEQ ID NO: 91196 - DNA, 22 bp, Artificial Sequence
  Synthetic oligonucleotide; CTT chr11 5267661 5267682 5267678 5267683 +
gctggttttagaatttaagcct

SEQ ID NO: 91197 - DNA, 22 bp, Artificial Sequence
  Synthetic oligonucleotide; TTG chr11 5267662 5267683 5267679 5267684 +
ctggttttagaatttaagcctt

SEQ ID NO: 91198 - DNA, 22 bp, Artificial Sequence
  Synthetic oligonucleotide; CTG chr11 5267665 5267686 5267682 5267687 +
gttttagaatttaagcctttat

SEQ ID NO: 91199 - DNA, 22 bp, Artificial Sequence
  Synthetic oligonucleotide; TTT chr11 5267669 5267690 5267686 5267691 +
tagaatttaagcctttattagt

SEQ ID NO: 91200 - DNA, 22 bp, Artificial Sequence
  Synthetic oligonucleotide; TTT chr11 5267670 5267691 5267687 5267692 +
agaatttaagcctttattagta

SEQ ID NO: 91201 - DNA, 22 bp, Artificial Sequence
  Synthetic oligonucleotide; TTA chr11 5267671 5267692 5267688 5267693 +
gaatttaagcctttattagtat

SEQ ID NO: 91202 - DNA, 22 bp, Artificial Sequence
  Synthetic oligonucleotide; TTT chr11 5267677 5267698 5267694 5267699 +
aagcctttattagtattctatc

SEQ ID NO: 91203 - DNA, 22 bp, Artificial Sequence
  Synthetic oligonucleotide; TTA chr11 5267678 5267699 5267695 5267700 +
agcctttattagtattctatct

SEQ ID NO: 91204 - DNA, 22 bp, Artificial Sequence
  Synthetic oligonucleotide; CTT chr11 5267684 5267705 5267701 5267706 +
tattagtattctatctcccacg

SEQ ID NO: 91205 - DNA, 22 bp, Artificial Sequence
  Synthetic oligonucleotide; TTT chr11 5267685 5267706 5267702 5267707 +
attagtattctatctcccacgg

SEQ ID NO: 91206 - DNA, 22 bp, Artificial Sequence
  Synthetic oligonucleotide; TTA chr11 5267686 5267707 5267703 5267708 +
ttagtattctatctcccacgga

SEQ ID NO: 91207 - DNA, 22 bp, Artificial Sequence
  Synthetic oligonucleotide; TTA chr11 5267689 5267710 5267706 5267711 +
gtattctatctcccacggaaag

SEQ ID NO: 91208 - DNA, 22 bp, Artificial Sequence
  Synthetic oligonucleotide; TTC chr11 5267695 5267716 5267712 5267717 +
tatctcccacggaaagtcttca

SEQ ID NO: 91209 - DNA, 22 bp, Artificial Sequence
  Synthetic oligonucleotide; CTA chr11 5267697 5267718 5267714 5267719 +
tctcccacggaaagtcttcatc

SEQ ID NO: 91210 - DNA, 22 bp, Artificial Sequence
  Synthetic oligonucleotide; CTC chr11 5267701 5267722 5267718 5267723 +
ccacggaaagtcttcatcacac

SEQ ID NO: 91211 - DNA, 22 bp, Artificial Sequence
  Synthetic oligonucleotide; CTT chr11 5267715 5267736 5267732 5267737 +
catcacactctccaaaaacttt

SEQ ID NO: 91212 - DNA, 22 bp, Artificial Sequence
  Synthetic oligonucleotide; TTC chr11 5267716 5267737 5267733 5267738 +
atcacactctccaaaaactttc

SEQ ID NO: 91213 - DNA, 22 bp, Artificial Sequence
  Synthetic oligonucleotide; CTC chr11 5267725 5267746 5267742 5267747 +
tccaaaaactttcccactcagg

SEQ ID NO: 91214 - DNA, 22 bp, Artificial Sequence
  Synthetic oligonucleotide; CTC chr11 5267727 5267748 5267744 5267749 +
caaaaactttcccactcaggtc

SEQ ID NO: 91215 - DNA, 22 bp, Artificial Sequence
  Synthetic oligonucleotide; CTT chr11 5267736 5267757 5267753 5267758 +
tcccactcaggtcctaactcta

SEQ ID NO: 91216 - DNA, 22 bp, Artificial Sequence
  Synthetic oligonucleotide; TTT chr11 5267737 5267758 5267754 5267759 +
cccactcaggtcctaactctaa

SEQ ID NO: 91217 - DNA, 22 bp, Artificial Sequence
  Synthetic oligonucleotide; TTC chr11 5267738 5267759 5267755 5267760 +
ccactcaggtcctaactctaac

SEQ ID NO: 91218 - DNA, 22 bp, Artificial Sequence
  Synthetic oligonucleotide; CTC chr11 5267744 5267765 5267761 5267766 +
aggtcctaactctaactttatt

SEQ ID NO: 91219 - DNA, 22 bp, Artificial Sequence
  Synthetic oligonucleotide; CTA chr11 5267752 5267773 5267769 5267774 +
actctaactttattttagtgca

SEQ ID NO: 91220 - DNA, 22 bp, Artificial Sequence
  Synthetic oligonucleotide; CTC chr11 5267756 5267777 5267773 5267778 +
taactttattttagtgcatgtt

SEQ ID NO: 91221 - DNA, 22 bp, Artificial Sequence
  Synthetic oligonucleotide; CTA chr11 5267758 5267779 5267775 5267780 +
actttattttagtgcatgttac

SEQ ID NO: 91222 - DNA, 22 bp, Artificial Sequence
  Synthetic oligonucleotide; CTT chr11 5267762 5267783 5267779 5267784 +
tattttagtgcatgttacattc

SEQ ID NO: 91223 - DNA, 22 bp, Artificial Sequence
  Synthetic oligonucleotide; TTT chr11 5267763 5267784 5267780 5267785 +
attttagtgcatgttacattct

SEQ ID NO: 91224 - DNA, 22 bp, Artificial Sequence
  Synthetic oligonucleotide; TTA chr11 5267764 5267785 5267781 5267786 +
ttttagtgcatgttacattcta

SEQ ID NO: 91225 - DNA, 22 bp, Artificial Sequence
  Synthetic oligonucleotide; TTT chr11 5267767 5267788 5267784 5267789 +
tagtgcatgttacattctatca

SEQ ID NO: 91226 - DNA, 22 bp, Artificial Sequence
  Synthetic oligonucleotide; TTT chr11 5267768 5267789 5267785 5267790 +
agtgcatgttacattctatcag

SEQ ID NO: 91227 - DNA, 22 bp, Artificial Sequence
  Synthetic oligonucleotide; TTA chr11 5267769 5267790 5267786 5267791 +
gtgcatgttacattctatcaga

SEQ ID NO: 91228 - DNA, 22 bp, Artificial Sequence
  Synthetic oligonucleotide; TTA chr11 5267779 5267800 5267796 5267801 +
cattctatcagaagataatgca

SEQ ID NO: 91229 - DNA, 22 bp, Artificial Sequence
  Synthetic oligonucleotide; TTC chr11 5267784 5267805 5267801 5267806 +
tatcagaagataatgcacaatg

SEQ ID NO: 91230 - DNA, 22 bp, Artificial Sequence
  Synthetic oligonucleotide; CTA chr11 5267786 5267807 5267803 5267808 +
tcagaagataatgcacaatgat

SEQ ID NO: 91231 - DNA, 22 bp, Artificial Sequence
  Synthetic oligonucleotide; CTT chr11 5267820 5267841 5267837 5267842 +
agcttcagctaacccatgaaat

SEQ ID NO: 91232 - DNA, 22 bp, Artificial Sequence
  Synthetic oligonucleotide; TTA chr11 5267821 5267842 5267838 5267843 +
gcttcagctaacccatgaaata

SEQ ID NO: 91233 - DNA, 22 bp, Artificial Sequence
  Synthetic oligonucleotide; CTT chr11 5267825 5267846 5267842 5267847 +
cagctaacccatgaaataatgg

SEQ ID NO: 91234 - DNA, 22 bp, Artificial Sequence
  Synthetic oligonucleotide; TTC chr11 5267826 5267847 5267843 5267848 +
agctaacccatgaaataatgga

SEQ ID NO: 91235 - DNA, 22 bp, Artificial Sequence
  Synthetic oligonucleotide; CTA chr11 5267831 5267852 5267848 5267853 +
acccatgaaataatggaatcct

SEQ ID NO: 91236 - DNA, 22 bp, Artificial Sequence
  Synthetic oligonucleotide; CTT chr11 5267854 5267875 5267871 5267876 +
catggaaagagcaggctattgt

SEQ ID NO: 91237 - DNA, 22 bp, Artificial Sequence
  Synthetic oligonucleotide; TTC chr11 5267855 5267876 5267872 5267877 +
atggaaagagcaggctattgtt

SEQ ID NO: 91238 - DNA, 22 bp, Artificial Sequence
  Synthetic oligonucleotide; CTA chr11 5267872 5267893 5267889 5267894 +
ttgttgatacacactcatctta

SEQ ID NO: 91239 - DNA, 22 bp, Artificial Sequence
  Synthetic oligonucleotide; TTG chr11 5267875 5267896 5267892 5267897 +
ttgatacacactcatcttatct

SEQ ID NO: 91240 - DNA, 22 bp, Artificial Sequence
  Synthetic oligonucleotide; TTG chr11 5267878 5267899 5267895 5267900 +
atacacactcatcttatctcca

SEQ ID NO: 91241 - DNA, 22 bp, Artificial Sequence
  Synthetic oligonucleotide; CTC chr11 5267888 5267909 5267905 5267910 +
atcttatctccaaatcaatttc

SEQ ID NO: 91242 - DNA, 22 bp, Artificial Sequence
  Synthetic oligonucleotide; CTT chr11 5267893 5267914 5267910 5267915 +
atctccaaatcaatttcataaa

SEQ ID NO: 91243 - DNA, 22 bp, Artificial Sequence
  Synthetic oligonucleotide; TTA chr11 5267894 5267915 5267911 5267916 +
tctccaaatcaatttcataaaa

SEQ ID NO: 91244 - DNA, 22 bp, Artificial Sequence
  Synthetic oligonucleotide; CTC chr11 5267898 5267919 5267915 5267920 +
caaatcaatttcataaaacatg

SEQ ID NO: 91245 - DNA, 22 bp, Artificial Sequence
  Synthetic oligonucleotide; TTT chr11 5267909 5267930 5267926 5267931 +
cataaaacatgtgacaagctag

SEQ ID NO: 91246 - DNA, 22 bp, Artificial Sequence
  Synthetic oligonucleotide; TTC chr11 5267910 5267931 5267927 5267932 +
ataaaacatgtgacaagctagc

SEQ ID NO: 91247 - DNA, 22 bp, Artificial Sequence
  Synthetic oligonucleotide; CTA chr11 5267930 5267951 5267947 5267952 +
gctacttcaaaatgtaaataag

SEQ ID NO: 91248 - DNA, 22 bp, Artificial Sequence
  Synthetic oligonucleotide; CTA chr11 5267934 5267955 5267951 5267956 +
cttcaaaatgtaaataagagta

SEQ ID NO: 91249 - DNA, 22 bp, Artificial Sequence
  Synthetic oligonucleotide; CTT chr11 5267937 5267958 5267954 5267959 +
caaaatgtaaataagagtaaat

SEQ ID NO: 91250 - DNA, 22 bp, Artificial Sequence
  Synthetic oligonucleotide; TTC chr11 5267938 5267959 5267955 5267960 +
aaaatgtaaataagagtaaatt

SEQ ID NO: 91251 - DNA, 22 bp, Artificial Sequence
  Synthetic oligonucleotide; TTA chr11 5267961 5267982 5267978 5267983 +
aaatagtaattctagcctatat

SEQ ID NO: 91252 - DNA, 22 bp, Artificial Sequence
  Synthetic oligonucleotide; TTC chr11 5267973 5267994 5267990 5267995 +
tagcctatatcttggatatcta

SEQ ID NO: 91253 - DNA, 22 bp, Artificial Sequence
  Synthetic oligonucleotide; CTA chr11 5267975 5267996 5267992 5267997 +
gcctatatcttggatatctatg

SEQ ID NO: 91254 - DNA, 22 bp, Artificial Sequence
  Synthetic oligonucleotide; CTA chr11 5267980 5268001 5267997 5268002 +
tatcttggatatctatgaagtt

SEQ ID NO: 91255 - DNA, 22 bp, Artificial Sequence
  Synthetic oligonucleotide; CTT chr11 5267986 5268007 5268003 5268008 +
ggatatctatgaagttttgttt

SEQ ID NO: 91256 - DNA, 22 bp, Artificial Sequence
  Synthetic oligonucleotide; TTG chr11 5267987 5268008 5268004 5268009 +
gatatctatgaagttttgtttt

SEQ ID NO: 91257 - DNA, 22 bp, Artificial Sequence
  Synthetic oligonucleotide; CTA chr11 5267995 5268016 5268012 5268017 +
tgaagttttgttttgttttgtt

SEQ ID NO: 91258 - DNA, 22 bp, Artificial Sequence
  Synthetic oligonucleotide; TTT chr11 5268003 5268024 5268020 5268025 +
tgttttgttttgtttttgtttt

SEQ ID NO: 91259 - DNA, 22 bp, Artificial Sequence
  Synthetic oligonucleotide; TTT chr11 5268004 5268025 5268021 5268026 +
gttttgttttgtttttgttttt

SEQ ID NO: 91260 - DNA, 22 bp, Artificial Sequence
  Synthetic oligonucleotide; TTG chr11 5268005 5268026 5268022 5268027 +
ttttgttttgtttttgttttta

SEQ ID NO: 91261 - DNA, 22 bp, Artificial Sequence
  Synthetic oligonucleotide; TTT chr11 5268008 5268029 5268025 5268030 +
tgttttgtttttgtttttaatg

SEQ ID NO: 91262 - DNA, 22 bp, Artificial Sequence
  Synthetic oligonucleotide; TTT chr11 5268009 5268030 5268026 5268031 +
gttttgtttttgtttttaatga

SEQ ID NO: 91263 - DNA, 22 bp, Artificial Sequence
  Synthetic oligonucleotide; TTG chr11 5268010 5268031 5268027 5268032 +
ttttgtttttgtttttaatgaa

SEQ ID NO: 91264 - DNA, 22 bp, Artificial Sequence
  Synthetic oligonucleotide; TTT chr11 5268013 5268034 5268030 5268035 +
tgtttttgtttttaatgaaaag

SEQ ID NO: 91265 - DNA, 22 bp, Artificial Sequence
  Synthetic oligonucleotide; TTT chr11 5268014 5268035 5268031 5268036 +
gtttttgtttttaatgaaaagt

SEQ ID NO: 91266 - DNA, 22 bp, Artificial Sequence
  Synthetic oligonucleotide; TTG chr11 5268015 5268036 5268032 5268037 +
tttttgtttttaatgaaaagtg

SEQ ID NO: 91267 - DNA, 22 bp, Artificial Sequence
  Synthetic oligonucleotide; TTT chr11 5268018 5268039 5268035 5268040 +
ttgtttttaatgaaaagtgaca

SEQ ID NO: 91268 - DNA, 22 bp, Artificial Sequence
  Synthetic oligonucleotide; TTT chr11 5268019 5268040 5268036 5268041 +
tgtttttaatgaaaagtgacat

SEQ ID NO: 91269 - DNA, 22 bp, Artificial Sequence
  Synthetic oligonucleotide; TTT chr11 5268020 5268041 5268037 5268042 +
gtttttaatgaaaagtgacatg

SEQ ID NO: 91270 - DNA, 22 bp, Artificial Sequence
  Synthetic oligonucleotide; TTG chr11 5268021 5268042 5268038 5268043 +
tttttaatgaaaagtgacatgt

SEQ ID NO: 91271 - DNA, 22 bp, Artificial Sequence
  Synthetic oligonucleotide; TTT chr11 5268024 5268045 5268041 5268046 +
ttaatgaaaagtgacatgtacc

SEQ ID NO: 91272 - DNA, 22 bp, Artificial Sequence
  Synthetic oligonucleotide; TTT chr11 5268025 5268046 5268042 5268047 +
taatgaaaagtgacatgtacca

SEQ ID NO: 91273 - DNA, 22 bp, Artificial Sequence
  Synthetic oligonucleotide; TTT chr11 5268026 5268047 5268043 5268048 +
aatgaaaagtgacatgtaccac

SEQ ID NO: 91274 - DNA, 22 bp, Artificial Sequence
  Synthetic oligonucleotide; TTA chr11 5268027 5268048 5268044 5268049 +
atgaaaagtgacatgtaccaca

SEQ ID NO: 91275 - DNA, 22 bp, Artificial Sequence
  Synthetic oligonucleotide; CTG chr11 5268055 5268076 5268072 5268077 +
ctttctcaggtaccactaacag

SEQ ID NO: 91276 - DNA, 22 bp, Artificial Sequence
  Synthetic oligonucleotide; CTT chr11 5268058 5268079 5268075 5268080 +
tctcaggtaccactaacagctc

SEQ ID NO: 91277 - DNA, 22 bp, Artificial Sequence
  Synthetic oligonucleotide; TTT chr11 5268059 5268080 5268076 5268081 +
ctcaggtaccactaacagctcc

SEQ ID NO: 91278 - DNA, 22 bp, Artificial Sequence
  Synthetic oligonucleotide; TTC chr11 5268060 5268081 5268077 5268082 +
tcaggtaccactaacagctcct

SEQ ID NO: 91279 - DNA, 22 bp, Artificial Sequence
  Synthetic oligonucleotide; CTC chr11 5268062 5268083 5268079 5268084 +
aggtaccactaacagctccttc

SEQ ID NO: 91280 - DNA, 22 bp, Artificial Sequence
  Synthetic oligonucleotide; CTA chr11 5268073 5268094 5268090 5268095 +
acagctccttctttccccggtg

SEQ ID NO: 91281 - DNA, 22 bp, Artificial Sequence
  Synthetic oligonucleotide; CTC chr11 5268080 5268101 5268097 5268102 +
cttctttccccggtgcagtaaa

SEQ ID NO: 91282 - DNA, 22 bp, Artificial Sequence
  Synthetic oligonucleotide; CTT chr11 5268083 5268104 5268100 5268105 +
ctttccccggtgcagtaaaaac

SEQ ID NO: 91283 - DNA, 22 bp, Artificial Sequence
  Synthetic oligonucleotide; TTC chr11 5268084 5268105 5268101 5268106 +
tttccccggtgcagtaaaaact

SEQ ID NO: 91284 - DNA, 22 bp, Artificial Sequence
  Synthetic oligonucleotide; CTT chr11 5268086 5268107 5268103 5268108 +
tccccggtgcagtaaaaactgc

SEQ ID NO: 91285 - DNA, 22 bp, Artificial Sequence
  Synthetic oligonucleotide; TTT chr11 5268087 5268108 5268104 5268109 +
ccccggtgcagtaaaaactgcc

SEQ ID NO: 91286 - DNA, 22 bp, Artificial Sequence
  Synthetic oligonucleotide; TTC chr11 5268088 5268109 5268105 5268110 +
cccggtgcagtaaaaactgcct

SEQ ID NO: 91287 - DNA, 22 bp, Artificial Sequence
  Synthetic oligonucleotide; CTG chr11 5268107 5268128 5268124 5268129 +
cctaggagtctctgtccactta

SEQ ID NO: 91288 - DNA, 22 bp, Artificial Sequence
  Synthetic oligonucleotide; CTA chr11 5268111 5268132 5268128 5268133 +
ggagtctctgtccacttaatta

SEQ ID NO: 91289 - DNA, 22 bp, Artificial Sequence
  Synthetic oligonucleotide; CTC chr11 5268119 5268140 5268136 5268141 +
tgtccacttaattaaccatttt

SEQ ID NO: 91290 - DNA, 22 bp, Artificial Sequence
  Synthetic oligonucleotide; CTG chr11 5268121 5268142 5268138 5268143 +
tccacttaattaaccattttcc

SEQ ID NO: 91291 - DNA, 22 bp, Artificial Sequence
  Synthetic oligonucleotide; CTT chr11 5268128 5268149 5268145 5268150 +
aattaaccattttcccaccccg

SEQ ID NO: 91292 - DNA, 22 bp, Artificial Sequence
  Synthetic oligonucleotide; TTA chr11 5268129 5268150 5268146 5268151 +
attaaccattttcccaccccga

SEQ ID NO: 91293 - DNA, 22 bp, Artificial Sequence
  Synthetic oligonucleotide; TTA chr11 5268133 5268154 5268150 5268155 +
accattttcccaccccgataaa

SEQ ID NO: 91294 - DNA, 22 bp, Artificial Sequence
  Synthetic oligonucleotide; TTT chr11 5268140 5268161 5268157 5268162 +
tcccaccccgataaagattttt

SEQ ID NO: 91295 - DNA, 22 bp, Artificial Sequence
  Synthetic oligonucleotide; TTT chr11 5268141 5268162 5268158 5268163 +
cccaccccgataaagatttttc

SEQ ID NO: 91296 - DNA, 22 bp, Artificial Sequence
  Synthetic oligonucleotide; TTC chr11 5268142 5268163 5268159 5268164 +
ccaccccgataaagatttttct

SEQ ID NO: 91297 - DNA, 22 bp, Artificial Sequence
  Synthetic oligonucleotide; TTT chr11 5268160 5268181 5268177 5268182 +
ttctccatcatatcatcctcct

SEQ ID NO: 91298 - DNA, 22 bp, Artificial Sequence
  Synthetic oligonucleotide; TTT chr11 5268161 5268182 5268178 5268183 +
tctccatcatatcatcctcctt

SEQ ID NO: 91299 - DNA, 22 bp, Artificial Sequence
  Synthetic oligonucleotide; TTT chr11 5268162 5268183 5268179 5268184 +
ctccatcatatcatcctccttg

SEQ ID NO: 91300 - DNA, 22 bp, Artificial Sequence
  Synthetic oligonucleotide; TTC chr11 5268163 5268184 5268180 5268185 +
tccatcatatcatcctccttgg

SEQ ID NO: 91301 - DNA, 22 bp, Artificial Sequence
  Synthetic oligonucleotide; CTC chr11 5268165 5268186 5268182 5268187 +
catcatatcatcctccttggaa

SEQ ID NO: 91302 - DNA, 22 bp, Artificial Sequence
  Synthetic oligonucleotide; CTC chr11 5268180 5268201 5268197 5268202 +
cttggaatcctggaattctccc

SEQ ID NO: 91303 - DNA, 22 bp, Artificial Sequence
  Synthetic oligonucleotide; CTT chr11 5268183 5268204 5268200 5268205 +
ggaatcctggaattctcccata

SEQ ID NO: 91304 - DNA, 22 bp, Artificial Sequence
  Synthetic oligonucleotide; TTG chr11 5268184 5268205 5268201 5268206 +
gaatcctggaattctcccataa

SEQ ID NO: 91305 - DNA, 22 bp, Artificial Sequence
  Synthetic oligonucleotide; CTG chr11 5268192 5268213 5268209 5268214 +
gaattctcccataacatccaca

SEQ ID NO: 91306 - DNA, 22 bp, Artificial Sequence
  Synthetic oligonucleotide; TTC chr11 5268198 5268219 5268215 5268220 +
tcccataacatccacattaatt

SEQ ID NO: 91307 - DNA, 22 bp, Artificial Sequence
  Synthetic oligonucleotide; CTC chr11 5268200 5268221 5268217 5268222 +
ccataacatccacattaatttt

SEQ ID NO: 91308 - DNA, 22 bp, Artificial Sequence
  Synthetic oligonucleotide; TTA chr11 5268217 5268238 5268234 5268239 +
attttacaagcccccatacatt

SEQ ID NO: 91309 - DNA, 22 bp, Artificial Sequence
  Synthetic oligonucleotide; TTT chr11 5268221 5268242 5268238 5268243 +
tacaagcccccatacatttctt

SEQ ID NO: 91310 - DNA, 22 bp, Artificial Sequence
  Synthetic oligonucleotide; TTT chr11 5268222 5268243 5268239 5268244 +
acaagcccccatacatttctta

SEQ ID NO: 91311 - DNA, 22 bp, Artificial Sequence
  Synthetic oligonucleotide; TTA chr11 5268223 5268244 5268240 5268245 +
caagcccccatacatttcttaa

SEQ ID NO: 91312 - DNA, 22 bp, Artificial Sequence
  Synthetic oligonucleotide; TTT chr11 5268240 5268261 5268257 5268262 +
cttaaggaagctcttggttctt

SEQ ID NO: 91313 - DNA, 22 bp, Artificial Sequence
  Synthetic oligonucleotide; TTC chr11 5268241 5268262 5268258 5268263 +
ttaaggaagctcttggttcttc

SEQ ID NO: 91314 - DNA, 22 bp, Artificial Sequence
  Synthetic oligonucleotide; CTT chr11 5268243 5268264 5268260 5268265 +
aaggaagctcttggttcttcct

SEQ ID NO: 91315 - DNA, 22 bp, Artificial Sequence
  Synthetic oligonucleotide; TTA chr11 5268244 5268265 5268261 5268266 +
aggaagctcttggttcttccta

SEQ ID NO: 91316 - DNA, 22 bp, Artificial Sequence
  Synthetic oligonucleotide; CTC chr11 5268253 5268274 5268270 5268275 +
ttggttcttcctatgtttctct

SEQ ID NO: 91317 - DNA, 22 bp, Artificial Sequence
  Synthetic oligonucleotide; CTT chr11 5268255 5268276 5268272 5268277 +
ggttcttcctatgtttctctcc

SEQ ID NO: 91318 - DNA, 22 bp, Artificial Sequence
  Synthetic oligonucleotide; TTG chr11 5268256 5268277 5268273 5268278 +
gttcttcctatgtttctctcca

SEQ ID NO: 91319 - DNA, 22 bp, Artificial Sequence
  Synthetic oligonucleotide; TTC chr11 5268260 5268281 5268277 5268282 +
ttcctatgtttctctccatccc

SEQ ID NO: 91320 - DNA, 22 bp, Artificial Sequence
  Synthetic oligonucleotide; CTT chr11 5268262 5268283 5268279 5268284 +
cctatgtttctctccatccctc

SEQ ID NO: 91321 - DNA, 22 bp, Artificial Sequence
  Synthetic oligonucleotide; TTC chr11 5268263 5268284 5268280 5268285 +
ctatgtttctctccatccctca

SEQ ID NO: 91322 - DNA, 22 bp, Artificial Sequence
  Synthetic oligonucleotide; CTA chr11 5268266 5268287 5268283 5268288 +
tgtttctctccatccctcagcc

SEQ ID NO: 91323 - DNA, 22 bp, Artificial Sequence
  Synthetic oligonucleotide; TTT chr11 5268271 5268292 5268288 5268293 +
ctctccatccctcagcccatga

SEQ ID NO: 91324 - DNA, 22 bp, Artificial Sequence
  Synthetic oligonucleotide; TTC chr11 5268272 5268293 5268289 5268294 +
tctccatccctcagcccatgaa

SEQ ID NO: 91325 - DNA, 22 bp, Artificial Sequence
  Synthetic oligonucleotide; CTC chr11 5268274 5268295 5268291 5268296 +
tccatccctcagcccatgaaca

SEQ ID NO: 91326 - DNA, 22 bp, Artificial Sequence
  Synthetic oligonucleotide; CTC chr11 5268276 5268297 5268293 5268298 +
catccctcagcccatgaacact

SEQ ID NO: 91327 - DNA, 22 bp, Artificial Sequence
  Synthetic oligonucleotide; CTC chr11 5268284 5268305 5268301 5268306 +
agcccatgaacactttttcctt

SEQ ID NO: 91328 - DNA, 22 bp, Artificial Sequence
  Synthetic oligonucleotide; CTT chr11 5268299 5268320 5268316 5268321 +
tttccttttaacacaagagtaa

SEQ ID NO: 91329 - DNA, 22 bp, Artificial Sequence
  Synthetic oligonucleotide; TTT chr11 5268300 5268321 5268317 5268322 +
ttccttttaacacaagagtaaa

SEQ ID NO: 91330 - DNA, 22 bp, Artificial Sequence
  Synthetic oligonucleotide; TTT chr11 5268301 5268322 5268318 5268323 +
tccttttaacacaagagtaaaa

SEQ ID NO: 91331 - DNA, 22 bp, Artificial Sequence
  Synthetic oligonucleotide; TTT chr11 5268302 5268323 5268319 5268324 +
ccttttaacacaagagtaaaag

SEQ ID NO: 91332 - DNA, 22 bp, Artificial Sequence
  Synthetic oligonucleotide; TTC chr11 5268303 5268324 5268320 5268325 +
cttttaacacaagagtaaaaga

SEQ ID NO: 91333 - DNA, 22 bp, Artificial Sequence
  Synthetic oligonucleotide; CTT chr11 5268306 5268327 5268323 5268328 +
ttaacacaagagtaaaagatgg

SEQ ID NO: 91334 - DNA, 22 bp, Artificial Sequence
  Synthetic oligonucleotide; TTT chr11 5268307 5268328 5268324 5268329 +
taacacaagagtaaaagatgga

SEQ ID NO: 91335 - DNA, 22 bp, Artificial Sequence
  Synthetic oligonucleotide; TTT chr11 5268308 5268329 5268325 5268330 +
aacacaagagtaaaagatggag

SEQ ID NO: 91336 - DNA, 22 bp, Artificial Sequence
  Synthetic oligonucleotide; TTA chr11 5268309 5268330 5268326 5268331 +
acacaagagtaaaagatggaga

SEQ ID NO: 91337 - DNA, 22 bp, Artificial Sequence
  Synthetic oligonucleotide; TTG chr11 5268342 5268363 5268359 5268364 +
caatttttgattactgaagaaa

SEQ ID NO: 91338 - DNA, 22 bp, Artificial Sequence
  Synthetic oligonucleotide; TTT chr11 5268348 5268369 5268365 5268370 +
ttgattactgaagaaaatgtac

SEQ ID NO: 91339 - DNA, 22 bp, Artificial Sequence
  Synthetic oligonucleotide; TTT chr11 5268349 5268370 5268366 5268371 +
tgattactgaagaaaatgtact

SEQ ID NO: 91340 - DNA, 22 bp, Artificial Sequence
  Synthetic oligonucleotide; TTT chr11 5268350 5268371 5268367 5268372 +
gattactgaagaaaatgtactt

SEQ ID NO: 91341 - DNA, 22 bp, Artificial Sequence
  Synthetic oligonucleotide; TTG chr11 5268351 5268372 5268368 5268373 +
attactgaagaaaatgtacttt

SEQ ID NO: 91342 - DNA, 22 bp, Artificial Sequence
  Synthetic oligonucleotide; TTA chr11 5268355 5268376 5268372 5268377 +
ctgaagaaaatgtactttatta

SEQ ID NO: 91343 - DNA, 22 bp, Artificial Sequence
  Synthetic oligonucleotide; CTG chr11 5268358 5268379 5268375 5268380 +
aagaaaatgtactttattaaac

SEQ ID NO: 91344 - DNA, 22 bp, Artificial Sequence
  Synthetic oligonucleotide; CTT chr11 5268372 5268393 5268389 5268394 +
tattaaacagaaggctttctct

SEQ ID NO: 91345 - DNA, 22 bp, Artificial Sequence
  Synthetic oligonucleotide; TTT chr11 5268373 5268394 5268390 5268395 +
attaaacagaaggctttctctc

SEQ ID NO: 91346 - DNA, 22 bp, Artificial Sequence
  Synthetic oligonucleotide; TTA chr11 5268374 5268395 5268391 5268396 +
ttaaacagaaggctttctctca

SEQ ID NO: 91347 - DNA, 22 bp, Artificial Sequence
  Synthetic oligonucleotide; TTA chr11 5268377 5268398 5268394 5268399 +
aacagaaggctttctctcaagg

SEQ ID NO: 91348 - DNA, 22 bp, Artificial Sequence
  Synthetic oligonucleotide; CTT chr11 5268389 5268410 5268406 5268411 +
tctctcaaggccaagcccagtc

SEQ ID NO: 91349 - DNA, 22 bp, Artificial Sequence
  Synthetic oligonucleotide; TTT chr11 5268390 5268411 5268407 5268412 +
ctctcaaggccaagcccagtcc

SEQ ID NO: 91350 - DNA, 22 bp, Artificial Sequence
  Synthetic oligonucleotide; TTC chr11 5268391 5268412 5268408 5268413 +
tctcaaggccaagcccagtccc

SEQ ID NO: 91351 - DNA, 22 bp, Artificial Sequence
  Synthetic oligonucleotide; CTC chr11 5268393 5268414 5268410 5268415 +
tcaaggccaagcccagtcccca

SEQ ID NO: 91352 - DNA, 22 bp, Artificial Sequence
  Synthetic oligonucleotide; CTC chr11 5268395 5268416 5268412 5268417 +
aaggccaagcccagtccccatg

SEQ ID NO: 91353 - DNA, 22 bp, Artificial Sequence
  Synthetic oligonucleotide; CTG chr11 5268453 5268474 5268470 5268475 +
caaactggaagagaactcagtg

SEQ ID NO: 91354 - DNA, 22 bp, Artificial Sequence
  Synthetic oligonucleotide; CTG chr11 5268460 5268481 5268477 5268482 +
gaagagaactcagtggtactta

SEQ ID NO: 91355 - DNA, 22 bp, Artificial Sequence
  Synthetic oligonucleotide; CTC chr11 5268471 5268492 5268488 5268493 +
agtggtacttatgggccagggc

SEQ ID NO: 91356 - DNA, 22 bp, Artificial Sequence
  Synthetic oligonucleotide; CTT chr11 5268481 5268502 5268498 5268503 +
atgggccagggcaatggcgaca

SEQ ID NO: 91357 - DNA, 22 bp, Artificial Sequence
  Synthetic oligonucleotide; TTA chr11 5268482 5268503 5268499 5268504 +
tgggccagggcaatggcgacag

SEQ ID NO: 91358 - DNA, 22 bp, Artificial Sequence
  Synthetic oligonucleotide; CTT chr11 5268517 5268538 5268534 5268539 +
ctgccaggcagcctgcacttca

SEQ ID NO: 91359 - DNA, 22 bp, Artificial Sequence
  Synthetic oligonucleotide; TTC chr11 5268518 5268539 5268535 5268540 +
tgccaggcagcctgcacttcag

SEQ ID NO: 91360 - DNA, 22 bp, Artificial Sequence
  Synthetic oligonucleotide; CTG chr11 5268520 5268541 5268537 5268542 +
ccaggcagcctgcacttcaggg

SEQ ID NO: 91361 - DNA, 22 bp, Artificial Sequence
  Synthetic oligonucleotide; CTG chr11 5268532 5268553 5268549 5268554 +
cacttcaggggtgaactccttg

SEQ ID NO: 91362 - DNA, 22 bp, Artificial Sequence
  Synthetic oligonucleotide; CTT chr11 5268537 5268558 5268554 5268559 +
caggggtgaactccttgccaaa

SEQ ID NO: 91363 - DNA, 22 bp, Artificial Sequence
  Synthetic oligonucleotide; TTC chr11 5268538 5268559 5268555 5268560 +
aggggtgaactccttgccaaag

SEQ ID NO: 91364 - DNA, 22 bp, Artificial Sequence
  Synthetic oligonucleotide; CTC chr11 5268550 5268571 5268567 5268572 +
cttgccaaagtgagtagccaga

SEQ ID NO: 91365 - DNA, 22 bp, Artificial Sequence
  Synthetic oligonucleotide; CTT chr11 5268553 5268574 5268570 5268575 +
gccaaagtgagtagccagaata

SEQ ID NO: 91366 - DNA, 22 bp, Artificial Sequence
  Synthetic oligonucleotide; TTG chr11 5268554 5268575 5268571 5268576 +
ccaaagtgagtagccagaataa

SEQ ID NO: 91367 - DNA, 22 bp, Artificial Sequence
  Synthetic oligonucleotide; TTA chr11 5268590 5268611 5268607 5268612 +
cccaggagctgttaggcaaaag

SEQ ID NO: 91368 - DNA, 22 bp, Artificial Sequence
  Synthetic oligonucleotide; CTG chr11 5268601 5268622 5268618 5268623 +
ttaggcaaaagacaaaataaca

SEQ ID NO: 91369 - DNA, 22 bp, Artificial Sequence
  Synthetic oligonucleotide; TTA chr11 5268604 5268625 5268621 5268626 +
ggcaaaagacaaaataacacac

SEQ ID NO: 91370 - DNA, 22 bp, Artificial Sequence
  Synthetic oligonucleotide; TTG chr11 5268636 5268657 5268653 5268658 +
agtagaagtttccgaaaacaac

SEQ ID NO: 91371 - DNA, 22 bp, Artificial Sequence
  Synthetic oligonucleotide; TTT chr11 5268647 5268668 5268664 5268669 +
ccgaaaacaacttgatgaaaaa

SEQ ID NO: 91372 - DNA, 22 bp, Artificial Sequence
  Synthetic oligonucleotide; TTC chr11 5268648 5268669 5268665 5268670 +
cgaaaacaacttgatgaaaaaa

SEQ ID NO: 91373 - DNA, 22 bp, Artificial Sequence
  Synthetic oligonucleotide; CTT chr11 5268660 5268681 5268677 5268682 +
gatgaaaaaacaaacaaacaaa

SEQ ID NO: 91374 - DNA, 22 bp, Artificial Sequence
  Synthetic oligonucleotide; TTG chr11 5268661 5268682 5268678 5268683 +
atgaaaaaacaaacaaacaaac

SEQ ID NO: 91375 - DNA, 22 bp, Artificial Sequence
  Synthetic oligonucleotide; CTT chr11 5268694 5268715 5268711 5268716 +
tatacctacattcctagacaac

SEQ ID NO: 91376 - DNA, 22 bp, Artificial Sequence
  Synthetic oligonucleotide; TTT chr11 5268695 5268716 5268712 5268717 +
atacctacattcctagacaacc

SEQ ID NO: 91377 - DNA, 22 bp, Artificial Sequence
  Synthetic oligonucleotide; TTA chr11 5268696 5268717 5268713 5268718 +
tacctacattcctagacaaccc

SEQ ID NO: 91378 - DNA, 22 bp, Artificial Sequence
  Synthetic oligonucleotide; CTA chr11 5268702 5268723 5268719 5268724 +
cattcctagacaaccctgacct

SEQ ID NO: 91379 - DNA, 22 bp, Artificial Sequence
  Synthetic oligonucleotide; TTC chr11 5268707 5268728 5268724 5268729 +
ctagacaaccctgacctcaaac

SEQ ID NO: 91380 - DNA, 22 bp, Artificial Sequence
  Synthetic oligonucleotide; CTA chr11 5268710 5268731 5268727 5268732 +
gacaaccctgacctcaaactgt

SEQ ID NO: 91381 - DNA, 22 bp, Artificial Sequence
  Synthetic oligonucleotide; CTG chr11 5268720 5268741 5268737 5268742 +
acctcaaactgttccaaggttt

SEQ ID NO: 91382 - DNA, 22 bp, Artificial Sequence
  Synthetic oligonucleotide; CTC chr11 5268725 5268746 5268742 5268747 +
aaactgttccaaggtttgtgcc

SEQ ID NO: 91383 - DNA, 22 bp, Artificial Sequence
  Synthetic oligonucleotide; CTG chr11 5268731 5268752 5268748 5268753 +
ttccaaggtttgtgcccaccca

SEQ ID NO: 91384 - DNA, 22 bp, Artificial Sequence
  Synthetic oligonucleotide; TTC chr11 5268734 5268755 5268751 5268756 +
caaggtttgtgcccacccaaaa

SEQ ID NO: 91385 - DNA, 22 bp, Artificial Sequence
  Synthetic oligonucleotide; TTT chr11 5268742 5268763 5268759 5268764 +
gtgcccacccaaaaaattcaga

SEQ ID NO: 91386 - DNA, 22 bp, Artificial Sequence
  Synthetic oligonucleotide; TTG chr11 5268743 5268764 5268760 5268765 +
tgcccacccaaaaaattcagat

SEQ ID NO: 91387 - DNA, 22 bp, Artificial Sequence
  Synthetic oligonucleotide; TTC chr11 5268761 5268782 5268778 5268783 +
agatgagcttaggttcaatttt

SEQ ID NO: 91388 - DNA, 22 bp, Artificial Sequence
  Synthetic oligonucleotide; CTT chr11 5268771 5268792 5268788 5268793 +
aggttcaattttattctatgag

SEQ ID NO: 91389 - DNA, 22 bp, Artificial Sequence
  Synthetic oligonucleotide; TTA chr11 5268772 5268793 5268789 5268794 +
ggttcaattttattctatgagc

SEQ ID NO: 91390 - DNA, 22 bp, Artificial Sequence
  Synthetic oligonucleotide; TTC chr11 5268777 5268798 5268794 5268799 +
aattttattctatgagccctac

SEQ ID NO: 91391 - DNA, 22 bp, Artificial Sequence
  Synthetic oligonucleotide; TTT chr11 5268782 5268803 5268799 5268804 +
tattctatgagccctacattca

SEQ ID NO: 91392 - DNA, 22 bp, Artificial Sequence
  Synthetic oligonucleotide; TTT chr11 5268783 5268804 5268800 5268805 +
attctatgagccctacattcaa

SEQ ID NO: 91393 - DNA, 22 bp, Artificial Sequence
  Synthetic oligonucleotide; TTA chr11 5268784 5268805 5268801 5268806 +
ttctatgagccctacattcaac

SEQ ID NO: 91394 - DNA, 22 bp, Artificial Sequence
  Synthetic oligonucleotide; TTC chr11 5268787 5268808 5268804 5268809 +
tatgagccctacattcaacatt

SEQ ID NO: 91395 - DNA, 22 bp, Artificial Sequence
  Synthetic oligonucleotide; CTA chr11 5268789 5268810 5268806 5268811 +
tgagccctacattcaacattct

SEQ ID NO: 91396 - DNA, 22 bp, Artificial Sequence
  Synthetic oligonucleotide; CTA chr11 5268798 5268819 5268815 5268820 +
cattcaacattctacctaccta

SEQ ID NO: 91397 - DNA, 22 bp, Artificial Sequence
  Synthetic oligonucleotide; TTC chr11 5268803 5268824 5268820 5268825 +
aacattctacctacctacaccc

SEQ ID NO: 91398 - DNA, 22 bp, Artificial Sequence
  Synthetic oligonucleotide; TTC chr11 5268810 5268831 5268827 5268832 +
tacctacctacaccctcacccc

SEQ ID NO: 91399 - DNA, 22 bp, Artificial Sequence
  Synthetic oligonucleotide; CTA chr11 5268812 5268833 5268829 5268834 +
cctacctacaccctcaccccct

SEQ ID NO: 91400 - DNA, 22 bp, Artificial Sequence
  Synthetic oligonucleotide; CTA chr11 5268816 5268837 5268833 5268838 +
cctacaccctcacccccttccc

SEQ ID NO: 91401 - DNA, 22 bp, Artificial Sequence
  Synthetic oligonucleotide; CTA chr11 5268820 5268841 5268837 5268842 +
caccctcacccccttccccatt

SEQ ID NO: 91402 - DNA, 22 bp, Artificial Sequence
  Synthetic oligonucleotide; CTC chr11 5268827 5268848 5268844 5268849 +
acccccttccccattttaccag

SEQ ID NO: 91403 - DNA, 22 bp, Artificial Sequence
  Synthetic oligonucleotide; CTT chr11 5268835 5268856 5268852 5268857 +
ccccattttaccagtattattg

SEQ ID NO: 91404 - DNA, 22 bp, Artificial Sequence
  Synthetic oligonucleotide; TTC chr11 5268836 5268857 5268853 5268858 +
cccattttaccagtattattgg

SEQ ID NO: 91405 - DNA, 22 bp, Artificial Sequence
  Synthetic oligonucleotide; TTT chr11 5268843 5268864 5268860 5268865 +
taccagtattattgggttccct

SEQ ID NO: 91406 - DNA, 22 bp, Artificial Sequence
  Synthetic oligonucleotide; TTT chr11 5268844 5268865 5268861 5268866 +
accagtattattgggttccctc

SEQ ID NO: 91407 - DNA, 22 bp, Artificial Sequence
  Synthetic oligonucleotide; TTA chr11 5268845 5268866 5268862 5268867 +
ccagtattattgggttccctct

SEQ ID NO: 91408 - DNA, 22 bp, Artificial Sequence
  Synthetic oligonucleotide; TTA chr11 5268854 5268875 5268871 5268876 +
ttgggttccctctctccctgtt

SEQ ID NO: 91409 - DNA, 22 bp, Artificial Sequence
  Synthetic oligonucleotide; TTG chr11 5268857 5268878 5268874 5268879 +
ggttccctctctccctgttttt

SEQ ID NO: 91410 - DNA, 22 bp, Artificial Sequence
  Synthetic oligonucleotide; TTC chr11 5268862 5268883 5268879 5268884 +
cctctctccctgtttttcttta

SEQ ID NO: 91411 - DNA, 22 bp, Artificial Sequence
  Synthetic oligonucleotide; CTC chr11 5268866 5268887 5268883 5268888 +
tctccctgtttttctttaagca

SEQ ID NO: 91412 - DNA, 22 bp, Artificial Sequence
  Synthetic oligonucleotide; CTC chr11 5268868 5268889 5268885 5268890 +
tccctgtttttctttaagcaat

SEQ ID NO: 91413 - DNA, 22 bp, Artificial Sequence
  Synthetic oligonucleotide; CTC chr11 5268870 5268891 5268887 5268892 +
cctgtttttctttaagcaattg

SEQ ID NO: 91414 - DNA, 22 bp, Artificial Sequence
  Synthetic oligonucleotide; CTG chr11 5268874 5268895 5268891 5268896 +
tttttctttaagcaattgtcta

SEQ ID NO: 91415 - DNA, 22 bp, Artificial Sequence
  Synthetic oligonucleotide; TTT chr11 5268877 5268898 5268894 5268899 +
ttctttaagcaattgtctaatt

SEQ ID NO: 91416 - DNA, 22 bp, Artificial Sequence
  Synthetic oligonucleotide; TTT chr11 5268878 5268899 5268895 5268900 +
tctttaagcaattgtctaattt

SEQ ID NO: 91417 - DNA, 22 bp, Artificial Sequence
  Synthetic oligonucleotide; TTT chr11 5268879 5268900 5268896 5268901 +
ctttaagcaattgtctaatttt

SEQ ID NO: 91418 - DNA, 22 bp, Artificial Sequence
  Synthetic oligonucleotide; TTC chr11 5268880 5268901 5268897 5268902 +
tttaagcaattgtctaattttt

SEQ ID NO: 91419 - DNA, 22 bp, Artificial Sequence
  Synthetic oligonucleotide; CTT chr11 5268882 5268903 5268899 5268904 +
taagcaattgtctaatttttgt

SEQ ID NO: 91420 - DNA, 22 bp, Artificial Sequence
  Synthetic oligonucleotide; TTT chr11 5268883 5268904 5268900 5268905 +
aagcaattgtctaatttttgta

SEQ ID NO: 91421 - DNA, 22 bp, Artificial Sequence
  Synthetic oligonucleotide; TTA chr11 5268884 5268905 5268901 5268906 +
agcaattgtctaatttttgtaa

SEQ ID NO: 91422 - DNA, 22 bp, Artificial Sequence
  Synthetic oligonucleotide; TTG chr11 5268892 5268913 5268909 5268914 +
tctaatttttgtaaatgtagaa

SEQ ID NO: 91423 - DNA, 22 bp, Artificial Sequence
  Synthetic oligonucleotide; CTA chr11 5268896 5268917 5268913 5268918 +
atttttgtaaatgtagaatgtg

SEQ ID NO: 91424 - DNA, 22 bp, Artificial Sequence
  Synthetic oligonucleotide; TTT chr11 5268900 5268921 5268917 5268922 +
ttgtaaatgtagaatgtgagtg

SEQ ID NO: 91425 - DNA, 22 bp, Artificial Sequence
  Synthetic oligonucleotide; TTT chr11 5268901 5268922 5268918 5268923 +
tgtaaatgtagaatgtgagtgc

SEQ ID NO: 91426 - DNA, 22 bp, Artificial Sequence
  Synthetic oligonucleotide; TTT chr11 5268902 5268923 5268919 5268924 +
gtaaatgtagaatgtgagtgct

SEQ ID NO: 91427 - DNA, 22 bp, Artificial Sequence
  Synthetic oligonucleotide; TTG chr11 5268903 5268924 5268920 5268925 +
taaatgtagaatgtgagtgctg

SEQ ID NO: 91428 - DNA, 22 bp, Artificial Sequence
  Synthetic oligonucleotide; CTG chr11 5268925 5268946 5268942 5268947 +
caagagttctcagcgggagttt

SEQ ID NO: 91429 - DNA, 22 bp, Artificial Sequence
  Synthetic oligonucleotide; TTC chr11 5268934 5268955 5268951 5268956 +
tcagcgggagtttaaaatcccc

SEQ ID NO: 91430 - DNA, 22 bp, Artificial Sequence
  Synthetic oligonucleotide; CTC chr11 5268936 5268957 5268953 5268958 +
agcgggagtttaaaatccccaa

SEQ ID NO: 91431 - DNA, 22 bp, Artificial Sequence
  Synthetic oligonucleotide; TTT chr11 5268947 5268968 5268964 5268969 +
aaaatccccaacaaattcggaa

SEQ ID NO: 91432 - DNA, 22 bp, Artificial Sequence
  Synthetic oligonucleotide; TTA chr11 5268948 5268969 5268965 5268970 +
aaatccccaacaaattcggaaa

SEQ ID NO: 91433 - DNA, 22 bp, Artificial Sequence
  Synthetic oligonucleotide; TTC chr11 5268965 5268986 5268982 5268987 +
ggaaacaagccttcacttggtc

SEQ ID NO: 91434 - DNA, 22 bp, Artificial Sequence
  Synthetic oligonucleotide; CTT chr11 5268978 5268999 5268995 5269000 +
cacttggtcacaatactgatgg

SEQ ID NO: 91435 - DNA, 22 bp, Artificial Sequence
  Synthetic oligonucleotide; TTC chr11 5268979 5269000 5268996 5269001 +
acttggtcacaatactgatggg

SEQ ID NO: 91436 - DNA, 22 bp, Artificial Sequence
  Synthetic oligonucleotide; CTT chr11 5268983 5269004 5269000 5269005 +
ggtcacaatactgatgggaaat

SEQ ID NO: 91437 - DNA, 22 bp, Artificial Sequence
  Synthetic oligonucleotide; TTG chr11 5268984 5269005 5269001 5269006 +
gtcacaatactgatgggaaatt

SEQ ID NO: 91438 - DNA, 22 bp, Artificial Sequence
  Synthetic oligonucleotide; CTG chr11 5268996 5269017 5269013 5269018 +
atgggaaatttaacatatttta

SEQ ID NO: 91439 - DNA, 22 bp, Artificial Sequence
  Synthetic oligonucleotide; TTT chr11 5269007 5269028 5269024 5269029 +
aacatattttagaaaatgtgtc

SEQ ID NO: 91440 - DNA, 22 bp, Artificial Sequence
  Synthetic oligonucleotide; TTA chr11 5269008 5269029 5269025 5269030 +
acatattttagaaaatgtgtct

SEQ ID NO: 91441 - DNA, 22 bp, Artificial Sequence
  Synthetic oligonucleotide; TTT chr11 5269016 5269037 5269033 5269038 +
tagaaaatgtgtcttatttttc

SEQ ID NO: 91442 - DNA, 22 bp, Artificial Sequence
  Synthetic oligonucleotide; TTT chr11 5269017 5269038 5269034 5269039 +
agaaaatgtgtcttatttttct

SEQ ID NO: 91443 - DNA, 22 bp, Artificial Sequence
  Synthetic oligonucleotide; TTA chr11 5269018 5269039 5269035 5269040 +
gaaaatgtgtcttatttttctt

SEQ ID NO: 91444 - DNA, 22 bp, Artificial Sequence
  Synthetic oligonucleotide; CTT chr11 5269031 5269052 5269048 5269053 +
atttttctttgagcaaatcttt

SEQ ID NO: 91445 - DNA, 22 bp, Artificial Sequence
  Synthetic oligonucleotide; TTA chr11 5269032 5269053 5269049 5269054 +
tttttctttgagcaaatctttt

SEQ ID NO: 91446 - DNA, 22 bp, Artificial Sequence
  Synthetic oligonucleotide; TTT chr11 5269035 5269056 5269052 5269057 +
ttctttgagcaaatcttttatt

SEQ ID NO: 91447 - DNA, 22 bp, Artificial Sequence
  Synthetic oligonucleotide; TTT chr11 5269036 5269057 5269053 5269058 +
tctttgagcaaatcttttattt

SEQ ID NO: 91448 - DNA, 22 bp, Artificial Sequence
  Synthetic oligonucleotide; TTT chr11 5269037 5269058 5269054 5269059 +
ctttgagcaaatcttttatttt

SEQ ID NO: 91449 - DNA, 22 bp, Artificial Sequence
  Synthetic oligonucleotide; TTC chr11 5269038 5269059 5269055 5269060 +
tttgagcaaatcttttattttt

SEQ ID NO: 91450 - DNA, 22 bp, Artificial Sequence
  Synthetic oligonucleotide; CTT chr11 5269040 5269061 5269057 5269062 +
tgagcaaatcttttattttttt

SEQ ID NO: 91451 - DNA, 22 bp, Artificial Sequence
  Synthetic oligonucleotide; TTT chr11 5269041 5269062 5269058 5269063 +
gagcaaatcttttatttttttt

SEQ ID NO: 91452 - DNA, 22 bp, Artificial Sequence
  Synthetic oligonucleotide; TTG chr11 5269042 5269063 5269059 5269064 +
agcaaatcttttattttttttg

SEQ ID NO: 91453 - DNA, 22 bp, Artificial Sequence
  Synthetic oligonucleotide; CTT chr11 5269052 5269073 5269069 5269074 +
ttattttttttgcaaaaatctc

SEQ ID NO: 91454 - DNA, 22 bp, Artificial Sequence
  Synthetic oligonucleotide; TTT chr11 5269053 5269074 5269070 5269075 +
tattttttttgcaaaaatctct

SEQ ID NO: 91455 - DNA, 22 bp, Artificial Sequence
  Synthetic oligonucleotide; TTT chr11 5269054 5269075 5269071 5269076 +
attttttttgcaaaaatctctt

SEQ ID NO: 91456 - DNA, 22 bp, Artificial Sequence
  Synthetic oligonucleotide; TTA chr11 5269055 5269076 5269072 5269077 +
ttttttttgcaaaaatctcttt

SEQ ID NO: 91457 - DNA, 22 bp, Artificial Sequence
  Synthetic oligonucleotide; TTT chr11 5269058 5269079 5269075 5269080 +
tttttgcaaaaatctctttcta

SEQ ID NO: 91458 - DNA, 22 bp, Artificial Sequence
  Synthetic oligonucleotide; TTT chr11 5269059 5269080 5269076 5269081 +
ttttgcaaaaatctctttctaa

SEQ ID NO: 91459 - DNA, 22 bp, Artificial Sequence
  Synthetic oligonucleotide; TTT chr11 5269060 5269081 5269077 5269082 +
tttgcaaaaatctctttctaaa

SEQ ID NO: 91460 - DNA, 22 bp, Artificial Sequence
  Synthetic oligonucleotide; TTT chr11 5269061 5269082 5269078 5269083 +
ttgcaaaaatctctttctaaac

SEQ ID NO: 91461 - DNA, 22 bp, Artificial Sequence
  Synthetic oligonucleotide; TTT chr11 5269062 5269083 5269079 5269084 +
tgcaaaaatctctttctaaacc

SEQ ID NO: 91462 - DNA, 22 bp, Artificial Sequence
  Synthetic oligonucleotide; TTT chr11 5269063 5269084 5269080 5269085 +
gcaaaaatctctttctaaacct

SEQ ID NO: 91463 - DNA, 22 bp, Artificial Sequence
  Synthetic oligonucleotide; TTG chr11 5269064 5269085 5269081 5269086 +
caaaaatctctttctaaacctc

SEQ ID NO: 91464 - DNA, 22 bp, Artificial Sequence
  Synthetic oligonucleotide; CTC chr11 5269074 5269095 5269091 5269096 +
tttctaaacctcaattatcatg

SEQ ID NO: 91465 - DNA, 22 bp, Artificial Sequence
  Synthetic oligonucleotide; CTT chr11 5269076 5269097 5269093 5269098 +
tctaaacctcaattatcatgac

SEQ ID NO: 91466 - DNA, 22 bp, Artificial Sequence
  Synthetic oligonucleotide; TTT chr11 5269077 5269098 5269094 5269099 +
ctaaacctcaattatcatgacc

SEQ ID NO: 91467 - DNA, 22 bp, Artificial Sequence
  Synthetic oligonucleotide; TTC chr11 5269078 5269099 5269095 5269100 +
taaacctcaattatcatgaccc

SEQ ID NO: 91468 - DNA, 22 bp, Artificial Sequence
  Synthetic oligonucleotide; CTA chr11 5269080 5269101 5269097 5269102 +
aacctcaattatcatgacccac

SEQ ID NO: 91469 - DNA, 22 bp, Artificial Sequence
  Synthetic oligonucleotide; CTC chr11 5269086 5269107 5269103 5269108 +
aattatcatgacccacataaaa

SEQ ID NO: 91470 - DNA, 22 bp, Artificial Sequence
  Synthetic oligonucleotide; TTA chr11 5269091 5269112 5269108 5269113 +
tcatgacccacataaaataagg

SEQ ID NO: 91471 - DNA, 22 bp, Artificial Sequence
  Synthetic oligonucleotide; TTT chr11 5269118 5269139 5269135 5269140 +
ctatttccttgaaatggacttt

SEQ ID NO: 91472 - DNA, 22 bp, Artificial Sequence
  Synthetic oligonucleotide; TTC chr11 5269119 5269140 5269136 5269141 +
tatttccttgaaatggactttc

SEQ ID NO: 91473 - DNA, 22 bp, Artificial Sequence
  Synthetic oligonucleotide; CTA chr11 5269121 5269142 5269138 5269143 +
tttccttgaaatggactttcat

SEQ ID NO: 91474 - DNA, 22 bp, Artificial Sequence
  Synthetic oligonucleotide; TTT chr11 5269124 5269145 5269141 5269146 +
ccttgaaatggactttcatcta

SEQ ID NO: 91475 - DNA, 22 bp, Artificial Sequence
  Synthetic oligonucleotide; TTC chr11 5269125 5269146 5269142 5269147 +
cttgaaatggactttcatctac

SEQ ID NO: 91476 - DNA, 22 bp, Artificial Sequence
  Synthetic oligonucleotide; CTT chr11 5269128 5269149 5269145 5269150 +
gaaatggactttcatctaccaa

SEQ ID NO: 91477 - DNA, 22 bp, Artificial Sequence
  Synthetic oligonucleotide; TTG chr11 5269129 5269150 5269146 5269151 +
aaatggactttcatctaccaaa

SEQ ID NO: 91478 - DNA, 22 bp, Artificial Sequence
  Synthetic oligonucleotide; CTT chr11 5269139 5269160 5269156 5269161 +
tcatctaccaaaagccaaattt

SEQ ID NO: 91479 - DNA, 22 bp, Artificial Sequence
  Synthetic oligonucleotide; TTT chr11 5269140 5269161 5269157 5269162 +
catctaccaaaagccaaatttc

SEQ ID NO: 91480 - DNA, 22 bp, Artificial Sequence
  Synthetic oligonucleotide; TTC chr11 5269141 5269162 5269158 5269163 +
atctaccaaaagccaaatttca

SEQ ID NO: 91481 - DNA, 22 bp, Artificial Sequence
  Synthetic oligonucleotide; CTA chr11 5269146 5269167 5269163 5269168 +
ccaaaagccaaatttcattctt

SEQ ID NO: 91482 - DNA, 22 bp, Artificial Sequence
  Synthetic oligonucleotide; TTT chr11 5269161 5269182 5269178 5269183 +
cattcttctttcacaagtctac

SEQ ID NO: 91483 - DNA, 22 bp, Artificial Sequence
  Synthetic oligonucleotide; TTC chr11 5269162 5269183 5269179 5269184 +
attcttctttcacaagtctaca

SEQ ID NO: 91484 - DNA, 22 bp, Artificial Sequence
  Synthetic oligonucleotide; TTC chr11 5269166 5269187 5269183 5269188 +
ttctttcacaagtctacaattc

SEQ ID NO: 91485 - DNA, 22 bp, Artificial Sequence
  Synthetic oligonucleotide; CTT chr11 5269168 5269189 5269185 5269190 +
ctttcacaagtctacaattcta

SEQ ID NO: 91486 - DNA, 22 bp, Artificial Sequence
  Synthetic oligonucleotide; TTC chr11 5269169 5269190 5269186 5269191 +
tttcacaagtctacaattctat

SEQ ID NO: 91487 - DNA, 22 bp, Artificial Sequence
  Synthetic oligonucleotide; CTT chr11 5269171 5269192 5269188 5269193 +
tcacaagtctacaattctataa

SEQ ID NO: 91488 - DNA, 22 bp, Artificial Sequence
  Synthetic oligonucleotide; TTT chr11 5269172 5269193 5269189 5269194 +
cacaagtctacaattctataat

SEQ ID NO: 91489 - DNA, 22 bp, Artificial Sequence
  Synthetic oligonucleotide; TTC chr11 5269173 5269194 5269190 5269195 +
acaagtctacaattctataata

SEQ ID NO: 91490 - DNA, 22 bp, Artificial Sequence
  Synthetic oligonucleotide; CTA chr11 5269182 5269203 5269199 5269204 +
caattctataatacaattctct

SEQ ID NO: 91491 - DNA, 22 bp, Artificial Sequence
  Synthetic oligonucleotide; TTC chr11 5269188 5269209 5269205 5269210 +
tataatacaattctctgggata

SEQ ID NO: 91492 - DNA, 22 bp, Artificial Sequence
  Synthetic oligonucleotide; CTA chr11 5269190 5269211 5269207 5269212 +
taatacaattctctgggataaa

SEQ ID NO: 91493 - DNA, 22 bp, Artificial Sequence
  Synthetic oligonucleotide; TTC chr11 5269201 5269222 5269218 5269223 +
tctgggataaacacatcaagtt

SEQ ID NO: 91494 - DNA, 22 bp, Artificial Sequence
  Synthetic oligonucleotide; CTC chr11 5269203 5269224 5269220 5269225 +
tgggataaacacatcaagttct

SEQ ID NO: 91495 - DNA, 22 bp, Artificial Sequence
  Synthetic oligonucleotide; CTG chr11 5269205 5269226 5269222 5269227 +
ggataaacacatcaagttctgg

SEQ ID NO: 91496 - DNA, 22 bp, Artificial Sequence
  Synthetic oligonucleotide; TTC chr11 5269224 5269245 5269241 5269246 +
tggcaagatttcctgaaaagtt

SEQ ID NO: 91497 - DNA, 22 bp, Artificial Sequence
  Synthetic oligonucleotide; CTG chr11 5269226 5269247 5269243 5269248 +
gcaagatttcctgaaaagttaa

SEQ ID NO: 91498 - DNA, 22 bp, Artificial Sequence
  Synthetic oligonucleotide; TTT chr11 5269235 5269256 5269252 5269257 +
cctgaaaagttaagccaattca

SEQ ID NO: 91499 - DNA, 22 bp, Artificial Sequence
  Synthetic oligonucleotide; TTC chr11 5269236 5269257 5269253 5269258 +
ctgaaaagttaagccaattcag

SEQ ID NO: 91500 - DNA, 22 bp, Artificial Sequence
  Synthetic oligonucleotide; CTG chr11 5269239 5269260 5269256 5269261 +
aaaagttaagccaattcaggct

SEQ ID NO: 91501 - DNA, 22 bp, Artificial Sequence
  Synthetic oligonucleotide; TTA chr11 5269247 5269268 5269264 5269269 +
agccaattcaggctgttagtag

SEQ ID NO: 91502 - DNA, 22 bp, Artificial Sequence
  Synthetic oligonucleotide; TTC chr11 5269256 5269277 5269273 5269278 +
aggctgttagtagtcctttact

SEQ ID NO: 91503 - DNA, 22 bp, Artificial Sequence
  Synthetic oligonucleotide; CTG chr11 5269262 5269283 5269279 5269284 +
ttagtagtcctttactgtcact

SEQ ID NO: 91504 - DNA, 22 bp, Artificial Sequence
  Synthetic oligonucleotide; TTA chr11 5269265 5269286 5269282 5269287 +
gtagtcctttactgtcactagt

SEQ ID NO: 91505 - DNA, 22 bp, Artificial Sequence
  Synthetic oligonucleotide; CTT chr11 5269274 5269295 5269291 5269296 +
tactgtcactagttctgaatca

SEQ ID NO: 91506 - DNA, 22 bp, Artificial Sequence
  Synthetic oligonucleotide; TTT chr11 5269275 5269296 5269292 5269297 +
actgtcactagttctgaatcat

SEQ ID NO: 91507 - DNA, 22 bp, Artificial Sequence
  Synthetic oligonucleotide; TTA chr11 5269276 5269297 5269293 5269298 +
ctgtcactagttctgaatcatg

SEQ ID NO: 91508 - DNA, 22 bp, Artificial Sequence
  Synthetic oligonucleotide; CTG chr11 5269279 5269300 5269296 5269301 +
tcactagttctgaatcatgtaa

SEQ ID NO: 91509 - DNA, 22 bp, Artificial Sequence
  Synthetic oligonucleotide; CTA chr11 5269285 5269306 5269302 5269307 +
gttctgaatcatgtaagttttg

SEQ ID NO: 91510 - DNA, 22 bp, Artificial Sequence
  Synthetic oligonucleotide; TTC chr11 5269289 5269310 5269306 5269311 +
tgaatcatgtaagttttggtta

SEQ ID NO: 91511 - DNA, 22 bp, Artificial Sequence
  Synthetic oligonucleotide; CTG chr11 5269291 5269312 5269308 5269313 +
aatcatgtaagttttggttatg

SEQ ID NO: 91512 - DNA, 22 bp, Artificial Sequence
  Synthetic oligonucleotide; TTT chr11 5269305 5269326 5269322 5269327 +
tggttatgctcactagaagtct

SEQ ID NO: 91513 - DNA, 22 bp, Artificial Sequence
  Synthetic oligonucleotide; TTT chr11 5269306 5269327 5269323 5269328 +
ggttatgctcactagaagtctg

SEQ ID NO: 91514 - DNA, 22 bp, Artificial Sequence
  Synthetic oligonucleotide; TTG chr11 5269307 5269328 5269324 5269329 +
gttatgctcactagaagtctgc

SEQ ID NO: 91515 - DNA, 22 bp, Artificial Sequence
  Synthetic oligonucleotide; TTA chr11 5269311 5269332 5269328 5269333 +
tgctcactagaagtctgctgtt

SEQ ID NO: 91516 - DNA, 22 bp, Artificial Sequence
  Synthetic oligonucleotide; CTC chr11 5269316 5269337 5269333 5269338 +
actagaagtctgctgttctaac

SEQ ID NO: 91517 - DNA, 22 bp, Artificial Sequence
  Synthetic oligonucleotide; CTA chr11 5269320 5269341 5269337 5269342 +
gaagtctgctgttctaacatca

SEQ ID NO: 91518 - DNA, 22 bp, Artificial Sequence
  Synthetic oligonucleotide; CTG chr11 5269328 5269349 5269345 5269350 +
ctgttctaacatcaagctcgac

SEQ ID NO: 91519 - DNA, 22 bp, Artificial Sequence
  Synthetic oligonucleotide; CTG chr11 5269331 5269352 5269348 5269353 +
ttctaacatcaagctcgaccca

SEQ ID NO: 91520 - DNA, 22 bp, Artificial Sequence
  Synthetic oligonucleotide; TTC chr11 5269334 5269355 5269351 5269356 +
taacatcaagctcgacccatga

SEQ ID NO: 91521 - DNA, 22 bp, Artificial Sequence
  Synthetic oligonucleotide; CTA chr11 5269336 5269357 5269353 5269358 +
acatcaagctcgacccatgatt

SEQ ID NO: 91522 - DNA, 22 bp, Artificial Sequence
  Synthetic oligonucleotide; CTC chr11 5269347 5269368 5269364 5269369 +
gacccatgatttctgagatctt

SEQ ID NO: 91523 - DNA, 22 bp, Artificial Sequence
  Synthetic oligonucleotide; TTT chr11 5269359 5269380 5269376 5269381 +
ctgagatctttgttggtctttc

SEQ ID NO: 91524 - DNA, 22 bp, Artificial Sequence
  Synthetic oligonucleotide; TTC chr11 5269360 5269381 5269377 5269382 +
tgagatctttgttggtctttcc

SEQ ID NO: 91525 - DNA, 22 bp, Artificial Sequence
  Synthetic oligonucleotide; CTG chr11 5269362 5269383 5269379 5269384 +
agatctttgttggtctttccaa

SEQ ID NO: 91526 - DNA, 22 bp, Artificial Sequence
  Synthetic oligonucleotide; CTT chr11 5269369 5269390 5269386 5269391 +
tgttggtctttccaataagatt

SEQ ID NO: 91527 - DNA, 22 bp, Artificial Sequence
  Synthetic oligonucleotide; TTT chr11 5269370 5269391 5269387 5269392 +
gttggtctttccaataagatta

SEQ ID NO: 91528 - DNA, 22 bp, Artificial Sequence
  Synthetic oligonucleotide; TTG chr11 5269371 5269392 5269388 5269393 +
ttggtctttccaataagattat

SEQ ID NO: 91529 - DNA, 22 bp, Artificial Sequence
  Synthetic oligonucleotide; TTG chr11 5269374 5269395 5269391 5269396 +
gtctttccaataagattatgag

SEQ ID NO: 91530 - DNA, 22 bp, Artificial Sequence
  Synthetic oligonucleotide; CTT chr11 5269379 5269400 5269396 5269401 +
tccaataagattatgagcttca

SEQ ID NO: 91531 - DNA, 22 bp, Artificial Sequence
  Synthetic oligonucleotide; TTT chr11 5269380 5269401 5269397 5269402 +
ccaataagattatgagcttcaa

SEQ ID NO: 91532 - DNA, 22 bp, Artificial Sequence
  Synthetic oligonucleotide; TTC chr11 5269381 5269402 5269398 5269403 +
caataagattatgagcttcaat

SEQ ID NO: 91533 - DNA, 22 bp, Artificial Sequence
  Synthetic oligonucleotide; TTA chr11 5269392 5269413 5269409 5269414 +
tgagcttcaattaatgtcaaaa

SEQ ID NO: 91534 - DNA, 22 bp, Artificial Sequence
  Synthetic oligonucleotide; CTT chr11 5269399 5269420 5269416 5269421 +
caattaatgtcaaaatataaag

SEQ ID NO: 91535 - DNA, 22 bp, Artificial Sequence
  Synthetic oligonucleotide; TTC chr11 5269400 5269421 5269417 5269422 +
aattaatgtcaaaatataaagc

SEQ ID NO: 91536 - DNA, 22 bp, Artificial Sequence
  Synthetic oligonucleotide; TTA chr11 5269405 5269426 5269422 5269427 +
atgtcaaaatataaagccaaaa

SEQ ID NO: 91537 - DNA, 22 bp, Artificial Sequence
  Synthetic oligonucleotide; CTG chr11 5269447 5269468 5269464 5269469 +
aactcaccttgaagttctcagg

SEQ ID NO: 91538 - DNA, 22 bp, Artificial Sequence
  Synthetic oligonucleotide; CTC chr11 5269452 5269473 5269469 5269474 +
accttgaagttctcaggatcca

SEQ ID NO: 91539 - DNA, 22 bp, Artificial Sequence
  Synthetic oligonucleotide; CTT chr11 5269457 5269478 5269474 5269479 +
gaagttctcaggatccacatgc

SEQ ID NO: 91540 - DNA, 22 bp, Artificial Sequence
  Synthetic oligonucleotide; TTG chr11 5269458 5269479 5269475 5269480 +
aagttctcaggatccacatgca

SEQ ID NO: 91541 - DNA, 22 bp, Artificial Sequence
  Synthetic oligonucleotide; TTC chr11 5269464 5269485 5269481 5269486 +
tcaggatccacatgcagcttgt

SEQ ID NO: 91542 - DNA, 22 bp, Artificial Sequence
  Synthetic oligonucleotide; CTC chr11 5269466 5269487 5269483 5269488 +
aggatccacatgcagcttgtca

SEQ ID NO: 91543 - DNA, 22 bp, Artificial Sequence
  Synthetic oligonucleotide; CTT chr11 5269484 5269505 5269501 5269506 +
gtcacagtgcagctcactcagc

SEQ ID NO: 91544 - DNA, 22 bp, Artificial Sequence
  Synthetic oligonucleotide; TTG chr11 5269485 5269506 5269502 5269507 +
tcacagtgcagctcactcagct

SEQ ID NO: 91545 - DNA, 22 bp, Artificial Sequence
  Synthetic oligonucleotide; CTC chr11 5269499 5269520 5269516 5269521 +
actcagcttagcaaaggcgggc

SEQ ID NO: 91546 - DNA, 22 bp, Artificial Sequence
  Synthetic oligonucleotide; CTC chr11 5269503 5269524 5269520 5269525 +
agcttagcaaaggcgggcttga

SEQ ID NO: 91547 - DNA, 22 bp, Artificial Sequence
  Synthetic oligonucleotide; CTT chr11 5269508 5269529 5269525 5269530 +
agcaaaggcgggcttgaggttg

SEQ ID NO: 91548 - DNA, 22 bp, Artificial Sequence
  Synthetic oligonucleotide; TTA chr11 5269509 5269530 5269526 5269531 +
gcaaaggcgggcttgaggttgt

SEQ ID NO: 91549 - DNA, 22 bp, Artificial Sequence
  Synthetic oligonucleotide; CTT chr11 5269523 5269544 5269540 5269545 +
gaggttgtccatgtttttaata

SEQ ID NO: 91550 - DNA, 22 bp, Artificial Sequence
  Synthetic oligonucleotide; TTG chr11 5269524 5269545 5269541 5269546 +
aggttgtccatgtttttaatag

SEQ ID NO: 91551 - DNA, 22 bp, Artificial Sequence
  Synthetic oligonucleotide; TTG chr11 5269530 5269551 5269547 5269552 +
tccatgtttttaatagcatctc

SEQ ID NO: 91552 - DNA, 22 bp, Artificial Sequence
  Synthetic oligonucleotide; TTT chr11 5269539 5269560 5269556 5269561 +
ttaatagcatctccaaaggaag

SEQ ID NO: 91553 - DNA, 22 bp, Artificial Sequence
  Synthetic oligonucleotide; TTT chr11 5269540 5269561 5269557 5269562 +
taatagcatctccaaaggaagt

SEQ ID NO: 91554 - DNA, 22 bp, Artificial Sequence
  Synthetic oligonucleotide; TTT chr11 5269541 5269562 5269558 5269563 +
aatagcatctccaaaggaagtc

SEQ ID NO: 91555 - DNA, 22 bp, Artificial Sequence
  Synthetic oligonucleotide; TTA chr11 5269542 5269563 5269559 5269564 +
atagcatctccaaaggaagtca

SEQ ID NO: 91556 - DNA, 22 bp, Artificial Sequence
  Synthetic oligonucleotide; CTC chr11 5269552 5269573 5269569 5269574 +
caaaggaagtcagcaccttctt

SEQ ID NO: 91557 - DNA, 22 bp, Artificial Sequence
  Synthetic oligonucleotide; CTT chr11 5269571 5269592 5269588 5269593 +
cttgccatgggccttgaccttg

SEQ ID NO: 91558 - DNA, 22 bp, Artificial Sequence
  Synthetic oligonucleotide; TTC chr11 5269572 5269593 5269589 5269594 +
ttgccatgggccttgaccttgg

SEQ ID NO: 91559 - DNA, 22 bp, Artificial Sequence
  Synthetic oligonucleotide; CTT chr11 5269574 5269595 5269591 5269596 +
gccatgggccttgaccttgggg

SEQ ID NO: 91560 - DNA, 22 bp, Artificial Sequence
  Synthetic oligonucleotide; TTG chr11 5269575 5269596 5269592 5269597 +
ccatgggccttgaccttggggt

SEQ ID NO: 91561 - DNA, 22 bp, Artificial Sequence
  Synthetic oligonucleotide; CTT chr11 5269586 5269607 5269603 5269608 +
gaccttggggttgcccaggatg

SEQ ID NO: 91562 - DNA, 22 bp, Artificial Sequence
  Synthetic oligonucleotide; TTG chr11 5269587 5269608 5269604 5269609 +
accttggggttgcccaggatgg

SEQ ID NO: 91563 - DNA, 22 bp, Artificial Sequence
  Synthetic oligonucleotide; CTT chr11 5269592 5269613 5269609 5269614 +
ggggttgcccaggatggcagag

SEQ ID NO: 91564 - DNA, 22 bp, Artificial Sequence
  Synthetic oligonucleotide; TTG chr11 5269593 5269614 5269610 5269615 +
gggttgcccaggatggcagagg

SEQ ID NO: 91565 - DNA, 22 bp, Artificial Sequence
  Synthetic oligonucleotide; TTG chr11 5269599 5269620 5269616 5269621 +
cccaggatggcagagggagacg

SEQ ID NO: 91566 - DNA, 22 bp, Artificial Sequence
  Synthetic oligonucleotide; TTT chr11 5269629 5269650 5269646 5269651 +
ccaaagctgtcaaaaaatctct

SEQ ID NO: 91567 - DNA, 22 bp, Artificial Sequence
  Synthetic oligonucleotide; TTC chr11 5269630 5269651 5269647 5269652 +
caaagctgtcaaaaaatctctg

SEQ ID NO: 91568 - DNA, 22 bp, Artificial Sequence
  Synthetic oligonucleotide; CTG chr11 5269638 5269659 5269655 5269660 +
tcaaaaaatctctgggtccagg

SEQ ID NO: 91569 - DNA, 22 bp, Artificial Sequence
  Synthetic oligonucleotide; CTC chr11 5269650 5269671 5269667 5269672 +
tgggtccaggggtaaacaacga

SEQ ID NO: 91570 - DNA, 22 bp, Artificial Sequence
  Synthetic oligonucleotide; CTG chr11 5269652 5269673 5269669 5269674 +
ggtccaggggtaaacaacgagg

SEQ ID NO: 91571 - DNA, 22 bp, Artificial Sequence
  Synthetic oligonucleotide; CTA chr11 5269680 5269701 5269697 5269702 +
tgaaatgacaccatatcagata

SEQ ID NO: 91572 - DNA, 22 bp, Artificial Sequence
  Synthetic oligonucleotide; TTA chr11 5269710 5269731 5269727 5269732 +
gagatgcaaaaaatcttgagga

SEQ ID NO: 91573 - DNA, 22 bp, Artificial Sequence
  Synthetic oligonucleotide; CTT chr11 5269727 5269748 5269744 5269749 +
gaggactttcccaatcaacttg

SEQ ID NO: 91574 - DNA, 22 bp, Artificial Sequence
  Synthetic oligonucleotide; TTG chr11 5269728 5269749 5269745 5269750 +
aggactttcccaatcaacttgc

SEQ ID NO: 91575 - DNA, 22 bp, Artificial Sequence
  Synthetic oligonucleotide; CTT chr11 5269735 5269756 5269752 5269757 +
tcccaatcaacttgctagggta

SEQ ID NO: 91576 - DNA, 22 bp, Artificial Sequence
  Synthetic oligonucleotide; TTT chr11 5269736 5269757 5269753 5269758 +
cccaatcaacttgctagggtaa

SEQ ID NO: 91577 - DNA, 22 bp, Artificial Sequence
  Synthetic oligonucleotide; TTC chr11 5269737 5269758 5269754 5269759 +
ccaatcaacttgctagggtaat

SEQ ID NO: 91578 - DNA, 22 bp, Artificial Sequence
  Synthetic oligonucleotide; CTT chr11 5269748 5269769 5269765 5269770 +
gctagggtaatattcacccttc

SEQ ID NO: 91579 - DNA, 22 bp, Artificial Sequence
  Synthetic oligonucleotide; TTG chr11 5269749 5269770 5269766 5269771 +
ctagggtaatattcacccttca

SEQ ID NO: 91580 - DNA, 22 bp, Artificial Sequence
  Synthetic oligonucleotide; CTA chr11 5269752 5269773 5269769 5269774 +
gggtaatattcacccttcattc

SEQ ID NO: 91581 - DNA, 22 bp, Artificial Sequence
  Synthetic oligonucleotide; TTC chr11 5269763 5269784 5269780 5269785 +
acccttcattcccatgcattga

SEQ ID NO: 91582 - DNA, 22 bp, Artificial Sequence
  Synthetic oligonucleotide; CTT chr11 5269769 5269790 5269786 5269791 +
cattcccatgcattgagaacca

SEQ ID NO: 91583 - DNA, 22 bp, Artificial Sequence
  Synthetic oligonucleotide; TTC chr11 5269770 5269791 5269787 5269792 +
attcccatgcattgagaaccaa

SEQ ID NO: 91584 - DNA, 22 bp, Artificial Sequence
  Synthetic oligonucleotide; TTC chr11 5269774 5269795 5269791 5269796 +
ccatgcattgagaaccaatgct

SEQ ID NO: 91585 - DNA, 22 bp, Artificial Sequence
  Synthetic oligonucleotide; TTG chr11 5269784 5269805 5269801 5269806 +
agaaccaatgcttacctgccca

SEQ ID NO: 91586 - DNA, 22 bp, Artificial Sequence
  Synthetic oligonucleotide; CTT chr11 5269797 5269818 5269814 5269819 +
acctgcccaaggcttcacctcc

SEQ ID NO: 91587 - DNA, 22 bp, Artificial Sequence
  Synthetic oligonucleotide; TTA chr11 5269798 5269819 5269815 5269820 +
cctgcccaaggcttcacctcca

SEQ ID NO: 91588 - DNA, 22 bp, Artificial Sequence
  Synthetic oligonucleotide; CTG chr11 5269802 5269823 5269819 5269824 +
cccaaggcttcacctccagcct

SEQ ID NO: 91589 - DNA, 22 bp, Artificial Sequence
  Synthetic oligonucleotide; CTT chr11 5269812 5269833 5269829 5269834 +
cacctccagcctcttccacatt

SEQ ID NO: 91590 - DNA, 22 bp, Artificial Sequence
  Synthetic oligonucleotide; TTC chr11 5269813 5269834 5269830 5269835 +
acctccagcctcttccacattc

SEQ ID NO: 91591 - DNA, 22 bp, Artificial Sequence
  Synthetic oligonucleotide; CTC chr11 5269818 5269839 5269835 5269840 +
cagcctcttccacattcatctt

SEQ ID NO: 91592 - DNA, 22 bp, Artificial Sequence
  Synthetic oligonucleotide; CTC chr11 5269825 5269846 5269842 5269847 +
ttccacattcatcttgctccac

SEQ ID NO: 91593 - DNA, 22 bp, Artificial Sequence
  Synthetic oligonucleotide; CTT chr11 5269827 5269848 5269844 5269849 +
ccacattcatcttgctccacag

SEQ ID NO: 91594 - DNA, 22 bp, Artificial Sequence
  Synthetic oligonucleotide; TTC chr11 5269828 5269849 5269845 5269850 +
cacattcatcttgctccacagg

SEQ ID NO: 91595 - DNA, 22 bp, Artificial Sequence
  Synthetic oligonucleotide; TTC chr11 5269835 5269856 5269852 5269857 +
atcttgctccacaggctagtga

SEQ ID NO: 91596 - DNA, 22 bp, Artificial Sequence
  Synthetic oligonucleotide; CTT chr11 5269840 5269861 5269857 5269862 +
gctccacaggctagtgacggca

SEQ ID NO: 91597 - DNA, 22 bp, Artificial Sequence
  Synthetic oligonucleotide; TTG chr11 5269841 5269862 5269858 5269863 +
ctccacaggctagtgacggcag

SEQ ID NO: 91598 - DNA, 22 bp, Artificial Sequence
  Synthetic oligonucleotide; CTC chr11 5269844 5269865 5269861 5269866 +
cacaggctagtgacggcagcct

SEQ ID NO: 91599 - DNA, 22 bp, Artificial Sequence
  Synthetic oligonucleotide; CTA chr11 5269853 5269874 5269870 5269875 +
gtgacggcagccttctcctcag

SEQ ID NO: 91600 - DNA, 22 bp, Artificial Sequence
  Synthetic oligonucleotide; CTT chr11 5269867 5269888 5269884 5269889 +
ctcctcagcagtaaaatgcacc

SEQ ID NO: 91601 - DNA, 22 bp, Artificial Sequence
  Synthetic oligonucleotide; TTC chr11 5269868 5269889 5269885 5269890 +
tcctcagcagtaaaatgcacca

SEQ ID NO: 91602 - DNA, 22 bp, Artificial Sequence
  Synthetic oligonucleotide; CTC chr11 5269870 5269891 5269887 5269892 +
ctcagcagtaaaatgcaccatg

SEQ ID NO: 91603 - DNA, 22 bp, Artificial Sequence
  Synthetic oligonucleotide; CTC chr11 5269873 5269894 5269890 5269895 +
agcagtaaaatgcaccatgatg

SEQ ID NO: 91604 - DNA, 22 bp, Artificial Sequence
  Synthetic oligonucleotide; CTG chr11 5269904 5269925 5269921 5269926 +
agagcttgctagtgattgcagc

SEQ ID NO: 91605 - DNA, 22 bp, Artificial Sequence
  Synthetic oligonucleotide; CTT chr11 5269911 5269932 5269928 5269933 +
gctagtgattgcagctgtgtcg

SEQ ID NO: 91606 - DNA, 22 bp, Artificial Sequence
  Synthetic oligonucleotide; TTG chr11 5269912 5269933 5269929 5269934 +
ctagtgattgcagctgtgtcgg

SEQ ID NO: 91607 - DNA, 22 bp, Artificial Sequence
  Synthetic oligonucleotide; CTA chr11 5269915 5269936 5269932 5269937 +
gtgattgcagctgtgtcggaag

SEQ ID NO: 91608 - DNA, 22 bp, Artificial Sequence
  Synthetic oligonucleotide; TTG chr11 5269922 5269943 5269939 5269944 +
cagctgtgtcggaagcagatat

SEQ ID NO: 91609 - DNA, 22 bp, Artificial Sequence
  Synthetic oligonucleotide; CTG chr11 5269928 5269949 5269945 5269950 +
tgtcggaagcagatatgtgctg

SEQ ID NO: 91610 - DNA, 22 bp, Artificial Sequence
  Synthetic oligonucleotide; CTG chr11 5269950 5269971 5269967 5269972 +
ctgcctctctgtctggcctttt

SEQ ID NO: 91611 - DNA, 22 bp, Artificial Sequence
  Synthetic oligonucleotide; CTG chr11 5269953 5269974 5269970 5269975 +
cctctctgtctggccttttatt

SEQ ID NO: 91612 - DNA, 22 bp, Artificial Sequence
  Synthetic oligonucleotide; CTC chr11 5269957 5269978 5269974 5269979 +
tctgtctggccttttattcttt

SEQ ID NO: 91613 - DNA, 22 bp, Artificial Sequence
  Synthetic oligonucleotide; CTC chr11 5269959 5269980 5269976 5269981 +
tgtctggccttttattctttac

SEQ ID NO: 91614 - DNA, 22 bp, Artificial Sequence
  Synthetic oligonucleotide; CTG chr11 5269961 5269982 5269978 5269983 +
tctggccttttattctttactg

SEQ ID NO: 91615 - DNA, 22 bp, Artificial Sequence
  Synthetic oligonucleotide; CTG chr11 5269965 5269986 5269982 5269987 +
gccttttattctttactgccga

SEQ ID NO: 91616 - DNA, 22 bp, Artificial Sequence
  Synthetic oligonucleotide; CTT chr11 5269970 5269991 5269987 5269992 +
ttattctttactgccgaagttc

SEQ ID NO: 91617 - DNA, 22 bp, Artificial Sequence
  Synthetic oligonucleotide; TTT chr11 5269971 5269992 5269988 5269993 +
tattctttactgccgaagttct

SEQ ID NO: 91618 - DNA, 22 bp, Artificial Sequence
  Synthetic oligonucleotide; TTT chr11 5269972 5269993 5269989 5269994 +
attctttactgccgaagttctg

SEQ ID NO: 91619 - DNA, 22 bp, Artificial Sequence
  Synthetic oligonucleotide; TTA chr11 5269973 5269994 5269990 5269995 +
ttctttactgccgaagttctgg

SEQ ID NO: 91620 - DNA, 22 bp, Artificial Sequence
  Synthetic oligonucleotide; TTC chr11 5269976 5269997 5269993 5269998 +
tttactgccgaagttctggccc

SEQ ID NO: 91621 - DNA, 22 bp, Artificial Sequence
  Synthetic oligonucleotide; CTT chr11 5269978 5269999 5269995 5270000 +
tactgccgaagttctggccccc

SEQ ID NO: 91622 - DNA, 22 bp, Artificial Sequence
  Synthetic oligonucleotide; TTT chr11 5269979 5270000 5269996 5270001 +
actgccgaagttctggccccct

SEQ ID NO: 91623 - DNA, 22 bp, Artificial Sequence
  Synthetic oligonucleotide; TTA chr11 5269980 5270001 5269997 5270002 +
ctgccgaagttctggccccctg

SEQ ID NO: 91624 - DNA, 22 bp, Artificial Sequence
  Synthetic oligonucleotide; CTG chr11 5269983 5270004 5270000 5270005 +
ccgaagttctggccccctgttc

SEQ ID NO: 91625 - DNA, 22 bp, Artificial Sequence
  Synthetic oligonucleotide; TTC chr11 5269992 5270013 5270009 5270014 +
tggccccctgttctccatggta

SEQ ID NO: 91626 - DNA, 22 bp, Artificial Sequence
  Synthetic oligonucleotide; CTG chr11 5269994 5270015 5270011 5270016 +
gccccctgttctccatggtact

SEQ ID NO: 91627 - DNA, 22 bp, Artificial Sequence
  Synthetic oligonucleotide; CTG chr11 5270002 5270023 5270019 5270024 +
ttctccatggtacttaaaagtc

SEQ ID NO: 91628 - DNA, 22 bp, Artificial Sequence
  Synthetic oligonucleotide; TTC chr11 5270005 5270026 5270022 5270027 +
tccatggtacttaaaagtcatt

SEQ ID NO: 91629 - DNA, 22 bp, Artificial Sequence
  Synthetic oligonucleotide; CTC chr11 5270007 5270028 5270024 5270029 +
catggtacttaaaagtcattgg

SEQ ID NO: 91630 - DNA, 22 bp, Artificial Sequence
  Synthetic oligonucleotide; CTT chr11 5270017 5270038 5270034 5270039 +
aaaagtcattggtcaaggctga

SEQ ID NO: 91631 - DNA, 22 bp, Artificial Sequence
  Synthetic oligonucleotide; TTA chr11 5270018 5270039 5270035 5270040 +
aaagtcattggtcaaggctgac

SEQ ID NO: 91632 - DNA, 22 bp, Artificial Sequence
  Synthetic oligonucleotide; TTG chr11 5270028 5270049 5270045 5270050 +
gtcaaggctgacctgtgtccct

SEQ ID NO: 91633 - DNA, 22 bp, Artificial Sequence
  Synthetic oligonucleotide; CTG chr11 5270038 5270059 5270055 5270060 +
acctgtgtccctcaggggtgga

SEQ ID NO: 91634 - DNA, 22 bp, Artificial Sequence
  Synthetic oligonucleotide; CTG chr11 5270043 5270064 5270060 5270065 +
tgtccctcaggggtggagtcag

SEQ ID NO: 91635 - DNA, 22 bp, Artificial Sequence
  Synthetic oligonucleotide; CTC chr11 5270051 5270072 5270068 5270073 +
aggggtggagtcaggtccggag

SEQ ID NO: 91636 - DNA, 22 bp, Artificial Sequence
  Synthetic oligonucleotide; CTA chr11 5270100 5270121 5270117 5270122 +
agtttgtgataatgtgtgctgg

SEQ ID NO: 91637 - DNA, 22 bp, Artificial Sequence
  Synthetic oligonucleotide; TTT chr11 5270105 5270126 5270122 5270127 +
gtgataatgtgtgctggatcct

SEQ ID NO: 91638 - DNA, 22 bp, Artificial Sequence
  Synthetic oligonucleotide; TTG chr11 5270106 5270127 5270123 5270128 +
tgataatgtgtgctggatcctg

SEQ ID NO: 91639 - DNA, 22 bp, Artificial Sequence
  Synthetic oligonucleotide; CTG chr11 5270121 5270142 5270138 5270143 +
gatcctgaggctcttttttgtt

SEQ ID NO: 91640 - DNA, 22 bp, Artificial Sequence
  Synthetic oligonucleotide; CTG chr11 5270128 5270149 5270145 5270150 +
aggctcttttttgttggctcct

SEQ ID NO: 91641 - DNA, 22 bp, Artificial Sequence
  Synthetic oligonucleotide; CTC chr11 5270134 5270155 5270151 5270156 +
ttttttgttggctcctcatcta

SEQ ID NO: 91642 - DNA, 22 bp, Artificial Sequence
  Synthetic oligonucleotide; CTT chr11 5270136 5270157 5270153 5270158 +
ttttgttggctcctcatctatc

SEQ ID NO: 91643 - DNA, 22 bp, Artificial Sequence
  Synthetic oligonucleotide; TTT chr11 5270137 5270158 5270154 5270159 +
tttgttggctcctcatctatct

SEQ ID NO: 91644 - DNA, 22 bp, Artificial Sequence
  Synthetic oligonucleotide; TTT chr11 5270138 5270159 5270155 5270160 +
ttgttggctcctcatctatctg

SEQ ID NO: 91645 - DNA, 22 bp, Artificial Sequence
  Synthetic oligonucleotide; TTT chr11 5270139 5270160 5270156 5270161 +
tgttggctcctcatctatctgc

SEQ ID NO: 91646 - DNA, 22 bp, Artificial Sequence
  Synthetic oligonucleotide; TTT chr11 5270140 5270161 5270157 5270162 +
gttggctcctcatctatctgca

SEQ ID NO: 91647 - DNA, 22 bp, Artificial Sequence
  Synthetic oligonucleotide; TTG chr11 5270141 5270162 5270158 5270163 +
ttggctcctcatctatctgcaa

SEQ ID NO: 91648 - DNA, 22 bp, Artificial Sequence
  Synthetic oligonucleotide; TTG chr11 5270144 5270165 5270161 5270166 +
gctcctcatctatctgcaacac

SEQ ID NO: 91649 - DNA, 22 bp, Artificial Sequence
  Synthetic oligonucleotide; CTC chr11 5270148 5270169 5270165 5270170 +
ctcatctatctgcaacacaaat

SEQ ID NO: 91650 - DNA, 22 bp, Artificial Sequence
  Synthetic oligonucleotide; CTC chr11 5270151 5270172 5270168 5270173 +
atctatctgcaacacaaatttc

SEQ ID NO: 91651 - DNA, 22 bp, Artificial Sequence
  Synthetic oligonucleotide; CTA chr11 5270156 5270177 5270173 5270178 +
tctgcaacacaaatttccattt

SEQ ID NO: 91652 - DNA, 22 bp, Artificial Sequence
  Synthetic oligonucleotide; CTG chr11 5270160 5270181 5270177 5270182 +
caacacaaatttccatttgtcc

SEQ ID NO: 91653 - DNA, 22 bp, Artificial Sequence
  Synthetic oligonucleotide; TTT chr11 5270172 5270193 5270189 5270194 +
ccatttgtccccttttttaccc

SEQ ID NO: 91654 - DNA, 22 bp, Artificial Sequence
  Synthetic oligonucleotide; TTC chr11 5270173 5270194 5270190 5270195 +
catttgtccccttttttaccct

SEQ ID NO: 91655 - DNA, 22 bp, Artificial Sequence
  Synthetic oligonucleotide; TTT chr11 5270178 5270199 5270195 5270200 +
gtccccttttttaccctcttca

SEQ ID NO: 91656 - DNA, 22 bp, Artificial Sequence
  Synthetic oligonucleotide; TTG chr11 5270179 5270200 5270196 5270201 +
tccccttttttaccctcttcat

SEQ ID NO: 91657 - DNA, 22 bp, Artificial Sequence
  Synthetic oligonucleotide; CTT chr11 5270186 5270207 5270203 5270208 +
ttttaccctcttcatcatcttc

SEQ ID NO: 91658 - DNA, 22 bp, Artificial Sequence
  Synthetic oligonucleotide; TTT chr11 5270187 5270208 5270204 5270209 +
tttaccctcttcatcatcttcc

SEQ ID NO: 91659 - DNA, 22 bp, Artificial Sequence
  Synthetic oligonucleotide; TTT chr11 5270188 5270209 5270205 5270210 +
ttaccctcttcatcatcttcca

SEQ ID NO: 91660 - DNA, 22 bp, Artificial Sequence
  Synthetic oligonucleotide; TTT chr11 5270189 5270210 5270206 5270211 +
taccctcttcatcatcttccaa

SEQ ID NO: 91661 - DNA, 22 bp, Artificial Sequence
  Synthetic oligonucleotide; TTT chr11 5270190 5270211 5270207 5270212 +
accctcttcatcatcttccaaa

SEQ ID NO: 91662 - DNA, 22 bp, Artificial Sequence
  Synthetic oligonucleotide; TTA chr11 5270191 5270212 5270208 5270213 +
ccctcttcatcatcttccaaaa

SEQ ID NO: 91663 - DNA, 22 bp, Artificial Sequence
  Synthetic oligonucleotide; CTC chr11 5270196 5270217 5270213 5270218 +
ttcatcatcttccaaaatgata

SEQ ID NO: 91664 - DNA, 22 bp, Artificial Sequence
  Synthetic oligonucleotide; CTT chr11 5270198 5270219 5270215 5270220 +
catcatcttccaaaatgatatc

SEQ ID NO: 91665 - DNA, 22 bp, Artificial Sequence
  Synthetic oligonucleotide; TTC chr11 5270199 5270220 5270216 5270221 +
atcatcttccaaaatgatatcc

SEQ ID NO: 91666 - DNA, 22 bp, Artificial Sequence
  Synthetic oligonucleotide; CTT chr11 5270207 5270228 5270224 5270229 +
ccaaaatgatatccatctctcc

SEQ ID NO: 91667 - DNA, 22 bp, Artificial Sequence
  Synthetic oligonucleotide; TTC chr11 5270208 5270229 5270225 5270230 +
caaaatgatatccatctctccc

SEQ ID NO: 91668 - DNA, 22 bp, Artificial Sequence
  Synthetic oligonucleotide; CTC chr11 5270226 5270247 5270243 5270248 +
tcccattctccttttccaagaa

SEQ ID NO: 91669 - DNA, 22 bp, Artificial Sequence
  Synthetic oligonucleotide; CTC chr11 5270228 5270249 5270245 5270250 +
ccattctccttttccaagaaag

SEQ ID NO: 91670 - DNA, 22 bp, Artificial Sequence
  Synthetic oligonucleotide; TTC chr11 5270234 5270255 5270251 5270256 +
tccttttccaagaaagcctcat

SEQ ID NO: 91671 - DNA, 22 bp, Artificial Sequence
  Synthetic oligonucleotide; CTC chr11 5270236 5270257 5270253 5270258 +
cttttccaagaaagcctcatat

SEQ ID NO: 91672 - DNA, 22 bp, Artificial Sequence
  Synthetic oligonucleotide; CTT chr11 5270239 5270260 5270256 5270261 +
ttccaagaaagcctcatataaa

SEQ ID NO: 91673 - DNA, 22 bp, Artificial Sequence
  Synthetic oligonucleotide; TTT chr11 5270240 5270261 5270257 5270262 +
tccaagaaagcctcatataaag

SEQ ID NO: 91674 - DNA, 22 bp, Artificial Sequence
  Synthetic oligonucleotide; TTT chr11 5270241 5270262 5270258 5270263 +
ccaagaaagcctcatataaagg

SEQ ID NO: 91675 - DNA, 22 bp, Artificial Sequence
  Synthetic oligonucleotide; TTC chr11 5270242 5270263 5270259 5270264 +
caagaaagcctcatataaagga

SEQ ID NO: 91676 - DNA, 22 bp, Artificial Sequence
  Synthetic oligonucleotide; CTC chr11 5270254 5270275 5270271 5270276 +
atataaaggagcaaatctcaaa

SEQ ID NO: 91677 - DNA, 22 bp, Artificial Sequence
  Synthetic oligonucleotide; CTC chr11 5270273 5270294 5270290 5270295 +
aaaataggaaaaaaagtttcag

SEQ ID NO: 91678 - DNA, 22 bp, Artificial Sequence
  Synthetic oligonucleotide; TTT chr11 5270292 5270313 5270309 5270314 +
cagccaaagcgcatttaacatt

SEQ ID NO: 91679 - DNA, 22 bp, Artificial Sequence
  Synthetic oligonucleotide; TTC chr11 5270293 5270314 5270310 5270315 +
agccaaagcgcatttaacattt

SEQ ID NO: 91680 - DNA, 22 bp, Artificial Sequence
  Synthetic oligonucleotide; TTT chr11 5270308 5270329 5270325 5270330 +
aacatttgccttaaaggtggtg

SEQ ID NO: 91681 - DNA, 22 bp, Artificial Sequence
  Synthetic oligonucleotide; TTA chr11 5270309 5270330 5270326 5270331 +
acatttgccttaaaggtggtga

SEQ ID NO: 91682 - DNA, 22 bp, Artificial Sequence
  Synthetic oligonucleotide; TTT chr11 5270315 5270336 5270332 5270337 +
gccttaaaggtggtgacagtga

SEQ ID NO: 91683 - DNA, 22 bp, Artificial Sequence
  Synthetic oligonucleotide; TTG chr11 5270316 5270337 5270333 5270338 +
ccttaaaggtggtgacagtgac

SEQ ID NO: 91684 - DNA, 22 bp, Artificial Sequence
  Synthetic oligonucleotide; CTT chr11 5270320 5270341 5270337 5270342 +
aaaggtggtgacagtgacaaaa

SEQ ID NO: 91685 - DNA, 22 bp, Artificial Sequence
  Synthetic oligonucleotide; TTA chr11 5270321 5270342 5270338 5270343 +
aaggtggtgacagtgacaaaaa

SEQ ID NO: 91686 - DNA, 22 bp, Artificial Sequence
  Synthetic oligonucleotide; CTG chr11 5270371 5270392 5270388 5270393 +
ttaaaacagaatctcacccagt

SEQ ID NO: 91687 - DNA, 22 bp, Artificial Sequence
  Synthetic oligonucleotide; TTA chr11 5270374 5270395 5270391 5270396 +
aaacagaatctcacccagttct

SEQ ID NO: 91688 - DNA, 22 bp, Artificial Sequence
  Synthetic oligonucleotide; CTC chr11 5270386 5270407 5270403 5270408 +
acccagttctagctctcttaag

SEQ ID NO: 91689 - DNA, 22 bp, Artificial Sequence
  Synthetic oligonucleotide; TTC chr11 5270395 5270416 5270412 5270417 +
tagctctcttaaggagtgcatt

SEQ ID NO: 91690 - DNA, 22 bp, Artificial Sequence
  Synthetic oligonucleotide; CTA chr11 5270397 5270418 5270414 5270419 +
gctctcttaaggagtgcattgt

SEQ ID NO: 91691 - DNA, 22 bp, Artificial Sequence
  Synthetic oligonucleotide; CTC chr11 5270401 5270422 5270418 5270423 +
tcttaaggagtgcattgtaaac

SEQ ID NO: 91692 - DNA, 22 bp, Artificial Sequence
  Synthetic oligonucleotide; CTC chr11 5270403 5270424 5270420 5270425 +
ttaaggagtgcattgtaaacaa

SEQ ID NO: 91693 - DNA, 22 bp, Artificial Sequence
  Synthetic oligonucleotide; CTT chr11 5270405 5270426 5270422 5270427 +
aaggagtgcattgtaaacaaaa

SEQ ID NO: 91694 - DNA, 22 bp, Artificial Sequence
  Synthetic oligonucleotide; TTA chr11 5270406 5270427 5270423 5270428 +
aggagtgcattgtaaacaaaac

SEQ ID NO: 91695 - DNA, 22 bp, Artificial Sequence
  Synthetic oligonucleotide; TTG chr11 5270418 5270439 5270435 5270440 +
taaacaaaacttctgtacctta

SEQ ID NO: 91696 - DNA, 22 bp, Artificial Sequence
  Synthetic oligonucleotide; CTT chr11 5270430 5270451 5270447 5270452 +
ctgtaccttagtttctctaggg

SEQ ID NO: 91697 - DNA, 22 bp, Artificial Sequence
  Synthetic oligonucleotide; TTC chr11 5270431 5270452 5270448 5270453 +
tgtaccttagtttctctaggga

SEQ ID NO: 91698 - DNA, 22 bp, Artificial Sequence
  Synthetic oligonucleotide; CTG chr11 5270433 5270454 5270450 5270455 +
taccttagtttctctagggaga

SEQ ID NO: 91699 - DNA, 22 bp, Artificial Sequence
  Synthetic oligonucleotide; CTT chr11 5270439 5270460 5270456 5270461 +
agtttctctagggagacaaaaa

SEQ ID NO: 91700 - DNA, 22 bp, Artificial Sequence
  Synthetic oligonucleotide; TTA chr11 5270440 5270461 5270457 5270462 +
gtttctctagggagacaaaaac

SEQ ID NO: 91701 - DNA, 22 bp, Artificial Sequence
  Synthetic oligonucleotide; TTT chr11 5270444 5270465 5270461 5270466 +
ctctagggagacaaaaaccgta

SEQ ID NO: 91702 - DNA, 22 bp, Artificial Sequence
  Synthetic oligonucleotide; TTC chr11 5270445 5270466 5270462 5270467 +
tctagggagacaaaaaccgtac

SEQ ID NO: 91703 - DNA, 22 bp, Artificial Sequence
  Synthetic oligonucleotide; CTC chr11 5270447 5270468 5270464 5270469 +
tagggagacaaaaaccgtacat

SEQ ID NO: 91704 - DNA, 22 bp, Artificial Sequence
  Synthetic oligonucleotide; CTA chr11 5270449 5270470 5270466 5270471 +
gggagacaaaaaccgtacatag

SEQ ID NO: 91705 - DNA, 22 bp, Artificial Sequence
  Synthetic oligonucleotide; TTC chr11 5270474 5270495 5270491 5270496 +
cttctagaaactgaacagaata

SEQ ID NO: 91706 - DNA, 22 bp, Artificial Sequence
  Synthetic oligonucleotide; CTT chr11 5270477 5270498 5270494 5270499 +
ctagaaactgaacagaatagca

SEQ ID NO: 91707 - DNA, 22 bp, Artificial Sequence
  Synthetic oligonucleotide; TTC chr11 5270478 5270499 5270495 5270500 +
tagaaactgaacagaatagcaa

SEQ ID NO: 91708 - DNA, 22 bp, Artificial Sequence
  Synthetic oligonucleotide; CTA chr11 5270480 5270501 5270497 5270502 +
gaaactgaacagaatagcaagt

SEQ ID NO: 91709 - DNA, 22 bp, Artificial Sequence
  Synthetic oligonucleotide; CTG chr11 5270487 5270508 5270504 5270509 +
aacagaatagcaagtagtccac

SEQ ID NO: 91710 - DNA, 22 bp, Artificial Sequence
  Synthetic oligonucleotide; CTA chr11 5270519 5270540 5270536 5270541 +
aagccttaatcccaaagtacag

SEQ ID NO: 91711 - DNA, 22 bp, Artificial Sequence
  Synthetic oligonucleotide; CTT chr11 5270526 5270547 5270543 5270548 +
aatcccaaagtacagtaccttg

SEQ ID NO: 91712 - DNA, 22 bp, Artificial Sequence
  Synthetic oligonucleotide; TTA chr11 5270527 5270548 5270544 5270549 +
atcccaaagtacagtaccttgg

SEQ ID NO: 91713 - DNA, 22 bp, Artificial Sequence
  Synthetic oligonucleotide; CTT chr11 5270547 5270568 5270564 5270569 +
ggggtgattccctagagaggac

SEQ ID NO: 91714 - DNA, 22 bp, Artificial Sequence
  Synthetic oligonucleotide; TTG chr11 5270548 5270569 5270565 5270570 +
gggtgattccctagagaggaca

SEQ ID NO: 91715 - DNA, 22 bp, Artificial Sequence
  Synthetic oligonucleotide; TTC chr11 5270557 5270578 5270574 5270579 +
cctagagaggacagacagaaaa

SEQ ID NO: 91716 - DNA, 22 bp, Artificial Sequence
  Synthetic oligonucleotide; CTA chr11 5270561 5270582 5270578 5270583 +
gagaggacagacagaaaagatt

SEQ ID NO: 91717 - DNA, 22 bp, Artificial Sequence
  Synthetic oligonucleotide; TTA chr11 5270584 5270605 5270601 5270606 +
catccagtgcttccagagaatc

SEQ ID NO: 91718 - DNA, 22 bp, Artificial Sequence
  Synthetic oligonucleotide; CTT chr11 5270596 5270617 5270613 5270618 +
ccagagaatcctctctcttttc

SEQ ID NO: 91719 - DNA, 22 bp, Artificial Sequence
  Synthetic oligonucleotide; TTC chr11 5270597 5270618 5270614 5270619 +
cagagaatcctctctcttttca

SEQ ID NO: 91720 - DNA, 22 bp, Artificial Sequence
  Synthetic oligonucleotide; CTC chr11 5270609 5270630 5270626 5270631 +
tctcttttcatttctctatgac

SEQ ID NO: 91721 - DNA, 22 bp, Artificial Sequence
  Synthetic oligonucleotide; CTC chr11 5270611 5270632 5270628 5270633 +
tcttttcatttctctatgacca

SEQ ID NO: 91722 - DNA, 22 bp, Artificial Sequence
  Synthetic oligonucleotide; CTC chr11 5270613 5270634 5270630 5270635 +
ttttcatttctctatgaccaca

SEQ ID NO: 91723 - DNA, 22 bp, Artificial Sequence
  Synthetic oligonucleotide; CTT chr11 5270615 5270636 5270632 5270637 +
ttcatttctctatgaccacagg

SEQ ID NO: 91724 - DNA, 22 bp, Artificial Sequence
  Synthetic oligonucleotide; TTT chr11 5270616 5270637 5270633 5270638 +
tcatttctctatgaccacaggg

SEQ ID NO: 91725 - DNA, 22 bp, Artificial Sequence
  Synthetic oligonucleotide; TTT chr11 5270617 5270638 5270634 5270639 +
catttctctatgaccacagggg

SEQ ID NO: 91726 - DNA, 22 bp, Artificial Sequence
  Synthetic oligonucleotide; TTC chr11 5270618 5270639 5270635 5270640 +
atttctctatgaccacagggga

SEQ ID NO: 91727 - DNA, 22 bp, Artificial Sequence
  Synthetic oligonucleotide; TTT chr11 5270622 5270643 5270639 5270644 +
ctctatgaccacaggggacatt

SEQ ID NO: 91728 - DNA, 22 bp, Artificial Sequence
  Synthetic oligonucleotide; TTC chr11 5270623 5270644 5270640 5270645 +
tctatgaccacaggggacattg

SEQ ID NO: 91729 - DNA, 22 bp, Artificial Sequence
  Synthetic oligonucleotide; CTC chr11 5270625 5270646 5270642 5270647 +
tatgaccacaggggacattggc

SEQ ID NO: 91730 - DNA, 22 bp, Artificial Sequence
  Synthetic oligonucleotide; CTA chr11 5270627 5270648 5270644 5270649 +
tgaccacaggggacattggcta

SEQ ID NO: 91731 - DNA, 22 bp, Artificial Sequence
  Synthetic oligonucleotide; TTG chr11 5270645 5270666 5270662 5270667 +
gctactttgtgagtattgcctg

SEQ ID NO: 91732 - DNA, 22 bp, Artificial Sequence
  Synthetic oligonucleotide; CTA chr11 5270649 5270670 5270666 5270671 +
ctttgtgagtattgcctggggc

SEQ ID NO: 91733 - DNA, 22 bp, Artificial Sequence
  Synthetic oligonucleotide; CTT chr11 5270652 5270673 5270669 5270674 +
tgtgagtattgcctggggctct

SEQ ID NO: 91734 - DNA, 22 bp, Artificial Sequence
  Synthetic oligonucleotide; TTT chr11 5270653 5270674 5270670 5270675 +
gtgagtattgcctggggctctc

SEQ ID NO: 91735 - DNA, 22 bp, Artificial Sequence
  Synthetic oligonucleotide; TTG chr11 5270654 5270675 5270671 5270676 +
tgagtattgcctggggctctct

SEQ ID NO: 91736 - DNA, 22 bp, Artificial Sequence
  Synthetic oligonucleotide; TTG chr11 5270663 5270684 5270680 5270685 +
cctggggctctcttcttgcttg

SEQ ID NO: 91737 - DNA, 22 bp, Artificial Sequence
  Synthetic oligonucleotide; CTG chr11 5270667 5270688 5270684 5270689 +
gggctctcttcttgcttgcctg

SEQ ID NO: 91738 - DNA, 22 bp, Artificial Sequence
  Synthetic oligonucleotide; CTC chr11 5270673 5270694 5270690 5270695 +
tcttcttgcttgcctgtctgtc

SEQ ID NO: 91739 - DNA, 22 bp, Artificial Sequence
  Synthetic oligonucleotide; CTC chr11 5270675 5270696 5270692 5270697 +
ttcttgcttgcctgtctgtcct

SEQ ID NO: 91740 - DNA, 22 bp, Artificial Sequence
  Synthetic oligonucleotide; CTT chr11 5270677 5270698 5270694 5270699 +
cttgcttgcctgtctgtcctgc

SEQ ID NO: 91741 - DNA, 22 bp, Artificial Sequence
  Synthetic oligonucleotide; TTC chr11 5270678 5270699 5270695 5270700 +
ttgcttgcctgtctgtcctgct

SEQ ID NO: 91742 - DNA, 22 bp, Artificial Sequence
  Synthetic oligonucleotide; CTT chr11 5270680 5270701 5270697 5270702 +
gcttgcctgtctgtcctgctta

SEQ ID NO: 91743 - DNA, 22 bp, Artificial Sequence
  Synthetic oligonucleotide; TTG chr11 5270681 5270702 5270698 5270703 +
cttgcctgtctgtcctgcttat

SEQ ID NO: 91744 - DNA, 22 bp, Artificial Sequence
  Synthetic oligonucleotide; CTT chr11 5270684 5270705 5270701 5270706 +
gcctgtctgtcctgcttatact

SEQ ID NO: 91745 - DNA, 22 bp, Artificial Sequence
  Synthetic oligonucleotide; TTG chr11 5270685 5270706 5270702 5270707 +
cctgtctgtcctgcttatactt

SEQ ID NO: 91746 - DNA, 22 bp, Artificial Sequence
  Synthetic oligonucleotide; CTG chr11 5270689 5270710 5270706 5270711 +
tctgtcctgcttatacttctca

SEQ ID NO: 91747 - DNA, 22 bp, Artificial Sequence
  Synthetic oligonucleotide; CTG chr11 5270693 5270714 5270710 5270715 +
tcctgcttatacttctcactgg

SEQ ID NO: 91748 - DNA, 22 bp, Artificial Sequence
  Synthetic oligonucleotide; CTG chr11 5270698 5270719 5270715 5270720 +
cttatacttctcactgggaagg

SEQ ID NO: 91749 - DNA, 22 bp, Artificial Sequence
  Synthetic oligonucleotide; CTT chr11 5270701 5270722 5270718 5270723 +
atacttctcactgggaagggag

SEQ ID NO: 91750 - DNA, 22 bp, Artificial Sequence
  Synthetic oligonucleotide; TTA chr11 5270702 5270723 5270719 5270724 +
tacttctcactgggaagggagc

SEQ ID NO: 91751 - DNA, 22 bp, Artificial Sequence
  Synthetic oligonucleotide; CTT chr11 5270707 5270728 5270724 5270729 +
ctcactgggaagggagctgaga

SEQ ID NO: 91752 - DNA, 22 bp, Artificial Sequence
  Synthetic oligonucleotide; TTC chr11 5270708 5270729 5270725 5270730 +
tcactgggaagggagctgagaa

SEQ ID NO: 91753 - DNA, 22 bp, Artificial Sequence
  Synthetic oligonucleotide; CTC chr11 5270710 5270731 5270727 5270732 +
actgggaagggagctgagaagc

SEQ ID NO: 91754 - DNA, 22 bp, Artificial Sequence
  Synthetic oligonucleotide; CTG chr11 5270714 5270735 5270731 5270736 +
ggaagggagctgagaagcctaa

SEQ ID NO: 91755 - DNA, 22 bp, Artificial Sequence
  Synthetic oligonucleotide; CTG chr11 5270726 5270747 5270743 5270748 +
agaagcctaaaatcctaaaatt

SEQ ID NO: 91756 - DNA, 22 bp, Artificial Sequence
  Synthetic oligonucleotide; CTA chr11 5270735 5270756 5270752 5270757 +
aaatcctaaaattatttaaagc

SEQ ID NO: 91757 - DNA, 22 bp, Artificial Sequence
  Synthetic oligonucleotide; CTA chr11 5270743 5270764 5270760 5270765 +
aaattatttaaagccagaattt

SEQ ID NO: 91758 - DNA, 22 bp, Artificial Sequence
  Synthetic oligonucleotide; TTA chr11 5270749 5270770 5270766 5270771 +
tttaaagccagaatttgtcatc

SEQ ID NO: 91759 - DNA, 22 bp, Artificial Sequence
  Synthetic oligonucleotide; TTT chr11 5270752 5270773 5270769 5270774 +
aaagccagaatttgtcatcaaa

SEQ ID NO: 91760 - DNA, 22 bp, Artificial Sequence
  Synthetic oligonucleotide; TTA chr11 5270753 5270774 5270770 5270775 +
aagccagaatttgtcatcaaac

SEQ ID NO: 91761 - DNA, 22 bp, Artificial Sequence
  Synthetic oligonucleotide; TTT chr11 5270765 5270786 5270782 5270787 +
gtcatcaaacagagaaaaaagt

SEQ ID NO: 91762 - DNA, 22 bp, Artificial Sequence
  Synthetic oligonucleotide; TTG chr11 5270766 5270787 5270783 5270788 +
tcatcaaacagagaaaaaagtg

SEQ ID NO: 91763 - DNA, 22 bp, Artificial Sequence
  Synthetic oligonucleotide; TTA chr11 5270801 5270822 5270818 5270823 +
atcaggctaggagtcagggtat

SEQ ID NO: 91764 - DNA, 22 bp, Artificial Sequence
  Synthetic oligonucleotide; CTA chr11 5270810 5270831 5270827 5270832 +
ggagtcagggtatattattcct

SEQ ID NO: 91765 - DNA, 22 bp, Artificial Sequence
  Synthetic oligonucleotide; TTA chr11 5270827 5270848 5270844 5270849 +
ttcctctagtgtcctttttttt

SEQ ID NO: 91766 - DNA, 22 bp, Artificial Sequence
  Synthetic oligonucleotide; TTC chr11 5270830 5270851 5270847 5270852 +
ctctagtgtccttttttttttc

SEQ ID NO: 91767 - DNA, 22 bp, Artificial Sequence
  Synthetic oligonucleotide; CTC chr11 5270833 5270854 5270850 5270855 +
tagtgtccttttttttttctgt

SEQ ID NO: 91768 - DNA, 22 bp, Artificial Sequence
  Synthetic oligonucleotide; CTA chr11 5270835 5270856 5270852 5270857 +
gtgtccttttttttttctgtat

SEQ ID NO: 91769 - DNA, 22 bp, Artificial Sequence
  Synthetic oligonucleotide; CTT chr11 5270843 5270864 5270860 5270865 +
ttttttttctgtatgtccccat

SEQ ID NO: 91770 - DNA, 22 bp, Artificial Sequence
  Synthetic oligonucleotide; TTT chr11 5270844 5270865 5270861 5270866 +
tttttttctgtatgtccccatt

SEQ ID NO: 91771 - DNA, 22 bp, Artificial Sequence
  Synthetic oligonucleotide; TTT chr11 5270845 5270866 5270862 5270867 +
ttttttctgtatgtccccattt

SEQ ID NO: 91772 - DNA, 22 bp, Artificial Sequence
  Synthetic oligonucleotide; TTT chr11 5270846 5270867 5270863 5270868 +
tttttctgtatgtccccatttt

SEQ ID NO: 91773 - DNA, 22 bp, Artificial Sequence
  Synthetic oligonucleotide; TTT chr11 5270847 5270868 5270864 5270869 +
ttttctgtatgtccccattttg

SEQ ID NO: 91774 - DNA, 22 bp, Artificial Sequence
  Synthetic oligonucleotide; TTT chr11 5270848 5270869 5270865 5270870 +
tttctgtatgtccccattttga

SEQ ID NO: 91775 - DNA, 22 bp, Artificial Sequence
  Synthetic oligonucleotide; TTT chr11 5270849 5270870 5270866 5270871 +
ttctgtatgtccccattttgat

SEQ ID NO: 91776 - DNA, 22 bp, Artificial Sequence
  Synthetic oligonucleotide; TTT chr11 5270850 5270871 5270867 5270872 +
tctgtatgtccccattttgatg

SEQ ID NO: 91777 - DNA, 22 bp, Artificial Sequence
  Synthetic oligonucleotide; TTT chr11 5270851 5270872 5270868 5270873 +
ctgtatgtccccattttgatga

SEQ ID NO: 91778 - DNA, 22 bp, Artificial Sequence
  Synthetic oligonucleotide; TTC chr11 5270852 5270873 5270869 5270874 +
tgtatgtccccattttgatgac

SEQ ID NO: 91779 - DNA, 22 bp, Artificial Sequence
  Synthetic oligonucleotide; CTG chr11 5270854 5270875 5270871 5270876 +
tatgtccccattttgatgactt

SEQ ID NO: 91780 - DNA, 22 bp, Artificial Sequence
  Synthetic oligonucleotide; TTT chr11 5270867 5270888 5270884 5270889 +
tgatgacttgctagctctttac

SEQ ID NO: 91781 - DNA, 22 bp, Artificial Sequence
  Synthetic oligonucleotide; TTT chr11 5270868 5270889 5270885 5270890 +
gatgacttgctagctctttact

SEQ ID NO: 91782 - DNA, 22 bp, Artificial Sequence
  Synthetic oligonucleotide; TTG chr11 5270869 5270890 5270886 5270891 +
atgacttgctagctctttactt

SEQ ID NO: 91783 - DNA, 22 bp, Artificial Sequence
  Synthetic oligonucleotide; CTT chr11 5270876 5270897 5270893 5270898 +
gctagctctttacttggtagag

SEQ ID NO: 91784 - DNA, 22 bp, Artificial Sequence
  Synthetic oligonucleotide; TTG chr11 5270877 5270898 5270894 5270899 +
ctagctctttacttggtagagc

SEQ ID NO: 91785 - DNA, 22 bp, Artificial Sequence
  Synthetic oligonucleotide; CTA chr11 5270880 5270901 5270897 5270902 +
gctctttacttggtagagctga

SEQ ID NO: 91786 - DNA, 22 bp, Artificial Sequence
  Synthetic oligonucleotide; CTC chr11 5270884 5270905 5270901 5270906 +
tttacttggtagagctgaaact

SEQ ID NO: 91787 - DNA, 22 bp, Artificial Sequence
  Synthetic oligonucleotide; CTT chr11 5270886 5270907 5270903 5270908 +
tacttggtagagctgaaactgg

SEQ ID NO: 91788 - DNA, 22 bp, Artificial Sequence
  Synthetic oligonucleotide; TTT chr11 5270887 5270908 5270904 5270909 +
acttggtagagctgaaactgga

SEQ ID NO: 91789 - DNA, 22 bp, Artificial Sequence
  Synthetic oligonucleotide; TTA chr11 5270888 5270909 5270905 5270910 +
cttggtagagctgaaactggaa

SEQ ID NO: 91790 - DNA, 22 bp, Artificial Sequence
  Synthetic oligonucleotide; CTT chr11 5270891 5270912 5270908 5270913 +
ggtagagctgaaactggaagtt

SEQ ID NO: 91791 - DNA, 22 bp, Artificial Sequence
  Synthetic oligonucleotide; TTG chr11 5270892 5270913 5270909 5270914 +
gtagagctgaaactggaagttg

SEQ ID NO: 91792 - DNA, 22 bp, Artificial Sequence
  Synthetic oligonucleotide; CTG chr11 5270901 5270922 5270918 5270923 +
aaactggaagttgggatttaca

SEQ ID NO: 91793 - DNA, 22 bp, Artificial Sequence
  Synthetic oligonucleotide; CTG chr11 5270907 5270928 5270924 5270929 +
gaagttgggatttacagtgtat

SEQ ID NO: 91794 - DNA, 22 bp, Artificial Sequence
  Synthetic oligonucleotide; TTG chr11 5270914 5270935 5270931 5270936 +
ggatttacagtgtattcaattc

SEQ ID NO: 91795 - DNA, 22 bp, Artificial Sequence
  Synthetic oligonucleotide; TTT chr11 5270920 5270941 5270937 5270942 +
acagtgtattcaattcgatcca

SEQ ID NO: 91796 - DNA, 22 bp, Artificial Sequence
  Synthetic oligonucleotide; TTA chr11 5270921 5270942 5270938 5270943 +
cagtgtattcaattcgatccat

SEQ ID NO: 91797 - DNA, 22 bp, Artificial Sequence
  Synthetic oligonucleotide; TTC chr11 5270931 5270952 5270948 5270953 +
aattcgatccatgtgcctgaag

SEQ ID NO: 91798 - DNA, 22 bp, Artificial Sequence
  Synthetic oligonucleotide; TTC chr11 5270936 5270957 5270953 5270958 +
gatccatgtgcctgaagaatat

SEQ ID NO: 91799 - DNA, 22 bp, Artificial Sequence
  Synthetic oligonucleotide; CTG chr11 5270950 5270971 5270967 5270972 +
aagaatattgctcatgctatat

SEQ ID NO: 91800 - DNA, 22 bp, Artificial Sequence
  Synthetic oligonucleotide; TTG chr11 5270960 5270981 5270977 5270982 +
ctcatgctatatcacttaatct

SEQ ID NO: 91801 - DNA, 22 bp, Artificial Sequence
  Synthetic oligonucleotide; CTC chr11 5270963 5270984 5270980 5270985 +
atgctatatcacttaatctgcc

SEQ ID NO: 91802 - DNA, 22 bp, Artificial Sequence
  Synthetic oligonucleotide; CTA chr11 5270969 5270990 5270986 5270991 +
tatcacttaatctgcccttata

SEQ ID NO: 91803 - DNA, 22 bp, Artificial Sequence
  Synthetic oligonucleotide; CTT chr11 5270977 5270998 5270994 5270999 +
aatctgcccttataataccatt

SEQ ID NO: 91804 - DNA, 22 bp, Artificial Sequence
  Synthetic oligonucleotide; TTA chr11 5270978 5270999 5270995 5271000 +
atctgcccttataataccattg

SEQ ID NO: 91805 - DNA, 22 bp, Artificial Sequence
  Synthetic oligonucleotide; CTG chr11 5270983 5271004 5271000 5271005 +
cccttataataccattgtcatt

SEQ ID NO: 91806 - DNA, 22 bp, Artificial Sequence
  Synthetic oligonucleotide; CTT chr11 5270988 5271009 5271005 5271010 +
ataataccattgtcattatcct

SEQ ID NO: 91807 - DNA, 22 bp, Artificial Sequence
  Synthetic oligonucleotide; TTA chr11 5270989 5271010 5271006 5271011 +
taataccattgtcattatcctc

SEQ ID NO: 91808 - DNA, 22 bp, Artificial Sequence
  Synthetic oligonucleotide; TTG chr11 5271000 5271021 5271017 5271022 +
tcattatcctcatattttagaa

SEQ ID NO: 91809 - DNA, 22 bp, Artificial Sequence
  Synthetic oligonucleotide; TTA chr11 5271006 5271027 5271023 5271028 +
tcctcatattttagaatcaagg

SEQ ID NO: 91810 - DNA, 22 bp, Artificial Sequence
  Synthetic oligonucleotide; CTC chr11 5271011 5271032 5271028 5271033 +
atattttagaatcaaggaataa

SEQ ID NO: 91811 - DNA, 22 bp, Artificial Sequence
  Synthetic oligonucleotide; TTT chr11 5271017 5271038 5271034 5271039 +
tagaatcaaggaataaattcac

SEQ ID NO: 91812 - DNA, 22 bp, Artificial Sequence
  Synthetic oligonucleotide; TTT chr11 5271018 5271039 5271035 5271040 +
agaatcaaggaataaattcaca

SEQ ID NO: 91813 - DNA, 22 bp, Artificial Sequence
  Synthetic oligonucleotide; TTA chr11 5271019 5271040 5271036 5271041 +
gaatcaaggaataaattcacag

SEQ ID NO: 91814 - DNA, 22 bp, Artificial Sequence
  Synthetic oligonucleotide; TTC chr11 5271037 5271058 5271054 5271059 +
acagaaattatttaactatcaa

SEQ ID NO: 91815 - DNA, 22 bp, Artificial Sequence
  Synthetic oligonucleotide; TTA chr11 5271047 5271068 5271064 5271069 +
tttaactatcaatgtgacagaa

SEQ ID NO: 91816 - DNA, 22 bp, Artificial Sequence
  Synthetic oligonucleotide; TTT chr11 5271050 5271071 5271067 5271072 +
aactatcaatgtgacagaagta

SEQ ID NO: 91817 - DNA, 22 bp, Artificial Sequence
  Synthetic oligonucleotide; TTA chr11 5271051 5271072 5271068 5271073 +
actatcaatgtgacagaagtaa

SEQ ID NO: 91818 - DNA, 22 bp, Artificial Sequence
  Synthetic oligonucleotide; CTA chr11 5271055 5271076 5271072 5271077 +
tcaatgtgacagaagtaatgat

SEQ ID NO: 91819 - DNA, 22 bp, Artificial Sequence
  Synthetic oligonucleotide; TTG chr11 5271079 5271100 5271096 5271101 +
ggggaataatagaagcagagtt

SEQ ID NO: 91820 - DNA, 22 bp, Artificial Sequence
  Synthetic oligonucleotide; TTC chr11 5271102 5271123 5271119 5271124 +
cacaaattccagcattgttaat

SEQ ID NO: 91821 - DNA, 22 bp, Artificial Sequence
  Synthetic oligonucleotide; TTC chr11 5271111 5271132 5271128 5271133 +
cagcattgttaattctataaaa

SEQ ID NO: 91822 - DNA, 22 bp, Artificial Sequence
  Synthetic oligonucleotide; TTG chr11 5271119 5271140 5271136 5271141 +
ttaattctataaaagtccctta

SEQ ID NO: 91823 - DNA, 22 bp, Artificial Sequence
  Synthetic oligonucleotide; TTA chr11 5271122 5271143 5271139 5271144 +
attctataaaagtcccttacat

SEQ ID NO: 91824 - DNA, 22 bp, Artificial Sequence
  Synthetic oligonucleotide; TTC chr11 5271126 5271147 5271143 5271148 +
tataaaagtcccttacatcacc

SEQ ID NO: 91825 - DNA, 22 bp, Artificial Sequence
  Synthetic oligonucleotide; CTA chr11 5271128 5271149 5271145 5271150 +
taaaagtcccttacatcaccat

SEQ ID NO: 91826 - DNA, 22 bp, Artificial Sequence
  Synthetic oligonucleotide; CTT chr11 5271140 5271161 5271157 5271162 +
acatcaccataatctcattgcc

SEQ ID NO: 91827 - DNA, 22 bp, Artificial Sequence
  Synthetic oligonucleotide; TTA chr11 5271141 5271162 5271158 5271163 +
catcaccataatctcattgccc

SEQ ID NO: 91828 - DNA, 22 bp, Artificial Sequence
  Synthetic oligonucleotide; CTC chr11 5271156 5271177 5271173 5271178 +
attgccccagcccagttcctcc

SEQ ID NO: 91829 - DNA, 22 bp, Artificial Sequence
  Synthetic oligonucleotide; TTG chr11 5271160 5271181 5271177 5271182 +
ccccagcccagttcctccttct

SEQ ID NO: 91830 - DNA, 22 bp, Artificial Sequence
  Synthetic oligonucleotide; TTC chr11 5271174 5271195 5271191 5271196 +
ctccttctggcttgttctacat

SEQ ID NO: 91831 - DNA, 22 bp, Artificial Sequence
  Synthetic oligonucleotide; CTC chr11 5271177 5271198 5271194 5271199 +
cttctggcttgttctacatcca

SEQ ID NO: 91832 - DNA, 22 bp, Artificial Sequence
  Synthetic oligonucleotide; CTT chr11 5271180 5271201 5271197 5271202 +
ctggcttgttctacatccattt

SEQ ID NO: 91833 - DNA, 22 bp, Artificial Sequence
  Synthetic oligonucleotide; TTC chr11 5271181 5271202 5271198 5271203 +
tggcttgttctacatccattta

SEQ ID NO: 91834 - DNA, 22 bp, Artificial Sequence
  Synthetic oligonucleotide; CTG chr11 5271183 5271204 5271200 5271205 +
gcttgttctacatccatttatt

SEQ ID NO: 91835 - DNA, 22 bp, Artificial Sequence
  Synthetic oligonucleotide; CTT chr11 5271187 5271208 5271204 5271209 +
gttctacatccatttatttttt

SEQ ID NO: 91836 - DNA, 22 bp, Artificial Sequence
  Synthetic oligonucleotide; TTG chr11 5271188 5271209 5271205 5271210 +
ttctacatccatttattttttc

SEQ ID NO: 91837 - DNA, 22 bp, Artificial Sequence
  Synthetic oligonucleotide; TTC chr11 5271191 5271212 5271208 5271213 +
tacatccatttattttttcttt

SEQ ID NO: 91838 - DNA, 22 bp, Artificial Sequence
  Synthetic oligonucleotide; CTA chr11 5271193 5271214 5271210 5271215 +
catccatttattttttcttttt

SEQ ID NO: 91839 - DNA, 22 bp, Artificial Sequence
  Synthetic oligonucleotide; TTT chr11 5271202 5271223 5271219 5271224 +
attttttcttttttctttttct

SEQ ID NO: 91840 - DNA, 22 bp, Artificial Sequence
  Synthetic oligonucleotide; TTA chr11 5271203 5271224 5271220 5271225 +
ttttttcttttttctttttctt

SEQ ID NO: 91841 - DNA, 22 bp, Artificial Sequence
  Synthetic oligonucleotide; TTT chr11 5271206 5271227 5271223 5271228 +
tttcttttttctttttcttttc

SEQ ID NO: 91842 - DNA, 22 bp, Artificial Sequence
  Synthetic oligonucleotide; TTT chr11 5271207 5271228 5271224 5271229 +
ttcttttttctttttcttttct

SEQ ID NO: 91843 - DNA, 22 bp, Artificial Sequence
  Synthetic oligonucleotide; TTT chr11 5271208 5271229 5271225 5271230 +
tcttttttctttttcttttctt

SEQ ID NO: 91844 - DNA, 22 bp, Artificial Sequence
  Synthetic oligonucleotide; TTT chr11 5271209 5271230 5271226 5271231 +
cttttttctttttcttttcttt

SEQ ID NO: 91845 - DNA, 22 bp, Artificial Sequence
  Synthetic oligonucleotide; TTC chr11 5271210 5271231 5271227 5271232 +
ttttttctttttcttttctttc

SEQ ID NO: 91846 - DNA, 22 bp, Artificial Sequence
  Synthetic oligonucleotide; CTT chr11 5271212 5271233 5271229 5271234 +
ttttctttttcttttctttctt

SEQ ID NO: 91847 - DNA, 22 bp, Artificial Sequence
  Synthetic oligonucleotide; TTT chr11 5271213 5271234 5271230 5271235 +
tttctttttcttttctttcttt

SEQ ID NO: 91848 - DNA, 22 bp, Artificial Sequence
  Synthetic oligonucleotide; TTT chr11 5271214 5271235 5271231 5271236 +
ttctttttcttttctttctttc

SEQ ID NO: 91849 - DNA, 22 bp, Artificial Sequence
  Synthetic oligonucleotide; TTT chr11 5271215 5271236 5271232 5271237 +
tctttttcttttctttctttct

SEQ ID NO: 91850 - DNA, 22 bp, Artificial Sequence
  Synthetic oligonucleotide; TTT chr11 5271216 5271237 5271233 5271238 +
ctttttcttttctttctttctt

SEQ ID NO: 91851 - DNA, 22 bp, Artificial Sequence
  Synthetic oligonucleotide; TTC chr11 5271217 5271238 5271234 5271239 +
tttttcttttctttctttcttt

SEQ ID NO: 91852 - DNA, 22 bp, Artificial Sequence
  Synthetic oligonucleotide; CTT chr11 5271219 5271240 5271236 5271241 +
tttcttttctttctttcttttt

SEQ ID NO: 91853 - DNA, 22 bp, Artificial Sequence
  Synthetic oligonucleotide; TTT chr11 5271220 5271241 5271237 5271242 +
ttcttttctttctttctttttt

SEQ ID NO: 91854 - DNA, 22 bp, Artificial Sequence
  Synthetic oligonucleotide; TTT chr11 5271221 5271242 5271238 5271243 +
tcttttctttctttcttttttt

SEQ ID NO: 91855 - DNA, 22 bp, Artificial Sequence
  Synthetic oligonucleotide; TTT chr11 5271222 5271243 5271239 5271244 +
cttttctttctttctttttttt

SEQ ID NO: 91856 - DNA, 22 bp, Artificial Sequence
  Synthetic oligonucleotide; TTC chr11 5271223 5271244 5271240 5271245 +
ttttctttctttcttttttttt

SEQ ID NO: 91857 - DNA, 22 bp, Artificial Sequence
  Synthetic oligonucleotide; CTT chr11 5271225 5271246 5271242 5271247 +
ttctttctttcttttttttttt

SEQ ID NO: 91858 - DNA, 22 bp, Artificial Sequence
  Synthetic oligonucleotide; TTT chr11 5271226 5271247 5271243 5271248 +
tctttctttctttttttttttt

SEQ ID NO: 91859 - DNA, 22 bp, Artificial Sequence
  Synthetic oligonucleotide; TTT chr11 5271227 5271248 5271244 5271249 +
ctttctttcttttttttttttt

SEQ ID NO: 91860 - DNA, 22 bp, Artificial Sequence
  Synthetic oligonucleotide; TTC chr11 5271228 5271249 5271245 5271250 +
tttctttctttttttttttttt

SEQ ID NO: 91861 - DNA, 22 bp, Artificial Sequence
  Synthetic oligonucleotide; CTT chr11 5271230 5271251 5271247 5271252 +
tctttctttttttttttttttt

SEQ ID NO: 91862 - DNA, 22 bp, Artificial Sequence
  Synthetic oligonucleotide; TTT chr11 5271231 5271252 5271248 5271253 +
ctttcttttttttttttttttg

SEQ ID NO: 91863 - DNA, 22 bp, Artificial Sequence
  Synthetic oligonucleotide; TTC chr11 5271232 5271253 5271249 5271254 +
tttcttttttttttttttttga

SEQ ID NO: 91864 - DNA, 22 bp, Artificial Sequence
  Synthetic oligonucleotide; CTT chr11 5271234 5271255 5271251 5271256 +
tcttttttttttttttttgaga

SEQ ID NO: 91865 - DNA, 22 bp, Artificial Sequence
  Synthetic oligonucleotide; TTT chr11 5271235 5271256 5271252 5271257 +
cttttttttttttttttgagac

SEQ ID NO: 91866 - DNA, 22 bp, Artificial Sequence
  Synthetic oligonucleotide; TTC chr11 5271236 5271257 5271253 5271258 +
ttttttttttttttttgagacg

SEQ ID NO: 91867 - DNA, 22 bp, Artificial Sequence
  Synthetic oligonucleotide; CTT chr11 5271238 5271259 5271255 5271260 +
ttttttttttttttgagacgga

SEQ ID NO: 91868 - DNA, 22 bp, Artificial Sequence
  Synthetic oligonucleotide; TTT chr11 5271239 5271260 5271256 5271261 +
tttttttttttttgagacggag

SEQ ID NO: 91869 - DNA, 22 bp, Artificial Sequence
  Synthetic oligonucleotide; TTT chr11 5271240 5271261 5271257 5271262 +
ttttttttttttgagacggagt

SEQ ID NO: 91870 - DNA, 22 bp, Artificial Sequence
  Synthetic oligonucleotide; TTT chr11 5271241 5271262 5271258 5271263 +
tttttttttttgagacggagtc

SEQ ID NO: 91871 - DNA, 22 bp, Artificial Sequence
  Synthetic oligonucleotide; TTT chr11 5271242 5271263 5271259 5271264 +
ttttttttttgagacggagtct

SEQ ID NO: 91872 - DNA, 22 bp, Artificial Sequence
  Synthetic oligonucleotide; TTT chr11 5271243 5271264 5271260 5271265 +
tttttttttgagacggagtctc

SEQ ID NO: 91873 - DNA, 22 bp, Artificial Sequence
  Synthetic oligonucleotide; TTT chr11 5271244 5271265 5271261 5271266 +
ttttttttgagacggagtctca

SEQ ID NO: 91874 - DNA, 22 bp, Artificial Sequence
  Synthetic oligonucleotide; TTT chr11 5271245 5271266 5271262 5271267 +
tttttttgagacggagtctcac

SEQ ID NO: 91875 - DNA, 22 bp, Artificial Sequence
  Synthetic oligonucleotide; TTT chr11 5271246 5271267 5271263 5271268 +
ttttttgagacggagtctcact

SEQ ID NO: 91876 - DNA, 22 bp, Artificial Sequence
  Synthetic oligonucleotide; TTT chr11 5271247 5271268 5271264 5271269 +
tttttgagacggagtctcactc

SEQ ID NO: 91877 - DNA, 22 bp, Artificial Sequence
  Synthetic oligonucleotide; TTT chr11 5271248 5271269 5271265 5271270 +
ttttgagacggagtctcactct

SEQ ID NO: 91878 - DNA, 22 bp, Artificial Sequence
  Synthetic oligonucleotide; TTT chr11 5271249 5271270 5271266 5271271 +
tttgagacggagtctcactctg

SEQ ID NO: 91879 - DNA, 22 bp, Artificial Sequence
  Synthetic oligonucleotide; TTT chr11 5271250 5271271 5271267 5271272 +
ttgagacggagtctcactctgt

SEQ ID NO: 91880 - DNA, 22 bp, Artificial Sequence
  Synthetic oligonucleotide; TTT chr11 5271251 5271272 5271268 5271273 +
tgagacggagtctcactctgtt

SEQ ID NO: 91881 - DNA, 22 bp, Artificial Sequence
  Synthetic oligonucleotide; TTT chr11 5271252 5271273 5271269 5271274 +
gagacggagtctcactctgttg

SEQ ID NO: 91882 - DNA, 22 bp, Artificial Sequence
  Synthetic oligonucleotide; TTG chr11 5271253 5271274 5271270 5271275 +
agacggagtctcactctgttgc

SEQ ID NO: 91883 - DNA, 22 bp, Artificial Sequence
  Synthetic oligonucleotide; CTC chr11 5271265 5271286 5271282 5271287 +
actctgttgccagactggagtg

SEQ ID NO: 91884 - DNA, 22 bp, Artificial Sequence
  Synthetic oligonucleotide; CTC chr11 5271269 5271290 5271286 5271291 +
tgttgccagactggagtgcaat

SEQ ID NO: 91885 - DNA, 22 bp, Artificial Sequence
  Synthetic oligonucleotide; CTG chr11 5271271 5271292 5271288 5271293 +
ttgccagactggagtgcaatgg

SEQ ID NO: 91886 - DNA, 22 bp, Artificial Sequence
  Synthetic oligonucleotide; TTG chr11 5271274 5271295 5271291 5271296 +
ccagactggagtgcaatggcac

SEQ ID NO: 91887 - DNA, 22 bp, Artificial Sequence
  Synthetic oligonucleotide; CTG chr11 5271282 5271303 5271299 5271304 +
gagtgcaatggcactatctcag

SEQ ID NO: 91888 - DNA, 22 bp, Artificial Sequence
  Synthetic oligonucleotide; CTA chr11 5271298 5271319 5271315 5271320 +
tctcagctcactgcaaccttcg

SEQ ID NO: 91889 - DNA, 22 bp, Artificial Sequence
  Synthetic oligonucleotide; CTC chr11 5271302 5271323 5271319 5271324 +
agctcactgcaaccttcgcctc

SEQ ID NO: 91890 - DNA, 22 bp, Artificial Sequence
  Synthetic oligonucleotide; CTC chr11 5271307 5271328 5271324 5271329 +
actgcaaccttcgcctcctggg

SEQ ID NO: 91891 - DNA, 22 bp, Artificial Sequence
  Synthetic oligonucleotide; CTG chr11 5271311 5271332 5271328 5271333 +
caaccttcgcctcctgggttca

SEQ ID NO: 91892 - DNA, 22 bp, Artificial Sequence
  Synthetic oligonucleotide; CTT chr11 5271318 5271339 5271335 5271340 +
cgcctcctgggttcaaacgatt

SEQ ID NO: 91893 - DNA, 22 bp, Artificial Sequence
  Synthetic oligonucleotide; TTC chr11 5271319 5271340 5271336 5271341 +
gcctcctgggttcaaacgattc

SEQ ID NO: 91894 - DNA, 22 bp, Artificial Sequence
  Synthetic oligonucleotide; CTC chr11 5271324 5271345 5271341 5271346 +
ctgggttcaaacgattctcctg

SEQ ID NO: 91895 - DNA, 22 bp, Artificial Sequence
  Synthetic oligonucleotide; CTG chr11 5271327 5271348 5271344 5271349 +
ggttcaaacgattctcctgcct

SEQ ID NO: 91896 - DNA, 22 bp, Artificial Sequence
  Synthetic oligonucleotide; TTC chr11 5271332 5271353 5271349 5271354 +
aaacgattctcctgcctcagcc

SEQ ID NO: 91897 - DNA, 22 bp, Artificial Sequence
  Synthetic oligonucleotide; TTC chr11 5271341 5271362 5271358 5271363 +
tcctgcctcagcctcccgagca

SEQ ID NO: 91898 - DNA, 22 bp, Artificial Sequence
  Synthetic oligonucleotide; CTC chr11 5271343 5271364 5271360 5271365 +
ctgcctcagcctcccgagcagc

SEQ ID NO: 91899 - DNA, 22 bp, Artificial Sequence
  Synthetic oligonucleotide; CTG chr11 5271346 5271367 5271363 5271368 +
cctcagcctcccgagcagctgg

SEQ ID NO: 91900 - DNA, 22 bp, Artificial Sequence
  Synthetic oligonucleotide; CTC chr11 5271350 5271371 5271367 5271372 +
agcctcccgagcagctgggact

SEQ ID NO: 91901 - DNA, 22 bp, Artificial Sequence
  Synthetic oligonucleotide; CTC chr11 5271356 5271377 5271373 5271378 +
ccgagcagctgggactacaggc

SEQ ID NO: 91902 - DNA, 22 bp, Artificial Sequence
  Synthetic oligonucleotide; CTG chr11 5271367 5271388 5271384 5271389 +
ggactacaggcgcatgccacca

SEQ ID NO: 91903 - DNA, 22 bp, Artificial Sequence
  Synthetic oligonucleotide; CTA chr11 5271373 5271394 5271390 5271395 +
caggcgcatgccaccatgccca

SEQ ID NO: 91904 - DNA, 22 bp, Artificial Sequence
  Synthetic oligonucleotide; CTA chr11 5271399 5271420 5271416 5271421 +
atttttttatttttagtagaga

SEQ ID NO: 91905 - DNA, 22 bp, Artificial Sequence
  Synthetic oligonucleotide; TTT chr11 5271403 5271424 5271420 5271425 +
ttttatttttagtagagacggg

SEQ ID NO: 91906 - DNA, 22 bp, Artificial Sequence
  Synthetic oligonucleotide; TTT chr11 5271404 5271425 5271421 5271426 +
tttatttttagtagagacggga

SEQ ID NO: 91907 - DNA, 22 bp, Artificial Sequence
  Synthetic oligonucleotide; TTT chr11 5271405 5271426 5271422 5271427 +
ttatttttagtagagacgggat

SEQ ID NO: 91908 - DNA, 22 bp, Artificial Sequence
  Synthetic oligonucleotide; TTT chr11 5271406 5271427 5271423 5271428 +
tatttttagtagagacgggatt

SEQ ID NO: 91909 - DNA, 22 bp, Artificial Sequence
  Synthetic oligonucleotide; TTT chr11 5271407 5271428 5271424 5271429 +
atttttagtagagacgggattt

SEQ ID NO: 91910 - DNA, 22 bp, Artificial Sequence
  Synthetic oligonucleotide; TTA chr11 5271408 5271429 5271425 5271430 +
tttttagtagagacgggatttc

SEQ ID NO: 91911 - DNA, 22 bp, Artificial Sequence
  Synthetic oligonucleotide; TTT chr11 5271411 5271432 5271428 5271433 +
ttagtagagacgggatttcacc

SEQ ID NO: 91912 - DNA, 22 bp, Artificial Sequence
  Synthetic oligonucleotide; TTT chr11 5271412 5271433 5271429 5271434 +
tagtagagacgggatttcacca

SEQ ID NO: 91913 - DNA, 22 bp, Artificial Sequence
  Synthetic oligonucleotide; TTT chr11 5271413 5271434 5271430 5271435 +
agtagagacgggatttcaccat

SEQ ID NO: 91914 - DNA, 22 bp, Artificial Sequence
  Synthetic oligonucleotide; TTA chr11 5271414 5271435 5271431 5271436 +
gtagagacgggatttcaccatg

SEQ ID NO: 91915 - DNA, 22 bp, Artificial Sequence
  Synthetic oligonucleotide; TTT chr11 5271429 5271450 5271446 5271451 +
caccatgtttgccaggatggtc

SEQ ID NO: 91916 - DNA, 22 bp, Artificial Sequence
  Synthetic oligonucleotide; TTC chr11 5271430 5271451 5271447 5271452 +
accatgtttgccaggatggtct

SEQ ID NO: 91917 - DNA, 22 bp, Artificial Sequence
  Synthetic oligonucleotide; TTT chr11 5271439 5271460 5271456 5271461 +
gccaggatggtctcgatctctt

SEQ ID NO: 91918 - DNA, 22 bp, Artificial Sequence
  Synthetic oligonucleotide; TTG chr11 5271440 5271461 5271457 5271462 +
ccaggatggtctcgatctcttg

SEQ ID NO: 91919 - DNA, 22 bp, Artificial Sequence
  Synthetic oligonucleotide; CTC chr11 5271453 5271474 5271470 5271475 +
gatctcttgacctcatgatctg

SEQ ID NO: 91920 - DNA, 22 bp, Artificial Sequence
  Synthetic oligonucleotide; CTC chr11 5271459 5271480 5271476 5271481 +
ttgacctcatgatctgcccacc

SEQ ID NO: 91921 - DNA, 22 bp, Artificial Sequence
  Synthetic oligonucleotide; CTT chr11 5271461 5271482 5271478 5271483 +
gacctcatgatctgcccacctc

SEQ ID NO: 91922 - DNA, 22 bp, Artificial Sequence
  Synthetic oligonucleotide; TTG chr11 5271462 5271483 5271479 5271484 +
acctcatgatctgcccacctct

SEQ ID NO: 91923 - DNA, 22 bp, Artificial Sequence
  Synthetic oligonucleotide; CTC chr11 5271467 5271488 5271484 5271489 +
atgatctgcccacctctgcctc

SEQ ID NO: 91924 - DNA, 22 bp, Artificial Sequence
  Synthetic oligonucleotide; CTG chr11 5271475 5271496 5271492 5271497 +
cccacctctgcctccgtctcca

SEQ ID NO: 91925 - DNA, 22 bp, Artificial Sequence
  Synthetic oligonucleotide; CTC chr11 5271483 5271504 5271500 5271505 +
tgcctccgtctccatccatttc

SEQ ID NO: 91926 - DNA, 22 bp, Artificial Sequence
  Synthetic oligonucleotide; CTG chr11 5271485 5271506 5271502 5271507 +
cctccgtctccatccatttcta

SEQ ID NO: 91927 - DNA, 22 bp, Artificial Sequence
  Synthetic oligonucleotide; CTC chr11 5271489 5271510 5271506 5271511 +
cgtctccatccatttctaccat

SEQ ID NO: 91928 - DNA, 22 bp, Artificial Sequence
  Synthetic oligonucleotide; CTC chr11 5271495 5271516 5271512 5271517 +
catccatttctaccatttcttt

SEQ ID NO: 91929 - DNA, 22 bp, Artificial Sequence
  Synthetic oligonucleotide; TTT chr11 5271504 5271525 5271521 5271526 +
ctaccatttctttctcctatgg

SEQ ID NO: 91930 - DNA, 22 bp, Artificial Sequence
  Synthetic oligonucleotide; TTC chr11 5271505 5271526 5271522 5271527 +
taccatttctttctcctatggc

SEQ ID NO: 91931 - DNA, 22 bp, Artificial Sequence
  Synthetic oligonucleotide; CTA chr11 5271507 5271528 5271524 5271529 +
ccatttctttctcctatggctc

SEQ ID NO: 91932 - DNA, 22 bp, Artificial Sequence
  Synthetic oligonucleotide; TTT chr11 5271513 5271534 5271530 5271535 +
ctttctcctatggctccccttg

SEQ ID NO: 91933 - DNA, 22 bp, Artificial Sequence
  Synthetic oligonucleotide; TTC chr11 5271514 5271535 5271531 5271536 +
tttctcctatggctccccttgc

SEQ ID NO: 91934 - DNA, 22 bp, Artificial Sequence
  Synthetic oligonucleotide; CTT chr11 5271516 5271537 5271533 5271538 +
tctcctatggctccccttgccc

SEQ ID NO: 91935 - DNA, 22 bp, Artificial Sequence
  Synthetic oligonucleotide; TTT chr11 5271517 5271538 5271534 5271539 +
ctcctatggctccccttgcccc

SEQ ID NO: 91936 - DNA, 22 bp, Artificial Sequence
  Synthetic oligonucleotide; TTC chr11 5271518 5271539 5271535 5271540 +
tcctatggctccccttgcccca

SEQ ID NO: 91937 - DNA, 22 bp, Artificial Sequence
  Synthetic oligonucleotide; CTC chr11 5271520 5271541 5271537 5271542 +
ctatggctccccttgccccacc

SEQ ID NO: 91938 - DNA, 22 bp, Artificial Sequence
  Synthetic oligonucleotide; CTA chr11 5271523 5271544 5271540 5271545 +
tggctccccttgccccaccaga

SEQ ID NO: 91939 - DNA, 22 bp, Artificial Sequence
  Synthetic oligonucleotide; CTC chr11 5271529 5271550 5271546 5271551 +
cccttgccccaccagatctagg

SEQ ID NO: 91940 - DNA, 22 bp, Artificial Sequence
  Synthetic oligonucleotide; CTT chr11 5271534 5271555 5271551 5271556 +
gccccaccagatctaggaattt

SEQ ID NO: 91941 - DNA, 22 bp, Artificial Sequence
  Synthetic oligonucleotide; TTG chr11 5271535 5271556 5271552 5271557 +
ccccaccagatctaggaatttc

SEQ ID NO: 91942 - DNA, 22 bp, Artificial Sequence
  Synthetic oligonucleotide; CTA chr11 5271549 5271570 5271566 5271571 +
ggaatttctgttcctacaattt

SEQ ID NO: 91943 - DNA, 22 bp, Artificial Sequence
  Synthetic oligonucleotide; TTT chr11 5271556 5271577 5271573 5271578 +
ctgttcctacaatttcctgtat

SEQ ID NO: 91944 - DNA, 22 bp, Artificial Sequence
  Synthetic oligonucleotide; TTC chr11 5271557 5271578 5271574 5271579 +
tgttcctacaatttcctgtatg

SEQ ID NO: 91945 - DNA, 22 bp, Artificial Sequence
  Synthetic oligonucleotide; CTG chr11 5271559 5271580 5271576 5271581 +
ttcctacaatttcctgtatgtt

SEQ ID NO: 91946 - DNA, 22 bp, Artificial Sequence
  Synthetic oligonucleotide; TTC chr11 5271562 5271583 5271579 5271584 +
ctacaatttcctgtatgttcag

SEQ ID NO: 91947 - DNA, 22 bp, Artificial Sequence
  Synthetic oligonucleotide; CTA chr11 5271565 5271586 5271582 5271587 +
caatttcctgtatgttcaggcc

SEQ ID NO: 91948 - DNA, 22 bp, Artificial Sequence
  Synthetic oligonucleotide; TTT chr11 5271571 5271592 5271588 5271593 +
cctgtatgttcaggccctagag

SEQ ID NO: 91949 - DNA, 22 bp, Artificial Sequence
  Synthetic oligonucleotide; TTC chr11 5271572 5271593 5271589 5271594 +
ctgtatgttcaggccctagagg

SEQ ID NO: 91950 - DNA, 22 bp, Artificial Sequence
  Synthetic oligonucleotide; CTG chr11 5271575 5271596 5271592 5271597 +
tatgttcaggccctagaggttc

SEQ ID NO: 91951 - DNA, 22 bp, Artificial Sequence
  Synthetic oligonucleotide; TTC chr11 5271582 5271603 5271599 5271604 +
aggccctagaggttcttcgtct

SEQ ID NO: 91952 - DNA, 22 bp, Artificial Sequence
  Synthetic oligonucleotide; CTA chr11 5271590 5271611 5271607 5271612 +
gaggttcttcgtctttttcact

SEQ ID NO: 91953 - DNA, 22 bp, Artificial Sequence
  Synthetic oligonucleotide; TTC chr11 5271597 5271618 5271614 5271619 +
ttcgtctttttcacttagcagt

SEQ ID NO: 91954 - DNA, 22 bp, Artificial Sequence
  Synthetic oligonucleotide; CTT chr11 5271599 5271620 5271616 5271621 +
cgtctttttcacttagcagtat

SEQ ID NO: 91955 - DNA, 22 bp, Artificial Sequence
  Synthetic oligonucleotide; TTC chr11 5271600 5271621 5271617 5271622 +
gtctttttcacttagcagtatg

SEQ ID NO: 91956 - DNA, 22 bp, Artificial Sequence
  Synthetic oligonucleotide; CTT chr11 5271605 5271626 5271622 5271627 +
tttcacttagcagtatggctcc

SEQ ID NO: 91957 - DNA, 22 bp, Artificial Sequence
  Synthetic oligonucleotide; TTT chr11 5271606 5271627 5271623 5271628 +
ttcacttagcagtatggctcct

SEQ ID NO: 91958 - DNA, 22 bp, Artificial Sequence
  Synthetic oligonucleotide; TTT chr11 5271607 5271628 5271624 5271629 +
tcacttagcagtatggctcctg

SEQ ID NO: 91959 - DNA, 22 bp, Artificial Sequence
  Synthetic oligonucleotide; TTT chr11 5271608 5271629 5271625 5271630 +
cacttagcagtatggctcctgt

SEQ ID NO: 91960 - DNA, 22 bp, Artificial Sequence
  Synthetic oligonucleotide; TTC chr11 5271609 5271630 5271626 5271631 +
acttagcagtatggctcctgtc

SEQ ID NO: 91961 - DNA, 22 bp, Artificial Sequence
  Synthetic oligonucleotide; CTT chr11 5271613 5271634 5271630 5271635 +
agcagtatggctcctgtctccc

SEQ ID NO: 91962 - DNA, 22 bp, Artificial Sequence
  Synthetic oligonucleotide; TTA chr11 5271614 5271635 5271631 5271636 +
gcagtatggctcctgtctccca

SEQ ID NO: 91963 - DNA, 22 bp, Artificial Sequence
  Synthetic oligonucleotide; CTC chr11 5271626 5271647 5271643 5271648 +
ctgtctcccaagtcaagtgcct

SEQ ID NO: 91964 - DNA, 22 bp, Artificial Sequence
  Synthetic oligonucleotide; CTG chr11 5271629 5271650 5271646 5271651 +
tctcccaagtcaagtgcctttg

SEQ ID NO: 91965 - DNA, 22 bp, Artificial Sequence
  Synthetic oligonucleotide; CTC chr11 5271633 5271654 5271650 5271655 +
ccaagtcaagtgcctttgggga

SEQ ID NO: 91966 - DNA, 22 bp, Artificial Sequence
  Synthetic oligonucleotide; CTT chr11 5271649 5271670 5271666 5271671 +
tggggattccatattccaagtt

SEQ ID NO: 91967 - DNA, 22 bp, Artificial Sequence
  Synthetic oligonucleotide; TTT chr11 5271650 5271671 5271667 5271672 +
ggggattccatattccaagttt

SEQ ID NO: 91968 - DNA, 22 bp, Artificial Sequence
  Synthetic oligonucleotide; TTG chr11 5271651 5271672 5271668 5271673 +
gggattccatattccaagttta

SEQ ID NO: 91969 - DNA, 22 bp, Artificial Sequence
  Synthetic oligonucleotide; TTC chr11 5271658 5271679 5271675 5271680 +
catattccaagtttactaagag

SEQ ID NO: 91970 - DNA, 22 bp, Artificial Sequence
  Synthetic oligonucleotide; TTC chr11 5271665 5271686 5271682 5271687 +
caagtttactaagagcgtttct

SEQ ID NO: 91971 - DNA, 22 bp, Artificial Sequence
  Synthetic oligonucleotide; TTT chr11 5271672 5271693 5271689 5271694 +
actaagagcgtttctctcttct

SEQ ID NO: 91972 - DNA, 22 bp, Artificial Sequence
  Synthetic oligonucleotide; TTA chr11 5271673 5271694 5271690 5271695 +
ctaagagcgtttctctcttcta

SEQ ID NO: 91973 - DNA, 22 bp, Artificial Sequence
  Synthetic oligonucleotide; CTA chr11 5271676 5271697 5271693 5271698 +
agagcgtttctctcttctataa

SEQ ID NO: 91974 - DNA, 22 bp, Artificial Sequence
  Synthetic oligonucleotide; TTT chr11 5271685 5271706 5271702 5271707 +
ctctcttctataacctgacttt

SEQ ID NO: 91975 - DNA, 22 bp, Artificial Sequence
  Synthetic oligonucleotide; TTC chr11 5271686 5271707 5271703 5271708 +
tctcttctataacctgactttg

SEQ ID NO: 91976 - DNA, 22 bp, Artificial Sequence
  Synthetic oligonucleotide; CTC chr11 5271688 5271709 5271705 5271710 +
tcttctataacctgactttgtt

SEQ ID NO: 91977 - DNA, 22 bp, Artificial Sequence
  Synthetic oligonucleotide; CTC chr11 5271690 5271711 5271707 5271712 +
ttctataacctgactttgttat

SEQ ID NO: 91978 - DNA, 22 bp, Artificial Sequence
  Synthetic oligonucleotide; CTT chr11 5271692 5271713 5271709 5271714 +
ctataacctgactttgttattt

SEQ ID NO: 91979 - DNA, 22 bp, Artificial Sequence
  Synthetic oligonucleotide; TTC chr11 5271693 5271714 5271710 5271715 +
tataacctgactttgttattta

SEQ ID NO: 91980 - DNA, 22 bp, Artificial Sequence
  Synthetic oligonucleotide; CTA chr11 5271695 5271716 5271712 5271717 +
taacctgactttgttatttatt

SEQ ID NO: 91981 - DNA, 22 bp, Artificial Sequence
  Synthetic oligonucleotide; CTG chr11 5271702 5271723 5271719 5271724 +
actttgttatttattatatttt

SEQ ID NO: 91982 - DNA, 22 bp, Artificial Sequence
  Synthetic oligonucleotide; CTT chr11 5271706 5271727 5271723 5271728 +
tgttatttattatattttctta

SEQ ID NO: 91983 - DNA, 22 bp, Artificial Sequence
  Synthetic oligonucleotide; TTT chr11 5271707 5271728 5271724 5271729 +
gttatttattatattttcttat

SEQ ID NO: 91984 - DNA, 22 bp, Artificial Sequence
  Synthetic oligonucleotide; TTG chr11 5271708 5271729 5271725 5271730 +
ttatttattatattttcttatg

SEQ ID NO: 91985 - DNA, 22 bp, Artificial Sequence
  Synthetic oligonucleotide; TTA chr11 5271711 5271732 5271728 5271733 +
tttattatattttcttatgttt

SEQ ID NO: 91986 - DNA, 22 bp, Artificial Sequence
  Synthetic oligonucleotide; TTT chr11 5271714 5271735 5271731 5271736 +
attatattttcttatgtttgtg

SEQ ID NO: 91987 - DNA, 22 bp, Artificial Sequence
  Synthetic oligonucleotide; TTA chr11 5271715 5271736 5271732 5271737 +
ttatattttcttatgtttgtga

SEQ ID NO: 91988 - DNA, 22 bp, Artificial Sequence
  Synthetic oligonucleotide; TTA chr11 5271718 5271739 5271735 5271740 +
tattttcttatgtttgtgataa

SEQ ID NO: 91989 - DNA, 22 bp, Artificial Sequence
  Synthetic oligonucleotide; TTT chr11 5271723 5271744 5271740 5271745 +
tcttatgtttgtgataaaaaaa

SEQ ID NO: 91990 - DNA, 22 bp, Artificial Sequence
  Synthetic oligonucleotide; TTT chr11 5271724 5271745 5271741 5271746 +
cttatgtttgtgataaaaaaaa

SEQ ID NO: 91991 - DNA, 22 bp, Artificial Sequence
  Synthetic oligonucleotide; TTC chr11 5271725 5271746 5271742 5271747 +
ttatgtttgtgataaaaaaaaa

SEQ ID NO: 91992 - DNA, 22 bp, Artificial Sequence
  Synthetic oligonucleotide; CTT chr11 5271727 5271748 5271744 5271749 +
atgtttgtgataaaaaaaaaaa

SEQ ID NO: 91993 - DNA, 22 bp, Artificial Sequence
  Synthetic oligonucleotide; TTA chr11 5271728 5271749 5271745 5271750 +
tgtttgtgataaaaaaaaaaaa

SEQ ID NO: 91994 - DNA, 22 bp, Artificial Sequence
  Synthetic oligonucleotide; TTT chr11 5271733 5271754 5271750 5271755 +
gtgataaaaaaaaaaaaaaaaa

SEQ ID NO: 91995 - DNA, 22 bp, Artificial Sequence
  Synthetic oligonucleotide; TTG chr11 5271734 5271755 5271751 5271756 +
tgataaaaaaaaaaaaaaaaaa

SEQ ID NO: 91996 - DNA, 22 bp, Artificial Sequence
  Synthetic oligonucleotide; CTT chr11 5271764 5271785 5271781 5271786 +
gtggcaagtaagaatgtctccc

SEQ ID NO: 91997 - DNA, 22 bp, Artificial Sequence
  Synthetic oligonucleotide; TTG chr11 5271765 5271786 5271782 5271787 +
tggcaagtaagaatgtctccct

SEQ ID NO: 91998 - DNA, 22 bp, Artificial Sequence
  Synthetic oligonucleotide; CTC chr11 5271784 5271805 5271801 5271806 +
ccttgcttttctcccatgattc

SEQ ID NO: 91999 - DNA, 22 bp, Artificial Sequence
  Synthetic oligonucleotide; CTT chr11 5271788 5271809 5271805 5271810 +
gcttttctcccatgattccaga

SEQ ID NO: 92000 - DNA, 22 bp, Artificial Sequence
  Synthetic oligonucleotide; TTG chr11 5271789 5271810 5271806 5271811 +
cttttctcccatgattccagaa

SEQ ID NO: 92001 - DNA, 22 bp, Artificial Sequence
  Synthetic oligonucleotide; CTT chr11 5271792 5271813 5271809 5271814 +
ttctcccatgattccagaagtc

SEQ ID NO: 92002 - DNA, 22 bp, Artificial Sequence
  Synthetic oligonucleotide; TTT chr11 5271793 5271814 5271810 5271815 +
tctcccatgattccagaagtct

SEQ ID NO: 92003 - DNA, 22 bp, Artificial Sequence
  Synthetic oligonucleotide; TTT chr11 5271794 5271815 5271811 5271816 +
ctcccatgattccagaagtctt

SEQ ID NO: 92004 - DNA, 22 bp, Artificial Sequence
  Synthetic oligonucleotide; TTC chr11 5271795 5271816 5271812 5271817 +
tcccatgattccagaagtcttc

SEQ ID NO: 92005 - DNA, 22 bp, Artificial Sequence
  Synthetic oligonucleotide; CTC chr11 5271797 5271818 5271814 5271819 +
ccatgattccagaagtcttcac

SEQ ID NO: 92006 - DNA, 22 bp, Artificial Sequence
  Synthetic oligonucleotide; TTC chr11 5271806 5271827 5271823 5271828 +
cagaagtcttcacctgacttaa

SEQ ID NO: 92007 - DNA, 22 bp, Artificial Sequence
  Synthetic oligonucleotide; CTT chr11 5271816 5271837 5271833 5271838 +
cacctgacttaatgactgccca

SEQ ID NO: 92008 - DNA, 22 bp, Artificial Sequence
  Synthetic oligonucleotide; TTC chr11 5271817 5271838 5271834 5271839 +
acctgacttaatgactgcccaa

SEQ ID NO: 92009 - DNA, 22 bp, Artificial Sequence
  Synthetic oligonucleotide; CTG chr11 5271822 5271843 5271839 5271844 +
acttaatgactgcccaaattgt

SEQ ID NO: 92010 - DNA, 22 bp, Artificial Sequence
  Synthetic oligonucleotide; CTT chr11 5271826 5271847 5271843 5271848 +
aatgactgcccaaattgttatt

SEQ ID NO: 92011 - DNA, 22 bp, Artificial Sequence
  Synthetic oligonucleotide; TTA chr11 5271827 5271848 5271844 5271849 +
atgactgcccaaattgttatta

SEQ ID NO: 92012 - DNA, 22 bp, Artificial Sequence
  Synthetic oligonucleotide; CTG chr11 5271834 5271855 5271851 5271856 +
cccaaattgttattattccagg

SEQ ID NO: 92013 - DNA, 22 bp, Artificial Sequence
  Synthetic oligonucleotide; TTG chr11 5271843 5271864 5271860 5271865 +
ttattattccaggccactgaat

SEQ ID NO: 92014 - DNA, 22 bp, Artificial Sequence
  Synthetic oligonucleotide; TTA chr11 5271846 5271867 5271863 5271868 +
ttattccaggccactgaatttc

SEQ ID NO: 92015 - DNA, 22 bp, Artificial Sequence
  Synthetic oligonucleotide; TTA chr11 5271849 5271870 5271866 5271871 +
ttccaggccactgaatttctac

SEQ ID NO: 92016 - DNA, 22 bp, Artificial Sequence
  Synthetic oligonucleotide; TTC chr11 5271852 5271873 5271869 5271874 +
caggccactgaatttctactcc

SEQ ID NO: 92017 - DNA, 22 bp, Artificial Sequence
  Synthetic oligonucleotide; CTG chr11 5271862 5271883 5271879 5271884 +
aatttctactccattttctttt

SEQ ID NO: 92018 - DNA, 22 bp, Artificial Sequence
  Synthetic oligonucleotide; TTT chr11 5271867 5271888 5271884 5271889 +
ctactccattttcttttagcta

SEQ ID NO: 92019 - DNA, 22 bp, Artificial Sequence
  Synthetic oligonucleotide; TTC chr11 5271868 5271889 5271885 5271890 +
tactccattttcttttagctat

SEQ ID NO: 92020 - DNA, 22 bp, Artificial Sequence
  Synthetic oligonucleotide; CTA chr11 5271870 5271891 5271887 5271892 +
ctccattttcttttagctatta

SEQ ID NO: 92021 - DNA, 22 bp, Artificial Sequence
  Synthetic oligonucleotide; CTC chr11 5271873 5271894 5271890 5271895 +
cattttcttttagctattaacc

SEQ ID NO: 92022 - DNA, 22 bp, Artificial Sequence
  Synthetic oligonucleotide; TTT chr11 5271878 5271899 5271895 5271900 +
tcttttagctattaaccaatgg

SEQ ID NO: 92023 - DNA, 22 bp, Artificial Sequence
  Synthetic oligonucleotide; TTT chr11 5271879 5271900 5271896 5271901 +
cttttagctattaaccaatggt

SEQ ID NO: 92024 - DNA, 22 bp, Artificial Sequence
  Synthetic oligonucleotide; TTC chr11 5271880 5271901 5271897 5271902 +
ttttagctattaaccaatggta

SEQ ID NO: 92025 - DNA, 22 bp, Artificial Sequence
  Synthetic oligonucleotide; CTT chr11 5271882 5271903 5271899 5271904 +
ttagctattaaccaatggtatc

SEQ ID NO: 92026 - DNA, 22 bp, Artificial Sequence
  Synthetic oligonucleotide; TTT chr11 5271883 5271904 5271900 5271905 +
tagctattaaccaatggtatct

SEQ ID NO: 92027 - DNA, 22 bp, Artificial Sequence
  Synthetic oligonucleotide; TTT chr11 5271884 5271905 5271901 5271906 +
agctattaaccaatggtatctt

SEQ ID NO: 92028 - DNA, 22 bp, Artificial Sequence
  Synthetic oligonucleotide; TTA chr11 5271885 5271906 5271902 5271907 +
gctattaaccaatggtatcttt

SEQ ID NO: 92029 - DNA, 22 bp, Artificial Sequence
  Synthetic oligonucleotide; CTA chr11 5271889 5271910 5271906 5271911 +
ttaaccaatggtatctttctga

SEQ ID NO: 92030 - DNA, 22 bp, Artificial Sequence
  Synthetic oligonucleotide; TTA chr11 5271892 5271913 5271909 5271914 +
accaatggtatctttctgagca

SEQ ID NO: 92031 - DNA, 22 bp, Artificial Sequence
  Synthetic oligonucleotide; CTT chr11 5271906 5271927 5271923 5271928 +
tctgagcatatattctaaccat

SEQ ID NO: 92032 - DNA, 22 bp, Artificial Sequence
  Synthetic oligonucleotide; TTT chr11 5271907 5271928 5271924 5271929 +
ctgagcatatattctaaccatt

SEQ ID NO: 92033 - DNA, 22 bp, Artificial Sequence
  Synthetic oligonucleotide; TTC chr11 5271908 5271929 5271925 5271930 +
tgagcatatattctaaccattg

SEQ ID NO: 92034 - DNA, 22 bp, Artificial Sequence
  Synthetic oligonucleotide; CTG chr11 5271910 5271931 5271927 5271932 +
agcatatattctaaccattggc

SEQ ID NO: 92035 - DNA, 22 bp, Artificial Sequence
  Synthetic oligonucleotide; TTC chr11 5271921 5271942 5271938 5271943 +
taaccattggctaacacagaca

SEQ ID NO: 92036 - DNA, 22 bp, Artificial Sequence
  Synthetic oligonucleotide; CTA chr11 5271923 5271944 5271940 5271945 +
accattggctaacacagacaaa

SEQ ID NO: 92037 - DNA, 22 bp, Artificial Sequence
  Synthetic oligonucleotide; TTG chr11 5271930 5271951 5271947 5271952 +
gctaacacagacaaaaccagga

SEQ ID NO: 92038 - DNA, 22 bp, Artificial Sequence
  Synthetic oligonucleotide; CTA chr11 5271934 5271955 5271951 5271956 +
acacagacaaaaccaggaattc

SEQ ID NO: 92039 - DNA, 22 bp, Artificial Sequence
  Synthetic oligonucleotide; TTC chr11 5271956 5271977 5271973 5271978 +
ctaaactttttttgtgtcacag

SEQ ID NO: 92040 - DNA, 22 bp, Artificial Sequence
  Synthetic oligonucleotide; CTA chr11 5271959 5271980 5271976 5271981 +
aactttttttgtgtcacaggcc

SEQ ID NO: 92041 - DNA, 22 bp, Artificial Sequence
  Synthetic oligonucleotide; CTT chr11 5271964 5271985 5271981 5271986 +
tttttgtgtcacaggccagttt

SEQ ID NO: 92042 - DNA, 22 bp, Artificial Sequence
  Synthetic oligonucleotide; TTT chr11 5271965 5271986 5271982 5271987 +
ttttgtgtcacaggccagtttg

SEQ ID NO: 92043 - DNA, 22 bp, Artificial Sequence
  Synthetic oligonucleotide; TTT chr11 5271966 5271987 5271983 5271988 +
tttgtgtcacaggccagtttgg

SEQ ID NO: 92044 - DNA, 22 bp, Artificial Sequence
  Synthetic oligonucleotide; TTT chr11 5271967 5271988 5271984 5271989 +
ttgtgtcacaggccagtttggc

SEQ ID NO: 92045 - DNA, 22 bp, Artificial Sequence
  Synthetic oligonucleotide; TTT chr11 5271968 5271989 5271985 5271990 +
tgtgtcacaggccagtttggca

SEQ ID NO: 92046 - DNA, 22 bp, Artificial Sequence
  Synthetic oligonucleotide; TTT chr11 5271969 5271990 5271986 5271991 +
gtgtcacaggccagtttggcag

SEQ ID NO: 92047 - DNA, 22 bp, Artificial Sequence
  Synthetic oligonucleotide; TTG chr11 5271970 5271991 5271987 5271992 +
tgtcacaggccagtttggcaga

SEQ ID NO: 92048 - DNA, 22 bp, Artificial Sequence
  Synthetic oligonucleotide; TTT chr11 5271986 5272007 5272003 5272008 +
ggcagactgtaagtgctaaaaa

SEQ ID NO: 92049 - DNA, 22 bp, Artificial Sequence
  Synthetic oligonucleotide; TTG chr11 5271987 5272008 5272004 5272009 +
gcagactgtaagtgctaaaaaa

SEQ ID NO: 92050 - DNA, 22 bp, Artificial Sequence
  Synthetic oligonucleotide; CTG chr11 5271995 5272016 5272012 5272017 +
taagtgctaaaaaaatatgttt

SEQ ID NO: 92051 - DNA, 22 bp, Artificial Sequence
  Synthetic oligonucleotide; CTA chr11 5272004 5272025 5272021 5272026 +
aaaaaatatgtttttattgcat

SEQ ID NO: 92052 - DNA, 22 bp, Artificial Sequence
  Synthetic oligonucleotide; TTT chr11 5272017 5272038 5272034 5272039 +
ttattgcatcaaataatataca

SEQ ID NO: 92053 - DNA, 22 bp, Artificial Sequence
  Synthetic oligonucleotide; TTT chr11 5272018 5272039 5272035 5272040 +
tattgcatcaaataatatacat

SEQ ID NO: 92054 - DNA, 22 bp, Artificial Sequence
  Synthetic oligonucleotide; TTT chr11 5272019 5272040 5272036 5272041 +
attgcatcaaataatatacata

SEQ ID NO: 92055 - DNA, 22 bp, Artificial Sequence
  Synthetic oligonucleotide; TTA chr11 5272020 5272041 5272037 5272042 +
ttgcatcaaataatatacatag

SEQ ID NO: 92056 - DNA, 22 bp, Artificial Sequence
  Synthetic oligonucleotide; TTG chr11 5272023 5272044 5272040 5272045 +
catcaaataatatacataggag

SEQ ID NO: 92057 - DNA, 22 bp, Artificial Sequence
  Synthetic oligonucleotide; CTA chr11 5272050 5272071 5272067 5272072 +
agtttaattacactgaaatatc

SEQ ID NO: 92058 - DNA, 22 bp, Artificial Sequence
  Synthetic oligonucleotide; TTT chr11 5272055 5272076 5272072 5272077 +
aattacactgaaatatcattat

SEQ ID NO: 92059 - DNA, 22 bp, Artificial Sequence
  Synthetic oligonucleotide; TTA chr11 5272056 5272077 5272073 5272078 +
attacactgaaatatcattatc

SEQ ID NO: 92060 - DNA, 22 bp, Artificial Sequence
  Synthetic oligonucleotide; TTA chr11 5272060 5272081 5272077 5272082 +
cactgaaatatcattatcagac

SEQ ID NO: 92061 - DNA, 22 bp, Artificial Sequence
  Synthetic oligonucleotide; CTG chr11 5272065 5272086 5272082 5272087 +
aaatatcattatcagacatcaa

SEQ ID NO: 92062 - DNA, 22 bp, Artificial Sequence
  Synthetic oligonucleotide; TTA chr11 5272076 5272097 5272093 5272098 +
tcagacatcaaacattacattt

SEQ ID NO: 92063 - DNA, 22 bp, Artificial Sequence
  Synthetic oligonucleotide; TTA chr11 5272093 5272114 5272110 5272115 +
catttgtggtatagtatttatt

SEQ ID NO: 92064 - DNA, 22 bp, Artificial Sequence
  Synthetic oligonucleotide; TTT chr11 5272098 5272119 5272115 5272120 +
gtggtatagtatttattatatt

SEQ ID NO: 92065 - DNA, 22 bp, Artificial Sequence
  Synthetic oligonucleotide; TTG chr11 5272099 5272120 5272116 5272121 +
tggtatagtatttattatattt

SEQ ID NO: 92066 - DNA, 22 bp, Artificial Sequence
  Synthetic oligonucleotide; TTT chr11 5272112 5272133 5272129 5272134 +
attatatttgcttctttatgaa

SEQ ID NO: 92067 - DNA, 22 bp, Artificial Sequence
  Synthetic oligonucleotide; TTA chr11 5272113 5272134 5272130 5272135 +
ttatatttgcttctttatgaaa

SEQ ID NO: 92068 - DNA, 22 bp, Artificial Sequence
  Synthetic oligonucleotide; TTA chr11 5272116 5272137 5272133 5272138 +
tatttgcttctttatgaaagca

SEQ ID NO: 92069 - DNA, 22 bp, Artificial Sequence
  Synthetic oligonucleotide; TTT chr11 5272121 5272142 5272138 5272143 +
gcttctttatgaaagcattaga

SEQ ID NO: 92070 - DNA, 22 bp, Artificial Sequence
  Synthetic oligonucleotide; TTG chr11 5272122 5272143 5272139 5272144 +
cttctttatgaaagcattagat

SEQ ID NO: 92071 - DNA, 22 bp, Artificial Sequence
  Synthetic oligonucleotide; CTT chr11 5272125 5272146 5272142 5272147 +
ctttatgaaagcattagatcta

SEQ ID NO: 92072 - DNA, 22 bp, Artificial Sequence
  Synthetic oligonucleotide; TTC chr11 5272126 5272147 5272143 5272148 +
tttatgaaagcattagatctag

SEQ ID NO: 92073 - DNA, 22 bp, Artificial Sequence
  Synthetic oligonucleotide; CTT chr11 5272128 5272149 5272145 5272150 +
tatgaaagcattagatctagga

SEQ ID NO: 92074 - DNA, 22 bp, Artificial Sequence
  Synthetic oligonucleotide; TTT chr11 5272129 5272150 5272146 5272151 +
atgaaagcattagatctaggat

SEQ ID NO: 92075 - DNA, 22 bp, Artificial Sequence
  Synthetic oligonucleotide; TTA chr11 5272130 5272151 5272147 5272152 +
tgaaagcattagatctaggatt

SEQ ID NO: 92076 - DNA, 22 bp, Artificial Sequence
  Synthetic oligonucleotide; TTA chr11 5272141 5272162 5272158 5272163 +
gatctaggattgggtctacagc

SEQ ID NO: 92077 - DNA, 22 bp, Artificial Sequence
  Synthetic oligonucleotide; CTA chr11 5272147 5272168 5272164 5272169 +
ggattgggtctacagctacctt

SEQ ID NO: 92078 - DNA, 22 bp, Artificial Sequence
  Synthetic oligonucleotide; TTG chr11 5272153 5272174 5272170 5272175 +
ggtctacagctaccttaagatc

SEQ ID NO: 92079 - DNA, 22 bp, Artificial Sequence
  Synthetic oligonucleotide; CTA chr11 5272159 5272180 5272176 5272181 +
cagctaccttaagatccaagta

SEQ ID NO: 92080 - DNA, 22 bp, Artificial Sequence
  Synthetic oligonucleotide; CTA chr11 5272165 5272186 5272182 5272187 +
ccttaagatccaagtagtgatg

SEQ ID NO: 92081 - DNA, 22 bp, Artificial Sequence
  Synthetic oligonucleotide; CTT chr11 5272169 5272190 5272186 5272191 +
aagatccaagtagtgatgcaga

SEQ ID NO: 92082 - DNA, 22 bp, Artificial Sequence
  Synthetic oligonucleotide; TTA chr11 5272170 5272191 5272187 5272192 +
agatccaagtagtgatgcagat

SEQ ID NO: 92083 - DNA, 22 bp, Artificial Sequence
  Synthetic oligonucleotide; TTA chr11 5272204 5272225 5272221 5272226 +
aaaatatctgcaatgggccagg

SEQ ID NO: 92084 - DNA, 22 bp, Artificial Sequence
  Synthetic oligonucleotide; CTG chr11 5272214 5272235 5272231 5272236 +
caatgggccaggcgtggtggct

SEQ ID NO: 92085 - DNA, 22 bp, Artificial Sequence
  Synthetic oligonucleotide; CTC chr11 5272237 5272258 5272254 5272259 +
acacctataatcccagcacttc

SEQ ID NO: 92086 - DNA, 22 bp, Artificial Sequence
  Synthetic oligonucleotide; CTA chr11 5272244 5272265 5272261 5272266 +
taatcccagcacttcaggaggc

SEQ ID NO: 92087 - DNA, 22 bp, Artificial Sequence
  Synthetic oligonucleotide; CTT chr11 5272258 5272279 5272275 5272280 +
caggaggccaaggcgggcagat

SEQ ID NO: 92088 - DNA, 22 bp, Artificial Sequence
  Synthetic oligonucleotide; TTC chr11 5272259 5272280 5272276 5272281 +
aggaggccaaggcgggcagatc

SEQ ID NO: 92089 - DNA, 22 bp, Artificial Sequence
  Synthetic oligonucleotide; CTG chr11 5272286 5272307 5272303 5272308 +
aggtcaggagttcaagaccagc

SEQ ID NO: 92090 - DNA, 22 bp, Artificial Sequence
  Synthetic oligonucleotide; TTC chr11 5272299 5272320 5272316 5272321 +
aagaccagcctggccaacatgg

SEQ ID NO: 92091 - DNA, 22 bp, Artificial Sequence
  Synthetic oligonucleotide; CTG chr11 5272311 5272332 5272328 5272333 +
gccaacatggcgaaaccccatc

SEQ ID NO: 92092 - DNA, 22 bp, Artificial Sequence
  Synthetic oligonucleotide; CTC chr11 5272335 5272356 5272352 5272357 +
tactaaaaatacaaaaattaga

SEQ ID NO: 92093 - DNA, 22 bp, Artificial Sequence
  Synthetic oligonucleotide; CTA chr11 5272337 5272358 5272354 5272359 +
ctaaaaatacaaaaattagact

SEQ ID NO: 92094 - DNA, 22 bp, Artificial Sequence
  Synthetic oligonucleotide; CTA chr11 5272340 5272361 5272357 5272362 +
aaaatacaaaaattagactggc

SEQ ID NO: 92095 - DNA, 22 bp, Artificial Sequence
  Synthetic oligonucleotide; TTA chr11 5272355 5272376 5272372 5272377 +
gactggcatggtggcaggtgcc

SEQ ID NO: 92096 - DNA, 22 bp, Artificial Sequence
  Synthetic oligonucleotide; CTG chr11 5272360 5272381 5272377 5272382 +
gcatggtggcaggtgcctgtaa

SEQ ID NO: 92097 - DNA, 22 bp, Artificial Sequence
  Synthetic oligonucleotide; CTG chr11 5272379 5272400 5272396 5272401 +
taatccccagctactcaggagg

SEQ ID NO: 92098 - DNA, 22 bp, Artificial Sequence
  Synthetic oligonucleotide; CTA chr11 5272392 5272413 5272409 5272414 +
ctcaggaggccaaggcaggaga

SEQ ID NO: 92099 - DNA, 22 bp, Artificial Sequence
  Synthetic oligonucleotide; CTC chr11 5272395 5272416 5272412 5272417 +
aggaggccaaggcaggagaatt

SEQ ID NO: 92100 - DNA, 22 bp, Artificial Sequence
  Synthetic oligonucleotide; TTG chr11 5272418 5272439 5272435 5272440 +
cttgaatgcaggaaggggaggt

SEQ ID NO: 92101 - DNA, 22 bp, Artificial Sequence
  Synthetic oligonucleotide; CTT chr11 5272421 5272442 5272438 5272443 +
gaatgcaggaaggggaggttgc

SEQ ID NO: 92102 - DNA, 22 bp, Artificial Sequence
  Synthetic oligonucleotide; TTG chr11 5272422 5272443 5272439 5272444 +
aatgcaggaaggggaggttgca

SEQ ID NO: 92103 - DNA, 22 bp, Artificial Sequence
  Synthetic oligonucleotide; TTG chr11 5272442 5272463 5272459 5272464 +
cagtgagccgaaatcatgccac

SEQ ID NO: 92104 - DNA, 22 bp, Artificial Sequence
  Synthetic oligonucleotide; CTG chr11 5272466 5272487 5272483 5272488 +
cactccagcctgggcaataaga

SEQ ID NO: 92105 - DNA, 22 bp, Artificial Sequence
  Synthetic oligonucleotide; CTC chr11 5272471 5272492 5272488 5272493 +
cagcctgggcaataagagcgaa

SEQ ID NO: 92106 - DNA, 22 bp, Artificial Sequence
  Synthetic oligonucleotide; CTG chr11 5272478 5272499 5272495 5272500 +
ggcaataagagcgaaactccat

SEQ ID NO: 92107 - DNA, 22 bp, Artificial Sequence
  Synthetic oligonucleotide; CTC chr11 5272497 5272518 5272514 5272519 +
catctcaaacaaaaacaaaaac

SEQ ID NO: 92108 - DNA, 22 bp, Artificial Sequence
  Synthetic oligonucleotide; CTC chr11 5272503 5272524 5272520 5272525 +
aaacaaaaacaaaaacaaaaag

SEQ ID NO: 92109 - DNA, 22 bp, Artificial Sequence
  Synthetic oligonucleotide; CTG chr11 5272530 5272551 5272547 5272552 +
caatacctatggtgtagtatga

SEQ ID NO: 92110 - DNA, 22 bp, Artificial Sequence
  Synthetic oligonucleotide; CTA chr11 5272539 5272560 5272556 5272561 +
tggtgtagtatgaaaatatctg

SEQ ID NO: 92111 - DNA, 22 bp, Artificial Sequence
  Synthetic oligonucleotide; CTG chr11 5272561 5272582 5272578 5272583 +
tggtttctctttataactatgc

SEQ ID NO: 92112 - DNA, 22 bp, Artificial Sequence
  Synthetic oligonucleotide; TTT chr11 5272567 5272588 5272584 5272589 +
ctctttataactatgcaatagg

SEQ ID NO: 92113 - DNA, 22 bp, Artificial Sequence
  Synthetic oligonucleotide; TTC chr11 5272568 5272589 5272585 5272590 +
tctttataactatgcaataggt

SEQ ID NO: 92114 - DNA, 22 bp, Artificial Sequence
  Synthetic oligonucleotide; CTC chr11 5272570 5272591 5272587 5272592 +
tttataactatgcaataggtac

SEQ ID NO: 92115 - DNA, 22 bp, Artificial Sequence
  Synthetic oligonucleotide; CTT chr11 5272572 5272593 5272589 5272594 +
tataactatgcaataggtactg

SEQ ID NO: 92116 - DNA, 22 bp, Artificial Sequence
  Synthetic oligonucleotide; TTT chr11 5272573 5272594 5272590 5272595 +
ataactatgcaataggtactga

SEQ ID NO: 92117 - DNA, 22 bp, Artificial Sequence
  Synthetic oligonucleotide; TTA chr11 5272574 5272595 5272591 5272596 +
taactatgcaataggtactgat

SEQ ID NO: 92118 - DNA, 22 bp, Artificial Sequence
  Synthetic oligonucleotide; CTA chr11 5272580 5272601 5272597 5272602 +
tgcaataggtactgatgatgtc

SEQ ID NO: 92119 - DNA, 22 bp, Artificial Sequence
  Synthetic oligonucleotide; CTG chr11 5272594 5272615 5272611 5272616 +
atgatgtcattctagtttgtcc

SEQ ID NO: 92120 - DNA, 22 bp, Artificial Sequence
  Synthetic oligonucleotide; TTC chr11 5272606 5272627 5272623 5272628 +
tagtttgtcctttgcattcaaa

SEQ ID NO: 92121 - DNA, 22 bp, Artificial Sequence
  Synthetic oligonucleotide; CTA chr11 5272608 5272629 5272625 5272630 +
gtttgtcctttgcattcaaagt

SEQ ID NO: 92122 - DNA, 22 bp, Artificial Sequence
  Synthetic oligonucleotide; TTT chr11 5272612 5272633 5272629 5272634 +
gtcctttgcattcaaagtagaa

SEQ ID NO: 92123 - DNA, 22 bp, Artificial Sequence
  Synthetic oligonucleotide; TTG chr11 5272613 5272634 5272630 5272635 +
tcctttgcattcaaagtagaag

SEQ ID NO: 92124 - DNA, 22 bp, Artificial Sequence
  Synthetic oligonucleotide; CTT chr11 5272618 5272639 5272635 5272640 +
tgcattcaaagtagaagaaaat

SEQ ID NO: 92125 - DNA, 22 bp, Artificial Sequence
  Synthetic oligonucleotide; TTT chr11 5272619 5272640 5272636 5272641 +
gcattcaaagtagaagaaaatg

SEQ ID NO: 92126 - DNA, 22 bp, Artificial Sequence
  Synthetic oligonucleotide; TTG chr11 5272620 5272641 5272637 5272642 +
cattcaaagtagaagaaaatgc

SEQ ID NO: 92127 - DNA, 22 bp, Artificial Sequence
  Synthetic oligonucleotide; TTC chr11 5272625 5272646 5272642 5272647 +
aaagtagaagaaaatgctaaat

SEQ ID NO: 92128 - DNA, 22 bp, Artificial Sequence
  Synthetic oligonucleotide; CTA chr11 5272644 5272665 5272661 5272666 +
aatttcagttacatgtaagtaa

SEQ ID NO: 92129 - DNA, 22 bp, Artificial Sequence
  Synthetic oligonucleotide; TTT chr11 5272649 5272670 5272666 5272671 +
cagttacatgtaagtaaaaata

SEQ ID NO: 92130 - DNA, 22 bp, Artificial Sequence
  Synthetic oligonucleotide; TTC chr11 5272650 5272671 5272667 5272672 +
agttacatgtaagtaaaaatac

SEQ ID NO: 92131 - DNA, 22 bp, Artificial Sequence
  Synthetic oligonucleotide; TTA chr11 5272655 5272676 5272672 5272677 +
catgtaagtaaaaatacagatt

SEQ ID NO: 92132 - DNA, 22 bp, Artificial Sequence
  Synthetic oligonucleotide; TTT chr11 5272678 5272699 5272695 5272700 +
tttttctataaacttcaccagc

SEQ ID NO: 92133 - DNA, 22 bp, Artificial Sequence
  Synthetic oligonucleotide; TTT chr11 5272679 5272700 5272696 5272701 +
ttttctataaacttcaccagcc

SEQ ID NO: 92134 - DNA, 22 bp, Artificial Sequence
  Synthetic oligonucleotide; TTT chr11 5272680 5272701 5272697 5272702 +
tttctataaacttcaccagccc

SEQ ID NO: 92135 - DNA, 22 bp, Artificial Sequence
  Synthetic oligonucleotide; TTT chr11 5272681 5272702 5272698 5272703 +
ttctataaacttcaccagcccc

SEQ ID NO: 92136 - DNA, 22 bp, Artificial Sequence
  Synthetic oligonucleotide; TTT chr11 5272682 5272703 5272699 5272704 +
tctataaacttcaccagccccc

SEQ ID NO: 92137 - DNA, 22 bp, Artificial Sequence
  Synthetic oligonucleotide; TTT chr11 5272683 5272704 5272700 5272705 +
ctataaacttcaccagccccct

SEQ ID NO: 92138 - DNA, 22 bp, Artificial Sequence
  Synthetic oligonucleotide; TTC chr11 5272684 5272705 5272701 5272706 +
tataaacttcaccagcccccta

SEQ ID NO: 92139 - DNA, 22 bp, Artificial Sequence
  Synthetic oligonucleotide; CTA chr11 5272686 5272707 5272703 5272708 +
taaacttcaccagccccctagt

SEQ ID NO: 92140 - DNA, 22 bp, Artificial Sequence
  Synthetic oligonucleotide; CTT chr11 5272693 5272714 5272710 5272715 +
caccagccccctagtgttctgt

SEQ ID NO: 92141 - DNA, 22 bp, Artificial Sequence
  Synthetic oligonucleotide; TTC chr11 5272694 5272715 5272711 5272716 +
accagccccctagtgttctgtg

SEQ ID NO: 92142 - DNA, 22 bp, Artificial Sequence
  Synthetic oligonucleotide; CTA chr11 5272706 5272727 5272723 5272728 +
gtgttctgtggaccccagatta

SEQ ID NO: 92143 - DNA, 22 bp, Artificial Sequence
  Synthetic oligonucleotide; TTC chr11 5272712 5272733 5272729 5272734 +
tgtggaccccagattaagactt

SEQ ID NO: 92144 - DNA, 22 bp, Artificial Sequence
  Synthetic oligonucleotide; CTG chr11 5272714 5272735 5272731 5272736 +
tggaccccagattaagacttcc

SEQ ID NO: 92145 - DNA, 22 bp, Artificial Sequence
  Synthetic oligonucleotide; TTA chr11 5272728 5272749 5272745 5272750 +
agacttcctgggacaaaatata

SEQ ID NO: 92146 - DNA, 22 bp, Artificial Sequence
  Synthetic oligonucleotide; CTT chr11 5272734 5272755 5272751 5272756 +
cctgggacaaaatatatagcct

SEQ ID NO: 92147 - DNA, 22 bp, Artificial Sequence
  Synthetic oligonucleotide; TTC chr11 5272735 5272756 5272752 5272757 +
ctgggacaaaatatatagccta

SEQ ID NO: 92148 - DNA, 22 bp, Artificial Sequence
  Synthetic oligonucleotide; CTG chr11 5272738 5272759 5272755 5272760 +
ggacaaaatatatagcctagga

SEQ ID NO: 92149 - DNA, 22 bp, Artificial Sequence
  Synthetic oligonucleotide; CTA chr11 5272757 5272778 5272774 5272779 +
ggaagacaagatcctaggtttg

SEQ ID NO: 92150 - DNA, 22 bp, Artificial Sequence
  Synthetic oligonucleotide; CTA chr11 5272773 5272794 5272790 5272795 +
ggtttggaaagaacgtatttga

SEQ ID NO: 92151 - DNA, 22 bp, Artificial Sequence
  Synthetic oligonucleotide; TTT chr11 5272778 5272799 5272795 5272800 +
ggaaagaacgtatttgatccac

SEQ ID NO: 92152 - DNA, 22 bp, Artificial Sequence
  Synthetic oligonucleotide; TTG chr11 5272779 5272800 5272796 5272801 +
gaaagaacgtatttgatccact

SEQ ID NO: 92153 - DNA, 22 bp, Artificial Sequence
  Synthetic oligonucleotide; TTT chr11 5272793 5272814 5272810 5272815 +
gatccactgaaataaaagaaca

SEQ ID NO: 92154 - DNA, 22 bp, Artificial Sequence
  Synthetic oligonucleotide; TTG chr11 5272794 5272815 5272811 5272816 +
atccactgaaataaaagaacaa

SEQ ID NO: 92155 - DNA, 22 bp, Artificial Sequence
  Synthetic oligonucleotide; CTG chr11 5272802 5272823 5272819 5272824 +
aaataaaagaacaatgactaga

SEQ ID NO: 92156 - DNA, 22 bp, Artificial Sequence
  Synthetic oligonucleotide; CTA chr11 5272822 5272843 5272839 5272844 +
gacaaaaagcagctcagctgct

SEQ ID NO: 92157 - DNA, 22 bp, Artificial Sequence
  Synthetic oligonucleotide; CTC chr11 5272837 5272858 5272854 5272859 +
agctgcttgtagcttgaaccaa

SEQ ID NO: 92158 - DNA, 22 bp, Artificial Sequence
  Synthetic oligonucleotide; CTG chr11 5272842 5272863 5272859 5272864 +
cttgtagcttgaaccaagctga

SEQ ID NO: 92159 - DNA, 22 bp, Artificial Sequence
  Synthetic oligonucleotide; CTT chr11 5272845 5272866 5272862 5272867 +
gtagcttgaaccaagctgagct

SEQ ID NO: 92160 - DNA, 22 bp, Artificial Sequence
  Synthetic oligonucleotide; TTG chr11 5272846 5272867 5272863 5272868 +
tagcttgaaccaagctgagctt

SEQ ID NO: 92161 - DNA, 22 bp, Artificial Sequence
  Synthetic oligonucleotide; CTT chr11 5272852 5272873 5272869 5272874 +
gaaccaagctgagcttggctac

SEQ ID NO: 92162 - DNA, 22 bp, Artificial Sequence
  Synthetic oligonucleotide; TTG chr11 5272853 5272874 5272870 5272875 +
aaccaagctgagcttggctact

SEQ ID NO: 92163 - DNA, 22 bp, Artificial Sequence
  Synthetic oligonucleotide; CTG chr11 5272863 5272884 5272880 5272885 +
agcttggctactcagagaagaa

SEQ ID NO: 92164 - DNA, 22 bp, Artificial Sequence
  Synthetic oligonucleotide; CTT chr11 5272868 5272889 5272885 5272890 +
ggctactcagagaagaacagtc

SEQ ID NO: 92165 - DNA, 22 bp, Artificial Sequence
  Synthetic oligonucleotide; TTG chr11 5272869 5272890 5272886 5272891 +
gctactcagagaagaacagtcg

SEQ ID NO: 92166 - DNA, 22 bp, Artificial Sequence
  Synthetic oligonucleotide; CTA chr11 5272873 5272894 5272890 5272895 +
ctcagagaagaacagtcgttga

SEQ ID NO: 92167 - DNA, 22 bp, Artificial Sequence
  Synthetic oligonucleotide; CTC chr11 5272876 5272897 5272893 5272898 +
agagaagaacagtcgttgagat

SEQ ID NO: 92168 - DNA, 22 bp, Artificial Sequence
  Synthetic oligonucleotide; TTG chr11 5272894 5272915 5272911 5272916 +
agataatataattttttttaac

SEQ ID NO: 92169 - DNA, 22 bp, Artificial Sequence
  Synthetic oligonucleotide; TTT chr11 5272908 5272929 5272925 5272930 +
tttttaaccaattaagatacag

SEQ ID NO: 92170 - DNA, 22 bp, Artificial Sequence
  Synthetic oligonucleotide; TTT chr11 5272909 5272930 5272926 5272931 +
ttttaaccaattaagatacagc

SEQ ID NO: 92171 - DNA, 22 bp, Artificial Sequence
  Synthetic oligonucleotide; TTT chr11 5272910 5272931 5272927 5272932 +
tttaaccaattaagatacagct

SEQ ID NO: 92172 - DNA, 22 bp, Artificial Sequence
  Synthetic oligonucleotide; TTT chr11 5272911 5272932 5272928 5272933 +
ttaaccaattaagatacagctc

SEQ ID NO: 92173 - DNA, 22 bp, Artificial Sequence
  Synthetic oligonucleotide; TTT chr11 5272912 5272933 5272929 5272934 +
taaccaattaagatacagctct

SEQ ID NO: 92174 - DNA, 22 bp, Artificial Sequence
  Synthetic oligonucleotide; TTT chr11 5272913 5272934 5272930 5272935 +
aaccaattaagatacagctctg

SEQ ID NO: 92175 - DNA, 22 bp, Artificial Sequence
  Synthetic oligonucleotide; TTA chr11 5272914 5272935 5272931 5272936 +
accaattaagatacagctctgg

SEQ ID NO: 92176 - DNA, 22 bp, Artificial Sequence
  Synthetic oligonucleotide; TTA chr11 5272922 5272943 5272939 5272944 +
agatacagctctgggttttcag

SEQ ID NO: 92177 - DNA, 22 bp, Artificial Sequence
  Synthetic oligonucleotide; CTC chr11 5272933 5272954 5272950 5272955 +
tgggttttcagggggaatttgc

SEQ ID NO: 92178 - DNA, 22 bp, Artificial Sequence
  Synthetic oligonucleotide; CTG chr11 5272935 5272956 5272952 5272957 +
ggttttcagggggaatttgcta

SEQ ID NO: 92179 - DNA, 22 bp, Artificial Sequence
  Synthetic oligonucleotide; TTT chr11 5272940 5272961 5272957 5272962 +
tcagggggaatttgctacagat

SEQ ID NO: 92180 - DNA, 22 bp, Artificial Sequence
  Synthetic oligonucleotide; TTT chr11 5272941 5272962 5272958 5272963 +
cagggggaatttgctacagatc

SEQ ID NO: 92181 - DNA, 22 bp, Artificial Sequence
  Synthetic oligonucleotide; TTC chr11 5272942 5272963 5272959 5272964 +
agggggaatttgctacagatcc

SEQ ID NO: 92182 - DNA, 22 bp, Artificial Sequence
  Synthetic oligonucleotide; TTT chr11 5272953 5272974 5272970 5272975 +
gctacagatccacagtatgaag

SEQ ID NO: 92183 - DNA, 22 bp, Artificial Sequence
  Synthetic oligonucleotide; TTG chr11 5272954 5272975 5272971 5272976 +
ctacagatccacagtatgaagg

SEQ ID NO: 92184 - DNA, 22 bp, Artificial Sequence
  Synthetic oligonucleotide; CTA chr11 5272957 5272978 5272974 5272979 +
cagatccacagtatgaaggcag

SEQ ID NO: 92185 - DNA, 22 bp, Artificial Sequence
  Synthetic oligonucleotide; CTT chr11 5272987 5273008 5273004 5273009 +
cctcagaacttgaatgtgaggg

SEQ ID NO: 92186 - DNA, 22 bp, Artificial Sequence
  Synthetic oligonucleotide; TTC chr11 5272988 5273009 5273005 5273010 +
ctcagaacttgaatgtgagggt

SEQ ID NO: 92187 - DNA, 22 bp, Artificial Sequence
  Synthetic oligonucleotide; CTC chr11 5272991 5273012 5273008 5273013 +
agaacttgaatgtgagggtcag

SEQ ID NO: 92188 - DNA, 22 bp, Artificial Sequence
  Synthetic oligonucleotide; CTT chr11 5272998 5273019 5273015 5273020 +
gaatgtgagggtcagacattgc

SEQ ID NO: 92189 - DNA, 22 bp, Artificial Sequence
  Synthetic oligonucleotide; TTG chr11 5272999 5273020 5273016 5273021 +
aatgtgagggtcagacattgcc

SEQ ID NO: 92190 - DNA, 22 bp, Artificial Sequence
  Synthetic oligonucleotide; TTG chr11 5273019 5273040 5273036 5273041 +
ccaaagtccaaggaataaggac

SEQ ID NO: 92191 - DNA, 22 bp, Artificial Sequence
  Synthetic oligonucleotide; CTC chr11 5273051 5273072 5273068 5273073 +
aaggccaagagtttggagaaca

SEQ ID NO: 92192 - DNA, 22 bp, Artificial Sequence
  Synthetic oligonucleotide; TTT chr11 5273065 5273086 5273082 5273087 +
ggagaacaggtttctccctaaa

SEQ ID NO: 92193 - DNA, 22 bp, Artificial Sequence
  Synthetic oligonucleotide; TTG chr11 5273066 5273087 5273083 5273088 +
gagaacaggtttctccctaaaa

SEQ ID NO: 92194 - DNA, 22 bp, Artificial Sequence
  Synthetic oligonucleotide; TTT chr11 5273078 5273099 5273095 5273100 +
ctccctaaaacaagccctatgg

SEQ ID NO: 92195 - DNA, 22 bp, Artificial Sequence
  Synthetic oligonucleotide; TTC chr11 5273079 5273100 5273096 5273101 +
tccctaaaacaagccctatggg

SEQ ID NO: 92196 - DNA, 22 bp, Artificial Sequence
  Synthetic oligonucleotide; CTC chr11 5273081 5273102 5273098 5273103 +
cctaaaacaagccctatgggta

SEQ ID NO: 92197 - DNA, 22 bp, Artificial Sequence
  Synthetic oligonucleotide; CTA chr11 5273085 5273106 5273102 5273107 +
aaacaagccctatgggtaatcc

SEQ ID NO: 92198 - DNA, 22 bp, Artificial Sequence
  Synthetic oligonucleotide; CTA chr11 5273097 5273118 5273114 5273119 +
tgggtaatcccatcattcttcc

SEQ ID NO: 92199 - DNA, 22 bp, Artificial Sequence
  Synthetic oligonucleotide; TTC chr11 5273115 5273136 5273132 5273137 +
ttcccattcagagtatggacac

SEQ ID NO: 92200 - DNA, 22 bp, Artificial Sequence
  Synthetic oligonucleotide; CTT chr11 5273117 5273138 5273134 5273139 +
cccattcagagtatggacacca

SEQ ID NO: 92201 - DNA, 22 bp, Artificial Sequence
  Synthetic oligonucleotide; TTC chr11 5273118 5273139 5273135 5273140 +
ccattcagagtatggacaccag

SEQ ID NO: 92202 - DNA, 22 bp, Artificial Sequence
  Synthetic oligonucleotide; TTC chr11 5273124 5273145 5273141 5273146 +
agagtatggacaccagtcttct

SEQ ID NO: 92203 - DNA, 22 bp, Artificial Sequence
  Synthetic oligonucleotide; CTT chr11 5273144 5273165 5273161 5273166 +
ctcttagattcagagtatgggg

SEQ ID NO: 92204 - DNA, 22 bp, Artificial Sequence
  Synthetic oligonucleotide; TTC chr11 5273145 5273166 5273162 5273167 +
tcttagattcagagtatggggt

SEQ ID NO: 92205 - DNA, 22 bp, Artificial Sequence
  Synthetic oligonucleotide; CTC chr11 5273147 5273168 5273164 5273169 +
ttagattcagagtatggggttg

SEQ ID NO: 92206 - DNA, 22 bp, Artificial Sequence
  Synthetic oligonucleotide; CTT chr11 5273149 5273170 5273166 5273171 +
agattcagagtatggggttgat

SEQ ID NO: 92207 - DNA, 22 bp, Artificial Sequence
  Synthetic oligonucleotide; TTA chr11 5273150 5273171 5273167 5273172 +
gattcagagtatggggttgatc

SEQ ID NO: 92208 - DNA, 22 bp, Artificial Sequence
  Synthetic oligonucleotide; TTC chr11 5273155 5273176 5273172 5273177 +
agagtatggggttgatcctctc

SEQ ID NO: 92209 - DNA, 22 bp, Artificial Sequence
  Synthetic oligonucleotide; TTG chr11 5273169 5273190 5273186 5273191 +
atcctctcctgctccctcggag

SEQ ID NO: 92210 - DNA, 22 bp, Artificial Sequence
  Synthetic oligonucleotide; CTC chr11 5273175 5273196 5273192 5273197 +
tcctgctccctcggagccagtt

SEQ ID NO: 92211 - DNA, 22 bp, Artificial Sequence
  Synthetic oligonucleotide; CTC chr11 5273177 5273198 5273194 5273199 +
ctgctccctcggagccagttgc

SEQ ID NO: 92212 - DNA, 22 bp, Artificial Sequence
  Synthetic oligonucleotide; CTG chr11 5273180 5273201 5273197 5273202 +
ctccctcggagccagttgcaga

SEQ ID NO: 92213 - DNA, 22 bp, Artificial Sequence
  Synthetic oligonucleotide; CTC chr11 5273183 5273204 5273200 5273205 +
cctcggagccagttgcagagcc

SEQ ID NO: 92214 - DNA, 22 bp, Artificial Sequence
  Synthetic oligonucleotide; CTC chr11 5273187 5273208 5273204 5273209 +
ggagccagttgcagagcccaca

SEQ ID NO: 92215 - DNA, 22 bp, Artificial Sequence
  Synthetic oligonucleotide; TTG chr11 5273198 5273219 5273215 5273220 +
cagagcccacattttcttctct

SEQ ID NO: 92216 - DNA, 22 bp, Artificial Sequence
  Synthetic oligonucleotide; TTT chr11 5273212 5273233 5273229 5273234 +
tcttctctccttactgcctatg

SEQ ID NO: 92217 - DNA, 22 bp, Artificial Sequence
  Synthetic oligonucleotide; TTT chr11 5273213 5273234 5273230 5273235 +
cttctctccttactgcctatgg

SEQ ID NO: 92218 - DNA, 22 bp, Artificial Sequence
  Synthetic oligonucleotide; TTC chr11 5273214 5273235 5273231 5273236 +
ttctctccttactgcctatggt

SEQ ID NO: 92219 - DNA, 22 bp, Artificial Sequence
  Synthetic oligonucleotide; CTT chr11 5273216 5273237 5273233 5273238 +
ctctccttactgcctatggttc

SEQ ID NO: 92220 - DNA, 22 bp, Artificial Sequence
  Synthetic oligonucleotide; TTC chr11 5273217 5273238 5273234 5273239 +
tctccttactgcctatggttcc

SEQ ID NO: 92221 - DNA, 22 bp, Artificial Sequence
  Synthetic oligonucleotide; CTC chr11 5273219 5273240 5273236 5273241 +
tccttactgcctatggttccag

SEQ ID NO: 92222 - DNA, 22 bp, Artificial Sequence
  Synthetic oligonucleotide; CTC chr11 5273221 5273242 5273238 5273243 +
cttactgcctatggttccagac

SEQ ID NO: 92223 - DNA, 22 bp, Artificial Sequence
  Synthetic oligonucleotide; CTT chr11 5273224 5273245 5273241 5273246 +
actgcctatggttccagacctg

SEQ ID NO: 92224 - DNA, 22 bp, Artificial Sequence
  Synthetic oligonucleotide; TTA chr11 5273225 5273246 5273242 5273247 +
ctgcctatggttccagacctgg

SEQ ID NO: 92225 - DNA, 22 bp, Artificial Sequence
  Synthetic oligonucleotide; CTG chr11 5273228 5273249 5273245 5273250 +
cctatggttccagacctggctt

SEQ ID NO: 92226 - DNA, 22 bp, Artificial Sequence
  Synthetic oligonucleotide; CTA chr11 5273232 5273253 5273249 5273254 +
tggttccagacctggcttgcat

SEQ ID NO: 92227 - DNA, 22 bp, Artificial Sequence
  Synthetic oligonucleotide; TTC chr11 5273238 5273259 5273255 5273260 +
cagacctggcttgcatccaggg

SEQ ID NO: 92228 - DNA, 22 bp, Artificial Sequence
  Synthetic oligonucleotide; CTG chr11 5273246 5273267 5273263 5273268 +
gcttgcatccagggatctgacc

SEQ ID NO: 92229 - DNA, 22 bp, Artificial Sequence
  Synthetic oligonucleotide; CTT chr11 5273250 5273271 5273267 5273272 +
gcatccagggatctgacccatt

SEQ ID NO: 92230 - DNA, 22 bp, Artificial Sequence
  Synthetic oligonucleotide; TTG chr11 5273251 5273272 5273268 5273273 +
catccagggatctgacccattc

SEQ ID NO: 92231 - DNA, 22 bp, Artificial Sequence
  Synthetic oligonucleotide; CTG chr11 5273265 5273286 5273282 5273287 +
acccattccatgtttccttatg

SEQ ID NO: 92232 - DNA, 22 bp, Artificial Sequence
  Synthetic oligonucleotide; TTC chr11 5273273 5273294 5273290 5273295 +
catgtttccttatggctaaagg

SEQ ID NO: 92233 - DNA, 22 bp, Artificial Sequence
  Synthetic oligonucleotide; TTT chr11 5273280 5273301 5273297 5273302 +
ccttatggctaaaggtggtagg

SEQ ID NO: 92234 - DNA, 22 bp, Artificial Sequence
  Synthetic oligonucleotide; TTC chr11 5273281 5273302 5273298 5273303 +
cttatggctaaaggtggtaggg

SEQ ID NO: 92235 - DNA, 22 bp, Artificial Sequence
  Synthetic oligonucleotide; CTT chr11 5273284 5273305 5273301 5273306 +
atggctaaaggtggtagggagg

SEQ ID NO: 92236 - DNA, 22 bp, Artificial Sequence
  Synthetic oligonucleotide; TTA chr11 5273285 5273306 5273302 5273307 +
tggctaaaggtggtagggagga

SEQ ID NO: 92237 - DNA, 22 bp, Artificial Sequence
  Synthetic oligonucleotide; CTA chr11 5273291 5273312 5273308 5273313 +
aaggtggtagggaggagcttca

SEQ ID NO: 92238 - DNA, 22 bp, Artificial Sequence
  Synthetic oligonucleotide; CTT chr11 5273311 5273332 5273328 5273333 +
caagaaaggttatagcattgaa

SEQ ID NO: 92239 - DNA, 22 bp, Artificial Sequence
  Synthetic oligonucleotide; TTC chr11 5273312 5273333 5273329 5273334 +
aagaaaggttatagcattgaaa

SEQ ID NO: 92240 - DNA, 22 bp, Artificial Sequence
  Synthetic oligonucleotide; TTA chr11 5273323 5273344 5273340 5273345 +
tagcattgaaaggcccaggttt

SEQ ID NO: 92241 - DNA, 22 bp, Artificial Sequence
  Synthetic oligonucleotide; TTG chr11 5273331 5273352 5273348 5273353 +
aaaggcccaggtttgtgtctca

SEQ ID NO: 92242 - DNA, 22 bp, Artificial Sequence
  Synthetic oligonucleotide; TTT chr11 5273345 5273366 5273362 5273367 +
gtgtctcagtaacaaggcttat

SEQ ID NO: 92243 - DNA, 22 bp, Artificial Sequence
  Synthetic oligonucleotide; TTG chr11 5273346 5273367 5273363 5273368 +
tgtctcagtaacaaggcttata

SEQ ID NO: 92244 - DNA, 22 bp, Artificial Sequence
  Synthetic oligonucleotide; CTC chr11 5273352 5273373 5273369 5273374 +
agtaacaaggcttataaatcct

SEQ ID NO: 92245 - DNA, 22 bp, Artificial Sequence
  Synthetic oligonucleotide; CTT chr11 5273365 5273386 5273382 5273387 +
ataaatcctgactcagaagtca

SEQ ID NO: 92246 - DNA, 22 bp, Artificial Sequence
  Synthetic oligonucleotide; TTA chr11 5273366 5273387 5273383 5273388 +
taaatcctgactcagaagtcag

SEQ ID NO: 92247 - DNA, 22 bp, Artificial Sequence
  Synthetic oligonucleotide; CTG chr11 5273375 5273396 5273392 5273397 +
actcagaagtcaggtaggctgc

SEQ ID NO: 92248 - DNA, 22 bp, Artificial Sequence
  Synthetic oligonucleotide; CTC chr11 5273379 5273400 5273396 5273401 +
agaagtcaggtaggctgcgggc

SEQ ID NO: 92249 - DNA, 22 bp, Artificial Sequence
  Synthetic oligonucleotide; CTG chr11 5273396 5273417 5273413 5273418 +
cgggcagtctcattattgcttc

SEQ ID NO: 92250 - DNA, 22 bp, Artificial Sequence
  Synthetic oligonucleotide; CTC chr11 5273407 5273428 5273424 5273429 +
attattgcttcgatgcttgttg

SEQ ID NO: 92251 - DNA, 22 bp, Artificial Sequence
  Synthetic oligonucleotide; TTA chr11 5273411 5273432 5273428 5273433 +
ttgcttcgatgcttgttggttc

SEQ ID NO: 92252 - DNA, 22 bp, Artificial Sequence
  Synthetic oligonucleotide; TTG chr11 5273414 5273435 5273431 5273436 +
cttcgatgcttgttggttcaag

SEQ ID NO: 92253 - DNA, 22 bp, Artificial Sequence
  Synthetic oligonucleotide; CTT chr11 5273417 5273438 5273434 5273439 +
cgatgcttgttggttcaagata

SEQ ID NO: 92254 - DNA, 22 bp, Artificial Sequence
  Synthetic oligonucleotide; TTC chr11 5273418 5273439 5273435 5273440 +
gatgcttgttggttcaagataa

SEQ ID NO: 92255 - DNA, 22 bp, Artificial Sequence
  Synthetic oligonucleotide; CTT chr11 5273425 5273446 5273442 5273447 +
gttggttcaagataaattgctt

SEQ ID NO: 92256 - DNA, 22 bp, Artificial Sequence
  Synthetic oligonucleotide; TTG chr11 5273426 5273447 5273443 5273448 +
ttggttcaagataaattgcttc

SEQ ID NO: 92257 - DNA, 22 bp, Artificial Sequence
  Synthetic oligonucleotide; TTG chr11 5273429 5273450 5273446 5273451 +
gttcaagataaattgcttcacc

SEQ ID NO: 92258 - DNA, 22 bp, Artificial Sequence
  Synthetic oligonucleotide; TTC chr11 5273433 5273454 5273450 5273455 +
aagataaattgcttcacctgct

SEQ ID NO: 92259 - DNA, 22 bp, Artificial Sequence
  Synthetic oligonucleotide; TTG chr11 5273444 5273465 5273461 5273466 +
cttcacctgctcatttttaagc

SEQ ID NO: 92260 - DNA, 22 bp, Artificial Sequence
  Synthetic oligonucleotide; CTT chr11 5273447 5273468 5273464 5273469 +
cacctgctcatttttaagcatt

SEQ ID NO: 92261 - DNA, 22 bp, Artificial Sequence
  Synthetic oligonucleotide; TTC chr11 5273448 5273469 5273465 5273470 +
acctgctcatttttaagcattt

SEQ ID NO: 92262 - DNA, 22 bp, Artificial Sequence
  Synthetic oligonucleotide; CTG chr11 5273453 5273474 5273470 5273475 +
ctcatttttaagcattttattt

SEQ ID NO: 92263 - DNA, 22 bp, Artificial Sequence
  Synthetic oligonucleotide; CTC chr11 5273456 5273477 5273473 5273478 +
atttttaagcattttatttgtt

SEQ ID NO: 92264 - DNA, 22 bp, Artificial Sequence
  Synthetic oligonucleotide; TTT chr11 5273460 5273481 5273477 5273482 +
ttaagcattttatttgtttatc

SEQ ID NO: 92265 - DNA, 22 bp, Artificial Sequence
  Synthetic oligonucleotide; TTT chr11 5273461 5273482 5273478 5273483 +
taagcattttatttgtttatca

SEQ ID NO: 92266 - DNA, 22 bp, Artificial Sequence
  Synthetic oligonucleotide; TTT chr11 5273462 5273483 5273479 5273484 +
aagcattttatttgtttatcat

SEQ ID NO: 92267 - DNA, 22 bp, Artificial Sequence
  Synthetic oligonucleotide; TTA chr11 5273463 5273484 5273480 5273485 +
agcattttatttgtttatcata

SEQ ID NO: 92268 - DNA, 22 bp, Artificial Sequence
  Synthetic oligonucleotide; TTT chr11 5273470 5273491 5273487 5273492 +
tatttgtttatcatatgagata

SEQ ID NO: 92269 - DNA, 22 bp, Artificial Sequence
  Synthetic oligonucleotide; TTT chr11 5273471 5273492 5273488 5273493 +
atttgtttatcatatgagatac

SEQ ID NO: 92270 - DNA, 22 bp, Artificial Sequence
  Synthetic oligonucleotide; TTA chr11 5273472 5273493 5273489 5273494 +
tttgtttatcatatgagatacc

SEQ ID NO: 92271 - DNA, 22 bp, Artificial Sequence
  Synthetic oligonucleotide; TTT chr11 5273475 5273496 5273492 5273497 +
gtttatcatatgagataccatg

SEQ ID NO: 92272 - DNA, 22 bp, Artificial Sequence
  Synthetic oligonucleotide; TTG chr11 5273476 5273497 5273493 5273498 +
tttatcatatgagataccatga

SEQ ID NO: 92273 - DNA, 22 bp, Artificial Sequence
  Synthetic oligonucleotide; TTT chr11 5273479 5273500 5273496 5273501 +
atcatatgagataccatgaaaa

SEQ ID NO: 92274 - DNA, 22 bp, Artificial Sequence
  Synthetic oligonucleotide; TTA chr11 5273480 5273501 5273497 5273502 +
tcatatgagataccatgaaaaa

SEQ ID NO: 92275 - DNA, 22 bp, Artificial Sequence
  Synthetic oligonucleotide; TTA chr11 5273509 5273530 5273526 5273531 +
ttgcttttctttcctatattaa

SEQ ID NO: 92276 - DNA, 22 bp, Artificial Sequence
  Synthetic oligonucleotide; TTG chr11 5273512 5273533 5273529 5273534 +
cttttctttcctatattaaaag

SEQ ID NO: 92277 - DNA, 22 bp, Artificial Sequence
  Synthetic oligonucleotide; CTT chr11 5273515 5273536 5273532 5273537 +
ttctttcctatattaaaagccc

SEQ ID NO: 92278 - DNA, 22 bp, Artificial Sequence
  Synthetic oligonucleotide; TTT chr11 5273516 5273537 5273533 5273538 +
tctttcctatattaaaagccca

SEQ ID NO: 92279 - DNA, 22 bp, Artificial Sequence
  Synthetic oligonucleotide; TTT chr11 5273517 5273538 5273534 5273539 +
ctttcctatattaaaagcccaa

SEQ ID NO: 92280 - DNA, 22 bp, Artificial Sequence
  Synthetic oligonucleotide; TTC chr11 5273518 5273539 5273535 5273540 +
tttcctatattaaaagcccaaa

SEQ ID NO: 92281 - DNA, 22 bp, Artificial Sequence
  Synthetic oligonucleotide; CTT chr11 5273520 5273541 5273537 5273542 +
tcctatattaaaagcccaaagt

SEQ ID NO: 92282 - DNA, 22 bp, Artificial Sequence
  Synthetic oligonucleotide; TTT chr11 5273521 5273542 5273538 5273543 +
cctatattaaaagcccaaagtt

SEQ ID NO: 92283 - DNA, 22 bp, Artificial Sequence
  Synthetic oligonucleotide; TTC chr11 5273522 5273543 5273539 5273544 +
ctatattaaaagcccaaagttc

SEQ ID NO: 92284 - DNA, 22 bp, Artificial Sequence
  Synthetic oligonucleotide; CTA chr11 5273525 5273546 5273542 5273547 +
tattaaaagcccaaagttcaga

SEQ ID NO: 92285 - DNA, 22 bp, Artificial Sequence
  Synthetic oligonucleotide; TTA chr11 5273530 5273551 5273547 5273552 +
aaagcccaaagttcagagagat

SEQ ID NO: 92286 - DNA, 22 bp, Artificial Sequence
  Synthetic oligonucleotide; TTC chr11 5273544 5273565 5273561 5273566 +
agagagataagtgttatggcca

SEQ ID NO: 92287 - DNA, 22 bp, Artificial Sequence
  Synthetic oligonucleotide; TTA chr11 5273560 5273581 5273577 5273582 +
tggccatccaggatagatcaga

SEQ ID NO: 92288 - DNA, 22 bp, Artificial Sequence
  Synthetic oligonucleotide; TTA chr11 5273589 5273610 5273606 5273611 +
gacagtcagaaaaagtaatcag

SEQ ID NO: 92289 - DNA, 22 bp, Artificial Sequence
  Synthetic oligonucleotide; TTC chr11 5273622 5273643 5273639 5273644 +
atttattgtctatataattaaa

SEQ ID NO: 92290 - DNA, 22 bp, Artificial Sequence
  Synthetic oligonucleotide; TTT chr11 5273626 5273647 5273643 5273648 +
attgtctatataattaaaatta

SEQ ID NO: 92291 - DNA, 22 bp, Artificial Sequence
  Synthetic oligonucleotide; TTA chr11 5273627 5273648 5273644 5273649 +
ttgtctatataattaaaattag

SEQ ID NO: 92292 - DNA, 22 bp, Artificial Sequence
  Synthetic oligonucleotide; TTG chr11 5273630 5273651 5273647 5273652 +
tctatataattaaaattagtaa

SEQ ID NO: 92293 - DNA, 22 bp, Artificial Sequence
  Synthetic oligonucleotide; CTA chr11 5273634 5273655 5273651 5273656 +
tataattaaaattagtaaaata

SEQ ID NO: 92294 - DNA, 22 bp, Artificial Sequence
  Synthetic oligonucleotide; TTA chr11 5273642 5273663 5273659 5273664 +
aaattagtaaaataaaatctat

SEQ ID NO: 92295 - DNA, 22 bp, Artificial Sequence
  Synthetic oligonucleotide; TTA chr11 5273648 5273669 5273665 5273670 +
gtaaaataaaatctatgtatgt

SEQ ID NO: 92296 - DNA, 22 bp, Artificial Sequence
  Synthetic oligonucleotide; CTA chr11 5273663 5273684 5273680 5273685 +
tgtatgtcttaagacatttaag

SEQ ID NO: 92297 - DNA, 22 bp, Artificial Sequence
  Synthetic oligonucleotide; CTT chr11 5273673 5273694 5273690 5273695 +
aagacatttaagtataaaggac

SEQ ID NO: 92298 - DNA, 22 bp, Artificial Sequence
  Synthetic oligonucleotide; TTA chr11 5273674 5273695 5273691 5273696 +
agacatttaagtataaaggact

SEQ ID NO: 92299 - DNA, 22 bp, Artificial Sequence
  Synthetic oligonucleotide; TTT chr11 5273682 5273703 5273699 5273704 +
aagtataaaggacttttagaaa

SEQ ID NO: 92300 - DNA, 22 bp, Artificial Sequence
  Synthetic oligonucleotide; TTA chr11 5273683 5273704 5273700 5273705 +
agtataaaggacttttagaaag

SEQ ID NO: 92301 - DNA, 22 bp, Artificial Sequence
  Synthetic oligonucleotide; CTT chr11 5273697 5273718 5273714 5273719 +
ttagaaagaaacacccaaattc

SEQ ID NO: 92302 - DNA, 22 bp, Artificial Sequence
  Synthetic oligonucleotide; TTT chr11 5273698 5273719 5273715 5273720 +
tagaaagaaacacccaaattcg

SEQ ID NO: 92303 - DNA, 22 bp, Artificial Sequence
  Synthetic oligonucleotide; TTT chr11 5273699 5273720 5273716 5273721 +
agaaagaaacacccaaattcga

SEQ ID NO: 92304 - DNA, 22 bp, Artificial Sequence
  Synthetic oligonucleotide; TTA chr11 5273700 5273721 5273717 5273722 +
gaaagaaacacccaaattcgat

SEQ ID NO: 92305 - DNA, 22 bp, Artificial Sequence
  Synthetic oligonucleotide; TTC chr11 5273719 5273740 5273736 5273741 +
gatgaagattaattcctgcctg

SEQ ID NO: 92306 - DNA, 22 bp, Artificial Sequence
  Synthetic oligonucleotide; TTA chr11 5273730 5273751 5273747 5273752 +
attcctgcctgtttgggtttgc

SEQ ID NO: 92307 - DNA, 22 bp, Artificial Sequence
  Synthetic oligonucleotide; TTC chr11 5273734 5273755 5273751 5273756 +
ctgcctgtttgggtttgcttta

SEQ ID NO: 92308 - DNA, 22 bp, Artificial Sequence
  Synthetic oligonucleotide; CTG chr11 5273737 5273758 5273754 5273759 +
cctgtttgggtttgctttagca

SEQ ID NO: 92309 - DNA, 22 bp, Artificial Sequence
  Synthetic oligonucleotide; CTG chr11 5273741 5273762 5273758 5273763 +
tttgggtttgctttagcatttg

SEQ ID NO: 92310 - DNA, 22 bp, Artificial Sequence
  Synthetic oligonucleotide; TTT chr11 5273744 5273765 5273761 5273766 +
gggtttgctttagcatttgtaa

SEQ ID NO: 92311 - DNA, 22 bp, Artificial Sequence
  Synthetic oligonucleotide; TTG chr11 5273745 5273766 5273762 5273767 +
ggtttgctttagcatttgtaat

SEQ ID NO: 92312 - DNA, 22 bp, Artificial Sequence
  Synthetic oligonucleotide; TTT chr11 5273750 5273771 5273767 5273772 +
gctttagcatttgtaatttctt

SEQ ID NO: 92313 - DNA, 22 bp, Artificial Sequence
  Synthetic oligonucleotide; TTG chr11 5273751 5273772 5273768 5273773 +
ctttagcatttgtaatttctta

SEQ ID NO: 92314 - DNA, 22 bp, Artificial Sequence
  Synthetic oligonucleotide; CTT chr11 5273754 5273775 5273771 5273776 +
tagcatttgtaatttcttaagt

SEQ ID NO: 92315 - DNA, 22 bp, Artificial Sequence
  Synthetic oligonucleotide; TTT chr11 5273755 5273776 5273772 5273777 +
agcatttgtaatttcttaagtt

SEQ ID NO: 92316 - DNA, 22 bp, Artificial Sequence
  Synthetic oligonucleotide; TTA chr11 5273756 5273777 5273773 5273778 +
gcatttgtaatttcttaagttc

SEQ ID NO: 92317 - DNA, 22 bp, Artificial Sequence
  Synthetic oligonucleotide; TTT chr11 5273762 5273783 5273779 5273784 +
gtaatttcttaagttctatgca

SEQ ID NO: 92318 - DNA, 22 bp, Artificial Sequence
  Synthetic oligonucleotide; TTG chr11 5273763 5273784 5273780 5273785 +
taatttcttaagttctatgcag

SEQ ID NO: 92319 - DNA, 22 bp, Artificial Sequence
  Synthetic oligonucleotide; TTT chr11 5273769 5273790 5273786 5273791 +
cttaagttctatgcaggattct

SEQ ID NO: 92320 - DNA, 22 bp, Artificial Sequence
  Synthetic oligonucleotide; TTC chr11 5273770 5273791 5273787 5273792 +
ttaagttctatgcaggattcta

SEQ ID NO: 92321 - DNA, 22 bp, Artificial Sequence
  Synthetic oligonucleotide; CTT chr11 5273772 5273793 5273789 5273794 +
aagttctatgcaggattctaaa

SEQ ID NO: 92322 - DNA, 22 bp, Artificial Sequence
  Synthetic oligonucleotide; TTA chr11 5273773 5273794 5273790 5273795 +
agttctatgcaggattctaaaa

SEQ ID NO: 92323 - DNA, 22 bp, Artificial Sequence
  Synthetic oligonucleotide; TTC chr11 5273778 5273799 5273795 5273800 +
tatgcaggattctaaaaactgt

SEQ ID NO: 92324 - DNA, 22 bp, Artificial Sequence
  Synthetic oligonucleotide; CTA chr11 5273780 5273801 5273797 5273802 +
tgcaggattctaaaaactgtaa

SEQ ID NO: 92325 - DNA, 22 bp, Artificial Sequence
  Synthetic oligonucleotide; TTC chr11 5273790 5273811 5273807 5273812 +
taaaaactgtaagatgcctaat

SEQ ID NO: 92326 - DNA, 22 bp, Artificial Sequence
  Synthetic oligonucleotide; CTA chr11 5273792 5273813 5273809 5273814 +
aaaactgtaagatgcctaattt

SEQ ID NO: 92327 - DNA, 22 bp, Artificial Sequence
  Synthetic oligonucleotide; CTG chr11 5273799 5273820 5273816 5273821 +
taagatgcctaatttaaacaag

SEQ ID NO: 92328 - DNA, 22 bp, Artificial Sequence
  Synthetic oligonucleotide; CTA chr11 5273810 5273831 5273827 5273832 +
atttaaacaaggaaacatccaa

SEQ ID NO: 92329 - DNA, 22 bp, Artificial Sequence
  Synthetic oligonucleotide; TTT chr11 5273814 5273835 5273831 5273836 +
aaacaaggaaacatccaatatt

SEQ ID NO: 92330 - DNA, 22 bp, Artificial Sequence
  Synthetic oligonucleotide; TTA chr11 5273815 5273836 5273832 5273837 +
aacaaggaaacatccaatattt

SEQ ID NO: 92331 - DNA, 22 bp, Artificial Sequence
  Synthetic oligonucleotide; TTT chr11 5273837 5273858 5273854 5273859 +
tcttaaatctttctggctaatt

SEQ ID NO: 92332 - DNA, 22 bp, Artificial Sequence
  Synthetic oligonucleotide; TTT chr11 5273838 5273859 5273855 5273860 +
cttaaatctttctggctaattt

SEQ ID NO: 92333 - DNA, 22 bp, Artificial Sequence
  Synthetic oligonucleotide; TTC chr11 5273839 5273860 5273856 5273861 +
ttaaatctttctggctaattta

SEQ ID NO: 92334 - DNA, 22 bp, Artificial Sequence
  Synthetic oligonucleotide; CTT chr11 5273841 5273862 5273858 5273863 +
aaatctttctggctaatttatg

SEQ ID NO: 92335 - DNA, 22 bp, Artificial Sequence
  Synthetic oligonucleotide; TTA chr11 5273842 5273863 5273859 5273864 +
aatctttctggctaatttatga

SEQ ID NO: 92336 - DNA, 22 bp, Artificial Sequence
  Synthetic oligonucleotide; CTT chr11 5273848 5273869 5273865 5273870 +
tctggctaatttatgacatatg

SEQ ID NO: 92337 - DNA, 22 bp, Artificial Sequence
  Synthetic oligonucleotide; TTT chr11 5273849 5273870 5273866 5273871 +
ctggctaatttatgacatatgt

SEQ ID NO: 92338 - DNA, 22 bp, Artificial Sequence
  Synthetic oligonucleotide; TTC chr11 5273850 5273871 5273867 5273872 +
tggctaatttatgacatatgtt

SEQ ID NO: 92339 - DNA, 22 bp, Artificial Sequence
  Synthetic oligonucleotide; CTG chr11 5273852 5273873 5273869 5273874 +
gctaatttatgacatatgttta

SEQ ID NO: 92340 - DNA, 22 bp, Artificial Sequence
  Synthetic oligonucleotide; CTA chr11 5273856 5273877 5273873 5273878 +
atttatgacatatgtttaacct

SEQ ID NO: 92341 - DNA, 22 bp, Artificial Sequence
  Synthetic oligonucleotide; TTT chr11 5273860 5273881 5273877 5273882 +
atgacatatgtttaacctgaag

SEQ ID NO: 92342 - DNA, 22 bp, Artificial Sequence
  Synthetic oligonucleotide; TTA chr11 5273861 5273882 5273878 5273883 +
tgacatatgtttaacctgaaga

SEQ ID NO: 92343 - DNA, 22 bp, Artificial Sequence
  Synthetic oligonucleotide; TTT chr11 5273873 5273894 5273890 5273895 +
aacctgaagagtcaaatattgt

SEQ ID NO: 92344 - DNA, 22 bp, Artificial Sequence
  Synthetic oligonucleotide; TTA chr11 5273874 5273895 5273891 5273896 +
acctgaagagtcaaatattgta

SEQ ID NO: 92345 - DNA, 22 bp, Artificial Sequence
  Synthetic oligonucleotide; CTG chr11 5273879 5273900 5273896 5273901 +
aagagtcaaatattgtactgtt

SEQ ID NO: 92346 - DNA, 22 bp, Artificial Sequence
  Synthetic oligonucleotide; TTG chr11 5273894 5273915 5273911 5273916 +
tactgttcttagatgctattag

SEQ ID NO: 92347 - DNA, 22 bp, Artificial Sequence
  Synthetic oligonucleotide; CTG chr11 5273899 5273920 5273916 5273921 +
ttcttagatgctattagtatga

SEQ ID NO: 92348 - DNA, 22 bp, Artificial Sequence
  Synthetic oligonucleotide; TTC chr11 5273902 5273923 5273919 5273924 +
ttagatgctattagtatgaaaa

SEQ ID NO: 92349 - DNA, 22 bp, Artificial Sequence
  Synthetic oligonucleotide; CTT chr11 5273904 5273925 5273921 5273926 +
agatgctattagtatgaaaaat

SEQ ID NO: 92350 - DNA, 22 bp, Artificial Sequence
  Synthetic oligonucleotide; TTA chr11 5273905 5273926 5273922 5273927 +
gatgctattagtatgaaaaatt

SEQ ID NO: 92351 - DNA, 22 bp, Artificial Sequence
  Synthetic oligonucleotide; CTA chr11 5273912 5273933 5273929 5273934 +
ttagtatgaaaaattatataaa

SEQ ID NO: 92352 - DNA, 22 bp, Artificial Sequence
  Synthetic oligonucleotide; TTA chr11 5273915 5273936 5273932 5273937 +
gtatgaaaaattatataaatta

SEQ ID NO: 92353 - DNA, 22 bp, Artificial Sequence
  Synthetic oligonucleotide; TTA chr11 5273928 5273949 5273945 5273950 +
tataaattagattcttgttaag

SEQ ID NO: 92354 - DNA, 22 bp, Artificial Sequence
  Synthetic oligonucleotide; TTA chr11 5273937 5273958 5273954 5273959 +
gattcttgttaagtaaagtagg

SEQ ID NO: 92355 - DNA, 22 bp, Artificial Sequence
  Synthetic oligonucleotide; TTC chr11 5273942 5273963 5273959 5273964 +
ttgttaagtaaagtaggccctt

SEQ ID NO: 92356 - DNA, 22 bp, Artificial Sequence
  Synthetic oligonucleotide; CTT chr11 5273944 5273965 5273961 5273966 +
gttaagtaaagtaggcccttca

SEQ ID NO: 92357 - DNA, 22 bp, Artificial Sequence
  Synthetic oligonucleotide; TTG chr11 5273945 5273966 5273962 5273967 +
ttaagtaaagtaggcccttcac

SEQ ID NO: 92358 - DNA, 22 bp, Artificial Sequence
  Synthetic oligonucleotide; TTA chr11 5273948 5273969 5273965 5273970 +
agtaaagtaggcccttcacttc

SEQ ID NO: 92359 - DNA, 22 bp, Artificial Sequence
  Synthetic oligonucleotide; CTT chr11 5273964 5273985 5273981 5273986 +
cacttcactgaatgtttttcat

SEQ ID NO: 92360 - DNA, 22 bp, Artificial Sequence
  Synthetic oligonucleotide; TTC chr11 5273965 5273986 5273982 5273987 +
acttcactgaatgtttttcatg

SEQ ID NO: 92361 - DNA, 22 bp, Artificial Sequence
  Synthetic oligonucleotide; CTT chr11 5273969 5273990 5273986 5273991 +
cactgaatgtttttcatggtat

SEQ ID NO: 92362 - DNA, 22 bp, Artificial Sequence
  Synthetic oligonucleotide; TTC chr11 5273970 5273991 5273987 5273992 +
actgaatgtttttcatggtatt

SEQ ID NO: 92363 - DNA, 22 bp, Artificial Sequence
  Synthetic oligonucleotide; CTG chr11 5273974 5273995 5273991 5273996 +
aatgtttttcatggtattatct

SEQ ID NO: 92364 - DNA, 22 bp, Artificial Sequence
  Synthetic oligonucleotide; TTT chr11 5273981 5274002 5273998 5274003 +
ttcatggtattatctaagaaat

SEQ ID NO: 92365 - DNA, 22 bp, Artificial Sequence
  Synthetic oligonucleotide; TTT chr11 5273982 5274003 5273999 5274004 +
tcatggtattatctaagaaata

SEQ ID NO: 92366 - DNA, 22 bp, Artificial Sequence
  Synthetic oligonucleotide; TTT chr11 5273983 5274004 5274000 5274005 +
catggtattatctaagaaataa

SEQ ID NO: 92367 - DNA, 22 bp, Artificial Sequence
  Synthetic oligonucleotide; TTC chr11 5273984 5274005 5274001 5274006 +
atggtattatctaagaaataaa

SEQ ID NO: 92368 - DNA, 22 bp, Artificial Sequence
  Synthetic oligonucleotide; TTA chr11 5273993 5274014 5274010 5274015 +
tctaagaaataaatactttaat

SEQ ID NO: 92369 - DNA, 22 bp, Artificial Sequence
  Synthetic oligonucleotide; CTA chr11 5273997 5274018 5274014 5274019 +
agaaataaatactttaatgaat

SEQ ID NO: 92370 - DNA, 22 bp, Artificial Sequence
  Synthetic oligonucleotide; CTT chr11 5274011 5274032 5274028 5274033 +
taatgaatattctttaccacaa

SEQ ID NO: 92371 - DNA, 22 bp, Artificial Sequence
  Synthetic oligonucleotide; TTT chr11 5274012 5274033 5274029 5274034 +
aatgaatattctttaccacaaa

SEQ ID NO: 92372 - DNA, 22 bp, Artificial Sequence
  Synthetic oligonucleotide; TTA chr11 5274013 5274034 5274030 5274035 +
atgaatattctttaccacaaat

SEQ ID NO: 92373 - DNA, 22 bp, Artificial Sequence
  Synthetic oligonucleotide; TTC chr11 5274023 5274044 5274040 5274045 +
tttaccacaaataacttacttt

SEQ ID NO: 92374 - DNA, 22 bp, Artificial Sequence
  Synthetic oligonucleotide; CTT chr11 5274025 5274046 5274042 5274047 +
taccacaaataacttactttat

SEQ ID NO: 92375 - DNA, 22 bp, Artificial Sequence
  Synthetic oligonucleotide; TTT chr11 5274026 5274047 5274043 5274048 +
accacaaataacttactttatt

SEQ ID NO: 92376 - DNA, 22 bp, Artificial Sequence
  Synthetic oligonucleotide; TTA chr11 5274027 5274048 5274044 5274049 +
ccacaaataacttactttattt

SEQ ID NO: 92377 - DNA, 22 bp, Artificial Sequence
  Synthetic oligonucleotide; CTT chr11 5274040 5274061 5274057 5274062 +
actttatttttatttttaaaat

SEQ ID NO: 92378 - DNA, 22 bp, Artificial Sequence
  Synthetic oligonucleotide; TTA chr11 5274041 5274062 5274058 5274063 +
ctttatttttatttttaaaata

SEQ ID NO: 92379 - DNA, 22 bp, Artificial Sequence
  Synthetic oligonucleotide; CTT chr11 5274044 5274065 5274061 5274066 +
tatttttatttttaaaatagga

SEQ ID NO: 92380 - DNA, 22 bp, Artificial Sequence
  Synthetic oligonucleotide; TTT chr11 5274045 5274066 5274062 5274067 +
atttttatttttaaaataggaa

SEQ ID NO: 92381 - DNA, 22 bp, Artificial Sequence
  Synthetic oligonucleotide; TTA chr11 5274046 5274067 5274063 5274068 +
tttttatttttaaaataggaaa

SEQ ID NO: 92382 - DNA, 22 bp, Artificial Sequence
  Synthetic oligonucleotide; TTT chr11 5274049 5274070 5274066 5274071 +
ttatttttaaaataggaaaaat

SEQ ID NO: 92383 - DNA, 22 bp, Artificial Sequence
  Synthetic oligonucleotide; TTT chr11 5274050 5274071 5274067 5274072 +
tatttttaaaataggaaaaata

SEQ ID NO: 92384 - DNA, 22 bp, Artificial Sequence
  Synthetic oligonucleotide; TTT chr11 5274051 5274072 5274068 5274073 +
atttttaaaataggaaaaatat

SEQ ID NO: 92385 - DNA, 22 bp, Artificial Sequence
  Synthetic oligonucleotide; TTA chr11 5274052 5274073 5274069 5274074 +
tttttaaaataggaaaaatata

SEQ ID NO: 92386 - DNA, 22 bp, Artificial Sequence
  Synthetic oligonucleotide; TTT chr11 5274055 5274076 5274072 5274077 +
ttaaaataggaaaaatataaac

SEQ ID NO: 92387 - DNA, 22 bp, Artificial Sequence
  Synthetic oligonucleotide; TTT chr11 5274056 5274077 5274073 5274078 +
taaaataggaaaaatataaaca

SEQ ID NO: 92388 - DNA, 22 bp, Artificial Sequence
  Synthetic oligonucleotide; TTT chr11 5274057 5274078 5274074 5274079 +
aaaataggaaaaatataaacaa

SEQ ID NO: 92389 - DNA, 22 bp, Artificial Sequence
  Synthetic oligonucleotide; TTA chr11 5274058 5274079 5274075 5274080 +
aaataggaaaaatataaacaag

SEQ ID NO: 92390 - DNA, 22 bp, Artificial Sequence
  Synthetic oligonucleotide; CTT chr11 5274084 5274105 5274101 5274106 +
gtaaaccactgataggaaaaga

SEQ ID NO: 92391 - DNA, 22 bp, Artificial Sequence
  Synthetic oligonucleotide; TTG chr11 5274085 5274106 5274102 5274107 +
taaaccactgataggaaaagag

SEQ ID NO: 92392 - DNA, 22 bp, Artificial Sequence
  Synthetic oligonucleotide; CTG chr11 5274095 5274116 5274112 5274117 +
ataggaaaagagctgcttagga

SEQ ID NO: 92393 - DNA, 22 bp, Artificial Sequence
  Synthetic oligonucleotide; CTG chr11 5274110 5274131 5274127 5274132 +
cttaggattctaaattagccag

SEQ ID NO: 92394 - DNA, 22 bp, Artificial Sequence
  Synthetic oligonucleotide; CTT chr11 5274113 5274134 5274130 5274135 +
aggattctaaattagccagatt

SEQ ID NO: 92395 - DNA, 22 bp, Artificial Sequence
  Synthetic oligonucleotide; TTA chr11 5274114 5274135 5274131 5274136 +
ggattctaaattagccagattt

SEQ ID NO: 92396 - DNA, 22 bp, Artificial Sequence
  Synthetic oligonucleotide; TTC chr11 5274120 5274141 5274137 5274142 +
taaattagccagattttaaatt

SEQ ID NO: 92397 - DNA, 22 bp, Artificial Sequence
  Synthetic oligonucleotide; CTA chr11 5274122 5274143 5274139 5274144 +
aattagccagattttaaattat

SEQ ID NO: 92398 - DNA, 22 bp, Artificial Sequence
  Synthetic oligonucleotide; TTA chr11 5274127 5274148 5274144 5274149 +
gccagattttaaattattctgc

SEQ ID NO: 92399 - DNA, 22 bp, Artificial Sequence
  Synthetic oligonucleotide; TTT chr11 5274136 5274157 5274153 5274158 +
taaattattctgcttccattat

SEQ ID NO: 92400 - DNA, 22 bp, Artificial Sequence
  Synthetic oligonucleotide; TTT chr11 5274137 5274158 5274154 5274159 +
aaattattctgcttccattatg

SEQ ID NO: 92401 - DNA, 22 bp, Artificial Sequence
  Synthetic oligonucleotide; TTA chr11 5274138 5274159 5274155 5274160 +
aattattctgcttccattatgt

SEQ ID NO: 92402 - DNA, 22 bp, Artificial Sequence
  Synthetic oligonucleotide; TTA chr11 5274143 5274164 5274160 5274165 +
ttctgcttccattatgtatcta

SEQ ID NO: 92403 - DNA, 22 bp, Artificial Sequence
  Synthetic oligonucleotide; TTC chr11 5274146 5274167 5274163 5274168 +
tgcttccattatgtatctaaat

SEQ ID NO: 92404 - DNA, 22 bp, Artificial Sequence
  Synthetic oligonucleotide; CTG chr11 5274148 5274169 5274165 5274170 +
cttccattatgtatctaaatct

SEQ ID NO: 92405 - DNA, 22 bp, Artificial Sequence
  Synthetic oligonucleotide; CTT chr11 5274151 5274172 5274168 5274173 +
ccattatgtatctaaatctata

SEQ ID NO: 92406 - DNA, 22 bp, Artificial Sequence
  Synthetic oligonucleotide; TTC chr11 5274152 5274173 5274169 5274174 +
cattatgtatctaaatctatat

SEQ ID NO: 92407 - DNA, 22 bp, Artificial Sequence
  Synthetic oligonucleotide; TTA chr11 5274157 5274178 5274174 5274179 +
tgtatctaaatctatattctca

SEQ ID NO: 92408 - DNA, 22 bp, Artificial Sequence
  Synthetic oligonucleotide; CTA chr11 5274165 5274186 5274182 5274187 +
aatctatattctcagaacaaaa

SEQ ID NO: 92409 - DNA, 22 bp, Artificial Sequence
  Synthetic oligonucleotide; CTA chr11 5274171 5274192 5274188 5274193 +
tattctcagaacaaaaatagat

SEQ ID NO: 92410 - DNA, 22 bp, Artificial Sequence
  Synthetic oligonucleotide; TTC chr11 5274176 5274197 5274193 5274198 +
tcagaacaaaaatagatgtaag

SEQ ID NO: 92411 - DNA, 22 bp, Artificial Sequence
  Synthetic oligonucleotide; CTC chr11 5274178 5274199 5274195 5274200 +
agaacaaaaatagatgtaagca

SEQ ID NO: 92412 - DNA, 22 bp, Artificial Sequence
  Synthetic oligonucleotide; TTC chr11 5274208 5274229 5274225 5274230 +
tactagattttgtgttagattt

SEQ ID NO: 92413 - DNA, 22 bp, Artificial Sequence
  Synthetic oligonucleotide; CTA chr11 5274210 5274231 5274227 5274232 +
ctagattttgtgttagattttg

SEQ ID NO: 92414 - DNA, 22 bp, Artificial Sequence
  Synthetic oligonucleotide; CTA chr11 5274213 5274234 5274230 5274235 +
gattttgtgttagattttgcat

SEQ ID NO: 92415 - DNA, 22 bp, Artificial Sequence
  Synthetic oligonucleotide; TTT chr11 5274218 5274239 5274235 5274240 +
tgtgttagattttgcattatcc

SEQ ID NO: 92416 - DNA, 22 bp, Artificial Sequence
  Synthetic oligonucleotide; TTT chr11 5274219 5274240 5274236 5274241 +
gtgttagattttgcattatcca

SEQ ID NO: 92417 - DNA, 22 bp, Artificial Sequence
  Synthetic oligonucleotide; TTG chr11 5274220 5274241 5274237 5274242 +
tgttagattttgcattatccag

SEQ ID NO: 92418 - DNA, 22 bp, Artificial Sequence
  Synthetic oligonucleotide; TTA chr11 5274225 5274246 5274242 5274247 +
gattttgcattatccaggaatg

SEQ ID NO: 92419 - DNA, 22 bp, Artificial Sequence
  Synthetic oligonucleotide; TTT chr11 5274230 5274251 5274247 5274252 +
tgcattatccaggaatgacttg

SEQ ID NO: 92420 - DNA, 22 bp, Artificial Sequence
  Synthetic oligonucleotide; TTT chr11 5274231 5274252 5274248 5274253 +
gcattatccaggaatgacttgg

SEQ ID NO: 92421 - DNA, 22 bp, Artificial Sequence
  Synthetic oligonucleotide; TTG chr11 5274232 5274253 5274249 5274254 +
cattatccaggaatgacttgga

SEQ ID NO: 92422 - DNA, 22 bp, Artificial Sequence
  Synthetic oligonucleotide; TTA chr11 5274237 5274258 5274254 5274259 +
tccaggaatgacttggatatca

SEQ ID NO: 92423 - DNA, 22 bp, Artificial Sequence
  Synthetic oligonucleotide; CTT chr11 5274251 5274272 5274268 5274273 +
ggatatcacaagtcataaattc

SEQ ID NO: 92424 - DNA, 22 bp, Artificial Sequence
  Synthetic oligonucleotide; TTG chr11 5274252 5274273 5274269 5274274 +
gatatcacaagtcataaattct

SEQ ID NO: 92425 - DNA, 22 bp, Artificial Sequence
  Synthetic oligonucleotide; TTC chr11 5274273 5274294 5274290 5274295 +
tgtggctgccttgcaggaagcc

SEQ ID NO: 92426 - DNA, 22 bp, Artificial Sequence
  Synthetic oligonucleotide; CTG chr11 5274275 5274296 5274292 5274297 +
tggctgccttgcaggaagcctg

SEQ ID NO: 92427 - DNA, 22 bp, Artificial Sequence
  Synthetic oligonucleotide; CTG chr11 5274281 5274302 5274298 5274303 +
ccttgcaggaagcctgtggcta

SEQ ID NO: 92428 - DNA, 22 bp, Artificial Sequence
  Synthetic oligonucleotide; CTT chr11 5274285 5274306 5274302 5274307 +
gcaggaagcctgtggctatttt

SEQ ID NO: 92429 - DNA, 22 bp, Artificial Sequence
  Synthetic oligonucleotide; TTG chr11 5274286 5274307 5274303 5274308 +
caggaagcctgtggctattttc

SEQ ID NO: 92430 - DNA, 22 bp, Artificial Sequence
  Synthetic oligonucleotide; CTG chr11 5274297 5274318 5274314 5274319 +
tggctattttctagtgtaattg

SEQ ID NO: 92431 - DNA, 22 bp, Artificial Sequence
  Synthetic oligonucleotide; CTA chr11 5274303 5274324 5274320 5274325 +
ttttctagtgtaattgtaaaga

SEQ ID NO: 92432 - DNA, 22 bp, Artificial Sequence
  Synthetic oligonucleotide; TTT chr11 5274306 5274327 5274323 5274328 +
tctagtgtaattgtaaagaatg

SEQ ID NO: 92433 - DNA, 22 bp, Artificial Sequence
  Synthetic oligonucleotide; TTT chr11 5274307 5274328 5274324 5274329 +
ctagtgtaattgtaaagaatga

SEQ ID NO: 92434 - DNA, 22 bp, Artificial Sequence
  Synthetic oligonucleotide; TTC chr11 5274308 5274329 5274325 5274330 +
tagtgtaattgtaaagaatgag

SEQ ID NO: 92435 - DNA, 22 bp, Artificial Sequence
  Synthetic oligonucleotide; CTA chr11 5274310 5274331 5274327 5274332 +
gtgtaattgtaaagaatgagag

SEQ ID NO: 92436 - DNA, 22 bp, Artificial Sequence
  Synthetic oligonucleotide; TTG chr11 5274319 5274340 5274336 5274341 +
taaagaatgagagaatagacca

SEQ ID NO: 92437 - DNA, 22 bp, Artificial Sequence
  Synthetic oligonucleotide; TTC chr11 5274353 5274374 5274370 5274375 +
aaactgttgctttcttgttttc

SEQ ID NO: 92438 - DNA, 22 bp, Artificial Sequence
  Synthetic oligonucleotide; CTG chr11 5274359 5274380 5274376 5274381 +
ttgctttcttgttttcaacttt

SEQ ID NO: 92439 - DNA, 22 bp, Artificial Sequence
  Synthetic oligonucleotide; TTG chr11 5274362 5274383 5274379 5274384 +
ctttcttgttttcaacttttat

SEQ ID NO: 92440 - DNA, 22 bp, Artificial Sequence
  Synthetic oligonucleotide; CTT chr11 5274365 5274386 5274382 5274387 +
tcttgttttcaacttttatttt

SEQ ID NO: 92441 - DNA, 22 bp, Artificial Sequence
  Synthetic oligonucleotide; TTT chr11 5274366 5274387 5274383 5274388 +
cttgttttcaacttttatttta

SEQ ID NO: 92442 - DNA, 22 bp, Artificial Sequence
  Synthetic oligonucleotide; TTC chr11 5274367 5274388 5274384 5274389 +
ttgttttcaacttttattttaa

SEQ ID NO: 92443 - DNA, 22 bp, Artificial Sequence
  Synthetic oligonucleotide; CTT chr11 5274369 5274390 5274386 5274391 +
gttttcaacttttattttaagt

SEQ ID NO: 92444 - DNA, 22 bp, Artificial Sequence
  Synthetic oligonucleotide; TTG chr11 5274370 5274391 5274387 5274392 +
ttttcaacttttattttaagtt

SEQ ID NO: 92445 - DNA, 22 bp, Artificial Sequence
  Synthetic oligonucleotide; TTT chr11 5274373 5274394 5274390 5274395 +
tcaacttttattttaagttcag

SEQ ID NO: 92446 - DNA, 22 bp, Artificial Sequence
  Synthetic oligonucleotide; TTT chr11 5274374 5274395 5274391 5274396 +
caacttttattttaagttcagg

SEQ ID NO: 92447 - DNA, 22 bp, Artificial Sequence
  Synthetic oligonucleotide; TTC chr11 5274375 5274396 5274392 5274397 +
aacttttattttaagttcaggg

SEQ ID NO: 92448 - DNA, 22 bp, Artificial Sequence
  Synthetic oligonucleotide; CTT chr11 5274380 5274401 5274397 5274402 +
ttattttaagttcaggggtaca

SEQ ID NO: 92449 - DNA, 22 bp, Artificial Sequence
  Synthetic oligonucleotide; TTT chr11 5274381 5274402 5274398 5274403 +
tattttaagttcaggggtacat

SEQ ID NO: 92450 - DNA, 22 bp, Artificial Sequence
  Synthetic oligonucleotide; TTT chr11 5274382 5274403 5274399 5274404 +
attttaagttcaggggtacatg

SEQ ID NO: 92451 - DNA, 22 bp, Artificial Sequence
  Synthetic oligonucleotide; TTA chr11 5274383 5274404 5274400 5274405 +
ttttaagttcaggggtacatgt

SEQ ID NO: 92452 - DNA, 22 bp, Artificial Sequence
  Synthetic oligonucleotide; TTT chr11 5274386 5274407 5274403 5274408 +
taagttcaggggtacatgtaca

SEQ ID NO: 92453 - DNA, 22 bp, Artificial Sequence
  Synthetic oligonucleotide; TTT chr11 5274387 5274408 5274404 5274409 +
aagttcaggggtacatgtacag

SEQ ID NO: 92454 - DNA, 22 bp, Artificial Sequence
  Synthetic oligonucleotide; TTA chr11 5274388 5274409 5274405 5274410 +
agttcaggggtacatgtacagg

SEQ ID NO: 92455 - DNA, 22 bp, Artificial Sequence
  Synthetic oligonucleotide; TTC chr11 5274393 5274414 5274410 5274415 +
aggggtacatgtacaggatgtg

SEQ ID NO: 92456 - DNA, 22 bp, Artificial Sequence
  Synthetic oligonucleotide; TTT chr11 5274422 5274443 5274439 5274444 +
gttacatagataaatgaatgtc

SEQ ID NO: 92457 - DNA, 22 bp, Artificial Sequence
  Synthetic oligonucleotide; TTG chr11 5274423 5274444 5274440 5274445 +
ttacatagataaatgaatgtca

SEQ ID NO: 92458 - DNA, 22 bp, Artificial Sequence
  Synthetic oligonucleotide; TTA chr11 5274426 5274447 5274443 5274448 +
catagataaatgaatgtcaagg

SEQ ID NO: 92459 - DNA, 22 bp, Artificial Sequence
  Synthetic oligonucleotide; TTT chr11 5274454 5274475 5274471 5274476 +
gttgtatagatgatctcatcac

SEQ ID NO: 92460 - DNA, 22 bp, Artificial Sequence
  Synthetic oligonucleotide; TTG chr11 5274455 5274476 5274472 5274477 +
ttgtatagatgatctcatcact

SEQ ID NO: 92461 - DNA, 22 bp, Artificial Sequence
  Synthetic oligonucleotide; TTG chr11 5274458 5274479 5274475 5274480 +
tatagatgatctcatcactcag

SEQ ID NO: 92462 - DNA, 22 bp, Artificial Sequence
  Synthetic oligonucleotide; CTC chr11 5274471 5274492 5274488 5274493 +
atcactcaggtattacgcttag

SEQ ID NO: 92463 - DNA, 22 bp, Artificial Sequence
  Synthetic oligonucleotide; CTC chr11 5274478 5274499 5274495 5274500 +
aggtattacgcttagcatccat

SEQ ID NO: 92464 - DNA, 22 bp, Artificial Sequence
  Synthetic oligonucleotide; TTA chr11 5274486 5274507 5274503 5274508 +
cgcttagcatccattagtgatt

SEQ ID NO: 92465 - DNA, 22 bp, Artificial Sequence
  Synthetic oligonucleotide; CTT chr11 5274491 5274512 5274508 5274513 +
agcatccattagtgatttttcc

SEQ ID NO: 92466 - DNA, 22 bp, Artificial Sequence
  Synthetic oligonucleotide; TTA chr11 5274492 5274513 5274509 5274514 +
gcatccattagtgatttttcct

SEQ ID NO: 92467 - DNA, 22 bp, Artificial Sequence
  Synthetic oligonucleotide; TTA chr11 5274502 5274523 5274519 5274524 +
gtgatttttcctgatcctctcc

SEQ ID NO: 92468 - DNA, 22 bp, Artificial Sequence
  Synthetic oligonucleotide; TTT chr11 5274509 5274530 5274526 5274531 +
ttcctgatcctctccttctctc

SEQ ID NO: 92469 - DNA, 22 bp, Artificial Sequence
  Synthetic oligonucleotide; TTT chr11 5274510 5274531 5274527 5274532 +
tcctgatcctctccttctctca

SEQ ID NO: 92470 - DNA, 22 bp, Artificial Sequence
  Synthetic oligonucleotide; TTT chr11 5274511 5274532 5274528 5274533 +
cctgatcctctccttctctcac

SEQ ID NO: 92471 - DNA, 22 bp, Artificial Sequence
  Synthetic oligonucleotide; TTC chr11 5274512 5274533 5274529 5274534 +
ctgatcctctccttctctcacc

SEQ ID NO: 92472 - DNA, 22 bp, Artificial Sequence
  Synthetic oligonucleotide; CTG chr11 5274515 5274536 5274532 5274537 +
atcctctccttctctcaccctc

SEQ ID NO: 92473 - DNA, 22 bp, Artificial Sequence
  Synthetic oligonucleotide; CTC chr11 5274521 5274542 5274538 5274543 +
tccttctctcaccctccaccct

SEQ ID NO: 92474 - DNA, 22 bp, Artificial Sequence
  Synthetic oligonucleotide; CTC chr11 5274523 5274544 5274540 5274545 +
cttctctcaccctccaccctct

SEQ ID NO: 92475 - DNA, 22 bp, Artificial Sequence
  Synthetic oligonucleotide; CTT chr11 5274526 5274547 5274543 5274548 +
ctctcaccctccaccctctgat

SEQ ID NO: 92476 - DNA, 22 bp, Artificial Sequence
  Synthetic oligonucleotide; TTC chr11 5274527 5274548 5274544 5274549 +
tctcaccctccaccctctgata

SEQ ID NO: 92477 - DNA, 22 bp, Artificial Sequence
  Synthetic oligonucleotide; CTC chr11 5274529 5274550 5274546 5274551 +
tcaccctccaccctctgatagg

SEQ ID NO: 92478 - DNA, 22 bp, Artificial Sequence
  Synthetic oligonucleotide; CTC chr11 5274531 5274552 5274548 5274553 +
accctccaccctctgataggcc

SEQ ID NO: 92479 - DNA, 22 bp, Artificial Sequence
  Synthetic oligonucleotide; CTC chr11 5274537 5274558 5274554 5274559 +
caccctctgataggccccagta

SEQ ID NO: 92480 - DNA, 22 bp, Artificial Sequence
  Synthetic oligonucleotide; CTC chr11 5274544 5274565 5274561 5274566 +
tgataggccccagtatgcgttg

SEQ ID NO: 92481 - DNA, 22 bp, Artificial Sequence
  Synthetic oligonucleotide; CTG chr11 5274546 5274567 5274563 5274568 +
ataggccccagtatgcgttgtt

SEQ ID NO: 92482 - DNA, 22 bp, Artificial Sequence
  Synthetic oligonucleotide; TTG chr11 5274566 5274587 5274583 5274588 +
tttccctctatgagtccatgtg

SEQ ID NO: 92483 - DNA, 22 bp, Artificial Sequence
  Synthetic oligonucleotide; TTT chr11 5274569 5274590 5274586 5274591 +
ccctctatgagtccatgtgttc

SEQ ID NO: 92484 - DNA, 22 bp, Artificial Sequence
  Synthetic oligonucleotide; TTC chr11 5274570 5274591 5274587 5274592 +
cctctatgagtccatgtgttct

SEQ ID NO: 92485 - DNA, 22 bp, Artificial Sequence
  Synthetic oligonucleotide; CTC chr11 5274574 5274595 5274591 5274596 +
tatgagtccatgtgttctcatc

SEQ ID NO: 92486 - DNA, 22 bp, Artificial Sequence
  Synthetic oligonucleotide; CTA chr11 5274576 5274597 5274593 5274598 +
tgagtccatgtgttctcatcat

SEQ ID NO: 92487 - DNA, 22 bp, Artificial Sequence
  Synthetic oligonucleotide; TTC chr11 5274591 5274612 5274608 5274613 +
tcatcatttagcttctaactgt

SEQ ID NO: 92488 - DNA, 22 bp, Artificial Sequence
  Synthetic oligonucleotide; CTC chr11 5274593 5274614 5274610 5274615 +
atcatttagcttctaactgttg

SEQ ID NO: 92489 - DNA, 22 bp, Artificial Sequence
  Synthetic oligonucleotide; TTT chr11 5274600 5274621 5274617 5274622 +
agcttctaactgttgctttcgt

SEQ ID NO: 92490 - DNA, 22 bp, Artificial Sequence
  Synthetic oligonucleotide; TTA chr11 5274601 5274622 5274618 5274623 +
gcttctaactgttgctttcgta

SEQ ID NO: 92491 - DNA, 22 bp, Artificial Sequence
  Synthetic oligonucleotide; CTT chr11 5274605 5274626 5274622 5274627 +
ctaactgttgctttcgtagtgt

SEQ ID NO: 92492 - DNA, 22 bp, Artificial Sequence
  Synthetic oligonucleotide; TTC chr11 5274606 5274627 5274623 5274628 +
taactgttgctttcgtagtgta

SEQ ID NO: 92493 - DNA, 22 bp, Artificial Sequence
  Synthetic oligonucleotide; CTA chr11 5274608 5274629 5274625 5274630 +
actgttgctttcgtagtgtacc

SEQ ID NO: 92494 - DNA, 22 bp, Artificial Sequence
  Synthetic oligonucleotide; CTG chr11 5274612 5274633 5274629 5274634 +
ttgctttcgtagtgtacctctg

SEQ ID NO: 92495 - DNA, 22 bp, Artificial Sequence
  Synthetic oligonucleotide; TTG chr11 5274615 5274636 5274632 5274637 +
ctttcgtagtgtacctctgcct

SEQ ID NO: 92496 - DNA, 22 bp, Artificial Sequence
  Synthetic oligonucleotide; CTT chr11 5274618 5274639 5274635 5274640 +
tcgtagtgtacctctgcctcat

SEQ ID NO: 92497 - DNA, 22 bp, Artificial Sequence
  Synthetic oligonucleotide; TTT chr11 5274619 5274640 5274636 5274641 +
cgtagtgtacctctgcctcatc

SEQ ID NO: 92498 - DNA, 22 bp, Artificial Sequence
  Synthetic oligonucleotide; TTC chr11 5274620 5274641 5274637 5274642 +
gtagtgtacctctgcctcatct

SEQ ID NO: 92499 - DNA, 22 bp, Artificial Sequence
  Synthetic oligonucleotide; CTC chr11 5274632 5274653 5274649 5274654 +
tgcctcatctctcacgaagttt

SEQ ID NO: 92500 - DNA, 22 bp, Artificial Sequence
  Synthetic oligonucleotide; CTG chr11 5274634 5274655 5274651 5274656 +
cctcatctctcacgaagtttgc

SEQ ID NO: 92501 - DNA, 22 bp, Artificial Sequence
  Synthetic oligonucleotide; CTC chr11 5274638 5274659 5274655 5274660 +
atctctcacgaagtttgcaggt

SEQ ID NO: 92502 - DNA, 22 bp, Artificial Sequence
  Synthetic oligonucleotide; CTC chr11 5274643 5274664 5274660 5274665 +
tcacgaagtttgcaggtgagtt

SEQ ID NO: 92503 - DNA, 22 bp, Artificial Sequence
  Synthetic oligonucleotide; CTC chr11 5274645 5274666 5274662 5274667 +
acgaagtttgcaggtgagtttg

SEQ ID NO: 92504 - DNA, 22 bp, Artificial Sequence
  Synthetic oligonucleotide; TTT chr11 5274654 5274675 5274671 5274676 +
gcaggtgagtttgagccagggc

SEQ ID NO: 92505 - DNA, 22 bp, Artificial Sequence
  Synthetic oligonucleotide; TTG chr11 5274655 5274676 5274672 5274677 +
caggtgagtttgagccagggct

SEQ ID NO: 92506 - DNA, 22 bp, Artificial Sequence
  Synthetic oligonucleotide; TTT chr11 5274666 5274687 5274683 5274688 +
gagccagggctgaggctcattc

SEQ ID NO: 92507 - DNA, 22 bp, Artificial Sequence
  Synthetic oligonucleotide; TTG chr11 5274667 5274688 5274684 5274689 +
agccagggctgaggctcattct

SEQ ID NO: 92508 - DNA, 22 bp, Artificial Sequence
  Synthetic oligonucleotide; CTG chr11 5274678 5274699 5274695 5274700 +
aggctcattctcaagagtaatc

SEQ ID NO: 92509 - DNA, 22 bp, Artificial Sequence
  Synthetic oligonucleotide; CTC chr11 5274684 5274705 5274701 5274706 +
attctcaagagtaatctctctc

SEQ ID NO: 92510 - DNA, 22 bp, Artificial Sequence
  Synthetic oligonucleotide; TTC chr11 5274688 5274709 5274705 5274710 +
tcaagagtaatctctctctctg

SEQ ID NO: 92511 - DNA, 22 bp, Artificial Sequence
  Synthetic oligonucleotide; CTC chr11 5274690 5274711 5274707 5274712 +
aagagtaatctctctctctggc

SEQ ID NO: 92512 - DNA, 22 bp, Artificial Sequence
  Synthetic oligonucleotide; CTC chr11 5274702 5274723 5274719 5274724 +
tctctctggcaacttggagcac

SEQ ID NO: 92513 - DNA, 22 bp, Artificial Sequence
  Synthetic oligonucleotide; CTC chr11 5274704 5274725 5274721 5274726 +
tctctggcaacttggagcacag

SEQ ID NO: 92514 - DNA, 22 bp, Artificial Sequence
  Synthetic oligonucleotide; CTC chr11 5274706 5274727 5274723 5274728 +
tctggcaacttggagcacagac

SEQ ID NO: 92515 - DNA, 22 bp, Artificial Sequence
  Synthetic oligonucleotide; CTC chr11 5274708 5274729 5274725 5274730 +
tggcaacttggagcacagacat

SEQ ID NO: 92516 - DNA, 22 bp, Artificial Sequence
  Synthetic oligonucleotide; CTG chr11 5274710 5274731 5274727 5274732 +
gcaacttggagcacagacatcc

SEQ ID NO: 92517 - DNA, 22 bp, Artificial Sequence
  Synthetic oligonucleotide; CTT chr11 5274717 5274738 5274734 5274739 +
ggagcacagacatcctattgtg

SEQ ID NO: 92518 - DNA, 22 bp, Artificial Sequence
  Synthetic oligonucleotide; TTG chr11 5274718 5274739 5274735 5274740 +
gagcacagacatcctattgtgt

SEQ ID NO: 92519 - DNA, 22 bp, Artificial Sequence
  Synthetic oligonucleotide; CTA chr11 5274734 5274755 5274751 5274756 +
ttgtgtgactgacctcgggagc

SEQ ID NO: 92520 - DNA, 22 bp, Artificial Sequence
  Synthetic oligonucleotide; TTG chr11 5274737 5274758 5274754 5274759 +
tgtgactgacctcgggagccac

SEQ ID NO: 92521 - DNA, 22 bp, Artificial Sequence
  Synthetic oligonucleotide; CTG chr11 5274745 5274766 5274762 5274767 +
acctcgggagccactgtgccta

SEQ ID NO: 92522 - DNA, 22 bp, Artificial Sequence
  Synthetic oligonucleotide; CTC chr11 5274750 5274771 5274767 5274772 +
gggagccactgtgcctaaagta

SEQ ID NO: 92523 - DNA, 22 bp, Artificial Sequence
  Synthetic oligonucleotide; CTG chr11 5274761 5274782 5274778 5274783 +
tgcctaaagtacaaccagagtt

SEQ ID NO: 92524 - DNA, 22 bp, Artificial Sequence
  Synthetic oligonucleotide; CTA chr11 5274767 5274788 5274784 5274789 +
aagtacaaccagagttacttgt

SEQ ID NO: 92525 - DNA, 22 bp, Artificial Sequence
  Synthetic oligonucleotide; TTA chr11 5274784 5274805 5274801 5274806 +
cttgtgaatgttaattaagcag

SEQ ID NO: 92526 - DNA, 22 bp, Artificial Sequence
  Synthetic oligonucleotide; CTT chr11 5274787 5274808 5274804 5274809 +
gtgaatgttaattaagcaggag

SEQ ID NO: 92527 - DNA, 22 bp, Artificial Sequence
  Synthetic oligonucleotide; TTG chr11 5274788 5274809 5274805 5274810 +
tgaatgttaattaagcaggagg

SEQ ID NO: 92528 - DNA, 22 bp, Artificial Sequence
  Synthetic oligonucleotide; TTA chr11 5274797 5274818 5274814 5274819 +
attaagcaggagggatctttaa

SEQ ID NO: 92529 - DNA, 22 bp, Artificial Sequence
  Synthetic oligonucleotide; TTA chr11 5274801 5274822 5274818 5274823 +
agcaggagggatctttaatggg

SEQ ID NO: 92530 - DNA, 22 bp, Artificial Sequence
  Synthetic oligonucleotide; CTT chr11 5274816 5274837 5274833 5274838 +
taatgggaaaaaggagtagaaa

SEQ ID NO: 92531 - DNA, 22 bp, Artificial Sequence
  Synthetic oligonucleotide; TTT chr11 5274817 5274838 5274834 5274839 +
aatgggaaaaaggagtagaaag

SEQ ID NO: 92532 - DNA, 22 bp, Artificial Sequence
  Synthetic oligonucleotide; TTA chr11 5274818 5274839 5274835 5274840 +
atgggaaaaaggagtagaaagc

SEQ ID NO: 92533 - DNA, 22 bp, Artificial Sequence
  Synthetic oligonucleotide; TTA chr11 5274856 5274877 5274873 5274878 +
tgccacactttcctacatgatg

SEQ ID NO: 92534 - DNA, 22 bp, Artificial Sequence
  Synthetic oligonucleotide; CTT chr11 5274866 5274887 5274883 5274888 +
tcctacatgatgggcactgaag

SEQ ID NO: 92535 - DNA, 22 bp, Artificial Sequence
  Synthetic oligonucleotide; TTT chr11 5274867 5274888 5274884 5274889 +
cctacatgatgggcactgaagg

SEQ ID NO: 92536 - DNA, 22 bp, Artificial Sequence
  Synthetic oligonucleotide; TTC chr11 5274868 5274889 5274885 5274890 +
ctacatgatgggcactgaaggt

SEQ ID NO: 92537 - DNA, 22 bp, Artificial Sequence
  Synthetic oligonucleotide; CTA chr11 5274871 5274892 5274888 5274893 +
catgatgggcactgaaggttaa

SEQ ID NO: 92538 - DNA, 22 bp, Artificial Sequence
  Synthetic oligonucleotide; CTG chr11 5274885 5274906 5274902 5274907 +
aaggttaaaacttgagtctgtc

SEQ ID NO: 92539 - DNA, 22 bp, Artificial Sequence
  Synthetic oligonucleotide; TTA chr11 5274892 5274913 5274909 5274914 +
aaacttgagtctgtcaacttag

SEQ ID NO: 92540 - DNA, 22 bp, Artificial Sequence
  Synthetic oligonucleotide; CTT chr11 5274898 5274919 5274915 5274920 +
gagtctgtcaacttagaaaact

SEQ ID NO: 92541 - DNA, 22 bp, Artificial Sequence
  Synthetic oligonucleotide; TTG chr11 5274899 5274920 5274916 5274921 +
agtctgtcaacttagaaaactc

SEQ ID NO: 92542 - DNA, 22 bp, Artificial Sequence
  Synthetic oligonucleotide; CTG chr11 5274905 5274926 5274922 5274927 +
tcaacttagaaaactcataaat

SEQ ID NO: 92543 - DNA, 22 bp, Artificial Sequence
  Synthetic oligonucleotide; CTT chr11 5274912 5274933 5274929 5274934 +
agaaaactcataaatatcccat

SEQ ID NO: 92544 - DNA, 22 bp, Artificial Sequence
  Synthetic oligonucleotide; TTA chr11 5274913 5274934 5274930 5274935 +
gaaaactcataaatatcccatt

SEQ ID NO: 92545 - DNA, 22 bp, Artificial Sequence
  Synthetic oligonucleotide; CTC chr11 5274921 5274942 5274938 5274943 +
ataaatatcccattttccgctg

SEQ ID NO: 92546 - DNA, 22 bp, Artificial Sequence
  Synthetic oligonucleotide; TTT chr11 5274936 5274957 5274953 5274958 +
tccgctgaaatatagctttact

SEQ ID NO: 92547 - DNA, 22 bp, Artificial Sequence
  Synthetic oligonucleotide; TTT chr11 5274937 5274958 5274954 5274959 +
ccgctgaaatatagctttactt

SEQ ID NO: 92548 - DNA, 22 bp, Artificial Sequence
  Synthetic oligonucleotide; TTC chr11 5274938 5274959 5274955 5274960 +
cgctgaaatatagctttacttt

SEQ ID NO: 92549 - DNA, 22 bp, Artificial Sequence
  Synthetic oligonucleotide; CTG chr11 5274943 5274964 5274960 5274965 +
aaatatagctttactttcctgg

SEQ ID NO: 92550 - DNA, 22 bp, Artificial Sequence
  Synthetic oligonucleotide; CTT chr11 5274954 5274975 5274971 5274976 +
tactttcctggtttctttgacc

SEQ ID NO: 92551 - DNA, 22 bp, Artificial Sequence
  Synthetic oligonucleotide; TTT chr11 5274955 5274976 5274972 5274977 +
actttcctggtttctttgacct

SEQ ID NO: 92552 - DNA, 22 bp, Artificial Sequence
  Synthetic oligonucleotide; TTA chr11 5274956 5274977 5274973 5274978 +
ctttcctggtttctttgacctt

SEQ ID NO: 92553 - DNA, 22 bp, Artificial Sequence
  Synthetic oligonucleotide; CTT chr11 5274959 5274980 5274976 5274981 +
tcctggtttctttgaccttttg

SEQ ID NO: 92554 - DNA, 22 bp, Artificial Sequence
  Synthetic oligonucleotide; TTT chr11 5274960 5274981 5274977 5274982 +
cctggtttctttgaccttttgg

SEQ ID NO: 92555 - DNA, 22 bp, Artificial Sequence
  Synthetic oligonucleotide; TTC chr11 5274961 5274982 5274978 5274983 +
ctggtttctttgaccttttggg

SEQ ID NO: 92556 - DNA, 22 bp, Artificial Sequence
  Synthetic oligonucleotide; CTG chr11 5274964 5274985 5274981 5274986 +
gtttctttgaccttttgggacc

SEQ ID NO: 92557 - DNA, 22 bp, Artificial Sequence
  Synthetic oligonucleotide; TTT chr11 5274968 5274989 5274985 5274990 +
ctttgaccttttgggaccttga

SEQ ID NO: 92558 - DNA, 22 bp, Artificial Sequence
  Synthetic oligonucleotide; TTC chr11 5274969 5274990 5274986 5274991 +
tttgaccttttgggaccttgag

SEQ ID NO: 92559 - DNA, 22 bp, Artificial Sequence
  Synthetic oligonucleotide; CTT chr11 5274971 5274992 5274988 5274993 +
tgaccttttgggaccttgagta

SEQ ID NO: 92560 - DNA, 22 bp, Artificial Sequence
  Synthetic oligonucleotide; TTT chr11 5274972 5274993 5274989 5274994 +
gaccttttgggaccttgagtaa

SEQ ID NO: 92561 - DNA, 22 bp, Artificial Sequence
  Synthetic oligonucleotide; TTG chr11 5274973 5274994 5274990 5274995 +
accttttgggaccttgagtaag

SEQ ID NO: 92562 - DNA, 22 bp, Artificial Sequence
  Synthetic oligonucleotide; CTT chr11 5274978 5274999 5274995 5275000 +
ttgggaccttgagtaagtaaag

SEQ ID NO: 92563 - DNA, 22 bp, Artificial Sequence
  Synthetic oligonucleotide; TTT chr11 5274979 5275000 5274996 5275001 +
tgggaccttgagtaagtaaaga

SEQ ID NO: 92564 - DNA, 22 bp, Artificial Sequence
  Synthetic oligonucleotide; TTT chr11 5274980 5275001 5274997 5275002 +
gggaccttgagtaagtaaagat

SEQ ID NO: 92565 - DNA, 22 bp, Artificial Sequence
  Synthetic oligonucleotide; TTG chr11 5274981 5275002 5274998 5275003 +
ggaccttgagtaagtaaagatg

SEQ ID NO: 92566 - DNA, 22 bp, Artificial Sequence
  Synthetic oligonucleotide; CTT chr11 5274988 5275009 5275005 5275010 +
gagtaagtaaagatgccttcat

SEQ ID NO: 92567 - DNA, 22 bp, Artificial Sequence
  Synthetic oligonucleotide; TTG chr11 5274989 5275010 5275006 5275011 +
agtaagtaaagatgccttcatt

SEQ ID NO: 92568 - DNA, 22 bp, Artificial Sequence
  Synthetic oligonucleotide; CTT chr11 5275007 5275028 5275024 5275029 +
catttattttcatgattaaaat

SEQ ID NO: 92569 - DNA, 22 bp, Artificial Sequence
  Synthetic oligonucleotide; TTC chr11 5275008 5275029 5275025 5275030 +
atttattttcatgattaaaatt

SEQ ID NO: 92570 - DNA, 22 bp, Artificial Sequence
  Synthetic oligonucleotide; TTT chr11 5275012 5275033 5275029 5275034 +
attttcatgattaaaattctaa

SEQ ID NO: 92571 - DNA, 22 bp, Artificial Sequence
  Synthetic oligonucleotide; TTA chr11 5275013 5275034 5275030 5275035 +
ttttcatgattaaaattctaag

SEQ ID NO: 92572 - DNA, 22 bp, Artificial Sequence
  Synthetic oligonucleotide; TTT chr11 5275016 5275037 5275033 5275038 +
tcatgattaaaattctaagaaa

SEQ ID NO: 92573 - DNA, 22 bp, Artificial Sequence
  Synthetic oligonucleotide; TTT chr11 5275017 5275038 5275034 5275039 +
catgattaaaattctaagaaat

SEQ ID NO: 92574 - DNA, 22 bp, Artificial Sequence
  Synthetic oligonucleotide; TTC chr11 5275018 5275039 5275035 5275040 +
atgattaaaattctaagaaatt

SEQ ID NO: 92575 - DNA, 22 bp, Artificial Sequence
  Synthetic oligonucleotide; TTA chr11 5275025 5275046 5275042 5275047 +
aaattctaagaaattcttgggt

SEQ ID NO: 92576 - DNA, 22 bp, Artificial Sequence
  Synthetic oligonucleotide; TTC chr11 5275031 5275052 5275048 5275053 +
taagaaattcttgggttttttt

SEQ ID NO: 92577 - DNA, 22 bp, Artificial Sequence
  Synthetic oligonucleotide; CTA chr11 5275033 5275054 5275050 5275055 +
agaaattcttgggtttttttaa

SEQ ID NO: 92578 - DNA, 22 bp, Artificial Sequence
  Synthetic oligonucleotide; TTC chr11 5275041 5275062 5275058 5275063 +
ttgggtttttttaattaaattg

SEQ ID NO: 92579 - DNA, 22 bp, Artificial Sequence
  Synthetic oligonucleotide; CTT chr11 5275043 5275064 5275060 5275065 +
gggtttttttaattaaattgca

SEQ ID NO: 92580 - DNA, 22 bp, Artificial Sequence
  Synthetic oligonucleotide; TTG chr11 5275044 5275065 5275061 5275066 +
ggtttttttaattaaattgcat

SEQ ID NO: 92581 - DNA, 22 bp, Artificial Sequence
  Synthetic oligonucleotide; TTT chr11 5275049 5275070 5275066 5275071 +
ttttaattaaattgcattgcct

SEQ ID NO: 92582 - DNA, 22 bp, Artificial Sequence
  Synthetic oligonucleotide; TTT chr11 5275050 5275071 5275067 5275072 +
tttaattaaattgcattgccta

SEQ ID NO: 92583 - DNA, 22 bp, Artificial Sequence
  Synthetic oligonucleotide; TTT chr11 5275051 5275072 5275068 5275073 +
ttaattaaattgcattgcctaa

SEQ ID NO: 92584 - DNA, 22 bp, Artificial Sequence
  Synthetic oligonucleotide; TTT chr11 5275052 5275073 5275069 5275074 +
taattaaattgcattgcctaat

SEQ ID NO: 92585 - DNA, 22 bp, Artificial Sequence
  Synthetic oligonucleotide; TTT chr11 5275053 5275074 5275070 5275075 +
aattaaattgcattgcctaatg

SEQ ID NO: 92586 - DNA, 22 bp, Artificial Sequence
  Synthetic oligonucleotide; TTA chr11 5275054 5275075 5275071 5275076 +
attaaattgcattgcctaatgt

SEQ ID NO: 92587 - DNA, 22 bp, Artificial Sequence
  Synthetic oligonucleotide; TTA chr11 5275058 5275079 5275075 5275080 +
aattgcattgcctaatgtattt

SEQ ID NO: 92588 - DNA, 22 bp, Artificial Sequence
  Synthetic oligonucleotide; TTG chr11 5275063 5275084 5275080 5275085 +
cattgcctaatgtatttatgaa

SEQ ID NO: 92589 - DNA, 22 bp, Artificial Sequence
  Synthetic oligonucleotide; TTG chr11 5275068 5275089 5275085 5275090 +
cctaatgtatttatgaactaag

SEQ ID NO: 92590 - DNA, 22 bp, Artificial Sequence
  Synthetic oligonucleotide; CTA chr11 5275072 5275093 5275089 5275094 +
atgtatttatgaactaagaaca

SEQ ID NO: 92591 - DNA, 22 bp, Artificial Sequence
  Synthetic oligonucleotide; TTT chr11 5275080 5275101 5275097 5275102 +
atgaactaagaacatagaaata

SEQ ID NO: 92592 - DNA, 22 bp, Artificial Sequence
  Synthetic oligonucleotide; TTA chr11 5275081 5275102 5275098 5275103 +
tgaactaagaacatagaaataa

SEQ ID NO: 92593 - DNA, 22 bp, Artificial Sequence
  Synthetic oligonucleotide; CTA chr11 5275088 5275109 5275105 5275110 +
agaacatagaaataaaacaata

SEQ ID NO: 92594 - DNA, 22 bp, Artificial Sequence
  Synthetic oligonucleotide; CTC chr11 5275113 5275134 5275130 5275135 +
tgaagtagttcagaatgtgctt

SEQ ID NO: 92595 - DNA, 22 bp, Artificial Sequence
  Synthetic oligonucleotide; CTG chr11 5275115 5275136 5275132 5275137 +
aagtagttcagaatgtgctttc

SEQ ID NO: 92596 - DNA, 22 bp, Artificial Sequence
  Synthetic oligonucleotide; TTC chr11 5275124 5275145 5275141 5275146 +
agaatgtgctttcaatttatat

SEQ ID NO: 92597 - DNA, 22 bp, Artificial Sequence
  Synthetic oligonucleotide; CTT chr11 5275135 5275156 5275152 5275157 +
tcaatttatataaagagttaat

SEQ ID NO: 92598 - DNA, 22 bp, Artificial Sequence
  Synthetic oligonucleotide; TTT chr11 5275136 5275157 5275153 5275158 +
caatttatataaagagttaatt

SEQ ID NO: 92599 - DNA, 22 bp, Artificial Sequence
  Synthetic oligonucleotide; TTC chr11 5275137 5275158 5275154 5275159 +
aatttatataaagagttaattc

SEQ ID NO: 92600 - DNA, 22 bp, Artificial Sequence
  Synthetic oligonucleotide; TTT chr11 5275142 5275163 5275159 5275164 +
atataaagagttaattcaaatg

SEQ ID NO: 92601 - DNA, 22 bp, Artificial Sequence
  Synthetic oligonucleotide; TTA chr11 5275143 5275164 5275160 5275165 +
tataaagagttaattcaaatga

SEQ ID NO: 92602 - DNA, 22 bp, Artificial Sequence
  Synthetic oligonucleotide; TTA chr11 5275155 5275176 5275172 5275177 +
attcaaatgagactattttaag

SEQ ID NO: 92603 - DNA, 22 bp, Artificial Sequence
  Synthetic oligonucleotide; TTC chr11 5275159 5275180 5275176 5275181 +
aaatgagactattttaagtgca

SEQ ID NO: 92604 - DNA, 22 bp, Artificial Sequence
  Synthetic oligonucleotide; CTA chr11 5275170 5275191 5275187 5275192 +
ttttaagtgcagggctttgaat

SEQ ID NO: 92605 - DNA, 22 bp, Artificial Sequence
  Synthetic oligonucleotide; TTT chr11 5275173 5275194 5275190 5275195 +
taagtgcagggctttgaatctt

SEQ ID NO: 92606 - DNA, 22 bp, Artificial Sequence
  Synthetic oligonucleotide; TTT chr11 5275174 5275195 5275191 5275196 +
aagtgcagggctttgaatctta

SEQ ID NO: 92607 - DNA, 22 bp, Artificial Sequence
  Synthetic oligonucleotide; TTA chr11 5275175 5275196 5275192 5275197 +
agtgcagggctttgaatcttat

SEQ ID NO: 92608 - DNA, 22 bp, Artificial Sequence
  Synthetic oligonucleotide; CTT chr11 5275187 5275208 5275204 5275209 +
tgaatcttatgtctagaaattt

SEQ ID NO: 92609 - DNA, 22 bp, Artificial Sequence
  Synthetic oligonucleotide; TTT chr11 5275188 5275209 5275205 5275210 +
gaatcttatgtctagaaatttt

SEQ ID NO: 92610 - DNA, 22 bp, Artificial Sequence
  Synthetic oligonucleotide; TTG chr11 5275189 5275210 5275206 5275211 +
aatcttatgtctagaaattttg

SEQ ID NO: 92611 - DNA, 22 bp, Artificial Sequence
  Synthetic oligonucleotide; CTT chr11 5275195 5275216 5275212 5275217 +
atgtctagaaattttgaaaaac

SEQ ID NO: 92612 - DNA, 22 bp, Artificial Sequence
  Synthetic oligonucleotide; TTA chr11 5275196 5275217 5275213 5275218 +
tgtctagaaattttgaaaaacc

SEQ ID NO: 92613 - DNA, 22 bp, Artificial Sequence
  Synthetic oligonucleotide; CTA chr11 5275202 5275223 5275219 5275224 +
gaaattttgaaaaacctctgat

SEQ ID NO: 92614 - DNA, 22 bp, Artificial Sequence
  Synthetic oligonucleotide; TTT chr11 5275209 5275230 5275226 5275231 +
tgaaaaacctctgattatatgc

SEQ ID NO: 92615 - DNA, 22 bp, Artificial Sequence
  Synthetic oligonucleotide; TTT chr11 5275210 5275231 5275227 5275232 +
gaaaaacctctgattatatgct

SEQ ID NO: 92616 - DNA, 22 bp, Artificial Sequence
  Synthetic oligonucleotide; TTG chr11 5275211 5275232 5275228 5275233 +
aaaaacctctgattatatgcta

SEQ ID NO: 92617 - DNA, 22 bp, Artificial Sequence
  Synthetic oligonucleotide; CTC chr11 5275220 5275241 5275237 5275242 +
tgattatatgctaagattccac

SEQ ID NO: 92618 - DNA, 22 bp, Artificial Sequence
  Synthetic oligonucleotide; CTG chr11 5275222 5275243 5275239 5275244 +
attatatgctaagattccacct

SEQ ID NO: 92619 - DNA, 22 bp, Artificial Sequence
  Synthetic oligonucleotide; TTA chr11 5275226 5275247 5275243 5275248 +
tatgctaagattccacctctag

SEQ ID NO: 92620 - DNA, 22 bp, Artificial Sequence
  Synthetic oligonucleotide; CTA chr11 5275233 5275254 5275250 5275255 +
agattccacctctagtgctaga

SEQ ID NO: 92621 - DNA, 22 bp, Artificial Sequence
  Synthetic oligonucleotide; TTC chr11 5275239 5275260 5275256 5275261 +
cacctctagtgctagaactgag

SEQ ID NO: 92622 - DNA, 22 bp, Artificial Sequence
  Synthetic oligonucleotide; CTC chr11 5275245 5275266 5275262 5275267 +
tagtgctagaactgagaagtcc

SEQ ID NO: 92623 - DNA, 22 bp, Artificial Sequence
  Synthetic oligonucleotide; CTA chr11 5275247 5275268 5275264 5275269 +
gtgctagaactgagaagtcctt

SEQ ID NO: 92624 - DNA, 22 bp, Artificial Sequence
  Synthetic oligonucleotide; CTA chr11 5275253 5275274 5275270 5275275 +
gaactgagaagtccttgacttg

SEQ ID NO: 92625 - DNA, 22 bp, Artificial Sequence
  Synthetic oligonucleotide; CTG chr11 5275259 5275280 5275276 5275281 +
agaagtccttgacttggtgatc

SEQ ID NO: 92626 - DNA, 22 bp, Artificial Sequence
  Synthetic oligonucleotide; CTT chr11 5275269 5275290 5275286 5275291 +
gacttggtgatcttttttaaat

SEQ ID NO: 92627 - DNA, 22 bp, Artificial Sequence
  Synthetic oligonucleotide; TTG chr11 5275270 5275291 5275287 5275292 +
acttggtgatcttttttaaatt

SEQ ID NO: 92628 - DNA, 22 bp, Artificial Sequence
  Synthetic oligonucleotide; CTT chr11 5275274 5275295 5275291 5275296 +
ggtgatcttttttaaattctga

SEQ ID NO: 92629 - DNA, 22 bp, Artificial Sequence
  Synthetic oligonucleotide; TTG chr11 5275275 5275296 5275292 5275297 +
gtgatcttttttaaattctgaa

SEQ ID NO: 92630 - DNA, 22 bp, Artificial Sequence
  Synthetic oligonucleotide; CTT chr11 5275283 5275304 5275300 5275305 +
ttttaaattctgaaacaacagc

SEQ ID NO: 92631 - DNA, 22 bp, Artificial Sequence
  Synthetic oligonucleotide; TTT chr11 5275284 5275305 5275301 5275306 +
tttaaattctgaaacaacagca

SEQ ID NO: 92632 - DNA, 22 bp, Artificial Sequence
  Synthetic oligonucleotide; TTT chr11 5275285 5275306 5275302 5275307 +
ttaaattctgaaacaacagcaa

SEQ ID NO: 92633 - DNA, 22 bp, Artificial Sequence
  Synthetic oligonucleotide; TTT chr11 5275286 5275307 5275303 5275308 +
taaattctgaaacaacagcaac

SEQ ID NO: 92634 - DNA, 22 bp, Artificial Sequence
  Synthetic oligonucleotide; TTT chr11 5275287 5275308 5275304 5275309 +
aaattctgaaacaacagcaaca

SEQ ID NO: 92635 - DNA, 22 bp, Artificial Sequence
  Synthetic oligonucleotide; TTA chr11 5275288 5275309 5275305 5275310 +
aattctgaaacaacagcaacat

SEQ ID NO: 92636 - DNA, 22 bp, Artificial Sequence
  Synthetic oligonucleotide; TTC chr11 5275293 5275314 5275310 5275315 +
tgaaacaacagcaacataaagc

SEQ ID NO: 92637 - DNA, 22 bp, Artificial Sequence
  Synthetic oligonucleotide; CTG chr11 5275295 5275316 5275312 5275317 +
aaacaacagcaacataaagcta

SEQ ID NO: 92638 - DNA, 22 bp, Artificial Sequence
  Synthetic oligonucleotide; CTA chr11 5275317 5275338 5275334 5275339 +
aggactttttcttgcctatgca

SEQ ID NO: 92639 - DNA, 22 bp, Artificial Sequence
  Synthetic oligonucleotide; CTT chr11 5275324 5275345 5275341 5275346 +
tttcttgcctatgcatgctatc

SEQ ID NO: 92640 - DNA, 22 bp, Artificial Sequence
  Synthetic oligonucleotide; TTT chr11 5275325 5275346 5275342 5275347 +
ttcttgcctatgcatgctatct

SEQ ID NO: 92641 - DNA, 22 bp, Artificial Sequence
  Synthetic oligonucleotide; TTT chr11 5275326 5275347 5275343 5275348 +
tcttgcctatgcatgctatctt

SEQ ID NO: 92642 - DNA, 22 bp, Artificial Sequence
  Synthetic oligonucleotide; TTT chr11 5275327 5275348 5275344 5275349 +
cttgcctatgcatgctatcttc

SEQ ID NO: 92643 - DNA, 22 bp, Artificial Sequence
  Synthetic oligonucleotide; TTC chr11 5275328 5275349 5275345 5275350 +
ttgcctatgcatgctatcttca

SEQ ID NO: 92644 - DNA, 22 bp, Artificial Sequence
  Synthetic oligonucleotide; CTT chr11 5275330 5275351 5275347 5275352 +
gcctatgcatgctatcttcagt

SEQ ID NO: 92645 - DNA, 22 bp, Artificial Sequence
  Synthetic oligonucleotide; TTG chr11 5275331 5275352 5275348 5275353 +
cctatgcatgctatcttcagta

SEQ ID NO: 92646 - DNA, 22 bp, Artificial Sequence
  Synthetic oligonucleotide; CTA chr11 5275335 5275356 5275352 5275357 +
tgcatgctatcttcagtacttt

SEQ ID NO: 92647 - DNA, 22 bp, Artificial Sequence
  Synthetic oligonucleotide; CTA chr11 5275344 5275365 5275361 5275366 +
tcttcagtactttgattattta

SEQ ID NO: 92648 - DNA, 22 bp, Artificial Sequence
  Synthetic oligonucleotide; CTT chr11 5275348 5275369 5275365 5275370 +
cagtactttgattatttagtat

SEQ ID NO: 92649 - DNA, 22 bp, Artificial Sequence
  Synthetic oligonucleotide; TTC chr11 5275349 5275370 5275366 5275371 +
agtactttgattatttagtatt

SEQ ID NO: 92650 - DNA, 22 bp, Artificial Sequence
  Synthetic oligonucleotide; CTT chr11 5275356 5275377 5275373 5275378 +
tgattatttagtattgaaacta

SEQ ID NO: 92651 - DNA, 22 bp, Artificial Sequence
  Synthetic oligonucleotide; TTT chr11 5275357 5275378 5275374 5275379 +
gattatttagtattgaaactat

SEQ ID NO: 92652 - DNA, 22 bp, Artificial Sequence
  Synthetic oligonucleotide; TTG chr11 5275358 5275379 5275375 5275380 +
attatttagtattgaaactata

SEQ ID NO: 92653 - DNA, 22 bp, Artificial Sequence
  Synthetic oligonucleotide; TTA chr11 5275362 5275383 5275379 5275384 +
tttagtattgaaactataacat

SEQ ID NO: 92654 - DNA, 22 bp, Artificial Sequence
  Synthetic oligonucleotide; TTT chr11 5275365 5275386 5275382 5275387 +
agtattgaaactataacatagt

SEQ ID NO: 92655 - DNA, 22 bp, Artificial Sequence
  Synthetic oligonucleotide; TTA chr11 5275366 5275387 5275383 5275388 +
gtattgaaactataacatagta

SEQ ID NO: 92656 - DNA, 22 bp, Artificial Sequence
  Synthetic oligonucleotide; TTG chr11 5275372 5275393 5275389 5275394 +
aaactataacatagtatgtttc

SEQ ID NO: 92657 - DNA, 22 bp, Artificial Sequence
  Synthetic oligonucleotide; CTA chr11 5275378 5275399 5275395 5275400 +
taacatagtatgtttcctgaat

SEQ ID NO: 92658 - DNA, 22 bp, Artificial Sequence
  Synthetic oligonucleotide; TTT chr11 5275393 5275414 5275410 5275415 +
cctgaataaaaaatgtgtattt

SEQ ID NO: 92659 - DNA, 22 bp, Artificial Sequence
  Synthetic oligonucleotide; TTC chr11 5275394 5275415 5275411 5275416 +
ctgaataaaaaatgtgtatttc

SEQ ID NO: 92660 - DNA, 22 bp, Artificial Sequence
  Synthetic oligonucleotide; CTG chr11 5275397 5275418 5275414 5275419 +
aataaaaaatgtgtatttctct

SEQ ID NO: 92661 - DNA, 22 bp, Artificial Sequence
  Synthetic oligonucleotide; TTT chr11 5275415 5275436 5275432 5275437 +
ctctggagaaggttaaaactga

SEQ ID NO: 92662 - DNA, 22 bp, Artificial Sequence
  Synthetic oligonucleotide; TTC chr11 5275416 5275437 5275433 5275438 +
tctggagaaggttaaaactgag

SEQ ID NO: 92663 - DNA, 22 bp, Artificial Sequence
  Synthetic oligonucleotide; CTC chr11 5275418 5275439 5275435 5275440 +
tggagaaggttaaaactgagga

SEQ ID NO: 92664 - DNA, 22 bp, Artificial Sequence
  Synthetic oligonucleotide; CTG chr11 5275420 5275441 5275437 5275442 +
gagaaggttaaaactgaggatt

SEQ ID NO: 92665 - DNA, 22 bp, Artificial Sequence
  Synthetic oligonucleotide; TTA chr11 5275430 5275451 5275447 5275452 +
aaactgaggattggcaagtgag

SEQ ID NO: 92666 - DNA, 22 bp, Artificial Sequence
  Synthetic oligonucleotide; CTG chr11 5275436 5275457 5275453 5275458 +
aggattggcaagtgagcaaggc

SEQ ID NO: 92667 - DNA, 22 bp, Artificial Sequence
  Synthetic oligonucleotide; TTG chr11 5275443 5275464 5275460 5275465 +
gcaagtgagcaaggcttaaatg

SEQ ID NO: 92668 - DNA, 22 bp, Artificial Sequence
  Synthetic oligonucleotide; CTT chr11 5275460 5275481 5275477 5275482 +
aaatggaagaagcaatgatctc

SEQ ID NO: 92669 - DNA, 22 bp, Artificial Sequence
  Synthetic oligonucleotide; TTA chr11 5275461 5275482 5275478 5275483 +
aatggaagaagcaatgatctcg

SEQ ID NO: 92670 - DNA, 22 bp, Artificial Sequence
  Synthetic oligonucleotide; CTC chr11 5275482 5275503 5275499 5275504 +
gtcagaccaccttcattaacga

SEQ ID NO: 92671 - DNA, 22 bp, Artificial Sequence
  Synthetic oligonucleotide; CTT chr11 5275495 5275516 5275512 5275517 +
cattaacgagatcatccatcat

SEQ ID NO: 92672 - DNA, 22 bp, Artificial Sequence
  Synthetic oligonucleotide; TTC chr11 5275496 5275517 5275513 5275518 +
attaacgagatcatccatcatg

SEQ ID NO: 92673 - DNA, 22 bp, Artificial Sequence
  Synthetic oligonucleotide; TTA chr11 5275500 5275521 5275517 5275522 +
acgagatcatccatcatgagga

SEQ ID NO: 92674 - DNA, 22 bp, Artificial Sequence
  Synthetic oligonucleotide; CTC chr11 5275545 5275566 5275562 5275567 +
tgttttgtgtcactaagggtga

SEQ ID NO: 92675 - DNA, 22 bp, Artificial Sequence
  Synthetic oligonucleotide; CTG chr11 5275547 5275568 5275564 5275569 +
ttttgtgtcactaagggtgagg

SEQ ID NO: 92676 - DNA, 22 bp, Artificial Sequence
  Synthetic oligonucleotide; TTT chr11 5275550 5275571 5275567 5275572 +
tgtgtcactaagggtgaggatg

SEQ ID NO: 92677 - DNA, 22 bp, Artificial Sequence
  Synthetic oligonucleotide; TTT chr11 5275551 5275572 5275568 5275573 +
gtgtcactaagggtgaggatgc

SEQ ID NO: 92678 - DNA, 22 bp, Artificial Sequence
  Synthetic oligonucleotide; TTG chr11 5275552 5275573 5275569 5275574 +
tgtcactaagggtgaggatgct

SEQ ID NO: 92679 - DNA, 22 bp, Artificial Sequence
  Synthetic oligonucleotide; CTA chr11 5275560 5275581 5275577 5275582 +
agggtgaggatgctgaatgatt

SEQ ID NO: 92680 - DNA, 22 bp, Artificial Sequence
  Synthetic oligonucleotide; CTG chr11 5275575 5275596 5275592 5275597 +
aatgatttttccctcccccggg

SEQ ID NO: 92681 - DNA, 22 bp, Artificial Sequence
  Synthetic oligonucleotide; TTT chr11 5275583 5275604 5275600 5275605 +
ttccctcccccgggcttctttt

SEQ ID NO: 92682 - DNA, 22 bp, Artificial Sequence
  Synthetic oligonucleotide; TTT chr11 5275584 5275605 5275601 5275606 +
tccctcccccgggcttctttta

SEQ ID NO: 92683 - DNA, 22 bp, Artificial Sequence
  Synthetic oligonucleotide; TTT chr11 5275585 5275606 5275602 5275607 +
ccctcccccgggcttcttttag

SEQ ID NO: 92684 - DNA, 22 bp, Artificial Sequence
  Synthetic oligonucleotide; TTC chr11 5275586 5275607 5275603 5275608 +
cctcccccgggcttcttttagc

SEQ ID NO: 92685 - DNA, 22 bp, Artificial Sequence
  Synthetic oligonucleotide; CTC chr11 5275590 5275611 5275607 5275612 +
ccccgggcttcttttagccatc

SEQ ID NO: 92686 - DNA, 22 bp, Artificial Sequence
  Synthetic oligonucleotide; CTT chr11 5275600 5275621 5275617 5275622 +
cttttagccatcaataattcta

SEQ ID NO: 92687 - DNA, 22 bp, Artificial Sequence
  Synthetic oligonucleotide; TTC chr11 5275601 5275622 5275618 5275623 +
ttttagccatcaataattctag

SEQ ID NO: 92688 - DNA, 22 bp, Artificial Sequence
  Synthetic oligonucleotide; CTT chr11 5275603 5275624 5275620 5275625 +
ttagccatcaataattctagcc

SEQ ID NO: 92689 - DNA, 22 bp, Artificial Sequence
  Synthetic oligonucleotide; TTT chr11 5275604 5275625 5275621 5275626 +
tagccatcaataattctagccc

SEQ ID NO: 92690 - DNA, 22 bp, Artificial Sequence
  Synthetic oligonucleotide; TTT chr11 5275605 5275626 5275622 5275627 +
agccatcaataattctagcccc

SEQ ID NO: 92691 - DNA, 22 bp, Artificial Sequence
  Synthetic oligonucleotide; TTA chr11 5275606 5275627 5275623 5275628 +
gccatcaataattctagcccca

SEQ ID NO: 92692 - DNA, 22 bp, Artificial Sequence
  Synthetic oligonucleotide; TTC chr11 5275620 5275641 5275637 5275642 +
tagccccacaggagtttgttct

SEQ ID NO: 92693 - DNA, 22 bp, Artificial Sequence
  Synthetic oligonucleotide; CTA chr11 5275622 5275643 5275639 5275644 +
gccccacaggagtttgttctga

SEQ ID NO: 92694 - DNA, 22 bp, Artificial Sequence
  Synthetic oligonucleotide; TTT chr11 5275637 5275658 5275654 5275659 +
gttctgaaagtaaacttccaca

SEQ ID NO: 92695 - DNA, 22 bp, Artificial Sequence
  Synthetic oligonucleotide; TTG chr11 5275638 5275659 5275655 5275660 +
ttctgaaagtaaacttccacaa

SEQ ID NO: 92696 - DNA, 22 bp, Artificial Sequence
  Synthetic oligonucleotide; TTC chr11 5275641 5275662 5275658 5275663 +
tgaaagtaaacttccacaaccg

SEQ ID NO: 92697 - DNA, 22 bp, Artificial Sequence
  Synthetic oligonucleotide; CTG chr11 5275643 5275664 5275660 5275665 +
aaagtaaacttccacaaccgca

SEQ ID NO: 92698 - DNA, 22 bp, Artificial Sequence
  Synthetic oligonucleotide; CTT chr11 5275654 5275675 5275671 5275676 +
ccacaaccgcaagcttattgag

SEQ ID NO: 92699 - DNA, 22 bp, Artificial Sequence
  Synthetic oligonucleotide; TTC chr11 5275655 5275676 5275672 5275677 +
cacaaccgcaagcttattgagg

SEQ ID NO: 92700 - DNA, 22 bp, Artificial Sequence
  Synthetic oligonucleotide; CTT chr11 5275670 5275691 5275687 5275692 +
attgaggctaaggcatctgtga

SEQ ID NO: 92701 - DNA, 22 bp, Artificial Sequence
  Synthetic oligonucleotide; TTA chr11 5275671 5275692 5275688 5275693 +
ttgaggctaaggcatctgtgaa

SEQ ID NO: 92702 - DNA, 22 bp, Artificial Sequence
  Synthetic oligonucleotide; TTG chr11 5275674 5275695 5275691 5275696 +
aggctaaggcatctgtgaagga

SEQ ID NO: 92703 - DNA, 22 bp, Artificial Sequence
  Synthetic oligonucleotide; CTA chr11 5275680 5275701 5275697 5275702 +
aggcatctgtgaaggaaagaaa

SEQ ID NO: 92704 - DNA, 22 bp, Artificial Sequence
  Synthetic oligonucleotide; CTG chr11 5275689 5275710 5275706 5275711 +
tgaaggaaagaaacatctcctc

SEQ ID NO: 92705 - DNA, 22 bp, Artificial Sequence
  Synthetic oligonucleotide; CTC chr11 5275708 5275729 5275725 5275730 +
ctctaaaccactatgctgctag

SEQ ID NO: 92706 - DNA, 22 bp, Artificial Sequence
  Synthetic oligonucleotide; CTC chr11 5275711 5275732 5275728 5275733 +
taaaccactatgctgctagagc

SEQ ID NO: 92707 - DNA, 22 bp, Artificial Sequence
  Synthetic oligonucleotide; CTA chr11 5275713 5275734 5275730 5275735 +
aaccactatgctgctagagcct

SEQ ID NO: 92708 - DNA, 22 bp, Artificial Sequence
  Synthetic oligonucleotide; CTA chr11 5275721 5275742 5275738 5275743 +
tgctgctagagcctcttttctg

SEQ ID NO: 92709 - DNA, 22 bp, Artificial Sequence
  Synthetic oligonucleotide; CTG chr11 5275726 5275747 5275743 5275748 +
ctagagcctcttttctgtactc

SEQ ID NO: 92710 - DNA, 22 bp, Artificial Sequence
  Synthetic oligonucleotide; CTA chr11 5275729 5275750 5275746 5275751 +
gagcctcttttctgtactcaag

SEQ ID NO: 92711 - DNA, 22 bp, Artificial Sequence
  Synthetic oligonucleotide; CTC chr11 5275736 5275757 5275753 5275758 +
ttttctgtactcaagcctcatt

SEQ ID NO: 92712 - DNA, 22 bp, Artificial Sequence
  Synthetic oligonucleotide; CTT chr11 5275738 5275759 5275755 5275760 +
ttctgtactcaagcctcattca

SEQ ID NO: 92713 - DNA, 22 bp, Artificial Sequence
  Synthetic oligonucleotide; TTT chr11 5275739 5275760 5275756 5275761 +
tctgtactcaagcctcattcag

SEQ ID NO: 92714 - DNA, 22 bp, Artificial Sequence
  Synthetic oligonucleotide; TTT chr11 5275740 5275761 5275757 5275762 +
ctgtactcaagcctcattcaga

SEQ ID NO: 92715 - DNA, 22 bp, Artificial Sequence
  Synthetic oligonucleotide; TTC chr11 5275741 5275762 5275758 5275763 +
tgtactcaagcctcattcagac

SEQ ID NO: 92716 - DNA, 22 bp, Artificial Sequence
  Synthetic oligonucleotide; CTG chr11 5275743 5275764 5275760 5275765 +
tactcaagcctcattcagacac

SEQ ID NO: 92717 - DNA, 22 bp, Artificial Sequence
  Synthetic oligonucleotide; CTC chr11 5275748 5275769 5275765 5275770 +
aagcctcattcagacactagtg

SEQ ID NO: 92718 - DNA, 22 bp, Artificial Sequence
  Synthetic oligonucleotide; CTC chr11 5275755 5275776 5275772 5275777 +
attcagacactagtgtcaccag

SEQ ID NO: 92719 - DNA, 22 bp, Artificial Sequence
  Synthetic oligonucleotide; TTC chr11 5275759 5275780 5275776 5275781 +
agacactagtgtcaccagtctc

SEQ ID NO: 92720 - DNA, 22 bp, Artificial Sequence
  Synthetic oligonucleotide; CTA chr11 5275767 5275788 5275784 5275789 +
gtgtcaccagtctcctcatata

SEQ ID NO: 92721 - DNA, 22 bp, Artificial Sequence
  Synthetic oligonucleotide; CTC chr11 5275781 5275802 5275798 5275803 +
ctcatatacctattgtattttc

SEQ ID NO: 92722 - DNA, 22 bp, Artificial Sequence
  Synthetic oligonucleotide; CTC chr11 5275784 5275805 5275801 5275806 +
atatacctattgtattttcttc

SEQ ID NO: 92723 - DNA, 22 bp, Artificial Sequence
  Synthetic oligonucleotide; CTA chr11 5275793 5275814 5275810 5275815 +
ttgtattttcttcttcttgctg

SEQ ID NO: 92724 - DNA, 22 bp, Artificial Sequence
  Synthetic oligonucleotide; TTG chr11 5275796 5275817 5275813 5275818 +
tattttcttcttcttgctggtt

SEQ ID NO: 92725 - DNA, 22 bp, Artificial Sequence
  Synthetic oligonucleotide; TTT chr11 5275801 5275822 5275818 5275823 +
tcttcttcttgctggtttagtc

SEQ ID NO: 92726 - DNA, 22 bp, Artificial Sequence
  Synthetic oligonucleotide; TTT chr11 5275802 5275823 5275819 5275824 +
cttcttcttgctggtttagtca

SEQ ID NO: 92727 - DNA, 22 bp, Artificial Sequence
  Synthetic oligonucleotide; TTC chr11 5275803 5275824 5275820 5275825 +
ttcttcttgctggtttagtcat

SEQ ID NO: 92728 - DNA, 22 bp, Artificial Sequence
  Synthetic oligonucleotide; CTT chr11 5275805 5275826 5275822 5275827 +
cttcttgctggtttagtcatgt

SEQ ID NO: 92729 - DNA, 22 bp, Artificial Sequence
  Synthetic oligonucleotide; TTC chr11 5275806 5275827 5275823 5275828 +
ttcttgctggtttagtcatgtt

SEQ ID NO: 92730 - DNA, 22 bp, Artificial Sequence
  Synthetic oligonucleotide; CTT chr11 5275808 5275829 5275825 5275830 +
cttgctggtttagtcatgtttt

SEQ ID NO: 92731 - DNA, 22 bp, Artificial Sequence
  Synthetic oligonucleotide; TTC chr11 5275809 5275830 5275826 5275831 +
ttgctggtttagtcatgttttc

SEQ ID NO: 92732 - DNA, 22 bp, Artificial Sequence
  Synthetic oligonucleotide; CTT chr11 5275811 5275832 5275828 5275833 +
gctggtttagtcatgttttctg

SEQ ID NO: 92733 - DNA, 22 bp, Artificial Sequence
  Synthetic oligonucleotide; TTG chr11 5275812 5275833 5275829 5275834 +
ctggtttagtcatgttttctgg

SEQ ID NO: 92734 - DNA, 22 bp, Artificial Sequence
  Synthetic oligonucleotide; CTG chr11 5275815 5275836 5275832 5275837 +
gtttagtcatgttttctgggag

SEQ ID NO: 92735 - DNA, 22 bp, Artificial Sequence
  Synthetic oligonucleotide; TTT chr11 5275819 5275840 5275836 5275841 +
agtcatgttttctgggagctta

SEQ ID NO: 92736 - DNA, 22 bp, Artificial Sequence
  Synthetic oligonucleotide; TTA chr11 5275820 5275841 5275837 5275842 +
gtcatgttttctgggagcttag

SEQ ID NO: 92737 - DNA, 22 bp, Artificial Sequence
  Synthetic oligonucleotide; TTT chr11 5275829 5275850 5275846 5275851 +
tctgggagcttaggggcttatt

SEQ ID NO: 92738 - DNA, 22 bp, Artificial Sequence
  Synthetic oligonucleotide; TTT chr11 5275830 5275851 5275847 5275852 +
ctgggagcttaggggcttattt

SEQ ID NO: 92739 - DNA, 22 bp, Artificial Sequence
  Synthetic oligonucleotide; TTC chr11 5275831 5275852 5275848 5275853 +
tgggagcttaggggcttatttt

SEQ ID NO: 92740 - DNA, 22 bp, Artificial Sequence
  Synthetic oligonucleotide; CTG chr11 5275833 5275854 5275850 5275855 +
ggagcttaggggcttattttat

SEQ ID NO: 92741 - DNA, 22 bp, Artificial Sequence
  Synthetic oligonucleotide; CTT chr11 5275840 5275861 5275857 5275862 +
aggggcttattttattttgttt

SEQ ID NO: 92742 - DNA, 22 bp, Artificial Sequence
  Synthetic oligonucleotide; TTA chr11 5275841 5275862 5275858 5275863 +
ggggcttattttattttgtttt

SEQ ID NO: 92743 - DNA, 22 bp, Artificial Sequence
  Synthetic oligonucleotide; CTT chr11 5275848 5275869 5275865 5275870 +
attttattttgttttgttttct

SEQ ID NO: 92744 - DNA, 22 bp, Artificial Sequence
  Synthetic oligonucleotide; TTA chr11 5275849 5275870 5275866 5275871 +
ttttattttgttttgttttcta

SEQ ID NO: 92745 - DNA, 22 bp, Artificial Sequence
  Synthetic oligonucleotide; TTT chr11 5275852 5275873 5275869 5275874 +
tattttgttttgttttctaatc

SEQ ID NO: 92746 - DNA, 22 bp, Artificial Sequence
  Synthetic oligonucleotide; TTT chr11 5275853 5275874 5275870 5275875 +
attttgttttgttttctaatca

SEQ ID NO: 92747 - DNA, 22 bp, Artificial Sequence
  Synthetic oligonucleotide; TTA chr11 5275854 5275875 5275871 5275876 +
ttttgttttgttttctaatcaa

SEQ ID NO: 92748 - DNA, 22 bp, Artificial Sequence
  Synthetic oligonucleotide; TTT chr11 5275857 5275878 5275874 5275879 +
tgttttgttttctaatcaacag

SEQ ID NO: 92749 - DNA, 22 bp, Artificial Sequence
  Synthetic oligonucleotide; TTT chr11 5275858 5275879 5275875 5275880 +
gttttgttttctaatcaacaga

SEQ ID NO: 92750 - DNA, 22 bp, Artificial Sequence
  Synthetic oligonucleotide; TTG chr11 5275859 5275880 5275876 5275881 +
ttttgttttctaatcaacagag

SEQ ID NO: 92751 - DNA, 22 bp, Artificial Sequence
  Synthetic oligonucleotide; TTT chr11 5275862 5275883 5275879 5275884 +
tgttttctaatcaacagagatg

SEQ ID NO: 92752 - DNA, 22 bp, Artificial Sequence
  Synthetic oligonucleotide; TTT chr11 5275863 5275884 5275880 5275885 +
gttttctaatcaacagagatgg

SEQ ID NO: 92753 - DNA, 22 bp, Artificial Sequence
  Synthetic oligonucleotide; TTG chr11 5275864 5275885 5275881 5275886 +
ttttctaatcaacagagatggg

SEQ ID NO: 92754 - DNA, 22 bp, Artificial Sequence
  Synthetic oligonucleotide; TTT chr11 5275867 5275888 5275884 5275889 +
tctaatcaacagagatgggcaa

SEQ ID NO: 92755 - DNA, 22 bp, Artificial Sequence
  Synthetic oligonucleotide; TTT chr11 5275868 5275889 5275885 5275890 +
ctaatcaacagagatgggcaaa

SEQ ID NO: 92756 - DNA, 22 bp, Artificial Sequence
  Synthetic oligonucleotide; TTC chr11 5275869 5275890 5275886 5275891 +
taatcaacagagatgggcaaac

SEQ ID NO: 92757 - DNA, 22 bp, Artificial Sequence
  Synthetic oligonucleotide; CTA chr11 5275871 5275892 5275888 5275893 +
atcaacagagatgggcaaaccc

SEQ ID NO: 92758 - DNA, 22 bp, Artificial Sequence
  Synthetic oligonucleotide; TTA chr11 5275897 5275918 5275914 5275919 +
tttttttctttagacttgggat

SEQ ID NO: 92759 - DNA, 22 bp, Artificial Sequence
  Synthetic oligonucleotide; TTT chr11 5275900 5275921 5275917 5275922 +
ttttctttagacttgggatggt

SEQ ID NO: 92760 - DNA, 22 bp, Artificial Sequence
  Synthetic oligonucleotide; TTT chr11 5275901 5275922 5275918 5275923 +
tttctttagacttgggatggtg

SEQ ID NO: 92761 - DNA, 22 bp, Artificial Sequence
  Synthetic oligonucleotide; TTT chr11 5275902 5275923 5275919 5275924 +
ttctttagacttgggatggtga

SEQ ID NO: 92762 - DNA, 22 bp, Artificial Sequence
  Synthetic oligonucleotide; TTT chr11 5275903 5275924 5275920 5275925 +
tctttagacttgggatggtgat

SEQ ID NO: 92763 - DNA, 22 bp, Artificial Sequence
  Synthetic oligonucleotide; TTT chr11 5275904 5275925 5275921 5275926 +
ctttagacttgggatggtgata

SEQ ID NO: 92764 - DNA, 22 bp, Artificial Sequence
  Synthetic oligonucleotide; TTC chr11 5275905 5275926 5275922 5275927 +
tttagacttgggatggtgatag

SEQ ID NO: 92765 - DNA, 22 bp, Artificial Sequence
  Synthetic oligonucleotide; CTT chr11 5275907 5275928 5275924 5275929 +
tagacttgggatggtgatagct

SEQ ID NO: 92766 - DNA, 22 bp, Artificial Sequence
  Synthetic oligonucleotide; TTT chr11 5275908 5275929 5275925 5275930 +
agacttgggatggtgatagctg

SEQ ID NO: 92767 - DNA, 22 bp, Artificial Sequence
  Synthetic oligonucleotide; TTA chr11 5275909 5275930 5275926 5275931 +
gacttgggatggtgatagctgg

SEQ ID NO: 92768 - DNA, 22 bp, Artificial Sequence
  Synthetic oligonucleotide; CTT chr11 5275914 5275935 5275931 5275936 +
gggatggtgatagctgggcagc

SEQ ID NO: 92769 - DNA, 22 bp, Artificial Sequence
  Synthetic oligonucleotide; TTG chr11 5275915 5275936 5275932 5275937 +
ggatggtgatagctgggcagcg

SEQ ID NO: 92770 - DNA, 22 bp, Artificial Sequence
  Synthetic oligonucleotide; CTG chr11 5275930 5275951 5275947 5275952 +
ggcagcgtcagaaactgtgtgt

SEQ ID NO: 92771 - DNA, 22 bp, Artificial Sequence
  Synthetic oligonucleotide; CTG chr11 5275947 5275968 5275964 5275969 +
tgtgtggatatagataagagct

SEQ ID NO: 92772 - DNA, 22 bp, Artificial Sequence
  Synthetic oligonucleotide; CTC chr11 5275970 5275991 5275987 5275992 +
aggactatgctgagctgtgatg

SEQ ID NO: 92773 - DNA, 22 bp, Artificial Sequence
  Synthetic oligonucleotide; CTA chr11 5275977 5275998 5275994 5275999 +
tgctgagctgtgatgagggagg

SEQ ID NO: 92774 - DNA, 22 bp, Artificial Sequence
  Synthetic oligonucleotide; CTG chr11 5275982 5276003 5275999 5276004 +
agctgtgatgagggaggggcct

SEQ ID NO: 92775 - DNA, 22 bp, Artificial Sequence
  Synthetic oligonucleotide; CTG chr11 5275987 5276008 5276004 5276009 +
tgatgagggaggggcctagcta

SEQ ID NO: 92776 - DNA, 22 bp, Artificial Sequence
  Synthetic oligonucleotide; CTA chr11 5276005 5276026 5276022 5276027 +
gctaaaggcagtgagagtcaga

SEQ ID NO: 92777 - DNA, 22 bp, Artificial Sequence
  Synthetic oligonucleotide; CTA chr11 5276009 5276030 5276026 5276031 +
aaggcagtgagagtcagaatgc

SEQ ID NO: 92778 - DNA, 22 bp, Artificial Sequence
  Synthetic oligonucleotide; CTC chr11 5276033 5276054 5276050 5276055 +
ctgctattgccttctcagtccc

SEQ ID NO: 92779 - DNA, 22 bp, Artificial Sequence
  Synthetic oligonucleotide; CTG chr11 5276036 5276057 5276053 5276058 +
ctattgccttctcagtccccac

SEQ ID NO: 92780 - DNA, 22 bp, Artificial Sequence
  Synthetic oligonucleotide; CTA chr11 5276039 5276060 5276056 5276061 +
ttgccttctcagtccccacgct

SEQ ID NO: 92781 - DNA, 22 bp, Artificial Sequence
  Synthetic oligonucleotide; TTG chr11 5276042 5276063 5276059 5276064 +
ccttctcagtccccacgcttgg

SEQ ID NO: 92782 - DNA, 22 bp, Artificial Sequence
  Synthetic oligonucleotide; CTT chr11 5276046 5276067 5276063 5276068 +
ctcagtccccacgcttggtttc

SEQ ID NO: 92783 - DNA, 22 bp, Artificial Sequence
  Synthetic oligonucleotide; TTC chr11 5276047 5276068 5276064 5276069 +
tcagtccccacgcttggtttct

SEQ ID NO: 92784 - DNA, 22 bp, Artificial Sequence
  Synthetic oligonucleotide; CTC chr11 5276049 5276070 5276066 5276071 +
agtccccacgcttggtttctac

SEQ ID NO: 92785 - DNA, 22 bp, Artificial Sequence
  Synthetic oligonucleotide; CTT chr11 5276062 5276083 5276079 5276084 +
ggtttctacacaagtagataca

SEQ ID NO: 92786 - DNA, 22 bp, Artificial Sequence
  Synthetic oligonucleotide; TTG chr11 5276063 5276084 5276080 5276085 +
gtttctacacaagtagatacat

SEQ ID NO: 92787 - DNA, 22 bp, Artificial Sequence
  Synthetic oligonucleotide; TTT chr11 5276067 5276088 5276084 5276089 +
ctacacaagtagatacatagaa

SEQ ID NO: 92788 - DNA, 22 bp, Artificial Sequence
  Synthetic oligonucleotide; TTC chr11 5276068 5276089 5276085 5276090 +
tacacaagtagatacatagaaa

SEQ ID NO: 92789 - DNA, 22 bp, Artificial Sequence
  Synthetic oligonucleotide; CTA chr11 5276070 5276091 5276087 5276092 +
cacaagtagatacatagaaaag

SEQ ID NO: 92790 - DNA, 22 bp, Artificial Sequence
  Synthetic oligonucleotide; CTA chr11 5276096 5276117 5276113 5276118 +
taggttagtgtttgagagtcct

SEQ ID NO: 92791 - DNA, 22 bp, Artificial Sequence
  Synthetic oligonucleotide; TTA chr11 5276103 5276124 5276120 5276125 +
gtgtttgagagtcctgcatgat

SEQ ID NO: 92792 - DNA, 22 bp, Artificial Sequence
  Synthetic oligonucleotide; TTT chr11 5276109 5276130 5276126 5276131 +
gagagtcctgcatgattagttg

SEQ ID NO: 92793 - DNA, 22 bp, Artificial Sequence
  Synthetic oligonucleotide; TTG chr11 5276110 5276131 5276127 5276132 +
agagtcctgcatgattagttgc

SEQ ID NO: 92794 - DNA, 22 bp, Artificial Sequence
  Synthetic oligonucleotide; CTG chr11 5276119 5276140 5276136 5276141 +
catgattagttgctcagaaatg

SEQ ID NO: 92795 - DNA, 22 bp, Artificial Sequence
  Synthetic oligonucleotide; TTA chr11 5276127 5276148 5276144 5276149 +
gttgctcagaaatgcccgataa

SEQ ID NO: 92796 - DNA, 22 bp, Artificial Sequence
  Synthetic oligonucleotide; TTG chr11 5276131 5276152 5276148 5276153 +
ctcagaaatgcccgataaatat

SEQ ID NO: 92797 - DNA, 22 bp, Artificial Sequence
  Synthetic oligonucleotide; CTC chr11 5276134 5276155 5276151 5276156 +
agaaatgcccgataaatatgtt

SEQ ID NO: 92798 - DNA, 22 bp, Artificial Sequence
  Synthetic oligonucleotide; TTA chr11 5276157 5276178 5276174 5276179 +
tgtgtgtttatgtatatatatg

SEQ ID NO: 92799 - DNA, 22 bp, Artificial Sequence
  Synthetic oligonucleotide; TTT chr11 5276166 5276187 5276183 5276188 +
atgtatatatatgttttatata

SEQ ID NO: 92800 - DNA, 22 bp, Artificial Sequence
  Synthetic oligonucleotide; TTA chr11 5276167 5276188 5276184 5276189 +
tgtatatatatgttttatatat

SEQ ID NO: 92801 - DNA, 22 bp, Artificial Sequence
  Synthetic oligonucleotide; TTT chr11 5276182 5276203 5276199 5276204 +
tatatatatatatatgtgtgtg

SEQ ID NO: 92802 - DNA, 22 bp, Artificial Sequence
  Synthetic oligonucleotide; TTT chr11 5276183 5276204 5276200 5276205 +
atatatatatatatgtgtgtgt

SEQ ID NO: 92803 - DNA, 22 bp, Artificial Sequence
  Synthetic oligonucleotide; TTA chr11 5276184 5276205 5276201 5276206 +
tatatatatatatgtgtgtgtg

SEQ ID NO: 92804 - DNA, 22 bp, Artificial Sequence
  Synthetic oligonucleotide; TTG chr11 5276223 5276244 5276240 5276245 +
tgtttacaaatatgtgattatc

SEQ ID NO: 92805 - DNA, 22 bp, Artificial Sequence
  Synthetic oligonucleotide; TTT chr11 5276228 5276249 5276245 5276250 +
acaaatatgtgattatcatcaa

SEQ ID NO: 92806 - DNA, 22 bp, Artificial Sequence
  Synthetic oligonucleotide; TTA chr11 5276229 5276250 5276246 5276251 +
caaatatgtgattatcatcaaa

SEQ ID NO: 92807 - DNA, 22 bp, Artificial Sequence
  Synthetic oligonucleotide; TTA chr11 5276243 5276264 5276260 5276265 +
tcatcaaaacgtgagggctaaa

SEQ ID NO: 92808 - DNA, 22 bp, Artificial Sequence
  Synthetic oligonucleotide; CTA chr11 5276263 5276284 5276280 5276285 +
aagtgaccagataacttgcaag

SEQ ID NO: 92809 - DNA, 22 bp, Artificial Sequence
  Synthetic oligonucleotide; CTT chr11 5276280 5276301 5276297 5276302 +
gcaagtcctaggataccaggaa

SEQ ID NO: 92810 - DNA, 22 bp, Artificial Sequence
  Synthetic oligonucleotide; TTG chr11 5276281 5276302 5276298 5276303 +
caagtcctaggataccaggaaa

SEQ ID NO: 92811 - DNA, 22 bp, Artificial Sequence
  Synthetic oligonucleotide; CTA chr11 5276290 5276311 5276307 5276312 +
ggataccaggaaaataaattac

SEQ ID NO: 92812 - DNA, 22 bp, Artificial Sequence
  Synthetic oligonucleotide; TTA chr11 5276311 5276332 5276328 5276333 +
cattccaaaaatttaactgaga

SEQ ID NO: 92813 - DNA, 22 bp, Artificial Sequence
  Synthetic oligonucleotide; TTC chr11 5276316 5276337 5276333 5276338 +
caaaaatttaactgagacttta

SEQ ID NO: 92814 - DNA, 22 bp, Artificial Sequence
  Synthetic oligonucleotide; TTT chr11 5276325 5276346 5276342 5276347 +
aactgagactttaaaaaaaaaa

SEQ ID NO: 92815 - DNA, 22 bp, Artificial Sequence
  Synthetic oligonucleotide; TTA chr11 5276326 5276347 5276343 5276348 +
actgagactttaaaaaaaaaaa

SEQ ID NO: 92816 - DNA, 22 bp, Artificial Sequence
  Synthetic oligonucleotide; CTG chr11 5276330 5276351 5276347 5276352 +
agactttaaaaaaaaaaaaaaa

SEQ ID NO: 92817 - DNA, 22 bp, Artificial Sequence
  Synthetic oligonucleotide; CTT chr11 5276336 5276357 5276353 5276358 +
taaaaaaaaaaaaaaaacaaaa

SEQ ID NO: 92818 - DNA, 22 bp, Artificial Sequence
  Synthetic oligonucleotide; TTT chr11 5276337 5276358 5276354 5276359 +
aaaaaaaaaaaaaaaacaaaaa

SEQ ID NO: 92819 - DNA, 22 bp, Artificial Sequence
  Synthetic oligonucleotide; TTA chr11 5276338 5276359 5276355 5276360 +
aaaaaaaaaaaaaaacaaaaaa

SEQ ID NO: 92820 - DNA, 22 bp, Artificial Sequence
  Synthetic oligonucleotide; CTG chr11 5276404 5276425 5276421 5276426 +
gggcctgttgggggtggggggc

SEQ ID NO: 92821 - DNA, 22 bp, Artificial Sequence
  Synthetic oligonucleotide; CTG chr11 5276411 5276432 5276428 5276433 +
ttgggggtggggggctagggga

SEQ ID NO: 92822 - DNA, 22 bp, Artificial Sequence
  Synthetic oligonucleotide; TTG chr11 5276414 5276435 5276431 5276436 +
ggggtggggggctaggggaagg

SEQ ID NO: 92823 - DNA, 22 bp, Artificial Sequence
  Synthetic oligonucleotide; CTA chr11 5276428 5276449 5276445 5276450 +
ggggaaggatagcattaggaga

SEQ ID NO: 92824 - DNA, 22 bp, Artificial Sequence
  Synthetic oligonucleotide; TTA chr11 5276445 5276466 5276462 5276467 +
ggagaaatacctaatgtagatg

SEQ ID NO: 92825 - DNA, 22 bp, Artificial Sequence
  Synthetic oligonucleotide; CTA chr11 5276458 5276479 5276475 5276480 +
atgtagatgacgggttgatggg

SEQ ID NO: 92826 - DNA, 22 bp, Artificial Sequence
  Synthetic oligonucleotide; TTG chr11 5276475 5276496 5276492 5276497 +
atgggtgcagcaaaccaccatg

SEQ ID NO: 92827 - DNA, 22 bp, Artificial Sequence
  Synthetic oligonucleotide; CTT chr11 5276517 5276538 5276534 5276539 +
aaagcatattaaaaaaacagtg

SEQ ID NO: 92828 - DNA, 22 bp, Artificial Sequence
  Synthetic oligonucleotide; TTA chr11 5276518 5276539 5276535 5276540 +
aagcatattaaaaaaacagtga

SEQ ID NO: 92829 - DNA, 22 bp, Artificial Sequence
  Synthetic oligonucleotide; TTA chr11 5276528 5276549 5276545 5276550 +
aaaaaacagtgatcataaaaga

SEQ ID NO: 92830 - DNA, 22 bp, Artificial Sequence
  Synthetic oligonucleotide; CTC chr11 5276555 5276576 5276572 5276577 +
aaatttaactataagagacgga

SEQ ID NO: 92831 - DNA, 22 bp, Artificial Sequence
  Synthetic oligonucleotide; TTT chr11 5276561 5276582 5276578 5276583 +
aactataagagacggaatggct

SEQ ID NO: 92832 - DNA, 22 bp, Artificial Sequence
  Synthetic oligonucleotide; TTA chr11 5276562 5276583 5276579 5276584 +
actataagagacggaatggctc

SEQ ID NO: 92833 - DNA, 22 bp, Artificial Sequence
  Synthetic oligonucleotide; CTA chr11 5276566 5276587 5276583 5276588 +
taagagacggaatggctcccac

SEQ ID NO: 92834 - DNA, 22 bp, Artificial Sequence
  Synthetic oligonucleotide; CTC chr11 5276584 5276605 5276601 5276606 +
ccacaattcttaactataatct

SEQ ID NO: 92835 - DNA, 22 bp, Artificial Sequence
  Synthetic oligonucleotide; TTC chr11 5276593 5276614 5276610 5276615 +
ttaactataatcttacagaata

SEQ ID NO: 92836 - DNA, 22 bp, Artificial Sequence
  Synthetic oligonucleotide; CTT chr11 5276595 5276616 5276612 5276617 +
aactataatcttacagaatatt

SEQ ID NO: 92837 - DNA, 22 bp, Artificial Sequence
  Synthetic oligonucleotide; TTA chr11 5276596 5276617 5276613 5276618 +
actataatcttacagaatattc

SEQ ID NO: 92838 - DNA, 22 bp, Artificial Sequence
  Synthetic oligonucleotide; CTA chr11 5276600 5276621 5276617 5276622 +
taatcttacagaatattctcat

SEQ ID NO: 92839 - DNA, 22 bp, Artificial Sequence
  Synthetic oligonucleotide; CTT chr11 5276607 5276628 5276624 5276629 +
acagaatattctcattgaatag

SEQ ID NO: 92840 - DNA, 22 bp, Artificial Sequence
  Synthetic oligonucleotide; TTA chr11 5276608 5276629 5276625 5276630 +
cagaatattctcattgaataga

SEQ ID NO: 92841 - DNA, 22 bp, Artificial Sequence
  Synthetic oligonucleotide; TTC chr11 5276618 5276639 5276635 5276640 +
tcattgaatagaagtatgctta

SEQ ID NO: 92842 - DNA, 22 bp, Artificial Sequence
  Synthetic oligonucleotide; CTC chr11 5276620 5276641 5276637 5276642 +
attgaatagaagtatgcttatc

SEQ ID NO: 92843 - DNA, 22 bp, Artificial Sequence
  Synthetic oligonucleotide; TTG chr11 5276624 5276645 5276641 5276646 +
aatagaagtatgcttatcatta

SEQ ID NO: 92844 - DNA, 22 bp, Artificial Sequence
  Synthetic oligonucleotide; CTT chr11 5276639 5276660 5276656 5276661 +
atcattagagatttggacagcc

SEQ ID NO: 92845 - DNA, 22 bp, Artificial Sequence
  Synthetic oligonucleotide; TTA chr11 5276640 5276661 5276657 5276662 +
tcattagagatttggacagcca

SEQ ID NO: 92846 - DNA, 22 bp, Artificial Sequence
  Synthetic oligonucleotide; TTA chr11 5276646 5276667 5276663 5276668 +
gagatttggacagccaggaaag

SEQ ID NO: 92847 - DNA, 22 bp, Artificial Sequence
  Synthetic oligonucleotide; TTT chr11 5276653 5276674 5276670 5276675 +
ggacagccaggaaagcacagaa

SEQ ID NO: 92848 - DNA, 22 bp, Artificial Sequence
  Synthetic oligonucleotide; TTG chr11 5276654 5276675 5276671 5276676 +
gacagccaggaaagcacagaaa

SEQ ID NO: 92849 - DNA, 22 bp, Artificial Sequence
  Synthetic oligonucleotide; CTC chr11 5276692 5276713 5276709 5276714 +
tgttgccttatagcctagaggt

SEQ ID NO: 92850 - DNA, 22 bp, Artificial Sequence
  Synthetic oligonucleotide; CTG chr11 5276694 5276715 5276711 5276716 +
ttgccttatagcctagaggtgt

SEQ ID NO: 92851 - DNA, 22 bp, Artificial Sequence
  Synthetic oligonucleotide; TTG chr11 5276697 5276718 5276714 5276719 +
ccttatagcctagaggtgtttt

SEQ ID NO: 92852 - DNA, 22 bp, Artificial Sequence
  Synthetic oligonucleotide; CTT chr11 5276701 5276722 5276718 5276723 +
atagcctagaggtgttttgaac

SEQ ID NO: 92853 - DNA, 22 bp, Artificial Sequence
  Synthetic oligonucleotide; TTA chr11 5276702 5276723 5276719 5276724 +
tagcctagaggtgttttgaacc

SEQ ID NO: 92854 - DNA, 22 bp, Artificial Sequence
  Synthetic oligonucleotide; CTA chr11 5276709 5276730 5276726 5276731 +
gaggtgttttgaacctcacata

SEQ ID NO: 92855 - DNA, 22 bp, Artificial Sequence
  Synthetic oligonucleotide; TTT chr11 5276718 5276739 5276735 5276740 +
tgaacctcacataacactgatg

SEQ ID NO: 92856 - DNA, 22 bp, Artificial Sequence
  Synthetic oligonucleotide; TTT chr11 5276719 5276740 5276736 5276741 +
gaacctcacataacactgatgt

SEQ ID NO: 92857 - DNA, 22 bp, Artificial Sequence
  Synthetic oligonucleotide; TTG chr11 5276720 5276741 5276737 5276742 +
aacctcacataacactgatgtc

SEQ ID NO: 92858 - DNA, 22 bp, Artificial Sequence
  Synthetic oligonucleotide; CTC chr11 5276726 5276747 5276743 5276748 +
acataacactgatgtccaggcc

SEQ ID NO: 92859 - DNA, 22 bp, Artificial Sequence
  Synthetic oligonucleotide; CTG chr11 5276737 5276758 5276754 5276759 +
atgtccaggccaaggccatcct

SEQ ID NO: 92860 - DNA, 22 bp, Artificial Sequence
  Synthetic oligonucleotide; CTT chr11 5276760 5276781 5276777 5276782 +
cccatgaagatggatgaataag

SEQ ID NO: 92861 - DNA, 22 bp, Artificial Sequence
  Synthetic oligonucleotide; TTC chr11 5276761 5276782 5276778 5276783 +
ccatgaagatggatgaataagc

SEQ ID NO: 92862 - DNA, 22 bp, Artificial Sequence
  Synthetic oligonucleotide; CTG chr11 5276791 5276812 5276808 5276813 +
acacctatgaaataatgtttac

SEQ ID NO: 92863 - DNA, 22 bp, Artificial Sequence
  Synthetic oligonucleotide; CTA chr11 5276798 5276819 5276815 5276820 +
tgaaataatgtttactttagtg

SEQ ID NO: 92864 - DNA, 22 bp, Artificial Sequence
  Synthetic oligonucleotide; TTT chr11 5276811 5276832 5276828 5276833 +
actttagtggcatattgcatta

SEQ ID NO: 92865 - DNA, 22 bp, Artificial Sequence
  Synthetic oligonucleotide; TTA chr11 5276812 5276833 5276829 5276834 +
ctttagtggcatattgcattag

SEQ ID NO: 92866 - DNA, 22 bp, Artificial Sequence
  Synthetic oligonucleotide; CTT chr11 5276815 5276836 5276832 5276837 +
tagtggcatattgcattaggct

SEQ ID NO: 92867 - DNA, 22 bp, Artificial Sequence
  Synthetic oligonucleotide; TTT chr11 5276816 5276837 5276833 5276838 +
agtggcatattgcattaggcta

SEQ ID NO: 92868 - DNA, 22 bp, Artificial Sequence
  Synthetic oligonucleotide; TTA chr11 5276817 5276838 5276834 5276839 +
gtggcatattgcattaggctac

SEQ ID NO: 92869 - DNA, 22 bp, Artificial Sequence
  Synthetic oligonucleotide; TTG chr11 5276828 5276849 5276845 5276850 +
cattaggctacctgccttggca

SEQ ID NO: 92870 - DNA, 22 bp, Artificial Sequence
  Synthetic oligonucleotide; TTA chr11 5276833 5276854 5276850 5276855 +
ggctacctgccttggcacagtt

SEQ ID NO: 92871 - DNA, 22 bp, Artificial Sequence
  Synthetic oligonucleotide; CTA chr11 5276838 5276859 5276855 5276860 +
cctgccttggcacagtttttct

SEQ ID NO: 92872 - DNA, 22 bp, Artificial Sequence
  Synthetic oligonucleotide; CTG chr11 5276842 5276863 5276859 5276864 +
ccttggcacagtttttctttac

SEQ ID NO: 92873 - DNA, 22 bp, Artificial Sequence
  Synthetic oligonucleotide; CTT chr11 5276846 5276867 5276863 5276868 +
ggcacagtttttctttactttt

SEQ ID NO: 92874 - DNA, 22 bp, Artificial Sequence
  Synthetic oligonucleotide; TTG chr11 5276847 5276868 5276864 5276869 +
gcacagtttttctttactttta

SEQ ID NO: 92875 - DNA, 22 bp, Artificial Sequence
  Synthetic oligonucleotide; TTT chr11 5276856 5276877 5276873 5276878 +
ttctttacttttacctgactga

SEQ ID NO: 92876 - DNA, 22 bp, Artificial Sequence
  Synthetic oligonucleotide; TTT chr11 5276857 5276878 5276874 5276879 +
tctttacttttacctgactgat

SEQ ID NO: 92877 - DNA, 22 bp, Artificial Sequence
  Synthetic oligonucleotide; TTT chr11 5276858 5276879 5276875 5276880 +
ctttacttttacctgactgatg

SEQ ID NO: 92878 - DNA, 22 bp, Artificial Sequence
  Synthetic oligonucleotide; TTC chr11 5276859 5276880 5276876 5276881 +
tttacttttacctgactgatga

SEQ ID NO: 92879 - DNA, 22 bp, Artificial Sequence
  Synthetic oligonucleotide; CTT chr11 5276861 5276882 5276878 5276883 +
tacttttacctgactgatgaaa

SEQ ID NO: 92880 - DNA, 22 bp, Artificial Sequence
  Synthetic oligonucleotide; TTT chr11 5276862 5276883 5276879 5276884 +
acttttacctgactgatgaaac

SEQ ID NO: 92881 - DNA, 22 bp, Artificial Sequence
  Synthetic oligonucleotide; TTA chr11 5276863 5276884 5276880 5276885 +
cttttacctgactgatgaaaca

SEQ ID NO: 92882 - DNA, 22 bp, Artificial Sequence
  Synthetic oligonucleotide; CTT chr11 5276866 5276887 5276883 5276888 +
ttacctgactgatgaaacaatt

SEQ ID NO: 92883 - DNA, 22 bp, Artificial Sequence
  Synthetic oligonucleotide; TTT chr11 5276867 5276888 5276884 5276889 +
tacctgactgatgaaacaatta

SEQ ID NO: 92884 - DNA, 22 bp, Artificial Sequence
  Synthetic oligonucleotide; TTT chr11 5276868 5276889 5276885 5276890 +
acctgactgatgaaacaattaa

SEQ ID NO: 92885 - DNA, 22 bp, Artificial Sequence
  Synthetic oligonucleotide; TTA chr11 5276869 5276890 5276886 5276891 +
cctgactgatgaaacaattaat

SEQ ID NO: 92886 - DNA, 22 bp, Artificial Sequence
  Synthetic oligonucleotide; CTG chr11 5276873 5276894 5276890 5276895 +
actgatgaaacaattaattgct

SEQ ID NO: 92887 - DNA, 22 bp, Artificial Sequence
  Synthetic oligonucleotide; CTG chr11 5276877 5276898 5276894 5276899 +
atgaaacaattaattgcttaca

SEQ ID NO: 92888 - DNA, 22 bp, Artificial Sequence
  Synthetic oligonucleotide; TTA chr11 5276889 5276910 5276906 5276911 +
attgcttacataaacatgagtg

SEQ ID NO: 92889 - DNA, 22 bp, Artificial Sequence
  Synthetic oligonucleotide; TTG chr11 5276893 5276914 5276910 5276915 +
cttacataaacatgagtgctct

SEQ ID NO: 92890 - DNA, 22 bp, Artificial Sequence
  Synthetic oligonucleotide; CTT chr11 5276896 5276917 5276913 5276918 +
acataaacatgagtgctctagt

SEQ ID NO: 92891 - DNA, 22 bp, Artificial Sequence
  Synthetic oligonucleotide; TTA chr11 5276897 5276918 5276914 5276919 +
cataaacatgagtgctctagtt

SEQ ID NO: 92892 - DNA, 22 bp, Artificial Sequence
  Synthetic oligonucleotide; CTC chr11 5276914 5276935 5276931 5276936 +
tagttataaattccagtgtaaa

SEQ ID NO: 92893 - DNA, 22 bp, Artificial Sequence
  Synthetic oligonucleotide; CTA chr11 5276916 5276937 5276933 5276938 +
gttataaattccagtgtaaaaa

SEQ ID NO: 92894 - DNA, 22 bp, Artificial Sequence
  Synthetic oligonucleotide; TTA chr11 5276920 5276941 5276937 5276942 +
taaattccagtgtaaaaaacac

SEQ ID NO: 92895 - DNA, 22 bp, Artificial Sequence
  Synthetic oligonucleotide; TTC chr11 5276927 5276948 5276944 5276949 +
cagtgtaaaaaacaccctggtt

SEQ ID NO: 92896 - DNA, 22 bp, Artificial Sequence
  Synthetic oligonucleotide; CTG chr11 5276946 5276967 5276963 5276968 +
gtttcgatattcatcttttgag

SEQ ID NO: 92897 - DNA, 22 bp, Artificial Sequence
  Synthetic oligonucleotide; TTT chr11 5276950 5276971 5276967 5276972 +
cgatattcatcttttgagcctt

SEQ ID NO: 92898 - DNA, 22 bp, Artificial Sequence
  Synthetic oligonucleotide; TTC chr11 5276951 5276972 5276968 5276973 +
gatattcatcttttgagccttt

SEQ ID NO: 92899 - DNA, 22 bp, Artificial Sequence
  Synthetic oligonucleotide; TTC chr11 5276958 5276979 5276975 5276980 +
atcttttgagccttttattttg

SEQ ID NO: 92900 - DNA, 22 bp, Artificial Sequence
  Synthetic oligonucleotide; CTT chr11 5276963 5276984 5276980 5276985 +
ttgagccttttattttggtcag

SEQ ID NO: 92901 - DNA, 22 bp, Artificial Sequence
  Synthetic oligonucleotide; TTT chr11 5276964 5276985 5276981 5276986 +
tgagccttttattttggtcaga

SEQ ID NO: 92902 - DNA, 22 bp, Artificial Sequence
  Synthetic oligonucleotide; TTT chr11 5276965 5276986 5276982 5276987 +
gagccttttattttggtcagaa

SEQ ID NO: 92903 - DNA, 22 bp, Artificial Sequence
  Synthetic oligonucleotide; TTG chr11 5276966 5276987 5276983 5276988 +
agccttttattttggtcagaac

SEQ ID NO: 92904 - DNA, 22 bp, Artificial Sequence
  Synthetic oligonucleotide; CTT chr11 5276972 5276993 5276989 5276994 +
ttattttggtcagaacaagttt

SEQ ID NO: 92905 - DNA, 22 bp, Artificial Sequence
  Synthetic oligonucleotide; TTT chr11 5276973 5276994 5276990 5276995 +
tattttggtcagaacaagtttt

SEQ ID NO: 92906 - DNA, 22 bp, Artificial Sequence
  Synthetic oligonucleotide; TTT chr11 5276974 5276995 5276991 5276996 +
attttggtcagaacaagttttc

SEQ ID NO: 92907 - DNA, 22 bp, Artificial Sequence
  Synthetic oligonucleotide; TTA chr11 5276975 5276996 5276992 5276997 +
ttttggtcagaacaagttttca

SEQ ID NO: 92908 - DNA, 22 bp, Artificial Sequence
  Synthetic oligonucleotide; TTT chr11 5276978 5276999 5276995 5277000 +
tggtcagaacaagttttcaaga

SEQ ID NO: 92909 - DNA, 22 bp, Artificial Sequence
  Synthetic oligonucleotide; TTT chr11 5276979 5277000 5276996 5277001 +
ggtcagaacaagttttcaagag

SEQ ID NO: 92910 - DNA, 22 bp, Artificial Sequence
  Synthetic oligonucleotide; TTG chr11 5276980 5277001 5276997 5277002 +
gtcagaacaagttttcaagagc

SEQ ID NO: 92911 - DNA, 22 bp, Artificial Sequence
  Synthetic oligonucleotide; TTT chr11 5276994 5277015 5277011 5277016 +
tcaagagcaaatctcagcctac

SEQ ID NO: 92912 - DNA, 22 bp, Artificial Sequence
  Synthetic oligonucleotide; TTT chr11 5276995 5277016 5277012 5277017 +
caagagcaaatctcagcctaca

SEQ ID NO: 92913 - DNA, 22 bp, Artificial Sequence
  Synthetic oligonucleotide; TTC chr11 5276996 5277017 5277013 5277018 +
aagagcaaatctcagcctacaa

SEQ ID NO: 92914 - DNA, 22 bp, Artificial Sequence
  Synthetic oligonucleotide; CTC chr11 5277009 5277030 5277026 5277031 +
agcctacaaaacaaatgagtcc

SEQ ID NO: 92915 - DNA, 22 bp, Artificial Sequence
  Synthetic oligonucleotide; CTA chr11 5277015 5277036 5277032 5277037 +
caaaacaaatgagtccaattct

SEQ ID NO: 92916 - DNA, 22 bp, Artificial Sequence
  Synthetic oligonucleotide; TTC chr11 5277036 5277057 5277053 5277058 +
tagaactcagtaatcccatcaa

SEQ ID NO: 92917 - DNA, 22 bp, Artificial Sequence
  Synthetic oligonucleotide; CTA chr11 5277038 5277059 5277055 5277060 +
gaactcagtaatcccatcaagg

SEQ ID NO: 92918 - DNA, 22 bp, Artificial Sequence
  Synthetic oligonucleotide; CTC chr11 5277044 5277065 5277061 5277066 +
agtaatcccatcaaggctctgc

SEQ ID NO: 92919 - DNA, 22 bp, Artificial Sequence
  Synthetic oligonucleotide; CTC chr11 5277063 5277084 5277080 5277085 +
tgcctgcggagggctaactagc

SEQ ID NO: 92920 - DNA, 22 bp, Artificial Sequence
  Synthetic oligonucleotide; CTG chr11 5277065 5277086 5277082 5277087 +
cctgcggagggctaactagctc

SEQ ID NO: 92921 - DNA, 22 bp, Artificial Sequence
  Synthetic oligonucleotide; CTG chr11 5277069 5277090 5277086 5277091 +
cggagggctaactagctctatg

SEQ ID NO: 92922 - DNA, 22 bp, Artificial Sequence
  Synthetic oligonucleotide; CTA chr11 5277079 5277100 5277096 5277101 +
actagctctatgcaggcttagc

SEQ ID NO: 92923 - DNA, 22 bp, Artificial Sequence
  Synthetic oligonucleotide; CTA chr11 5277083 5277104 5277100 5277105 +
gctctatgcaggcttagcactt

SEQ ID NO: 92924 - DNA, 22 bp, Artificial Sequence
  Synthetic oligonucleotide; CTC chr11 5277087 5277108 5277104 5277109 +
tatgcaggcttagcacttccag

SEQ ID NO: 92925 - DNA, 22 bp, Artificial Sequence
  Synthetic oligonucleotide; CTA chr11 5277089 5277110 5277106 5277111 +
tgcaggcttagcacttccagct

SEQ ID NO: 92926 - DNA, 22 bp, Artificial Sequence
  Synthetic oligonucleotide; CTT chr11 5277098 5277119 5277115 5277120 +
agcacttccagctctactccac

SEQ ID NO: 92927 - DNA, 22 bp, Artificial Sequence
  Synthetic oligonucleotide; TTA chr11 5277099 5277120 5277116 5277121 +
gcacttccagctctactccact

SEQ ID NO: 92928 - DNA, 22 bp, Artificial Sequence
  Synthetic oligonucleotide; CTT chr11 5277105 5277126 5277122 5277127 +
ccagctctactccactgatttc

SEQ ID NO: 92929 - DNA, 22 bp, Artificial Sequence
  Synthetic oligonucleotide; TTC chr11 5277106 5277127 5277123 5277128 +
cagctctactccactgatttct

SEQ ID NO: 92930 - DNA, 22 bp, Artificial Sequence
  Synthetic oligonucleotide; CTC chr11 5277112 5277133 5277129 5277134 +
tactccactgatttctttgtgt

SEQ ID NO: 92931 - DNA, 22 bp, Artificial Sequence
  Synthetic oligonucleotide; CTA chr11 5277114 5277135 5277131 5277136 +
ctccactgatttctttgtgtgt

SEQ ID NO: 92932 - DNA, 22 bp, Artificial Sequence
  Synthetic oligonucleotide; CTC chr11 5277117 5277138 5277134 5277139 +
cactgatttctttgtgtgtgca

SEQ ID NO: 92933 - DNA, 22 bp, Artificial Sequence
  Synthetic oligonucleotide; CTG chr11 5277122 5277143 5277139 5277144 +
atttctttgtgtgtgcatagca

SEQ ID NO: 92934 - DNA, 22 bp, Artificial Sequence
  Synthetic oligonucleotide; TTT chr11 5277126 5277147 5277143 5277148 +
ctttgtgtgtgcatagcagtgg

SEQ ID NO: 92935 - DNA, 22 bp, Artificial Sequence
  Synthetic oligonucleotide; TTC chr11 5277127 5277148 5277144 5277149 +
tttgtgtgtgcatagcagtgga

SEQ ID NO: 92936 - DNA, 22 bp, Artificial Sequence
  Synthetic oligonucleotide; CTT chr11 5277129 5277150 5277146 5277151 +
tgtgtgtgcatagcagtggatg

SEQ ID NO: 92937 - DNA, 22 bp, Artificial Sequence
  Synthetic oligonucleotide; TTT chr11 5277130 5277151 5277147 5277152 +
gtgtgtgcatagcagtggatgt

SEQ ID NO: 92938 - DNA, 22 bp, Artificial Sequence
  Synthetic oligonucleotide; TTG chr11 5277131 5277152 5277148 5277153 +
tgtgtgcatagcagtggatgtg

SEQ ID NO: 92939 - DNA, 22 bp, Artificial Sequence
  Synthetic oligonucleotide; CTT chr11 5277168 5277189 5277185 5277190 +
ttaattatagttgtatatgtgt

SEQ ID NO: 92940 - DNA, 22 bp, Artificial Sequence
  Synthetic oligonucleotide; TTT chr11 5277169 5277190 5277186 5277191 +
taattatagttgtatatgtgtt

SEQ ID NO: 92941 - DNA, 22 bp, Artificial Sequence
  Synthetic oligonucleotide; TTT chr11 5277170 5277191 5277187 5277192 +
aattatagttgtatatgtgttt

SEQ ID NO: 92942 - DNA, 22 bp, Artificial Sequence
  Synthetic oligonucleotide; TTA chr11 5277171 5277192 5277188 5277193 +
attatagttgtatatgtgtttg

SEQ ID NO: 92943 - DNA, 22 bp, Artificial Sequence
  Synthetic oligonucleotide; TTA chr11 5277175 5277196 5277192 5277197 +
tagttgtatatgtgtttgactg

SEQ ID NO: 92944 - DNA, 22 bp, Artificial Sequence
  Synthetic oligonucleotide; TTG chr11 5277181 5277202 5277198 5277203 +
tatatgtgtttgactgctcatt

SEQ ID NO: 92945 - DNA, 22 bp, Artificial Sequence
  Synthetic oligonucleotide; TTT chr11 5277192 5277213 5277209 5277214 +
gactgctcattcattcattcaa

SEQ ID NO: 92946 - DNA, 22 bp, Artificial Sequence
  Synthetic oligonucleotide; TTG chr11 5277193 5277214 5277210 5277215 +
actgctcattcattcattcaaa

SEQ ID NO: 92947 - DNA, 22 bp, Artificial Sequence
  Synthetic oligonucleotide; CTG chr11 5277197 5277218 5277214 5277219 +
ctcattcattcattcaaaattg

SEQ ID NO: 92948 - DNA, 22 bp, Artificial Sequence
  Synthetic oligonucleotide; CTC chr11 5277200 5277221 5277217 5277222 +
attcattcattcaaaattgtaa

SEQ ID NO: 92949 - DNA, 22 bp, Artificial Sequence
  Synthetic oligonucleotide; TTC chr11 5277204 5277225 5277221 5277226 +
attcattcaaaattgtaaaatt

SEQ ID NO: 92950 - DNA, 22 bp, Artificial Sequence
  Synthetic oligonucleotide; TTC chr11 5277208 5277229 5277225 5277230 +
attcaaaattgtaaaattgcta

SEQ ID NO: 92951 - DNA, 22 bp, Artificial Sequence
  Synthetic oligonucleotide; TTC chr11 5277212 5277233 5277229 5277234 +
aaaattgtaaaattgctaagaa

SEQ ID NO: 92952 - DNA, 22 bp, Artificial Sequence
  Synthetic oligonucleotide; TTG chr11 5277219 5277240 5277236 5277241 +
taaaattgctaagaatacagca

SEQ ID NO: 92953 - DNA, 22 bp, Artificial Sequence
  Synthetic oligonucleotide; TTG chr11 5277227 5277248 5277244 5277249 +
ctaagaatacagcacaaaaaca

SEQ ID NO: 92954 - DNA, 22 bp, Artificial Sequence
  Synthetic oligonucleotide; CTA chr11 5277230 5277251 5277247 5277252 +
agaatacagcacaaaaacagaa

SEQ ID NO: 92955 - DNA, 22 bp, Artificial Sequence
  Synthetic oligonucleotide; TTC chr11 5277268 5277289 5277285 5277290 +
ctgttttcatggacttgatagt

SEQ ID NO: 92956 - DNA, 22 bp, Artificial Sequence
  Synthetic oligonucleotide; CTG chr11 5277271 5277292 5277288 5277293 +
ttttcatggacttgatagtgga

SEQ ID NO: 92957 - DNA, 22 bp, Artificial Sequence
  Synthetic oligonucleotide; TTT chr11 5277274 5277295 5277291 5277296 +
tcatggacttgatagtggaaag

SEQ ID NO: 92958 - DNA, 22 bp, Artificial Sequence
  Synthetic oligonucleotide; TTT chr11 5277275 5277296 5277292 5277297 +
catggacttgatagtggaaaga

SEQ ID NO: 92959 - DNA, 22 bp, Artificial Sequence
  Synthetic oligonucleotide; TTC chr11 5277276 5277297 5277293 5277298 +
atggacttgatagtggaaagag

SEQ ID NO: 92960 - DNA, 22 bp, Artificial Sequence
  Synthetic oligonucleotide; CTT chr11 5277284 5277305 5277301 5277306 +
gatagtggaaagagcttgacat

SEQ ID NO: 92961 - DNA, 22 bp, Artificial Sequence
  Synthetic oligonucleotide; TTG chr11 5277285 5277306 5277302 5277307 +
atagtggaaagagcttgacatt

SEQ ID NO: 92962 - DNA, 22 bp, Artificial Sequence
  Synthetic oligonucleotide; CTT chr11 5277301 5277322 5277318 5277323 +
gacattaaataagcaaatgaaa

SEQ ID NO: 92963 - DNA, 22 bp, Artificial Sequence
  Synthetic oligonucleotide; TTG chr11 5277302 5277323 5277319 5277324 +
acattaaataagcaaatgaaac

SEQ ID NO: 92964 - DNA, 22 bp, Artificial Sequence
  Synthetic oligonucleotide; TTA chr11 5277308 5277329 5277325 5277330 +
aataagcaaatgaaacatgtta

SEQ ID NO: 92965 - DNA, 22 bp, Artificial Sequence
  Synthetic oligonucleotide; TTA chr11 5277330 5277351 5277347 5277352 +
tataccaatgagattaggtgct

SEQ ID NO: 92966 - DNA, 22 bp, Artificial Sequence
  Synthetic oligonucleotide; TTA chr11 5277346 5277367 5277363 5277368 +
ggtgctatggagaaaaaaaaaa

SEQ ID NO: 92967 - DNA, 22 bp, Artificial Sequence
  Synthetic oligonucleotide; CTA chr11 5277353 5277374 5277370 5277375 +
tggagaaaaaaaaaaaactgaa

SEQ ID NO: 92968 - DNA, 22 bp, Artificial Sequence
  Synthetic oligonucleotide; CTG chr11 5277373 5277394 5277390 5277395 +
aaatgaaggccagagtgtgatt

SEQ ID NO: 92969 - DNA, 22 bp, Artificial Sequence
  Synthetic oligonucleotide; TTA chr11 5277396 5277417 5277413 5277418 +
ggacagggtgaaagggtatcgc

SEQ ID NO: 92970 - DNA, 22 bp, Artificial Sequence
  Synthetic oligonucleotide; CTA chr11 5277420 5277441 5277437 5277442 +
ctttaagtagtatggcaggaaa

SEQ ID NO: 92971 - DNA, 22 bp, Artificial Sequence
  Synthetic oligonucleotide; CTT chr11 5277423 5277444 5277440 5277445 +
taagtagtatggcaggaaagtc

SEQ ID NO: 92972 - DNA, 22 bp, Artificial Sequence
  Synthetic oligonucleotide; TTT chr11 5277424 5277445 5277441 5277446 +
aagtagtatggcaggaaagtcc

SEQ ID NO: 92973 - DNA, 22 bp, Artificial Sequence
  Synthetic oligonucleotide; TTA chr11 5277425 5277446 5277442 5277447 +
agtagtatggcaggaaagtcct

SEQ ID NO: 92974 - DNA, 22 bp, Artificial Sequence
  Synthetic oligonucleotide; CTC chr11 5277448 5277469 5277465 5277470 +
actataaagttaacacctgaga

SEQ ID NO: 92975 - DNA, 22 bp, Artificial Sequence
  Synthetic oligonucleotide; CTA chr11 5277452 5277473 5277469 5277474 +
taaagttaacacctgagagagt

SEQ ID NO: 92976 - DNA, 22 bp, Artificial Sequence
  Synthetic oligonucleotide; TTA chr11 5277460 5277481 5277477 5277482 +
acacctgagagagtacccatag

SEQ ID NO: 92977 - DNA, 22 bp, Artificial Sequence
  Synthetic oligonucleotide; CTG chr11 5277467 5277488 5277484 5277489 +
agagagtacccatagatgatga

SEQ ID NO: 92978 - DNA, 22 bp, Artificial Sequence
  Synthetic oligonucleotide; TTT chr11 5277500 5277521 5277517 5277522 +
atatgaaactatgattaaatat

SEQ ID NO: 92979 - DNA, 22 bp, Artificial Sequence
  Synthetic oligonucleotide; TTA chr11 5277501 5277522 5277518 5277523 +
tatgaaactatgattaaatatt

SEQ ID NO: 92980 - DNA, 22 bp, Artificial Sequence
  Synthetic oligonucleotide; CTA chr11 5277511 5277532 5277528 5277533 +
tgattaaatatttagggcatag

SEQ ID NO: 92981 - DNA, 22 bp, Artificial Sequence
  Synthetic oligonucleotide; TTA chr11 5277517 5277538 5277534 5277539 +
aatatttagggcatagggaatg

SEQ ID NO: 92982 - DNA, 22 bp, Artificial Sequence
  Synthetic oligonucleotide; TTT chr11 5277524 5277545 5277541 5277546 +
agggcatagggaatggcaaatg

SEQ ID NO: 92983 - DNA, 22 bp, Artificial Sequence
  Synthetic oligonucleotide; TTA chr11 5277525 5277546 5277542 5277547 +
gggcatagggaatggcaaatgt

SEQ ID NO: 92984 - DNA, 22 bp, Artificial Sequence
  Synthetic oligonucleotide; CTA chr11 5277557 5277578 5277574 5277579 +
aagatgtaagatgcttagaatt

SEQ ID NO: 92985 - DNA, 22 bp, Artificial Sequence
  Synthetic oligonucleotide; CTT chr11 5277573 5277594 5277590 5277595 +
agaattttcaaggaatatcaat

SEQ ID NO: 92986 - DNA, 22 bp, Artificial Sequence
  Synthetic oligonucleotide; TTA chr11 5277574 5277595 5277591 5277596 +
gaattttcaaggaatatcaata

SEQ ID NO: 92987 - DNA, 22 bp, Artificial Sequence
  Synthetic oligonucleotide; TTT chr11 5277580 5277601 5277597 5277602 +
tcaaggaatatcaataaggcca

SEQ ID NO: 92988 - DNA, 22 bp, Artificial Sequence
  Synthetic oligonucleotide; TTT chr11 5277581 5277602 5277598 5277603 +
caaggaatatcaataaggccaa

SEQ ID NO: 92989 - DNA, 22 bp, Artificial Sequence
  Synthetic oligonucleotide; TTC chr11 5277582 5277603 5277599 5277604 +
aaggaatatcaataaggccaat

SEQ ID NO: 92990 - DNA, 22 bp, Artificial Sequence
  Synthetic oligonucleotide; TTC chr11 5277618 5277639 5277635 5277640 +
ggtgaaggggagaataaaagat

SEQ ID NO: 92991 - DNA, 22 bp, Artificial Sequence
  Synthetic oligonucleotide; CTA chr11 5277658 5277679 5277675 5277680 +
aattataaaatttgggacacta

SEQ ID NO: 92992 - DNA, 22 bp, Artificial Sequence
  Synthetic oligonucleotide; TTA chr11 5277663 5277684 5277680 5277685 +
taaaatttgggacactaataat

SEQ ID NO: 92993 - DNA, 22 bp, Artificial Sequence
  Synthetic oligonucleotide; TTT chr11 5277671 5277692 5277688 5277693 +
gggacactaataatacctacat

SEQ ID NO: 92994 - DNA, 22 bp, Artificial Sequence
  Synthetic oligonucleotide; TTG chr11 5277672 5277693 5277689 5277694 +
ggacactaataatacctacatc

SEQ ID NO: 92995 - DNA, 22 bp, Artificial Sequence
  Synthetic oligonucleotide; CTA chr11 5277680 5277701 5277697 5277702 +
ataatacctacatcatagagtt

SEQ ID NO: 92996 - DNA, 22 bp, Artificial Sequence
  Synthetic oligonucleotide; CTA chr11 5277690 5277711 5277707 5277712 +
catcatagagttgtaagaaaaa

SEQ ID NO: 92997 - DNA, 22 bp, Artificial Sequence
  Synthetic oligonucleotide; TTG chr11 5277703 5277724 5277720 5277725 +
taagaaaaaacactctacacac

SEQ ID NO: 92998 - DNA, 22 bp, Artificial Sequence
  Synthetic oligonucleotide; CTC chr11 5277718 5277739 5277735 5277740 +
tacacacatacacataaatata

SEQ ID NO: 92999 - DNA, 22 bp, Artificial Sequence
  Synthetic oligonucleotide; CTA chr11 5277720 5277741 5277737 5277742 +
cacacatacacataaatatata

SEQ ID NO: 93000 - DNA, 22 bp, Artificial Sequence
  Synthetic oligonucleotide; TTT chr11 5277747 5277768 5277764 5277769 +
atttatatgagagctatatata

SEQ ID NO: 93001 - DNA, 22 bp, Artificial Sequence
  Synthetic oligonucleotide; TTA chr11 5277748 5277769 5277765 5277770 +
tttatatgagagctatatatat

SEQ ID NO: 93002 - DNA, 22 bp, Artificial Sequence
  Synthetic oligonucleotide; TTT chr11 5277751 5277772 5277768 5277773 +
atatgagagctatatatatgta

SEQ ID NO: 93003 - DNA, 22 bp, Artificial Sequence
  Synthetic oligonucleotide; TTA chr11 5277752 5277773 5277769 5277774 +
tatgagagctatatatatgtat

SEQ ID NO: 93004 - DNA, 22 bp, Artificial Sequence
  Synthetic oligonucleotide; CTA chr11 5277763 5277784 5277780 5277785 +
tatatatgtatctgtaataaac

SEQ ID NO: 93005 - DNA, 22 bp, Artificial Sequence
  Synthetic oligonucleotide; CTG chr11 5277777 5277798 5277794 5277799 +
taataaacataatatatgcatg

SEQ ID NO: 93006 - DNA, 22 bp, Artificial Sequence
  Synthetic oligonucleotide; CTA chr11 5277807 5277828 5277824 5277829 +
ttgtagagaattgtaaggattt

SEQ ID NO: 93007 - DNA, 22 bp, Artificial Sequence
  Synthetic oligonucleotide; TTG chr11 5277810 5277831 5277827 5277832 +
tagagaattgtaaggatttggt

SEQ ID NO: 93008 - DNA, 22 bp, Artificial Sequence
  Synthetic oligonucleotide; TTG chr11 5277820 5277841 5277837 5277842 +
taaggatttggttttattataa

SEQ ID NO: 93009 - DNA, 22 bp, Artificial Sequence
  Synthetic oligonucleotide; TTT chr11 5277829 5277850 5277846 5277851 +
ggttttattataaatgatatag

SEQ ID NO: 93010 - DNA, 22 bp, Artificial Sequence
  Synthetic oligonucleotide; TTG chr11 5277830 5277851 5277847 5277852 +
gttttattataaatgatatagg

SEQ ID NO: 93011 - DNA, 22 bp, Artificial Sequence
  Synthetic oligonucleotide; TTT chr11 5277834 5277855 5277851 5277856 +
tattataaatgatataggaaac

SEQ ID NO: 93012 - DNA, 22 bp, Artificial Sequence
  Synthetic oligonucleotide; TTT chr11 5277835 5277856 5277852 5277857 +
attataaatgatataggaaact

SEQ ID NO: 93013 - DNA, 22 bp, Artificial Sequence
  Synthetic oligonucleotide; TTA chr11 5277836 5277857 5277853 5277858 +
ttataaatgatataggaaacta

SEQ ID NO: 93014 - DNA, 22 bp, Artificial Sequence
  Synthetic oligonucleotide; TTA chr11 5277839 5277860 5277856 5277861 +
taaatgatataggaaactatca

SEQ ID NO: 93015 - DNA, 22 bp, Artificial Sequence
  Synthetic oligonucleotide; CTA chr11 5277858 5277879 5277875 5277880 +
tcagaagactttgaacaaagag

SEQ ID NO: 93016 - DNA, 22 bp, Artificial Sequence
  Synthetic oligonucleotide; CTT chr11 5277869 5277890 5277886 5277891 +
tgaacaaagaggtgaccatata

SEQ ID NO: 93017 - DNA, 22 bp, Artificial Sequence
  Synthetic oligonucleotide; TTT chr11 5277870 5277891 5277887 5277892 +
gaacaaagaggtgaccatatat

SEQ ID NO: 93018 - DNA, 22 bp, Artificial Sequence
  Synthetic oligonucleotide; TTG chr11 5277871 5277892 5277888 5277893 +
aacaaagaggtgaccatatatg

SEQ ID NO: 93019 - DNA, 22 bp, Artificial Sequence
  Synthetic oligonucleotide; CTT chr11 5277897 5277918 5277914 5277919 +
acattttgaaaagactaatttg

SEQ ID NO: 93020 - DNA, 22 bp, Artificial Sequence
  Synthetic oligonucleotide; TTA chr11 5277898 5277919 5277915 5277920 +
cattttgaaaagactaatttgg

SEQ ID NO: 93021 - DNA, 22 bp, Artificial Sequence
  Synthetic oligonucleotide; TTT chr11 5277903 5277924 5277920 5277925 +
tgaaaagactaatttggatagt

SEQ ID NO: 93022 - DNA, 22 bp, Artificial Sequence
  Synthetic oligonucleotide; TTT chr11 5277904 5277925 5277921 5277926 +
gaaaagactaatttggatagta

SEQ ID NO: 93023 - DNA, 22 bp, Artificial Sequence
  Synthetic oligonucleotide; TTG chr11 5277905 5277926 5277922 5277927 +
aaaagactaatttggatagtat

SEQ ID NO: 93024 - DNA, 22 bp, Artificial Sequence
  Synthetic oligonucleotide; CTA chr11 5277914 5277935 5277931 5277936 +
atttggatagtatattgggaag

SEQ ID NO: 93025 - DNA, 22 bp, Artificial Sequence
  Synthetic oligonucleotide; TTT chr11 5277918 5277939 5277935 5277940 +
ggatagtatattgggaagaaat

SEQ ID NO: 93026 - DNA, 22 bp, Artificial Sequence
  Synthetic oligonucleotide; TTG chr11 5277919 5277940 5277936 5277941 +
gatagtatattgggaagaaatt

SEQ ID NO: 93027 - DNA, 22 bp, Artificial Sequence
  Synthetic oligonucleotide; TTG chr11 5277931 5277952 5277948 5277953 +
ggaagaaattgtagtggggcag

SEQ ID NO: 93028 - DNA, 22 bp, Artificial Sequence
  Synthetic oligonucleotide; TTG chr11 5277942 5277963 5277959 5277964 +
tagtggggcagtggtagaagca

SEQ ID NO: 93029 - DNA, 22 bp, Artificial Sequence
  Synthetic oligonucleotide; TTG chr11 5277973 5277994 5277990 5277995 +
ttatgagtcaacagctataatt

SEQ ID NO: 93030 - DNA, 22 bp, Artificial Sequence
  Synthetic oligonucleotide; TTA chr11 5277976 5277997 5277993 5277998 +
tgagtcaacagctataatttag

SEQ ID NO: 93031 - DNA, 22 bp, Artificial Sequence
  Synthetic oligonucleotide; CTA chr11 5277990 5278011 5278007 5278012 +
taatttaggtggtggtgacagt

SEQ ID NO: 93032 - DNA, 22 bp, Artificial Sequence
  Synthetic oligonucleotide; TTT chr11 5277996 5278017 5278013 5278018 +
aggtggtggtgacagtgactta

SEQ ID NO: 93033 - DNA, 22 bp, Artificial Sequence
  Synthetic oligonucleotide; TTA chr11 5277997 5278018 5278014 5278019 +
ggtggtggtgacagtgacttag

SEQ ID NO: 93034 - DNA, 22 bp, Artificial Sequence
  Synthetic oligonucleotide; CTT chr11 5278017 5278038 5278034 5278039 +
agaccagagtggtagcattgga

SEQ ID NO: 93035 - DNA, 22 bp, Artificial Sequence
  Synthetic oligonucleotide; TTA chr11 5278018 5278039 5278035 5278040 +
gaccagagtggtagcattggag

SEQ ID NO: 93036 - DNA, 22 bp, Artificial Sequence
  Synthetic oligonucleotide; TTG chr11 5278037 5278058 5278054 5278059 +
gaggtgaaggcaaggggtcagc

SEQ ID NO: 93037 - DNA, 22 bp, Artificial Sequence
  Synthetic oligonucleotide; CTC chr11 5278062 5278083 5278079 5278084 +
tgaaaacatcctttcacgaaaa

SEQ ID NO: 93038 - DNA, 22 bp, Artificial Sequence
  Synthetic oligonucleotide; CTG chr11 5278064 5278085 5278081 5278086 +
aaaacatcctttcacgaaaaac

SEQ ID NO: 93039 - DNA, 22 bp, Artificial Sequence
  Synthetic oligonucleotide; CTT chr11 5278075 5278096 5278092 5278097 +
tcacgaaaaaccaacaggattt

SEQ ID NO: 93040 - DNA, 22 bp, Artificial Sequence
  Synthetic oligonucleotide; TTT chr11 5278076 5278097 5278093 5278098 +
cacgaaaaaccaacaggatttt

SEQ ID NO: 93041 - DNA, 22 bp, Artificial Sequence
  Synthetic oligonucleotide; TTC chr11 5278077 5278098 5278094 5278099 +
acgaaaaaccaacaggattttc

SEQ ID NO: 93042 - DNA, 22 bp, Artificial Sequence
  Synthetic oligonucleotide; TTT chr11 5278097 5278118 5278114 5278119 +
tctgacagagaatatggaattg

SEQ ID NO: 93043 - DNA, 22 bp, Artificial Sequence
  Synthetic oligonucleotide; TTT chr11 5278098 5278119 5278115 5278120 +
ctgacagagaatatggaattgg

SEQ ID NO: 93044 - DNA, 22 bp, Artificial Sequence
  Synthetic oligonucleotide; TTC chr11 5278099 5278120 5278116 5278121 +
tgacagagaatatggaattggt

SEQ ID NO: 93045 - DNA, 22 bp, Artificial Sequence
  Synthetic oligonucleotide; CTG chr11 5278101 5278122 5278118 5278123 +
acagagaatatggaattggtgt

SEQ ID NO: 93046 - DNA, 22 bp, Artificial Sequence
  Synthetic oligonucleotide; TTG chr11 5278119 5278140 5278136 5278141 +
gtgtgtgtgtgtgttgcactca

SEQ ID NO: 93047 - DNA, 22 bp, Artificial Sequence
  Synthetic oligonucleotide; TTG chr11 5278135 5278156 5278152 5278157 +
cactcatgcacactctagtgca

SEQ ID NO: 93048 - DNA, 22 bp, Artificial Sequence
  Synthetic oligonucleotide; CTC chr11 5278140 5278161 5278157 5278162 +
atgcacactctagtgcatgcta

SEQ ID NO: 93049 - DNA, 22 bp, Artificial Sequence
  Synthetic oligonucleotide; CTC chr11 5278150 5278171 5278167 5278172 +
tagtgcatgctaatttctggct

SEQ ID NO: 93050 - DNA, 22 bp, Artificial Sequence
  Synthetic oligonucleotide; CTA chr11 5278152 5278173 5278169 5278174 +
gtgcatgctaatttctggctgt

SEQ ID NO: 93051 - DNA, 22 bp, Artificial Sequence
  Synthetic oligonucleotide; CTA chr11 5278162 5278183 5278179 5278184 +
atttctggctgtgagtatatgt

SEQ ID NO: 93052 - DNA, 22 bp, Artificial Sequence
  Synthetic oligonucleotide; TTT chr11 5278166 5278187 5278183 5278188 +
ctggctgtgagtatatgtcaga

SEQ ID NO: 93053 - DNA, 22 bp, Artificial Sequence
  Synthetic oligonucleotide; TTC chr11 5278167 5278188 5278184 5278189 +
tggctgtgagtatatgtcagag

SEQ ID NO: 93054 - DNA, 22 bp, Artificial Sequence
  Synthetic oligonucleotide; CTG chr11 5278169 5278190 5278186 5278191 +
gctgtgagtatatgtcagagta

SEQ ID NO: 93055 - DNA, 22 bp, Artificial Sequence
  Synthetic oligonucleotide; CTG chr11 5278173 5278194 5278190 5278195 +
tgagtatatgtcagagtaagga

SEQ ID NO: 93056 - DNA, 22 bp, Artificial Sequence
  Synthetic oligonucleotide; TTT chr11 5278198 5278219 5278215 5278220 +
tgaagctaggcaaagtgagtct

SEQ ID NO: 93057 - DNA, 22 bp, Artificial Sequence
  Synthetic oligonucleotide; TTT chr11 5278199 5278220 5278216 5278221 +
gaagctaggcaaagtgagtctt

SEQ ID NO: 93058 - DNA, 22 bp, Artificial Sequence
  Synthetic oligonucleotide; TTG chr11 5278200 5278221 5278217 5278222 +
aagctaggcaaagtgagtcttt

SEQ ID NO: 93059 - DNA, 22 bp, Artificial Sequence
  Synthetic oligonucleotide; CTA chr11 5278206 5278227 5278223 5278228 +
ggcaaagtgagtctttgggttg

SEQ ID NO: 93060 - DNA, 22 bp, Artificial Sequence
  Synthetic oligonucleotide; CTT chr11 5278221 5278242 5278238 5278243 +
tgggttgaattttgtcaaggtg

SEQ ID NO: 93061 - DNA, 22 bp, Artificial Sequence
  Synthetic oligonucleotide; TTT chr11 5278222 5278243 5278239 5278244 +
gggttgaattttgtcaaggtgt

SEQ ID NO: 93062 - DNA, 22 bp, Artificial Sequence
  Synthetic oligonucleotide; TTG chr11 5278223 5278244 5278240 5278245 +
ggttgaattttgtcaaggtgtt

SEQ ID NO: 93063 - DNA, 22 bp, Artificial Sequence
  Synthetic oligonucleotide; TTG chr11 5278228 5278249 5278245 5278250 +
aattttgtcaaggtgtttgttc

SEQ ID NO: 93064 - DNA, 22 bp, Artificial Sequence
  Synthetic oligonucleotide; TTT chr11 5278233 5278254 5278250 5278255 +
tgtcaaggtgtttgttcatcac

SEQ ID NO: 93065 - DNA, 22 bp, Artificial Sequence
  Synthetic oligonucleotide; TTT chr11 5278234 5278255 5278251 5278256 +
gtcaaggtgtttgttcatcaca

SEQ ID NO: 93066 - DNA, 22 bp, Artificial Sequence
  Synthetic oligonucleotide; TTG chr11 5278235 5278256 5278252 5278257 +
tcaaggtgtttgttcatcacag

SEQ ID NO: 93067 - DNA, 22 bp, Artificial Sequence
  Synthetic oligonucleotide; TTT chr11 5278246 5278267 5278263 5278268 +
gttcatcacagtctctacctca

SEQ ID NO: 93068 - DNA, 22 bp, Artificial Sequence
  Synthetic oligonucleotide; TTG chr11 5278247 5278268 5278264 5278269 +
ttcatcacagtctctacctcag

SEQ ID NO: 93069 - DNA, 22 bp, Artificial Sequence
  Synthetic oligonucleotide; TTC chr11 5278250 5278271 5278267 5278272 +
atcacagtctctacctcagaat

SEQ ID NO: 93070 - DNA, 22 bp, Artificial Sequence
  Synthetic oligonucleotide; CTC chr11 5278261 5278282 5278278 5278283 +
tacctcagaattggctttaaaa

SEQ ID NO: 93071 - DNA, 22 bp, Artificial Sequence
  Synthetic oligonucleotide; CTA chr11 5278263 5278284 5278280 5278285 +
cctcagaattggctttaaaatt

SEQ ID NO: 93072 - DNA, 22 bp, Artificial Sequence
  Synthetic oligonucleotide; CTC chr11 5278267 5278288 5278284 5278289 +
agaattggctttaaaattggaa

SEQ ID NO: 93073 - DNA, 22 bp, Artificial Sequence
  Synthetic oligonucleotide; TTG chr11 5278274 5278295 5278291 5278296 +
gctttaaaattggaaagctggg

SEQ ID NO: 93074 - DNA, 22 bp, Artificial Sequence
  Synthetic oligonucleotide; CTT chr11 5278278 5278299 5278295 5278300 +
taaaattggaaagctgggtggg

SEQ ID NO: 93075 - DNA, 22 bp, Artificial Sequence
  Synthetic oligonucleotide; TTT chr11 5278279 5278300 5278296 5278301 +
aaaattggaaagctgggtgggt

SEQ ID NO: 93076 - DNA, 22 bp, Artificial Sequence
  Synthetic oligonucleotide; TTA chr11 5278280 5278301 5278297 5278302 +
aaattggaaagctgggtgggtg

SEQ ID NO: 93077 - DNA, 22 bp, Artificial Sequence
  Synthetic oligonucleotide; TTG chr11 5278286 5278307 5278303 5278308 +
gaaagctgggtgggtggatatg

SEQ ID NO: 93078 - DNA, 22 bp, Artificial Sequence
  Synthetic oligonucleotide; CTG chr11 5278294 5278315 5278311 5278316 +
ggtgggtggatatggaaatgag

SEQ ID NO: 93079 - DNA, 22 bp, Artificial Sequence
  Synthetic oligonucleotide; CTC chr11 5278326 5278347 5278343 5278348 +
tggagcttgtctacacatcata

SEQ ID NO: 93080 - DNA, 22 bp, Artificial Sequence
  Synthetic oligonucleotide; CTG chr11 5278328 5278349 5278345 5278350 +
gagcttgtctacacatcatacc

SEQ ID NO: 93081 - DNA, 22 bp, Artificial Sequence
  Synthetic oligonucleotide; CTT chr11 5278334 5278355 5278351 5278356 +
gtctacacatcatacctttagc

SEQ ID NO: 93082 - DNA, 22 bp, Artificial Sequence
  Synthetic oligonucleotide; TTG chr11 5278335 5278356 5278352 5278357 +
tctacacatcatacctttagcc

SEQ ID NO: 93083 - DNA, 22 bp, Artificial Sequence
  Synthetic oligonucleotide; CTA chr11 5278339 5278360 5278356 5278361 +
cacatcatacctttagccaaag

SEQ ID NO: 93084 - DNA, 22 bp, Artificial Sequence
  Synthetic oligonucleotide; CTT chr11 5278352 5278373 5278369 5278374 +
tagccaaagtgacatcaagtat

SEQ ID NO: 93085 - DNA, 22 bp, Artificial Sequence
  Synthetic oligonucleotide; TTT chr11 5278353 5278374 5278370 5278375 +
agccaaagtgacatcaagtatt

SEQ ID NO: 93086 - DNA, 22 bp, Artificial Sequence
  Synthetic oligonucleotide; TTA chr11 5278354 5278375 5278371 5278376 +
gccaaagtgacatcaagtattt

SEQ ID NO: 93087 - DNA, 22 bp, Artificial Sequence
  Synthetic oligonucleotide; TTT chr11 5278376 5278397 5278393 5278398 +
cttggatgctgaccagaggctt

SEQ ID NO: 93088 - DNA, 22 bp, Artificial Sequence
  Synthetic oligonucleotide; TTC chr11 5278377 5278398 5278394 5278399 +
ttggatgctgaccagaggcttc

SEQ ID NO: 93089 - DNA, 22 bp, Artificial Sequence
  Synthetic oligonucleotide; CTT chr11 5278379 5278400 5278396 5278401 +
ggatgctgaccagaggcttctg

SEQ ID NO: 93090 - DNA, 22 bp, Artificial Sequence
  Synthetic oligonucleotide; TTG chr11 5278380 5278401 5278397 5278402 +
gatgctgaccagaggcttctga

SEQ ID NO: 93091 - DNA, 22 bp, Artificial Sequence
  Synthetic oligonucleotide; CTG chr11 5278387 5278408 5278404 5278409 +
accagaggcttctgagccaggc

SEQ ID NO: 93092 - DNA, 22 bp, Artificial Sequence
  Synthetic oligonucleotide; CTT chr11 5278398 5278419 5278415 5278420 +
ctgagccaggcccctctagctg

SEQ ID NO: 93093 - DNA, 22 bp, Artificial Sequence
  Synthetic oligonucleotide; TTC chr11 5278399 5278420 5278416 5278421 +
tgagccaggcccctctagctga

SEQ ID NO: 93094 - DNA, 22 bp, Artificial Sequence
  Synthetic oligonucleotide; CTG chr11 5278401 5278422 5278418 5278423 +
agccaggcccctctagctgaag

SEQ ID NO: 93095 - DNA, 22 bp, Artificial Sequence
  Synthetic oligonucleotide; CTC chr11 5278414 5278435 5278431 5278436 +
tagctgaaggaagttcacagtt

SEQ ID NO: 93096 - DNA, 22 bp, Artificial Sequence
  Synthetic oligonucleotide; CTA chr11 5278416 5278437 5278433 5278438 +
gctgaaggaagttcacagtttc

SEQ ID NO: 93097 - DNA, 22 bp, Artificial Sequence
  Synthetic oligonucleotide; CTG chr11 5278420 5278441 5278437 5278442 +
aaggaagttcacagtttcttta

SEQ ID NO: 93098 - DNA, 22 bp, Artificial Sequence
  Synthetic oligonucleotide; TTC chr11 5278430 5278451 5278447 5278452 +
acagtttctttaaggagggaaa

SEQ ID NO: 93099 - DNA, 22 bp, Artificial Sequence
  Synthetic oligonucleotide; TTT chr11 5278437 5278458 5278454 5278459 +
ctttaaggagggaaaatggtag

SEQ ID NO: 93100 - DNA, 22 bp, Artificial Sequence
  Synthetic oligonucleotide; TTC chr11 5278438 5278459 5278455 5278460 +
tttaaggagggaaaatggtaga

SEQ ID NO: 93101 - DNA, 22 bp, Artificial Sequence
  Synthetic oligonucleotide; CTT chr11 5278440 5278461 5278457 5278462 +
taaggagggaaaatggtagata

SEQ ID NO: 93102 - DNA, 22 bp, Artificial Sequence
  Synthetic oligonucleotide; TTT chr11 5278441 5278462 5278458 5278463 +
aaggagggaaaatggtagataa

SEQ ID NO: 93103 - DNA, 22 bp, Artificial Sequence
  Synthetic oligonucleotide; TTA chr11 5278442 5278463 5278459 5278464 +
aggagggaaaatggtagataag

SEQ ID NO: 93104 - DNA, 22 bp, Artificial Sequence
  Synthetic oligonucleotide; TTC chr11 5278488 5278509 5278505 5278510 +
tgttcggtcagggaatttgatg

SEQ ID NO: 93105 - DNA, 22 bp, Artificial Sequence
  Synthetic oligonucleotide; CTG chr11 5278490 5278511 5278507 5278512 +
ttcggtcagggaatttgatggg

SEQ ID NO: 93106 - DNA, 22 bp, Artificial Sequence
  Synthetic oligonucleotide; TTC chr11 5278493 5278514 5278510 5278515 +
ggtcagggaatttgatgggttt

SEQ ID NO: 93107 - DNA, 22 bp, Artificial Sequence
  Synthetic oligonucleotide; TTT chr11 5278506 5278527 5278523 5278528 +
gatgggttttgtttgtttgttt

SEQ ID NO: 93108 - DNA, 22 bp, Artificial Sequence
  Synthetic oligonucleotide; TTG chr11 5278507 5278528 5278524 5278529 +
atgggttttgtttgtttgtttg

SEQ ID NO: 93109 - DNA, 22 bp, Artificial Sequence
  Synthetic oligonucleotide; TTT chr11 5278515 5278536 5278532 5278537 +
tgtttgtttgtttgtttgtttg

SEQ ID NO: 93110 - DNA, 22 bp, Artificial Sequence
  Synthetic oligonucleotide; TTT chr11 5278516 5278537 5278533 5278538 +
gtttgtttgtttgtttgtttgt

SEQ ID NO: 93111 - DNA, 22 bp, Artificial Sequence
  Synthetic oligonucleotide; TTG chr11 5278517 5278538 5278534 5278539 +
tttgtttgtttgtttgtttgtt

SEQ ID NO: 93112 - DNA, 22 bp, Artificial Sequence
  Synthetic oligonucleotide; TTT chr11 5278520 5278541 5278537 5278542 +
gtttgtttgtttgtttgttttc

SEQ ID NO: 93113 - DNA, 22 bp, Artificial Sequence
  Synthetic oligonucleotide; TTG chr11 5278521 5278542 5278538 5278543 +
tttgtttgtttgtttgttttcg

SEQ ID NO: 93114 - DNA, 22 bp, Artificial Sequence
  Synthetic oligonucleotide; TTT chr11 5278524 5278545 5278541 5278546 +
gtttgtttgtttgttttcgttt

SEQ ID NO: 93115 - DNA, 22 bp, Artificial Sequence
  Synthetic oligonucleotide; TTG chr11 5278525 5278546 5278542 5278547 +
tttgtttgtttgttttcgtttt

SEQ ID NO: 93116 - DNA, 22 bp, Artificial Sequence
  Synthetic oligonucleotide; TTT chr11 5278528 5278549 5278545 5278550 +
gtttgtttgttttcgtttttct

SEQ ID NO: 93117 - DNA, 22 bp, Artificial Sequence
  Synthetic oligonucleotide; TTG chr11 5278529 5278550 5278546 5278551 +
tttgtttgttttcgtttttctt

SEQ ID NO: 93118 - DNA, 22 bp, Artificial Sequence
  Synthetic oligonucleotide; TTT chr11 5278532 5278553 5278549 5278554 +
gtttgttttcgtttttctttag

SEQ ID NO: 93119 - DNA, 22 bp, Artificial Sequence
  Synthetic oligonucleotide; TTG chr11 5278533 5278554 5278550 5278555 +
tttgttttcgtttttctttaga

SEQ ID NO: 93120 - DNA, 22 bp, Artificial Sequence
  Synthetic oligonucleotide; TTT chr11 5278536 5278557 5278553 5278558 +
gttttcgtttttctttagacag

SEQ ID NO: 93121 - DNA, 22 bp, Artificial Sequence
  Synthetic oligonucleotide; TTG chr11 5278537 5278558 5278554 5278559 +
ttttcgtttttctttagacaga

SEQ ID NO: 93122 - DNA, 22 bp, Artificial Sequence
  Synthetic oligonucleotide; TTT chr11 5278540 5278561 5278557 5278562 +
tcgtttttctttagacagagtc

SEQ ID NO: 93123 - DNA, 22 bp, Artificial Sequence
  Synthetic oligonucleotide; TTT chr11 5278541 5278562 5278558 5278563 +
cgtttttctttagacagagtct

SEQ ID NO: 93124 - DNA, 22 bp, Artificial Sequence
  Synthetic oligonucleotide; TTC chr11 5278542 5278563 5278559 5278564 +
gtttttctttagacagagtctc

SEQ ID NO: 93125 - DNA, 22 bp, Artificial Sequence
  Synthetic oligonucleotide; TTT chr11 5278546 5278567 5278563 5278568 +
ttctttagacagagtctcgctc

SEQ ID NO: 93126 - DNA, 22 bp, Artificial Sequence
  Synthetic oligonucleotide; TTT chr11 5278547 5278568 5278564 5278569 +
tctttagacagagtctcgctct

SEQ ID NO: 93127 - DNA, 22 bp, Artificial Sequence
  Synthetic oligonucleotide; TTT chr11 5278548 5278569 5278565 5278570 +
ctttagacagagtctcgctctg

SEQ ID NO: 93128 - DNA, 22 bp, Artificial Sequence
  Synthetic oligonucleotide; TTC chr11 5278549 5278570 5278566 5278571 +
tttagacagagtctcgctctgg

SEQ ID NO: 93129 - DNA, 22 bp, Artificial Sequence
  Synthetic oligonucleotide; CTT chr11 5278551 5278572 5278568 5278573 +
tagacagagtctcgctctggag

SEQ ID NO: 93130 - DNA, 22 bp, Artificial Sequence
  Synthetic oligonucleotide; TTT chr11 5278552 5278573 5278569 5278574 +
agacagagtctcgctctggagg

SEQ ID NO: 93131 - DNA, 22 bp, Artificial Sequence
  Synthetic oligonucleotide; TTA chr11 5278553 5278574 5278570 5278575 +
gacagagtctcgctctggaggc

SEQ ID NO: 93132 - DNA, 22 bp, Artificial Sequence
  Synthetic oligonucleotide; CTC chr11 5278564 5278585 5278581 5278586 +
gctctggaggctggagtgcaat

SEQ ID NO: 93133 - DNA, 22 bp, Artificial Sequence
  Synthetic oligonucleotide; CTC chr11 5278568 5278589 5278585 5278590 +
tggaggctggagtgcaatggca

SEQ ID NO: 93134 - DNA, 22 bp, Artificial Sequence
  Synthetic oligonucleotide; CTG chr11 5278570 5278591 5278587 5278592 +
gaggctggagtgcaatggcatg

SEQ ID NO: 93135 - DNA, 22 bp, Artificial Sequence
  Synthetic oligonucleotide; CTG chr11 5278577 5278598 5278594 5278599 +
gagtgcaatggcatgatctctg

SEQ ID NO: 93136 - DNA, 22 bp, Artificial Sequence
  Synthetic oligonucleotide; CTC chr11 5278597 5278618 5278614 5278619 +
tgctcagtgcaaactccacctc

SEQ ID NO: 93137 - DNA, 22 bp, Artificial Sequence
  Synthetic oligonucleotide; CTG chr11 5278599 5278620 5278616 5278621 +
ctcagtgcaaactccacctccc

SEQ ID NO: 93138 - DNA, 22 bp, Artificial Sequence
  Synthetic oligonucleotide; CTC chr11 5278602 5278623 5278619 5278624 +
agtgcaaactccacctccccgg

SEQ ID NO: 93139 - DNA, 22 bp, Artificial Sequence
  Synthetic oligonucleotide; CTC chr11 5278613 5278634 5278630 5278635 +
cacctccccggttcaagcgatt

SEQ ID NO: 93140 - DNA, 22 bp, Artificial Sequence
  Synthetic oligonucleotide; CTC chr11 5278619 5278640 5278636 5278641 +
cccggttcaagcgattctcctg

SEQ ID NO: 93141 - DNA, 22 bp, Artificial Sequence
  Synthetic oligonucleotide; TTC chr11 5278627 5278648 5278644 5278649 +
aagcgattctcctgcctcagcc

SEQ ID NO: 93142 - DNA, 22 bp, Artificial Sequence
  Synthetic oligonucleotide; TTC chr11 5278636 5278657 5278653 5278658 +
tcctgcctcagcctcccaagta

SEQ ID NO: 93143 - DNA, 22 bp, Artificial Sequence
  Synthetic oligonucleotide; CTC chr11 5278638 5278659 5278655 5278660 +
ctgcctcagcctcccaagtagt

SEQ ID NO: 93144 - DNA, 22 bp, Artificial Sequence
  Synthetic oligonucleotide; CTG chr11 5278641 5278662 5278658 5278663 +
cctcagcctcccaagtagttgg

SEQ ID NO: 93145 - DNA, 22 bp, Artificial Sequence
  Synthetic oligonucleotide; CTC chr11 5278645 5278666 5278662 5278667 +
agcctcccaagtagttggatta

SEQ ID NO: 93146 - DNA, 22 bp, Artificial Sequence
  Synthetic oligonucleotide; CTC chr11 5278651 5278672 5278668 5278673 +
ccaagtagttggattacaggct

SEQ ID NO: 93147 - DNA, 22 bp, Artificial Sequence
  Synthetic oligonucleotide; TTG chr11 5278662 5278683 5278679 5278684 +
gattacaggctcccgtcaccac

SEQ ID NO: 93148 - DNA, 22 bp, Artificial Sequence
  Synthetic oligonucleotide; TTA chr11 5278667 5278688 5278684 5278689 +
caggctcccgtcaccacgtcca

SEQ ID NO: 93149 - DNA, 22 bp, Artificial Sequence
  Synthetic oligonucleotide; CTC chr11 5278674 5278695 5278691 5278696 +
ccgtcaccacgtccagctaatt

SEQ ID NO: 93150 - DNA, 22 bp, Artificial Sequence
  Synthetic oligonucleotide; CTA chr11 5278693 5278714 5278710 5278715 +
atttttatatttttaagcagag

SEQ ID NO: 93151 - DNA, 22 bp, Artificial Sequence
  Synthetic oligonucleotide; TTT chr11 5278697 5278718 5278714 5278719 +
ttatatttttaagcagagacca

SEQ ID NO: 93152 - DNA, 22 bp, Artificial Sequence
  Synthetic oligonucleotide; TTT chr11 5278698 5278719 5278715 5278720 +
tatatttttaagcagagaccag

SEQ ID NO: 93153 - DNA, 22 bp, Artificial Sequence
  Synthetic oligonucleotide; TTT chr11 5278699 5278720 5278716 5278721 +
atatttttaagcagagaccagg

SEQ ID NO: 93154 - DNA, 22 bp, Artificial Sequence
  Synthetic oligonucleotide; TTA chr11 5278700 5278721 5278717 5278722 +
tatttttaagcagagaccaggt

SEQ ID NO: 93155 - DNA, 22 bp, Artificial Sequence
  Synthetic oligonucleotide; TTT chr11 5278705 5278726 5278722 5278727 +
ttaagcagagaccaggtttcac

SEQ ID NO: 93156 - DNA, 22 bp, Artificial Sequence
  Synthetic oligonucleotide; TTT chr11 5278706 5278727 5278723 5278728 +
taagcagagaccaggtttcact

SEQ ID NO: 93157 - DNA, 22 bp, Artificial Sequence
  Synthetic oligonucleotide; TTT chr11 5278707 5278728 5278724 5278729 +
aagcagagaccaggtttcacta

SEQ ID NO: 93158 - DNA, 22 bp, Artificial Sequence
  Synthetic oligonucleotide; TTA chr11 5278708 5278729 5278725 5278730 +
agcagagaccaggtttcactat

SEQ ID NO: 93159 - DNA, 22 bp, Artificial Sequence
  Synthetic oligonucleotide; TTT chr11 5278724 5278745 5278741 5278746 +
cactatgttggctgggctggtg

SEQ ID NO: 93160 - DNA, 22 bp, Artificial Sequence
  Synthetic oligonucleotide; TTC chr11 5278725 5278746 5278742 5278747 +
actatgttggctgggctggtgt

SEQ ID NO: 93161 - DNA, 22 bp, Artificial Sequence
  Synthetic oligonucleotide; CTA chr11 5278729 5278750 5278746 5278751 +
tgttggctgggctggtgtccaa

SEQ ID NO: 93162 - DNA, 22 bp, Artificial Sequence
  Synthetic oligonucleotide; TTG chr11 5278734 5278755 5278751 5278756 +
gctgggctggtgtccaactcct

SEQ ID NO: 93163 - DNA, 22 bp, Artificial Sequence
  Synthetic oligonucleotide; CTG chr11 5278738 5278759 5278755 5278760 +
ggctggtgtccaactcctgacc

SEQ ID NO: 93164 - DNA, 22 bp, Artificial Sequence
  Synthetic oligonucleotide; CTG chr11 5278743 5278764 5278760 5278765 +
gtgtccaactcctgacctcaag

SEQ ID NO: 93165 - DNA, 22 bp, Artificial Sequence
  Synthetic oligonucleotide; CTC chr11 5278754 5278775 5278771 5278776 +
ctgacctcaagtgatctgccca

SEQ ID NO: 93166 - DNA, 22 bp, Artificial Sequence
  Synthetic oligonucleotide; CTG chr11 5278757 5278778 5278774 5278779 +
acctcaagtgatctgcccacct

SEQ ID NO: 93167 - DNA, 22 bp, Artificial Sequence
  Synthetic oligonucleotide; CTC chr11 5278762 5278783 5278779 5278784 +
aagtgatctgcccaccttggcg

SEQ ID NO: 93168 - DNA, 22 bp, Artificial Sequence
  Synthetic oligonucleotide; CTG chr11 5278772 5278793 5278789 5278794 +
cccaccttggcgtcccaaactg

SEQ ID NO: 93169 - DNA, 22 bp, Artificial Sequence
  Synthetic oligonucleotide; CTT chr11 5278780 5278801 5278797 5278802 +
ggcgtcccaaactgctgtgatt

SEQ ID NO: 93170 - DNA, 22 bp, Artificial Sequence
  Synthetic oligonucleotide; TTG chr11 5278781 5278802 5278798 5278803 +
gcgtcccaaactgctgtgatta

SEQ ID NO: 93171 - DNA, 22 bp, Artificial Sequence
  Synthetic oligonucleotide; CTG chr11 5278794 5278815 5278811 5278816 +
ctgtgattacaggagtgagcca

SEQ ID NO: 93172 - DNA, 22 bp, Artificial Sequence
  Synthetic oligonucleotide; CTG chr11 5278797 5278818 5278814 5278819 +
tgattacaggagtgagccaccg

SEQ ID NO: 93173 - DNA, 22 bp, Artificial Sequence
  Synthetic oligonucleotide; TTA chr11 5278803 5278824 5278820 5278825 +
caggagtgagccaccgcacctc

SEQ ID NO: 93174 - DNA, 22 bp, Artificial Sequence
  Synthetic oligonucleotide; CTC chr11 5278825 5278846 5278842 5278847 +
aaggaatttgatgtttaggctg

SEQ ID NO: 93175 - DNA, 22 bp, Artificial Sequence
  Synthetic oligonucleotide; TTT chr11 5278834 5278855 5278851 5278856 +
gatgtttaggctgtgacctctg

SEQ ID NO: 93176 - DNA, 22 bp, Artificial Sequence
  Synthetic oligonucleotide; TTG chr11 5278835 5278856 5278852 5278857 +
atgtttaggctgtgacctctgc

SEQ ID NO: 93177 - DNA, 22 bp, Artificial Sequence
  Synthetic oligonucleotide; TTT chr11 5278841 5278862 5278858 5278863 +
aggctgtgacctctgcactagg

SEQ ID NO: 93178 - DNA, 22 bp, Artificial Sequence
  Synthetic oligonucleotide; TTA chr11 5278842 5278863 5278859 5278864 +
ggctgtgacctctgcactagga

SEQ ID NO: 93179 - DNA, 22 bp, Artificial Sequence
  Synthetic oligonucleotide; CTG chr11 5278847 5278868 5278864 5278869 +
tgacctctgcactaggaatgga

SEQ ID NO: 93180 - DNA, 22 bp, Artificial Sequence
  Synthetic oligonucleotide; CTC chr11 5278854 5278875 5278871 5278876 +
tgcactaggaatggaaggttag

SEQ ID NO: 93181 - DNA, 22 bp, Artificial Sequence
  Synthetic oligonucleotide; CTG chr11 5278856 5278877 5278873 5278878 +
cactaggaatggaaggttagcc

SEQ ID NO: 93182 - DNA, 22 bp, Artificial Sequence
  Synthetic oligonucleotide; CTA chr11 5278861 5278882 5278878 5278883 +
ggaatggaaggttagccactcc

SEQ ID NO: 93183 - DNA, 22 bp, Artificial Sequence
  Synthetic oligonucleotide; TTA chr11 5278875 5278896 5278892 5278897 +
gccactcccaccccacccttcg

SEQ ID NO: 93184 - DNA, 22 bp, Artificial Sequence
  Synthetic oligonucleotide; CTC chr11 5278882 5278903 5278899 5278904 +
ccaccccacccttcgtcctgca

SEQ ID NO: 93185 - DNA, 22 bp, Artificial Sequence
  Synthetic oligonucleotide; CTT chr11 5278895 5278916 5278912 5278917 +
cgtcctgcaagtacccaatcac

SEQ ID NO: 93186 - DNA, 22 bp, Artificial Sequence
  Synthetic oligonucleotide; TTC chr11 5278896 5278917 5278913 5278918 +
gtcctgcaagtacccaatcaca

SEQ ID NO: 93187 - DNA, 22 bp, Artificial Sequence
  Synthetic oligonucleotide; CTG chr11 5278902 5278923 5278919 5278924 +
caagtacccaatcacactgcag

SEQ ID NO: 93188 - DNA, 22 bp, Artificial Sequence
  Synthetic oligonucleotide; CTG chr11 5278921 5278942 5278938 5278943 +
cagagccacacctgccttcctt

SEQ ID NO: 93189 - DNA, 22 bp, Artificial Sequence
  Synthetic oligonucleotide; CTG chr11 5278935 5278956 5278952 5278957 +
ccttccttagaggcgtgcctcc

SEQ ID NO: 93190 - DNA, 22 bp, Artificial Sequence
  Synthetic oligonucleotide; CTT chr11 5278939 5278960 5278956 5278961 +
ccttagaggcgtgcctccatcc

SEQ ID NO: 93191 - DNA, 22 bp, Artificial Sequence
  Synthetic oligonucleotide; TTC chr11 5278940 5278961 5278957 5278962 +
cttagaggcgtgcctccatccc

SEQ ID NO: 93192 - DNA, 22 bp, Artificial Sequence
  Synthetic oligonucleotide; CTT chr11 5278943 5278964 5278960 5278965 +
agaggcgtgcctccatccctga

SEQ ID NO: 93193 - DNA, 22 bp, Artificial Sequence
  Synthetic oligonucleotide; TTA chr11 5278944 5278965 5278961 5278966 +
gaggcgtgcctccatccctgat

SEQ ID NO: 93194 - DNA, 22 bp, Artificial Sequence
  Synthetic oligonucleotide; CTC chr11 5278956 5278977 5278973 5278978 +
catccctgatgagtttttcctc

SEQ ID NO: 93195 - DNA, 22 bp, Artificial Sequence
  Synthetic oligonucleotide; CTG chr11 5278964 5278985 5278981 5278986 +
atgagtttttcctccatgtgta

SEQ ID NO: 93196 - DNA, 22 bp, Artificial Sequence
  Synthetic oligonucleotide; TTT chr11 5278972 5278993 5278989 5278994 +
ttcctccatgtgtagaattgaa

SEQ ID NO: 93197 - DNA, 22 bp, Artificial Sequence
  Synthetic oligonucleotide; TTT chr11 5278973 5278994 5278990 5278995 +
tcctccatgtgtagaattgaat

SEQ ID NO: 93198 - DNA, 22 bp, Artificial Sequence
  Synthetic oligonucleotide; TTT chr11 5278974 5278995 5278991 5278996 +
cctccatgtgtagaattgaata

SEQ ID NO: 93199 - DNA, 22 bp, Artificial Sequence
  Synthetic oligonucleotide; TTC chr11 5278975 5278996 5278992 5278997 +
ctccatgtgtagaattgaataa

SEQ ID NO: 93200 - DNA, 22 bp, Artificial Sequence
  Synthetic oligonucleotide; CTC chr11 5278978 5278999 5278995 5279000 +
catgtgtagaattgaataagaa

SEQ ID NO: 93201 - DNA, 22 bp, Artificial Sequence
  Synthetic oligonucleotide; TTG chr11 5278992 5279013 5279009 5279014 +
aataagaaggatagaattcaat

SEQ ID NO: 93202 - DNA, 22 bp, Artificial Sequence
  Synthetic oligonucleotide; TTC chr11 5279011 5279032 5279028 5279033 +
aatttaacaagctttgagtact

SEQ ID NO: 93203 - DNA, 22 bp, Artificial Sequence
  Synthetic oligonucleotide; TTT chr11 5279016 5279037 5279033 5279038 +
aacaagctttgagtacttccta

SEQ ID NO: 93204 - DNA, 22 bp, Artificial Sequence
  Synthetic oligonucleotide; TTA chr11 5279017 5279038 5279034 5279039 +
acaagctttgagtacttcctat

SEQ ID NO: 93205 - DNA, 22 bp, Artificial Sequence
  Synthetic oligonucleotide; CTT chr11 5279025 5279046 5279042 5279047 +
tgagtacttcctatagcctagg

SEQ ID NO: 93206 - DNA, 22 bp, Artificial Sequence
  Synthetic oligonucleotide; TTT chr11 5279026 5279047 5279043 5279048 +
gagtacttcctatagcctaggc

SEQ ID NO: 93207 - DNA, 22 bp, Artificial Sequence
  Synthetic oligonucleotide; TTG chr11 5279027 5279048 5279044 5279049 +
agtacttcctatagcctaggca

SEQ ID NO: 93208 - DNA, 22 bp, Artificial Sequence
  Synthetic oligonucleotide; CTT chr11 5279034 5279055 5279051 5279056 +
cctatagcctaggcattgtgct

SEQ ID NO: 93209 - DNA, 22 bp, Artificial Sequence
  Synthetic oligonucleotide; TTC chr11 5279035 5279056 5279052 5279057 +
ctatagcctaggcattgtgctg

SEQ ID NO: 93210 - DNA, 22 bp, Artificial Sequence
  Synthetic oligonucleotide; CTA chr11 5279038 5279059 5279055 5279060 +
tagcctaggcattgtgctgaca

SEQ ID NO: 93211 - DNA, 22 bp, Artificial Sequence
  Synthetic oligonucleotide; CTA chr11 5279045 5279066 5279062 5279067 +
ggcattgtgctgacaactatgt

SEQ ID NO: 93212 - DNA, 22 bp, Artificial Sequence
  Synthetic oligonucleotide; TTG chr11 5279052 5279073 5279069 5279074 +
tgctgacaactatgttagagag

SEQ ID NO: 93213 - DNA, 22 bp, Artificial Sequence
  Synthetic oligonucleotide; CTG chr11 5279057 5279078 5279074 5279079 +
acaactatgttagagagagaaa

SEQ ID NO: 93214 - DNA, 22 bp, Artificial Sequence
  Synthetic oligonucleotide; CTA chr11 5279064 5279085 5279081 5279086 +
tgttagagagagaaatagacaa

SEQ ID NO: 93215 - DNA, 22 bp, Artificial Sequence
  Synthetic oligonucleotide; TTA chr11 5279069 5279090 5279086 5279091 +
gagagagaaatagacaagctat

SEQ ID NO: 93216 - DNA, 22 bp, Artificial Sequence
  Synthetic oligonucleotide; CTA chr11 5279090 5279111 5279107 5279112 +
taaacttttcctcaggaccatc

SEQ ID NO: 93217 - DNA, 22 bp, Artificial Sequence
  Synthetic oligonucleotide; CTT chr11 5279097 5279118 5279114 5279119 +
ttcctcaggaccatctacataa

SEQ ID NO: 93218 - DNA, 22 bp, Artificial Sequence
  Synthetic oligonucleotide; TTT chr11 5279098 5279119 5279115 5279120 +
tcctcaggaccatctacataat

SEQ ID NO: 93219 - DNA, 22 bp, Artificial Sequence
  Synthetic oligonucleotide; TTT chr11 5279099 5279120 5279116 5279121 +
cctcaggaccatctacataatt

SEQ ID NO: 93220 - DNA, 22 bp, Artificial Sequence
  Synthetic oligonucleotide; TTC chr11 5279100 5279121 5279117 5279122 +
ctcaggaccatctacataattt

SEQ ID NO: 93221 - DNA, 22 bp, Artificial Sequence
  Synthetic oligonucleotide; CTC chr11 5279103 5279124 5279120 5279125 +
aggaccatctacataatttcta

SEQ ID NO: 93222 - DNA, 22 bp, Artificial Sequence
  Synthetic oligonucleotide; CTA chr11 5279114 5279135 5279131 5279136 +
cataatttctaggcccaatata

SEQ ID NO: 93223 - DNA, 22 bp, Artificial Sequence
  Synthetic oligonucleotide; TTT chr11 5279122 5279143 5279139 5279144 +
ctaggcccaatataaaatgaaa

SEQ ID NO: 93224 - DNA, 22 bp, Artificial Sequence
  Synthetic oligonucleotide; TTC chr11 5279123 5279144 5279140 5279145 +
taggcccaatataaaatgaaaa

SEQ ID NO: 93225 - DNA, 22 bp, Artificial Sequence
  Synthetic oligonucleotide; CTA chr11 5279125 5279146 5279142 5279147 +
ggcccaatataaaatgaaaatg

SEQ ID NO: 93226 - DNA, 22 bp, Artificial Sequence
  Synthetic oligonucleotide; CTT chr11 5279158 5279179 5279175 5279180 +
tgtcaaaaattaaggatttcat

SEQ ID NO: 93227 - DNA, 22 bp, Artificial Sequence
  Synthetic oligonucleotide; TTT chr11 5279159 5279180 5279176 5279181 +
gtcaaaaattaaggatttcatg

SEQ ID NO: 93228 - DNA, 22 bp, Artificial Sequence
  Synthetic oligonucleotide; TTG chr11 5279160 5279181 5279177 5279182 +
tcaaaaattaaggatttcatgt

SEQ ID NO: 93229 - DNA, 22 bp, Artificial Sequence
  Synthetic oligonucleotide; TTA chr11 5279170 5279191 5279187 5279192 +
aggatttcatgtcaggaacagc

SEQ ID NO: 93230 - DNA, 22 bp, Artificial Sequence
  Synthetic oligonucleotide; TTT chr11 5279177 5279198 5279194 5279199 +
catgtcaggaacagcaaggatg

SEQ ID NO: 93231 - DNA, 22 bp, Artificial Sequence
  Synthetic oligonucleotide; TTC chr11 5279178 5279199 5279195 5279200 +
atgtcaggaacagcaaggatgt

SEQ ID NO: 93232 - DNA, 22 bp, Artificial Sequence
  Synthetic oligonucleotide; TTA chr11 5279202 5279223 5279219 5279224 +
aaccaagcatggggccatcaag

SEQ ID NO: 93233 - DNA, 22 bp, Artificial Sequence
  Synthetic oligonucleotide; CTA chr11 5279227 5279248 5279244 5279249 +
tatctgctattcatgatacgaa

SEQ ID NO: 93234 - DNA, 22 bp, Artificial Sequence
  Synthetic oligonucleotide; CTG chr11 5279233 5279254 5279250 5279255 +
ctattcatgatacgaaaaaata

SEQ ID NO: 93235 - DNA, 22 bp, Artificial Sequence
  Synthetic oligonucleotide; CTA chr11 5279236 5279257 5279253 5279258 +
ttcatgatacgaaaaaataaag

SEQ ID NO: 93236 - DNA, 22 bp, Artificial Sequence
  Synthetic oligonucleotide; TTC chr11 5279239 5279260 5279256 5279261 +
atgatacgaaaaaataaagagt

SEQ ID NO: 93237 - DNA, 22 bp, Artificial Sequence
  Synthetic oligonucleotide; TTC chr11 5279265 5279286 5279282 5279287 +
tagttatttagccacatatttc

SEQ ID NO: 93238 - DNA, 22 bp, Artificial Sequence
  Synthetic oligonucleotide; CTA chr11 5279267 5279288 5279284 5279289 +
gttatttagccacatatttcaa

SEQ ID NO: 93239 - DNA, 22 bp, Artificial Sequence
  Synthetic oligonucleotide; TTA chr11 5279271 5279292 5279288 5279293 +
tttagccacatatttcaagttt

SEQ ID NO: 93240 - DNA, 22 bp, Artificial Sequence
  Synthetic oligonucleotide; TTT chr11 5279274 5279295 5279291 5279296 +
agccacatatttcaagtttagt

SEQ ID NO: 93241 - DNA, 22 bp, Artificial Sequence
  Synthetic oligonucleotide; TTA chr11 5279275 5279296 5279292 5279297 +
gccacatatttcaagtttagtc

SEQ ID NO: 93242 - DNA, 22 bp, Artificial Sequence
  Synthetic oligonucleotide; TTT chr11 5279286 5279307 5279303 5279308 +
caagtttagtctgatatcaccc

SEQ ID NO: 93243 - DNA, 22 bp, Artificial Sequence
  Synthetic oligonucleotide; TTC chr11 5279287 5279308 5279304 5279309 +
aagtttagtctgatatcaccct

SEQ ID NO: 93244 - DNA, 22 bp, Artificial Sequence
  Synthetic oligonucleotide; TTT chr11 5279293 5279314 5279310 5279315 +
agtctgatatcaccctttaaac

SEQ ID NO: 93245 - DNA, 22 bp, Artificial Sequence
  Synthetic oligonucleotide; TTA chr11 5279294 5279315 5279311 5279316 +
gtctgatatcaccctttaaaca

SEQ ID NO: 93246 - DNA, 22 bp, Artificial Sequence
  Synthetic oligonucleotide; CTG chr11 5279299 5279320 5279316 5279321 +
atatcaccctttaaacactgcc

SEQ ID NO: 93247 - DNA, 22 bp, Artificial Sequence
  Synthetic oligonucleotide; CTT chr11 5279310 5279331 5279327 5279332 +
taaacactgccactcaacctaa

SEQ ID NO: 93248 - DNA, 22 bp, Artificial Sequence
  Synthetic oligonucleotide; TTT chr11 5279311 5279332 5279328 5279333 +
aaacactgccactcaacctaaa

SEQ ID NO: 93249 - DNA, 22 bp, Artificial Sequence
  Synthetic oligonucleotide; TTA chr11 5279312 5279333 5279329 5279334 +
aacactgccactcaacctaaaa

SEQ ID NO: 93250 - DNA, 22 bp, Artificial Sequence
  Synthetic oligonucleotide; CTG chr11 5279319 5279340 5279336 5279341 +
ccactcaacctaaaacaatgct

SEQ ID NO: 93251 - DNA, 22 bp, Artificial Sequence
  Synthetic oligonucleotide; CTC chr11 5279325 5279346 5279342 5279347 +
aacctaaaacaatgctagtctt

SEQ ID NO: 93252 - DNA, 22 bp, Artificial Sequence
  Synthetic oligonucleotide; CTA chr11 5279331 5279352 5279348 5279353 +
aaacaatgctagtctttctaga

SEQ ID NO: 93253 - DNA, 22 bp, Artificial Sequence
  Synthetic oligonucleotide; CTA chr11 5279342 5279363 5279359 5279364 +
gtctttctagacccatccatgg

SEQ ID NO: 93254 - DNA, 22 bp, Artificial Sequence
  Synthetic oligonucleotide; CTT chr11 5279347 5279368 5279364 5279369 +
tctagacccatccatggaattt

SEQ ID NO: 93255 - DNA, 22 bp, Artificial Sequence
  Synthetic oligonucleotide; TTT chr11 5279348 5279369 5279365 5279370 +
ctagacccatccatggaatttt

SEQ ID NO: 93256 - DNA, 22 bp, Artificial Sequence
  Synthetic oligonucleotide; TTC chr11 5279349 5279370 5279366 5279371 +
tagacccatccatggaattttt

SEQ ID NO: 93257 - DNA, 22 bp, Artificial Sequence
  Synthetic oligonucleotide; CTA chr11 5279351 5279372 5279368 5279373 +
gacccatccatggaattttttc

SEQ ID NO: 93258 - DNA, 22 bp, Artificial Sequence
  Synthetic oligonucleotide; TTT chr11 5279369 5279390 5279386 5279391 +
tttccccactgttttttttcta

SEQ ID NO: 93259 - DNA, 22 bp, Artificial Sequence
  Synthetic oligonucleotide; TTT chr11 5279370 5279391 5279387 5279392 +
ttccccactgttttttttctaa

SEQ ID NO: 93260 - DNA, 22 bp, Artificial Sequence
  Synthetic oligonucleotide; TTT chr11 5279371 5279392 5279388 5279393 +
tccccactgttttttttctaat

SEQ ID NO: 93261 - DNA, 22 bp, Artificial Sequence
  Synthetic oligonucleotide; TTT chr11 5279372 5279393 5279389 5279394 +
ccccactgttttttttctaatt

SEQ ID NO: 93262 - DNA, 22 bp, Artificial Sequence
  Synthetic oligonucleotide; TTC chr11 5279373 5279394 5279390 5279395 +
cccactgttttttttctaatta

SEQ ID NO: 93263 - DNA, 22 bp, Artificial Sequence
  Synthetic oligonucleotide; CTG chr11 5279380 5279401 5279397 5279402 +
ttttttttctaattaatttgtg

SEQ ID NO: 93264 - DNA, 22 bp, Artificial Sequence
  Synthetic oligonucleotide; TTT chr11 5279383 5279404 5279400 5279405 +
tttttctaattaatttgtgatt

SEQ ID NO: 93265 - DNA, 22 bp, Artificial Sequence
  Synthetic oligonucleotide; TTT chr11 5279384 5279405 5279401 5279406 +
ttttctaattaatttgtgattt

SEQ ID NO: 93266 - DNA, 22 bp, Artificial Sequence
  Synthetic oligonucleotide; TTT chr11 5279385 5279406 5279402 5279407 +
tttctaattaatttgtgattta

SEQ ID NO: 93267 - DNA, 22 bp, Artificial Sequence
  Synthetic oligonucleotide; TTT chr11 5279386 5279407 5279403 5279408 +
ttctaattaatttgtgatttaa

SEQ ID NO: 93268 - DNA, 22 bp, Artificial Sequence
  Synthetic oligonucleotide; TTT chr11 5279387 5279408 5279404 5279409 +
tctaattaatttgtgatttaaa

SEQ ID NO: 93269 - DNA, 22 bp, Artificial Sequence
  Synthetic oligonucleotide; TTT chr11 5279388 5279409 5279405 5279410 +
ctaattaatttgtgatttaaat

SEQ ID NO: 93270 - DNA, 22 bp, Artificial Sequence
  Synthetic oligonucleotide; TTC chr11 5279389 5279410 5279406 5279411 +
taattaatttgtgatttaaatg

SEQ ID NO: 93271 - DNA, 22 bp, Artificial Sequence
  Synthetic oligonucleotide; CTA chr11 5279391 5279412 5279408 5279413 +
attaatttgtgatttaaatggc

SEQ ID NO: 93272 - DNA, 22 bp, Artificial Sequence
  Synthetic oligonucleotide; TTA chr11 5279395 5279416 5279412 5279417 +
atttgtgatttaaatggctcat

SEQ ID NO: 93273 - DNA, 22 bp, Artificial Sequence
  Synthetic oligonucleotide; TTT chr11 5279399 5279420 5279416 5279421 +
gtgatttaaatggctcatattc

SEQ ID NO: 93274 - DNA, 22 bp, Artificial Sequence
  Synthetic oligonucleotide; TTG chr11 5279400 5279421 5279417 5279422 +
tgatttaaatggctcatattcc

SEQ ID NO: 93275 - DNA, 22 bp, Artificial Sequence
  Synthetic oligonucleotide; TTT chr11 5279406 5279427 5279423 5279428 +
aaatggctcatattccagcctg

SEQ ID NO: 93276 - DNA, 22 bp, Artificial Sequence
  Synthetic oligonucleotide; TTA chr11 5279407 5279428 5279424 5279429 +
aatggctcatattccagcctgt

SEQ ID NO: 93277 - DNA, 22 bp, Artificial Sequence
  Synthetic oligonucleotide; CTC chr11 5279415 5279436 5279432 5279437 +
atattccagcctgtgccacagt

SEQ ID NO: 93278 - DNA, 22 bp, Artificial Sequence
  Synthetic oligonucleotide; TTC chr11 5279421 5279442 5279438 5279443 +
cagcctgtgccacagttattac

SEQ ID NO: 93279 - DNA, 22 bp, Artificial Sequence
  Synthetic oligonucleotide; CTG chr11 5279428 5279449 5279445 5279450 +
tgccacagttattacacattta

SEQ ID NO: 93280 - DNA, 22 bp, Artificial Sequence
  Synthetic oligonucleotide; TTA chr11 5279439 5279460 5279456 5279461 +
ttacacatttaactcactctct

SEQ ID NO: 93281 - DNA, 22 bp, Artificial Sequence
  Synthetic oligonucleotide; TTA chr11 5279442 5279463 5279459 5279464 +
cacatttaactcactctctgta

SEQ ID NO: 93282 - DNA, 22 bp, Artificial Sequence
  Synthetic oligonucleotide; TTT chr11 5279449 5279470 5279466 5279471 +
aactcactctctgtattttgtt

SEQ ID NO: 93283 - DNA, 22 bp, Artificial Sequence
  Synthetic oligonucleotide; TTA chr11 5279450 5279471 5279467 5279472 +
actcactctctgtattttgtta

SEQ ID NO: 93284 - DNA, 22 bp, Artificial Sequence
  Synthetic oligonucleotide; CTC chr11 5279454 5279475 5279471 5279476 +
actctctgtattttgttatctg

SEQ ID NO: 93285 - DNA, 22 bp, Artificial Sequence
  Synthetic oligonucleotide; CTC chr11 5279458 5279479 5279475 5279480 +
tctgtattttgttatctgtata

SEQ ID NO: 93286 - DNA, 22 bp, Artificial Sequence
  Synthetic oligonucleotide; CTC chr11 5279460 5279481 5279477 5279482 +
tgtattttgttatctgtataaa

SEQ ID NO: 93287 - DNA, 22 bp, Artificial Sequence
  Synthetic oligonucleotide; CTG chr11 5279462 5279483 5279479 5279484 +
tattttgttatctgtataaata

SEQ ID NO: 93288 - DNA, 22 bp, Artificial Sequence
  Synthetic oligonucleotide; TTT chr11 5279467 5279488 5279484 5279489 +
tgttatctgtataaatactctt

SEQ ID NO: 93289 - DNA, 22 bp, Artificial Sequence
  Synthetic oligonucleotide; TTT chr11 5279468 5279489 5279485 5279490 +
gttatctgtataaatactcttc

SEQ ID NO: 93290 - DNA, 22 bp, Artificial Sequence
  Synthetic oligonucleotide; TTG chr11 5279469 5279490 5279486 5279491 +
ttatctgtataaatactcttca

SEQ ID NO: 93291 - DNA, 22 bp, Artificial Sequence
  Synthetic oligonucleotide; TTA chr11 5279472 5279493 5279489 5279494 +
tctgtataaatactcttcaggt

SEQ ID NO: 93292 - DNA, 22 bp, Artificial Sequence
  Synthetic oligonucleotide; CTG chr11 5279476 5279497 5279493 5279498 +
tataaatactcttcaggttgat

SEQ ID NO: 93293 - DNA, 22 bp, Artificial Sequence
  Synthetic oligonucleotide; CTC chr11 5279487 5279508 5279504 5279509 +
ttcaggttgatttcctttctta

SEQ ID NO: 93294 - DNA, 22 bp, Artificial Sequence
  Synthetic oligonucleotide; CTT chr11 5279489 5279510 5279506 5279511 +
caggttgatttcctttcttaat

SEQ ID NO: 93295 - DNA, 22 bp, Artificial Sequence
  Synthetic oligonucleotide; TTC chr11 5279490 5279511 5279507 5279512 +
aggttgatttcctttcttaatg

SEQ ID NO: 93296 - DNA, 22 bp, Artificial Sequence
  Synthetic oligonucleotide; TTG chr11 5279496 5279517 5279513 5279518 +
atttcctttcttaatgtttgtg

SEQ ID NO: 93297 - DNA, 22 bp, Artificial Sequence
  Synthetic oligonucleotide; TTT chr11 5279500 5279521 5279517 5279522 +
cctttcttaatgtttgtgttta

SEQ ID NO: 93298 - DNA, 22 bp, Artificial Sequence
  Synthetic oligonucleotide; TTC chr11 5279501 5279522 5279518 5279523 +
ctttcttaatgtttgtgtttat

SEQ ID NO: 93299 - DNA, 22 bp, Artificial Sequence
  Synthetic oligonucleotide; CTT chr11 5279504 5279525 5279521 5279526 +
tcttaatgtttgtgtttatgtt

SEQ ID NO: 93300 - DNA, 22 bp, Artificial Sequence
  Synthetic oligonucleotide; TTT chr11 5279505 5279526 5279522 5279527 +
cttaatgtttgtgtttatgtta

SEQ ID NO: 93301 - DNA, 22 bp, Artificial Sequence
  Synthetic oligonucleotide; TTC chr11 5279506 5279527 5279523 5279528 +
ttaatgtttgtgtttatgttag

SEQ ID NO: 93302 - DNA, 22 bp, Artificial Sequence
  Synthetic oligonucleotide; CTT chr11 5279508 5279529 5279525 5279530 +
aatgtttgtgtttatgttagat

SEQ ID NO: 93303 - DNA, 22 bp, Artificial Sequence
  Synthetic oligonucleotide; TTA chr11 5279509 5279530 5279526 5279531 +
atgtttgtgtttatgttagata

SEQ ID NO: 93304 - DNA, 22 bp, Artificial Sequence
  Synthetic oligonucleotide; TTT chr11 5279515 5279536 5279532 5279537 +
gtgtttatgttagatatgcatc

SEQ ID NO: 93305 - DNA, 22 bp, Artificial Sequence
  Synthetic oligonucleotide; TTG chr11 5279516 5279537 5279533 5279538 +
tgtttatgttagatatgcatca

SEQ ID NO: 93306 - DNA, 22 bp, Artificial Sequence
  Synthetic oligonucleotide; TTT chr11 5279521 5279542 5279538 5279543 +
atgttagatatgcatcatgtag

SEQ ID NO: 93307 - DNA, 22 bp, Artificial Sequence
  Synthetic oligonucleotide; TTA chr11 5279522 5279543 5279539 5279544 +
tgttagatatgcatcatgtagc

SEQ ID NO: 93308 - DNA, 22 bp, Artificial Sequence
  Synthetic oligonucleotide; TTA chr11 5279527 5279548 5279544 5279549 +
gatatgcatcatgtagcctgtc

SEQ ID NO: 93309 - DNA, 22 bp, Artificial Sequence
  Synthetic oligonucleotide; CTG chr11 5279547 5279568 5279564 5279569 +
tcttcatttctatcacaaacat

SEQ ID NO: 93310 - DNA, 22 bp, Artificial Sequence
  Synthetic oligonucleotide; CTT chr11 5279551 5279572 5279568 5279573 +
catttctatcacaaacatacac

SEQ ID NO: 93311 - DNA, 22 bp, Artificial Sequence
  Synthetic oligonucleotide; TTC chr11 5279552 5279573 5279569 5279574 +
atttctatcacaaacatacact

SEQ ID NO: 93312 - DNA, 22 bp, Artificial Sequence
  Synthetic oligonucleotide; TTT chr11 5279556 5279577 5279573 5279578 +
ctatcacaaacatacacttgaa

SEQ ID NO: 93313 - DNA, 22 bp, Artificial Sequence
  Synthetic oligonucleotide; TTC chr11 5279557 5279578 5279574 5279579 +
tatcacaaacatacacttgaac

SEQ ID NO: 93314 - DNA, 22 bp, Artificial Sequence
  Synthetic oligonucleotide; CTA chr11 5279559 5279580 5279576 5279581 +
tcacaaacatacacttgaacca

SEQ ID NO: 93315 - DNA, 22 bp, Artificial Sequence
  Synthetic oligonucleotide; CTT chr11 5279575 5279596 5279592 5279597 +
gaaccaaaaaggaagtttttac

SEQ ID NO: 93316 - DNA, 22 bp, Artificial Sequence
  Synthetic oligonucleotide; TTG chr11 5279576 5279597 5279593 5279598 +
aaccaaaaaggaagtttttaca

SEQ ID NO: 93317 - DNA, 22 bp, Artificial Sequence
  Synthetic oligonucleotide; TTT chr11 5279593 5279614 5279610 5279615 +
ttacatagcatcactaaatctt

SEQ ID NO: 93318 - DNA, 22 bp, Artificial Sequence
  Synthetic oligonucleotide; TTT chr11 5279594 5279615 5279611 5279616 +
tacatagcatcactaaatcttc

SEQ ID NO: 93319 - DNA, 22 bp, Artificial Sequence
  Synthetic oligonucleotide; TTT chr11 5279595 5279616 5279612 5279617 +
acatagcatcactaaatcttct

SEQ ID NO: 93320 - DNA, 22 bp, Artificial Sequence
  Synthetic oligonucleotide; TTA chr11 5279596 5279617 5279613 5279618 +
catagcatcactaaatcttctc

SEQ ID NO: 93321 - DNA, 22 bp, Artificial Sequence
  Synthetic oligonucleotide; CTA chr11 5279609 5279630 5279626 5279631 +
aatcttctctctgtgctcttag

SEQ ID NO: 93322 - DNA, 22 bp, Artificial Sequence
  Synthetic oligonucleotide; CTT chr11 5279615 5279636 5279632 5279637 +
ctctctgtgctcttagcgaaac

SEQ ID NO: 93323 - DNA, 22 bp, Artificial Sequence
  Synthetic oligonucleotide; TTC chr11 5279616 5279637 5279633 5279638 +
tctctgtgctcttagcgaaacc

SEQ ID NO: 93324 - DNA, 22 bp, Artificial Sequence
  Synthetic oligonucleotide; CTC chr11 5279618 5279639 5279635 5279640 +
tctgtgctcttagcgaaaccaa

SEQ ID NO: 93325 - DNA, 22 bp, Artificial Sequence
  Synthetic oligonucleotide; CTC chr11 5279620 5279641 5279637 5279642 +
tgtgctcttagcgaaaccaagt

SEQ ID NO: 93326 - DNA, 22 bp, Artificial Sequence
  Synthetic oligonucleotide; CTG chr11 5279622 5279643 5279639 5279644 +
tgctcttagcgaaaccaagtag

SEQ ID NO: 93327 - DNA, 22 bp, Artificial Sequence
  Synthetic oligonucleotide; CTC chr11 5279627 5279648 5279644 5279649 +
ttagcgaaaccaagtaggctga

SEQ ID NO: 93328 - DNA, 22 bp, Artificial Sequence
  Synthetic oligonucleotide; CTT chr11 5279629 5279650 5279646 5279651 +
agcgaaaccaagtaggctgaca

SEQ ID NO: 93329 - DNA, 22 bp, Artificial Sequence
  Synthetic oligonucleotide; TTA chr11 5279630 5279651 5279647 5279652 +
gcgaaaccaagtaggctgacaa

SEQ ID NO: 93330 - DNA, 22 bp, Artificial Sequence
  Synthetic oligonucleotide; CTG chr11 5279648 5279669 5279665 5279670 +
acaagacatcattcattcacag

SEQ ID NO: 93331 - DNA, 22 bp, Artificial Sequence
  Synthetic oligonucleotide; TTC chr11 5279662 5279683 5279679 5279684 +
attcacagcgaaaccgagtaga

SEQ ID NO: 93332 - DNA, 22 bp, Artificial Sequence
  Synthetic oligonucleotide; TTC chr11 5279666 5279687 5279683 5279688 +
acagcgaaaccgagtagactga

SEQ ID NO: 93333 - DNA, 22 bp, Artificial Sequence
  Synthetic oligonucleotide; CTG chr11 5279687 5279708 5279704 5279709 +
acaagaggtcattcattcacaa

SEQ ID NO: 93334 - DNA, 22 bp, Artificial Sequence
  Synthetic oligonucleotide; TTC chr11 5279701 5279722 5279718 5279723 +
attcacaaatgaatacaaaaaa

SEQ ID NO: 93335 - DNA, 22 bp, Artificial Sequence
  Synthetic oligonucleotide; TTC chr11 5279705 5279726 5279722 5279727 +
acaaatgaatacaaaaaacagt

SEQ ID NO: 93336 - DNA, 22 bp, Artificial Sequence
  Synthetic oligonucleotide; CTG chr11 5279749 5279770 5279766 5279771 +
taatgggtcctgggcctgcaaa

SEQ ID NO: 93337 - DNA, 22 bp, Artificial Sequence
  Synthetic oligonucleotide; CTG chr11 5279761 5279782 5279778 5279783 +
ggcctgcaaaaccctcacagct

SEQ ID NO: 93338 - DNA, 22 bp, Artificial Sequence
  Synthetic oligonucleotide; CTG chr11 5279767 5279788 5279784 5279789 +
caaaaccctcacagctgctaac

SEQ ID NO: 93339 - DNA, 22 bp, Artificial Sequence
  Synthetic oligonucleotide; CTC chr11 5279777 5279798 5279794 5279799 +
acagctgctaacctcaagaagc

SEQ ID NO: 93340 - DNA, 22 bp, Artificial Sequence
  Synthetic oligonucleotide; CTG chr11 5279784 5279805 5279801 5279806 +
ctaacctcaagaagctcagtgg

SEQ ID NO: 93341 - DNA, 22 bp, Artificial Sequence
  Synthetic oligonucleotide; CTA chr11 5279787 5279808 5279804 5279809 +
acctcaagaagctcagtggaga

SEQ ID NO: 93342 - DNA, 22 bp, Artificial Sequence
  Synthetic oligonucleotide; CTC chr11 5279792 5279813 5279809 5279814 +
aagaagctcagtggagacataa

SEQ ID NO: 93343 - DNA, 22 bp, Artificial Sequence
  Synthetic oligonucleotide; CTC chr11 5279801 5279822 5279818 5279823 +
agtggagacataacattcatct

SEQ ID NO: 93344 - DNA, 22 bp, Artificial Sequence
  Synthetic oligonucleotide; TTC chr11 5279819 5279840 5279836 5279841 +
atctgaaaattccttgcatgtc

SEQ ID NO: 93345 - DNA, 22 bp, Artificial Sequence
  Synthetic oligonucleotide; CTG chr11 5279824 5279845 5279841 5279846 +
aaaattccttgcatgtctgttg

SEQ ID NO: 93346 - DNA, 22 bp, Artificial Sequence
  Synthetic oligonucleotide; TTC chr11 5279831 5279852 5279848 5279853 +
cttgcatgtctgttgaactaat

SEQ ID NO: 93347 - DNA, 22 bp, Artificial Sequence
  Synthetic oligonucleotide; CTT chr11 5279834 5279855 5279851 5279856 +
gcatgtctgttgaactaattta

SEQ ID NO: 93348 - DNA, 22 bp, Artificial Sequence
  Synthetic oligonucleotide; TTG chr11 5279835 5279856 5279852 5279857 +
catgtctgttgaactaatttat

SEQ ID NO: 93349 - DNA, 22 bp, Artificial Sequence
  Synthetic oligonucleotide; CTG chr11 5279843 5279864 5279860 5279865 +
ttgaactaatttatctgcctct

SEQ ID NO: 93350 - DNA, 22 bp, Artificial Sequence
  Synthetic oligonucleotide; TTG chr11 5279846 5279867 5279863 5279868 +
aactaatttatctgcctctcct

SEQ ID NO: 93351 - DNA, 22 bp, Artificial Sequence
  Synthetic oligonucleotide; CTA chr11 5279851 5279872 5279868 5279873 +
atttatctgcctctccttaaat

SEQ ID NO: 93352 - DNA, 22 bp, Artificial Sequence
  Synthetic oligonucleotide; TTT chr11 5279855 5279876 5279872 5279877 +
atctgcctctccttaaatttgt

SEQ ID NO: 93353 - DNA, 22 bp, Artificial Sequence
  Synthetic oligonucleotide; TTA chr11 5279856 5279877 5279873 5279878 +
tctgcctctccttaaatttgtt

SEQ ID NO: 93354 - DNA, 22 bp, Artificial Sequence
  Synthetic oligonucleotide; CTG chr11 5279860 5279881 5279877 5279882 +
cctctccttaaatttgttcctt

SEQ ID NO: 93355 - DNA, 22 bp, Artificial Sequence
  Synthetic oligonucleotide; CTC chr11 5279864 5279885 5279881 5279886 +
tccttaaatttgttcctttttg

SEQ ID NO: 93356 - DNA, 22 bp, Artificial Sequence
  Synthetic oligonucleotide; CTC chr11 5279866 5279887 5279883 5279888 +
cttaaatttgttcctttttgta

SEQ ID NO: 93357 - DNA, 22 bp, Artificial Sequence
  Synthetic oligonucleotide; CTT chr11 5279869 5279890 5279886 5279891 +
aaatttgttcctttttgtatag

SEQ ID NO: 93358 - DNA, 22 bp, Artificial Sequence
  Synthetic oligonucleotide; TTA chr11 5279870 5279891 5279887 5279892 +
aatttgttcctttttgtatagt

SEQ ID NO: 93359 - DNA, 22 bp, Artificial Sequence
  Synthetic oligonucleotide; TTT chr11 5279875 5279896 5279892 5279897 +
gttcctttttgtatagttcctt

SEQ ID NO: 93360 - DNA, 22 bp, Artificial Sequence
  Synthetic oligonucleotide; TTG chr11 5279876 5279897 5279893 5279898 +
ttcctttttgtatagttcctta

SEQ ID NO: 93361 - DNA, 22 bp, Artificial Sequence
  Synthetic oligonucleotide; TTC chr11 5279879 5279900 5279896 5279901 +
ctttttgtatagttccttaagt

SEQ ID NO: 93362 - DNA, 22 bp, Artificial Sequence
  Synthetic oligonucleotide; CTT chr11 5279882 5279903 5279899 5279904 +
tttgtatagttccttaagtcat

SEQ ID NO: 93363 - DNA, 22 bp, Artificial Sequence
  Synthetic oligonucleotide; TTT chr11 5279883 5279904 5279900 5279905 +
ttgtatagttccttaagtcatg

SEQ ID NO: 93364 - DNA, 22 bp, Artificial Sequence
  Synthetic oligonucleotide; TTT chr11 5279884 5279905 5279901 5279906 +
tgtatagttccttaagtcatgt

SEQ ID NO: 93365 - DNA, 22 bp, Artificial Sequence
  Synthetic oligonucleotide; TTT chr11 5279885 5279906 5279902 5279907 +
gtatagttccttaagtcatgtc

SEQ ID NO: 93366 - DNA, 22 bp, Artificial Sequence
  Synthetic oligonucleotide; TTG chr11 5279886 5279907 5279903 5279908 +
tatagttccttaagtcatgtca

SEQ ID NO: 93367 - DNA, 22 bp, Artificial Sequence
  Synthetic oligonucleotide; TTC chr11 5279894 5279915 5279911 5279916 +
cttaagtcatgtcacatttctg

SEQ ID NO: 93368 - DNA, 22 bp, Artificial Sequence
  Synthetic oligonucleotide; CTT chr11 5279897 5279918 5279914 5279919 +
aagtcatgtcacatttctgaaa

SEQ ID NO: 93369 - DNA, 22 bp, Artificial Sequence
  Synthetic oligonucleotide; TTA chr11 5279898 5279919 5279915 5279920 +
agtcatgtcacatttctgaaac

SEQ ID NO: 93370 - DNA, 22 bp, Artificial Sequence
  Synthetic oligonucleotide; TTT chr11 5279913 5279934 5279930 5279935 +
ctgaaacatctttgccactgtg

SEQ ID NO: 93371 - DNA, 22 bp, Artificial Sequence
  Synthetic oligonucleotide; TTC chr11 5279914 5279935 5279931 5279936 +
tgaaacatctttgccactgtga

SEQ ID NO: 93372 - DNA, 22 bp, Artificial Sequence
  Synthetic oligonucleotide; CTG chr11 5279916 5279937 5279933 5279938 +
aaacatctttgccactgtgaac

SEQ ID NO: 93373 - DNA, 22 bp, Artificial Sequence
  Synthetic oligonucleotide; CTT chr11 5279925 5279946 5279942 5279947 +
tgccactgtgaactcctacaga

SEQ ID NO: 93374 - DNA, 22 bp, Artificial Sequence
  Synthetic oligonucleotide; TTT chr11 5279926 5279947 5279943 5279948 +
gccactgtgaactcctacagaa

SEQ ID NO: 93375 - DNA, 22 bp, Artificial Sequence
  Synthetic oligonucleotide; TTG chr11 5279927 5279948 5279944 5279949 +
ccactgtgaactcctacagaag

SEQ ID NO: 93376 - DNA, 22 bp, Artificial Sequence
  Synthetic oligonucleotide; CTG chr11 5279933 5279954 5279950 5279955 +
tgaactcctacagaagccagct

SEQ ID NO: 93377 - DNA, 22 bp, Artificial Sequence
  Synthetic oligonucleotide; CTC chr11 5279940 5279961 5279957 5279962 +
ctacagaagccagcttcaaagc

SEQ ID NO: 93378 - DNA, 22 bp, Artificial Sequence
  Synthetic oligonucleotide; CTA chr11 5279943 5279964 5279960 5279965 +
cagaagccagcttcaaagccat

SEQ ID NO: 93379 - DNA, 22 bp, Artificial Sequence
  Synthetic oligonucleotide; CTT chr11 5279956 5279977 5279973 5279978 +
caaagccattcttctggaagcc

SEQ ID NO: 93380 - DNA, 22 bp, Artificial Sequence
  Synthetic oligonucleotide; TTC chr11 5279957 5279978 5279974 5279979 +
aaagccattcttctggaagcct

SEQ ID NO: 93381 - DNA, 22 bp, Artificial Sequence
  Synthetic oligonucleotide; TTC chr11 5279967 5279988 5279984 5279989 +
ttctggaagccttctctatccc

SEQ ID NO: 93382 - DNA, 22 bp, Artificial Sequence
  Synthetic oligonucleotide; CTT chr11 5279969 5279990 5279986 5279991 +
ctggaagccttctctatcccct

SEQ ID NO: 93383 - DNA, 22 bp, Artificial Sequence
  Synthetic oligonucleotide; TTC chr11 5279970 5279991 5279987 5279992 +
tggaagccttctctatcccctt

SEQ ID NO: 93384 - DNA, 22 bp, Artificial Sequence
  Synthetic oligonucleotide; CTG chr11 5279972 5279993 5279989 5279994 +
gaagccttctctatccccttga

SEQ ID NO: 93385 - DNA, 22 bp, Artificial Sequence
  Synthetic oligonucleotide; CTT chr11 5279980 5280001 5279997 5280002 +
ctctatccccttgacctcctgt

SEQ ID NO: 93386 - DNA, 22 bp, Artificial Sequence
  Synthetic oligonucleotide; TTC chr11 5279981 5280002 5279998 5280003 +
tctatccccttgacctcctgtt

SEQ ID NO: 93387 - DNA, 22 bp, Artificial Sequence
  Synthetic oligonucleotide; CTC chr11 5279983 5280004 5280000 5280005 +
tatccccttgacctcctgtttt

SEQ ID NO: 93388 - DNA, 22 bp, Artificial Sequence
  Synthetic oligonucleotide; CTA chr11 5279985 5280006 5280002 5280007 +
tccccttgacctcctgtttttt

SEQ ID NO: 93389 - DNA, 22 bp, Artificial Sequence
  Synthetic oligonucleotide; CTT chr11 5279992 5280013 5280009 5280014 +
gacctcctgttttttctcccac

SEQ ID NO: 93390 - DNA, 22 bp, Artificial Sequence
  Synthetic oligonucleotide; TTG chr11 5279993 5280014 5280010 5280015 +
acctcctgttttttctcccaca

SEQ ID NO: 93391 - DNA, 22 bp, Artificial Sequence
  Synthetic oligonucleotide; CTC chr11 5279998 5280019 5280015 5280020 +
ctgttttttctcccacaagcat

SEQ ID NO: 93392 - DNA, 22 bp, Artificial Sequence
  Synthetic oligonucleotide; CTG chr11 5280001 5280022 5280018 5280023 +
ttttttctcccacaagcattat

SEQ ID NO: 93393 - DNA, 22 bp, Artificial Sequence
  Synthetic oligonucleotide; TTT chr11 5280004 5280025 5280021 5280026 +
tttctcccacaagcattatgtc

SEQ ID NO: 93394 - DNA, 22 bp, Artificial Sequence
  Synthetic oligonucleotide; TTT chr11 5280005 5280026 5280022 5280027 +
ttctcccacaagcattatgtct

SEQ ID NO: 93395 - DNA, 22 bp, Artificial Sequence
  Synthetic oligonucleotide; TTT chr11 5280006 5280027 5280023 5280028 +
tctcccacaagcattatgtctg

SEQ ID NO: 93396 - DNA, 22 bp, Artificial Sequence
  Synthetic oligonucleotide; TTT chr11 5280007 5280028 5280024 5280029 +
ctcccacaagcattatgtctgt

SEQ ID NO: 93397 - DNA, 22 bp, Artificial Sequence
  Synthetic oligonucleotide; TTC chr11 5280008 5280029 5280025 5280030 +
tcccacaagcattatgtctgtc

SEQ ID NO: 93398 - DNA, 22 bp, Artificial Sequence
  Synthetic oligonucleotide; CTC chr11 5280010 5280031 5280027 5280032 +
ccacaagcattatgtctgtctg

SEQ ID NO: 93399 - DNA, 22 bp, Artificial Sequence
  Synthetic oligonucleotide; TTA chr11 5280022 5280043 5280039 5280044 +
tgtctgtctgtcattgtttttc

SEQ ID NO: 93400 - DNA, 22 bp, Artificial Sequence
  Synthetic oligonucleotide; CTG chr11 5280028 5280049 5280045 5280050 +
tctgtcattgtttttcatcctc

SEQ ID NO: 93401 - DNA, 22 bp, Artificial Sequence
  Synthetic oligonucleotide; CTG chr11 5280032 5280053 5280049 5280054 +
tcattgtttttcatcctcttgt

SEQ ID NO: 93402 - DNA, 22 bp, Artificial Sequence
  Synthetic oligonucleotide; TTG chr11 5280038 5280059 5280055 5280060 +
tttttcatcctcttgtagtcct

SEQ ID NO: 93403 - DNA, 22 bp, Artificial Sequence
  Synthetic oligonucleotide; TTT chr11 5280041 5280062 5280058 5280063 +
ttcatcctcttgtagtccttca

SEQ ID NO: 93404 - DNA, 22 bp, Artificial Sequence
  Synthetic oligonucleotide; TTT chr11 5280042 5280063 5280059 5280064 +
tcatcctcttgtagtccttcac

SEQ ID NO: 93405 - DNA, 22 bp, Artificial Sequence
  Synthetic oligonucleotide; TTT chr11 5280043 5280064 5280060 5280065 +
catcctcttgtagtccttcaca

SEQ ID NO: 93406 - DNA, 22 bp, Artificial Sequence
  Synthetic oligonucleotide; TTC chr11 5280044 5280065 5280061 5280066 +
atcctcttgtagtccttcacag

SEQ ID NO: 93407 - DNA, 22 bp, Artificial Sequence
  Synthetic oligonucleotide; CTC chr11 5280050 5280071 5280067 5280072 +
ttgtagtccttcacagttaccc

SEQ ID NO: 93408 - DNA, 22 bp, Artificial Sequence
  Synthetic oligonucleotide; CTT chr11 5280052 5280073 5280069 5280074 +
gtagtccttcacagttacccac

SEQ ID NO: 93409 - DNA, 22 bp, Artificial Sequence
  Synthetic oligonucleotide; TTG chr11 5280053 5280074 5280070 5280075 +
tagtccttcacagttacccaca

SEQ ID NO: 93410 - DNA, 22 bp, Artificial Sequence
  Synthetic oligonucleotide; CTT chr11 5280061 5280082 5280078 5280083 +
cacagttacccacacaggtgaa

SEQ ID NO: 93411 - DNA, 22 bp, Artificial Sequence
  Synthetic oligonucleotide; TTC chr11 5280062 5280083 5280079 5280084 +
acagttacccacacaggtgaac

SEQ ID NO: 93412 - DNA, 22 bp, Artificial Sequence
  Synthetic oligonucleotide; TTA chr11 5280069 5280090 5280086 5280091 +
cccacacaggtgaaccctttta

SEQ ID NO: 93413 - DNA, 22 bp, Artificial Sequence
  Synthetic oligonucleotide; CTT chr11 5280088 5280109 5280105 5280110 +
ttagctctcctggaggaatgtt

SEQ ID NO: 93414 - DNA, 22 bp, Artificial Sequence
  Synthetic oligonucleotide; TTT chr11 5280089 5280110 5280106 5280111 +
tagctctcctggaggaatgttt

SEQ ID NO: 93415 - DNA, 22 bp, Artificial Sequence
  Synthetic oligonucleotide; TTT chr11 5280090 5280111 5280107 5280112 +
agctctcctggaggaatgtttc

SEQ ID NO: 93416 - DNA, 22 bp, Artificial Sequence
  Synthetic oligonucleotide; TTA chr11 5280091 5280112 5280108 5280113 +
gctctcctggaggaatgtttct

SEQ ID NO: 93417 - DNA, 22 bp, Artificial Sequence
  Synthetic oligonucleotide; CTC chr11 5280095 5280116 5280112 5280117 +
tcctggaggaatgtttctttcc

SEQ ID NO: 93418 - DNA, 22 bp, Artificial Sequence
  Synthetic oligonucleotide; CTC chr11 5280097 5280118 5280114 5280119 +
ctggaggaatgtttctttcctc

SEQ ID NO: 93419 - DNA, 22 bp, Artificial Sequence
  Synthetic oligonucleotide; CTG chr11 5280100 5280121 5280117 5280122 +
gaggaatgtttctttcctctca

SEQ ID NO: 93420 - DNA, 22 bp, Artificial Sequence
  Synthetic oligonucleotide; TTT chr11 5280111 5280132 5280128 5280133 +
ctttcctctcaggatcagagtt

SEQ ID NO: 93421 - DNA, 22 bp, Artificial Sequence
  Synthetic oligonucleotide; TTC chr11 5280112 5280133 5280129 5280134 +
tttcctctcaggatcagagttg

SEQ ID NO: 93422 - DNA, 22 bp, Artificial Sequence
  Synthetic oligonucleotide; CTT chr11 5280114 5280135 5280131 5280136 +
tcctctcaggatcagagttgcc

SEQ ID NO: 93423 - DNA, 22 bp, Artificial Sequence
  Synthetic oligonucleotide; TTT chr11 5280115 5280136 5280132 5280137 +
cctctcaggatcagagttgcct

SEQ ID NO: 93424 - DNA, 22 bp, Artificial Sequence
  Synthetic oligonucleotide; TTC chr11 5280116 5280137 5280133 5280138 +
ctctcaggatcagagttgccta

SEQ ID NO: 93425 - DNA, 22 bp, Artificial Sequence
  Synthetic oligonucleotide; CTC chr11 5280119 5280140 5280136 5280141 +
tcaggatcagagttgcctacat

SEQ ID NO: 93426 - DNA, 22 bp, Artificial Sequence
  Synthetic oligonucleotide; CTC chr11 5280121 5280142 5280138 5280143 +
aggatcagagttgcctacatct

SEQ ID NO: 93427 - DNA, 22 bp, Artificial Sequence
  Synthetic oligonucleotide; TTG chr11 5280134 5280155 5280151 5280156 +
cctacatcttcctaatgcacca

SEQ ID NO: 93428 - DNA, 22 bp, Artificial Sequence
  Synthetic oligonucleotide; CTA chr11 5280138 5280159 5280155 5280160 +
catcttcctaatgcaccaagac

SEQ ID NO: 93429 - DNA, 22 bp, Artificial Sequence
  Synthetic oligonucleotide; CTT chr11 5280144 5280165 5280161 5280166 +
cctaatgcaccaagactggcct

SEQ ID NO: 93430 - DNA, 22 bp, Artificial Sequence
  Synthetic oligonucleotide; TTC chr11 5280145 5280166 5280162 5280167 +
ctaatgcaccaagactggcctg

SEQ ID NO: 93431 - DNA, 22 bp, Artificial Sequence
  Synthetic oligonucleotide; CTA chr11 5280148 5280169 5280165 5280170 +
atgcaccaagactggcctgaga

SEQ ID NO: 93432 - DNA, 22 bp, Artificial Sequence
  Synthetic oligonucleotide; CTG chr11 5280162 5280183 5280179 5280184 +
gcctgagatgtatccttaagat

SEQ ID NO: 93433 - DNA, 22 bp, Artificial Sequence
  Synthetic oligonucleotide; CTG chr11 5280167 5280188 5280184 5280189 +
agatgtatccttaagatgagag

SEQ ID NO: 93434 - DNA, 22 bp, Artificial Sequence
  Synthetic oligonucleotide; CTT chr11 5280179 5280200 5280196 5280201 +
aagatgagagcttcccagtagc

SEQ ID NO: 93435 - DNA, 22 bp, Artificial Sequence
  Synthetic oligonucleotide; TTA chr11 5280180 5280201 5280197 5280202 +
agatgagagcttcccagtagca

SEQ ID NO: 93436 - DNA, 22 bp, Artificial Sequence
  Synthetic oligonucleotide; CTT chr11 5280192 5280213 5280209 5280214 +
cccagtagcaccccaagtcaga

SEQ ID NO: 93437 - DNA, 22 bp, Artificial Sequence
  Synthetic oligonucleotide; TTC chr11 5280193 5280214 5280210 5280215 +
ccagtagcaccccaagtcagat

SEQ ID NO: 93438 - DNA, 22 bp, Artificial Sequence
  Synthetic oligonucleotide; CTG chr11 5280218 5280239 5280235 5280240 +
accccgtatgtgagcatgtgtc

SEQ ID NO: 93439 - DNA, 22 bp, Artificial Sequence
  Synthetic oligonucleotide; CTC chr11 5280243 5280264 5280260 5280265 +
taacagcacaggccttttgcca

SEQ ID NO: 93440 - DNA, 22 bp, Artificial Sequence
  Synthetic oligonucleotide; CTA chr11 5280245 5280266 5280262 5280267 +
acagcacaggccttttgccacc

SEQ ID NO: 93441 - DNA, 22 bp, Artificial Sequence
  Synthetic oligonucleotide; CTT chr11 5280259 5280280 5280276 5280281 +
ttgccacctagctgtccagggg

SEQ ID NO: 93442 - DNA, 22 bp, Artificial Sequence
  Synthetic oligonucleotide; TTT chr11 5280260 5280281 5280277 5280282 +
tgccacctagctgtccaggggt

SEQ ID NO: 93443 - DNA, 22 bp, Artificial Sequence
  Synthetic oligonucleotide; TTT chr11 5280261 5280282 5280278 5280283 +
gccacctagctgtccaggggtg

SEQ ID NO: 93444 - DNA, 22 bp, Artificial Sequence
  Synthetic oligonucleotide; TTG chr11 5280262 5280283 5280279 5280284 +
ccacctagctgtccaggggtgc

SEQ ID NO: 93445 - DNA, 22 bp, Artificial Sequence
  Synthetic oligonucleotide; CTA chr11 5280269 5280290 5280286 5280291 +
gctgtccaggggtgccttaaaa

SEQ ID NO: 93446 - DNA, 22 bp, Artificial Sequence
  Synthetic oligonucleotide; CTG chr11 5280273 5280294 5280290 5280295 +
tccaggggtgccttaaaatggc

SEQ ID NO: 93447 - DNA, 22 bp, Artificial Sequence
  Synthetic oligonucleotide; CTT chr11 5280287 5280308 5280304 5280309 +
aaaatggcaaacaaggtttgtt

SEQ ID NO: 93448 - DNA, 22 bp, Artificial Sequence
  Synthetic oligonucleotide; TTA chr11 5280288 5280309 5280305 5280310 +
aaatggcaaacaaggtttgttt

SEQ ID NO: 93449 - DNA, 22 bp, Artificial Sequence
  Synthetic oligonucleotide; TTT chr11 5280306 5280327 5280323 5280328 +
gttttcttttcctgttttcatg

SEQ ID NO: 93450 - DNA, 22 bp, Artificial Sequence
  Synthetic oligonucleotide; TTG chr11 5280307 5280328 5280324 5280329 +
ttttcttttcctgttttcatgc

SEQ ID NO: 93451 - DNA, 22 bp, Artificial Sequence
  Synthetic oligonucleotide; TTT chr11 5280310 5280331 5280327 5280332 +
tcttttcctgttttcatgcctt

SEQ ID NO: 93452 - DNA, 22 bp, Artificial Sequence
  Synthetic oligonucleotide; TTT chr11 5280311 5280332 5280328 5280333 +
cttttcctgttttcatgccttc

SEQ ID NO: 93453 - DNA, 22 bp, Artificial Sequence
  Synthetic oligonucleotide; TTC chr11 5280312 5280333 5280329 5280334 +
ttttcctgttttcatgccttcc

SEQ ID NO: 93454 - DNA, 22 bp, Artificial Sequence
  Synthetic oligonucleotide; CTT chr11 5280314 5280335 5280331 5280336 +
ttcctgttttcatgccttcctc

SEQ ID NO: 93455 - DNA, 22 bp, Artificial Sequence
  Synthetic oligonucleotide; TTT chr11 5280315 5280336 5280332 5280337 +
tcctgttttcatgccttcctct

SEQ ID NO: 93456 - DNA, 22 bp, Artificial Sequence
  Synthetic oligonucleotide; TTT chr11 5280316 5280337 5280333 5280338 +
cctgttttcatgccttcctctt

SEQ ID NO: 93457 - DNA, 22 bp, Artificial Sequence
  Synthetic oligonucleotide; TTC chr11 5280317 5280338 5280334 5280339 +
ctgttttcatgccttcctcttc

SEQ ID NO: 93458 - DNA, 22 bp, Artificial Sequence
  Synthetic oligonucleotide; CTG chr11 5280320 5280341 5280337 5280342 +
ttttcatgccttcctcttccat

SEQ ID NO: 93459 - DNA, 22 bp, Artificial Sequence
  Synthetic oligonucleotide; TTT chr11 5280323 5280344 5280340 5280345 +
tcatgccttcctcttccatatc

SEQ ID NO: 93460 - DNA, 22 bp, Artificial Sequence
  Synthetic oligonucleotide; TTT chr11 5280324 5280345 5280341 5280346 +
catgccttcctcttccatatcc

SEQ ID NO: 93461 - DNA, 22 bp, Artificial Sequence
  Synthetic oligonucleotide; TTC chr11 5280325 5280346 5280342 5280347 +
atgccttcctcttccatatcct

SEQ ID NO: 93462 - DNA, 22 bp, Artificial Sequence
  Synthetic oligonucleotide; CTT chr11 5280332 5280353 5280349 5280354 +
cctcttccatatccttgtttca

SEQ ID NO: 93463 - DNA, 22 bp, Artificial Sequence
  Synthetic oligonucleotide; TTC chr11 5280333 5280354 5280350 5280355 +
ctcttccatatccttgtttcat

SEQ ID NO: 93464 - DNA, 22 bp, Artificial Sequence
  Synthetic oligonucleotide; CTC chr11 5280336 5280357 5280353 5280358 +
ttccatatccttgtttcatatt

SEQ ID NO: 93465 - DNA, 22 bp, Artificial Sequence
  Synthetic oligonucleotide; CTT chr11 5280338 5280359 5280355 5280360 +
ccatatccttgtttcatattaa

SEQ ID NO: 93466 - DNA, 22 bp, Artificial Sequence
  Synthetic oligonucleotide; TTC chr11 5280339 5280360 5280356 5280361 +
catatccttgtttcatattaat

SEQ ID NO: 93467 - DNA, 22 bp, Artificial Sequence
  Synthetic oligonucleotide; CTT chr11 5280348 5280369 5280365 5280370 +
gtttcatattaatacatgtgta

SEQ ID NO: 93468 - DNA, 22 bp, Artificial Sequence
  Synthetic oligonucleotide; TTG chr11 5280349 5280370 5280366 5280371 +
tttcatattaatacatgtgtat

SEQ ID NO: 93469 - DNA, 22 bp, Artificial Sequence
  Synthetic oligonucleotide; TTT chr11 5280352 5280373 5280369 5280374 +
catattaatacatgtgtataga

SEQ ID NO: 93470 - DNA, 22 bp, Artificial Sequence
  Synthetic oligonucleotide; TTC chr11 5280353 5280374 5280370 5280375 +
atattaatacatgtgtatagat

SEQ ID NO: 93471 - DNA, 22 bp, Artificial Sequence
  Synthetic oligonucleotide; TTA chr11 5280359 5280380 5280376 5280381 +
atacatgtgtatagatcctaaa

SEQ ID NO: 93472 - DNA, 22 bp, Artificial Sequence
  Synthetic oligonucleotide; CTA chr11 5280379 5280400 5280396 5280401 +
aaaatctatacacatgtattaa

SEQ ID NO: 93473 - DNA, 22 bp, Artificial Sequence
  Synthetic oligonucleotide; CTA chr11 5280387 5280408 5280404 5280409 +
tacacatgtattaataaagcct

SEQ ID NO: 93474 - DNA, 22 bp, Artificial Sequence
  Synthetic oligonucleotide; TTA chr11 5280400 5280421 5280417 5280422 +
ataaagcctgattctgccgctt

SEQ ID NO: 93475 - DNA, 22 bp, Artificial Sequence
  Synthetic oligonucleotide; CTG chr11 5280410 5280431 5280427 5280432 +
attctgccgcttctaggtatag

SEQ ID NO: 93476 - DNA, 22 bp, Artificial Sequence
  Synthetic oligonucleotide; TTC chr11 5280414 5280435 5280431 5280436 +
tgccgcttctaggtatagaggc

SEQ ID NO: 93477 - DNA, 22 bp, Artificial Sequence
  Synthetic oligonucleotide; CTG chr11 5280416 5280437 5280433 5280438 +
ccgcttctaggtatagaggcca

SEQ ID NO: 93478 - DNA, 22 bp, Artificial Sequence
  Synthetic oligonucleotide; CTT chr11 5280422 5280443 5280439 5280444 +
ctaggtatagaggccacctgca

SEQ ID NO: 93479 - DNA, 22 bp, Artificial Sequence
  Synthetic oligonucleotide; TTC chr11 5280423 5280444 5280440 5280445 +
taggtatagaggccacctgcaa

SEQ ID NO: 93480 - DNA, 22 bp, Artificial Sequence
  Synthetic oligonucleotide; CTA chr11 5280425 5280446 5280442 5280447 +
ggtatagaggccacctgcaaga

SEQ ID NO: 93481 - DNA, 22 bp, Artificial Sequence
  Synthetic oligonucleotide; CTG chr11 5280442 5280463 5280459 5280464 +
caagataaatatttgattcaca

SEQ ID NO: 93482 - DNA, 22 bp, Artificial Sequence
  Synthetic oligonucleotide; TTT chr11 5280456 5280477 5280473 5280478 +
gattcacaataactaatcattc

SEQ ID NO: 93483 - DNA, 22 bp, Artificial Sequence
  Synthetic oligonucleotide; TTG chr11 5280457 5280478 5280474 5280479 +
attcacaataactaatcattct

SEQ ID NO: 93484 - DNA, 22 bp, Artificial Sequence
  Synthetic oligonucleotide; TTC chr11 5280461 5280482 5280478 5280483 +
acaataactaatcattctatgg

SEQ ID NO: 93485 - DNA, 22 bp, Artificial Sequence
  Synthetic oligonucleotide; CTA chr11 5280471 5280492 5280488 5280493 +
atcattctatggcaattgataa

SEQ ID NO: 93486 - DNA, 22 bp, Artificial Sequence
  Synthetic oligonucleotide; TTC chr11 5280478 5280499 5280495 5280500 +
tatggcaattgataacaacaaa

SEQ ID NO: 93487 - DNA, 22 bp, Artificial Sequence
  Synthetic oligonucleotide; CTA chr11 5280480 5280501 5280497 5280502 +
tggcaattgataacaacaaata

SEQ ID NO: 93488 - DNA, 22 bp, Artificial Sequence
  Synthetic oligonucleotide; TTG chr11 5280489 5280510 5280506 5280511 +
ataacaacaaatatatatatat

SEQ ID NO: 93489 - DNA, 22 bp, Artificial Sequence
  Synthetic oligonucleotide; TTC chr11 5280551 5280572 5280568 5280573 +
aggaaataatatattctagaat

SEQ ID NO: 93490 - DNA, 22 bp, Artificial Sequence
  Synthetic oligonucleotide; TTC chr11 5280567 5280588 5280584 5280589 +
tagaatatgtcacattctgtct

SEQ ID NO: 93491 - DNA, 22 bp, Artificial Sequence
  Synthetic oligonucleotide; CTA chr11 5280569 5280590 5280586 5280591 +
gaatatgtcacattctgtctca

SEQ ID NO: 93492 - DNA, 22 bp, Artificial Sequence
  Synthetic oligonucleotide; TTC chr11 5280584 5280605 5280601 5280606 +
tgtctcaggcatccattttctt

SEQ ID NO: 93493 - DNA, 22 bp, Artificial Sequence
  Synthetic oligonucleotide; CTG chr11 5280586 5280607 5280603 5280608 +
tctcaggcatccattttcttta

SEQ ID NO: 93494 - DNA, 22 bp, Artificial Sequence
  Synthetic oligonucleotide; CTC chr11 5280590 5280611 5280607 5280612 +
aggcatccattttctttatgat

SEQ ID NO: 93495 - DNA, 22 bp, Artificial Sequence
  Synthetic oligonucleotide; TTT chr11 5280602 5280623 5280619 5280624 +
tctttatgatgccgtttgaggt

SEQ ID NO: 93496 - DNA, 22 bp, Artificial Sequence
  Synthetic oligonucleotide; TTT chr11 5280603 5280624 5280620 5280625 +
ctttatgatgccgtttgaggtg

SEQ ID NO: 93497 - DNA, 22 bp, Artificial Sequence
  Synthetic oligonucleotide; TTC chr11 5280604 5280625 5280621 5280626 +
tttatgatgccgtttgaggtgg

SEQ ID NO: 93498 - DNA, 22 bp, Artificial Sequence
  Synthetic oligonucleotide; CTT chr11 5280606 5280627 5280623 5280628 +
tatgatgccgtttgaggtggag

SEQ ID NO: 93499 - DNA, 22 bp, Artificial Sequence
  Synthetic oligonucleotide; TTT chr11 5280607 5280628 5280624 5280629 +
atgatgccgtttgaggtggagt

SEQ ID NO: 93500 - DNA, 22 bp, Artificial Sequence
  Synthetic oligonucleotide; TTA chr11 5280608 5280629 5280625 5280630 +
tgatgccgtttgaggtggagtt

SEQ ID NO: 93501 - DNA, 22 bp, Artificial Sequence
  Synthetic oligonucleotide; TTT chr11 5280619 5280640 5280636 5280641 +
gaggtggagttttagtcaggtg

SEQ ID NO: 93502 - DNA, 22 bp, Artificial Sequence
  Synthetic oligonucleotide; TTG chr11 5280620 5280641 5280637 5280642 +
aggtggagttttagtcaggtgg

SEQ ID NO: 93503 - DNA, 22 bp, Artificial Sequence
  Synthetic oligonucleotide; TTT chr11 5280631 5280652 5280648 5280653 +
tagtcaggtggtcagcttctcc

SEQ ID NO: 93504 - DNA, 22 bp, Artificial Sequence
  Synthetic oligonucleotide; TTT chr11 5280632 5280653 5280649 5280654 +
agtcaggtggtcagcttctcct

SEQ ID NO: 93505 - DNA, 22 bp, Artificial Sequence
  Synthetic oligonucleotide; TTA chr11 5280633 5280654 5280650 5280655 +
gtcaggtggtcagcttctcctt

SEQ ID NO: 93506 - DNA, 22 bp, Artificial Sequence
  Synthetic oligonucleotide; CTT chr11 5280649 5280670 5280666 5280671 +
ctccttttttttgccatctgcc

SEQ ID NO: 93507 - DNA, 22 bp, Artificial Sequence
  Synthetic oligonucleotide; TTC chr11 5280650 5280671 5280667 5280672 +
tccttttttttgccatctgccc

SEQ ID NO: 93508 - DNA, 22 bp, Artificial Sequence
  Synthetic oligonucleotide; CTC chr11 5280652 5280673 5280669 5280674 +
cttttttttgccatctgccctg

SEQ ID NO: 93509 - DNA, 22 bp, Artificial Sequence
  Synthetic oligonucleotide; CTT chr11 5280655 5280676 5280672 5280677 +
ttttttgccatctgccctgtaa

SEQ ID NO: 93510 - DNA, 22 bp, Artificial Sequence
  Synthetic oligonucleotide; TTT chr11 5280656 5280677 5280673 5280678 +
tttttgccatctgccctgtaag

SEQ ID NO: 93511 - DNA, 22 bp, Artificial Sequence
  Synthetic oligonucleotide; TTT chr11 5280657 5280678 5280674 5280679 +
ttttgccatctgccctgtaagc

SEQ ID NO: 93512 - DNA, 22 bp, Artificial Sequence
  Synthetic oligonucleotide; TTT chr11 5280658 5280679 5280675 5280680 +
tttgccatctgccctgtaagca

SEQ ID NO: 93513 - DNA, 22 bp, Artificial Sequence
  Synthetic oligonucleotide; TTT chr11 5280659 5280680 5280676 5280681 +
ttgccatctgccctgtaagcat

SEQ ID NO: 93514 - DNA, 22 bp, Artificial Sequence
  Synthetic oligonucleotide; TTT chr11 5280660 5280681 5280677 5280682 +
tgccatctgccctgtaagcatc

SEQ ID NO: 93515 - DNA, 22 bp, Artificial Sequence
  Synthetic oligonucleotide; TTT chr11 5280661 5280682 5280678 5280683 +
gccatctgccctgtaagcatcc

SEQ ID NO: 93516 - DNA, 22 bp, Artificial Sequence
  Synthetic oligonucleotide; TTG chr11 5280662 5280683 5280679 5280684 +
ccatctgccctgtaagcatcct

SEQ ID NO: 93517 - DNA, 22 bp, Artificial Sequence
  Synthetic oligonucleotide; CTG chr11 5280669 5280690 5280686 5280691 +
ccctgtaagcatcctgctgggg

SEQ ID NO: 93518 - DNA, 22 bp, Artificial Sequence
  Synthetic oligonucleotide; CTG chr11 5280674 5280695 5280691 5280696 +
taagcatcctgctggggaccca

SEQ ID NO: 93519 - DNA, 22 bp, Artificial Sequence
  Synthetic oligonucleotide; CTG chr11 5280685 5280706 5280702 5280707 +
ctggggacccagataggagtca

SEQ ID NO: 93520 - DNA, 22 bp, Artificial Sequence
  Synthetic oligonucleotide; CTG chr11 5280688 5280709 5280705 5280710 +
gggacccagataggagtcatca

SEQ ID NO: 93521 - DNA, 22 bp, Artificial Sequence
  Synthetic oligonucleotide; CTC chr11 5280713 5280734 5280730 5280735 +
taggctgagaacatctgggcac

SEQ ID NO: 93522 - DNA, 22 bp, Artificial Sequence
  Synthetic oligonucleotide; CTA chr11 5280715 5280736 5280732 5280737 +
ggctgagaacatctgggcacac

SEQ ID NO: 93523 - DNA, 22 bp, Artificial Sequence
  Synthetic oligonucleotide; CTG chr11 5280720 5280741 5280737 5280742 +
agaacatctgggcacacaccct

SEQ ID NO: 93524 - DNA, 22 bp, Artificial Sequence
  Synthetic oligonucleotide; CTG chr11 5280730 5280751 5280747 5280752 +
ggcacacaccctaagcctcagc

SEQ ID NO: 93525 - DNA, 22 bp, Artificial Sequence
  Synthetic oligonucleotide; CTA chr11 5280743 5280764 5280760 5280765 +
agcctcagcatgactcatcatg

SEQ ID NO: 93526 - DNA, 22 bp, Artificial Sequence
  Synthetic oligonucleotide; CTC chr11 5280749 5280770 5280766 5280771 +
agcatgactcatcatgactcag

SEQ ID NO: 93527 - DNA, 22 bp, Artificial Sequence
  Synthetic oligonucleotide; CTC chr11 5280759 5280780 5280776 5280781 +
atcatgactcagcattgctgtg

SEQ ID NO: 93528 - DNA, 22 bp, Artificial Sequence
  Synthetic oligonucleotide; CTC chr11 5280769 5280790 5280786 5280791 +
agcattgctgtgcttgagccag

SEQ ID NO: 93529 - DNA, 22 bp, Artificial Sequence
  Synthetic oligonucleotide; TTG chr11 5280776 5280797 5280793 5280798 +
ctgtgcttgagccagaaggttt

SEQ ID NO: 93530 - DNA, 22 bp, Artificial Sequence
  Synthetic oligonucleotide; CTG chr11 5280779 5280800 5280796 5280801 +
tgcttgagccagaaggtttgct

SEQ ID NO: 93531 - DNA, 22 bp, Artificial Sequence
  Synthetic oligonucleotide; CTT chr11 5280784 5280805 5280801 5280806 +
gagccagaaggtttgcttagaa

SEQ ID NO: 93532 - DNA, 22 bp, Artificial Sequence
  Synthetic oligonucleotide; TTG chr11 5280785 5280806 5280802 5280807 +
agccagaaggtttgcttagaag

SEQ ID NO: 93533 - DNA, 22 bp, Artificial Sequence
  Synthetic oligonucleotide; TTT chr11 5280798 5280819 5280815 5280820 +
gcttagaaggttacacagaacc

SEQ ID NO: 93534 - DNA, 22 bp, Artificial Sequence
  Synthetic oligonucleotide; TTG chr11 5280799 5280820 5280816 5280821 +
cttagaaggttacacagaacca

SEQ ID NO: 93535 - DNA, 22 bp, Artificial Sequence
  Synthetic oligonucleotide; CTT chr11 5280802 5280823 5280819 5280824 +
agaaggttacacagaaccagaa

SEQ ID NO: 93536 - DNA, 22 bp, Artificial Sequence
  Synthetic oligonucleotide; TTA chr11 5280803 5280824 5280820 5280825 +
gaaggttacacagaaccagaag

SEQ ID NO: 93537 - DNA, 22 bp, Artificial Sequence
  Synthetic oligonucleotide; TTA chr11 5280811 5280832 5280828 5280833 +
cacagaaccagaaggcgggggt

SEQ ID NO: 93538 - DNA, 22 bp, Artificial Sequence
  Synthetic oligonucleotide; CTG chr11 5280842 5280863 5280859 5280864 +
accccgacaggggcctggccag

SEQ ID NO: 93539 - DNA, 22 bp, Artificial Sequence
  Synthetic oligonucleotide; CTG chr11 5280859 5280880 5280876 5280881 +
gccagaactgctcatgcttgga

SEQ ID NO: 93540 - DNA, 22 bp, Artificial Sequence
  Synthetic oligonucleotide; CTG chr11 5280869 5280890 5280886 5280891 +
ctcatgcttggactatgggagg

SEQ ID NO: 93541 - DNA, 22 bp, Artificial Sequence
  Synthetic oligonucleotide; CTC chr11 5280872 5280893 5280889 5280894 +
atgcttggactatgggaggtca

SEQ ID NO: 93542 - DNA, 22 bp, Artificial Sequence
  Synthetic oligonucleotide; CTT chr11 5280878 5280899 5280895 5280900 +
ggactatgggaggtcactaatg

SEQ ID NO: 93543 - DNA, 22 bp, Artificial Sequence
  Synthetic oligonucleotide; TTG chr11 5280879 5280900 5280896 5280901 +
gactatgggaggtcactaatgg

SEQ ID NO: 93544 - DNA, 22 bp, Artificial Sequence
  Synthetic oligonucleotide; CTA chr11 5280884 5280905 5280901 5280906 +
tgggaggtcactaatggagaca

SEQ ID NO: 93545 - DNA, 22 bp, Artificial Sequence
  Synthetic oligonucleotide; CTA chr11 5280897 5280918 5280914 5280919 +
atggagacacacagaaatgtaa

SEQ ID NO: 93546 - DNA, 22 bp, Artificial Sequence
  Synthetic oligonucleotide; CTA chr11 5280928 5280949 5280945 5280950 +
aggaaaaactgaagcttattta

SEQ ID NO: 93547 - DNA, 22 bp, Artificial Sequence
  Synthetic oligonucleotide; CTG chr11 5280939 5280960 5280956 5280961 +
aagcttatttaatcagagatga

SEQ ID NO: 93548 - DNA, 22 bp, Artificial Sequence
  Synthetic oligonucleotide; CTT chr11 5280945 5280966 5280962 5280967 +
atttaatcagagatgaggatgc

SEQ ID NO: 93549 - DNA, 22 bp, Artificial Sequence
  Synthetic oligonucleotide; TTA chr11 5280946 5280967 5280963 5280968 +
tttaatcagagatgaggatgct

SEQ ID NO: 93550 - DNA, 22 bp, Artificial Sequence
  Synthetic oligonucleotide; TTT chr11 5280949 5280970 5280966 5280971 +
aatcagagatgaggatgctgga

SEQ ID NO: 93551 - DNA, 22 bp, Artificial Sequence
  Synthetic oligonucleotide; TTA chr11 5280950 5280971 5280967 5280972 +
atcagagatgaggatgctggaa

SEQ ID NO: 93552 - DNA, 22 bp, Artificial Sequence
  Synthetic oligonucleotide; CTG chr11 5280969 5280990 5280986 5280991 +
gaagggatagagggagctgagc

SEQ ID NO: 93553 - DNA, 22 bp, Artificial Sequence
  Synthetic oligonucleotide; CTG chr11 5280988 5281009 5281005 5281010 +
agcttgtaaaaagtatagtaat

SEQ ID NO: 93554 - DNA, 22 bp, Artificial Sequence
  Synthetic oligonucleotide; CTT chr11 5280993 5281014 5281010 5281015 +
gtaaaaagtatagtaatcattc

SEQ ID NO: 93555 - DNA, 22 bp, Artificial Sequence
  Synthetic oligonucleotide; TTG chr11 5280994 5281015 5281011 5281016 +
taaaaagtatagtaatcattca

SEQ ID NO: 93556 - DNA, 22 bp, Artificial Sequence
  Synthetic oligonucleotide; TTC chr11 5281015 5281036 5281032 5281037 +
agcaaatggttttgaagcacct

SEQ ID NO: 93557 - DNA, 22 bp, Artificial Sequence
  Synthetic oligonucleotide; TTT chr11 5281027 5281048 5281044 5281049 +
tgaagcacctgctggatgctaa

SEQ ID NO: 93558 - DNA, 22 bp, Artificial Sequence
  Synthetic oligonucleotide; TTT chr11 5281028 5281049 5281045 5281050 +
gaagcacctgctggatgctaaa

SEQ ID NO: 93559 - DNA, 22 bp, Artificial Sequence
  Synthetic oligonucleotide; TTG chr11 5281029 5281050 5281046 5281051 +
aagcacctgctggatgctaaac

SEQ ID NO: 93560 - DNA, 22 bp, Artificial Sequence
  Synthetic oligonucleotide; CTG chr11 5281038 5281059 5281055 5281060 +
ctggatgctaaacactattttc

SEQ ID NO: 93561 - DNA, 22 bp, Artificial Sequence
  Synthetic oligonucleotide; CTG chr11 5281041 5281062 5281058 5281063 +
gatgctaaacactattttcagt

SEQ ID NO: 93562 - DNA, 22 bp, Artificial Sequence
  Synthetic oligonucleotide; CTA chr11 5281048 5281069 5281065 5281070 +
aacactattttcagtgcttgaa

SEQ ID NO: 93563 - DNA, 22 bp, Artificial Sequence
  Synthetic oligonucleotide; CTA chr11 5281055 5281076 5281072 5281077 +
ttttcagtgcttgaatcataaa

SEQ ID NO: 93564 - DNA, 22 bp, Artificial Sequence
  Synthetic oligonucleotide; TTT chr11 5281058 5281079 5281075 5281080 +
tcagtgcttgaatcataaataa

SEQ ID NO: 93565 - DNA, 22 bp, Artificial Sequence
  Synthetic oligonucleotide; TTT chr11 5281059 5281080 5281076 5281081 +
cagtgcttgaatcataaataag

SEQ ID NO: 93566 - DNA, 22 bp, Artificial Sequence
  Synthetic oligonucleotide; TTC chr11 5281060 5281081 5281077 5281082 +
agtgcttgaatcataaataaga

SEQ ID NO: 93567 - DNA, 22 bp, Artificial Sequence
  Synthetic oligonucleotide; CTT chr11 5281067 5281088 5281084 5281089 +
gaatcataaataagaataaaac

SEQ ID NO: 93568 - DNA, 22 bp, Artificial Sequence
  Synthetic oligonucleotide; TTG chr11 5281068 5281089 5281085 5281090 +
aatcataaataagaataaaaca

SEQ ID NO: 93569 - DNA, 22 bp, Artificial Sequence
  Synthetic oligonucleotide; CTT chr11 5281098 5281119 5281115 5281120 +
attccccacaagagtccaagta

SEQ ID NO: 93570 - DNA, 22 bp, Artificial Sequence
  Synthetic oligonucleotide; TTA chr11 5281099 5281120 5281116 5281121 +
ttccccacaagagtccaagtaa

SEQ ID NO: 93571 - DNA, 22 bp, Artificial Sequence
  Synthetic oligonucleotide; TTC chr11 5281102 5281123 5281119 5281124 +
cccacaagagtccaagtaaaaa

SEQ ID NO: 93572 - DNA, 22 bp, Artificial Sequence
  Synthetic oligonucleotide; TTA chr11 5281134 5281155 5281151 5281156 +
attataatgtgctctgtccccc

SEQ ID NO: 93573 - DNA, 22 bp, Artificial Sequence
  Synthetic oligonucleotide; TTA chr11 5281138 5281159 5281155 5281160 +
taatgtgctctgtcccccaggc

SEQ ID NO: 93574 - DNA, 22 bp, Artificial Sequence
  Synthetic oligonucleotide; CTC chr11 5281148 5281169 5281165 5281170 +
tgtcccccaggctggagtgcag

SEQ ID NO: 93575 - DNA, 22 bp, Artificial Sequence
  Synthetic oligonucleotide; CTG chr11 5281150 5281171 5281167 5281172 +
tcccccaggctggagtgcagtg

SEQ ID NO: 93576 - DNA, 22 bp, Artificial Sequence
  Synthetic oligonucleotide; CTG chr11 5281162 5281183 5281179 5281184 +
gagtgcagtggcacgatctcag

SEQ ID NO: 93577 - DNA, 22 bp, Artificial Sequence
  Synthetic oligonucleotide; CTC chr11 5281182 5281203 5281199 5281204 +
agctcactgcaacctccgcctc

SEQ ID NO: 93578 - DNA, 22 bp, Artificial Sequence
  Synthetic oligonucleotide; CTC chr11 5281187 5281208 5281204 5281209 +
actgcaacctccgcctcccggg

SEQ ID NO: 93579 - DNA, 22 bp, Artificial Sequence
  Synthetic oligonucleotide; CTG chr11 5281191 5281212 5281208 5281213 +
caacctccgcctcccgggttca

SEQ ID NO: 93580 - DNA, 22 bp, Artificial Sequence
  Synthetic oligonucleotide; CTC chr11 5281198 5281219 5281215 5281220 +
cgcctcccgggttcaagcaatt

SEQ ID NO: 93581 - DNA, 22 bp, Artificial Sequence
  Synthetic oligonucleotide; CTC chr11 5281204 5281225 5281221 5281226 +
ccgggttcaagcaattctcctg

SEQ ID NO: 93582 - DNA, 22 bp, Artificial Sequence
  Synthetic oligonucleotide; TTC chr11 5281212 5281233 5281229 5281234 +
aagcaattctcctgcctcagcc

SEQ ID NO: 93583 - DNA, 22 bp, Artificial Sequence
  Synthetic oligonucleotide; TTC chr11 5281221 5281242 5281238 5281243 +
tcctgcctcagccaccctaata

SEQ ID NO: 93584 - DNA, 22 bp, Artificial Sequence
  Synthetic oligonucleotide; CTC chr11 5281223 5281244 5281240 5281245 +
ctgcctcagccaccctaatagc

SEQ ID NO: 93585 - DNA, 22 bp, Artificial Sequence
  Synthetic oligonucleotide; CTG chr11 5281226 5281247 5281243 5281248 +
cctcagccaccctaatagctgg

SEQ ID NO: 93586 - DNA, 22 bp, Artificial Sequence
  Synthetic oligonucleotide; CTC chr11 5281230 5281251 5281247 5281252 +
agccaccctaatagctgggatt

SEQ ID NO: 93587 - DNA, 22 bp, Artificial Sequence
  Synthetic oligonucleotide; CTA chr11 5281240 5281261 5281257 5281262 +
atagctgggattacaggtgcac

SEQ ID NO: 93588 - DNA, 22 bp, Artificial Sequence
  Synthetic oligonucleotide; CTG chr11 5281247 5281268 5281264 5281269 +
ggattacaggtgcacaccacca

SEQ ID NO: 93589 - DNA, 22 bp, Artificial Sequence
  Synthetic oligonucleotide; TTA chr11 5281253 5281274 5281270 5281275 +
caggtgcacaccaccatgccag

SEQ ID NO: 93590 - DNA, 22 bp, Artificial Sequence
  Synthetic oligonucleotide; CTA chr11 5281279 5281300 5281296 5281301 +
atttttgtactttttgtagagg

SEQ ID NO: 93591 - DNA, 22 bp, Artificial Sequence
  Synthetic oligonucleotide; TTT chr11 5281283 5281304 5281300 5281305 +
ttgtactttttgtagaggcagg

SEQ ID NO: 93592 - DNA, 22 bp, Artificial Sequence
  Synthetic oligonucleotide; TTT chr11 5281284 5281305 5281301 5281306 +
tgtactttttgtagaggcaggg

SEQ ID NO: 93593 - DNA, 22 bp, Artificial Sequence
  Synthetic oligonucleotide; TTT chr11 5281285 5281306 5281302 5281307 +
gtactttttgtagaggcagggt

SEQ ID NO: 93594 - DNA, 22 bp, Artificial Sequence
  Synthetic oligonucleotide; TTG chr11 5281286 5281307 5281303 5281308 +
tactttttgtagaggcagggta

SEQ ID NO: 93595 - DNA, 22 bp, Artificial Sequence
  Synthetic oligonucleotide; CTT chr11 5281291 5281312 5281308 5281313 +
tttgtagaggcagggtatcacc

SEQ ID NO: 93596 - DNA, 22 bp, Artificial Sequence
  Synthetic oligonucleotide; TTT chr11 5281292 5281313 5281309 5281314 +
ttgtagaggcagggtatcacca

SEQ ID NO: 93597 - DNA, 22 bp, Artificial Sequence
  Synthetic oligonucleotide; TTT chr11 5281293 5281314 5281310 5281315 +
tgtagaggcagggtatcaccat

SEQ ID NO: 93598 - DNA, 22 bp, Artificial Sequence
  Synthetic oligonucleotide; TTT chr11 5281294 5281315 5281311 5281316 +
gtagaggcagggtatcaccatg

SEQ ID NO: 93599 - DNA, 22 bp, Artificial Sequence
  Synthetic oligonucleotide; TTG chr11 5281295 5281316 5281312 5281317 +
tagaggcagggtatcaccatgt

SEQ ID NO: 93600 - DNA, 22 bp, Artificial Sequence
  Synthetic oligonucleotide; TTG chr11 5281319 5281340 5281336 5281341 +
tccaagatggtcttgaactcct

SEQ ID NO: 93601 - DNA, 22 bp, Artificial Sequence
  Synthetic oligonucleotide; CTT chr11 5281333 5281354 5281350 5281355 +
gaactcctgagctccaagcagt

SEQ ID NO: 93602 - DNA, 22 bp, Artificial Sequence
  Synthetic oligonucleotide; TTG chr11 5281334 5281355 5281351 5281356 +
aactcctgagctccaagcagtc

SEQ ID NO: 93603 - DNA, 22 bp, Artificial Sequence
  Synthetic oligonucleotide; CTC chr11 5281339 5281360 5281356 5281361 +
ctgagctccaagcagtccaccc

SEQ ID NO: 93604 - DNA, 22 bp, Artificial Sequence
  Synthetic oligonucleotide; CTG chr11 5281342 5281363 5281359 5281364 +
agctccaagcagtccacccacc

SEQ ID NO: 93605 - DNA, 22 bp, Artificial Sequence
  Synthetic oligonucleotide; CTC chr11 5281347 5281368 5281364 5281369 +
caagcagtccacccacctcagc

SEQ ID NO: 93606 - DNA, 22 bp, Artificial Sequence
  Synthetic oligonucleotide; CTC chr11 5281366 5281387 5281383 5281388 +
agcctcccaaagtgctgggatt

SEQ ID NO: 93607 - DNA, 22 bp, Artificial Sequence
  Synthetic oligonucleotide; CTC chr11 5281372 5281393 5281389 5281394 +
ccaaagtgctgggattacaggt

SEQ ID NO: 93608 - DNA, 22 bp, Artificial Sequence
  Synthetic oligonucleotide; CTG chr11 5281383 5281404 5281400 5281405 +
ggattacaggtgtgagacacca

SEQ ID NO: 93609 - DNA, 22 bp, Artificial Sequence
  Synthetic oligonucleotide; TTA chr11 5281389 5281410 5281406 5281411 +
caggtgtgagacaccatgccca

SEQ ID NO: 93610 - DNA, 22 bp, Artificial Sequence
  Synthetic oligonucleotide; TTT chr11 5281416 5281437 5281433 5281438 +
tccatatttaatagaggtattt

SEQ ID NO: 93611 - DNA, 22 bp, Artificial Sequence
  Synthetic oligonucleotide; TTT chr11 5281417 5281438 5281434 5281439 +
ccatatttaatagaggtattta

SEQ ID NO: 93612 - DNA, 22 bp, Artificial Sequence
  Synthetic oligonucleotide; TTC chr11 5281418 5281439 5281435 5281440 +
catatttaatagaggtatttat

SEQ ID NO: 93613 - DNA, 22 bp, Artificial Sequence
  Synthetic oligonucleotide; TTT chr11 5281425 5281446 5281442 5281447 +
aatagaggtatttatgggatgg

SEQ ID NO: 93614 - DNA, 22 bp, Artificial Sequence
  Synthetic oligonucleotide; TTA chr11 5281426 5281447 5281443 5281448 +
atagaggtatttatgggatggg

SEQ ID NO: 93615 - DNA, 22 bp, Artificial Sequence
  Synthetic oligonucleotide; TTT chr11 5281438 5281459 5281455 5281460 +
atgggatgggggaaaagaatgt

SEQ ID NO: 93616 - DNA, 22 bp, Artificial Sequence
  Synthetic oligonucleotide; TTA chr11 5281439 5281460 5281456 5281461 +
tgggatgggggaaaagaatgtt

SEQ ID NO: 93617 - DNA, 22 bp, Artificial Sequence
  Synthetic oligonucleotide; TTT chr11 5281462 5281483 5281479 5281484 +
ctctcactgtggattattttag

SEQ ID NO: 93618 - DNA, 22 bp, Artificial Sequence
  Synthetic oligonucleotide; TTC chr11 5281463 5281484 5281480 5281485 +
tctcactgtggattattttaga

SEQ ID NO: 93619 - DNA, 22 bp, Artificial Sequence
  Synthetic oligonucleotide; CTC chr11 5281465 5281486 5281482 5281487 +
tcactgtggattattttagaga

SEQ ID NO: 93620 - DNA, 22 bp, Artificial Sequence
  Synthetic oligonucleotide; CTC chr11 5281467 5281488 5281484 5281489 +
actgtggattattttagagagt

SEQ ID NO: 93621 - DNA, 22 bp, Artificial Sequence
  Synthetic oligonucleotide; CTG chr11 5281471 5281492 5281488 5281493 +
tggattattttagagagtggag

SEQ ID NO: 93622 - DNA, 22 bp, Artificial Sequence
  Synthetic oligonucleotide; TTA chr11 5281478 5281499 5281495 5281500 +
ttttagagagtggagaatggtc

SEQ ID NO: 93623 - DNA, 22 bp, Artificial Sequence
  Synthetic oligonucleotide; TTT chr11 5281481 5281502 5281498 5281503 +
tagagagtggagaatggtcaag

SEQ ID NO: 93624 - DNA, 22 bp, Artificial Sequence
  Synthetic oligonucleotide; TTT chr11 5281482 5281503 5281499 5281504 +
agagagtggagaatggtcaaga

SEQ ID NO: 93625 - DNA, 22 bp, Artificial Sequence
  Synthetic oligonucleotide; TTA chr11 5281483 5281504 5281500 5281505 +
gagagtggagaatggtcaagat

SEQ ID NO: 93626 - DNA, 22 bp, Artificial Sequence
  Synthetic oligonucleotide; TTT chr11 5281507 5281528 5281524 5281529 +
ttttaaaaattaagaaaacata

SEQ ID NO: 93627 - DNA, 22 bp, Artificial Sequence
  Synthetic oligonucleotide; TTT chr11 5281508 5281529 5281525 5281530 +
tttaaaaattaagaaaacataa

SEQ ID NO: 93628 - DNA, 22 bp, Artificial Sequence
  Synthetic oligonucleotide; TTT chr11 5281509 5281530 5281526 5281531 +
ttaaaaattaagaaaacataag

SEQ ID NO: 93629 - DNA, 22 bp, Artificial Sequence
  Synthetic oligonucleotide; TTT chr11 5281510 5281531 5281527 5281532 +
taaaaattaagaaaacataagt

SEQ ID NO: 93630 - DNA, 22 bp, Artificial Sequence
  Synthetic oligonucleotide; TTT chr11 5281511 5281532 5281528 5281533 +
aaaaattaagaaaacataagtt

SEQ ID NO: 93631 - DNA, 22 bp, Artificial Sequence
  Synthetic oligonucleotide; TTA chr11 5281512 5281533 5281529 5281534 +
aaaattaagaaaacataagttg

SEQ ID NO: 93632 - DNA, 22 bp, Artificial Sequence
  Synthetic oligonucleotide; TTA chr11 5281519 5281540 5281536 5281541 +
agaaaacataagttggaccttg

SEQ ID NO: 93633 - DNA, 22 bp, Artificial Sequence
  Synthetic oligonucleotide; TTG chr11 5281534 5281555 5281551 5281556 +
gaccttgagaaatgaaaattta

SEQ ID NO: 93634 - DNA, 22 bp, Artificial Sequence
  Synthetic oligonucleotide; CTT chr11 5281540 5281561 5281557 5281562 +
gagaaatgaaaatttatttttt

SEQ ID NO: 93635 - DNA, 22 bp, Artificial Sequence
  Synthetic oligonucleotide; TTG chr11 5281541 5281562 5281558 5281563 +
agaaatgaaaatttattttttt

SEQ ID NO: 93636 - DNA, 22 bp, Artificial Sequence
  Synthetic oligonucleotide; TTT chr11 5281555 5281576 5281572 5281577 +
atttttttgttggaggataccc

SEQ ID NO: 93637 - DNA, 22 bp, Artificial Sequence
  Synthetic oligonucleotide; TTA chr11 5281556 5281577 5281573 5281578 +
tttttttgttggaggataccca

SEQ ID NO: 93638 - DNA, 22 bp, Artificial Sequence
  Synthetic oligonucleotide; TTT chr11 5281559 5281580 5281576 5281581 +
ttttgttggaggatacccattc

SEQ ID NO: 93639 - DNA, 22 bp, Artificial Sequence
  Synthetic oligonucleotide; TTT chr11 5281560 5281581 5281577 5281582 +
tttgttggaggatacccattct

SEQ ID NO: 93640 - DNA, 22 bp, Artificial Sequence
  Synthetic oligonucleotide; TTT chr11 5281561 5281582 5281578 5281583 +
ttgttggaggatacccattctc

SEQ ID NO: 93641 - DNA, 22 bp, Artificial Sequence
  Synthetic oligonucleotide; TTT chr11 5281562 5281583 5281579 5281584 +
tgttggaggatacccattctct

SEQ ID NO: 93642 - DNA, 22 bp, Artificial Sequence
  Synthetic oligonucleotide; TTT chr11 5281563 5281584 5281580 5281585 +
gttggaggatacccattctcta

SEQ ID NO: 93643 - DNA, 22 bp, Artificial Sequence
  Synthetic oligonucleotide; TTG chr11 5281564 5281585 5281581 5281586 +
ttggaggatacccattctctat

SEQ ID NO: 93644 - DNA, 22 bp, Artificial Sequence
  Synthetic oligonucleotide; TTG chr11 5281567 5281588 5281584 5281589 +
gaggatacccattctctatctc

SEQ ID NO: 93645 - DNA, 22 bp, Artificial Sequence
  Synthetic oligonucleotide; TTC chr11 5281581 5281602 5281598 5281603 +
tctatctcccatcagggcaagc

SEQ ID NO: 93646 - DNA, 22 bp, Artificial Sequence
  Synthetic oligonucleotide; CTC chr11 5281583 5281604 5281600 5281605 +
tatctcccatcagggcaagctg

SEQ ID NO: 93647 - DNA, 22 bp, Artificial Sequence
  Synthetic oligonucleotide; CTA chr11 5281585 5281606 5281602 5281607 +
tctcccatcagggcaagctgta

SEQ ID NO: 93648 - DNA, 22 bp, Artificial Sequence
  Synthetic oligonucleotide; CTC chr11 5281589 5281610 5281606 5281611 +
ccatcagggcaagctgtaagga

SEQ ID NO: 93649 - DNA, 22 bp, Artificial Sequence
  Synthetic oligonucleotide; CTG chr11 5281605 5281626 5281622 5281627 +
taaggaactggctaagacacag

SEQ ID NO: 93650 - DNA, 22 bp, Artificial Sequence
  Synthetic oligonucleotide; CTG chr11 5281615 5281636 5281632 5281637 +
gctaagacacagtgagacagag

SEQ ID NO: 93651 - DNA, 22 bp, Artificial Sequence
  Synthetic oligonucleotide; CTA chr11 5281619 5281640 5281636 5281641 +
agacacagtgagacagagtgac

SEQ ID NO: 93652 - DNA, 22 bp, Artificial Sequence
  Synthetic oligonucleotide; CTT chr11 5281643 5281664 5281660 5281665 +
agtcttagaggccccactggta

SEQ ID NO: 93653 - DNA, 22 bp, Artificial Sequence
  Synthetic oligonucleotide; TTA chr11 5281644 5281665 5281661 5281666 +
gtcttagaggccccactggtac

SEQ ID NO: 93654 - DNA, 22 bp, Artificial Sequence
  Synthetic oligonucleotide; CTT chr11 5281649 5281670 5281666 5281671 +
agaggccccactggtacccaga

SEQ ID NO: 93655 - DNA, 22 bp, Artificial Sequence
  Synthetic oligonucleotide; TTA chr11 5281650 5281671 5281667 5281672 +
gaggccccactggtacccagat

SEQ ID NO: 93656 - DNA, 22 bp, Artificial Sequence
  Synthetic oligonucleotide; CTG chr11 5281662 5281683 5281679 5281684 +
gtacccagatgagaaggcacct

SEQ ID NO: 93657 - DNA, 22 bp, Artificial Sequence
  Synthetic oligonucleotide; CTT chr11 5281685 5281706 5281702 5281707 +
catcactcatcacagtcagctc

SEQ ID NO: 93658 - DNA, 22 bp, Artificial Sequence
  Synthetic oligonucleotide; TTC chr11 5281686 5281707 5281703 5281708 +
atcactcatcacagtcagctct

SEQ ID NO: 93659 - DNA, 22 bp, Artificial Sequence
  Synthetic oligonucleotide; CTC chr11 5281693 5281714 5281710 5281715 +
atcacagtcagctctgcctttc

SEQ ID NO: 93660 - DNA, 22 bp, Artificial Sequence
  Synthetic oligonucleotide; CTC chr11 5281707 5281728 5281724 5281729 +
tgcctttctcctctctcctttc

SEQ ID NO: 93661 - DNA, 22 bp, Artificial Sequence
  Synthetic oligonucleotide; CTG chr11 5281709 5281730 5281726 5281731 +
cctttctcctctctcctttctc

SEQ ID NO: 93662 - DNA, 22 bp, Artificial Sequence
  Synthetic oligonucleotide; CTT chr11 5281713 5281734 5281730 5281735 +
tctcctctctcctttctcatca

SEQ ID NO: 93663 - DNA, 22 bp, Artificial Sequence
  Synthetic oligonucleotide; TTT chr11 5281714 5281735 5281731 5281736 +
ctcctctctcctttctcatcag

SEQ ID NO: 93664 - DNA, 22 bp, Artificial Sequence
  Synthetic oligonucleotide; TTC chr11 5281715 5281736 5281732 5281737 +
tcctctctcctttctcatcaga

SEQ ID NO: 93665 - DNA, 22 bp, Artificial Sequence
  Synthetic oligonucleotide; CTC chr11 5281717 5281738 5281734 5281739 +
ctctctcctttctcatcagaaa

SEQ ID NO: 93666 - DNA, 22 bp, Artificial Sequence
  Synthetic oligonucleotide; CTC chr11 5281720 5281741 5281737 5281742 +
tctcctttctcatcagaaattt

SEQ ID NO: 93667 - DNA, 22 bp, Artificial Sequence
  Synthetic oligonucleotide; CTC chr11 5281722 5281743 5281739 5281744 +
tcctttctcatcagaaatttca

SEQ ID NO: 93668 - DNA, 22 bp, Artificial Sequence
  Synthetic oligonucleotide; CTC chr11 5281724 5281745 5281741 5281746 +
ctttctcatcagaaatttcata

SEQ ID NO: 93669 - DNA, 22 bp, Artificial Sequence
  Synthetic oligonucleotide; CTT chr11 5281727 5281748 5281744 5281749 +
tctcatcagaaatttcataagt

SEQ ID NO: 93670 - DNA, 22 bp, Artificial Sequence
  Synthetic oligonucleotide; TTT chr11 5281728 5281749 5281745 5281750 +
ctcatcagaaatttcataagtc

SEQ ID NO: 93671 - DNA, 22 bp, Artificial Sequence
  Synthetic oligonucleotide; TTC chr11 5281729 5281750 5281746 5281751 +
tcatcagaaatttcataagtct

SEQ ID NO: 93672 - DNA, 22 bp, Artificial Sequence
  Synthetic oligonucleotide; CTC chr11 5281731 5281752 5281748 5281753 +
atcagaaatttcataagtctac

SEQ ID NO: 93673 - DNA, 22 bp, Artificial Sequence
  Synthetic oligonucleotide; TTT chr11 5281742 5281763 5281759 5281764 +
cataagtctactagggtcaggc

SEQ ID NO: 93674 - DNA, 22 bp, Artificial Sequence
  Synthetic oligonucleotide; TTC chr11 5281743 5281764 5281760 5281765 +
ataagtctactagggtcaggca

SEQ ID NO: 93675 - DNA, 22 bp, Artificial Sequence
  Synthetic oligonucleotide; CTA chr11 5281752 5281773 5281769 5281774 +
ctagggtcaggcagatcacata

SEQ ID NO: 93676 - DNA, 22 bp, Artificial Sequence
  Synthetic oligonucleotide; CTA chr11 5281755 5281776 5281772 5281777 +
gggtcaggcagatcacataaga

SEQ ID NO: 93677 - DNA, 22 bp, Artificial Sequence
  Synthetic oligonucleotide; TTA chr11 5281794 5281815 5281811 5281816 +
aggtctgcagtgagtatgagcc

SEQ ID NO: 93678 - DNA, 22 bp, Artificial Sequence
  Synthetic oligonucleotide; CTG chr11 5281801 5281822 5281818 5281823 +
cagtgagtatgagcccatccct

SEQ ID NO: 93679 - DNA, 22 bp, Artificial Sequence
  Synthetic oligonucleotide; CTG chr11 5281824 5281845 5281841 5281846 +
atgaattaaggcaatcaacact

SEQ ID NO: 93680 - DNA, 22 bp, Artificial Sequence
  Synthetic oligonucleotide; TTA chr11 5281832 5281853 5281849 5281854 +
aggcaatcaacactttaggcag

SEQ ID NO: 93681 - DNA, 22 bp, Artificial Sequence
  Synthetic oligonucleotide; CTT chr11 5281847 5281868 5281864 5281869 +
taggcagccatgttgccatgag

SEQ ID NO: 93682 - DNA, 22 bp, Artificial Sequence
  Synthetic oligonucleotide; TTT chr11 5281848 5281869 5281865 5281870 +
aggcagccatgttgccatgaga

SEQ ID NO: 93683 - DNA, 22 bp, Artificial Sequence
  Synthetic oligonucleotide; TTA chr11 5281849 5281870 5281866 5281871 +
ggcagccatgttgccatgagag

SEQ ID NO: 93684 - DNA, 22 bp, Artificial Sequence
  Synthetic oligonucleotide; TTG chr11 5281862 5281883 5281879 5281884 +
ccatgagagattaggaggggcc

SEQ ID NO: 93685 - DNA, 22 bp, Artificial Sequence
  Synthetic oligonucleotide; TTA chr11 5281875 5281896 5281892 5281897 +
ggaggggccaaatgagcccaga

SEQ ID NO: 93686 - DNA, 22 bp, Artificial Sequence
  Synthetic oligonucleotide; CTA chr11 5281908 5281929 5281925 5281930 +
cttcttagatgatcttgagcaa

SEQ ID NO: 93687 - DNA, 22 bp, Artificial Sequence
  Synthetic oligonucleotide; CTT chr11 5281911 5281932 5281928 5281933 +
cttagatgatcttgagcaagtt

SEQ ID NO: 93688 - DNA, 22 bp, Artificial Sequence
  Synthetic oligonucleotide; TTC chr11 5281912 5281933 5281929 5281934 +
ttagatgatcttgagcaagttg

SEQ ID NO: 93689 - DNA, 22 bp, Artificial Sequence
  Synthetic oligonucleotide; CTT chr11 5281914 5281935 5281931 5281936 +
agatgatcttgagcaagttgct

SEQ ID NO: 93690 - DNA, 22 bp, Artificial Sequence
  Synthetic oligonucleotide; TTA chr11 5281915 5281936 5281932 5281937 +
gatgatcttgagcaagttgctt

SEQ ID NO: 93691 - DNA, 22 bp, Artificial Sequence
  Synthetic oligonucleotide; CTT chr11 5281924 5281945 5281941 5281946 +
gagcaagttgcttaacttcttg

SEQ ID NO: 93692 - DNA, 22 bp, Artificial Sequence
  Synthetic oligonucleotide; TTG chr11 5281925 5281946 5281942 5281947 +
agcaagttgcttaacttcttga

SEQ ID NO: 93693 - DNA, 22 bp, Artificial Sequence
  Synthetic oligonucleotide; TTG chr11 5281934 5281955 5281951 5281956 +
cttaacttcttgaagtctctga

SEQ ID NO: 93694 - DNA, 22 bp, Artificial Sequence
  Synthetic oligonucleotide; CTT chr11 5281937 5281958 5281954 5281959 +
aacttcttgaagtctctgaaat

SEQ ID NO: 93695 - DNA, 22 bp, Artificial Sequence
  Synthetic oligonucleotide; TTA chr11 5281938 5281959 5281955 5281960 +
acttcttgaagtctctgaaata

SEQ ID NO: 93696 - DNA, 22 bp, Artificial Sequence
  Synthetic oligonucleotide; CTT chr11 5281942 5281963 5281959 5281964 +
cttgaagtctctgaaatatagg

SEQ ID NO: 93697 - DNA, 22 bp, Artificial Sequence
  Synthetic oligonucleotide; TTC chr11 5281943 5281964 5281960 5281965 +
ttgaagtctctgaaatatagga

SEQ ID NO: 93698 - DNA, 22 bp, Artificial Sequence
  Synthetic oligonucleotide; CTT chr11 5281945 5281966 5281962 5281967 +
gaagtctctgaaatataggatg

SEQ ID NO: 93699 - DNA, 22 bp, Artificial Sequence
  Synthetic oligonucleotide; TTG chr11 5281946 5281967 5281963 5281968 +
aagtctctgaaatataggatga

SEQ ID NO: 93700 - DNA, 22 bp, Artificial Sequence
  Synthetic oligonucleotide; CTC chr11 5281953 5281974 5281970 5281975 +
tgaaatataggatgataatatg

SEQ ID NO: 93701 - DNA, 22 bp, Artificial Sequence
  Synthetic oligonucleotide; CTG chr11 5281955 5281976 5281972 5281977 +
aaatataggatgataatatgta

SEQ ID NO: 93702 - DNA, 22 bp, Artificial Sequence
  Synthetic oligonucleotide; TTA chr11 5281980 5282001 5281997 5282002 +
gctaatagaattatgaggatga

SEQ ID NO: 93703 - DNA, 22 bp, Artificial Sequence
  Synthetic oligonucleotide; CTA chr11 5281984 5282005 5282001 5282006 +
atagaattatgaggatgagatt

SEQ ID NO: 93704 - DNA, 22 bp, Artificial Sequence
  Synthetic oligonucleotide; TTA chr11 5281993 5282014 5282010 5282015 +
tgaggatgagattagtttattg

SEQ ID NO: 93705 - DNA, 22 bp, Artificial Sequence
  Synthetic oligonucleotide; TTA chr11 5282007 5282028 5282024 5282029 +
gtttattgtgtaaagaactagg

SEQ ID NO: 93706 - DNA, 22 bp, Artificial Sequence
  Synthetic oligonucleotide; TTT chr11 5282011 5282032 5282028 5282033 +
attgtgtaaagaactagggaca

SEQ ID NO: 93707 - DNA, 22 bp, Artificial Sequence
  Synthetic oligonucleotide; TTA chr11 5282012 5282033 5282029 5282034 +
ttgtgtaaagaactagggacac

SEQ ID NO: 93708 - DNA, 22 bp, Artificial Sequence
  Synthetic oligonucleotide; TTG chr11 5282015 5282036 5282032 5282037 +
tgtaaagaactagggacacagt

SEQ ID NO: 93709 - DNA, 22 bp, Artificial Sequence
  Synthetic oligonucleotide; CTA chr11 5282027 5282048 5282044 5282049 +
gggacacagtatatattcagta

SEQ ID NO: 93710 - DNA, 22 bp, Artificial Sequence
  Synthetic oligonucleotide; TTC chr11 5282045 5282066 5282062 5282067 +
agtaagtgttttctgttacagt

SEQ ID NO: 93711 - DNA, 22 bp, Artificial Sequence
  Synthetic oligonucleotide; TTT chr11 5282056 5282077 5282073 5282078 +
tctgttacagtattatgataaa

SEQ ID NO: 93712 - DNA, 22 bp, Artificial Sequence
  Synthetic oligonucleotide; TTT chr11 5282057 5282078 5282074 5282079 +
ctgttacagtattatgataaat

SEQ ID NO: 93713 - DNA, 22 bp, Artificial Sequence
  Synthetic oligonucleotide; TTC chr11 5282058 5282079 5282075 5282080 +
tgttacagtattatgataaata

SEQ ID NO: 93714 - DNA, 22 bp, Artificial Sequence
  Synthetic oligonucleotide; CTG chr11 5282060 5282081 5282077 5282082 +
ttacagtattatgataaatata

SEQ ID NO: 93715 - DNA, 22 bp, Artificial Sequence
  Synthetic oligonucleotide; TTA chr11 5282063 5282084 5282080 5282085 +
cagtattatgataaatatatac

SEQ ID NO: 93716 - DNA, 22 bp, Artificial Sequence
  Synthetic oligonucleotide; TTA chr11 5282071 5282092 5282088 5282093 +
tgataaatatatacatgcaact

SEQ ID NO: 93717 - DNA, 22 bp, Artificial Sequence
  Synthetic oligonucleotide; CTA chr11 5282094 5282115 5282111 5282116 +
ttacagttgcatgctaccttaa

SEQ ID NO: 93718 - DNA, 22 bp, Artificial Sequence
  Synthetic oligonucleotide; TTA chr11 5282097 5282118 5282114 5282119 +
cagttgcatgctaccttaaaga

SEQ ID NO: 93719 - DNA, 22 bp, Artificial Sequence
  Synthetic oligonucleotide; TTG chr11 5282103 5282124 5282120 5282125 +
catgctaccttaaagaataatt

SEQ ID NO: 93720 - DNA, 22 bp, Artificial Sequence
  Synthetic oligonucleotide; CTA chr11 5282110 5282131 5282127 5282132 +
ccttaaagaataattggaggta

SEQ ID NO: 93721 - DNA, 22 bp, Artificial Sequence
  Synthetic oligonucleotide; CTT chr11 5282114 5282135 5282131 5282136 +
aaagaataattggaggtacagt

SEQ ID NO: 93722 - DNA, 22 bp, Artificial Sequence
  Synthetic oligonucleotide; TTA chr11 5282115 5282136 5282132 5282137 +
aagaataattggaggtacagtt

SEQ ID NO: 93723 - DNA, 22 bp, Artificial Sequence
  Synthetic oligonucleotide; TTG chr11 5282126 5282147 5282143 5282148 +
gaggtacagttattcggaggta

SEQ ID NO: 93724 - DNA, 22 bp, Artificial Sequence
  Synthetic oligonucleotide; TTA chr11 5282138 5282159 5282155 5282160 +
ttcggaggtatttcttgactgt

SEQ ID NO: 93725 - DNA, 22 bp, Artificial Sequence
  Synthetic oligonucleotide; TTC chr11 5282141 5282162 5282158 5282163 +
ggaggtatttcttgactgttaa

SEQ ID NO: 93726 - DNA, 22 bp, Artificial Sequence
  Synthetic oligonucleotide; TTT chr11 5282151 5282172 5282168 5282173 +
cttgactgttaatgttggcagc

SEQ ID NO: 93727 - DNA, 22 bp, Artificial Sequence
  Synthetic oligonucleotide; TTC chr11 5282152 5282173 5282169 5282174 +
ttgactgttaatgttggcagca

SEQ ID NO: 93728 - DNA, 22 bp, Artificial Sequence
  Synthetic oligonucleotide; CTT chr11 5282154 5282175 5282171 5282176 +
gactgttaatgttggcagcaga

SEQ ID NO: 93729 - DNA, 22 bp, Artificial Sequence
  Synthetic oligonucleotide; TTG chr11 5282155 5282176 5282172 5282177 +
actgttaatgttggcagcagat

SEQ ID NO: 93730 - DNA, 22 bp, Artificial Sequence
  Synthetic oligonucleotide; CTG chr11 5282159 5282180 5282176 5282181 +
ttaatgttggcagcagattcag

SEQ ID NO: 93731 - DNA, 22 bp, Artificial Sequence
  Synthetic oligonucleotide; TTA chr11 5282162 5282183 5282179 5282184 +
atgttggcagcagattcagctt

SEQ ID NO: 93732 - DNA, 22 bp, Artificial Sequence
  Synthetic oligonucleotide; TTG chr11 5282168 5282189 5282185 5282190 +
gcagcagattcagcttatttta

SEQ ID NO: 93733 - DNA, 22 bp, Artificial Sequence
  Synthetic oligonucleotide; TTC chr11 5282179 5282200 5282196 5282201 +
agcttattttacaacactattc

SEQ ID NO: 93734 - DNA, 22 bp, Artificial Sequence
  Synthetic oligonucleotide; CTT chr11 5282184 5282205 5282201 5282206 +
attttacaacactattcagacc

SEQ ID NO: 93735 - DNA, 22 bp, Artificial Sequence
  Synthetic oligonucleotide; TTA chr11 5282185 5282206 5282202 5282207 +
ttttacaacactattcagacct

SEQ ID NO: 93736 - DNA, 22 bp, Artificial Sequence
  Synthetic oligonucleotide; TTT chr11 5282188 5282209 5282205 5282210 +
tacaacactattcagacctctc

SEQ ID NO: 93737 - DNA, 22 bp, Artificial Sequence
  Synthetic oligonucleotide; TTT chr11 5282189 5282210 5282206 5282211 +
acaacactattcagacctctca

SEQ ID NO: 93738 - DNA, 22 bp, Artificial Sequence
  Synthetic oligonucleotide; TTA chr11 5282190 5282211 5282207 5282212 +
caacactattcagacctctcac

SEQ ID NO: 93739 - DNA, 22 bp, Artificial Sequence
  Synthetic oligonucleotide; CTA chr11 5282198 5282219 5282215 5282220 +
ttcagacctctcacaataattc

SEQ ID NO: 93740 - DNA, 22 bp, Artificial Sequence
  Synthetic oligonucleotide; TTC chr11 5282201 5282222 5282218 5282223 +
agacctctcacaataattccct

SEQ ID NO: 93741 - DNA, 22 bp, Artificial Sequence
  Synthetic oligonucleotide; CTC chr11 5282208 5282229 5282225 5282230 +
tcacaataattccctaggagat

SEQ ID NO: 93742 - DNA, 22 bp, Artificial Sequence
  Synthetic oligonucleotide; CTC chr11 5282210 5282231 5282227 5282232 +
acaataattccctaggagatat

SEQ ID NO: 93743 - DNA, 22 bp, Artificial Sequence
  Synthetic oligonucleotide; TTC chr11 5282220 5282241 5282237 5282242 +
cctaggagatatttagacaaca

SEQ ID NO: 93744 - DNA, 22 bp, Artificial Sequence
  Synthetic oligonucleotide; CTA chr11 5282224 5282245 5282241 5282246 +
ggagatatttagacaacaagcc

SEQ ID NO: 93745 - DNA, 22 bp, Artificial Sequence
  Synthetic oligonucleotide; TTT chr11 5282234 5282255 5282251 5282256 +
agacaacaagccatcatgttgt

SEQ ID NO: 93746 - DNA, 22 bp, Artificial Sequence
  Synthetic oligonucleotide; TTA chr11 5282235 5282256 5282252 5282257 +
gacaacaagccatcatgttgta

SEQ ID NO: 93747 - DNA, 22 bp, Artificial Sequence
  Synthetic oligonucleotide; TTG chr11 5282255 5282276 5282272 5282277 +
taacttctcatttgtcttttct

SEQ ID NO: 93748 - DNA, 22 bp, Artificial Sequence
  Synthetic oligonucleotide; CTT chr11 5282261 5282282 5282278 5282283 +
ctcatttgtcttttctcactta

SEQ ID NO: 93749 - DNA, 22 bp, Artificial Sequence
  Synthetic oligonucleotide; TTC chr11 5282262 5282283 5282279 5282284 +
tcatttgtcttttctcacttac

SEQ ID NO: 93750 - DNA, 22 bp, Artificial Sequence
  Synthetic oligonucleotide; CTC chr11 5282264 5282285 5282281 5282286 +
atttgtcttttctcacttaccc

SEQ ID NO: 93751 - DNA, 22 bp, Artificial Sequence
  Synthetic oligonucleotide; TTT chr11 5282268 5282289 5282285 5282290 +
gtcttttctcacttaccctctc

SEQ ID NO: 93752 - DNA, 22 bp, Artificial Sequence
  Synthetic oligonucleotide; TTG chr11 5282269 5282290 5282286 5282291 +
tcttttctcacttaccctctca

SEQ ID NO: 93753 - DNA, 22 bp, Artificial Sequence
  Synthetic oligonucleotide; CTT chr11 5282273 5282294 5282290 5282295 +
ttctcacttaccctctcattca

SEQ ID NO: 93754 - DNA, 22 bp, Artificial Sequence
  Synthetic oligonucleotide; TTT chr11 5282274 5282295 5282291 5282296 +
tctcacttaccctctcattcac

SEQ ID NO: 93755 - DNA, 22 bp, Artificial Sequence
  Synthetic oligonucleotide; TTT chr11 5282275 5282296 5282292 5282297 +
ctcacttaccctctcattcacc

SEQ ID NO: 93756 - DNA, 22 bp, Artificial Sequence
  Synthetic oligonucleotide; TTC chr11 5282276 5282297 5282293 5282298 +
tcacttaccctctcattcaccc

SEQ ID NO: 93757 - DNA, 22 bp, Artificial Sequence
  Synthetic oligonucleotide; CTC chr11 5282278 5282299 5282295 5282300 +
acttaccctctcattcacccac

SEQ ID NO: 93758 - DNA, 22 bp, Artificial Sequence
  Synthetic oligonucleotide; CTT chr11 5282282 5282303 5282299 5282304 +
accctctcattcacccacctct

SEQ ID NO: 93759 - DNA, 22 bp, Artificial Sequence
  Synthetic oligonucleotide; TTA chr11 5282283 5282304 5282300 5282305 +
ccctctcattcacccacctctt

SEQ ID NO: 93760 - DNA, 22 bp, Artificial Sequence
  Synthetic oligonucleotide; CTC chr11 5282288 5282309 5282305 5282310 +
tcattcacccacctcttttgct

SEQ ID NO: 93761 - DNA, 22 bp, Artificial Sequence
  Synthetic oligonucleotide; CTC chr11 5282290 5282311 5282307 5282312 +
attcacccacctcttttgctct

SEQ ID NO: 93762 - DNA, 22 bp, Artificial Sequence
  Synthetic oligonucleotide; TTC chr11 5282294 5282315 5282311 5282316 +
acccacctcttttgctctctgt

SEQ ID NO: 93763 - DNA, 22 bp, Artificial Sequence
  Synthetic oligonucleotide; CTC chr11 5282303 5282324 5282320 5282325 +
ttttgctctctgttcctgtgaa

SEQ ID NO: 93764 - DNA, 22 bp, Artificial Sequence
  Synthetic oligonucleotide; CTT chr11 5282305 5282326 5282322 5282327 +
ttgctctctgttcctgtgaaag

SEQ ID NO: 93765 - DNA, 22 bp, Artificial Sequence
  Synthetic oligonucleotide; TTT chr11 5282306 5282327 5282323 5282328 +
tgctctctgttcctgtgaaagt

SEQ ID NO: 93766 - DNA, 22 bp, Artificial Sequence
  Synthetic oligonucleotide; TTT chr11 5282307 5282328 5282324 5282329 +
gctctctgttcctgtgaaagta

SEQ ID NO: 93767 - DNA, 22 bp, Artificial Sequence
  Synthetic oligonucleotide; TTG chr11 5282308 5282329 5282325 5282330 +
ctctctgttcctgtgaaagtac

SEQ ID NO: 93768 - DNA, 22 bp, Artificial Sequence
  Synthetic oligonucleotide; CTC chr11 5282311 5282332 5282328 5282333 +
tctgttcctgtgaaagtaccct

SEQ ID NO: 93769 - DNA, 22 bp, Artificial Sequence
  Synthetic oligonucleotide; CTC chr11 5282313 5282334 5282330 5282335 +
tgttcctgtgaaagtacccttc

SEQ ID NO: 93770 - DNA, 22 bp, Artificial Sequence
  Synthetic oligonucleotide; CTG chr11 5282315 5282336 5282332 5282337 +
ttcctgtgaaagtacccttcta

SEQ ID NO: 93771 - DNA, 22 bp, Artificial Sequence
  Synthetic oligonucleotide; TTC chr11 5282318 5282339 5282335 5282340 +
ctgtgaaagtacccttctactt

SEQ ID NO: 93772 - DNA, 22 bp, Artificial Sequence
  Synthetic oligonucleotide; CTG chr11 5282321 5282342 5282338 5282343 +
tgaaagtacccttctacttagc

SEQ ID NO: 93773 - DNA, 22 bp, Artificial Sequence
  Synthetic oligonucleotide; CTT chr11 5282334 5282355 5282351 5282356 +
ctacttagcctacttttgacca

SEQ ID NO: 93774 - DNA, 22 bp, Artificial Sequence
  Synthetic oligonucleotide; TTC chr11 5282335 5282356 5282352 5282357 +
tacttagcctacttttgaccag

SEQ ID NO: 93775 - DNA, 22 bp, Artificial Sequence
  Synthetic oligonucleotide; CTA chr11 5282337 5282358 5282354 5282359 +
cttagcctacttttgaccagtg

SEQ ID NO: 93776 - DNA, 22 bp, Artificial Sequence
  Synthetic oligonucleotide; CTT chr11 5282340 5282361 5282357 5282362 +
agcctacttttgaccagtgtgc

SEQ ID NO: 93777 - DNA, 22 bp, Artificial Sequence
  Synthetic oligonucleotide; TTA chr11 5282341 5282362 5282358 5282363 +
gcctacttttgaccagtgtgca

SEQ ID NO: 93778 - DNA, 22 bp, Artificial Sequence
  Synthetic oligonucleotide; CTA chr11 5282346 5282367 5282363 5282368 +
cttttgaccagtgtgcatgtca

SEQ ID NO: 93779 - DNA, 22 bp, Artificial Sequence
  Synthetic oligonucleotide; CTT chr11 5282349 5282370 5282366 5282371 +
ttgaccagtgtgcatgtcactg

SEQ ID NO: 93780 - DNA, 22 bp, Artificial Sequence
  Synthetic oligonucleotide; TTT chr11 5282350 5282371 5282367 5282372 +
tgaccagtgtgcatgtcactgg

SEQ ID NO: 93781 - DNA, 22 bp, Artificial Sequence
  Synthetic oligonucleotide; TTT chr11 5282351 5282372 5282368 5282373 +
gaccagtgtgcatgtcactggg

SEQ ID NO: 93782 - DNA, 22 bp, Artificial Sequence
  Synthetic oligonucleotide; TTG chr11 5282352 5282373 5282369 5282374 +
accagtgtgcatgtcactgggc

SEQ ID NO: 93783 - DNA, 22 bp, Artificial Sequence
  Synthetic oligonucleotide; CTG chr11 5282371 5282392 5282388 5282393 +
ggcaatacaagacctctgagct

SEQ ID NO: 93784 - DNA, 22 bp, Artificial Sequence
  Synthetic oligonucleotide; CTC chr11 5282387 5282408 5282404 5282409 +
tgagctttggcttagaaggaaa

SEQ ID NO: 93785 - DNA, 22 bp, Artificial Sequence
  Synthetic oligonucleotide; CTG chr11 5282389 5282410 5282406 5282411 +
agctttggcttagaaggaaata

SEQ ID NO: 93786 - DNA, 22 bp, Artificial Sequence
  Synthetic oligonucleotide; CTT chr11 5282394 5282415 5282411 5282416 +
tggcttagaaggaaatacaata

SEQ ID NO: 93787 - DNA, 22 bp, Artificial Sequence
  Synthetic oligonucleotide; TTT chr11 5282395 5282416 5282412 5282417 +
ggcttagaaggaaatacaataa

SEQ ID NO: 93788 - DNA, 22 bp, Artificial Sequence
  Synthetic oligonucleotide; TTG chr11 5282396 5282417 5282413 5282418 +
gcttagaaggaaatacaataat

SEQ ID NO: 93789 - DNA, 22 bp, Artificial Sequence
  Synthetic oligonucleotide; CTT chr11 5282400 5282421 5282417 5282422 +
agaaggaaatacaataatggct

SEQ ID NO: 93790 - DNA, 22 bp, Artificial Sequence
  Synthetic oligonucleotide; TTA chr11 5282401 5282422 5282418 5282423 +
gaaggaaatacaataatggcta

SEQ ID NO: 93791 - DNA, 22 bp, Artificial Sequence
  Synthetic oligonucleotide; CTA chr11 5282423 5282444 5282440 5282445 +
atttttgagaaagaggaactct

SEQ ID NO: 93792 - DNA, 22 bp, Artificial Sequence
  Synthetic oligonucleotide; TTT chr11 5282427 5282448 5282444 5282449 +
ttgagaaagaggaactctagcc

SEQ ID NO: 93793 - DNA, 22 bp, Artificial Sequence
  Synthetic oligonucleotide; TTT chr11 5282428 5282449 5282445 5282450 +
tgagaaagaggaactctagccc

SEQ ID NO: 93794 - DNA, 22 bp, Artificial Sequence
  Synthetic oligonucleotide; TTT chr11 5282429 5282450 5282446 5282451 +
gagaaagaggaactctagccca

SEQ ID NO: 93795 - DNA, 22 bp, Artificial Sequence
  Synthetic oligonucleotide; TTG chr11 5282430 5282451 5282447 5282452 +
agaaagaggaactctagcccat

SEQ ID NO: 93796 - DNA, 22 bp, Artificial Sequence
  Synthetic oligonucleotide; CTC chr11 5282444 5282465 5282461 5282466 +
tagcccatcagggaagacatag

SEQ ID NO: 93797 - DNA, 22 bp, Artificial Sequence
  Synthetic oligonucleotide; CTA chr11 5282446 5282467 5282463 5282468 +
gcccatcagggaagacataggg

SEQ ID NO: 93798 - DNA, 22 bp, Artificial Sequence
  Synthetic oligonucleotide; TTC chr11 5282473 5282494 5282490 5282495 +
tgtaggaatgagttcttccatt

SEQ ID NO: 93799 - DNA, 22 bp, Artificial Sequence
  Synthetic oligonucleotide; CTG chr11 5282475 5282496 5282492 5282497 +
taggaatgagttcttccattct

SEQ ID NO: 93800 - DNA, 22 bp, Artificial Sequence
  Synthetic oligonucleotide; TTC chr11 5282488 5282509 5282505 5282510 +
ttccattctttttacagatgag

SEQ ID NO: 93801 - DNA, 22 bp, Artificial Sequence
  Synthetic oligonucleotide; CTT chr11 5282490 5282511 5282507 5282512 +
ccattctttttacagatgagaa

SEQ ID NO: 93802 - DNA, 22 bp, Artificial Sequence
  Synthetic oligonucleotide; TTC chr11 5282491 5282512 5282508 5282513 +
cattctttttacagatgagaaa

SEQ ID NO: 93803 - DNA, 22 bp, Artificial Sequence
  Synthetic oligonucleotide; TTC chr11 5282496 5282517 5282513 5282518 +
tttttacagatgagaaagacaa

SEQ ID NO: 93804 - DNA, 22 bp, Artificial Sequence
  Synthetic oligonucleotide; CTT chr11 5282498 5282519 5282515 5282520 +
tttacagatgagaaagacaatg

SEQ ID NO: 93805 - DNA, 22 bp, Artificial Sequence
  Synthetic oligonucleotide; TTT chr11 5282499 5282520 5282516 5282521 +
ttacagatgagaaagacaatgt

SEQ ID NO: 93806 - DNA, 22 bp, Artificial Sequence
  Synthetic oligonucleotide; TTT chr11 5282500 5282521 5282517 5282522 +
tacagatgagaaagacaatgtg

SEQ ID NO: 93807 - DNA, 22 bp, Artificial Sequence
  Synthetic oligonucleotide; TTT chr11 5282501 5282522 5282518 5282523 +
acagatgagaaagacaatgtga

SEQ ID NO: 93808 - DNA, 22 bp, Artificial Sequence
  Synthetic oligonucleotide; TTA chr11 5282502 5282523 5282519 5282524 +
cagatgagaaagacaatgtgaa

SEQ ID NO: 93809 - DNA, 22 bp, Artificial Sequence
  Synthetic oligonucleotide; TTT chr11 5282538 5282559 5282555 5282560 +
taaagtagttagcatatggaga

SEQ ID NO: 93810 - DNA, 22 bp, Artificial Sequence
  Synthetic oligonucleotide; TTT chr11 5282539 5282560 5282556 5282561 +
aaagtagttagcatatggagaa

SEQ ID NO: 93811 - DNA, 22 bp, Artificial Sequence
  Synthetic oligonucleotide; TTA chr11 5282540 5282561 5282557 5282562 +
aagtagttagcatatggagaaa

SEQ ID NO: 93812 - DNA, 22 bp, Artificial Sequence
  Synthetic oligonucleotide; TTA chr11 5282549 5282570 5282566 5282571 +
gcatatggagaaatggcttgca

SEQ ID NO: 93813 - DNA, 22 bp, Artificial Sequence
  Synthetic oligonucleotide; CTT chr11 5282568 5282589 5282585 5282590 +
gcattggtaaaatttggggaaa

SEQ ID NO: 93814 - DNA, 22 bp, Artificial Sequence
  Synthetic oligonucleotide; TTG chr11 5282569 5282590 5282586 5282591 +
cattggtaaaatttggggaaac

SEQ ID NO: 93815 - DNA, 22 bp, Artificial Sequence
  Synthetic oligonucleotide; TTG chr11 5282574 5282595 5282591 5282596 +
gtaaaatttggggaaactttgt

SEQ ID NO: 93816 - DNA, 22 bp, Artificial Sequence
  Synthetic oligonucleotide; TTT chr11 5282583 5282604 5282600 5282605 +
ggggaaactttgttgtcagacc

SEQ ID NO: 93817 - DNA, 22 bp, Artificial Sequence
  Synthetic oligonucleotide; TTG chr11 5282584 5282605 5282601 5282606 +
gggaaactttgttgtcagaccc

SEQ ID NO: 93818 - DNA, 22 bp, Artificial Sequence
  Synthetic oligonucleotide; CTT chr11 5282593 5282614 5282610 5282615 +
tgttgtcagacccggcaaaggg

SEQ ID NO: 93819 - DNA, 22 bp, Artificial Sequence
  Synthetic oligonucleotide; TTT chr11 5282594 5282615 5282611 5282616 +
gttgtcagacccggcaaaggga

SEQ ID NO: 93820 - DNA, 22 bp, Artificial Sequence
  Synthetic oligonucleotide; TTG chr11 5282595 5282616 5282612 5282617 +
ttgtcagacccggcaaagggag

SEQ ID NO: 93821 - DNA, 22 bp, Artificial Sequence
  Synthetic oligonucleotide; TTG chr11 5282598 5282619 5282615 5282620 +
tcagacccggcaaagggagatg

SEQ ID NO: 93822 - DNA, 22 bp, Artificial Sequence
  Synthetic oligonucleotide; CTG chr11 5282631 5282652 5282648 5282653 +
cagtttcttctcatttcttgtg

SEQ ID NO: 93823 - DNA, 22 bp, Artificial Sequence
  Synthetic oligonucleotide; TTT chr11 5282637 5282658 5282654 5282659 +
cttctcatttcttgtgtaccta

SEQ ID NO: 93824 - DNA, 22 bp, Artificial Sequence
  Synthetic oligonucleotide; TTC chr11 5282638 5282659 5282655 5282660 +
ttctcatttcttgtgtacctat

SEQ ID NO: 93825 - DNA, 22 bp, Artificial Sequence
  Synthetic oligonucleotide; CTT chr11 5282640 5282661 5282657 5282662 +
ctcatttcttgtgtacctatca

SEQ ID NO: 93826 - DNA, 22 bp, Artificial Sequence
  Synthetic oligonucleotide; TTC chr11 5282641 5282662 5282658 5282663 +
tcatttcttgtgtacctatcac

SEQ ID NO: 93827 - DNA, 22 bp, Artificial Sequence
  Synthetic oligonucleotide; CTC chr11 5282643 5282664 5282660 5282665 +
atttcttgtgtacctatcacag

SEQ ID NO: 93828 - DNA, 22 bp, Artificial Sequence
  Synthetic oligonucleotide; TTT chr11 5282647 5282668 5282664 5282669 +
cttgtgtacctatcacagcacc

SEQ ID NO: 93829 - DNA, 22 bp, Artificial Sequence
  Synthetic oligonucleotide; TTC chr11 5282648 5282669 5282665 5282670 +
ttgtgtacctatcacagcacca

SEQ ID NO: 93830 - DNA, 22 bp, Artificial Sequence
  Synthetic oligonucleotide; CTT chr11 5282650 5282671 5282667 5282672 +
gtgtacctatcacagcaccaca

SEQ ID NO: 93831 - DNA, 22 bp, Artificial Sequence
  Synthetic oligonucleotide; TTG chr11 5282651 5282672 5282668 5282673 +
tgtacctatcacagcaccacag

SEQ ID NO: 93832 - DNA, 22 bp, Artificial Sequence
  Synthetic oligonucleotide; CTA chr11 5282659 5282680 5282676 5282681 +
tcacagcaccacagcactattc

SEQ ID NO: 93833 - DNA, 22 bp, Artificial Sequence
  Synthetic oligonucleotide; CTA chr11 5282678 5282699 5282695 5282700 +
ttcctagcatagtttagggccc

SEQ ID NO: 93834 - DNA, 22 bp, Artificial Sequence
  Synthetic oligonucleotide; TTC chr11 5282681 5282702 5282698 5282703 +
ctagcatagtttagggccctca

SEQ ID NO: 93835 - DNA, 22 bp, Artificial Sequence
  Synthetic oligonucleotide; CTA chr11 5282684 5282705 5282701 5282706 +
gcatagtttagggccctcagtt

SEQ ID NO: 93836 - DNA, 22 bp, Artificial Sequence
  Synthetic oligonucleotide; TTT chr11 5282693 5282714 5282710 5282715 +
agggccctcagttcttgacgct

SEQ ID NO: 93837 - DNA, 22 bp, Artificial Sequence
  Synthetic oligonucleotide; TTA chr11 5282694 5282715 5282711 5282716 +
gggccctcagttcttgacgcta

SEQ ID NO: 93838 - DNA, 22 bp, Artificial Sequence
  Synthetic oligonucleotide; CTC chr11 5282702 5282723 5282719 5282724 +
agttcttgacgctagttagaat

SEQ ID NO: 93839 - DNA, 22 bp, Artificial Sequence
  Synthetic oligonucleotide; TTC chr11 5282707 5282728 5282724 5282729 +
ttgacgctagttagaatttcac

SEQ ID NO: 93840 - DNA, 22 bp, Artificial Sequence
  Synthetic oligonucleotide; CTT chr11 5282709 5282730 5282726 5282731 +
gacgctagttagaatttcacac

SEQ ID NO: 93841 - DNA, 22 bp, Artificial Sequence
  Synthetic oligonucleotide; TTG chr11 5282710 5282731 5282727 5282732 +
acgctagttagaatttcacaca

SEQ ID NO: 93842 - DNA, 22 bp, Artificial Sequence
  Synthetic oligonucleotide; CTA chr11 5282716 5282737 5282733 5282738 +
gttagaatttcacacaaactta

SEQ ID NO: 93843 - DNA, 22 bp, Artificial Sequence
  Synthetic oligonucleotide; TTA chr11 5282720 5282741 5282737 5282742 +
gaatttcacacaaacttaaact

SEQ ID NO: 93844 - DNA, 22 bp, Artificial Sequence
  Synthetic oligonucleotide; TTT chr11 5282726 5282747 5282743 5282748 +
cacacaaacttaaactagacaa

SEQ ID NO: 93845 - DNA, 22 bp, Artificial Sequence
  Synthetic oligonucleotide; TTC chr11 5282727 5282748 5282744 5282749 +
acacaaacttaaactagacaaa

SEQ ID NO: 93846 - DNA, 22 bp, Artificial Sequence
  Synthetic oligonucleotide; CTT chr11 5282737 5282758 5282754 5282759 +
aaactagacaaacatatgtatg

SEQ ID NO: 93847 - DNA, 22 bp, Artificial Sequence
  Synthetic oligonucleotide; TTA chr11 5282738 5282759 5282755 5282760 +
aactagacaaacatatgtatgt

SEQ ID NO: 93848 - DNA, 22 bp, Artificial Sequence
  Synthetic oligonucleotide; CTA chr11 5282743 5282764 5282760 5282765 +
gacaaacatatgtatgtttctg

SEQ ID NO: 93849 - DNA, 22 bp, Artificial Sequence
  Synthetic oligonucleotide; TTT chr11 5282762 5282783 5282779 5282784 +
ctgaggcactgaggtcactgca

SEQ ID NO: 93850 - DNA, 22 bp, Artificial Sequence
  Synthetic oligonucleotide; TTC chr11 5282763 5282784 5282780 5282785 +
tgaggcactgaggtcactgcag

SEQ ID NO: 93851 - DNA, 22 bp, Artificial Sequence
  Synthetic oligonucleotide; CTG chr11 5282765 5282786 5282782 5282787 +
aggcactgaggtcactgcagga

SEQ ID NO: 93852 - DNA, 22 bp, Artificial Sequence
  Synthetic oligonucleotide; CTG chr11 5282773 5282794 5282790 5282795 +
aggtcactgcaggatgaagacg

SEQ ID NO: 93853 - DNA, 22 bp, Artificial Sequence
  Synthetic oligonucleotide; CTG chr11 5282782 5282803 5282799 5282804 +
caggatgaagacggagccaatg

SEQ ID NO: 93854 - DNA, 22 bp, Artificial Sequence
  Synthetic oligonucleotide; TTA chr11 5282809 5282830 5282826 5282831 +
gaccagaagagtaaatgaacac

SEQ ID NO: 93855 - DNA, 22 bp, Artificial Sequence
  Synthetic oligonucleotide; CTA chr11 5282833 5282854 5282850 5282855 +
taacacataaacactcccttta

SEQ ID NO: 93856 - DNA, 22 bp, Artificial Sequence
  Synthetic oligonucleotide; CTC chr11 5282849 5282870 5282866 5282871 +
cctttaaccaaagttgcagctt

SEQ ID NO: 93857 - DNA, 22 bp, Artificial Sequence
  Synthetic oligonucleotide; CTT chr11 5282853 5282874 5282870 5282875 +
taaccaaagttgcagcttgacc

SEQ ID NO: 93858 - DNA, 22 bp, Artificial Sequence
  Synthetic oligonucleotide; TTT chr11 5282854 5282875 5282871 5282876 +
aaccaaagttgcagcttgacca

SEQ ID NO: 93859 - DNA, 22 bp, Artificial Sequence
  Synthetic oligonucleotide; TTA chr11 5282855 5282876 5282872 5282877 +
accaaagttgcagcttgaccaa

SEQ ID NO: 93860 - DNA, 22 bp, Artificial Sequence
  Synthetic oligonucleotide; TTG chr11 5282865 5282886 5282882 5282887 +
cagcttgaccaaggggtcaaag

SEQ ID NO: 93861 - DNA, 22 bp, Artificial Sequence
  Synthetic oligonucleotide; CTT chr11 5282871 5282892 5282888 5282893 +
gaccaaggggtcaaagggtaat

SEQ ID NO: 93862 - DNA, 22 bp, Artificial Sequence
  Synthetic oligonucleotide; TTG chr11 5282872 5282893 5282889 5282894 +
accaaggggtcaaagggtaatt

SEQ ID NO: 93863 - DNA, 22 bp, Artificial Sequence
  Synthetic oligonucleotide; TTT chr11 5282895 5282916 5282912 5282917 +
gggcaggcatgggccttcagtt

SEQ ID NO: 93864 - DNA, 22 bp, Artificial Sequence
  Synthetic oligonucleotide; TTG chr11 5282896 5282917 5282913 5282918 +
ggcaggcatgggccttcagttt

SEQ ID NO: 93865 - DNA, 22 bp, Artificial Sequence
  Synthetic oligonucleotide; CTT chr11 5282912 5282933 5282929 5282934 +
cagttttctcaagtgtctgctt

SEQ ID NO: 93866 - DNA, 22 bp, Artificial Sequence
  Synthetic oligonucleotide; TTC chr11 5282913 5282934 5282930 5282935 +
agttttctcaagtgtctgctta

SEQ ID NO: 93867 - DNA, 22 bp, Artificial Sequence
  Synthetic oligonucleotide; TTT chr11 5282918 5282939 5282935 5282940 +
tctcaagtgtctgcttataatt

SEQ ID NO: 93868 - DNA, 22 bp, Artificial Sequence
  Synthetic oligonucleotide; TTT chr11 5282919 5282940 5282936 5282941 +
ctcaagtgtctgcttataattt

SEQ ID NO: 93869 - DNA, 22 bp, Artificial Sequence
  Synthetic oligonucleotide; TTC chr11 5282920 5282941 5282937 5282942 +
tcaagtgtctgcttataatttg

SEQ ID NO: 93870 - DNA, 22 bp, Artificial Sequence
  Synthetic oligonucleotide; CTC chr11 5282922 5282943 5282939 5282944 +
aagtgtctgcttataatttgtc

SEQ ID NO: 93871 - DNA, 22 bp, Artificial Sequence
  Synthetic oligonucleotide; CTG chr11 5282931 5282952 5282948 5282953 +
cttataatttgtcatatgacaa

SEQ ID NO: 93872 - DNA, 22 bp, Artificial Sequence
  Synthetic oligonucleotide; CTT chr11 5282934 5282955 5282951 5282956 +
ataatttgtcatatgacaatct

SEQ ID NO: 93873 - DNA, 22 bp, Artificial Sequence
  Synthetic oligonucleotide; TTA chr11 5282935 5282956 5282952 5282957 +
taatttgtcatatgacaatctc

SEQ ID NO: 93874 - DNA, 22 bp, Artificial Sequence
  Synthetic oligonucleotide; TTT chr11 5282941 5282962 5282958 5282963 +
gtcatatgacaatctctgtaac

SEQ ID NO: 93875 - DNA, 22 bp, Artificial Sequence
  Synthetic oligonucleotide; TTG chr11 5282942 5282963 5282959 5282964 +
tcatatgacaatctctgtaacc

SEQ ID NO: 93876 - DNA, 22 bp, Artificial Sequence
  Synthetic oligonucleotide; CTC chr11 5282957 5282978 5282974 5282979 +
tgtaacccaagagaaaatctct

SEQ ID NO: 93877 - DNA, 22 bp, Artificial Sequence
  Synthetic oligonucleotide; CTG chr11 5282959 5282980 5282976 5282981 +
taacccaagagaaaatctcttt

SEQ ID NO: 93878 - DNA, 22 bp, Artificial Sequence
  Synthetic oligonucleotide; CTC chr11 5282978 5282999 5282995 5283000 +
tttattctgaagttgtttctaa

SEQ ID NO: 93879 - DNA, 22 bp, Artificial Sequence
  Synthetic oligonucleotide; CTT chr11 5282980 5283001 5282997 5283002 +
tattctgaagttgtttctaaat

SEQ ID NO: 93880 - DNA, 22 bp, Artificial Sequence
  Synthetic oligonucleotide; TTT chr11 5282981 5283002 5282998 5283003 +
attctgaagttgtttctaaatt

SEQ ID NO: 93881 - DNA, 22 bp, Artificial Sequence
  Synthetic oligonucleotide; TTA chr11 5282982 5283003 5282999 5283004 +
ttctgaagttgtttctaaattt

SEQ ID NO: 93882 - DNA, 22 bp, Artificial Sequence
  Synthetic oligonucleotide; TTC chr11 5282985 5283006 5283002 5283007 +
tgaagttgtttctaaatttttc

SEQ ID NO: 93883 - DNA, 22 bp, Artificial Sequence
  Synthetic oligonucleotide; CTG chr11 5282987 5283008 5283004 5283009 +
aagttgtttctaaatttttctt

SEQ ID NO: 93884 - DNA, 22 bp, Artificial Sequence
  Synthetic oligonucleotide; TTG chr11 5282993 5283014 5283010 5283015 +
tttctaaatttttctttacctt

SEQ ID NO: 93885 - DNA, 22 bp, Artificial Sequence
  Synthetic oligonucleotide; TTT chr11 5282996 5283017 5283013 5283018 +
ctaaatttttctttaccttttt

SEQ ID NO: 93886 - DNA, 22 bp, Artificial Sequence
  Synthetic oligonucleotide; TTC chr11 5282997 5283018 5283014 5283019 +
taaatttttctttacctttttc

SEQ ID NO: 93887 - DNA, 22 bp, Artificial Sequence
  Synthetic oligonucleotide; CTA chr11 5282999 5283020 5283016 5283021 +
aatttttctttacctttttctc

SEQ ID NO: 93888 - DNA, 22 bp, Artificial Sequence
  Synthetic oligonucleotide; TTT chr11 5283004 5283025 5283021 5283026 +
ttctttacctttttctccctca

SEQ ID NO: 93889 - DNA, 22 bp, Artificial Sequence
  Synthetic oligonucleotide; TTT chr11 5283005 5283026 5283022 5283027 +
tctttacctttttctccctcaa

SEQ ID NO: 93890 - DNA, 22 bp, Artificial Sequence
  Synthetic oligonucleotide; TTT chr11 5283006 5283027 5283023 5283028 +
ctttacctttttctccctcaaa

SEQ ID NO: 93891 - DNA, 22 bp, Artificial Sequence
  Synthetic oligonucleotide; TTC chr11 5283007 5283028 5283024 5283029 +
tttacctttttctccctcaaac

SEQ ID NO: 93892 - DNA, 22 bp, Artificial Sequence
  Synthetic oligonucleotide; CTT chr11 5283009 5283030 5283026 5283031 +
tacctttttctccctcaaactt

SEQ ID NO: 93893 - DNA, 22 bp, Artificial Sequence
  Synthetic oligonucleotide; TTT chr11 5283010 5283031 5283027 5283032 +
acctttttctccctcaaacttt

SEQ ID NO: 93894 - DNA, 22 bp, Artificial Sequence
  Synthetic oligonucleotide; TTA chr11 5283011 5283032 5283028 5283033 +
cctttttctccctcaaactttc

SEQ ID NO: 93895 - DNA, 22 bp, Artificial Sequence
  Synthetic oligonucleotide; CTT chr11 5283015 5283036 5283032 5283037 +
tttctccctcaaactttcctga

SEQ ID NO: 93896 - DNA, 22 bp, Artificial Sequence
  Synthetic oligonucleotide; TTT chr11 5283016 5283037 5283033 5283038 +
ttctccctcaaactttcctgaa

SEQ ID NO: 93897 - DNA, 22 bp, Artificial Sequence
  Synthetic oligonucleotide; TTT chr11 5283017 5283038 5283034 5283039 +
tctccctcaaactttcctgaag

SEQ ID NO: 93898 - DNA, 22 bp, Artificial Sequence
  Synthetic oligonucleotide; TTT chr11 5283018 5283039 5283035 5283040 +
ctccctcaaactttcctgaaga

SEQ ID NO: 93899 - DNA, 22 bp, Artificial Sequence
  Synthetic oligonucleotide; TTC chr11 5283019 5283040 5283036 5283041 +
tccctcaaactttcctgaagaa

SEQ ID NO: 93900 - DNA, 22 bp, Artificial Sequence
  Synthetic oligonucleotide; CTC chr11 5283021 5283042 5283038 5283043 +
cctcaaactttcctgaagaaat

SEQ ID NO: 93901 - DNA, 22 bp, Artificial Sequence
  Synthetic oligonucleotide; CTC chr11 5283025 5283046 5283042 5283047 +
aaactttcctgaagaaatgcaa

SEQ ID NO: 93902 - DNA, 22 bp, Artificial Sequence
  Synthetic oligonucleotide; CTT chr11 5283031 5283052 5283048 5283053 +
tcctgaagaaatgcaattatgg

SEQ ID NO: 93903 - DNA, 22 bp, Artificial Sequence
  Synthetic oligonucleotide; TTT chr11 5283032 5283053 5283049 5283054 +
cctgaagaaatgcaattatggt

SEQ ID NO: 93904 - DNA, 22 bp, Artificial Sequence
  Synthetic oligonucleotide; TTC chr11 5283033 5283054 5283050 5283055 +
ctgaagaaatgcaattatggtt

SEQ ID NO: 93905 - DNA, 22 bp, Artificial Sequence
  Synthetic oligonucleotide; CTG chr11 5283036 5283057 5283053 5283058 +
aagaaatgcaattatggttgag

SEQ ID NO: 93906 - DNA, 22 bp, Artificial Sequence
  Synthetic oligonucleotide; TTA chr11 5283050 5283071 5283067 5283072 +
tggttgaggaagtatggtctgc

SEQ ID NO: 93907 - DNA, 22 bp, Artificial Sequence
  Synthetic oligonucleotide; TTG chr11 5283056 5283077 5283073 5283078 +
aggaagtatggtctgcaactgt

SEQ ID NO: 93908 - DNA, 22 bp, Artificial Sequence
  Synthetic oligonucleotide; CTG chr11 5283071 5283092 5283088 5283093 +
caactgtggcttggaccacaac

SEQ ID NO: 93909 - DNA, 22 bp, Artificial Sequence
  Synthetic oligonucleotide; CTG chr11 5283077 5283098 5283094 5283099 +
tggcttggaccacaacttccaa

SEQ ID NO: 93910 - DNA, 22 bp, Artificial Sequence
  Synthetic oligonucleotide; CTT chr11 5283083 5283104 5283100 5283105 +
ggaccacaacttccaatcgaca

SEQ ID NO: 93911 - DNA, 22 bp, Artificial Sequence
  Synthetic oligonucleotide; TTG chr11 5283084 5283105 5283101 5283106 +
gaccacaacttccaatcgacaa

SEQ ID NO: 93912 - DNA, 22 bp, Artificial Sequence
  Synthetic oligonucleotide; CTT chr11 5283095 5283116 5283112 5283117 +
ccaatcgacaagaagtaaaagt

SEQ ID NO: 93913 - DNA, 22 bp, Artificial Sequence
  Synthetic oligonucleotide; TTC chr11 5283096 5283117 5283113 5283118 +
caatcgacaagaagtaaaagta

SEQ ID NO: 93914 - DNA, 22 bp, Artificial Sequence
  Synthetic oligonucleotide; CTA chr11 5283149 5283170 5283166 5283171 +
cttctaatttctcgcatccaca

SEQ ID NO: 93915 - DNA, 22 bp, Artificial Sequence
  Synthetic oligonucleotide; CTT chr11 5283152 5283173 5283169 5283174 +
ctaatttctcgcatccacaata

SEQ ID NO: 93916 - DNA, 22 bp, Artificial Sequence
  Synthetic oligonucleotide; TTC chr11 5283153 5283174 5283170 5283175 +
taatttctcgcatccacaatat

SEQ ID NO: 93917 - DNA, 22 bp, Artificial Sequence
  Synthetic oligonucleotide; CTA chr11 5283155 5283176 5283172 5283177 +
atttctcgcatccacaatatct

SEQ ID NO: 93918 - DNA, 22 bp, Artificial Sequence
  Synthetic oligonucleotide; TTT chr11 5283159 5283180 5283176 5283181 +
ctcgcatccacaatatctgagt

SEQ ID NO: 93919 - DNA, 22 bp, Artificial Sequence
  Synthetic oligonucleotide; TTC chr11 5283160 5283181 5283177 5283182 +
tcgcatccacaatatctgagtt

SEQ ID NO: 93920 - DNA, 22 bp, Artificial Sequence
  Synthetic oligonucleotide; CTC chr11 5283162 5283183 5283179 5283184 +
gcatccacaatatctgagtttg

SEQ ID NO: 93921 - DNA, 22 bp, Artificial Sequence
  Synthetic oligonucleotide; CTG chr11 5283178 5283199 5283195 5283200 +
agtttgtgttttgctgtggaaa

SEQ ID NO: 93922 - DNA, 22 bp, Artificial Sequence
  Synthetic oligonucleotide; TTT chr11 5283183 5283204 5283200 5283205 +
gtgttttgctgtggaaaaaaca

SEQ ID NO: 93923 - DNA, 22 bp, Artificial Sequence
  Synthetic oligonucleotide; TTG chr11 5283184 5283205 5283201 5283206 +
tgttttgctgtggaaaaaacac

SEQ ID NO: 93924 - DNA, 22 bp, Artificial Sequence
  Synthetic oligonucleotide; TTT chr11 5283189 5283210 5283206 5283211 +
tgctgtggaaaaaacactgtct

SEQ ID NO: 93925 - DNA, 22 bp, Artificial Sequence
  Synthetic oligonucleotide; TTT chr11 5283190 5283211 5283207 5283212 +
gctgtggaaaaaacactgtctt

SEQ ID NO: 93926 - DNA, 22 bp, Artificial Sequence
  Synthetic oligonucleotide; TTG chr11 5283191 5283212 5283208 5283213 +
ctgtggaaaaaacactgtcttc

SEQ ID NO: 93927 - DNA, 22 bp, Artificial Sequence
  Synthetic oligonucleotide; CTG chr11 5283194 5283215 5283211 5283216 +
tggaaaaaacactgtcttcaga

SEQ ID NO: 93928 - DNA, 22 bp, Artificial Sequence
  Synthetic oligonucleotide; CTG chr11 5283208 5283229 5283225 5283230 +
tcttcagaggtagcagaactgg

SEQ ID NO: 93929 - DNA, 22 bp, Artificial Sequence
  Synthetic oligonucleotide; CTT chr11 5283212 5283233 5283229 5283234 +
cagaggtagcagaactgggtct

SEQ ID NO: 93930 - DNA, 22 bp, Artificial Sequence
  Synthetic oligonucleotide; TTC chr11 5283213 5283234 5283230 5283235 +
agaggtagcagaactgggtcta

SEQ ID NO: 93931 - DNA, 22 bp, Artificial Sequence
  Synthetic oligonucleotide; CTG chr11 5283229 5283250 5283246 5283251 +
ggtctacatcctagccttacta

SEQ ID NO: 93932 - DNA, 22 bp, Artificial Sequence
  Synthetic oligonucleotide; CTA chr11 5283235 5283256 5283252 5283257 +
catcctagccttactacttggt

SEQ ID NO: 93933 - DNA, 22 bp, Artificial Sequence
  Synthetic oligonucleotide; CTA chr11 5283242 5283263 5283259 5283264 +
gccttactacttggtggttctg

SEQ ID NO: 93934 - DNA, 22 bp, Artificial Sequence
  Synthetic oligonucleotide; CTT chr11 5283247 5283268 5283264 5283269 +
actacttggtggttctgtaagc

SEQ ID NO: 93935 - DNA, 22 bp, Artificial Sequence
  Synthetic oligonucleotide; TTA chr11 5283248 5283269 5283265 5283270 +
ctacttggtggttctgtaagct

SEQ ID NO: 93936 - DNA, 22 bp, Artificial Sequence
  Synthetic oligonucleotide; CTA chr11 5283251 5283272 5283268 5283273 +
cttggtggttctgtaagcttgg

SEQ ID NO: 93937 - DNA, 22 bp, Artificial Sequence
  Synthetic oligonucleotide; CTT chr11 5283254 5283275 5283271 5283276 +
ggtggttctgtaagcttggaca

SEQ ID NO: 93938 - DNA, 22 bp, Artificial Sequence
  Synthetic oligonucleotide; TTG chr11 5283255 5283276 5283272 5283277 +
gtggttctgtaagcttggacaa

SEQ ID NO: 93939 - DNA, 22 bp, Artificial Sequence
  Synthetic oligonucleotide; TTC chr11 5283262 5283283 5283279 5283284 +
tgtaagcttggacaaattattt

SEQ ID NO: 93940 - DNA, 22 bp, Artificial Sequence
  Synthetic oligonucleotide; CTG chr11 5283264 5283285 5283281 5283286 +
taagcttggacaaattatttca

SEQ ID NO: 93941 - DNA, 22 bp, Artificial Sequence
  Synthetic oligonucleotide; CTT chr11 5283271 5283292 5283288 5283293 +
ggacaaattatttcatgtcttt

SEQ ID NO: 93942 - DNA, 22 bp, Artificial Sequence
  Synthetic oligonucleotide; TTG chr11 5283272 5283293 5283289 5283294 +
gacaaattatttcatgtctttg

SEQ ID NO: 93943 - DNA, 22 bp, Artificial Sequence
  Synthetic oligonucleotide; TTA chr11 5283281 5283302 5283298 5283303 +
tttcatgtctttgattttcgag

SEQ ID NO: 93944 - DNA, 22 bp, Artificial Sequence
  Synthetic oligonucleotide; TTT chr11 5283284 5283305 5283301 5283306 +
catgtctttgattttcgagtcc

SEQ ID NO: 93945 - DNA, 22 bp, Artificial Sequence
  Synthetic oligonucleotide; TTC chr11 5283285 5283306 5283302 5283307 +
atgtctttgattttcgagtccc

SEQ ID NO: 93946 - DNA, 22 bp, Artificial Sequence
  Synthetic oligonucleotide; CTT chr11 5283292 5283313 5283309 5283314 +
tgattttcgagtccccagttaa

SEQ ID NO: 93947 - DNA, 22 bp, Artificial Sequence
  Synthetic oligonucleotide; TTT chr11 5283293 5283314 5283310 5283315 +
gattttcgagtccccagttaat

SEQ ID NO: 93948 - DNA, 22 bp, Artificial Sequence
  Synthetic oligonucleotide; TTG chr11 5283294 5283315 5283311 5283316 +
attttcgagtccccagttaata

SEQ ID NO: 93949 - DNA, 22 bp, Artificial Sequence
  Synthetic oligonucleotide; TTT chr11 5283298 5283319 5283315 5283320 +
tcgagtccccagttaataagag

SEQ ID NO: 93950 - DNA, 22 bp, Artificial Sequence
  Synthetic oligonucleotide; TTT chr11 5283299 5283320 5283316 5283321 +
cgagtccccagttaataagagc

SEQ ID NO: 93951 - DNA, 22 bp, Artificial Sequence
  Synthetic oligonucleotide; TTC chr11 5283300 5283321 5283317 5283322 +
gagtccccagttaataagagct

SEQ ID NO: 93952 - DNA, 22 bp, Artificial Sequence
  Synthetic oligonucleotide; TTA chr11 5283313 5283334 5283330 5283335 +
ataagagctcatgtaatgtaga

SEQ ID NO: 93953 - DNA, 22 bp, Artificial Sequence
  Synthetic oligonucleotide; CTC chr11 5283323 5283344 5283340 5283345 +
atgtaatgtagacagtaggaga

SEQ ID NO: 93954 - DNA, 22 bp, Artificial Sequence
  Synthetic oligonucleotide; CTC chr11 5283349 5283370 5283366 5283371 +
agaccatctgacttctaattac

SEQ ID NO: 93955 - DNA, 22 bp, Artificial Sequence
  Synthetic oligonucleotide; CTG chr11 5283359 5283380 5283376 5283381 +
acttctaattactaattgtcta

SEQ ID NO: 93956 - DNA, 22 bp, Artificial Sequence
  Synthetic oligonucleotide; CTT chr11 5283363 5283384 5283380 5283385 +
ctaattactaattgtctactta

SEQ ID NO: 93957 - DNA, 22 bp, Artificial Sequence
  Synthetic oligonucleotide; TTC chr11 5283364 5283385 5283381 5283386 +
taattactaattgtctacttat

SEQ ID NO: 93958 - DNA, 22 bp, Artificial Sequence
  Synthetic oligonucleotide; CTA chr11 5283366 5283387 5283383 5283388 +
attactaattgtctacttatta

SEQ ID NO: 93959 - DNA, 22 bp, Artificial Sequence
  Synthetic oligonucleotide; TTA chr11 5283370 5283391 5283387 5283392 +
ctaattgtctacttattagctt

SEQ ID NO: 93960 - DNA, 22 bp, Artificial Sequence
  Synthetic oligonucleotide; CTA chr11 5283373 5283394 5283390 5283395 +
attgtctacttattagcttgtg

SEQ ID NO: 93961 - DNA, 22 bp, Artificial Sequence
  Synthetic oligonucleotide; TTG chr11 5283377 5283398 5283394 5283399 +
tctacttattagcttgtgcttt

SEQ ID NO: 93962 - DNA, 22 bp, Artificial Sequence
  Synthetic oligonucleotide; CTA chr11 5283381 5283402 5283398 5283403 +
cttattagcttgtgctttcaat

SEQ ID NO: 93963 - DNA, 22 bp, Artificial Sequence
  Synthetic oligonucleotide; CTT chr11 5283384 5283405 5283401 5283406 +
attagcttgtgctttcaataag

SEQ ID NO: 93964 - DNA, 22 bp, Artificial Sequence
  Synthetic oligonucleotide; TTA chr11 5283385 5283406 5283402 5283407 +
ttagcttgtgctttcaataagt

SEQ ID NO: 93965 - DNA, 22 bp, Artificial Sequence
  Synthetic oligonucleotide; TTA chr11 5283388 5283409 5283405 5283410 +
gcttgtgctttcaataagttga

SEQ ID NO: 93966 - DNA, 22 bp, Artificial Sequence
  Synthetic oligonucleotide; CTT chr11 5283392 5283413 5283409 5283414 +
gtgctttcaataagttgatcta

SEQ ID NO: 93967 - DNA, 22 bp, Artificial Sequence
  Synthetic oligonucleotide; TTG chr11 5283393 5283414 5283410 5283415 +
tgctttcaataagttgatctac

SEQ ID NO: 93968 - DNA, 22 bp, Artificial Sequence
  Synthetic oligonucleotide; CTT chr11 5283398 5283419 5283415 5283420 +
tcaataagttgatctacactac

SEQ ID NO: 93969 - DNA, 22 bp, Artificial Sequence
  Synthetic oligonucleotide; TTT chr11 5283399 5283420 5283416 5283421 +
caataagttgatctacactaca

SEQ ID NO: 93970 - DNA, 22 bp, Artificial Sequence
  Synthetic oligonucleotide; TTC chr11 5283400 5283421 5283417 5283422 +
aataagttgatctacactacaa

SEQ ID NO: 93971 - DNA, 22 bp, Artificial Sequence
  Synthetic oligonucleotide; TTG chr11 5283409 5283430 5283426 5283431 +
atctacactacaagtacattgg

SEQ ID NO: 93972 - DNA, 22 bp, Artificial Sequence
  Synthetic oligonucleotide; CTA chr11 5283414 5283435 5283431 5283436 +
cactacaagtacattgggctcc

SEQ ID NO: 93973 - DNA, 22 bp, Artificial Sequence
  Synthetic oligonucleotide; CTA chr11 5283419 5283440 5283436 5283441 +
caagtacattgggctcctcatc

SEQ ID NO: 93974 - DNA, 22 bp, Artificial Sequence
  Synthetic oligonucleotide; TTG chr11 5283430 5283451 5283447 5283452 +
ggctcctcatcaataaatgagg

SEQ ID NO: 93975 - DNA, 22 bp, Artificial Sequence
  Synthetic oligonucleotide; CTC chr11 5283435 5283456 5283452 5283457 +
ctcatcaataaatgaggtaata

SEQ ID NO: 93976 - DNA, 22 bp, Artificial Sequence
  Synthetic oligonucleotide; CTC chr11 5283438 5283459 5283455 5283460 +
atcaataaatgaggtaataatc

SEQ ID NO: 93977 - DNA, 22 bp, Artificial Sequence
  Synthetic oligonucleotide; CTA chr11 5283462 5283483 5283479 5283484 +
cttctgagtattggtgtgagta

SEQ ID NO: 93978 - DNA, 22 bp, Artificial Sequence
  Synthetic oligonucleotide; CTT chr11 5283465 5283486 5283482 5283487 +
ctgagtattggtgtgagtaaaa

SEQ ID NO: 93979 - DNA, 22 bp, Artificial Sequence
  Synthetic oligonucleotide; TTC chr11 5283466 5283487 5283483 5283488 +
tgagtattggtgtgagtaaaac

SEQ ID NO: 93980 - DNA, 22 bp, Artificial Sequence
  Synthetic oligonucleotide; CTG chr11 5283468 5283489 5283485 5283490 +
agtattggtgtgagtaaaacta

SEQ ID NO: 93981 - DNA, 22 bp, Artificial Sequence
  Synthetic oligonucleotide; TTG chr11 5283475 5283496 5283492 5283497 +
gtgtgagtaaaactaagttaat

SEQ ID NO: 93982 - DNA, 22 bp, Artificial Sequence
  Synthetic oligonucleotide; CTA chr11 5283490 5283511 5283507 5283512 +
agttaattcatataataaactt

SEQ ID NO: 93983 - DNA, 22 bp, Artificial Sequence
  Synthetic oligonucleotide; TTA chr11 5283495 5283516 5283512 5283517 +
attcatataataaacttctttt

SEQ ID NO: 93984 - DNA, 22 bp, Artificial Sequence
  Synthetic oligonucleotide; TTC chr11 5283499 5283520 5283516 5283521 +
atataataaacttctttttttt

SEQ ID NO: 93985 - DNA, 22 bp, Artificial Sequence
  Synthetic oligonucleotide; CTT chr11 5283512 5283533 5283529 5283534 +
ctttttttttttttgagatgga

SEQ ID NO: 93986 - DNA, 22 bp, Artificial Sequence
  Synthetic oligonucleotide; TTC chr11 5283513 5283534 5283530 5283535 +
tttttttttttttgagatggag

SEQ ID NO: 93987 - DNA, 22 bp, Artificial Sequence
  Synthetic oligonucleotide; CTT chr11 5283515 5283536 5283532 5283537 +
tttttttttttgagatggagtc

SEQ ID NO: 93988 - DNA, 22 bp, Artificial Sequence
  Synthetic oligonucleotide; TTT chr11 5283516 5283537 5283533 5283538 +
ttttttttttgagatggagtct

SEQ ID NO: 93989 - DNA, 22 bp, Artificial Sequence
  Synthetic oligonucleotide; TTT chr11 5283517 5283538 5283534 5283539 +
tttttttttgagatggagtctc

SEQ ID NO: 93990 - DNA, 22 bp, Artificial Sequence
  Synthetic oligonucleotide; TTT chr11 5283518 5283539 5283535 5283540 +
ttttttttgagatggagtctca

SEQ ID NO: 93991 - DNA, 22 bp, Artificial Sequence
  Synthetic oligonucleotide; TTT chr11 5283519 5283540 5283536 5283541 +
tttttttgagatggagtctcac

SEQ ID NO: 93992 - DNA, 22 bp, Artificial Sequence
  Synthetic oligonucleotide; TTT chr11 5283520 5283541 5283537 5283542 +
ttttttgagatggagtctcact

SEQ ID NO: 93993 - DNA, 22 bp, Artificial Sequence
  Synthetic oligonucleotide; TTT chr11 5283521 5283542 5283538 5283543 +
tttttgagatggagtctcactc

SEQ ID NO: 93994 - DNA, 22 bp, Artificial Sequence
  Synthetic oligonucleotide; TTT chr11 5283522 5283543 5283539 5283544 +
ttttgagatggagtctcactct

SEQ ID NO: 93995 - DNA, 22 bp, Artificial Sequence
  Synthetic oligonucleotide; TTT chr11 5283523 5283544 5283540 5283545 +
tttgagatggagtctcactctg

SEQ ID NO: 93996 - DNA, 22 bp, Artificial Sequence
  Synthetic oligonucleotide; TTT chr11 5283524 5283545 5283541 5283546 +
ttgagatggagtctcactctgt

SEQ ID NO: 93997 - DNA, 22 bp, Artificial Sequence
  Synthetic oligonucleotide; TTT chr11 5283525 5283546 5283542 5283547 +
tgagatggagtctcactctgtc

SEQ ID NO: 93998 - DNA, 22 bp, Artificial Sequence
  Synthetic oligonucleotide; TTT chr11 5283526 5283547 5283543 5283548 +
gagatggagtctcactctgtcg

SEQ ID NO: 93999 - DNA, 22 bp, Artificial Sequence
  Synthetic oligonucleotide; TTG chr11 5283527 5283548 5283544 5283549 +
agatggagtctcactctgtcgc

SEQ ID NO: 94000 - DNA, 22 bp, Artificial Sequence
  Synthetic oligonucleotide; CTC chr11 5283539 5283560 5283556 5283561 +
actctgtcgcctaggctggagt

SEQ ID NO: 94001 - DNA, 22 bp, Artificial Sequence
  Synthetic oligonucleotide; CTC chr11 5283543 5283564 5283560 5283565 +
tgtcgcctaggctggagtgcag

SEQ ID NO: 94002 - DNA, 22 bp, Artificial Sequence
  Synthetic oligonucleotide; CTG chr11 5283545 5283566 5283562 5283567 +
tcgcctaggctggagtgcagtg

SEQ ID NO: 94003 - DNA, 22 bp, Artificial Sequence
  Synthetic oligonucleotide; CTA chr11 5283552 5283573 5283569 5283574 +
ggctggagtgcagtggtgcaat

SEQ ID NO: 94004 - DNA, 22 bp, Artificial Sequence
  Synthetic oligonucleotide; CTG chr11 5283557 5283578 5283574 5283579 +
gagtgcagtggtgcaatcttag

SEQ ID NO: 94005 - DNA, 22 bp, Artificial Sequence
  Synthetic oligonucleotide; CTT chr11 5283577 5283598 5283594 5283599 +
agctcactgcaacctccacctc

SEQ ID NO: 94006 - DNA, 22 bp, Artificial Sequence
  Synthetic oligonucleotide; TTA chr11 5283578 5283599 5283595 5283600 +
gctcactgcaacctccacctcc

SEQ ID NO: 94007 - DNA, 22 bp, Artificial Sequence
  Synthetic oligonucleotide; CTC chr11 5283582 5283603 5283599 5283604 +
actgcaacctccacctcctggg

SEQ ID NO: 94008 - DNA, 22 bp, Artificial Sequence
  Synthetic oligonucleotide; CTG chr11 5283586 5283607 5283603 5283608 +
caacctccacctcctgggttca

SEQ ID NO: 94009 - DNA, 22 bp, Artificial Sequence
  Synthetic oligonucleotide; CTC chr11 5283593 5283614 5283610 5283615 +
cacctcctgggttcaagtgatt

SEQ ID NO: 94010 - DNA, 22 bp, Artificial Sequence
  Synthetic oligonucleotide; CTC chr11 5283599 5283620 5283616 5283621 +
ctgggttcaagtgattctcctg

SEQ ID NO: 94011 - DNA, 22 bp, Artificial Sequence
  Synthetic oligonucleotide; CTG chr11 5283602 5283623 5283619 5283624 +
ggttcaagtgattctcctgcct

SEQ ID NO: 94012 - DNA, 22 bp, Artificial Sequence
  Synthetic oligonucleotide; TTC chr11 5283607 5283628 5283624 5283629 +
aagtgattctcctgcctcagcc

SEQ ID NO: 94013 - DNA, 22 bp, Artificial Sequence
  Synthetic oligonucleotide; TTC chr11 5283616 5283637 5283633 5283638 +
tcctgcctcagcctcctgagta

SEQ ID NO: 94014 - DNA, 22 bp, Artificial Sequence
  Synthetic oligonucleotide; CTC chr11 5283618 5283639 5283635 5283640 +
ctgcctcagcctcctgagtagc

SEQ ID NO: 94015 - DNA, 22 bp, Artificial Sequence
  Synthetic oligonucleotide; CTG chr11 5283621 5283642 5283638 5283643 +
cctcagcctcctgagtagctgg

SEQ ID NO: 94016 - DNA, 22 bp, Artificial Sequence
  Synthetic oligonucleotide; CTC chr11 5283625 5283646 5283642 5283647 +
agcctcctgagtagctgggatt

SEQ ID NO: 94017 - DNA, 22 bp, Artificial Sequence
  Synthetic oligonucleotide; CTC chr11 5283631 5283652 5283648 5283653 +
ctgagtagctgggattatagac

SEQ ID NO: 94018 - DNA, 22 bp, Artificial Sequence
  Synthetic oligonucleotide; CTG chr11 5283634 5283655 5283651 5283656 +
agtagctgggattatagacgcg

SEQ ID NO: 94019 - DNA, 22 bp, Artificial Sequence
  Synthetic oligonucleotide; CTG chr11 5283642 5283663 5283659 5283664 +
ggattatagacgcgtgccacca

SEQ ID NO: 94020 - DNA, 22 bp, Artificial Sequence
  Synthetic oligonucleotide; TTA chr11 5283648 5283669 5283665 5283670 +
tagacgcgtgccaccacacctg

SEQ ID NO: 94021 - DNA, 22 bp, Artificial Sequence
  Synthetic oligonucleotide; CTG chr11 5283670 5283691 5283687 5283692 +
gctgattttttgtattttttag

SEQ ID NO: 94022 - DNA, 22 bp, Artificial Sequence
  Synthetic oligonucleotide; CTG chr11 5283674 5283695 5283691 5283696 +
attttttgtattttttagtaga

SEQ ID NO: 94023 - DNA, 22 bp, Artificial Sequence
  Synthetic oligonucleotide; TTT chr11 5283678 5283699 5283695 5283700 +
tttgtattttttagtagagaag

SEQ ID NO: 94024 - DNA, 22 bp, Artificial Sequence
  Synthetic oligonucleotide; TTT chr11 5283679 5283700 5283696 5283701 +
ttgtattttttagtagagaagg

SEQ ID NO: 94025 - DNA, 22 bp, Artificial Sequence
  Synthetic oligonucleotide; TTT chr11 5283680 5283701 5283697 5283702 +
tgtattttttagtagagaaggg

SEQ ID NO: 94026 - DNA, 22 bp, Artificial Sequence
  Synthetic oligonucleotide; TTT chr11 5283681 5283702 5283698 5283703 +
gtattttttagtagagaagggg

SEQ ID NO: 94027 - DNA, 22 bp, Artificial Sequence
  Synthetic oligonucleotide; TTG chr11 5283682 5283703 5283699 5283704 +
tattttttagtagagaaggggt

SEQ ID NO: 94028 - DNA, 22 bp, Artificial Sequence
  Synthetic oligonucleotide; TTT chr11 5283687 5283708 5283704 5283709 +
tttagtagagaaggggtttcac

SEQ ID NO: 94029 - DNA, 22 bp, Artificial Sequence
  Synthetic oligonucleotide; TTT chr11 5283688 5283709 5283705 5283710 +
ttagtagagaaggggtttcacc

SEQ ID NO: 94030 - DNA, 22 bp, Artificial Sequence
  Synthetic oligonucleotide; TTT chr11 5283689 5283710 5283706 5283711 +
tagtagagaaggggtttcacca

SEQ ID NO: 94031 - DNA, 22 bp, Artificial Sequence
  Synthetic oligonucleotide; TTT chr11 5283690 5283711 5283707 5283712 +
agtagagaaggggtttcaccat

SEQ ID NO: 94032 - DNA, 22 bp, Artificial Sequence
  Synthetic oligonucleotide; TTA chr11 5283691 5283712 5283708 5283713 +
gtagagaaggggtttcaccatg

SEQ ID NO: 94033 - DNA, 22 bp, Artificial Sequence
  Synthetic oligonucleotide; TTT chr11 5283706 5283727 5283723 5283728 +
caccatgttggccaggctggtc

SEQ ID NO: 94034 - DNA, 22 bp, Artificial Sequence
  Synthetic oligonucleotide; TTC chr11 5283707 5283728 5283724 5283729 +
accatgttggccaggctggtct

SEQ ID NO: 94035 - DNA, 22 bp, Artificial Sequence
  Synthetic oligonucleotide; TTG chr11 5283716 5283737 5283733 5283738 +
gccaggctggtctggaactcct

SEQ ID NO: 94036 - DNA, 22 bp, Artificial Sequence
  Synthetic oligonucleotide; CTG chr11 5283725 5283746 5283742 5283747 +
gtctggaactcctgacctcagg

SEQ ID NO: 94037 - DNA, 22 bp, Artificial Sequence
  Synthetic oligonucleotide; CTG chr11 5283730 5283751 5283747 5283752 +
gaactcctgacctcaggtgatc

SEQ ID NO: 94038 - DNA, 22 bp, Artificial Sequence
  Synthetic oligonucleotide; CTC chr11 5283736 5283757 5283753 5283758 +
ctgacctcaggtgatccaattg

SEQ ID NO: 94039 - DNA, 22 bp, Artificial Sequence
  Synthetic oligonucleotide; CTG chr11 5283739 5283760 5283756 5283761 +
acctcaggtgatccaattgcct

SEQ ID NO: 94040 - DNA, 22 bp, Artificial Sequence
  Synthetic oligonucleotide; CTC chr11 5283744 5283765 5283761 5283766 +
aggtgatccaattgccttggcc

SEQ ID NO: 94041 - DNA, 22 bp, Artificial Sequence
  Synthetic oligonucleotide; TTG chr11 5283758 5283779 5283775 5283780 +
ccttggcctcccaaagtgctgg

SEQ ID NO: 94042 - DNA, 22 bp, Artificial Sequence
  Synthetic oligonucleotide; CTT chr11 5283762 5283783 5283779 5283784 +
ggcctcccaaagtgctgggatt

SEQ ID NO: 94043 - DNA, 22 bp, Artificial Sequence
  Synthetic oligonucleotide; TTG chr11 5283763 5283784 5283780 5283785 +
gcctcccaaagtgctgggatta

SEQ ID NO: 94044 - DNA, 22 bp, Artificial Sequence
  Synthetic oligonucleotide; CTC chr11 5283768 5283789 5283785 5283790 +
ccaaagtgctgggattacaggc

SEQ ID NO: 94045 - DNA, 22 bp, Artificial Sequence
  Synthetic oligonucleotide; CTG chr11 5283779 5283800 5283796 5283801 +
ggattacaggcatgtaatccca

SEQ ID NO: 94046 - DNA, 22 bp, Artificial Sequence
  Synthetic oligonucleotide; TTA chr11 5283785 5283806 5283802 5283807 +
caggcatgtaatcccatatatg

SEQ ID NO: 94047 - DNA, 22 bp, Artificial Sequence
  Synthetic oligonucleotide; CTC chr11 5283826 5283847 5283843 5283848 +
atatgataaacttaaatttgat

SEQ ID NO: 94048 - DNA, 22 bp, Artificial Sequence
  Synthetic oligonucleotide; CTT chr11 5283839 5283860 5283856 5283861 +
aaatttgattctagcatatact

SEQ ID NO: 94049 - DNA, 22 bp, Artificial Sequence
  Synthetic oligonucleotide; TTA chr11 5283840 5283861 5283857 5283862 +
aatttgattctagcatatacta

SEQ ID NO: 94050 - DNA, 22 bp, Artificial Sequence
  Synthetic oligonucleotide; TTT chr11 5283845 5283866 5283862 5283867 +
gattctagcatatactaagtac

SEQ ID NO: 94051 - DNA, 22 bp, Artificial Sequence
  Synthetic oligonucleotide; TTG chr11 5283846 5283867 5283863 5283868 +
attctagcatatactaagtact

SEQ ID NO: 94052 - DNA, 22 bp, Artificial Sequence
  Synthetic oligonucleotide; TTC chr11 5283850 5283871 5283867 5283872 +
tagcatatactaagtactcaag

SEQ ID NO: 94053 - DNA, 22 bp, Artificial Sequence
  Synthetic oligonucleotide; CTA chr11 5283852 5283873 5283869 5283874 +
gcatatactaagtactcaagag

SEQ ID NO: 94054 - DNA, 22 bp, Artificial Sequence
  Synthetic oligonucleotide; CTA chr11 5283862 5283883 5283879 5283884 +
agtactcaagaggtgttactta

SEQ ID NO: 94055 - DNA, 22 bp, Artificial Sequence
  Synthetic oligonucleotide; CTC chr11 5283869 5283890 5283886 5283891 +
aagaggtgttacttatcattag

SEQ ID NO: 94056 - DNA, 22 bp, Artificial Sequence
  Synthetic oligonucleotide; TTA chr11 5283880 5283901 5283897 5283902 +
cttatcattagtattaattata

SEQ ID NO: 94057 - DNA, 22 bp, Artificial Sequence
  Synthetic oligonucleotide; CTT chr11 5283883 5283904 5283900 5283905 +
atcattagtattaattatagta

SEQ ID NO: 94058 - DNA, 22 bp, Artificial Sequence
  Synthetic oligonucleotide; TTA chr11 5283884 5283905 5283901 5283906 +
tcattagtattaattatagtat

SEQ ID NO: 94059 - DNA, 22 bp, Artificial Sequence
  Synthetic oligonucleotide; TTA chr11 5283890 5283911 5283907 5283912 +
gtattaattatagtatgttcaa

SEQ ID NO: 94060 - DNA, 22 bp, Artificial Sequence
  Synthetic oligonucleotide; TTA chr11 5283896 5283917 5283913 5283918 +
attatagtatgttcaataatac

SEQ ID NO: 94061 - DNA, 22 bp, Artificial Sequence
  Synthetic oligonucleotide; TTA chr11 5283900 5283921 5283917 5283922 +
tagtatgttcaataatacatat

SEQ ID NO: 94062 - DNA, 22 bp, Artificial Sequence
  Synthetic oligonucleotide; TTC chr11 5283910 5283931 5283927 5283932 +
aataatacatatctcacagaat

SEQ ID NO: 94063 - DNA, 22 bp, Artificial Sequence
  Synthetic oligonucleotide; CTC chr11 5283925 5283946 5283942 5283947 +
acagaattaccatatgtaatga

SEQ ID NO: 94064 - DNA, 22 bp, Artificial Sequence
  Synthetic oligonucleotide; TTA chr11 5283934 5283955 5283951 5283956 +
ccatatgtaatgagattattaa

SEQ ID NO: 94065 - DNA, 22 bp, Artificial Sequence
  Synthetic oligonucleotide; TTA chr11 5283952 5283973 5283969 5283974 +
ttaaatatcataaaatggcacc

SEQ ID NO: 94066 - DNA, 22 bp, Artificial Sequence
  Synthetic oligonucleotide; TTA chr11 5283955 5283976 5283972 5283977 +
aatatcataaaatggcacctga

SEQ ID NO: 94067 - DNA, 22 bp, Artificial Sequence
  Synthetic oligonucleotide; CTG chr11 5283976 5283997 5283993 5283998 +
acatatagaaagatttcagtaa

SEQ ID NO: 94068 - DNA, 22 bp, Artificial Sequence
  Synthetic oligonucleotide; TTT chr11 5283992 5284013 5284009 5284014 +
cagtaagtattaattcccactt

SEQ ID NO: 94069 - DNA, 22 bp, Artificial Sequence
  Synthetic oligonucleotide; TTC chr11 5283993 5284014 5284010 5284015 +
agtaagtattaattcccacttc

SEQ ID NO: 94070 - DNA, 22 bp, Artificial Sequence
  Synthetic oligonucleotide; TTA chr11 5284004 5284025 5284021 5284026 +
attcccacttctctttcattta

SEQ ID NO: 94071 - DNA, 22 bp, Artificial Sequence
  Synthetic oligonucleotide; TTC chr11 5284008 5284029 5284025 5284030 +
ccacttctctttcatttacctc

SEQ ID NO: 94072 - DNA, 22 bp, Artificial Sequence
  Synthetic oligonucleotide; CTT chr11 5284014 5284035 5284031 5284036 +
ctctttcatttacctccagcct

SEQ ID NO: 94073 - DNA, 22 bp, Artificial Sequence
  Synthetic oligonucleotide; TTC chr11 5284015 5284036 5284032 5284037 +
tctttcatttacctccagccta

SEQ ID NO: 94074 - DNA, 22 bp, Artificial Sequence
  Synthetic oligonucleotide; CTC chr11 5284017 5284038 5284034 5284039 +
tttcatttacctccagcctaaa

SEQ ID NO: 94075 - DNA, 22 bp, Artificial Sequence
  Synthetic oligonucleotide; CTT chr11 5284019 5284040 5284036 5284041 +
tcatttacctccagcctaaatc

SEQ ID NO: 94076 - DNA, 22 bp, Artificial Sequence
  Synthetic oligonucleotide; TTT chr11 5284020 5284041 5284037 5284042 +
catttacctccagcctaaatct

SEQ ID NO: 94077 - DNA, 22 bp, Artificial Sequence
  Synthetic oligonucleotide; TTC chr11 5284021 5284042 5284038 5284043 +
atttacctccagcctaaatcta

SEQ ID NO: 94078 - DNA, 22 bp, Artificial Sequence
  Synthetic oligonucleotide; TTT chr11 5284025 5284046 5284042 5284047 +
acctccagcctaaatctacact

SEQ ID NO: 94079 - DNA, 22 bp, Artificial Sequence
  Synthetic oligonucleotide; TTA chr11 5284026 5284047 5284043 5284048 +
cctccagcctaaatctacacta

SEQ ID NO: 94080 - DNA, 22 bp, Artificial Sequence
  Synthetic oligonucleotide; CTC chr11 5284030 5284051 5284047 5284052 +
cagcctaaatctacactatttc

SEQ ID NO: 94081 - DNA, 22 bp, Artificial Sequence
  Synthetic oligonucleotide; CTA chr11 5284037 5284058 5284054 5284059 +
aatctacactatttcctcgtgt

SEQ ID NO: 94082 - DNA, 22 bp, Artificial Sequence
  Synthetic oligonucleotide; CTA chr11 5284043 5284064 5284060 5284065 +
cactatttcctcgtgtctctca

SEQ ID NO: 94083 - DNA, 22 bp, Artificial Sequence
  Synthetic oligonucleotide; CTA chr11 5284048 5284069 5284065 5284070 +
tttcctcgtgtctctcatgtgg

SEQ ID NO: 94084 - DNA, 22 bp, Artificial Sequence
  Synthetic oligonucleotide; TTT chr11 5284051 5284072 5284068 5284073 +
cctcgtgtctctcatgtggttt

SEQ ID NO: 94085 - DNA, 22 bp, Artificial Sequence
  Synthetic oligonucleotide; TTC chr11 5284052 5284073 5284069 5284074 +
ctcgtgtctctcatgtggtttc

SEQ ID NO: 94086 - DNA, 22 bp, Artificial Sequence
  Synthetic oligonucleotide; CTC chr11 5284055 5284076 5284072 5284077 +
gtgtctctcatgtggtttctag

SEQ ID NO: 94087 - DNA, 22 bp, Artificial Sequence
  Synthetic oligonucleotide; CTC chr11 5284062 5284083 5284079 5284084 +
tcatgtggtttctagtcccttc

SEQ ID NO: 94088 - DNA, 22 bp, Artificial Sequence
  Synthetic oligonucleotide; CTC chr11 5284064 5284085 5284081 5284086 +
atgtggtttctagtcccttcac

SEQ ID NO: 94089 - DNA, 22 bp, Artificial Sequence
  Synthetic oligonucleotide; TTT chr11 5284073 5284094 5284090 5284095 +
ctagtcccttcaccatcttgtt

SEQ ID NO: 94090 - DNA, 22 bp, Artificial Sequence
  Synthetic oligonucleotide; TTC chr11 5284074 5284095 5284091 5284096 +
tagtcccttcaccatcttgttt

SEQ ID NO: 94091 - DNA, 22 bp, Artificial Sequence
  Synthetic oligonucleotide; CTA chr11 5284076 5284097 5284093 5284098 +
gtcccttcaccatcttgtttcc

SEQ ID NO: 94092 - DNA, 22 bp, Artificial Sequence
  Synthetic oligonucleotide; CTT chr11 5284083 5284104 5284100 5284105 +
caccatcttgtttccctctcaa

SEQ ID NO: 94093 - DNA, 22 bp, Artificial Sequence
  Synthetic oligonucleotide; TTC chr11 5284084 5284105 5284101 5284106 +
accatcttgtttccctctcaac

SEQ ID NO: 94094 - DNA, 22 bp, Artificial Sequence
  Synthetic oligonucleotide; CTT chr11 5284092 5284113 5284109 5284114 +
gtttccctctcaactcctgtgc

SEQ ID NO: 94095 - DNA, 22 bp, Artificial Sequence
  Synthetic oligonucleotide; TTG chr11 5284093 5284114 5284110 5284115 +
tttccctctcaactcctgtgca

SEQ ID NO: 94096 - DNA, 22 bp, Artificial Sequence
  Synthetic oligonucleotide; TTT chr11 5284096 5284117 5284113 5284118 +
ccctctcaactcctgtgcagat

SEQ ID NO: 94097 - DNA, 22 bp, Artificial Sequence
  Synthetic oligonucleotide; TTC chr11 5284097 5284118 5284114 5284119 +
cctctcaactcctgtgcagatt

SEQ ID NO: 94098 - DNA, 22 bp, Artificial Sequence
  Synthetic oligonucleotide; CTC chr11 5284101 5284122 5284118 5284123 +
tcaactcctgtgcagattccta

SEQ ID NO: 94099 - DNA, 22 bp, Artificial Sequence
  Synthetic oligonucleotide; CTC chr11 5284103 5284124 5284120 5284125 +
aactcctgtgcagattcctaaa

SEQ ID NO: 94100 - DNA, 22 bp, Artificial Sequence
  Synthetic oligonucleotide; CTC chr11 5284108 5284129 5284125 5284130 +
ctgtgcagattcctaaaaattt

SEQ ID NO: 94101 - DNA, 22 bp, Artificial Sequence
  Synthetic oligonucleotide; CTG chr11 5284111 5284132 5284128 5284133 +
tgcagattcctaaaaatttctc

SEQ ID NO: 94102 - DNA, 22 bp, Artificial Sequence
  Synthetic oligonucleotide; TTC chr11 5284120 5284141 5284137 5284142 +
ctaaaaatttctcatgttcaga

SEQ ID NO: 94103 - DNA, 22 bp, Artificial Sequence
  Synthetic oligonucleotide; CTA chr11 5284123 5284144 5284140 5284145 +
aaaatttctcatgttcagaacc

SEQ ID NO: 94104 - DNA, 22 bp, Artificial Sequence
  Synthetic oligonucleotide; TTT chr11 5284130 5284151 5284147 5284152 +
ctcatgttcagaaccttgggct

SEQ ID NO: 94105 - DNA, 22 bp, Artificial Sequence
  Synthetic oligonucleotide; TTC chr11 5284131 5284152 5284148 5284153 +
tcatgttcagaaccttgggctt

SEQ ID NO: 94106 - DNA, 22 bp, Artificial Sequence
  Synthetic oligonucleotide; CTC chr11 5284133 5284154 5284150 5284155 +
atgttcagaaccttgggcttcc

SEQ ID NO: 94107 - DNA, 22 bp, Artificial Sequence
  Synthetic oligonucleotide; TTC chr11 5284139 5284160 5284156 5284161 +
agaaccttgggcttccatgttt

SEQ ID NO: 94108 - DNA, 22 bp, Artificial Sequence
  Synthetic oligonucleotide; CTT chr11 5284147 5284168 5284164 5284169 +
gggcttccatgtttccagtgaa

SEQ ID NO: 94109 - DNA, 22 bp, Artificial Sequence
  Synthetic oligonucleotide; TTG chr11 5284148 5284169 5284165 5284170 +
ggcttccatgtttccagtgaag

SEQ ID NO: 94110 - DNA, 22 bp, Artificial Sequence
  Synthetic oligonucleotide; CTT chr11 5284153 5284174 5284170 5284175 +
ccatgtttccagtgaagtcaga

SEQ ID NO: 94111 - DNA, 22 bp, Artificial Sequence
  Synthetic oligonucleotide; TTC chr11 5284154 5284175 5284171 5284176 +
catgtttccagtgaagtcagat

SEQ ID NO: 94112 - DNA, 22 bp, Artificial Sequence
  Synthetic oligonucleotide; TTT chr11 5284161 5284182 5284178 5284183 +
ccagtgaagtcagattttttta

SEQ ID NO: 94113 - DNA, 22 bp, Artificial Sequence
  Synthetic oligonucleotide; TTC chr11 5284162 5284183 5284179 5284184 +
cagtgaagtcagatttttttag

SEQ ID NO: 94114 - DNA, 22 bp, Artificial Sequence
  Synthetic oligonucleotide; TTT chr11 5284178 5284199 5284195 5284200 +
ttttagatggcaaagttgctgt

SEQ ID NO: 94115 - DNA, 22 bp, Artificial Sequence
  Synthetic oligonucleotide; TTT chr11 5284179 5284200 5284196 5284201 +
tttagatggcaaagttgctgtt

SEQ ID NO: 94116 - DNA, 22 bp, Artificial Sequence
  Synthetic oligonucleotide; TTT chr11 5284180 5284201 5284197 5284202 +
ttagatggcaaagttgctgtta

SEQ ID NO: 94117 - DNA, 22 bp, Artificial Sequence
  Synthetic oligonucleotide; TTT chr11 5284181 5284202 5284198 5284203 +
tagatggcaaagttgctgttag

SEQ ID NO: 94118 - DNA, 22 bp, Artificial Sequence
  Synthetic oligonucleotide; TTT chr11 5284182 5284203 5284199 5284204 +
agatggcaaagttgctgttaga

SEQ ID NO: 94119 - DNA, 22 bp, Artificial Sequence
  Synthetic oligonucleotide; TTA chr11 5284183 5284204 5284200 5284205 +
gatggcaaagttgctgttagac

SEQ ID NO: 94120 - DNA, 22 bp, Artificial Sequence
  Synthetic oligonucleotide; TTG chr11 5284196 5284217 5284213 5284218 +
ctgttagacaatttcatctgtg

SEQ ID NO: 94121 - DNA, 22 bp, Artificial Sequence
  Synthetic oligonucleotide; CTG chr11 5284199 5284220 5284216 5284221 +
ttagacaatttcatctgtgccc

SEQ ID NO: 94122 - DNA, 22 bp, Artificial Sequence
  Synthetic oligonucleotide; TTA chr11 5284202 5284223 5284219 5284224 +
gacaatttcatctgtgccctgc

SEQ ID NO: 94123 - DNA, 22 bp, Artificial Sequence
  Synthetic oligonucleotide; TTT chr11 5284210 5284231 5284227 5284232 +
catctgtgccctgcttaggagc

SEQ ID NO: 94124 - DNA, 22 bp, Artificial Sequence
  Synthetic oligonucleotide; TTC chr11 5284211 5284232 5284228 5284233 +
atctgtgccctgcttaggagct

SEQ ID NO: 94125 - DNA, 22 bp, Artificial Sequence
  Synthetic oligonucleotide; CTG chr11 5284216 5284237 5284233 5284238 +
tgccctgcttaggagcttaatc

SEQ ID NO: 94126 - DNA, 22 bp, Artificial Sequence
  Synthetic oligonucleotide; CTG chr11 5284223 5284244 5284240 5284245 +
cttaggagcttaatctttaatg

SEQ ID NO: 94127 - DNA, 22 bp, Artificial Sequence
  Synthetic oligonucleotide; CTT chr11 5284226 5284247 5284243 5284248 +
aggagcttaatctttaatgaaa

SEQ ID NO: 94128 - DNA, 22 bp, Artificial Sequence
  Synthetic oligonucleotide; TTA chr11 5284227 5284248 5284244 5284249 +
ggagcttaatctttaatgaaag

SEQ ID NO: 94129 - DNA, 22 bp, Artificial Sequence
  Synthetic oligonucleotide; CTT chr11 5284234 5284255 5284251 5284256 +
aatctttaatgaaagctaagct

SEQ ID NO: 94130 - DNA, 22 bp, Artificial Sequence
  Synthetic oligonucleotide; TTA chr11 5284235 5284256 5284252 5284257 +
atctttaatgaaagctaagctt

SEQ ID NO: 94131 - DNA, 22 bp, Artificial Sequence
  Synthetic oligonucleotide; CTT chr11 5284240 5284261 5284257 5284262 +
taatgaaagctaagctttcatt

SEQ ID NO: 94132 - DNA, 22 bp, Artificial Sequence
  Synthetic oligonucleotide; TTT chr11 5284241 5284262 5284258 5284263 +
aatgaaagctaagctttcatta

SEQ ID NO: 94133 - DNA, 22 bp, Artificial Sequence
  Synthetic oligonucleotide; TTA chr11 5284242 5284263 5284259 5284264 +
atgaaagctaagctttcattaa

SEQ ID NO: 94134 - DNA, 22 bp, Artificial Sequence
  Synthetic oligonucleotide; CTA chr11 5284252 5284273 5284269 5284274 +
agctttcattaaaaaaagtcta

SEQ ID NO: 94135 - DNA, 22 bp, Artificial Sequence
  Synthetic oligonucleotide; CTT chr11 5284257 5284278 5284274 5284279 +
tcattaaaaaaagtctaaccag

SEQ ID NO: 94136 - DNA, 22 bp, Artificial Sequence
  Synthetic oligonucleotide; TTT chr11 5284258 5284279 5284275 5284280 +
cattaaaaaaagtctaaccagc

SEQ ID NO: 94137 - DNA, 22 bp, Artificial Sequence
  Synthetic oligonucleotide; TTC chr11 5284259 5284280 5284276 5284281 +
attaaaaaaagtctaaccagct

SEQ ID NO: 94138 - DNA, 22 bp, Artificial Sequence
  Synthetic oligonucleotide; TTA chr11 5284263 5284284 5284280 5284285 +
aaaaaagtctaaccagctgcat

SEQ ID NO: 94139 - DNA, 22 bp, Artificial Sequence
  Synthetic oligonucleotide; CTA chr11 5284274 5284295 5284291 5284296 +
accagctgcattcgactttgac

SEQ ID NO: 94140 - DNA, 22 bp, Artificial Sequence
  Synthetic oligonucleotide; CTG chr11 5284282 5284303 5284299 5284304 +
cattcgactttgactgcagcag

SEQ ID NO: 94141 - DNA, 22 bp, Artificial Sequence
  Synthetic oligonucleotide; TTC chr11 5284287 5284308 5284304 5284309 +
gactttgactgcagcagctggt

SEQ ID NO: 94142 - DNA, 22 bp, Artificial Sequence
  Synthetic oligonucleotide; CTT chr11 5284292 5284313 5284309 5284314 +
tgactgcagcagctggttagaa

SEQ ID NO: 94143 - DNA, 22 bp, Artificial Sequence
  Synthetic oligonucleotide; TTT chr11 5284293 5284314 5284310 5284315 +
gactgcagcagctggttagaag

SEQ ID NO: 94144 - DNA, 22 bp, Artificial Sequence
  Synthetic oligonucleotide; TTG chr11 5284294 5284315 5284311 5284316 +
actgcagcagctggttagaagg

SEQ ID NO: 94145 - DNA, 22 bp, Artificial Sequence
  Synthetic oligonucleotide; CTG chr11 5284298 5284319 5284315 5284320 +
cagcagctggttagaaggttct

SEQ ID NO: 94146 - DNA, 22 bp, Artificial Sequence
  Synthetic oligonucleotide; CTG chr11 5284307 5284328 5284324 5284329 +
gttagaaggttctactggagga

SEQ ID NO: 94147 - DNA, 22 bp, Artificial Sequence
  Synthetic oligonucleotide; TTA chr11 5284311 5284332 5284328 5284333 +
gaaggttctactggaggagggt

SEQ ID NO: 94148 - DNA, 22 bp, Artificial Sequence
  Synthetic oligonucleotide; TTC chr11 5284319 5284340 5284336 5284341 +
tactggaggagggtcccagccc

SEQ ID NO: 94149 - DNA, 22 bp, Artificial Sequence
  Synthetic oligonucleotide; CTA chr11 5284321 5284342 5284338 5284343 +
ctggaggagggtcccagcccat

SEQ ID NO: 94150 - DNA, 22 bp, Artificial Sequence
  Synthetic oligonucleotide; CTG chr11 5284324 5284345 5284341 5284346 +
gaggagggtcccagcccattgc

SEQ ID NO: 94151 - DNA, 22 bp, Artificial Sequence
  Synthetic oligonucleotide; TTG chr11 5284345 5284366 5284362 5284367 +
ctaaattaacatcaggctctga

SEQ ID NO: 94152 - DNA, 22 bp, Artificial Sequence
  Synthetic oligonucleotide; CTA chr11 5284348 5284369 5284365 5284370 +
aattaacatcaggctctgagac

SEQ ID NO: 94153 - DNA, 22 bp, Artificial Sequence
  Synthetic oligonucleotide; TTA chr11 5284353 5284374 5284370 5284375 +
acatcaggctctgagactggca

SEQ ID NO: 94154 - DNA, 22 bp, Artificial Sequence
  Synthetic oligonucleotide; CTC chr11 5284364 5284385 5284381 5284386 +
tgagactggcagtatatctcta

SEQ ID NO: 94155 - DNA, 22 bp, Artificial Sequence
  Synthetic oligonucleotide; CTG chr11 5284366 5284387 5284383 5284388 +
agactggcagtatatctctaac

SEQ ID NO: 94156 - DNA, 22 bp, Artificial Sequence
  Synthetic oligonucleotide; CTG chr11 5284372 5284393 5284389 5284394 +
gcagtatatctctaacagtggt

SEQ ID NO: 94157 - DNA, 22 bp, Artificial Sequence
  Synthetic oligonucleotide; CTC chr11 5284384 5284405 5284401 5284406 +
taacagtggttgatgctatctt

SEQ ID NO: 94158 - DNA, 22 bp, Artificial Sequence
  Synthetic oligonucleotide; CTA chr11 5284386 5284407 5284403 5284408 +
acagtggttgatgctatcttct

SEQ ID NO: 94159 - DNA, 22 bp, Artificial Sequence
  Synthetic oligonucleotide; TTG chr11 5284396 5284417 5284413 5284418 +
atgctatcttctggaacttgcc

SEQ ID NO: 94160 - DNA, 22 bp, Artificial Sequence
  Synthetic oligonucleotide; CTA chr11 5284402 5284423 5284419 5284424 +
tcttctggaacttgcctgctac

SEQ ID NO: 94161 - DNA, 22 bp, Artificial Sequence
  Synthetic oligonucleotide; CTT chr11 5284406 5284427 5284423 5284428 +
ctggaacttgcctgctacattg

SEQ ID NO: 94162 - DNA, 22 bp, Artificial Sequence
  Synthetic oligonucleotide; TTC chr11 5284407 5284428 5284424 5284429 +
tggaacttgcctgctacattga

SEQ ID NO: 94163 - DNA, 22 bp, Artificial Sequence
  Synthetic oligonucleotide; CTG chr11 5284409 5284430 5284426 5284431 +
gaacttgcctgctacattgaga

SEQ ID NO: 94164 - DNA, 22 bp, Artificial Sequence
  Synthetic oligonucleotide; CTT chr11 5284415 5284436 5284432 5284437 +
gcctgctacattgagaccactg

SEQ ID NO: 94165 - DNA, 22 bp, Artificial Sequence
  Synthetic oligonucleotide; TTG chr11 5284416 5284437 5284433 5284438 +
cctgctacattgagaccactga

SEQ ID NO: 94166 - DNA, 22 bp, Artificial Sequence
  Synthetic oligonucleotide; CTG chr11 5284420 5284441 5284437 5284442 +
ctacattgagaccactgaccca

SEQ ID NO: 94167 - DNA, 22 bp, Artificial Sequence
  Synthetic oligonucleotide; CTA chr11 5284423 5284444 5284440 5284445 +
cattgagaccactgacccatac

SEQ ID NO: 94168 - DNA, 22 bp, Artificial Sequence
  Synthetic oligonucleotide; TTG chr11 5284428 5284449 5284445 5284450 +
agaccactgacccatacatagg

SEQ ID NO: 94169 - DNA, 22 bp, Artificial Sequence
  Synthetic oligonucleotide; CTG chr11 5284437 5284458 5284454 5284459 +
acccatacataggaagcccata

SEQ ID NO: 94170 - DNA, 22 bp, Artificial Sequence
  Synthetic oligonucleotide; CTC chr11 5284463 5284484 5284480 5284485 +
tgtcctgaactgttaggccact

SEQ ID NO: 94171 - DNA, 22 bp, Artificial Sequence
  Synthetic oligonucleotide; CTG chr11 5284465 5284486 5284482 5284487 +
tcctgaactgttaggccactgg

SEQ ID NO: 94172 - DNA, 22 bp, Artificial Sequence
  Synthetic oligonucleotide; CTG chr11 5284470 5284491 5284487 5284492 +
aactgttaggccactggtccag

SEQ ID NO: 94173 - DNA, 22 bp, Artificial Sequence
  Synthetic oligonucleotide; CTG chr11 5284475 5284496 5284492 5284497 +
ttaggccactggtccagagagt

SEQ ID NO: 94174 - DNA, 22 bp, Artificial Sequence
  Synthetic oligonucleotide; TTA chr11 5284478 5284499 5284495 5284500 +
ggccactggtccagagagtgtg

SEQ ID NO: 94175 - DNA, 22 bp, Artificial Sequence
  Synthetic oligonucleotide; CTG chr11 5284486 5284507 5284503 5284508 +
gtccagagagtgtgcatctcct

SEQ ID NO: 94176 - DNA, 22 bp, Artificial Sequence
  Synthetic oligonucleotide; CTC chr11 5284506 5284527 5284523 5284528 +
ctttgatcctcataataaccct

SEQ ID NO: 94177 - DNA, 22 bp, Artificial Sequence
  Synthetic oligonucleotide; CTT chr11 5284509 5284530 5284526 5284531 +
tgatcctcataataaccctatg

SEQ ID NO: 94178 - DNA, 22 bp, Artificial Sequence
  Synthetic oligonucleotide; TTT chr11 5284510 5284531 5284527 5284532 +
gatcctcataataaccctatga

SEQ ID NO: 94179 - DNA, 22 bp, Artificial Sequence
  Synthetic oligonucleotide; TTG chr11 5284511 5284532 5284528 5284533 +
atcctcataataaccctatgag

SEQ ID NO: 94180 - DNA, 22 bp, Artificial Sequence
  Synthetic oligonucleotide; CTC chr11 5284517 5284538 5284534 5284539 +
ataataaccctatgagatagac

SEQ ID NO: 94181 - DNA, 22 bp, Artificial Sequence
  Synthetic oligonucleotide; CTA chr11 5284529 5284550 5284546 5284551 +
tgagatagacacaattattact

SEQ ID NO: 94182 - DNA, 22 bp, Artificial Sequence
  Synthetic oligonucleotide; TTA chr11 5284546 5284567 5284563 5284568 +
ttactcttactttatagatgat

SEQ ID NO: 94183 - DNA, 22 bp, Artificial Sequence
  Synthetic oligonucleotide; TTA chr11 5284549 5284570 5284566 5284571 +
ctcttactttatagatgatgat

SEQ ID NO: 94184 - DNA, 22 bp, Artificial Sequence
  Synthetic oligonucleotide; CTC chr11 5284552 5284573 5284569 5284574 +
ttactttatagatgatgatcct

SEQ ID NO: 94185 - DNA, 22 bp, Artificial Sequence
  Synthetic oligonucleotide; CTT chr11 5284554 5284575 5284571 5284576 +
actttatagatgatgatcctga

SEQ ID NO: 94186 - DNA, 22 bp, Artificial Sequence
  Synthetic oligonucleotide; TTA chr11 5284555 5284576 5284572 5284577 +
ctttatagatgatgatcctgaa

SEQ ID NO: 94187 - DNA, 22 bp, Artificial Sequence
  Synthetic oligonucleotide; CTT chr11 5284558 5284579 5284575 5284580 +
tatagatgatgatcctgaaaac

SEQ ID NO: 94188 - DNA, 22 bp, Artificial Sequence
  Synthetic oligonucleotide; TTT chr11 5284559 5284580 5284576 5284581 +
atagatgatgatcctgaaaaca

SEQ ID NO: 94189 - DNA, 22 bp, Artificial Sequence
  Synthetic oligonucleotide; TTA chr11 5284560 5284581 5284577 5284582 +
tagatgatgatcctgaaaacat

SEQ ID NO: 94190 - DNA, 22 bp, Artificial Sequence
  Synthetic oligonucleotide; CTG chr11 5284575 5284596 5284592 5284597 +
aaaacataggagtcaaggcact

SEQ ID NO: 94191 - DNA, 22 bp, Artificial Sequence
  Synthetic oligonucleotide; CTT chr11 5284598 5284619 5284615 5284620 +
gcccctagctgggggtataggg

SEQ ID NO: 94192 - DNA, 22 bp, Artificial Sequence
  Synthetic oligonucleotide; TTG chr11 5284599 5284620 5284616 5284621 +
cccctagctgggggtatagggg

SEQ ID NO: 94193 - DNA, 22 bp, Artificial Sequence
  Synthetic oligonucleotide; CTA chr11 5284605 5284626 5284622 5284627 +
gctgggggtataggggagcagt

SEQ ID NO: 94194 - DNA, 22 bp, Artificial Sequence
  Synthetic oligonucleotide; CTG chr11 5284609 5284630 5284626 5284631 +
ggggtataggggagcagtccca

SEQ ID NO: 94195 - DNA, 22 bp, Artificial Sequence
  Synthetic oligonucleotide; CTG chr11 5284656 5284677 5284673 5284678 +
ctatgctgtgcctcccccacct

SEQ ID NO: 94196 - DNA, 22 bp, Artificial Sequence
  Synthetic oligonucleotide; CTA chr11 5284659 5284680 5284676 5284681 +
tgctgtgcctcccccacctttc

SEQ ID NO: 94197 - DNA, 22 bp, Artificial Sequence
  Synthetic oligonucleotide; CTG chr11 5284664 5284685 5284681 5284686 +
tgcctcccccacctttcccatg

SEQ ID NO: 94198 - DNA, 22 bp, Artificial Sequence
  Synthetic oligonucleotide; CTC chr11 5284670 5284691 5284687 5284692 +
ccccacctttcccatgtctgcc

SEQ ID NO: 94199 - DNA, 22 bp, Artificial Sequence
  Synthetic oligonucleotide; CTT chr11 5284679 5284700 5284696 5284701 +
tcccatgtctgccctctactca

SEQ ID NO: 94200 - DNA, 22 bp, Artificial Sequence
  Synthetic oligonucleotide; TTT chr11 5284680 5284701 5284697 5284702 +
cccatgtctgccctctactcat

SEQ ID NO: 94201 - DNA, 22 bp, Artificial Sequence
  Synthetic oligonucleotide; TTC chr11 5284681 5284702 5284698 5284703 +
ccatgtctgccctctactcatg

SEQ ID NO: 94202 - DNA, 22 bp, Artificial Sequence
  Synthetic oligonucleotide; CTG chr11 5284690 5284711 5284707 5284712 +
ccctctactcatggtctatctc

SEQ ID NO: 94203 - DNA, 22 bp, Artificial Sequence
  Synthetic oligonucleotide; CTC chr11 5284695 5284716 5284712 5284717 +
tactcatggtctatctctcctg

SEQ ID NO: 94204 - DNA, 22 bp, Artificial Sequence
  Synthetic oligonucleotide; CTA chr11 5284697 5284718 5284714 5284719 +
ctcatggtctatctctcctggc

SEQ ID NO: 94205 - DNA, 22 bp, Artificial Sequence
  Synthetic oligonucleotide; CTC chr11 5284700 5284721 5284717 5284722 +
atggtctatctctcctggctcc

SEQ ID NO: 94206 - DNA, 22 bp, Artificial Sequence
  Synthetic oligonucleotide; CTA chr11 5284708 5284729 5284725 5284730 +
tctctcctggctcctgggagtc

SEQ ID NO: 94207 - DNA, 22 bp, Artificial Sequence
  Synthetic oligonucleotide; CTC chr11 5284712 5284733 5284729 5284734 +
tcctggctcctgggagtcatgg

SEQ ID NO: 94208 - DNA, 22 bp, Artificial Sequence
  Synthetic oligonucleotide; CTC chr11 5284714 5284735 5284731 5284736 +
ctggctcctgggagtcatggac

SEQ ID NO: 94209 - DNA, 22 bp, Artificial Sequence
  Synthetic oligonucleotide; CTG chr11 5284717 5284738 5284734 5284739 +
gctcctgggagtcatggactcc

SEQ ID NO: 94210 - DNA, 22 bp, Artificial Sequence
  Synthetic oligonucleotide; CTC chr11 5284721 5284742 5284738 5284743 +
ctgggagtcatggactccaccc

SEQ ID NO: 94211 - DNA, 22 bp, Artificial Sequence
  Synthetic oligonucleotide; CTG chr11 5284724 5284745 5284741 5284746 +
ggagtcatggactccacccagc

SEQ ID NO: 94212 - DNA, 22 bp, Artificial Sequence
  Synthetic oligonucleotide; CTC chr11 5284738 5284759 5284755 5284760 +
cacccagcaccaccaacctgac

SEQ ID NO: 94213 - DNA, 22 bp, Artificial Sequence
  Synthetic oligonucleotide; CTG chr11 5284758 5284779 5284775 5284780 +
acctaaccacctatctgagcct

SEQ ID NO: 94214 - DNA, 22 bp, Artificial Sequence
  Synthetic oligonucleotide; CTA chr11 5284763 5284784 5284780 5284785 +
accacctatctgagcctgccag

SEQ ID NO: 94215 - DNA, 22 bp, Artificial Sequence
  Synthetic oligonucleotide; CTA chr11 5284771 5284792 5284788 5284793 +
tctgagcctgccagcctataac

SEQ ID NO: 94216 - DNA, 22 bp, Artificial Sequence
  Synthetic oligonucleotide; CTG chr11 5284775 5284796 5284792 5284797 +
agcctgccagcctataacccat

SEQ ID NO: 94217 - DNA, 22 bp, Artificial Sequence
  Synthetic oligonucleotide; CTG chr11 5284781 5284802 5284798 5284803 +
ccagcctataacccatctgggc

SEQ ID NO: 94218 - DNA, 22 bp, Artificial Sequence
  Synthetic oligonucleotide; CTA chr11 5284789 5284810 5284806 5284811 +
taacccatctgggccctgatag

SEQ ID NO: 94219 - DNA, 22 bp, Artificial Sequence
  Synthetic oligonucleotide; CTG chr11 5284800 5284821 5284817 5284822 +
ggccctgatagctggtggccag

SEQ ID NO: 94220 - DNA, 22 bp, Artificial Sequence
  Synthetic oligonucleotide; CTG chr11 5284807 5284828 5284824 5284829 +
atagctggtggccagccctgac

SEQ ID NO: 94221 - DNA, 22 bp, Artificial Sequence
  Synthetic oligonucleotide; CTG chr11 5284814 5284835 5284831 5284836 +
gtggccagccctgaccccaccc

SEQ ID NO: 94222 - DNA, 22 bp, Artificial Sequence
  Synthetic oligonucleotide; CTG chr11 5284827 5284848 5284844 5284849 +
accccaccccaccctccctgga

SEQ ID NO: 94223 - DNA, 22 bp, Artificial Sequence
  Synthetic oligonucleotide; CTC chr11 5284843 5284864 5284860 5284865 +
cctggaacctctgatagacaca

SEQ ID NO: 94224 - DNA, 22 bp, Artificial Sequence
  Synthetic oligonucleotide; CTG chr11 5284847 5284868 5284864 5284869 +
gaacctctgatagacacatctg

SEQ ID NO: 94225 - DNA, 22 bp, Artificial Sequence
  Synthetic oligonucleotide; CTC chr11 5284854 5284875 5284871 5284876 +
tgatagacacatctggcacacc

SEQ ID NO: 94226 - DNA, 22 bp, Artificial Sequence
  Synthetic oligonucleotide; CTG chr11 5284856 5284877 5284873 5284878 +
atagacacatctggcacaccag

SEQ ID NO: 94227 - DNA, 22 bp, Artificial Sequence
  Synthetic oligonucleotide; CTG chr11 5284869 5284890 5284886 5284891 +
gcacaccagctcgcaaagtcac

SEQ ID NO: 94228 - DNA, 22 bp, Artificial Sequence
  Synthetic oligonucleotide; CTC chr11 5284881 5284902 5284898 5284903 +
gcaaagtcaccgtgagggtctt

SEQ ID NO: 94229 - DNA, 22 bp, Artificial Sequence
  Synthetic oligonucleotide; CTT chr11 5284903 5284924 5284920 5284925 +
gtgtttgctgagtcaaaattcc

SEQ ID NO: 94230 - DNA, 22 bp, Artificial Sequence
  Synthetic oligonucleotide; TTG chr11 5284904 5284925 5284921 5284926 +
tgtttgctgagtcaaaattcct

SEQ ID NO: 94231 - DNA, 22 bp, Artificial Sequence
  Synthetic oligonucleotide; TTT chr11 5284909 5284930 5284926 5284931 +
gctgagtcaaaattccttgaaa

SEQ ID NO: 94232 - DNA, 22 bp, Artificial Sequence
  Synthetic oligonucleotide; TTG chr11 5284910 5284931 5284927 5284932 +
ctgagtcaaaattccttgaaat

SEQ ID NO: 94233 - DNA, 22 bp, Artificial Sequence
  Synthetic oligonucleotide; CTG chr11 5284913 5284934 5284930 5284935 +
agtcaaaattccttgaaatcca

SEQ ID NO: 94234 - DNA, 22 bp, Artificial Sequence
  Synthetic oligonucleotide; TTC chr11 5284924 5284945 5284941 5284946 +
cttgaaatccaagtccttagag

SEQ ID NO: 94235 - DNA, 22 bp, Artificial Sequence
  Synthetic oligonucleotide; CTT chr11 5284927 5284948 5284944 5284949 +
gaaatccaagtccttagagact

SEQ ID NO: 94236 - DNA, 22 bp, Artificial Sequence
  Synthetic oligonucleotide; TTG chr11 5284928 5284949 5284945 5284950 +
aaatccaagtccttagagactc

SEQ ID NO: 94237 - DNA, 22 bp, Artificial Sequence
  Synthetic oligonucleotide; CTT chr11 5284942 5284963 5284959 5284964 +
agagactcctgctcccaaattt

SEQ ID NO: 94238 - DNA, 22 bp, Artificial Sequence
  Synthetic oligonucleotide; TTA chr11 5284943 5284964 5284960 5284965 +
gagactcctgctcccaaattta

SEQ ID NO: 94239 - DNA, 22 bp, Artificial Sequence
  Synthetic oligonucleotide; CTC chr11 5284950 5284971 5284967 5284972 +
ctgctcccaaatttacagtcat

SEQ ID NO: 94240 - DNA, 22 bp, Artificial Sequence
  Synthetic oligonucleotide; CTG chr11 5284953 5284974 5284970 5284975 +
ctcccaaatttacagtcataga

SEQ ID NO: 94241 - DNA, 22 bp, Artificial Sequence
  Synthetic oligonucleotide; CTC chr11 5284956 5284977 5284973 5284978 +
ccaaatttacagtcatagactt

SEQ ID NO: 94242 - DNA, 22 bp, Artificial Sequence
  Synthetic oligonucleotide; TTT chr11 5284964 5284985 5284981 5284986 +
acagtcatagacttcttcatgg

SEQ ID NO: 94243 - DNA, 22 bp, Artificial Sequence
  Synthetic oligonucleotide; TTA chr11 5284965 5284986 5284982 5284987 +
cagtcatagacttcttcatggc

SEQ ID NO: 94244 - DNA, 22 bp, Artificial Sequence
  Synthetic oligonucleotide; CTT chr11 5284978 5284999 5284995 5285000 +
cttcatggctgtctcctttatc

SEQ ID NO: 94245 - DNA, 22 bp, Artificial Sequence
  Synthetic oligonucleotide; TTC chr11 5284979 5285000 5284996 5285001 +
ttcatggctgtctcctttatcc

SEQ ID NO: 94246 - DNA, 22 bp, Artificial Sequence
  Synthetic oligonucleotide; CTT chr11 5284981 5285002 5284998 5285003 +
catggctgtctcctttatccac

SEQ ID NO: 94247 - DNA, 22 bp, Artificial Sequence
  Synthetic oligonucleotide; TTC chr11 5284982 5285003 5284999 5285004 +
atggctgtctcctttatccaca

SEQ ID NO: 94248 - DNA, 22 bp, Artificial Sequence
  Synthetic oligonucleotide; CTG chr11 5284989 5285010 5285006 5285011 +
tctcctttatccacagaatgat

SEQ ID NO: 94249 - DNA, 22 bp, Artificial Sequence
  Synthetic oligonucleotide; CTC chr11 5284993 5285014 5285010 5285015 +
ctttatccacagaatgattcct

SEQ ID NO: 94250 - DNA, 22 bp, Artificial Sequence
  Synthetic oligonucleotide; CTT chr11 5284996 5285017 5285013 5285018 +
tatccacagaatgattcctttg

SEQ ID NO: 94251 - DNA, 22 bp, Artificial Sequence
  Synthetic oligonucleotide; TTT chr11 5284997 5285018 5285014 5285019 +
atccacagaatgattcctttgc

SEQ ID NO: 94252 - DNA, 22 bp, Artificial Sequence
  Synthetic oligonucleotide; TTA chr11 5284998 5285019 5285015 5285020 +
tccacagaatgattcctttgct

SEQ ID NO: 94253 - DNA, 22 bp, Artificial Sequence
  Synthetic oligonucleotide; TTC chr11 5285013 5285034 5285030 5285035 +
ctttgcttcattgccccatcca

SEQ ID NO: 94254 - DNA, 22 bp, Artificial Sequence
  Synthetic oligonucleotide; CTT chr11 5285016 5285037 5285033 5285038 +
tgcttcattgccccatccatct

SEQ ID NO: 94255 - DNA, 22 bp, Artificial Sequence
  Synthetic oligonucleotide; TTT chr11 5285017 5285038 5285034 5285039 +
gcttcattgccccatccatctg

SEQ ID NO: 94256 - DNA, 22 bp, Artificial Sequence
  Synthetic oligonucleotide; TTG chr11 5285018 5285039 5285035 5285040 +
cttcattgccccatccatctga

SEQ ID NO: 94257 - DNA, 22 bp, Artificial Sequence
  Synthetic oligonucleotide; CTT chr11 5285021 5285042 5285038 5285043 +
cattgccccatccatctgatcc

SEQ ID NO: 94258 - DNA, 22 bp, Artificial Sequence
  Synthetic oligonucleotide; TTC chr11 5285022 5285043 5285039 5285044 +
attgccccatccatctgatcct

SEQ ID NO: 94259 - DNA, 22 bp, Artificial Sequence
  Synthetic oligonucleotide; TTG chr11 5285026 5285047 5285043 5285048 +
ccccatccatctgatcctcctc

SEQ ID NO: 94260 - DNA, 22 bp, Artificial Sequence
  Synthetic oligonucleotide; CTG chr11 5285039 5285060 5285056 5285061 +
atcctcctcatcagtgcagcac

SEQ ID NO: 94261 - DNA, 22 bp, Artificial Sequence
  Synthetic oligonucleotide; CTC chr11 5285045 5285066 5285062 5285067 +
ctcatcagtgcagcacagggcc

SEQ ID NO: 94262 - DNA, 22 bp, Artificial Sequence
  Synthetic oligonucleotide; CTC chr11 5285048 5285069 5285065 5285070 +
atcagtgcagcacagggcccat

SEQ ID NO: 94263 - DNA, 22 bp, Artificial Sequence
  Synthetic oligonucleotide; CTG chr11 5285082 5285103 5285099 5285104 +
cagagtctcacataggtctggc

SEQ ID NO: 94264 - DNA, 22 bp, Artificial Sequence
  Synthetic oligonucleotide; CTC chr11 5285091 5285112 5285108 5285113 +
acataggtctggcactgcctct

SEQ ID NO: 94265 - DNA, 22 bp, Artificial Sequence
  Synthetic oligonucleotide; CTG chr11 5285102 5285123 5285119 5285124 +
gcactgcctctgacatgtccga

SEQ ID NO: 94266 - DNA, 22 bp, Artificial Sequence
  Synthetic oligonucleotide; CTG chr11 5285108 5285129 5285125 5285130 +
cctctgacatgtccgaccttag

SEQ ID NO: 94267 - DNA, 22 bp, Artificial Sequence
  Synthetic oligonucleotide; CTC chr11 5285112 5285133 5285129 5285134 +
tgacatgtccgaccttaggcaa

SEQ ID NO: 94268 - DNA, 22 bp, Artificial Sequence
  Synthetic oligonucleotide; CTG chr11 5285114 5285135 5285131 5285136 +
acatgtccgaccttaggcaaat

SEQ ID NO: 94269 - DNA, 22 bp, Artificial Sequence
  Synthetic oligonucleotide; CTT chr11 5285128 5285149 5285145 5285150 +
aggcaaatgcttgactcttctg

SEQ ID NO: 94270 - DNA, 22 bp, Artificial Sequence
  Synthetic oligonucleotide; TTA chr11 5285129 5285150 5285146 5285151 +
ggcaaatgcttgactcttctga

SEQ ID NO: 94271 - DNA, 22 bp, Artificial Sequence
  Synthetic oligonucleotide; CTT chr11 5285140 5285161 5285157 5285162 +
gactcttctgagctcagtcttg

SEQ ID NO: 94272 - DNA, 22 bp, Artificial Sequence
  Synthetic oligonucleotide; TTG chr11 5285141 5285162 5285158 5285163 +
actcttctgagctcagtcttgt

SEQ ID NO: 94273 - DNA, 22 bp, Artificial Sequence
  Synthetic oligonucleotide; CTC chr11 5285145 5285166 5285162 5285167 +
ttctgagctcagtcttgtcatg

SEQ ID NO: 94274 - DNA, 22 bp, Artificial Sequence
  Synthetic oligonucleotide; CTT chr11 5285147 5285168 5285164 5285169 +
ctgagctcagtcttgtcatggc

SEQ ID NO: 94275 - DNA, 22 bp, Artificial Sequence
  Synthetic oligonucleotide; TTC chr11 5285148 5285169 5285165 5285170 +
tgagctcagtcttgtcatggca

SEQ ID NO: 94276 - DNA, 22 bp, Artificial Sequence
  Synthetic oligonucleotide; CTG chr11 5285150 5285171 5285167 5285172 +
agctcagtcttgtcatggcaaa

SEQ ID NO: 94277 - DNA, 22 bp, Artificial Sequence
  Synthetic oligonucleotide; CTC chr11 5285155 5285176 5285172 5285177 +
agtcttgtcatggcaaaataaa

SEQ ID NO: 94278 - DNA, 22 bp, Artificial Sequence
  Synthetic oligonucleotide; CTT chr11 5285161 5285182 5285178 5285183 +
gtcatggcaaaataaagataat

SEQ ID NO: 94279 - DNA, 22 bp, Artificial Sequence
  Synthetic oligonucleotide; TTG chr11 5285162 5285183 5285179 5285184 +
tcatggcaaaataaagataata

SEQ ID NO: 94280 - DNA, 22 bp, Artificial Sequence
  Synthetic oligonucleotide; TTT chr11 5285193 5285214 5285210 5285215 +
ttttatggagttagcgtgagga

SEQ ID NO: 94281 - DNA, 22 bp, Artificial Sequence
  Synthetic oligonucleotide; TTT chr11 5285194 5285215 5285211 5285216 +
tttatggagttagcgtgaggat

SEQ ID NO: 94282 - DNA, 22 bp, Artificial Sequence
  Synthetic oligonucleotide; TTT chr11 5285195 5285216 5285212 5285217 +
ttatggagttagcgtgaggatg

SEQ ID NO: 94283 - DNA, 22 bp, Artificial Sequence
  Synthetic oligonucleotide; TTT chr11 5285196 5285217 5285213 5285218 +
tatggagttagcgtgaggatgg

SEQ ID NO: 94284 - DNA, 22 bp, Artificial Sequence
  Synthetic oligonucleotide; TTT chr11 5285197 5285218 5285214 5285219 +
atggagttagcgtgaggatgga

SEQ ID NO: 94285 - DNA, 22 bp, Artificial Sequence
  Synthetic oligonucleotide; TTA chr11 5285198 5285219 5285215 5285220 +
tggagttagcgtgaggatggaa

SEQ ID NO: 94286 - DNA, 22 bp, Artificial Sequence
  Synthetic oligonucleotide; TTA chr11 5285206 5285227 5285223 5285228 +
gcgtgaggatggaaaacaatag

SEQ ID NO: 94287 - DNA, 22 bp, Artificial Sequence
  Synthetic oligonucleotide; TTG chr11 5285236 5285257 5285253 5285258 +
attagactataaaaggtctcaa

SEQ ID NO: 94288 - DNA, 22 bp, Artificial Sequence
  Synthetic oligonucleotide; TTA chr11 5285240 5285261 5285257 5285262 +
gactataaaaggtctcaacaaa

SEQ ID NO: 94289 - DNA, 22 bp, Artificial Sequence
  Synthetic oligonucleotide; CTA chr11 5285245 5285266 5285262 5285267 +
taaaaggtctcaacaaatagta

SEQ ID NO: 94290 - DNA, 22 bp, Artificial Sequence
  Synthetic oligonucleotide; CTC chr11 5285256 5285277 5285273 5285278 +
aacaaatagtagtagattttat

SEQ ID NO: 94291 - DNA, 22 bp, Artificial Sequence
  Synthetic oligonucleotide; TTT chr11 5285275 5285296 5285292 5285297 +
tatcgtccattaatccttccct

SEQ ID NO: 94292 - DNA, 22 bp, Artificial Sequence
  Synthetic oligonucleotide; TTT chr11 5285276 5285297 5285293 5285298 +
atcgtccattaatccttccctc

SEQ ID NO: 94293 - DNA, 22 bp, Artificial Sequence
  Synthetic oligonucleotide; TTA chr11 5285277 5285298 5285294 5285299 +
tcgtccattaatccttccctct

SEQ ID NO: 94294 - DNA, 22 bp, Artificial Sequence
  Synthetic oligonucleotide; TTA chr11 5285287 5285308 5285304 5285309 +
atccttccctctcctctcttac

SEQ ID NO: 94295 - DNA, 22 bp, Artificial Sequence
  Synthetic oligonucleotide; CTT chr11 5285293 5285314 5285310 5285315 +
ccctctcctctcttactcatcc

SEQ ID NO: 94296 - DNA, 22 bp, Artificial Sequence
  Synthetic oligonucleotide; TTC chr11 5285294 5285315 5285311 5285316 +
cctctcctctcttactcatccc

SEQ ID NO: 94297 - DNA, 22 bp, Artificial Sequence
  Synthetic oligonucleotide; CTC chr11 5285298 5285319 5285315 5285320 +
tcctctcttactcatcccatca

SEQ ID NO: 94298 - DNA, 22 bp, Artificial Sequence
  Synthetic oligonucleotide; CTC chr11 5285300 5285321 5285317 5285322 +
ctctcttactcatcccatcacg

SEQ ID NO: 94299 - DNA, 22 bp, Artificial Sequence
  Synthetic oligonucleotide; CTC chr11 5285303 5285324 5285320 5285325 +
tcttactcatcccatcacgtat

SEQ ID NO: 94300 - DNA, 22 bp, Artificial Sequence
  Synthetic oligonucleotide; CTC chr11 5285305 5285326 5285322 5285327 +
ttactcatcccatcacgtatgc

SEQ ID NO: 94301 - DNA, 22 bp, Artificial Sequence
  Synthetic oligonucleotide; CTT chr11 5285307 5285328 5285324 5285329 +
actcatcccatcacgtatgcct

SEQ ID NO: 94302 - DNA, 22 bp, Artificial Sequence
  Synthetic oligonucleotide; TTA chr11 5285308 5285329 5285325 5285330 +
ctcatcccatcacgtatgcctc

SEQ ID NO: 94303 - DNA, 22 bp, Artificial Sequence
  Synthetic oligonucleotide; CTC chr11 5285311 5285332 5285328 5285333 +
atcccatcacgtatgcctctta

SEQ ID NO: 94304 - DNA, 22 bp, Artificial Sequence
  Synthetic oligonucleotide; CTC chr11 5285330 5285351 5285347 5285352 +
ttaattttcccttacctataat

SEQ ID NO: 94305 - DNA, 22 bp, Artificial Sequence
  Synthetic oligonucleotide; CTT chr11 5285332 5285353 5285349 5285354 +
aattttcccttacctataataa

SEQ ID NO: 94306 - DNA, 22 bp, Artificial Sequence
  Synthetic oligonucleotide; TTA chr11 5285333 5285354 5285350 5285355 +
attttcccttacctataataag

SEQ ID NO: 94307 - DNA, 22 bp, Artificial Sequence
  Synthetic oligonucleotide; TTT chr11 5285337 5285358 5285354 5285359 +
tcccttacctataataagagtt

SEQ ID NO: 94308 - DNA, 22 bp, Artificial Sequence
  Synthetic oligonucleotide; TTT chr11 5285338 5285359 5285355 5285360 +
cccttacctataataagagtta

SEQ ID NO: 94309 - DNA, 22 bp, Artificial Sequence
  Synthetic oligonucleotide; TTC chr11 5285339 5285360 5285356 5285361 +
ccttacctataataagagttat

SEQ ID NO: 94310 - DNA, 22 bp, Artificial Sequence
  Synthetic oligonucleotide; CTT chr11 5285343 5285364 5285360 5285365 +
acctataataagagttattcct

SEQ ID NO: 94311 - DNA, 22 bp, Artificial Sequence
  Synthetic oligonucleotide; TTA chr11 5285344 5285365 5285361 5285366 +
cctataataagagttattcctc

SEQ ID NO: 94312 - DNA, 22 bp, Artificial Sequence
  Synthetic oligonucleotide; CTA chr11 5285348 5285369 5285365 5285370 +
taataagagttattcctcttat

SEQ ID NO: 94313 - DNA, 22 bp, Artificial Sequence
  Synthetic oligonucleotide; TTA chr11 5285360 5285381 5285377 5285382 +
ttcctcttattatattcttctt

SEQ ID NO: 94314 - DNA, 22 bp, Artificial Sequence
  Synthetic oligonucleotide; TTC chr11 5285363 5285384 5285380 5285385 +
ctcttattatattcttcttata

SEQ ID NO: 94315 - DNA, 22 bp, Artificial Sequence
  Synthetic oligonucleotide; CTC chr11 5285366 5285387 5285383 5285388 +
ttattatattcttcttatagtg

SEQ ID NO: 94316 - DNA, 22 bp, Artificial Sequence
  Synthetic oligonucleotide; CTT chr11 5285368 5285389 5285385 5285390 +
attatattcttcttatagtgat

SEQ ID NO: 94317 - DNA, 22 bp, Artificial Sequence
  Synthetic oligonucleotide; TTA chr11 5285369 5285390 5285386 5285391 +
ttatattcttcttatagtgatt

SEQ ID NO: 94318 - DNA, 22 bp, Artificial Sequence
  Synthetic oligonucleotide; TTA chr11 5285372 5285393 5285389 5285394 +
tattcttcttatagtgattctg

SEQ ID NO: 94319 - DNA, 22 bp, Artificial Sequence
  Synthetic oligonucleotide; TTC chr11 5285377 5285398 5285394 5285399 +
ttcttatagtgattctggatat

SEQ ID NO: 94320 - DNA, 22 bp, Artificial Sequence
  Synthetic oligonucleotide; CTT chr11 5285379 5285400 5285396 5285401 +
cttatagtgattctggatatta

SEQ ID NO: 94321 - DNA, 22 bp, Artificial Sequence
  Synthetic oligonucleotide; TTC chr11 5285380 5285401 5285397 5285402 +
ttatagtgattctggatattaa

SEQ ID NO: 94322 - DNA, 22 bp, Artificial Sequence
  Synthetic oligonucleotide; CTT chr11 5285382 5285403 5285399 5285404 +
atagtgattctggatattaaag

SEQ ID NO: 94323 - DNA, 22 bp, Artificial Sequence
  Synthetic oligonucleotide; TTA chr11 5285383 5285404 5285400 5285405 +
tagtgattctggatattaaagt

SEQ ID NO: 94324 - DNA, 22 bp, Artificial Sequence
  Synthetic oligonucleotide; TTC chr11 5285392 5285413 5285409 5285414 +
tggatattaaagtgggaatgag

SEQ ID NO: 94325 - DNA, 22 bp, Artificial Sequence
  Synthetic oligonucleotide; CTG chr11 5285394 5285415 5285411 5285416 +
gatattaaagtgggaatgaggg

SEQ ID NO: 94326 - DNA, 22 bp, Artificial Sequence
  Synthetic oligonucleotide; TTA chr11 5285401 5285422 5285418 5285423 +
aagtgggaatgaggggcaggcc

SEQ ID NO: 94327 - DNA, 22 bp, Artificial Sequence
  Synthetic oligonucleotide; CTA chr11 5285427 5285448 5285444 5285449 +
acgaagaagatgtttctcaaag

SEQ ID NO: 94328 - DNA, 22 bp, Artificial Sequence
  Synthetic oligonucleotide; TTT chr11 5285442 5285463 5285459 5285464 +
ctcaaagaagccattctcccca

SEQ ID NO: 94329 - DNA, 22 bp, Artificial Sequence
  Synthetic oligonucleotide; TTC chr11 5285443 5285464 5285460 5285465 +
tcaaagaagccattctccccac

SEQ ID NO: 94330 - DNA, 22 bp, Artificial Sequence
  Synthetic oligonucleotide; CTC chr11 5285445 5285466 5285462 5285467 +
aaagaagccattctccccacat

SEQ ID NO: 94331 - DNA, 22 bp, Artificial Sequence
  Synthetic oligonucleotide; TTC chr11 5285458 5285479 5285475 5285480 +
tccccacatagatcatctcagc

SEQ ID NO: 94332 - DNA, 22 bp, Artificial Sequence
  Synthetic oligonucleotide; CTC chr11 5285460 5285481 5285477 5285482 +
cccacatagatcatctcagcag

SEQ ID NO: 94333 - DNA, 22 bp, Artificial Sequence
  Synthetic oligonucleotide; CTC chr11 5285477 5285498 5285494 5285499 +
agcagggttcaggaagataaag

SEQ ID NO: 94334 - DNA, 22 bp, Artificial Sequence
  Synthetic oligonucleotide; TTC chr11 5285487 5285508 5285504 5285509 +
aggaagataaaggaggatcaag

SEQ ID NO: 94335 - DNA, 22 bp, Artificial Sequence
  Synthetic oligonucleotide; CTA chr11 5285526 5285547 5285543 5285548 +
aggaagaacactgggcaagtgg

SEQ ID NO: 94336 - DNA, 22 bp, Artificial Sequence
  Synthetic oligonucleotide; CTG chr11 5285539 5285560 5285556 5285561 +
ggcaagtggatccaggttgtcc

SEQ ID NO: 94337 - DNA, 22 bp, Artificial Sequence
  Synthetic oligonucleotide; TTG chr11 5285558 5285579 5285575 5285580 +
tccaacgctgaaagtaggaatc

SEQ ID NO: 94338 - DNA, 22 bp, Artificial Sequence
  Synthetic oligonucleotide; CTG chr11 5285568 5285589 5285585 5285590 +
aaagtaggaatctaagcactag

SEQ ID NO: 94339 - DNA, 22 bp, Artificial Sequence
  Synthetic oligonucleotide; CTA chr11 5285582 5285603 5285599 5285604 +
agcactagtctctggatgctag

SEQ ID NO: 94340 - DNA, 22 bp, Artificial Sequence
  Synthetic oligonucleotide; CTA chr11 5285589 5285610 5285606 5285611 +
gtctctggatgctaggagggcc

SEQ ID NO: 94341 - DNA, 22 bp, Artificial Sequence
  Synthetic oligonucleotide; CTC chr11 5285594 5285615 5285611 5285616 +
tggatgctaggagggcctctgc

SEQ ID NO: 94342 - DNA, 22 bp, Artificial Sequence
  Synthetic oligonucleotide; CTG chr11 5285596 5285617 5285613 5285618 +
gatgctaggagggcctctgcat

SEQ ID NO: 94343 - DNA, 22 bp, Artificial Sequence
  Synthetic oligonucleotide; CTA chr11 5285603 5285624 5285620 5285625 +
ggagggcctctgcatgggtaac

SEQ ID NO: 94344 - DNA, 22 bp, Artificial Sequence
  Synthetic oligonucleotide; CTC chr11 5285613 5285634 5285630 5285635 +
tgcatgggtaactctttcaact

SEQ ID NO: 94345 - DNA, 22 bp, Artificial Sequence
  Synthetic oligonucleotide; CTG chr11 5285615 5285636 5285632 5285637 +
catgggtaactctttcaactag

SEQ ID NO: 94346 - DNA, 22 bp, Artificial Sequence
  Synthetic oligonucleotide; CTC chr11 5285627 5285648 5285644 5285649 +
tttcaactagccaggggctgga

SEQ ID NO: 94347 - DNA, 22 bp, Artificial Sequence
  Synthetic oligonucleotide; CTT chr11 5285629 5285650 5285646 5285651 +
tcaactagccaggggctggact

SEQ ID NO: 94348 - DNA, 22 bp, Artificial Sequence
  Synthetic oligonucleotide; TTT chr11 5285630 5285651 5285647 5285652 +
caactagccaggggctggactg

SEQ ID NO: 94349 - DNA, 22 bp, Artificial Sequence
  Synthetic oligonucleotide; TTC chr11 5285631 5285652 5285648 5285653 +
aactagccaggggctggactgt

SEQ ID NO: 94350 - DNA, 22 bp, Artificial Sequence
  Synthetic oligonucleotide; CTA chr11 5285636 5285657 5285653 5285658 +
gccaggggctggactgtggaga

SEQ ID NO: 94351 - DNA, 22 bp, Artificial Sequence
  Synthetic oligonucleotide; CTG chr11 5285647 5285668 5285664 5285669 +
gactgtggagaaaccatttcca

SEQ ID NO: 94352 - DNA, 22 bp, Artificial Sequence
  Synthetic oligonucleotide; CTG chr11 5285652 5285673 5285669 5285674 +
tggagaaaccatttccagatag

SEQ ID NO: 94353 - DNA, 22 bp, Artificial Sequence
  Synthetic oligonucleotide; TTT chr11 5285666 5285687 5285683 5285688 +
ccagatagaagtgaggagattc

SEQ ID NO: 94354 - DNA, 22 bp, Artificial Sequence
  Synthetic oligonucleotide; TTC chr11 5285667 5285688 5285684 5285689 +
cagatagaagtgaggagattcc

SEQ ID NO: 94355 - DNA, 22 bp, Artificial Sequence
  Synthetic oligonucleotide; TTC chr11 5285688 5285709 5285705 5285710 +
cagcaggaaacacttaagagag

SEQ ID NO: 94356 - DNA, 22 bp, Artificial Sequence
  Synthetic oligonucleotide; CTT chr11 5285703 5285724 5285720 5285725 +
aagagaggatccctggaagttc

SEQ ID NO: 94357 - DNA, 22 bp, Artificial Sequence
  Synthetic oligonucleotide; TTA chr11 5285704 5285725 5285721 5285726 +
agagaggatccctggaagttcg

SEQ ID NO: 94358 - DNA, 22 bp, Artificial Sequence
  Synthetic oligonucleotide; CTG chr11 5285718 5285739 5285735 5285740 +
gaagttcggggcaggaggctcc

SEQ ID NO: 94359 - DNA, 22 bp, Artificial Sequence
  Synthetic oligonucleotide; TTC chr11 5285725 5285746 5285742 5285747 +
ggggcaggaggctccctgtcac

SEQ ID NO: 94360 - DNA, 22 bp, Artificial Sequence
  Synthetic oligonucleotide; CTC chr11 5285739 5285760 5285756 5285761 +
cctgtcacatgaaggaaacctg

SEQ ID NO: 94361 - DNA, 22 bp, Artificial Sequence
  Synthetic oligonucleotide; CTG chr11 5285743 5285764 5285760 5285765 +
tcacatgaaggaaacctgctca

SEQ ID NO: 94362 - DNA, 22 bp, Artificial Sequence
  Synthetic oligonucleotide; CTG chr11 5285761 5285782 5285778 5285783 +
ctcagcgtaggctctaggttct

SEQ ID NO: 94363 - DNA, 22 bp, Artificial Sequence
  Synthetic oligonucleotide; CTC chr11 5285764 5285785 5285781 5285786 +
agcgtaggctctaggttcttcc

SEQ ID NO: 94364 - DNA, 22 bp, Artificial Sequence
  Synthetic oligonucleotide; CTC chr11 5285775 5285796 5285792 5285797 +
taggttcttccctactcttatc

SEQ ID NO: 94365 - DNA, 22 bp, Artificial Sequence
  Synthetic oligonucleotide; CTA chr11 5285777 5285798 5285794 5285799 +
ggttcttccctactcttatcca

SEQ ID NO: 94366 - DNA, 22 bp, Artificial Sequence
  Synthetic oligonucleotide; TTC chr11 5285782 5285803 5285799 5285804 +
ttccctactcttatccaatggg

SEQ ID NO: 94367 - DNA, 22 bp, Artificial Sequence
  Synthetic oligonucleotide; CTT chr11 5285784 5285805 5285801 5285806 +
ccctactcttatccaatggggc

SEQ ID NO: 94368 - DNA, 22 bp, Artificial Sequence
  Synthetic oligonucleotide; TTC chr11 5285785 5285806 5285802 5285807 +
cctactcttatccaatggggct

SEQ ID NO: 94369 - DNA, 22 bp, Artificial Sequence
  Synthetic oligonucleotide; CTA chr11 5285789 5285810 5285806 5285811 +
ctcttatccaatggggcttctg

SEQ ID NO: 94370 - DNA, 22 bp, Artificial Sequence
  Synthetic oligonucleotide; CTC chr11 5285792 5285813 5285809 5285814 +
ttatccaatggggcttctgatt

SEQ ID NO: 94371 - DNA, 22 bp, Artificial Sequence
  Synthetic oligonucleotide; CTT chr11 5285794 5285815 5285811 5285816 +
atccaatggggcttctgatttt

SEQ ID NO: 94372 - DNA, 22 bp, Artificial Sequence
  Synthetic oligonucleotide; TTA chr11 5285795 5285816 5285812 5285817 +
tccaatggggcttctgatttta

SEQ ID NO: 94373 - DNA, 22 bp, Artificial Sequence
  Synthetic oligonucleotide; CTT chr11 5285808 5285829 5285825 5285830 +
ctgattttaagccagtcttcac

SEQ ID NO: 94374 - DNA, 22 bp, Artificial Sequence
  Synthetic oligonucleotide; TTC chr11 5285809 5285830 5285826 5285831 +
tgattttaagccagtcttcaca

SEQ ID NO: 94375 - DNA, 22 bp, Artificial Sequence
  Synthetic oligonucleotide; CTG chr11 5285811 5285832 5285828 5285833 +
attttaagccagtcttcacaaa

SEQ ID NO: 94376 - DNA, 22 bp, Artificial Sequence
  Synthetic oligonucleotide; TTT chr11 5285815 5285836 5285832 5285837 +
taagccagtcttcacaaagccc

SEQ ID NO: 94377 - DNA, 22 bp, Artificial Sequence
  Synthetic oligonucleotide; TTT chr11 5285816 5285837 5285833 5285838 +
aagccagtcttcacaaagcccc

SEQ ID NO: 94378 - DNA, 22 bp, Artificial Sequence
  Synthetic oligonucleotide; TTA chr11 5285817 5285838 5285834 5285839 +
agccagtcttcacaaagcccca

SEQ ID NO: 94379 - DNA, 22 bp, Artificial Sequence
  Synthetic oligonucleotide; CTT chr11 5285827 5285848 5285844 5285849 +
cacaaagccccagatttctaca

SEQ ID NO: 94380 - DNA, 22 bp, Artificial Sequence
  Synthetic oligonucleotide; TTC chr11 5285828 5285849 5285845 5285850 +
acaaagccccagatttctacat

SEQ ID NO: 94381 - DNA, 22 bp, Artificial Sequence
  Synthetic oligonucleotide; TTT chr11 5285844 5285865 5285861 5285866 +
ctacatgctggagccctgaatg

SEQ ID NO: 94382 - DNA, 22 bp, Artificial Sequence
  Synthetic oligonucleotide; TTC chr11 5285845 5285866 5285862 5285867 +
tacatgctggagccctgaatgg

SEQ ID NO: 94383 - DNA, 22 bp, Artificial Sequence
  Synthetic oligonucleotide; CTA chr11 5285847 5285868 5285864 5285869 +
catgctggagccctgaatgggc

SEQ ID NO: 94384 - DNA, 22 bp, Artificial Sequence
  Synthetic oligonucleotide; CTG chr11 5285854 5285875 5285871 5285876 +
gagccctgaatgggcaggaagc

SEQ ID NO: 94385 - DNA, 22 bp, Artificial Sequence
  Synthetic oligonucleotide; CTG chr11 5285862 5285883 5285879 5285884 +
aatgggcaggaagcattgcggt

SEQ ID NO: 94386 - DNA, 22 bp, Artificial Sequence
  Synthetic oligonucleotide; TTG chr11 5285880 5285901 5285897 5285902 +
cggtttccatttcattcagagc

SEQ ID NO: 94387 - DNA, 22 bp, Artificial Sequence
  Synthetic oligonucleotide; TTT chr11 5285886 5285907 5285903 5285908 +
ccatttcattcagagctctttc

SEQ ID NO: 94388 - DNA, 22 bp, Artificial Sequence
  Synthetic oligonucleotide; TTC chr11 5285887 5285908 5285904 5285909 +
catttcattcagagctctttca

SEQ ID NO: 94389 - DNA, 22 bp, Artificial Sequence
  Synthetic oligonucleotide; TTT chr11 5285892 5285913 5285909 5285914 +
cattcagagctctttcataccc

SEQ ID NO: 94390 - DNA, 22 bp, Artificial Sequence
  Synthetic oligonucleotide; TTC chr11 5285893 5285914 5285910 5285915 +
attcagagctctttcataccct

SEQ ID NO: 94391 - DNA, 22 bp, Artificial Sequence
  Synthetic oligonucleotide; TTC chr11 5285897 5285918 5285914 5285919 +
agagctctttcataccctgctt

SEQ ID NO: 94392 - DNA, 22 bp, Artificial Sequence
  Synthetic oligonucleotide; CTC chr11 5285904 5285925 5285921 5285926 +
tttcataccctgcttccccata

SEQ ID NO: 94393 - DNA, 22 bp, Artificial Sequence
  Synthetic oligonucleotide; CTT chr11 5285906 5285927 5285923 5285928 +
tcataccctgcttccccatagt

SEQ ID NO: 94394 - DNA, 22 bp, Artificial Sequence
  Synthetic oligonucleotide; TTT chr11 5285907 5285928 5285924 5285929 +
cataccctgcttccccatagtt

SEQ ID NO: 94395 - DNA, 22 bp, Artificial Sequence
  Synthetic oligonucleotide; TTC chr11 5285908 5285929 5285925 5285930 +
ataccctgcttccccatagttt

SEQ ID NO: 94396 - DNA, 22 bp, Artificial Sequence
  Synthetic oligonucleotide; CTG chr11 5285916 5285937 5285933 5285938 +
cttccccatagtttgtctcaac

SEQ ID NO: 94397 - DNA, 22 bp, Artificial Sequence
  Synthetic oligonucleotide; CTT chr11 5285919 5285940 5285936 5285941 +
ccccatagtttgtctcaacatt

SEQ ID NO: 94398 - DNA, 22 bp, Artificial Sequence
  Synthetic oligonucleotide; TTC chr11 5285920 5285941 5285937 5285942 +
cccatagtttgtctcaacattt

SEQ ID NO: 94399 - DNA, 22 bp, Artificial Sequence
  Synthetic oligonucleotide; TTT chr11 5285930 5285951 5285947 5285952 +
gtctcaacatttctgttgataa

SEQ ID NO: 94400 - DNA, 22 bp, Artificial Sequence
  Synthetic oligonucleotide; TTG chr11 5285931 5285952 5285948 5285953 +
tctcaacatttctgttgataat

SEQ ID NO: 94401 - DNA, 22 bp, Artificial Sequence
  Synthetic oligonucleotide; CTC chr11 5285935 5285956 5285952 5285957 +
aacatttctgttgataatctga

SEQ ID NO: 94402 - DNA, 22 bp, Artificial Sequence
  Synthetic oligonucleotide; TTT chr11 5285942 5285963 5285959 5285964 +
ctgttgataatctgattcatgc

SEQ ID NO: 94403 - DNA, 22 bp, Artificial Sequence
  Synthetic oligonucleotide; TTC chr11 5285943 5285964 5285960 5285965 +
tgttgataatctgattcatgca

SEQ ID NO: 94404 - DNA, 22 bp, Artificial Sequence
  Synthetic oligonucleotide; CTG chr11 5285945 5285966 5285962 5285967 +
ttgataatctgattcatgcaac

SEQ ID NO: 94405 - DNA, 22 bp, Artificial Sequence
  Synthetic oligonucleotide; TTG chr11 5285948 5285969 5285965 5285970 +
ataatctgattcatgcaaccaa

SEQ ID NO: 94406 - DNA, 22 bp, Artificial Sequence
  Synthetic oligonucleotide; CTG chr11 5285956 5285977 5285973 5285978 +
attcatgcaaccaagaattatg

SEQ ID NO: 94407 - DNA, 22 bp, Artificial Sequence
  Synthetic oligonucleotide; TTC chr11 5285960 5285981 5285977 5285982 +
atgcaaccaagaattatgagag

SEQ ID NO: 94408 - DNA, 22 bp, Artificial Sequence
  Synthetic oligonucleotide; TTA chr11 5285976 5285997 5285993 5285998 +
tgagagagccttcagtcatgcc

SEQ ID NO: 94409 - DNA, 22 bp, Artificial Sequence
  Synthetic oligonucleotide; CTT chr11 5285988 5286009 5286005 5286010 +
cagtcatgcctaggcctgcatt

SEQ ID NO: 94410 - DNA, 22 bp, Artificial Sequence
  Synthetic oligonucleotide; TTC chr11 5285989 5286010 5286006 5286011 +
agtcatgcctaggcctgcattt

SEQ ID NO: 94411 - DNA, 22 bp, Artificial Sequence
  Synthetic oligonucleotide; CTA chr11 5286000 5286021 5286017 5286022 +
ggcctgcatttattgttgtgca

SEQ ID NO: 94412 - DNA, 22 bp, Artificial Sequence
  Synthetic oligonucleotide; CTG chr11 5286006 5286027 5286023 5286028 +
catttattgttgtgcatatgat

SEQ ID NO: 94413 - DNA, 22 bp, Artificial Sequence
  Synthetic oligonucleotide; TTT chr11 5286011 5286032 5286028 5286033 +
attgttgtgcatatgatggggt

SEQ ID NO: 94414 - DNA, 22 bp, Artificial Sequence
  Synthetic oligonucleotide; TTA chr11 5286012 5286033 5286029 5286034 +
ttgttgtgcatatgatggggta

SEQ ID NO: 94415 - DNA, 22 bp, Artificial Sequence
  Synthetic oligonucleotide; TTG chr11 5286015 5286036 5286032 5286037 +
ttgtgcatatgatggggtagca

SEQ ID NO: 94416 - DNA, 22 bp, Artificial Sequence
  Synthetic oligonucleotide; TTG chr11 5286018 5286039 5286035 5286040 +
tgcatatgatggggtagcagac

SEQ ID NO: 94417 - DNA, 22 bp, Artificial Sequence
  Synthetic oligonucleotide; TTA chr11 5286052 5286073 5286069 5286074 +
acagcatagactttctcagagc

SEQ ID NO: 94418 - DNA, 22 bp, Artificial Sequence
  Synthetic oligonucleotide; CTT chr11 5286065 5286086 5286082 5286087 +
tctcagagctatatgagtttgg

SEQ ID NO: 94419 - DNA, 22 bp, Artificial Sequence
  Synthetic oligonucleotide; TTT chr11 5286066 5286087 5286083 5286088 +
ctcagagctatatgagtttggg

SEQ ID NO: 94420 - DNA, 22 bp, Artificial Sequence
  Synthetic oligonucleotide; TTC chr11 5286067 5286088 5286084 5286089 +
tcagagctatatgagtttggga

SEQ ID NO: 94421 - DNA, 22 bp, Artificial Sequence
  Synthetic oligonucleotide; CTC chr11 5286069 5286090 5286086 5286091 +
agagctatatgagtttgggaat

SEQ ID NO: 94422 - DNA, 22 bp, Artificial Sequence
  Synthetic oligonucleotide; CTA chr11 5286076 5286097 5286093 5286098 +
tatgagtttgggaattaatcaa

SEQ ID NO: 94423 - DNA, 22 bp, Artificial Sequence
  Synthetic oligonucleotide; TTT chr11 5286085 5286106 5286102 5286107 +
gggaattaatcaagaccagcct

SEQ ID NO: 94424 - DNA, 22 bp, Artificial Sequence
  Synthetic oligonucleotide; TTG chr11 5286086 5286107 5286103 5286108 +
ggaattaatcaagaccagcctt

SEQ ID NO: 94425 - DNA, 22 bp, Artificial Sequence
  Synthetic oligonucleotide; TTA chr11 5286093 5286114 5286110 5286115 +
atcaagaccagccttttgctca

SEQ ID NO: 94426 - DNA, 22 bp, Artificial Sequence
  Synthetic oligonucleotide; CTT chr11 5286108 5286129 5286125 5286130 +
ttgctcagggtagaaatcccct

SEQ ID NO: 94427 - DNA, 22 bp, Artificial Sequence
  Synthetic oligonucleotide; TTT chr11 5286109 5286130 5286126 5286131 +
tgctcagggtagaaatccccta

SEQ ID NO: 94428 - DNA, 22 bp, Artificial Sequence
  Synthetic oligonucleotide; TTT chr11 5286110 5286131 5286127 5286132 +
gctcagggtagaaatcccctat

SEQ ID NO: 94429 - DNA, 22 bp, Artificial Sequence
  Synthetic oligonucleotide; TTG chr11 5286111 5286132 5286128 5286133 +
ctcagggtagaaatcccctata

SEQ ID NO: 94430 - DNA, 22 bp, Artificial Sequence
  Synthetic oligonucleotide; CTC chr11 5286114 5286135 5286131 5286136 +
agggtagaaatcccctataggg

SEQ ID NO: 94431 - DNA, 22 bp, Artificial Sequence
  Synthetic oligonucleotide; CTA chr11 5286131 5286152 5286148 5286153 +
tagggatttattcaatgatggg

SEQ ID NO: 94432 - DNA, 22 bp, Artificial Sequence
  Synthetic oligonucleotide; TTT chr11 5286140 5286161 5286157 5286162 +
attcaatgatgggttaaaagct

SEQ ID NO: 94433 - DNA, 22 bp, Artificial Sequence
  Synthetic oligonucleotide; TTA chr11 5286141 5286162 5286158 5286163 +
ttcaatgatgggttaaaagctt

SEQ ID NO: 94434 - DNA, 22 bp, Artificial Sequence
  Synthetic oligonucleotide; TTC chr11 5286144 5286165 5286161 5286166 +
aatgatgggttaaaagctttct

SEQ ID NO: 94435 - DNA, 22 bp, Artificial Sequence
  Synthetic oligonucleotide; TTA chr11 5286156 5286177 5286173 5286178 +
aaagctttctatatggtgagga

SEQ ID NO: 94436 - DNA, 22 bp, Artificial Sequence
  Synthetic oligonucleotide; CTT chr11 5286163 5286184 5286180 5286185 +
tctatatggtgaggagctcaca

SEQ ID NO: 94437 - DNA, 22 bp, Artificial Sequence
  Synthetic oligonucleotide; TTT chr11 5286164 5286185 5286181 5286186 +
ctatatggtgaggagctcacag

SEQ ID NO: 94438 - DNA, 22 bp, Artificial Sequence
  Synthetic oligonucleotide; TTC chr11 5286165 5286186 5286182 5286187 +
tatatggtgaggagctcacaga

SEQ ID NO: 94439 - DNA, 22 bp, Artificial Sequence
  Synthetic oligonucleotide; CTA chr11 5286167 5286188 5286184 5286189 +
tatggtgaggagctcacagatt

SEQ ID NO: 94440 - DNA, 22 bp, Artificial Sequence
  Synthetic oligonucleotide; CTC chr11 5286182 5286203 5286199 5286204 +
acagattttccaagcccttgct

SEQ ID NO: 94441 - DNA, 22 bp, Artificial Sequence
  Synthetic oligonucleotide; TTT chr11 5286190 5286211 5286207 5286212 +
tccaagcccttgcttttgctag

SEQ ID NO: 94442 - DNA, 22 bp, Artificial Sequence
  Synthetic oligonucleotide; TTT chr11 5286191 5286212 5286208 5286213 +
ccaagcccttgcttttgctaga

SEQ ID NO: 94443 - DNA, 22 bp, Artificial Sequence
  Synthetic oligonucleotide; TTC chr11 5286192 5286213 5286209 5286214 +
caagcccttgcttttgctagac

SEQ ID NO: 94444 - DNA, 22 bp, Artificial Sequence
  Synthetic oligonucleotide; CTT chr11 5286201 5286222 5286218 5286223 +
gcttttgctagacagcttaatg

SEQ ID NO: 94445 - DNA, 22 bp, Artificial Sequence
  Synthetic oligonucleotide; TTG chr11 5286202 5286223 5286219 5286224 +
cttttgctagacagcttaatgt

SEQ ID NO: 94446 - DNA, 22 bp, Artificial Sequence
  Synthetic oligonucleotide; CTT chr11 5286205 5286226 5286222 5286227 +
ttgctagacagcttaatgttta

SEQ ID NO: 94447 - DNA, 22 bp, Artificial Sequence
  Synthetic oligonucleotide; TTT chr11 5286206 5286227 5286223 5286228 +
tgctagacagcttaatgtttat

SEQ ID NO: 94448 - DNA, 22 bp, Artificial Sequence
  Synthetic oligonucleotide; TTT chr11 5286207 5286228 5286224 5286229 +
gctagacagcttaatgtttatg

SEQ ID NO: 94449 - DNA, 22 bp, Artificial Sequence
  Synthetic oligonucleotide; TTG chr11 5286208 5286229 5286225 5286230 +
ctagacagcttaatgtttatga

SEQ ID NO: 94450 - DNA, 22 bp, Artificial Sequence
  Synthetic oligonucleotide; CTA chr11 5286211 5286232 5286228 5286233 +
gacagcttaatgtttatgaaat

SEQ ID NO: 94451 - DNA, 22 bp, Artificial Sequence
  Synthetic oligonucleotide; CTT chr11 5286219 5286240 5286236 5286241 +
aatgtttatgaaattcttacac

SEQ ID NO: 94452 - DNA, 22 bp, Artificial Sequence
  Synthetic oligonucleotide; TTA chr11 5286220 5286241 5286237 5286242 +
atgtttatgaaattcttacaca

SEQ ID NO: 94453 - DNA, 22 bp, Artificial Sequence
  Synthetic oligonucleotide; TTT chr11 5286226 5286247 5286243 5286248 +
atgaaattcttacacacagaag

SEQ ID NO: 94454 - DNA, 22 bp, Artificial Sequence
  Synthetic oligonucleotide; TTA chr11 5286227 5286248 5286244 5286249 +
tgaaattcttacacacagaaga

SEQ ID NO: 94455 - DNA, 22 bp, Artificial Sequence
  Synthetic oligonucleotide; TTC chr11 5286235 5286256 5286252 5286257 +
ttacacacagaagaatcttcta

SEQ ID NO: 94456 - DNA, 22 bp, Artificial Sequence
  Synthetic oligonucleotide; CTT chr11 5286237 5286258 5286254 5286259 +
acacacagaagaatcttctaat

SEQ ID NO: 94457 - DNA, 22 bp, Artificial Sequence
  Synthetic oligonucleotide; TTA chr11 5286238 5286259 5286255 5286260 +
cacacagaagaatcttctaatc

SEQ ID NO: 94458 - DNA, 22 bp, Artificial Sequence
  Synthetic oligonucleotide; CTT chr11 5286254 5286275 5286271 5286276 +
ctaatcctgggttacataatat

SEQ ID NO: 94459 - DNA, 22 bp, Artificial Sequence
  Synthetic oligonucleotide; TTC chr11 5286255 5286276 5286272 5286277 +
taatcctgggttacataatata

SEQ ID NO: 94460 - DNA, 22 bp, Artificial Sequence
  Synthetic oligonucleotide; CTA chr11 5286257 5286278 5286274 5286279 +
atcctgggttacataatataac

SEQ ID NO: 94461 - DNA, 22 bp, Artificial Sequence
  Synthetic oligonucleotide; CTG chr11 5286263 5286284 5286280 5286285 +
ggttacataatataacttgatt

SEQ ID NO: 94462 - DNA, 22 bp, Artificial Sequence
  Synthetic oligonucleotide; TTA chr11 5286268 5286289 5286285 5286290 +
cataatataacttgattcccta

SEQ ID NO: 94463 - DNA, 22 bp, Artificial Sequence
  Synthetic oligonucleotide; CTT chr11 5286281 5286302 5286298 5286303 +
gattccctattccagaagataa

SEQ ID NO: 94464 - DNA, 22 bp, Artificial Sequence
  Synthetic oligonucleotide; TTG chr11 5286282 5286303 5286299 5286304 +
attccctattccagaagataat

SEQ ID NO: 94465 - DNA, 22 bp, Artificial Sequence
  Synthetic oligonucleotide; TTC chr11 5286286 5286307 5286303 5286308 +
cctattccagaagataatattc

SEQ ID NO: 94466 - DNA, 22 bp, Artificial Sequence
  Synthetic oligonucleotide; CTA chr11 5286290 5286311 5286307 5286312 +
ttccagaagataatattcccat

SEQ ID NO: 94467 - DNA, 22 bp, Artificial Sequence
  Synthetic oligonucleotide; TTC chr11 5286293 5286314 5286310 5286315 +
cagaagataatattcccatatt

SEQ ID NO: 94468 - DNA, 22 bp, Artificial Sequence
  Synthetic oligonucleotide; TTC chr11 5286308 5286329 5286325 5286330 +
ccatattctgaagcattcatgc

SEQ ID NO: 94469 - DNA, 22 bp, Artificial Sequence
  Synthetic oligonucleotide; TTC chr11 5286316 5286337 5286333 5286338 +
tgaagcattcatgcatttgtta

SEQ ID NO: 94470 - DNA, 22 bp, Artificial Sequence
  Synthetic oligonucleotide; CTG chr11 5286318 5286339 5286335 5286340 +
aagcattcatgcatttgttaaa

SEQ ID NO: 94471 - DNA, 22 bp, Artificial Sequence
  Synthetic oligonucleotide; TTC chr11 5286326 5286347 5286343 5286348 +
atgcatttgttaaataataggc

SEQ ID NO: 94472 - DNA, 22 bp, Artificial Sequence
  Synthetic oligonucleotide; TTT chr11 5286334 5286355 5286351 5286356 +
gttaaataataggcatagtgac

SEQ ID NO: 94473 - DNA, 22 bp, Artificial Sequence
  Synthetic oligonucleotide; TTG chr11 5286335 5286356 5286352 5286357 +
ttaaataataggcatagtgaca

SEQ ID NO: 94474 - DNA, 22 bp, Artificial Sequence
  Synthetic oligonucleotide; TTA chr11 5286338 5286359 5286355 5286360 +
aataataggcatagtgacaagt

SEQ ID NO: 94475 - DNA, 22 bp, Artificial Sequence
  Synthetic oligonucleotide; CTC chr11 5286370 5286391 5286387 5286392 +
taacagtcaaccagagagccac

SEQ ID NO: 94476 - DNA, 22 bp, Artificial Sequence
  Synthetic oligonucleotide; CTA chr11 5286372 5286393 5286389 5286394 +
acagtcaaccagagagccacag

SEQ ID NO: 94477 - DNA, 22 bp, Artificial Sequence
  Synthetic oligonucleotide; TTT chr11 5286397 5286418 5286414 5286419 +
tcaacttcacaaagttaaccat

SEQ ID NO: 94478 - DNA, 22 bp, Artificial Sequence
  Synthetic oligonucleotide; TTT chr11 5286398 5286419 5286415 5286420 +
caacttcacaaagttaaccatc

SEQ ID NO: 94479 - DNA, 22 bp, Artificial Sequence
  Synthetic oligonucleotide; TTC chr11 5286399 5286420 5286416 5286421 +
aacttcacaaagttaaccatct

SEQ ID NO: 94480 - DNA, 22 bp, Artificial Sequence
  Synthetic oligonucleotide; CTT chr11 5286404 5286425 5286421 5286426 +
cacaaagttaaccatctaactg

SEQ ID NO: 94481 - DNA, 22 bp, Artificial Sequence
  Synthetic oligonucleotide; TTC chr11 5286405 5286426 5286422 5286427 +
acaaagttaaccatctaactga

SEQ ID NO: 94482 - DNA, 22 bp, Artificial Sequence
  Synthetic oligonucleotide; TTA chr11 5286414 5286435 5286431 5286436 +
accatctaactgaagacagcag

SEQ ID NO: 94483 - DNA, 22 bp, Artificial Sequence
  Synthetic oligonucleotide; CTA chr11 5286422 5286443 5286439 5286444 +
actgaagacagcagcaatcaaa

SEQ ID NO: 94484 - DNA, 22 bp, Artificial Sequence
  Synthetic oligonucleotide; CTG chr11 5286426 5286447 5286443 5286448 +
aagacagcagcaatcaaaacca

SEQ ID NO: 94485 - DNA, 22 bp, Artificial Sequence
  Synthetic oligonucleotide; CTT chr11 5286457 5286478 5286474 5286479 +
ctccacatggtgtagtctttcc

SEQ ID NO: 94486 - DNA, 22 bp, Artificial Sequence
  Synthetic oligonucleotide; TTC chr11 5286458 5286479 5286475 5286480 +
tccacatggtgtagtctttcct

SEQ ID NO: 94487 - DNA, 22 bp, Artificial Sequence
  Synthetic oligonucleotide; CTC chr11 5286460 5286481 5286477 5286482 +
cacatggtgtagtctttcctga

SEQ ID NO: 94488 - DNA, 22 bp, Artificial Sequence
  Synthetic oligonucleotide; CTT chr11 5286476 5286497 5286493 5286498 +
tcctgatgtcagggatgttagg

SEQ ID NO: 94489 - DNA, 22 bp, Artificial Sequence
  Synthetic oligonucleotide; TTT chr11 5286477 5286498 5286494 5286499 +
cctgatgtcagggatgttaggc

SEQ ID NO: 94490 - DNA, 22 bp, Artificial Sequence
  Synthetic oligonucleotide; TTC chr11 5286478 5286499 5286495 5286500 +
ctgatgtcagggatgttaggct

SEQ ID NO: 94491 - DNA, 22 bp, Artificial Sequence
  Synthetic oligonucleotide; CTG chr11 5286481 5286502 5286498 5286503 +
atgtcagggatgttaggctcag

SEQ ID NO: 94492 - DNA, 22 bp, Artificial Sequence
  Synthetic oligonucleotide; TTA chr11 5286496 5286517 5286513 5286518 +
ggctcaggttaggaaagtcaga

SEQ ID NO: 94493 - DNA, 22 bp, Artificial Sequence
  Synthetic oligonucleotide; CTC chr11 5286501 5286522 5286518 5286523 +
aggttaggaaagtcagactatc

SEQ ID NO: 94494 - DNA, 22 bp, Artificial Sequence
  Synthetic oligonucleotide; TTA chr11 5286507 5286528 5286524 5286529 +
ggaaagtcagactatcatccca

SEQ ID NO: 94495 - DNA, 22 bp, Artificial Sequence
  Synthetic oligonucleotide; CTA chr11 5286521 5286542 5286538 5286543 +
tcatcccagagcaggacacaga

SEQ ID NO: 94496 - DNA, 22 bp, Artificial Sequence
  Synthetic oligonucleotide; TTT chr11 5286560 5286581 5286577 5286582 +
tttagtcacttaggaaaaacag

SEQ ID NO: 94497 - DNA, 22 bp, Artificial Sequence
  Synthetic oligonucleotide; TTT chr11 5286561 5286582 5286578 5286583 +
ttagtcacttaggaaaaacagt

SEQ ID NO: 94498 - DNA, 22 bp, Artificial Sequence
  Synthetic oligonucleotide; TTT chr11 5286562 5286583 5286579 5286584 +
tagtcacttaggaaaaacagtg

SEQ ID NO: 94499 - DNA, 22 bp, Artificial Sequence
  Synthetic oligonucleotide; TTT chr11 5286563 5286584 5286580 5286585 +
agtcacttaggaaaaacagtgg

SEQ ID NO: 94500 - DNA, 22 bp, Artificial Sequence
  Synthetic oligonucleotide; TTA chr11 5286564 5286585 5286581 5286586 +
gtcacttaggaaaaacagtgga

SEQ ID NO: 94501 - DNA, 22 bp, Artificial Sequence
  Synthetic oligonucleotide; CTT chr11 5286571 5286592 5286588 5286593 +
aggaaaaacagtggaatgcaaa

SEQ ID NO: 94502 - DNA, 22 bp, Artificial Sequence
  Synthetic oligonucleotide; TTA chr11 5286572 5286593 5286589 5286594 +
ggaaaaacagtggaatgcaaag

SEQ ID NO: 94503 - DNA, 22 bp, Artificial Sequence
  Synthetic oligonucleotide; CTT chr11 5286608 5286629 5286625 5286630 +
tctgaatggataacttggcctg

SEQ ID NO: 94504 - DNA, 22 bp, Artificial Sequence
  Synthetic oligonucleotide; TTT chr11 5286609 5286630 5286626 5286631 +
ctgaatggataacttggcctgg

SEQ ID NO: 94505 - DNA, 22 bp, Artificial Sequence
  Synthetic oligonucleotide; TTC chr11 5286610 5286631 5286627 5286632 +
tgaatggataacttggcctggg

SEQ ID NO: 94506 - DNA, 22 bp, Artificial Sequence
  Synthetic oligonucleotide; CTG chr11 5286612 5286633 5286629 5286634 +
aatggataacttggcctgggag

SEQ ID NO: 94507 - DNA, 22 bp, Artificial Sequence
  Synthetic oligonucleotide; CTT chr11 5286624 5286645 5286641 5286646 +
ggcctgggaggcctttggaagc

SEQ ID NO: 94508 - DNA, 22 bp, Artificial Sequence
  Synthetic oligonucleotide; TTG chr11 5286625 5286646 5286642 5286647 +
gcctgggaggcctttggaagca

SEQ ID NO: 94509 - DNA, 22 bp, Artificial Sequence
  Synthetic oligonucleotide; CTG chr11 5286630 5286651 5286647 5286652 +
ggaggcctttggaagcagagac

SEQ ID NO: 94510 - DNA, 22 bp, Artificial Sequence
  Synthetic oligonucleotide; CTT chr11 5286639 5286660 5286656 5286661 +
tggaagcagagactggagctta

SEQ ID NO: 94511 - DNA, 22 bp, Artificial Sequence
  Synthetic oligonucleotide; TTT chr11 5286640 5286661 5286657 5286662 +
ggaagcagagactggagcttaa

SEQ ID NO: 94512 - DNA, 22 bp, Artificial Sequence
  Synthetic oligonucleotide; TTG chr11 5286641 5286662 5286658 5286663 +
gaagcagagactggagcttaaa

SEQ ID NO: 94513 - DNA, 22 bp, Artificial Sequence
  Synthetic oligonucleotide; CTG chr11 5286654 5286675 5286671 5286676 +
gagcttaaatttaaacatcttt

SEQ ID NO: 94514 - DNA, 22 bp, Artificial Sequence
  Synthetic oligonucleotide; CTT chr11 5286660 5286681 5286677 5286682 +
aaatttaaacatctttgtatcc

SEQ ID NO: 94515 - DNA, 22 bp, Artificial Sequence
  Synthetic oligonucleotide; TTA chr11 5286661 5286682 5286678 5286683 +
aatttaaacatctttgtatccc

SEQ ID NO: 94516 - DNA, 22 bp, Artificial Sequence
  Synthetic oligonucleotide; TTT chr11 5286666 5286687 5286683 5286688 +
aaacatctttgtatccccagca

SEQ ID NO: 94517 - DNA, 22 bp, Artificial Sequence
  Synthetic oligonucleotide; TTA chr11 5286667 5286688 5286684 5286689 +
aacatctttgtatccccagcat

SEQ ID NO: 94518 - DNA, 22 bp, Artificial Sequence
  Synthetic oligonucleotide; CTT chr11 5286675 5286696 5286692 5286697 +
tgtatccccagcatccagcata

SEQ ID NO: 94519 - DNA, 22 bp, Artificial Sequence
  Synthetic oligonucleotide; TTT chr11 5286676 5286697 5286693 5286698 +
gtatccccagcatccagcatac

SEQ ID NO: 94520 - DNA, 22 bp, Artificial Sequence
  Synthetic oligonucleotide; TTG chr11 5286677 5286698 5286694 5286699 +
tatccccagcatccagcataca

SEQ ID NO: 94521 - DNA, 22 bp, Artificial Sequence
  Synthetic oligonucleotide; CTG chr11 5286704 5286725 5286721 5286726 +
ccaagaagtacatgtcaataaa

SEQ ID NO: 94522 - DNA, 22 bp, Artificial Sequence
  Synthetic oligonucleotide; TTT chr11 5286731 5286752 5286748 5286753 +
attggatagtgagcaaagacat

SEQ ID NO: 94523 - DNA, 22 bp, Artificial Sequence
  Synthetic oligonucleotide; TTA chr11 5286732 5286753 5286749 5286754 +
ttggatagtgagcaaagacata

SEQ ID NO: 94524 - DNA, 22 bp, Artificial Sequence
  Synthetic oligonucleotide; TTG chr11 5286735 5286756 5286752 5286757 +
gatagtgagcaaagacataatt

SEQ ID NO: 94525 - DNA, 22 bp, Artificial Sequence
  Synthetic oligonucleotide; TTA chr11 5286758 5286779 5286775 5286780 +
ggaccaaatctcaattctacta

SEQ ID NO: 94526 - DNA, 22 bp, Artificial Sequence
  Synthetic oligonucleotide; CTC chr11 5286770 5286791 5286787 5286792 +
aattctactatttgctagtagt

SEQ ID NO: 94527 - DNA, 22 bp, Artificial Sequence
  Synthetic oligonucleotide; TTC chr11 5286775 5286796 5286792 5286797 +
tactatttgctagtagtttatg

SEQ ID NO: 94528 - DNA, 22 bp, Artificial Sequence
  Synthetic oligonucleotide; CTA chr11 5286777 5286798 5286794 5286799 +
ctatttgctagtagtttatgtt

SEQ ID NO: 94529 - DNA, 22 bp, Artificial Sequence
  Synthetic oligonucleotide; CTA chr11 5286780 5286801 5286797 5286802 +
tttgctagtagtttatgtttgt

SEQ ID NO: 94530 - DNA, 22 bp, Artificial Sequence
  Synthetic oligonucleotide; TTT chr11 5286783 5286804 5286800 5286805 +
gctagtagtttatgtttgtgtg

SEQ ID NO: 94531 - DNA, 22 bp, Artificial Sequence
  Synthetic oligonucleotide; TTG chr11 5286784 5286805 5286801 5286806 +
ctagtagtttatgtttgtgtgt

SEQ ID NO: 94532 - DNA, 22 bp, Artificial Sequence
  Synthetic oligonucleotide; CTA chr11 5286787 5286808 5286804 5286809 +
gtagtttatgtttgtgtgtgtg

SEQ ID NO: 94533 - DNA, 22 bp, Artificial Sequence
  Synthetic oligonucleotide; TTT chr11 5286794 5286815 5286811 5286816 +
atgtttgtgtgtgtgagagtgt

SEQ ID NO: 94534 - DNA, 22 bp, Artificial Sequence
  Synthetic oligonucleotide; TTA chr11 5286795 5286816 5286812 5286817 +
tgtttgtgtgtgtgagagtgta

SEQ ID NO: 94535 - DNA, 22 bp, Artificial Sequence
  Synthetic oligonucleotide; TTT chr11 5286800 5286821 5286817 5286822 +
gtgtgtgtgagagtgtatgctt

SEQ ID NO: 94536 - DNA, 22 bp, Artificial Sequence
  Synthetic oligonucleotide; TTG chr11 5286801 5286822 5286818 5286823 +
tgtgtgtgagagtgtatgcttg

SEQ ID NO: 94537 - DNA, 22 bp, Artificial Sequence
  Synthetic oligonucleotide; CTT chr11 5286822 5286843 5286839 5286844 +
gagcaagttgagaggtagtttt

SEQ ID NO: 94538 - DNA, 22 bp, Artificial Sequence
  Synthetic oligonucleotide; TTG chr11 5286823 5286844 5286840 5286845 +
agcaagttgagaggtagttttt

SEQ ID NO: 94539 - DNA, 22 bp, Artificial Sequence
  Synthetic oligonucleotide; TTG chr11 5286832 5286853 5286849 5286854 +
agaggtagtttttttaactgta

SEQ ID NO: 94540 - DNA, 22 bp, Artificial Sequence
  Synthetic oligonucleotide; TTT chr11 5286843 5286864 5286860 5286865 +
ttttaactgtagtaaaatgggg

SEQ ID NO: 94541 - DNA, 22 bp, Artificial Sequence
  Synthetic oligonucleotide; TTT chr11 5286844 5286865 5286861 5286866 +
tttaactgtagtaaaatgggga

SEQ ID NO: 94542 - DNA, 22 bp, Artificial Sequence
  Synthetic oligonucleotide; TTT chr11 5286845 5286866 5286862 5286867 +
ttaactgtagtaaaatggggat

SEQ ID NO: 94543 - DNA, 22 bp, Artificial Sequence
  Synthetic oligonucleotide; TTT chr11 5286846 5286867 5286863 5286868 +
taactgtagtaaaatggggata

SEQ ID NO: 94544 - DNA, 22 bp, Artificial Sequence
  Synthetic oligonucleotide; TTT chr11 5286847 5286868 5286864 5286869 +
aactgtagtaaaatggggataa

SEQ ID NO: 94545 - DNA, 22 bp, Artificial Sequence
  Synthetic oligonucleotide; TTA chr11 5286848 5286869 5286865 5286870 +
actgtagtaaaatggggataat

SEQ ID NO: 94546 - DNA, 22 bp, Artificial Sequence
  Synthetic oligonucleotide; CTG chr11 5286852 5286873 5286869 5286874 +
tagtaaaatggggataataata

SEQ ID NO: 94547 - DNA, 22 bp, Artificial Sequence
  Synthetic oligonucleotide; CTA chr11 5286881 5286902 5286898 5286903 +
cctgaaagaatccaagagtatt

SEQ ID NO: 94548 - DNA, 22 bp, Artificial Sequence
  Synthetic oligonucleotide; CTG chr11 5286885 5286906 5286902 5286907 +
aaagaatccaagagtattaaat

SEQ ID NO: 94549 - DNA, 22 bp, Artificial Sequence
  Synthetic oligonucleotide; TTA chr11 5286904 5286925 5286921 5286926 +
aatatgattaattatgcaaagc

SEQ ID NO: 94550 - DNA, 22 bp, Artificial Sequence
  Synthetic oligonucleotide; TTA chr11 5286914 5286935 5286931 5286936 +
attatgcaaagcactaattaca

SEQ ID NO: 94551 - DNA, 22 bp, Artificial Sequence
  Synthetic oligonucleotide; TTA chr11 5286918 5286939 5286935 5286940 +
tgcaaagcactaattacagtct

SEQ ID NO: 94552 - DNA, 22 bp, Artificial Sequence
  Synthetic oligonucleotide; CTA chr11 5286930 5286951 5286947 5286952 +
attacagtctctgatagccttc

SEQ ID NO: 94553 - DNA, 22 bp, Artificial Sequence
  Synthetic oligonucleotide; TTA chr11 5286934 5286955 5286951 5286956 +
cagtctctgatagccttcaata

SEQ ID NO: 94554 - DNA, 22 bp, Artificial Sequence
  Synthetic oligonucleotide; CTC chr11 5286941 5286962 5286958 5286963 +
tgatagccttcaataaatgtca

SEQ ID NO: 94555 - DNA, 22 bp, Artificial Sequence
  Synthetic oligonucleotide; CTG chr11 5286943 5286964 5286960 5286965 +
atagccttcaataaatgtcagt

SEQ ID NO: 94556 - DNA, 22 bp, Artificial Sequence
  Synthetic oligonucleotide; CTT chr11 5286951 5286972 5286968 5286973 +
caataaatgtcagttattttta

SEQ ID NO: 94557 - DNA, 22 bp, Artificial Sequence
  Synthetic oligonucleotide; TTC chr11 5286952 5286973 5286969 5286974 +
aataaatgtcagttatttttat

SEQ ID NO: 94558 - DNA, 22 bp, Artificial Sequence
  Synthetic oligonucleotide; TTA chr11 5286967 5286988 5286984 5286989 +
tttttattattacagttaaaga

SEQ ID NO: 94559 - DNA, 22 bp, Artificial Sequence
  Synthetic oligonucleotide; TTT chr11 5286970 5286991 5286987 5286992 +
ttattattacagttaaagatga

SEQ ID NO: 94560 - DNA, 22 bp, Artificial Sequence
  Synthetic oligonucleotide; TTT chr11 5286971 5286992 5286988 5286993 +
tattattacagttaaagatgaa

SEQ ID NO: 94561 - DNA, 22 bp, Artificial Sequence
  Synthetic oligonucleotide; TTT chr11 5286972 5286993 5286989 5286994 +
attattacagttaaagatgaat

SEQ ID NO: 94562 - DNA, 22 bp, Artificial Sequence
  Synthetic oligonucleotide; TTA chr11 5286973 5286994 5286990 5286995 +
ttattacagttaaagatgaatg

SEQ ID NO: 94563 - DNA, 22 bp, Artificial Sequence
  Synthetic oligonucleotide; TTA chr11 5286976 5286997 5286993 5286998 +
ttacagttaaagatgaatgggc

SEQ ID NO: 94564 - DNA, 22 bp, Artificial Sequence
  Synthetic oligonucleotide; TTA chr11 5286979 5287000 5286996 5287001 +
cagttaaagatgaatgggcata

SEQ ID NO: 94565 - DNA, 22 bp, Artificial Sequence
  Synthetic oligonucleotide; TTA chr11 5286985 5287006 5287002 5287007 +
aagatgaatgggcataaagtac

SEQ ID NO: 94566 - DNA, 22 bp, Artificial Sequence
  Synthetic oligonucleotide; CTA chr11 5287016 5287037 5287033 5287038 +
gttttcacctgcagcaagaatg

SEQ ID NO: 94567 - DNA, 22 bp, Artificial Sequence
  Synthetic oligonucleotide; TTT chr11 5287020 5287041 5287037 5287042 +
tcacctgcagcaagaatgattg

SEQ ID NO: 94568 - DNA, 22 bp, Artificial Sequence
  Synthetic oligonucleotide; TTT chr11 5287021 5287042 5287038 5287043 +
cacctgcagcaagaatgattgc

SEQ ID NO: 94569 - DNA, 22 bp, Artificial Sequence
  Synthetic oligonucleotide; TTC chr11 5287022 5287043 5287039 5287044 +
acctgcagcaagaatgattgca

SEQ ID NO: 94570 - DNA, 22 bp, Artificial Sequence
  Synthetic oligonucleotide; CTG chr11 5287027 5287048 5287044 5287049 +
cagcaagaatgattgcagttaa

SEQ ID NO: 94571 - DNA, 22 bp, Artificial Sequence
  Synthetic oligonucleotide; TTG chr11 5287042 5287063 5287059 5287064 +
cagttaaacaaaaaatactagc

SEQ ID NO: 94572 - DNA, 22 bp, Artificial Sequence
  Synthetic oligonucleotide; TTA chr11 5287048 5287069 5287065 5287070 +
aacaaaaaatactagcaaacat

SEQ ID NO: 94573 - DNA, 22 bp, Artificial Sequence
  Synthetic oligonucleotide; CTA chr11 5287062 5287083 5287079 5287084 +
gcaaacatttctagagtagtta

SEQ ID NO: 94574 - DNA, 22 bp, Artificial Sequence
  Synthetic oligonucleotide; TTT chr11 5287072 5287093 5287089 5287094 +
ctagagtagttagcatttataa

SEQ ID NO: 94575 - DNA, 22 bp, Artificial Sequence
  Synthetic oligonucleotide; TTC chr11 5287073 5287094 5287090 5287095 +
tagagtagttagcatttataag

SEQ ID NO: 94576 - DNA, 22 bp, Artificial Sequence
  Synthetic oligonucleotide; CTA chr11 5287075 5287096 5287092 5287097 +
gagtagttagcatttataagtc

SEQ ID NO: 94577 - DNA, 22 bp, Artificial Sequence
  Synthetic oligonucleotide; TTA chr11 5287084 5287105 5287101 5287106 +
gcatttataagtcactgcttta

SEQ ID NO: 94578 - DNA, 22 bp, Artificial Sequence
  Synthetic oligonucleotide; TTT chr11 5287090 5287111 5287107 5287112 +
ataagtcactgctttaaactct

SEQ ID NO: 94579 - DNA, 22 bp, Artificial Sequence
  Synthetic oligonucleotide; TTA chr11 5287091 5287112 5287108 5287113 +
taagtcactgctttaaactctt

SEQ ID NO: 94580 - DNA, 22 bp, Artificial Sequence
  Synthetic oligonucleotide; CTG chr11 5287101 5287122 5287118 5287123 +
ctttaaactctttgcatgtatt

SEQ ID NO: 94581 - DNA, 22 bp, Artificial Sequence
  Synthetic oligonucleotide; CTT chr11 5287104 5287125 5287121 5287126 +
taaactctttgcatgtattaac

SEQ ID NO: 94582 - DNA, 22 bp, Artificial Sequence
  Synthetic oligonucleotide; TTT chr11 5287105 5287126 5287122 5287127 +
aaactctttgcatgtattaact

SEQ ID NO: 94583 - DNA, 22 bp, Artificial Sequence
  Synthetic oligonucleotide; TTA chr11 5287106 5287127 5287123 5287128 +
aactctttgcatgtattaactc

SEQ ID NO: 94584 - DNA, 22 bp, Artificial Sequence
  Synthetic oligonucleotide; CTC chr11 5287111 5287132 5287128 5287133 +
tttgcatgtattaactcactcg

SEQ ID NO: 94585 - DNA, 22 bp, Artificial Sequence
  Synthetic oligonucleotide; CTT chr11 5287113 5287134 5287130 5287135 +
tgcatgtattaactcactcggg

SEQ ID NO: 94586 - DNA, 22 bp, Artificial Sequence
  Synthetic oligonucleotide; TTT chr11 5287114 5287135 5287131 5287136 +
gcatgtattaactcactcgggc

SEQ ID NO: 94587 - DNA, 22 bp, Artificial Sequence
  Synthetic oligonucleotide; TTG chr11 5287115 5287136 5287132 5287137 +
catgtattaactcactcgggct

SEQ ID NO: 94588 - DNA, 22 bp, Artificial Sequence
  Synthetic oligonucleotide; TTA chr11 5287124 5287145 5287141 5287146 +
actcactcgggctgcagaacaa

SEQ ID NO: 94589 - DNA, 22 bp, Artificial Sequence
  Synthetic oligonucleotide; CTC chr11 5287128 5287149 5287145 5287150 +
actcgggctgcagaacaatctt

SEQ ID NO: 94590 - DNA, 22 bp, Artificial Sequence
  Synthetic oligonucleotide; CTC chr11 5287132 5287153 5287149 5287154 +
gggctgcagaacaatcttatga

SEQ ID NO: 94591 - DNA, 22 bp, Artificial Sequence
  Synthetic oligonucleotide; CTG chr11 5287138 5287159 5287155 5287160 +
cagaacaatcttatgagcctgt

SEQ ID NO: 94592 - DNA, 22 bp, Artificial Sequence
  Synthetic oligonucleotide; CTT chr11 5287150 5287171 5287167 5287172 +
atgagcctgttaaaactcctgt

SEQ ID NO: 94593 - DNA, 22 bp, Artificial Sequence
  Synthetic oligonucleotide; TTA chr11 5287151 5287172 5287168 5287173 +
tgagcctgttaaaactcctgta

SEQ ID NO: 94594 - DNA, 22 bp, Artificial Sequence
  Synthetic oligonucleotide; CTG chr11 5287159 5287180 5287176 5287181 +
ttaaaactcctgtaatcatgct

SEQ ID NO: 94595 - DNA, 22 bp, Artificial Sequence
  Synthetic oligonucleotide; TTA chr11 5287162 5287183 5287179 5287184 +
aaactcctgtaatcatgcttat

SEQ ID NO: 94596 - DNA, 22 bp, Artificial Sequence
  Synthetic oligonucleotide; CTC chr11 5287168 5287189 5287185 5287190 +
ctgtaatcatgcttataatccc

SEQ ID NO: 94597 - DNA, 22 bp, Artificial Sequence
  Synthetic oligonucleotide; CTG chr11 5287171 5287192 5287188 5287193 +
taatcatgcttataatcccagc

SEQ ID NO: 94598 - DNA, 22 bp, Artificial Sequence
  Synthetic oligonucleotide; CTT chr11 5287182 5287203 5287199 5287204 +
ataatcccagcactttggaagg

SEQ ID NO: 94599 - DNA, 22 bp, Artificial Sequence
  Synthetic oligonucleotide; TTA chr11 5287183 5287204 5287200 5287205 +
taatcccagcactttggaaggc

SEQ ID NO: 94600 - DNA, 22 bp, Artificial Sequence
  Synthetic oligonucleotide; CTT chr11 5287197 5287218 5287214 5287219 +
tggaaggctgaggtgggcagat

SEQ ID NO: 94601 - DNA, 22 bp, Artificial Sequence
  Synthetic oligonucleotide; TTT chr11 5287198 5287219 5287215 5287220 +
ggaaggctgaggtgggcagatt

SEQ ID NO: 94602 - DNA, 22 bp, Artificial Sequence
  Synthetic oligonucleotide; TTG chr11 5287199 5287220 5287216 5287221 +
gaaggctgaggtgggcagattg

SEQ ID NO: 94603 - DNA, 22 bp, Artificial Sequence
  Synthetic oligonucleotide; CTG chr11 5287207 5287228 5287224 5287229 +
aggtgggcagattgcttgagct

SEQ ID NO: 94604 - DNA, 22 bp, Artificial Sequence
  Synthetic oligonucleotide; TTG chr11 5287221 5287242 5287238 5287243 +
cttgagctccggagtctgagac

SEQ ID NO: 94605 - DNA, 22 bp, Artificial Sequence
  Synthetic oligonucleotide; CTT chr11 5287224 5287245 5287241 5287246 +
gagctccggagtctgagaccat

SEQ ID NO: 94606 - DNA, 22 bp, Artificial Sequence
  Synthetic oligonucleotide; TTG chr11 5287225 5287246 5287242 5287247 +
agctccggagtctgagaccatc

SEQ ID NO: 94607 - DNA, 22 bp, Artificial Sequence
  Synthetic oligonucleotide; CTC chr11 5287230 5287251 5287247 5287252 +
cggagtctgagaccatcctgtg

SEQ ID NO: 94608 - DNA, 22 bp, Artificial Sequence
  Synthetic oligonucleotide; CTG chr11 5287239 5287260 5287256 5287261 +
agaccatcctgtgtaacatgtg

SEQ ID NO: 94609 - DNA, 22 bp, Artificial Sequence
  Synthetic oligonucleotide; CTG chr11 5287250 5287271 5287267 5287272 +
tgtaacatgtgaaaccccatct

SEQ ID NO: 94610 - DNA, 22 bp, Artificial Sequence
  Synthetic oligonucleotide; CTC chr11 5287273 5287294 5287290 5287295 +
taccaaaaatacaaaaaattag

SEQ ID NO: 94611 - DNA, 22 bp, Artificial Sequence
  Synthetic oligonucleotide; CTA chr11 5287275 5287296 5287292 5287297 +
ccaaaaatacaaaaaattagcg

SEQ ID NO: 94612 - DNA, 22 bp, Artificial Sequence
  Synthetic oligonucleotide; TTA chr11 5287294 5287315 5287311 5287316 +
gcgaggtatggtggtgtgtacc

SEQ ID NO: 94613 - DNA, 22 bp, Artificial Sequence
  Synthetic oligonucleotide; CTG chr11 5287318 5287339 5287335 5287340 +
tggttccagctactcaggatgt

SEQ ID NO: 94614 - DNA, 22 bp, Artificial Sequence
  Synthetic oligonucleotide; TTC chr11 5287324 5287345 5287341 5287346 +
cagctactcaggatgttgaggt

SEQ ID NO: 94615 - DNA, 22 bp, Artificial Sequence
  Synthetic oligonucleotide; CTA chr11 5287330 5287351 5287347 5287352 +
ctcaggatgttgaggtgggagg

SEQ ID NO: 94616 - DNA, 22 bp, Artificial Sequence
  Synthetic oligonucleotide; CTC chr11 5287333 5287354 5287350 5287355 +
aggatgttgaggtgggaggacc

SEQ ID NO: 94617 - DNA, 22 bp, Artificial Sequence
  Synthetic oligonucleotide; TTG chr11 5287342 5287363 5287359 5287364 +
aggtgggaggaccgcttgagcc

SEQ ID NO: 94618 - DNA, 22 bp, Artificial Sequence
  Synthetic oligonucleotide; CTT chr11 5287359 5287380 5287376 5287381 +
gagcctgggaagtgcaagttgc

SEQ ID NO: 94619 - DNA, 22 bp, Artificial Sequence
  Synthetic oligonucleotide; TTG chr11 5287360 5287381 5287377 5287382 +
agcctgggaagtgcaagttgca

SEQ ID NO: 94620 - DNA, 22 bp, Artificial Sequence
  Synthetic oligonucleotide; CTG chr11 5287366 5287387 5287383 5287388 +
ggaagtgcaagttgcagtgagc

SEQ ID NO: 94621 - DNA, 22 bp, Artificial Sequence
  Synthetic oligonucleotide; TTG chr11 5287380 5287401 5287397 5287402 +
cagtgagccgagattttgccac

SEQ ID NO: 94622 - DNA, 22 bp, Artificial Sequence
  Synthetic oligonucleotide; TTT chr11 5287396 5287417 5287413 5287418 +
tgccactacactcccatttggg

SEQ ID NO: 94623 - DNA, 22 bp, Artificial Sequence
  Synthetic oligonucleotide; TTT chr11 5287397 5287418 5287414 5287419 +
gccactacactcccatttgggt

SEQ ID NO: 94624 - DNA, 22 bp, Artificial Sequence
  Synthetic oligonucleotide; TTG chr11 5287398 5287419 5287415 5287420 +
ccactacactcccatttgggtg

SEQ ID NO: 94625 - DNA, 22 bp, Artificial Sequence
  Synthetic oligonucleotide; CTA chr11 5287404 5287425 5287421 5287426 +
cactcccatttgggtgacagag

SEQ ID NO: 94626 - DNA, 22 bp, Artificial Sequence
  Synthetic oligonucleotide; CTC chr11 5287409 5287430 5287426 5287431 +
ccatttgggtgacagagtgaga

SEQ ID NO: 94627 - DNA, 22 bp, Artificial Sequence
  Synthetic oligonucleotide; TTT chr11 5287415 5287436 5287432 5287437 +
gggtgacagagtgagacccttt

SEQ ID NO: 94628 - DNA, 22 bp, Artificial Sequence
  Synthetic oligonucleotide; TTG chr11 5287416 5287437 5287433 5287438 +
ggtgacagagtgagaccctttc

SEQ ID NO: 94629 - DNA, 22 bp, Artificial Sequence
  Synthetic oligonucleotide; CTT chr11 5287436 5287457 5287453 5287458 +
tctcaaaaacaaactaattaaa

SEQ ID NO: 94630 - DNA, 22 bp, Artificial Sequence
  Synthetic oligonucleotide; TTT chr11 5287437 5287458 5287454 5287459 +
ctcaaaaacaaactaattaaaa

SEQ ID NO: 94631 - DNA, 22 bp, Artificial Sequence
  Synthetic oligonucleotide; TTC chr11 5287438 5287459 5287455 5287460 +
tcaaaaacaaactaattaaaaa

SEQ ID NO: 94632 - DNA, 22 bp, Artificial Sequence
  Synthetic oligonucleotide; CTC chr11 5287440 5287461 5287457 5287462 +
aaaaacaaactaattaaaaaac

SEQ ID NO: 94633 - DNA, 22 bp, Artificial Sequence
  Synthetic oligonucleotide; CTA chr11 5287452 5287473 5287469 5287474 +
attaaaaaaccctccattttac

SEQ ID NO: 94634 - DNA, 22 bp, Artificial Sequence
  Synthetic oligonucleotide; TTA chr11 5287456 5287477 5287473 5287478 +
aaaaaccctccattttacagat

SEQ ID NO: 94635 - DNA, 22 bp, Artificial Sequence
  Synthetic oligonucleotide; CTC chr11 5287466 5287487 5287483 5287488 +
cattttacagatgaagaaactg

SEQ ID NO: 94636 - DNA, 22 bp, Artificial Sequence
  Synthetic oligonucleotide; TTT chr11 5287471 5287492 5287488 5287493 +
tacagatgaagaaactgagtca

SEQ ID NO: 94637 - DNA, 22 bp, Artificial Sequence
  Synthetic oligonucleotide; TTT chr11 5287472 5287493 5287489 5287494 +
acagatgaagaaactgagtcat

SEQ ID NO: 94638 - DNA, 22 bp, Artificial Sequence
  Synthetic oligonucleotide; TTA chr11 5287473 5287494 5287490 5287495 +
cagatgaagaaactgagtcata

SEQ ID NO: 94639 - DNA, 22 bp, Artificial Sequence
  Synthetic oligonucleotide; CTG chr11 5287488 5287509 5287505 5287510 +
agtcatacaactactaagagaa

SEQ ID NO: 94640 - DNA, 22 bp, Artificial Sequence
  Synthetic oligonucleotide; CTA chr11 5287501 5287522 5287518 5287523 +
ctaagagaaactgagtcactaa

SEQ ID NO: 94641 - DNA, 22 bp, Artificial Sequence
  Synthetic oligonucleotide; CTA chr11 5287504 5287525 5287521 5287526 +
agagaaactgagtcactaatca

SEQ ID NO: 94642 - DNA, 22 bp, Artificial Sequence
  Synthetic oligonucleotide; CTG chr11 5287514 5287535 5287531 5287536 +
agtcactaatcactcaggtggt

SEQ ID NO: 94643 - DNA, 22 bp, Artificial Sequence
  Synthetic oligonucleotide; CTA chr11 5287522 5287543 5287539 5287544 +
atcactcaggtggtctggctcc

SEQ ID NO: 94644 - DNA, 22 bp, Artificial Sequence
  Synthetic oligonucleotide; CTC chr11 5287529 5287550 5287546 5287551 +
aggtggtctggctccagcatct

SEQ ID NO: 94645 - DNA, 22 bp, Artificial Sequence
  Synthetic oligonucleotide; CTG chr11 5287539 5287560 5287556 5287561 +
gctccagcatctgtactcttaa

SEQ ID NO: 94646 - DNA, 22 bp, Artificial Sequence
  Synthetic oligonucleotide; CTC chr11 5287543 5287564 5287560 5287565 +
cagcatctgtactcttaatctc

SEQ ID NO: 94647 - DNA, 22 bp, Artificial Sequence
  Synthetic oligonucleotide; CTG chr11 5287552 5287573 5287569 5287574 +
tactcttaatctctgctctata

SEQ ID NO: 94648 - DNA, 22 bp, Artificial Sequence
  Synthetic oligonucleotide; CTC chr11 5287557 5287578 5287574 5287579 +
ttaatctctgctctatactgcc

SEQ ID NO: 94649 - DNA, 22 bp, Artificial Sequence
  Synthetic oligonucleotide; CTT chr11 5287559 5287580 5287576 5287581 +
aatctctgctctatactgccca

SEQ ID NO: 94650 - DNA, 22 bp, Artificial Sequence
  Synthetic oligonucleotide; TTA chr11 5287560 5287581 5287577 5287582 +
atctctgctctatactgcccaa

SEQ ID NO: 94651 - DNA, 22 bp, Artificial Sequence
  Synthetic oligonucleotide; CTC chr11 5287565 5287586 5287582 5287587 +
tgctctatactgcccaagactt

SEQ ID NO: 94652 - DNA, 22 bp, Artificial Sequence
  Synthetic oligonucleotide; CTG chr11 5287567 5287588 5287584 5287589 +
ctctatactgcccaagactttt

SEQ ID NO: 94653 - DNA, 22 bp, Artificial Sequence
  Synthetic oligonucleotide; CTC chr11 5287570 5287591 5287587 5287592 +
tatactgcccaagacttttata

SEQ ID NO: 94654 - DNA, 22 bp, Artificial Sequence
  Synthetic oligonucleotide; CTA chr11 5287572 5287593 5287589 5287594 +
tactgcccaagacttttataaa

SEQ ID NO: 94655 - DNA, 22 bp, Artificial Sequence
  Synthetic oligonucleotide; CTG chr11 5287577 5287598 5287594 5287599 +
cccaagacttttataaagtcaa

SEQ ID NO: 94656 - DNA, 22 bp, Artificial Sequence
  Synthetic oligonucleotide; CTT chr11 5287587 5287608 5287604 5287609 +
ttataaagtcaagggttgagtc

SEQ ID NO: 94657 - DNA, 22 bp, Artificial Sequence
  Synthetic oligonucleotide; TTT chr11 5287588 5287609 5287605 5287610 +
tataaagtcaagggttgagtca

SEQ ID NO: 94658 - DNA, 22 bp, Artificial Sequence
  Synthetic oligonucleotide; TTT chr11 5287589 5287610 5287606 5287611 +
ataaagtcaagggttgagtcac

SEQ ID NO: 94659 - DNA, 22 bp, Artificial Sequence
  Synthetic oligonucleotide; TTA chr11 5287590 5287611 5287607 5287612 +
taaagtcaagggttgagtcact

SEQ ID NO: 94660 - DNA, 22 bp, Artificial Sequence
  Synthetic oligonucleotide; TTG chr11 5287605 5287626 5287622 5287627 +
agtcactgaaatgagttattgg

SEQ ID NO: 94661 - DNA, 22 bp, Artificial Sequence
  Synthetic oligonucleotide; CTG chr11 5287613 5287634 5287630 5287635 +
aaatgagttattgggatggctg

SEQ ID NO: 94662 - DNA, 22 bp, Artificial Sequence
  Synthetic oligonucleotide; TTA chr11 5287623 5287644 5287640 5287645 +
ttgggatggctgtgtgggaagg

SEQ ID NO: 94663 - DNA, 22 bp, Artificial Sequence
  Synthetic oligonucleotide; TTG chr11 5287626 5287647 5287643 5287648 +
ggatggctgtgtgggaagggtg

SEQ ID NO: 94664 - DNA, 22 bp, Artificial Sequence
  Synthetic oligonucleotide; CTG chr11 5287635 5287656 5287652 5287657 +
tgtgggaagggtgctaagttct

SEQ ID NO: 94665 - DNA, 22 bp, Artificial Sequence
  Synthetic oligonucleotide; CTA chr11 5287651 5287672 5287668 5287673 +
agttctttcctaaaggtatgtg

SEQ ID NO: 94666 - DNA, 22 bp, Artificial Sequence
  Synthetic oligonucleotide; TTC chr11 5287656 5287677 5287673 5287678 +
tttcctaaaggtatgtgagaat

SEQ ID NO: 94667 - DNA, 22 bp, Artificial Sequence
  Synthetic oligonucleotide; CTT chr11 5287658 5287679 5287675 5287680 +
tcctaaaggtatgtgagaatac

SEQ ID NO: 94668 - DNA, 22 bp, Artificial Sequence
  Synthetic oligonucleotide; TTT chr11 5287659 5287680 5287676 5287681 +
cctaaaggtatgtgagaataca

SEQ ID NO: 94669 - DNA, 22 bp, Artificial Sequence
  Synthetic oligonucleotide; TTC chr11 5287660 5287681 5287677 5287682 +
ctaaaggtatgtgagaatacaa

SEQ ID NO: 94670 - DNA, 22 bp, Artificial Sequence
  Synthetic oligonucleotide; CTA chr11 5287663 5287684 5287680 5287685 +
aaggtatgtgagaatacaaagg

SEQ ID NO: 94671 - DNA, 22 bp, Artificial Sequence
  Synthetic oligonucleotide; CTC chr11 5287699 5287720 5287716 5287721 +
ctttttacacacgtgaactagt

SEQ ID NO: 94672 - DNA, 22 bp, Artificial Sequence
  Synthetic oligonucleotide; CTT chr11 5287702 5287723 5287719 5287724 +
tttacacacgtgaactagtgca

SEQ ID NO: 94673 - DNA, 22 bp, Artificial Sequence
  Synthetic oligonucleotide; TTT chr11 5287703 5287724 5287720 5287725 +
ttacacacgtgaactagtgcat

SEQ ID NO: 94674 - DNA, 22 bp, Artificial Sequence
  Synthetic oligonucleotide; TTT chr11 5287704 5287725 5287721 5287726 +
tacacacgtgaactagtgcatg

SEQ ID NO: 94675 - DNA, 22 bp, Artificial Sequence
  Synthetic oligonucleotide; TTT chr11 5287705 5287726 5287722 5287727 +
acacacgtgaactagtgcatgc

SEQ ID NO: 94676 - DNA, 22 bp, Artificial Sequence
  Synthetic oligonucleotide; TTA chr11 5287706 5287727 5287723 5287728 +
cacacgtgaactagtgcatgca

SEQ ID NO: 94677 - DNA, 22 bp, Artificial Sequence
  Synthetic oligonucleotide; CTA chr11 5287719 5287740 5287736 5287741 +
gtgcatgcaaatctgacactca

SEQ ID NO: 94678 - DNA, 22 bp, Artificial Sequence
  Synthetic oligonucleotide; CTG chr11 5287734 5287755 5287751 5287756 +
acactcagtgggcctgggtgaa

SEQ ID NO: 94679 - DNA, 22 bp, Artificial Sequence
  Synthetic oligonucleotide; CTC chr11 5287740 5287761 5287757 5287762 +
agtgggcctgggtgaaggtgag

SEQ ID NO: 94680 - DNA, 22 bp, Artificial Sequence
  Synthetic oligonucleotide; CTG chr11 5287750 5287771 5287767 5287772 +
ggtgaaggtgagaattttattg

SEQ ID NO: 94681 - DNA, 22 bp, Artificial Sequence
  Synthetic oligonucleotide; TTT chr11 5287767 5287788 5287784 5287789 +
tattgctgaatgagagcctctg

SEQ ID NO: 94682 - DNA, 22 bp, Artificial Sequence
  Synthetic oligonucleotide; TTT chr11 5287768 5287789 5287785 5287790 +
attgctgaatgagagcctctgg

SEQ ID NO: 94683 - DNA, 22 bp, Artificial Sequence
  Synthetic oligonucleotide; TTA chr11 5287769 5287790 5287786 5287791 +
ttgctgaatgagagcctctggg

SEQ ID NO: 94684 - DNA, 22 bp, Artificial Sequence
  Synthetic oligonucleotide; TTG chr11 5287772 5287793 5287789 5287794 +
ctgaatgagagcctctggggac

SEQ ID NO: 94685 - DNA, 22 bp, Artificial Sequence
  Synthetic oligonucleotide; CTG chr11 5287775 5287796 5287792 5287797 +
aatgagagcctctggggacatc

SEQ ID NO: 94686 - DNA, 22 bp, Artificial Sequence
  Synthetic oligonucleotide; CTC chr11 5287787 5287808 5287804 5287809 +
tggggacatcttgccagtcaat

SEQ ID NO: 94687 - DNA, 22 bp, Artificial Sequence
  Synthetic oligonucleotide; CTG chr11 5287789 5287810 5287806 5287811 +
gggacatcttgccagtcaatga

SEQ ID NO: 94688 - DNA, 22 bp, Artificial Sequence
  Synthetic oligonucleotide; CTT chr11 5287799 5287820 5287816 5287821 +
gccagtcaatgagtctcaggtt

SEQ ID NO: 94689 - DNA, 22 bp, Artificial Sequence
  Synthetic oligonucleotide; TTG chr11 5287800 5287821 5287817 5287822 +
ccagtcaatgagtctcaggttc

SEQ ID NO: 94690 - DNA, 22 bp, Artificial Sequence
  Synthetic oligonucleotide; CTC chr11 5287816 5287837 5287833 5287838 +
aggttcaatttccttctcagtc

SEQ ID NO: 94691 - DNA, 22 bp, Artificial Sequence
  Synthetic oligonucleotide; TTC chr11 5287822 5287843 5287839 5287844 +
aatttccttctcagtcttggag

SEQ ID NO: 94692 - DNA, 22 bp, Artificial Sequence
  Synthetic oligonucleotide; TTT chr11 5287827 5287848 5287844 5287849 +
ccttctcagtcttggagtaaca

SEQ ID NO: 94693 - DNA, 22 bp, Artificial Sequence
  Synthetic oligonucleotide; TTC chr11 5287828 5287849 5287845 5287850 +
cttctcagtcttggagtaacag

SEQ ID NO: 94694 - DNA, 22 bp, Artificial Sequence
  Synthetic oligonucleotide; CTT chr11 5287831 5287852 5287848 5287853 +
ctcagtcttggagtaacagaag

SEQ ID NO: 94695 - DNA, 22 bp, Artificial Sequence
  Synthetic oligonucleotide; TTC chr11 5287832 5287853 5287849 5287854 +
tcagtcttggagtaacagaagc

SEQ ID NO: 94696 - DNA, 22 bp, Artificial Sequence
  Synthetic oligonucleotide; CTC chr11 5287834 5287855 5287851 5287856 +
agtcttggagtaacagaagctc

SEQ ID NO: 94697 - DNA, 22 bp, Artificial Sequence
  Synthetic oligonucleotide; CTT chr11 5287840 5287861 5287857 5287862 +
ggagtaacagaagctcatgcat

SEQ ID NO: 94698 - DNA, 22 bp, Artificial Sequence
  Synthetic oligonucleotide; TTG chr11 5287841 5287862 5287858 5287863 +
gagtaacagaagctcatgcatt

SEQ ID NO: 94699 - DNA, 22 bp, Artificial Sequence
  Synthetic oligonucleotide; CTC chr11 5287856 5287877 5287873 5287878 +
atgcatttaataaacggaaatt

SEQ ID NO: 94700 - DNA, 22 bp, Artificial Sequence
  Synthetic oligonucleotide; TTT chr11 5287864 5287885 5287881 5287886 +
aataaacggaaattttgtattg

SEQ ID NO: 94701 - DNA, 22 bp, Artificial Sequence
  Synthetic oligonucleotide; TTA chr11 5287865 5287886 5287882 5287887 +
ataaacggaaattttgtattga

SEQ ID NO: 94702 - DNA, 22 bp, Artificial Sequence
  Synthetic oligonucleotide; TTT chr11 5287879 5287900 5287896 5287901 +
tgtattgaaatgagagccattg

SEQ ID NO: 94703 - DNA, 22 bp, Artificial Sequence
  Synthetic oligonucleotide; TTT chr11 5287880 5287901 5287897 5287902 +
gtattgaaatgagagccattgg

SEQ ID NO: 94704 - DNA, 22 bp, Artificial Sequence
  Synthetic oligonucleotide; TTG chr11 5287881 5287902 5287898 5287903 +
tattgaaatgagagccattgga

SEQ ID NO: 94705 - DNA, 22 bp, Artificial Sequence
  Synthetic oligonucleotide; TTG chr11 5287886 5287907 5287903 5287908 +
aaatgagagccattggaaatca

SEQ ID NO: 94706 - DNA, 22 bp, Artificial Sequence
  Synthetic oligonucleotide; TTG chr11 5287901 5287922 5287918 5287923 +
gaaatcatttactccagactcc

SEQ ID NO: 94707 - DNA, 22 bp, Artificial Sequence
  Synthetic oligonucleotide; TTT chr11 5287911 5287932 5287928 5287933 +
actccagactcctacttataaa

SEQ ID NO: 94708 - DNA, 22 bp, Artificial Sequence
  Synthetic oligonucleotide; TTA chr11 5287912 5287933 5287929 5287934 +
ctccagactcctacttataaaa

SEQ ID NO: 94709 - DNA, 22 bp, Artificial Sequence
  Synthetic oligonucleotide; CTC chr11 5287915 5287936 5287932 5287937 +
cagactcctacttataaaaaga

SEQ ID NO: 94710 - DNA, 22 bp, Artificial Sequence
  Synthetic oligonucleotide; CTC chr11 5287922 5287943 5287939 5287944 +
ctacttataaaaagagaaactg

SEQ ID NO: 94711 - DNA, 22 bp, Artificial Sequence
  Synthetic oligonucleotide; CTA chr11 5287925 5287946 5287942 5287947 +
cttataaaaagagaaactgagg

SEQ ID NO: 94712 - DNA, 22 bp, Artificial Sequence
  Synthetic oligonucleotide; CTT chr11 5287928 5287949 5287945 5287950 +
ataaaaagagaaactgaggctc

SEQ ID NO: 94713 - DNA, 22 bp, Artificial Sequence
  Synthetic oligonucleotide; TTA chr11 5287929 5287950 5287946 5287951 +
taaaaagagaaactgaggctca

SEQ ID NO: 94714 - DNA, 22 bp, Artificial Sequence
  Synthetic oligonucleotide; CTG chr11 5287944 5287965 5287961 5287966 +
aggctcagagaagggtggggac

SEQ ID NO: 94715 - DNA, 22 bp, Artificial Sequence
  Synthetic oligonucleotide; CTC chr11 5287950 5287971 5287967 5287972 +
agagaagggtggggactttctc

SEQ ID NO: 94716 - DNA, 22 bp, Artificial Sequence
  Synthetic oligonucleotide; CTT chr11 5287968 5287989 5287985 5287990 +
tctcagtatgacatggaaatga

SEQ ID NO: 94717 - DNA, 22 bp, Artificial Sequence
  Synthetic oligonucleotide; TTT chr11 5287969 5287990 5287986 5287991 +
ctcagtatgacatggaaatgat

SEQ ID NO: 94718 - DNA, 22 bp, Artificial Sequence
  Synthetic oligonucleotide; TTC chr11 5287970 5287991 5287987 5287992 +
tcagtatgacatggaaatgatc

SEQ ID NO: 94719 - DNA, 22 bp, Artificial Sequence
  Synthetic oligonucleotide; CTC chr11 5287972 5287993 5287989 5287994 +
agtatgacatggaaatgatcag

SEQ ID NO: 94720 - DNA, 22 bp, Artificial Sequence
  Synthetic oligonucleotide; CTT chr11 5287998 5288019 5288015 5288020 +
ggattcaaagctcctgactttc

SEQ ID NO: 94721 - DNA, 22 bp, Artificial Sequence
  Synthetic oligonucleotide; TTG chr11 5287999 5288020 5288016 5288021 +
gattcaaagctcctgactttct

SEQ ID NO: 94722 - DNA, 22 bp, Artificial Sequence
  Synthetic oligonucleotide; TTC chr11 5288004 5288025 5288021 5288026 +
aaagctcctgactttctgtcta

SEQ ID NO: 94723 - DNA, 22 bp, Artificial Sequence
  Synthetic oligonucleotide; CTC chr11 5288011 5288032 5288028 5288033 +
ctgactttctgtctagtgtatg

SEQ ID NO: 94724 - DNA, 22 bp, Artificial Sequence
  Synthetic oligonucleotide; CTG chr11 5288014 5288035 5288031 5288036 +
actttctgtctagtgtatgtgc

SEQ ID NO: 94725 - DNA, 22 bp, Artificial Sequence
  Synthetic oligonucleotide; CTT chr11 5288018 5288039 5288035 5288040 +
tctgtctagtgtatgtgcagtg

SEQ ID NO: 94726 - DNA, 22 bp, Artificial Sequence
  Synthetic oligonucleotide; TTT chr11 5288019 5288040 5288036 5288041 +
ctgtctagtgtatgtgcagtga

SEQ ID NO: 94727 - DNA, 22 bp, Artificial Sequence
  Synthetic oligonucleotide; TTC chr11 5288020 5288041 5288037 5288042 +
tgtctagtgtatgtgcagtgag

SEQ ID NO: 94728 - DNA, 22 bp, Artificial Sequence
  Synthetic oligonucleotide; CTG chr11 5288022 5288043 5288039 5288044 +
tctagtgtatgtgcagtgagcc

SEQ ID NO: 94729 - DNA, 22 bp, Artificial Sequence
  Synthetic oligonucleotide; CTA chr11 5288026 5288047 5288043 5288048 +
gtgtatgtgcagtgagcccctt

SEQ ID NO: 94730 - DNA, 22 bp, Artificial Sequence
  Synthetic oligonucleotide; CTT chr11 5288048 5288069 5288065 5288070 +
ttcctctaactgaaagaaggaa

SEQ ID NO: 94731 - DNA, 22 bp, Artificial Sequence
  Synthetic oligonucleotide; TTT chr11 5288049 5288070 5288066 5288071 +
tcctctaactgaaagaaggaaa

SEQ ID NO: 94732 - DNA, 22 bp, Artificial Sequence
  Synthetic oligonucleotide; TTT chr11 5288050 5288071 5288067 5288072 +
cctctaactgaaagaaggaaaa

SEQ ID NO: 94733 - DNA, 22 bp, Artificial Sequence
  Synthetic oligonucleotide; TTC chr11 5288051 5288072 5288068 5288073 +
ctctaactgaaagaaggaaaaa

SEQ ID NO: 94734 - DNA, 22 bp, Artificial Sequence
  Synthetic oligonucleotide; CTC chr11 5288054 5288075 5288071 5288076 +
taactgaaagaaggaaaaaaaa

SEQ ID NO: 94735 - DNA, 22 bp, Artificial Sequence
  Synthetic oligonucleotide; CTA chr11 5288056 5288077 5288073 5288078 +
actgaaagaaggaaaaaaaaat

SEQ ID NO: 94736 - DNA, 22 bp, Artificial Sequence
  Synthetic oligonucleotide; CTG chr11 5288060 5288081 5288077 5288082 +
aaagaaggaaaaaaaaatggaa

SEQ ID NO: 94737 - DNA, 22 bp, Artificial Sequence
  Synthetic oligonucleotide; TTC chr11 5288094 5288115 5288111 5288116 +
tacatagtttccatgtcacagc

SEQ ID NO: 94738 - DNA, 22 bp, Artificial Sequence
  Synthetic oligonucleotide; CTA chr11 5288096 5288117 5288113 5288118 +
catagtttccatgtcacagcca

SEQ ID NO: 94739 - DNA, 22 bp, Artificial Sequence
  Synthetic oligonucleotide; TTT chr11 5288104 5288125 5288121 5288126 +
ccatgtcacagccagggctggg

SEQ ID NO: 94740 - DNA, 22 bp, Artificial Sequence
  Synthetic oligonucleotide; TTC chr11 5288105 5288126 5288122 5288127 +
catgtcacagccagggctgggc

SEQ ID NO: 94741 - DNA, 22 bp, Artificial Sequence
  Synthetic oligonucleotide; CTG chr11 5288124 5288145 5288141 5288146 +
ggcagtctcctgttatttcttt

SEQ ID NO: 94742 - DNA, 22 bp, Artificial Sequence
  Synthetic oligonucleotide; CTC chr11 5288133 5288154 5288150 5288155 +
ctgttatttcttttaaaataaa

SEQ ID NO: 94743 - DNA, 22 bp, Artificial Sequence
  Synthetic oligonucleotide; CTG chr11 5288136 5288157 5288153 5288158 +
ttatttcttttaaaataaatat

SEQ ID NO: 94744 - DNA, 22 bp, Artificial Sequence
  Synthetic oligonucleotide; TTA chr11 5288139 5288160 5288156 5288161 +
tttcttttaaaataaatatatc

SEQ ID NO: 94745 - DNA, 22 bp, Artificial Sequence
  Synthetic oligonucleotide; TTT chr11 5288142 5288163 5288159 5288164 +
cttttaaaataaatatatcatt

SEQ ID NO: 94746 - DNA, 22 bp, Artificial Sequence
  Synthetic oligonucleotide; TTC chr11 5288143 5288164 5288160 5288165 +
ttttaaaataaatatatcattt

SEQ ID NO: 94747 - DNA, 22 bp, Artificial Sequence
  Synthetic oligonucleotide; CTT chr11 5288145 5288166 5288162 5288167 +
ttaaaataaatatatcatttaa

SEQ ID NO: 94748 - DNA, 22 bp, Artificial Sequence
  Synthetic oligonucleotide; TTT chr11 5288146 5288167 5288163 5288168 +
taaaataaatatatcatttaaa

SEQ ID NO: 94749 - DNA, 22 bp, Artificial Sequence
  Synthetic oligonucleotide; TTT chr11 5288147 5288168 5288164 5288169 +
aaaataaatatatcatttaaat

SEQ ID NO: 94750 - DNA, 22 bp, Artificial Sequence
  Synthetic oligonucleotide; TTA chr11 5288148 5288169 5288165 5288170 +
aaataaatatatcatttaaatg

SEQ ID NO: 94751 - DNA, 22 bp, Artificial Sequence
  Synthetic oligonucleotide; TTT chr11 5288165 5288186 5288182 5288187 +
aaatgcataaataagcaaaccc

SEQ ID NO: 94752 - DNA, 22 bp, Artificial Sequence
  Synthetic oligonucleotide; TTA chr11 5288166 5288187 5288183 5288188 +
aatgcataaataagcaaaccct

SEQ ID NO: 94753 - DNA, 22 bp, Artificial Sequence
  Synthetic oligonucleotide; CTG chr11 5288189 5288210 5288206 5288211 +
ctcgggaatgggagggagagtc

SEQ ID NO: 94754 - DNA, 22 bp, Artificial Sequence
  Synthetic oligonucleotide; CTC chr11 5288192 5288213 5288209 5288214 +
gggaatgggagggagagtctct

SEQ ID NO: 94755 - DNA, 22 bp, Artificial Sequence
  Synthetic oligonucleotide; CTC chr11 5288213 5288234 5288230 5288235 +
tggagtccaccccttctcggcc

SEQ ID NO: 94756 - DNA, 22 bp, Artificial Sequence
  Synthetic oligonucleotide; CTG chr11 5288215 5288236 5288232 5288237 +
gagtccaccccttctcggccct

SEQ ID NO: 94757 - DNA, 22 bp, Artificial Sequence
  Synthetic oligonucleotide; CTT chr11 5288228 5288249 5288245 5288250 +
ctcggccctggctctgcagata

SEQ ID NO: 94758 - DNA, 22 bp, Artificial Sequence
  Synthetic oligonucleotide; TTC chr11 5288229 5288250 5288246 5288251 +
tcggccctggctctgcagatag

SEQ ID NO: 94759 - DNA, 22 bp, Artificial Sequence
  Synthetic oligonucleotide; CTC chr11 5288231 5288252 5288248 5288253 +
ggccctggctctgcagatagtg

SEQ ID NO: 94760 - DNA, 22 bp, Artificial Sequence
  Synthetic oligonucleotide; CTG chr11 5288238 5288259 5288255 5288260 +
gctctgcagatagtgctatcaa

SEQ ID NO: 94761 - DNA, 22 bp, Artificial Sequence
  Synthetic oligonucleotide; CTC chr11 5288242 5288263 5288259 5288264 +
tgcagatagtgctatcaaagcc

SEQ ID NO: 94762 - DNA, 22 bp, Artificial Sequence
  Synthetic oligonucleotide; CTG chr11 5288244 5288265 5288261 5288266 +
cagatagtgctatcaaagccct

SEQ ID NO: 94763 - DNA, 22 bp, Artificial Sequence
  Synthetic oligonucleotide; CTA chr11 5288256 5288277 5288273 5288278 +
tcaaagccctgacagagccctg

SEQ ID NO: 94764 - DNA, 22 bp, Artificial Sequence
  Synthetic oligonucleotide; CTG chr11 5288267 5288288 5288284 5288289 +
acagagccctgcccattgctgg

SEQ ID NO: 94765 - DNA, 22 bp, Artificial Sequence
  Synthetic oligonucleotide; CTG chr11 5288278 5288299 5288295 5288300 +
cccattgctgggccttggagtg

SEQ ID NO: 94766 - DNA, 22 bp, Artificial Sequence
  Synthetic oligonucleotide; TTG chr11 5288285 5288306 5288302 5288307 +
ctgggccttggagtgagtcagc

SEQ ID NO: 94767 - DNA, 22 bp, Artificial Sequence
  Synthetic oligonucleotide; CTG chr11 5288288 5288309 5288305 5288310 +
ggccttggagtgagtcagccta

SEQ ID NO: 94768 - DNA, 22 bp, Artificial Sequence
  Synthetic oligonucleotide; CTT chr11 5288294 5288315 5288311 5288316 +
ggagtgagtcagcctagtagag

SEQ ID NO: 94769 - DNA, 22 bp, Artificial Sequence
  Synthetic oligonucleotide; TTG chr11 5288295 5288316 5288312 5288317 +
gagtgagtcagcctagtagaga

SEQ ID NO: 94770 - DNA, 22 bp, Artificial Sequence
  Synthetic oligonucleotide; CTA chr11 5288310 5288331 5288327 5288332 +
gtagagaggcagggcaagccat

SEQ ID NO: 94771 - DNA, 22 bp, Artificial Sequence
  Synthetic oligonucleotide; CTC chr11 5288335 5288356 5288352 5288357 +
atagctgctgagtgggagagag

SEQ ID NO: 94772 - DNA, 22 bp, Artificial Sequence
  Synthetic oligonucleotide; CTG chr11 5288342 5288363 5288359 5288364 +
ctgagtgggagagagaaaaggg

SEQ ID NO: 94773 - DNA, 22 bp, Artificial Sequence
  Synthetic oligonucleotide; CTG chr11 5288345 5288366 5288362 5288367 +
agtgggagagagaaaagggctc

SEQ ID NO: 94774 - DNA, 22 bp, Artificial Sequence
  Synthetic oligonucleotide; CTC chr11 5288367 5288388 5288384 5288389 +
attgtctataaactcaggtcat

SEQ ID NO: 94775 - DNA, 22 bp, Artificial Sequence
  Synthetic oligonucleotide; TTG chr11 5288371 5288392 5288388 5288393 +
tctataaactcaggtcatggct

SEQ ID NO: 94776 - DNA, 22 bp, Artificial Sequence
  Synthetic oligonucleotide; CTA chr11 5288375 5288396 5288392 5288397 +
taaactcaggtcatggctattc

SEQ ID NO: 94777 - DNA, 22 bp, Artificial Sequence
  Synthetic oligonucleotide; CTC chr11 5288382 5288403 5288399 5288404 +
aggtcatggctattcttattct

SEQ ID NO: 94778 - DNA, 22 bp, Artificial Sequence
  Synthetic oligonucleotide; CTA chr11 5288394 5288415 5288411 5288416 +
ttcttattctcacactaagaaa

SEQ ID NO: 94779 - DNA, 22 bp, Artificial Sequence
  Synthetic oligonucleotide; TTC chr11 5288397 5288418 5288414 5288419 +
ttattctcacactaagaaaaag

SEQ ID NO: 94780 - DNA, 22 bp, Artificial Sequence
  Synthetic oligonucleotide; CTT chr11 5288399 5288420 5288416 5288421 +
attctcacactaagaaaaagaa

SEQ ID NO: 94781 - DNA, 22 bp, Artificial Sequence
  Synthetic oligonucleotide; TTA chr11 5288400 5288421 5288417 5288422 +
ttctcacactaagaaaaagaat

SEQ ID NO: 94782 - DNA, 22 bp, Artificial Sequence
  Synthetic oligonucleotide; TTC chr11 5288403 5288424 5288420 5288425 +
tcacactaagaaaaagaatgag

SEQ ID NO: 94783 - DNA, 22 bp, Artificial Sequence
  Synthetic oligonucleotide; CTC chr11 5288405 5288426 5288422 5288427 +
acactaagaaaaagaatgagat

SEQ ID NO: 94784 - DNA, 22 bp, Artificial Sequence
  Synthetic oligonucleotide; CTA chr11 5288411 5288432 5288428 5288433 +
agaaaaagaatgagatgtctac

SEQ ID NO: 94785 - DNA, 22 bp, Artificial Sequence
  Synthetic oligonucleotide; CTA chr11 5288432 5288453 5288449 5288454 +
catataccctgcgtcccctctt

SEQ ID NO: 94786 - DNA, 22 bp, Artificial Sequence
  Synthetic oligonucleotide; CTG chr11 5288443 5288464 5288460 5288465 +
cgtcccctcttgtgtactgggg

SEQ ID NO: 94787 - DNA, 22 bp, Artificial Sequence
  Synthetic oligonucleotide; CTC chr11 5288452 5288473 5288469 5288474 +
ttgtgtactggggtccccaaga

SEQ ID NO: 94788 - DNA, 22 bp, Artificial Sequence
  Synthetic oligonucleotide; CTT chr11 5288454 5288475 5288471 5288476 +
gtgtactggggtccccaagagc

SEQ ID NO: 94789 - DNA, 22 bp, Artificial Sequence
  Synthetic oligonucleotide; TTG chr11 5288455 5288476 5288472 5288477 +
tgtactggggtccccaagagct

SEQ ID NO: 94790 - DNA, 22 bp, Artificial Sequence
  Synthetic oligonucleotide; CTG chr11 5288462 5288483 5288479 5288484 +
gggtccccaagagctctctaaa

SEQ ID NO: 94791 - DNA, 22 bp, Artificial Sequence
  Synthetic oligonucleotide; CTC chr11 5288478 5288499 5288495 5288500 +
tctaaaagtgatggcaaagtca

SEQ ID NO: 94792 - DNA, 22 bp, Artificial Sequence
  Synthetic oligonucleotide; CTC chr11 5288480 5288501 5288497 5288502 +
taaaagtgatggcaaagtcatt

SEQ ID NO: 94793 - DNA, 22 bp, Artificial Sequence
  Synthetic oligonucleotide; CTA chr11 5288482 5288503 5288499 5288504 +
aaagtgatggcaaagtcattgc

SEQ ID NO: 94794 - DNA, 22 bp, Artificial Sequence
  Synthetic oligonucleotide; TTG chr11 5288503 5288524 5288520 5288525 +
cgctagatgccatcccatctat

SEQ ID NO: 94795 - DNA, 22 bp, Artificial Sequence
  Synthetic oligonucleotide; CTA chr11 5288508 5288529 5288525 5288530 +
gatgccatcccatctattataa

SEQ ID NO: 94796 - DNA, 22 bp, Artificial Sequence
  Synthetic oligonucleotide; CTA chr11 5288524 5288545 5288541 5288546 +
ttataaacctgcatttgtctcc

SEQ ID NO: 94797 - DNA, 22 bp, Artificial Sequence
  Synthetic oligonucleotide; TTA chr11 5288527 5288548 5288544 5288549 +
taaacctgcatttgtctccaca

SEQ ID NO: 94798 - DNA, 22 bp, Artificial Sequence
  Synthetic oligonucleotide; CTG chr11 5288535 5288556 5288552 5288557 +
catttgtctccacacaccagtc

SEQ ID NO: 94799 - DNA, 22 bp, Artificial Sequence
  Synthetic oligonucleotide; TTT chr11 5288540 5288561 5288557 5288562 +
gtctccacacaccagtcatgga

SEQ ID NO: 94800 - DNA, 22 bp, Artificial Sequence
  Synthetic oligonucleotide; TTG chr11 5288541 5288562 5288558 5288563 +
tctccacacaccagtcatggac

SEQ ID NO: 94801 - DNA, 22 bp, Artificial Sequence
  Synthetic oligonucleotide; CTC chr11 5288545 5288566 5288562 5288567 +
cacacaccagtcatggacaata

SEQ ID NO: 94802 - DNA, 22 bp, Artificial Sequence
  Synthetic oligonucleotide; CTC chr11 5288573 5288594 5288590 5288595 +
ctcccaggtccacgtgcttgtc

SEQ ID NO: 94803 - DNA, 22 bp, Artificial Sequence
  Synthetic oligonucleotide; CTC chr11 5288576 5288597 5288593 5288598 +
ccaggtccacgtgcttgtcttt

SEQ ID NO: 94804 - DNA, 22 bp, Artificial Sequence
  Synthetic oligonucleotide; CTT chr11 5288592 5288613 5288609 5288614 +
gtctttgtataatactcaagta

SEQ ID NO: 94805 - DNA, 22 bp, Artificial Sequence
  Synthetic oligonucleotide; TTG chr11 5288593 5288614 5288610 5288615 +
tctttgtataatactcaagtaa

SEQ ID NO: 94806 - DNA, 22 bp, Artificial Sequence
  Synthetic oligonucleotide; CTT chr11 5288597 5288618 5288614 5288619 +
tgtataatactcaagtaatttc

SEQ ID NO: 94807 - DNA, 22 bp, Artificial Sequence
  Synthetic oligonucleotide; TTT chr11 5288598 5288619 5288615 5288620 +
gtataatactcaagtaatttcg

SEQ ID NO: 94808 - DNA, 22 bp, Artificial Sequence
  Synthetic oligonucleotide; TTG chr11 5288599 5288620 5288616 5288621 +
tataatactcaagtaatttcgg

SEQ ID NO: 94809 - DNA, 22 bp, Artificial Sequence
  Synthetic oligonucleotide; CTC chr11 5288609 5288630 5288626 5288631 +
aagtaatttcggaaaatgtatt

SEQ ID NO: 94810 - DNA, 22 bp, Artificial Sequence
  Synthetic oligonucleotide; TTT chr11 5288618 5288639 5288635 5288640 +
cggaaaatgtattctttcaatc

SEQ ID NO: 94811 - DNA, 22 bp, Artificial Sequence
  Synthetic oligonucleotide; TTC chr11 5288619 5288640 5288636 5288641 +
ggaaaatgtattctttcaatct

SEQ ID NO: 94812 - DNA, 22 bp, Artificial Sequence
  Synthetic oligonucleotide; TTC chr11 5288632 5288653 5288649 5288654 +
tttcaatcttgttctgttattc

SEQ ID NO: 94813 - DNA, 22 bp, Artificial Sequence
  Synthetic oligonucleotide; CTT chr11 5288634 5288655 5288651 5288656 +
tcaatcttgttctgttattcct

SEQ ID NO: 94814 - DNA, 22 bp, Artificial Sequence
  Synthetic oligonucleotide; TTT chr11 5288635 5288656 5288652 5288657 +
caatcttgttctgttattcctg

SEQ ID NO: 94815 - DNA, 22 bp, Artificial Sequence
  Synthetic oligonucleotide; TTC chr11 5288636 5288657 5288653 5288658 +
aatcttgttctgttattcctgt

SEQ ID NO: 94816 - DNA, 22 bp, Artificial Sequence
  Synthetic oligonucleotide; CTT chr11 5288642 5288663 5288659 5288664 +
gttctgttattcctgtttcaat

SEQ ID NO: 94817 - DNA, 22 bp, Artificial Sequence
  Synthetic oligonucleotide; TTG chr11 5288643 5288664 5288660 5288665 +
ttctgttattcctgtttcaatg

SEQ ID NO: 94818 - DNA, 22 bp, Artificial Sequence
  Synthetic oligonucleotide; TTC chr11 5288646 5288667 5288663 5288668 +
tgttattcctgtttcaatggct

SEQ ID NO: 94819 - DNA, 22 bp, Artificial Sequence
  Synthetic oligonucleotide; CTG chr11 5288648 5288669 5288665 5288670 +
ttattcctgtttcaatggctta

SEQ ID NO: 94820 - DNA, 22 bp, Artificial Sequence
  Synthetic oligonucleotide; TTA chr11 5288651 5288672 5288668 5288673 +
ttcctgtttcaatggcttagta

SEQ ID NO: 94821 - DNA, 22 bp, Artificial Sequence
  Synthetic oligonucleotide; TTC chr11 5288654 5288675 5288671 5288676 +
ctgtttcaatggcttagtagaa

SEQ ID NO: 94822 - DNA, 22 bp, Artificial Sequence
  Synthetic oligonucleotide; CTG chr11 5288657 5288678 5288674 5288679 +
tttcaatggcttagtagaaaaa

SEQ ID NO: 94823 - DNA, 22 bp, Artificial Sequence
  Synthetic oligonucleotide; TTT chr11 5288660 5288681 5288677 5288682 +
caatggcttagtagaaaaagta

SEQ ID NO: 94824 - DNA, 22 bp, Artificial Sequence
  Synthetic oligonucleotide; TTC chr11 5288661 5288682 5288678 5288683 +
aatggcttagtagaaaaagtac

SEQ ID NO: 94825 - DNA, 22 bp, Artificial Sequence
  Synthetic oligonucleotide; CTT chr11 5288669 5288690 5288686 5288691 +
agtagaaaaagtacatacttgt

SEQ ID NO: 94826 - DNA, 22 bp, Artificial Sequence
  Synthetic oligonucleotide; TTA chr11 5288670 5288691 5288687 5288692 +
gtagaaaaagtacatacttgtt

SEQ ID NO: 94827 - DNA, 22 bp, Artificial Sequence
  Synthetic oligonucleotide; CTT chr11 5288689 5288710 5288706 5288711 +
gttttcccataaattgacaata

SEQ ID NO: 94828 - DNA, 22 bp, Artificial Sequence
  Synthetic oligonucleotide; TTG chr11 5288690 5288711 5288707 5288712 +
ttttcccataaattgacaatag

SEQ ID NO: 94829 - DNA, 22 bp, Artificial Sequence
  Synthetic oligonucleotide; TTT chr11 5288693 5288714 5288710 5288715 +
tcccataaattgacaatagaca

SEQ ID NO: 94830 - DNA, 22 bp, Artificial Sequence
  Synthetic oligonucleotide; TTT chr11 5288694 5288715 5288711 5288716 +
cccataaattgacaatagacaa

SEQ ID NO: 94831 - DNA, 22 bp, Artificial Sequence
  Synthetic oligonucleotide; TTC chr11 5288695 5288716 5288712 5288717 +
ccataaattgacaatagacaat

SEQ ID NO: 94832 - DNA, 22 bp, Artificial Sequence
  Synthetic oligonucleotide; TTG chr11 5288705 5288726 5288722 5288727 +
acaatagacaatttcacatcaa

SEQ ID NO: 94833 - DNA, 22 bp, Artificial Sequence
  Synthetic oligonucleotide; TTT chr11 5288719 5288740 5288736 5288741 +
cacatcaatgtctatatgggtc

SEQ ID NO: 94834 - DNA, 22 bp, Artificial Sequence
  Synthetic oligonucleotide; TTC chr11 5288720 5288741 5288737 5288742 +
acatcaatgtctatatgggtcg

SEQ ID NO: 94835 - DNA, 22 bp, Artificial Sequence
  Synthetic oligonucleotide; CTA chr11 5288733 5288754 5288750 5288755 +
tatgggtcgttgtgtttgctgt

SEQ ID NO: 94836 - DNA, 22 bp, Artificial Sequence
  Synthetic oligonucleotide; TTG chr11 5288745 5288766 5288762 5288767 +
tgtttgctgtgtttgcaaaaac

SEQ ID NO: 94837 - DNA, 22 bp, Artificial Sequence
  Synthetic oligonucleotide; TTT chr11 5288750 5288771 5288767 5288772 +
gctgtgtttgcaaaaactcaca

SEQ ID NO: 94838 - DNA, 22 bp, Artificial Sequence
  Synthetic oligonucleotide; TTG chr11 5288751 5288772 5288768 5288773 +
ctgtgtttgcaaaaactcacaa

SEQ ID NO: 94839 - DNA, 22 bp, Artificial Sequence
  Synthetic oligonucleotide; CTG chr11 5288754 5288775 5288771 5288776 +
tgtttgcaaaaactcacaataa

SEQ ID NO: 94840 - DNA, 22 bp, Artificial Sequence
  Synthetic oligonucleotide; TTT chr11 5288759 5288780 5288776 5288781 +
gcaaaaactcacaataacttta

SEQ ID NO: 94841 - DNA, 22 bp, Artificial Sequence
  Synthetic oligonucleotide; TTG chr11 5288760 5288781 5288777 5288782 +
caaaaactcacaataactttat

SEQ ID NO: 94842 - DNA, 22 bp, Artificial Sequence
  Synthetic oligonucleotide; CTC chr11 5288769 5288790 5288786 5288791 +
acaataactttatattgttact

SEQ ID NO: 94843 - DNA, 22 bp, Artificial Sequence
  Synthetic oligonucleotide; CTT chr11 5288779 5288800 5288796 5288801 +
tatattgttactactctaagaa

SEQ ID NO: 94844 - DNA, 22 bp, Artificial Sequence
  Synthetic oligonucleotide; TTT chr11 5288780 5288801 5288797 5288802 +
atattgttactactctaagaaa

SEQ ID NO: 94845 - DNA, 22 bp, Artificial Sequence
  Synthetic oligonucleotide; TTA chr11 5288781 5288802 5288798 5288803 +
tattgttactactctaagaaag

SEQ ID NO: 94846 - DNA, 22 bp, Artificial Sequence
  Synthetic oligonucleotide; TTG chr11 5288786 5288807 5288803 5288808 +
ttactactctaagaaagttaca

SEQ ID NO: 94847 - DNA, 22 bp, Artificial Sequence
  Synthetic oligonucleotide; TTA chr11 5288789 5288810 5288806 5288811 +
ctactctaagaaagttacaaca

SEQ ID NO: 94848 - DNA, 22 bp, Artificial Sequence
  Synthetic oligonucleotide; CTA chr11 5288792 5288813 5288809 5288814 +
ctctaagaaagttacaacatgg

SEQ ID NO: 94849 - DNA, 22 bp, Artificial Sequence
  Synthetic oligonucleotide; CTC chr11 5288795 5288816 5288812 5288817 +
taagaaagttacaacatggtga

SEQ ID NO: 94850 - DNA, 22 bp, Artificial Sequence
  Synthetic oligonucleotide; CTA chr11 5288797 5288818 5288814 5288819 +
agaaagttacaacatggtgaat

SEQ ID NO: 94851 - DNA, 22 bp, Artificial Sequence
  Synthetic oligonucleotide; TTA chr11 5288806 5288827 5288823 5288828 +
caacatggtgaatacaagagaa

SEQ ID NO: 94852 - DNA, 22 bp, Artificial Sequence
  Synthetic oligonucleotide; CTA chr11 5288833 5288854 5288850 5288855 +
ttacaagtccagaaaataaaag

SEQ ID NO: 94853 - DNA, 22 bp, Artificial Sequence
  Synthetic oligonucleotide; TTA chr11 5288836 5288857 5288853 5288858 +
caagtccagaaaataaaagtta

SEQ ID NO: 94854 - DNA, 22 bp, Artificial Sequence
  Synthetic oligonucleotide; TTA chr11 5288858 5288879 5288875 5288880 +
tcatcttgaggcctcagctttc

SEQ ID NO: 94855 - DNA, 22 bp, Artificial Sequence
  Synthetic oligonucleotide; CTT chr11 5288865 5288886 5288882 5288887 +
gaggcctcagctttctaggaat

SEQ ID NO: 94856 - DNA, 22 bp, Artificial Sequence
  Synthetic oligonucleotide; TTG chr11 5288866 5288887 5288883 5288888 +
aggcctcagctttctaggaata

SEQ ID NO: 94857 - DNA, 22 bp, Artificial Sequence
  Synthetic oligonucleotide; CTC chr11 5288873 5288894 5288890 5288895 +
agctttctaggaataatatcaa

SEQ ID NO: 94858 - DNA, 22 bp, Artificial Sequence
  Synthetic oligonucleotide; CTT chr11 5288878 5288899 5288895 5288900 +
tctaggaataatatcaatatta

SEQ ID NO: 94859 - DNA, 22 bp, Artificial Sequence
  Synthetic oligonucleotide; TTT chr11 5288879 5288900 5288896 5288901 +
ctaggaataatatcaatattac

SEQ ID NO: 94860 - DNA, 22 bp, Artificial Sequence
  Synthetic oligonucleotide; TTC chr11 5288880 5288901 5288897 5288902 +
taggaataatatcaatattaca

SEQ ID NO: 94861 - DNA, 22 bp, Artificial Sequence
  Synthetic oligonucleotide; CTA chr11 5288882 5288903 5288899 5288904 +
ggaataatatcaatattacaaa

SEQ ID NO: 94862 - DNA, 22 bp, Artificial Sequence
  Synthetic oligonucleotide; TTA chr11 5288900 5288921 5288917 5288922 +
caaaattaatctaacaattatg

SEQ ID NO: 94863 - DNA, 22 bp, Artificial Sequence
  Synthetic oligonucleotide; TTA chr11 5288908 5288929 5288925 5288930 +
atctaacaattatgaacagcaa

SEQ ID NO: 94864 - DNA, 22 bp, Artificial Sequence
  Synthetic oligonucleotide; CTA chr11 5288913 5288934 5288930 5288935 +
acaattatgaacagcaatgaga

SEQ ID NO: 94865 - DNA, 22 bp, Artificial Sequence
  Synthetic oligonucleotide; TTA chr11 5288920 5288941 5288937 5288942 +
tgaacagcaatgagataatgtg

SEQ ID NO: 94866 - DNA, 22 bp, Artificial Sequence
  Synthetic oligonucleotide; CTA chr11 5288961 5288982 5288978 5288983 +
tgtggtagagcatcaaggaagc

SEQ ID NO: 94867 - DNA, 22 bp, Artificial Sequence
  Synthetic oligonucleotide; TTG chr11 5288989 5289010 5289006 5289011 +
cggagcagttttttgtttgttt

SEQ ID NO: 94868 - DNA, 22 bp, Artificial Sequence
  Synthetic oligonucleotide; TTT chr11 5289000 5289021 5289017 5289022 +
tttgtttgtttgtttttgtatt

SEQ ID NO: 94869 - DNA, 22 bp, Artificial Sequence
  Synthetic oligonucleotide; TTT chr11 5289001 5289022 5289018 5289023 +
ttgtttgtttgtttttgtattc

SEQ ID NO: 94870 - DNA, 22 bp, Artificial Sequence
  Synthetic oligonucleotide; TTT chr11 5289002 5289023 5289019 5289024 +
tgtttgtttgtttttgtattct

SEQ ID NO: 94871 - DNA, 22 bp, Artificial Sequence
  Synthetic oligonucleotide; TTT chr11 5289003 5289024 5289020 5289025 +
gtttgtttgtttttgtattctg

SEQ ID NO: 94872 - DNA, 22 bp, Artificial Sequence
  Synthetic oligonucleotide; TTG chr11 5289004 5289025 5289021 5289026 +
tttgtttgtttttgtattctgt

SEQ ID NO: 94873 - DNA, 22 bp, Artificial Sequence
  Synthetic oligonucleotide; TTT chr11 5289007 5289028 5289024 5289029 +
gtttgtttttgtattctgtttc

SEQ ID NO: 94874 - DNA, 22 bp, Artificial Sequence
  Synthetic oligonucleotide; TTG chr11 5289008 5289029 5289025 5289030 +
tttgtttttgtattctgtttcg

SEQ ID NO: 94875 - DNA, 22 bp, Artificial Sequence
  Synthetic oligonucleotide; TTT chr11 5289011 5289032 5289028 5289033 +
gtttttgtattctgtttcgtga

SEQ ID NO: 94876 - DNA, 22 bp, Artificial Sequence
  Synthetic oligonucleotide; TTG chr11 5289012 5289033 5289029 5289034 +
tttttgtattctgtttcgtgag

SEQ ID NO: 94877 - DNA, 22 bp, Artificial Sequence
  Synthetic oligonucleotide; TTT chr11 5289015 5289036 5289032 5289037 +
ttgtattctgtttcgtgaggca

SEQ ID NO: 94878 - DNA, 22 bp, Artificial Sequence
  Synthetic oligonucleotide; TTT chr11 5289016 5289037 5289033 5289038 +
tgtattctgtttcgtgaggcaa

SEQ ID NO: 94879 - DNA, 22 bp, Artificial Sequence
  Synthetic oligonucleotide; TTT chr11 5289017 5289038 5289034 5289039 +
gtattctgtttcgtgaggcaag

SEQ ID NO: 94880 - DNA, 22 bp, Artificial Sequence
  Synthetic oligonucleotide; TTG chr11 5289018 5289039 5289035 5289040 +
tattctgtttcgtgaggcaagg

SEQ ID NO: 94881 - DNA, 22 bp, Artificial Sequence
  Synthetic oligonucleotide; TTC chr11 5289023 5289044 5289040 5289045 +
tgtttcgtgaggcaaggtttca

SEQ ID NO: 94882 - DNA, 22 bp, Artificial Sequence
  Synthetic oligonucleotide; CTG chr11 5289025 5289046 5289042 5289047 +
tttcgtgaggcaaggtttcact

SEQ ID NO: 94883 - DNA, 22 bp, Artificial Sequence
  Synthetic oligonucleotide; TTT chr11 5289028 5289049 5289045 5289050 +
cgtgaggcaaggtttcactctg

SEQ ID NO: 94884 - DNA, 22 bp, Artificial Sequence
  Synthetic oligonucleotide; TTC chr11 5289029 5289050 5289046 5289051 +
gtgaggcaaggtttcactctgc

SEQ ID NO: 94885 - DNA, 22 bp, Artificial Sequence
  Synthetic oligonucleotide; TTT chr11 5289043 5289064 5289060 5289065 +
cactctgctgtccaggctggag

SEQ ID NO: 94886 - DNA, 22 bp, Artificial Sequence
  Synthetic oligonucleotide; TTC chr11 5289044 5289065 5289061 5289066 +
actctgctgtccaggctggagt

SEQ ID NO: 94887 - DNA, 22 bp, Artificial Sequence
  Synthetic oligonucleotide; CTC chr11 5289048 5289069 5289065 5289070 +
tgctgtccaggctggagtgcag

SEQ ID NO: 94888 - DNA, 22 bp, Artificial Sequence
  Synthetic oligonucleotide; CTG chr11 5289050 5289071 5289067 5289072 +
ctgtccaggctggagtgcagtg

SEQ ID NO: 94889 - DNA, 22 bp, Artificial Sequence
  Synthetic oligonucleotide; CTG chr11 5289053 5289074 5289070 5289075 +
tccaggctggagtgcagtggca

SEQ ID NO: 94890 - DNA, 22 bp, Artificial Sequence
  Synthetic oligonucleotide; CTG chr11 5289062 5289083 5289079 5289084 +
gagtgcagtggcaagatcatgt

SEQ ID NO: 94891 - DNA, 22 bp, Artificial Sequence
  Synthetic oligonucleotide; CTC chr11 5289087 5289108 5289104 5289109 +
actgcagccttgacctcctgag

SEQ ID NO: 94892 - DNA, 22 bp, Artificial Sequence
  Synthetic oligonucleotide; CTG chr11 5289091 5289112 5289108 5289113 +
cagccttgacctcctgagctca

SEQ ID NO: 94893 - DNA, 22 bp, Artificial Sequence
  Synthetic oligonucleotide; CTT chr11 5289098 5289119 5289115 5289120 +
gacctcctgagctcaagggatc

SEQ ID NO: 94894 - DNA, 22 bp, Artificial Sequence
  Synthetic oligonucleotide; TTG chr11 5289099 5289120 5289116 5289121 +
acctcctgagctcaagggatcc

SEQ ID NO: 94895 - DNA, 22 bp, Artificial Sequence
  Synthetic oligonucleotide; CTC chr11 5289104 5289125 5289121 5289126 +
ctgagctcaagggatcctccca

SEQ ID NO: 94896 - DNA, 22 bp, Artificial Sequence
  Synthetic oligonucleotide; CTG chr11 5289107 5289128 5289124 5289129 +
agctcaagggatcctcccattt

SEQ ID NO: 94897 - DNA, 22 bp, Artificial Sequence
  Synthetic oligonucleotide; CTC chr11 5289112 5289133 5289129 5289134 +
aagggatcctcccatttcggcc

SEQ ID NO: 94898 - DNA, 22 bp, Artificial Sequence
  Synthetic oligonucleotide; CTC chr11 5289123 5289144 5289140 5289145 +
ccatttcggcctcctgagtagc

SEQ ID NO: 94899 - DNA, 22 bp, Artificial Sequence
  Synthetic oligonucleotide; TTT chr11 5289129 5289150 5289146 5289151 +
cggcctcctgagtagctgggac

SEQ ID NO: 94900 - DNA, 22 bp, Artificial Sequence
  Synthetic oligonucleotide; TTC chr11 5289130 5289151 5289147 5289152 +
ggcctcctgagtagctgggact

SEQ ID NO: 94901 - DNA, 22 bp, Artificial Sequence
  Synthetic oligonucleotide; CTC chr11 5289136 5289157 5289153 5289158 +
ctgagtagctgggactacaggt

SEQ ID NO: 94902 - DNA, 22 bp, Artificial Sequence
  Synthetic oligonucleotide; CTG chr11 5289139 5289160 5289156 5289161 +
agtagctgggactacaggtgta

SEQ ID NO: 94903 - DNA, 22 bp, Artificial Sequence
  Synthetic oligonucleotide; CTG chr11 5289147 5289168 5289164 5289169 +
ggactacaggtgtacatcacat

SEQ ID NO: 94904 - DNA, 22 bp, Artificial Sequence
  Synthetic oligonucleotide; CTA chr11 5289153 5289174 5289170 5289175 +
caggtgtacatcacatgcctgg

SEQ ID NO: 94905 - DNA, 22 bp, Artificial Sequence
  Synthetic oligonucleotide; CTG chr11 5289174 5289195 5289191 5289196 +
gctaatttttttttttttttta

SEQ ID NO: 94906 - DNA, 22 bp, Artificial Sequence
  Synthetic oligonucleotide; CTA chr11 5289178 5289199 5289195 5289200 +
attttttttttttttttaagta

SEQ ID NO: 94907 - DNA, 22 bp, Artificial Sequence
  Synthetic oligonucleotide; TTT chr11 5289182 5289203 5289199 5289204 +
tttttttttttttaagtagaga

SEQ ID NO: 94908 - DNA, 22 bp, Artificial Sequence
  Synthetic oligonucleotide; TTT chr11 5289183 5289204 5289200 5289205 +
ttttttttttttaagtagagac

SEQ ID NO: 94909 - DNA, 22 bp, Artificial Sequence
  Synthetic oligonucleotide; TTT chr11 5289184 5289205 5289201 5289206 +
tttttttttttaagtagagacg

SEQ ID NO: 94910 - DNA, 22 bp, Artificial Sequence
  Synthetic oligonucleotide; TTT chr11 5289185 5289206 5289202 5289207 +
ttttttttttaagtagagacga

SEQ ID NO: 94911 - DNA, 22 bp, Artificial Sequence
  Synthetic oligonucleotide; TTT chr11 5289186 5289207 5289203 5289208 +
tttttttttaagtagagacgag

SEQ ID NO: 94912 - DNA, 22 bp, Artificial Sequence
  Synthetic oligonucleotide; TTT chr11 5289187 5289208 5289204 5289209 +
ttttttttaagtagagacgagg

SEQ ID NO: 94913 - DNA, 22 bp, Artificial Sequence
  Synthetic oligonucleotide; TTT chr11 5289188 5289209 5289205 5289210 +
tttttttaagtagagacgaggt

SEQ ID NO: 94914 - DNA, 22 bp, Artificial Sequence
  Synthetic oligonucleotide; TTT chr11 5289189 5289210 5289206 5289211 +
ttttttaagtagagacgaggtc

SEQ ID NO: 94915 - DNA, 22 bp, Artificial Sequence
  Synthetic oligonucleotide; TTT chr11 5289190 5289211 5289207 5289212 +
tttttaagtagagacgaggtct

SEQ ID NO: 94916 - DNA, 22 bp, Artificial Sequence
  Synthetic oligonucleotide; TTT chr11 5289191 5289212 5289208 5289213 +
ttttaagtagagacgaggtctt

SEQ ID NO: 94917 - DNA, 22 bp, Artificial Sequence
  Synthetic oligonucleotide; TTT chr11 5289192 5289213 5289209 5289214 +
tttaagtagagacgaggtcttg

SEQ ID NO: 94918 - DNA, 22 bp, Artificial Sequence
  Synthetic oligonucleotide; TTT chr11 5289193 5289214 5289210 5289215 +
ttaagtagagacgaggtcttgc

SEQ ID NO: 94919 - DNA, 22 bp, Artificial Sequence
  Synthetic oligonucleotide; TTT chr11 5289194 5289215 5289211 5289216 +
taagtagagacgaggtcttgct

SEQ ID NO: 94920 - DNA, 22 bp, Artificial Sequence
  Synthetic oligonucleotide; TTT chr11 5289195 5289216 5289212 5289217 +
aagtagagacgaggtcttgcta

SEQ ID NO: 94921 - DNA, 22 bp, Artificial Sequence
  Synthetic oligonucleotide; TTA chr11 5289196 5289217 5289213 5289218 +
agtagagacgaggtcttgctat

SEQ ID NO: 94922 - DNA, 22 bp, Artificial Sequence
  Synthetic oligonucleotide; CTT chr11 5289213 5289234 5289230 5289235 +
gctatgttgtccaggataatat

SEQ ID NO: 94923 - DNA, 22 bp, Artificial Sequence
  Synthetic oligonucleotide; TTG chr11 5289214 5289235 5289231 5289236 +
ctatgttgtccaggataatatc

SEQ ID NO: 94924 - DNA, 22 bp, Artificial Sequence
  Synthetic oligonucleotide; CTA chr11 5289217 5289238 5289234 5289239 +
tgttgtccaggataatatcaaa

SEQ ID NO: 94925 - DNA, 22 bp, Artificial Sequence
  Synthetic oligonucleotide; TTG chr11 5289222 5289243 5289239 5289244 +
tccaggataatatcaaactctt

SEQ ID NO: 94926 - DNA, 22 bp, Artificial Sequence
  Synthetic oligonucleotide; CTC chr11 5289242 5289263 5289259 5289264 +
ttgagctcaagcagtcctccca

SEQ ID NO: 94927 - DNA, 22 bp, Artificial Sequence
  Synthetic oligonucleotide; CTT chr11 5289244 5289265 5289261 5289266 +
gagctcaagcagtcctcccact

SEQ ID NO: 94928 - DNA, 22 bp, Artificial Sequence
  Synthetic oligonucleotide; TTG chr11 5289245 5289266 5289262 5289267 +
agctcaagcagtcctcccactt

SEQ ID NO: 94929 - DNA, 22 bp, Artificial Sequence
  Synthetic oligonucleotide; CTC chr11 5289250 5289271 5289267 5289272 +
aagcagtcctcccacttctacc

SEQ ID NO: 94930 - DNA, 22 bp, Artificial Sequence
  Synthetic oligonucleotide; CTC chr11 5289261 5289282 5289278 5289283 +
ccacttctacctctcaagtgct

SEQ ID NO: 94931 - DNA, 22 bp, Artificial Sequence
  Synthetic oligonucleotide; CTT chr11 5289267 5289288 5289284 5289289 +
ctacctctcaagtgctggaatt

SEQ ID NO: 94932 - DNA, 22 bp, Artificial Sequence
  Synthetic oligonucleotide; TTC chr11 5289268 5289289 5289285 5289290 +
tacctctcaagtgctggaatta

SEQ ID NO: 94933 - DNA, 22 bp, Artificial Sequence
  Synthetic oligonucleotide; CTA chr11 5289270 5289291 5289287 5289292 +
cctctcaagtgctggaattaca

SEQ ID NO: 94934 - DNA, 22 bp, Artificial Sequence
  Synthetic oligonucleotide; CTC chr11 5289274 5289295 5289291 5289296 +
tcaagtgctggaattacagaca

SEQ ID NO: 94935 - DNA, 22 bp, Artificial Sequence
  Synthetic oligonucleotide; CTC chr11 5289276 5289297 5289293 5289298 +
aagtgctggaattacagacatg

SEQ ID NO: 94936 - DNA, 22 bp, Artificial Sequence
  Synthetic oligonucleotide; CTG chr11 5289284 5289305 5289301 5289306 +
gaattacagacatgagccacca

SEQ ID NO: 94937 - DNA, 22 bp, Artificial Sequence
  Synthetic oligonucleotide; TTA chr11 5289290 5289311 5289307 5289312 +
cagacatgagccaccactcctg

SEQ ID NO: 94938 - DNA, 22 bp, Artificial Sequence
  Synthetic oligonucleotide; CTC chr11 5289309 5289330 5289326 5289331 +
ctggcttgcagactatttaaat

SEQ ID NO: 94939 - DNA, 22 bp, Artificial Sequence
  Synthetic oligonucleotide; CTG chr11 5289312 5289333 5289329 5289334 +
gcttgcagactatttaaatgac

SEQ ID NO: 94940 - DNA, 22 bp, Artificial Sequence
  Synthetic oligonucleotide; CTT chr11 5289316 5289337 5289333 5289338 +
gcagactatttaaatgactaat

SEQ ID NO: 94941 - DNA, 22 bp, Artificial Sequence
  Synthetic oligonucleotide; TTG chr11 5289317 5289338 5289334 5289339 +
cagactatttaaatgactaatt

SEQ ID NO: 94942 - DNA, 22 bp, Artificial Sequence
  Synthetic oligonucleotide; CTA chr11 5289324 5289345 5289341 5289346 +
tttaaatgactaattcctgaca

SEQ ID NO: 94943 - DNA, 22 bp, Artificial Sequence
  Synthetic oligonucleotide; TTT chr11 5289327 5289348 5289344 5289349 +
aaatgactaattcctgacacta

SEQ ID NO: 94944 - DNA, 22 bp, Artificial Sequence
  Synthetic oligonucleotide; TTA chr11 5289328 5289349 5289345 5289350 +
aatgactaattcctgacactac

SEQ ID NO: 94945 - DNA, 22 bp, Artificial Sequence
  Synthetic oligonucleotide; CTA chr11 5289336 5289357 5289353 5289358 +
attcctgacactacttgaggga

SEQ ID NO: 94946 - DNA, 22 bp, Artificial Sequence
  Synthetic oligonucleotide; TTC chr11 5289340 5289361 5289357 5289362 +
ctgacactacttgagggatact

SEQ ID NO: 94947 - DNA, 22 bp, Artificial Sequence
  Synthetic oligonucleotide; CTG chr11 5289343 5289364 5289360 5289365 +
acactacttgagggatactaga

SEQ ID NO: 94948 - DNA, 22 bp, Artificial Sequence
  Synthetic oligonucleotide; CTA chr11 5289349 5289370 5289366 5289371 +
cttgagggatactagacagtag

SEQ ID NO: 94949 - DNA, 22 bp, Artificial Sequence
  Synthetic oligonucleotide; CTT chr11 5289352 5289373 5289369 5289374 +
gagggatactagacagtagaca

SEQ ID NO: 94950 - DNA, 22 bp, Artificial Sequence
  Synthetic oligonucleotide; TTG chr11 5289353 5289374 5289370 5289375 +
agggatactagacagtagacaa

SEQ ID NO: 94951 - DNA, 22 bp, Artificial Sequence
  Synthetic oligonucleotide; CTA chr11 5289363 5289384 5289380 5289385 +
gacagtagacaacacatcttta

SEQ ID NO: 94952 - DNA, 22 bp, Artificial Sequence
  Synthetic oligonucleotide; CTT chr11 5289383 5289404 5289400 5289405 +
taatataccaaatgggtgactg

SEQ ID NO: 94953 - DNA, 22 bp, Artificial Sequence
  Synthetic oligonucleotide; TTT chr11 5289384 5289405 5289401 5289406 +
aatataccaaatgggtgactgt

SEQ ID NO: 94954 - DNA, 22 bp, Artificial Sequence
  Synthetic oligonucleotide; TTA chr11 5289385 5289406 5289402 5289407 +
atataccaaatgggtgactgta

SEQ ID NO: 94955 - DNA, 22 bp, Artificial Sequence
  Synthetic oligonucleotide; CTG chr11 5289405 5289426 5289422 5289427 +
tagggttgagagggagattaga

SEQ ID NO: 94956 - DNA, 22 bp, Artificial Sequence
  Synthetic oligonucleotide; TTG chr11 5289413 5289434 5289430 5289435 +
agagggagattagaattcaatg

SEQ ID NO: 94957 - DNA, 22 bp, Artificial Sequence
  Synthetic oligonucleotide; TTA chr11 5289425 5289446 5289442 5289447 +
gaattcaatgttttatgaccaa

SEQ ID NO: 94958 - DNA, 22 bp, Artificial Sequence
  Synthetic oligonucleotide; TTC chr11 5289431 5289452 5289448 5289453 +
aatgttttatgaccaaaaaggc

SEQ ID NO: 94959 - DNA, 22 bp, Artificial Sequence
  Synthetic oligonucleotide; TTT chr11 5289438 5289459 5289455 5289460 +
tatgaccaaaaaggcttaaatc

SEQ ID NO: 94960 - DNA, 22 bp, Artificial Sequence
  Synthetic oligonucleotide; TTT chr11 5289439 5289460 5289456 5289461 +
atgaccaaaaaggcttaaatca

SEQ ID NO: 94961 - DNA, 22 bp, Artificial Sequence
  Synthetic oligonucleotide; TTA chr11 5289440 5289461 5289457 5289462 +
tgaccaaaaaggcttaaatcag

SEQ ID NO: 94962 - DNA, 22 bp, Artificial Sequence
  Synthetic oligonucleotide; CTT chr11 5289455 5289476 5289472 5289477 +
aaatcaggcacaagcttaggtc

SEQ ID NO: 94963 - DNA, 22 bp, Artificial Sequence
  Synthetic oligonucleotide; TTA chr11 5289456 5289477 5289473 5289478 +
aatcaggcacaagcttaggtct

SEQ ID NO: 94964 - DNA, 22 bp, Artificial Sequence
  Synthetic oligonucleotide; CTT chr11 5289472 5289493 5289489 5289494 +
aggtcttttcaactgtgaggac

SEQ ID NO: 94965 - DNA, 22 bp, Artificial Sequence
  Synthetic oligonucleotide; TTA chr11 5289473 5289494 5289490 5289495 +
ggtcttttcaactgtgaggacc

SEQ ID NO: 94966 - DNA, 22 bp, Artificial Sequence
  Synthetic oligonucleotide; CTT chr11 5289479 5289500 5289496 5289501 +
ttcaactgtgaggaccggactg

SEQ ID NO: 94967 - DNA, 22 bp, Artificial Sequence
  Synthetic oligonucleotide; TTT chr11 5289480 5289501 5289497 5289502 +
tcaactgtgaggaccggactga

SEQ ID NO: 94968 - DNA, 22 bp, Artificial Sequence
  Synthetic oligonucleotide; TTT chr11 5289481 5289502 5289498 5289503 +
caactgtgaggaccggactgaa

SEQ ID NO: 94969 - DNA, 22 bp, Artificial Sequence
  Synthetic oligonucleotide; TTC chr11 5289482 5289503 5289499 5289504 +
aactgtgaggaccggactgaaa

SEQ ID NO: 94970 - DNA, 22 bp, Artificial Sequence
  Synthetic oligonucleotide; CTG chr11 5289487 5289508 5289504 5289509 +
tgaggaccggactgaaagtgtg

SEQ ID NO: 94971 - DNA, 22 bp, Artificial Sequence
  Synthetic oligonucleotide; CTG chr11 5289501 5289522 5289518 5289523 +
aaagtgtgcagttcaaggccct

SEQ ID NO: 94972 - DNA, 22 bp, Artificial Sequence
  Synthetic oligonucleotide; TTC chr11 5289515 5289536 5289532 5289537 +
aaggccctgtagttgctgttta

SEQ ID NO: 94973 - DNA, 22 bp, Artificial Sequence
  Synthetic oligonucleotide; CTG chr11 5289524 5289545 5289541 5289546 +
tagttgctgtttaactgttccc

SEQ ID NO: 94974 - DNA, 22 bp, Artificial Sequence
  Synthetic oligonucleotide; TTG chr11 5289530 5289551 5289547 5289552 +
ctgtttaactgttcccaggtgg

SEQ ID NO: 94975 - DNA, 22 bp, Artificial Sequence
  Synthetic oligonucleotide; CTG chr11 5289533 5289554 5289550 5289555 +
tttaactgttcccaggtggaag

SEQ ID NO: 94976 - DNA, 22 bp, Artificial Sequence
  Synthetic oligonucleotide; TTT chr11 5289536 5289557 5289553 5289558 +
aactgttcccaggtggaagtct

SEQ ID NO: 94977 - DNA, 22 bp, Artificial Sequence
  Synthetic oligonucleotide; TTA chr11 5289537 5289558 5289554 5289559 +
actgttcccaggtggaagtctc

SEQ ID NO: 94978 - DNA, 22 bp, Artificial Sequence
  Synthetic oligonucleotide; CTG chr11 5289541 5289562 5289558 5289563 +
ttcccaggtggaagtctcttca

SEQ ID NO: 94979 - DNA, 22 bp, Artificial Sequence
  Synthetic oligonucleotide; TTC chr11 5289544 5289565 5289561 5289566 +
ccaggtggaagtctcttcaaag

SEQ ID NO: 94980 - DNA, 22 bp, Artificial Sequence
  Synthetic oligonucleotide; CTC chr11 5289559 5289580 5289576 5289581 +
ttcaaagaaccactggtgcaaa

SEQ ID NO: 94981 - DNA, 22 bp, Artificial Sequence
  Synthetic oligonucleotide; CTT chr11 5289561 5289582 5289578 5289583 +
caaagaaccactggtgcaaaaa

SEQ ID NO: 94982 - DNA, 22 bp, Artificial Sequence
  Synthetic oligonucleotide; TTC chr11 5289562 5289583 5289579 5289584 +
aaagaaccactggtgcaaaaag

SEQ ID NO: 94983 - DNA, 22 bp, Artificial Sequence
  Synthetic oligonucleotide; CTG chr11 5289574 5289595 5289591 5289596 +
gtgcaaaaagggaactacctgg

SEQ ID NO: 94984 - DNA, 22 bp, Artificial Sequence
  Synthetic oligonucleotide; CTA chr11 5289591 5289612 5289608 5289613 +
cctggggataaatatttcctcc

SEQ ID NO: 94985 - DNA, 22 bp, Artificial Sequence
  Synthetic oligonucleotide; CTG chr11 5289595 5289616 5289612 5289617 +
gggataaatatttcctccagaa

SEQ ID NO: 94986 - DNA, 22 bp, Artificial Sequence
  Synthetic oligonucleotide; TTT chr11 5289608 5289629 5289625 5289630 +
cctccagaaagggggaaagtgc

SEQ ID NO: 94987 - DNA, 22 bp, Artificial Sequence
  Synthetic oligonucleotide; TTC chr11 5289609 5289630 5289626 5289631 +
ctccagaaagggggaaagtgca

SEQ ID NO: 94988 - DNA, 22 bp, Artificial Sequence
  Synthetic oligonucleotide; CTC chr11 5289612 5289633 5289629 5289634 +
cagaaagggggaaagtgcaagc

SEQ ID NO: 94989 - DNA, 22 bp, Artificial Sequence
  Synthetic oligonucleotide; CTC chr11 5289636 5289657 5289653 5289658 +
ccctaccaaaagcaccaggcaa

SEQ ID NO: 94990 - DNA, 22 bp, Artificial Sequence
  Synthetic oligonucleotide; CTA chr11 5289641 5289662 5289658 5289663 +
ccaaaagcaccaggcaagtcct

SEQ ID NO: 94991 - DNA, 22 bp, Artificial Sequence
  Synthetic oligonucleotide; CTT chr11 5289664 5289685 5289681 5289686 +
gtctattttccctgaagttctc

SEQ ID NO: 94992 - DNA, 22 bp, Artificial Sequence
  Synthetic oligonucleotide; TTG chr11 5289665 5289686 5289682 5289687 +
tctattttccctgaagttctca

SEQ ID NO: 94993 - DNA, 22 bp, Artificial Sequence
  Synthetic oligonucleotide; CTA chr11 5289669 5289690 5289686 5289691 +
ttttccctgaagttctcaaaga

SEQ ID NO: 94994 - DNA, 22 bp, Artificial Sequence
  Synthetic oligonucleotide; TTT chr11 5289672 5289693 5289689 5289694 +
tccctgaagttctcaaagaaat

SEQ ID NO: 94995 - DNA, 22 bp, Artificial Sequence
  Synthetic oligonucleotide; TTT chr11 5289673 5289694 5289690 5289695 +
ccctgaagttctcaaagaaatg

SEQ ID NO: 94996 - DNA, 22 bp, Artificial Sequence
  Synthetic oligonucleotide; TTC chr11 5289674 5289695 5289691 5289696 +
cctgaagttctcaaagaaatga

SEQ ID NO: 94997 - DNA, 22 bp, Artificial Sequence
  Synthetic oligonucleotide; CTG chr11 5289678 5289699 5289695 5289700 +
aagttctcaaagaaatgagacc

SEQ ID NO: 94998 - DNA, 22 bp, Artificial Sequence
  Synthetic oligonucleotide; TTC chr11 5289684 5289705 5289701 5289706 +
tcaaagaaatgagacccttgtt

SEQ ID NO: 94999 - DNA, 22 bp, Artificial Sequence
  Synthetic oligonucleotide; CTC chr11 5289686 5289707 5289703 5289708 +
aaagaaatgagacccttgttta

SEQ ID NO: 95000 - DNA, 22 bp, Artificial Sequence
  Synthetic oligonucleotide; CTT chr11 5289703 5289724 5289720 5289725 +
gtttacctttaagattagagaa

SEQ ID NO: 95001 - DNA, 22 bp, Artificial Sequence
  Synthetic oligonucleotide; TTG chr11 5289704 5289725 5289721 5289726 +
tttacctttaagattagagaag

SEQ ID NO: 95002 - DNA, 22 bp, Artificial Sequence
  Synthetic oligonucleotide; TTT chr11 5289707 5289728 5289724 5289729 +
acctttaagattagagaaggct

SEQ ID NO: 95003 - DNA, 22 bp, Artificial Sequence
  Synthetic oligonucleotide; TTA chr11 5289708 5289729 5289725 5289730 +
cctttaagattagagaaggctt

SEQ ID NO: 95004 - DNA, 22 bp, Artificial Sequence
  Synthetic oligonucleotide; CTT chr11 5289712 5289733 5289729 5289734 +
taagattagagaaggcttgaaa

SEQ ID NO: 95005 - DNA, 22 bp, Artificial Sequence
  Synthetic oligonucleotide; TTT chr11 5289713 5289734 5289730 5289735 +
aagattagagaaggcttgaaaa

SEQ ID NO: 95006 - DNA, 22 bp, Artificial Sequence
  Synthetic oligonucleotide; TTA chr11 5289714 5289735 5289731 5289736 +
agattagagaaggcttgaaaag

SEQ ID NO: 95007 - DNA, 22 bp, Artificial Sequence
  Synthetic oligonucleotide; TTA chr11 5289720 5289741 5289737 5289742 +
gagaaggcttgaaaagtttgag

SEQ ID NO: 95008 - DNA, 22 bp, Artificial Sequence
  Synthetic oligonucleotide; CTT chr11 5289730 5289751 5289747 5289752 +
gaaaagtttgagctgtgccttt

SEQ ID NO: 95009 - DNA, 22 bp, Artificial Sequence
  Synthetic oligonucleotide; TTG chr11 5289731 5289752 5289748 5289753 +
aaaagtttgagctgtgcctttg

SEQ ID NO: 95010 - DNA, 22 bp, Artificial Sequence
  Synthetic oligonucleotide; TTT chr11 5289739 5289760 5289756 5289761 +
gagctgtgcctttggaggccaa

SEQ ID NO: 95011 - DNA, 22 bp, Artificial Sequence
  Synthetic oligonucleotide; TTG chr11 5289740 5289761 5289757 5289762 +
agctgtgcctttggaggccaac

SEQ ID NO: 95012 - DNA, 22 bp, Artificial Sequence
  Synthetic oligonucleotide; CTG chr11 5289745 5289766 5289762 5289767 +
tgcctttggaggccaacaaact

SEQ ID NO: 95013 - DNA, 22 bp, Artificial Sequence
  Synthetic oligonucleotide; CTT chr11 5289751 5289772 5289768 5289773 +
tggaggccaacaaacttttctc

SEQ ID NO: 95014 - DNA, 22 bp, Artificial Sequence
  Synthetic oligonucleotide; TTT chr11 5289752 5289773 5289769 5289774 +
ggaggccaacaaacttttctcc

SEQ ID NO: 95015 - DNA, 22 bp, Artificial Sequence
  Synthetic oligonucleotide; TTG chr11 5289753 5289774 5289770 5289775 +
gaggccaacaaacttttctcct

SEQ ID NO: 95016 - DNA, 22 bp, Artificial Sequence
  Synthetic oligonucleotide; CTT chr11 5289768 5289789 5289785 5289790 +
ttctcctttgttgaccaagttc

SEQ ID NO: 95017 - DNA, 22 bp, Artificial Sequence
  Synthetic oligonucleotide; TTT chr11 5289769 5289790 5289786 5289791 +
tctcctttgttgaccaagttca

SEQ ID NO: 95018 - DNA, 22 bp, Artificial Sequence
  Synthetic oligonucleotide; TTT chr11 5289770 5289791 5289787 5289792 +
ctcctttgttgaccaagttcag

SEQ ID NO: 95019 - DNA, 22 bp, Artificial Sequence
  Synthetic oligonucleotide; TTC chr11 5289771 5289792 5289788 5289793 +
tcctttgttgaccaagttcagc

SEQ ID NO: 95020 - DNA, 22 bp, Artificial Sequence
  Synthetic oligonucleotide; CTC chr11 5289773 5289794 5289790 5289795 +
ctttgttgaccaagttcagctc

SEQ ID NO: 95021 - DNA, 22 bp, Artificial Sequence
  Synthetic oligonucleotide; CTT chr11 5289776 5289797 5289793 5289798 +
tgttgaccaagttcagctctcc

SEQ ID NO: 95022 - DNA, 22 bp, Artificial Sequence
  Synthetic oligonucleotide; TTT chr11 5289777 5289798 5289794 5289799 +
gttgaccaagttcagctctcct

SEQ ID NO: 95023 - DNA, 22 bp, Artificial Sequence
  Synthetic oligonucleotide; TTG chr11 5289778 5289799 5289795 5289800 +
ttgaccaagttcagctctcctg

SEQ ID NO: 95024 - DNA, 22 bp, Artificial Sequence
  Synthetic oligonucleotide; TTG chr11 5289781 5289802 5289798 5289803 +
accaagttcagctctcctgtat

SEQ ID NO: 95025 - DNA, 22 bp, Artificial Sequence
  Synthetic oligonucleotide; TTC chr11 5289790 5289811 5289807 5289812 +
agctctcctgtatgcttccaag

SEQ ID NO: 95026 - DNA, 22 bp, Artificial Sequence
  Synthetic oligonucleotide; CTC chr11 5289795 5289816 5289812 5289817 +
tcctgtatgcttccaaggtctg

SEQ ID NO: 95027 - DNA, 22 bp, Artificial Sequence
  Synthetic oligonucleotide; CTC chr11 5289797 5289818 5289814 5289819 +
ctgtatgcttccaaggtctgtt

SEQ ID NO: 95028 - DNA, 22 bp, Artificial Sequence
  Synthetic oligonucleotide; CTG chr11 5289800 5289821 5289817 5289822 +
tatgcttccaaggtctgttgca

SEQ ID NO: 95029 - DNA, 22 bp, Artificial Sequence
  Synthetic oligonucleotide; CTT chr11 5289807 5289828 5289824 5289829 +
ccaaggtctgttgcatcaagag

SEQ ID NO: 95030 - DNA, 22 bp, Artificial Sequence
  Synthetic oligonucleotide; TTC chr11 5289808 5289829 5289825 5289830 +
caaggtctgttgcatcaagagt

SEQ ID NO: 95031 - DNA, 22 bp, Artificial Sequence
  Synthetic oligonucleotide; CTG chr11 5289817 5289838 5289834 5289839 +
ttgcatcaagagtgagaattga

SEQ ID NO: 95032 - DNA, 22 bp, Artificial Sequence
  Synthetic oligonucleotide; TTG chr11 5289820 5289841 5289837 5289842 +
catcaagagtgagaattgaagg

SEQ ID NO: 95033 - DNA, 22 bp, Artificial Sequence
  Synthetic oligonucleotide; TTG chr11 5289838 5289859 5289855 5289860 +
aaggtcttagaagctgggatct

SEQ ID NO: 95034 - DNA, 22 bp, Artificial Sequence
  Synthetic oligonucleotide; CTT chr11 5289846 5289867 5289863 5289868 +
agaagctgggatctcagatgta

SEQ ID NO: 95035 - DNA, 22 bp, Artificial Sequence
  Synthetic oligonucleotide; TTA chr11 5289847 5289868 5289864 5289869 +
gaagctgggatctcagatgtag

SEQ ID NO: 95036 - DNA, 22 bp, Artificial Sequence
  Synthetic oligonucleotide; CTG chr11 5289854 5289875 5289871 5289876 +
ggatctcagatgtagggaaaag

SEQ ID NO: 95037 - DNA, 22 bp, Artificial Sequence
  Synthetic oligonucleotide; CTC chr11 5289861 5289882 5289878 5289883 +
agatgtagggaaaagaggagat

SEQ ID NO: 95038 - DNA, 22 bp, Artificial Sequence
  Synthetic oligonucleotide; TTT chr11 5289885 5289906 5289902 5289907 +
cctgttcactcactgttaagat

SEQ ID NO: 95039 - DNA, 22 bp, Artificial Sequence
  Synthetic oligonucleotide; TTC chr11 5289886 5289907 5289903 5289908 +
ctgttcactcactgttaagata

SEQ ID NO: 95040 - DNA, 22 bp, Artificial Sequence
  Synthetic oligonucleotide; CTG chr11 5289889 5289910 5289906 5289911 +
ttcactcactgttaagatatgg

SEQ ID NO: 95041 - DNA, 22 bp, Artificial Sequence
  Synthetic oligonucleotide; TTC chr11 5289892 5289913 5289909 5289914 +
actcactgttaagatatggctg

SEQ ID NO: 95042 - DNA, 22 bp, Artificial Sequence
  Synthetic oligonucleotide; CTC chr11 5289896 5289917 5289913 5289918 +
actgttaagatatggctgaaat

SEQ ID NO: 95043 - DNA, 22 bp, Artificial Sequence
  Synthetic oligonucleotide; CTG chr11 5289900 5289921 5289917 5289922 +
ttaagatatggctgaaattttt

SEQ ID NO: 95044 - DNA, 22 bp, Artificial Sequence
  Synthetic oligonucleotide; TTA chr11 5289903 5289924 5289920 5289925 +
agatatggctgaaattttttga

SEQ ID NO: 95045 - DNA, 22 bp, Artificial Sequence
  Synthetic oligonucleotide; CTG chr11 5289914 5289935 5289931 5289936 +
aaattttttgatctagtcatct

SEQ ID NO: 95046 - DNA, 22 bp, Artificial Sequence
  Synthetic oligonucleotide; TTT chr11 5289920 5289941 5289937 5289942 +
tttgatctagtcatctacaaag

SEQ ID NO: 95047 - DNA, 22 bp, Artificial Sequence
  Synthetic oligonucleotide; TTT chr11 5289921 5289942 5289938 5289943 +
ttgatctagtcatctacaaagc

SEQ ID NO: 95048 - DNA, 22 bp, Artificial Sequence
  Synthetic oligonucleotide; TTT chr11 5289922 5289943 5289939 5289944 +
tgatctagtcatctacaaagca

SEQ ID NO: 95049 - DNA, 22 bp, Artificial Sequence
  Synthetic oligonucleotide; TTT chr11 5289923 5289944 5289940 5289945 +
gatctagtcatctacaaagcat

SEQ ID NO: 95050 - DNA, 22 bp, Artificial Sequence
  Synthetic oligonucleotide; TTG chr11 5289924 5289945 5289941 5289946 +
atctagtcatctacaaagcatg

SEQ ID NO: 95051 - DNA, 22 bp, Artificial Sequence
  Synthetic oligonucleotide; CTA chr11 5289929 5289950 5289946 5289951 +
gtcatctacaaagcatgagttg

SEQ ID NO: 95052 - DNA, 22 bp, Artificial Sequence
  Synthetic oligonucleotide; CTA chr11 5289937 5289958 5289954 5289959 +
caaagcatgagttgtgggtcag

SEQ ID NO: 95053 - DNA, 22 bp, Artificial Sequence
  Synthetic oligonucleotide; TTG chr11 5289951 5289972 5289968 5289973 +
tgggtcagaaattgtttttcac

SEQ ID NO: 95054 - DNA, 22 bp, Artificial Sequence
  Synthetic oligonucleotide; TTG chr11 5289965 5289986 5289982 5289987 +
tttttcacatcttttgacttcc

SEQ ID NO: 95055 - DNA, 22 bp, Artificial Sequence
  Synthetic oligonucleotide; TTT chr11 5289968 5289989 5289985 5289990 +
ttcacatcttttgacttccttt

SEQ ID NO: 95056 - DNA, 22 bp, Artificial Sequence
  Synthetic oligonucleotide; TTT chr11 5289969 5289990 5289986 5289991 +
tcacatcttttgacttcctttg

SEQ ID NO: 95057 - DNA, 22 bp, Artificial Sequence
  Synthetic oligonucleotide; TTT chr11 5289970 5289991 5289987 5289992 +
cacatcttttgacttcctttga

SEQ ID NO: 95058 - DNA, 22 bp, Artificial Sequence
  Synthetic oligonucleotide; TTC chr11 5289971 5289992 5289988 5289993 +
acatcttttgacttcctttgac

SEQ ID NO: 95059 - DNA, 22 bp, Artificial Sequence
  Synthetic oligonucleotide; CTT chr11 5289978 5289999 5289995 5290000 +
ttgacttcctttgacatcagaa

SEQ ID NO: 95060 - DNA, 22 bp, Artificial Sequence
  Synthetic oligonucleotide; TTT chr11 5289979 5290000 5289996 5290001 +
tgacttcctttgacatcagaat

SEQ ID NO: 95061 - DNA, 22 bp, Artificial Sequence
  Synthetic oligonucleotide; TTT chr11 5289980 5290001 5289997 5290002 +
gacttcctttgacatcagaata

SEQ ID NO: 95062 - DNA, 22 bp, Artificial Sequence
  Synthetic oligonucleotide; TTG chr11 5289981 5290002 5289998 5290003 +
acttcctttgacatcagaatat

SEQ ID NO: 95063 - DNA, 22 bp, Artificial Sequence
  Synthetic oligonucleotide; CTT chr11 5289985 5290006 5290002 5290007 +
cctttgacatcagaatataacc

SEQ ID NO: 95064 - DNA, 22 bp, Artificial Sequence
  Synthetic oligonucleotide; TTC chr11 5289986 5290007 5290003 5290008 +
ctttgacatcagaatataacct

SEQ ID NO: 95065 - DNA, 22 bp, Artificial Sequence
  Synthetic oligonucleotide; CTT chr11 5289989 5290010 5290006 5290011 +
tgacatcagaatataacctagg

SEQ ID NO: 95066 - DNA, 22 bp, Artificial Sequence
  Synthetic oligonucleotide; TTT chr11 5289990 5290011 5290007 5290012 +
gacatcagaatataacctagga

SEQ ID NO: 95067 - DNA, 22 bp, Artificial Sequence
  Synthetic oligonucleotide; TTG chr11 5289991 5290012 5290008 5290013 +
acatcagaatataacctaggaa

SEQ ID NO: 95068 - DNA, 22 bp, Artificial Sequence
  Synthetic oligonucleotide; CTA chr11 5290009 5290030 5290026 5290031 +
ggaattgattacttaagtgaag

SEQ ID NO: 95069 - DNA, 22 bp, Artificial Sequence
  Synthetic oligonucleotide; TTG chr11 5290016 5290037 5290033 5290038 +
attacttaagtgaaggcaaggt

SEQ ID NO: 95070 - DNA, 22 bp, Artificial Sequence
  Synthetic oligonucleotide; TTA chr11 5290020 5290041 5290037 5290042 +
cttaagtgaaggcaaggtactt

SEQ ID NO: 95071 - DNA, 22 bp, Artificial Sequence
  Synthetic oligonucleotide; CTT chr11 5290023 5290044 5290040 5290045 +
aagtgaaggcaaggtactttgg

SEQ ID NO: 95072 - DNA, 22 bp, Artificial Sequence
  Synthetic oligonucleotide; TTA chr11 5290024 5290045 5290041 5290046 +
agtgaaggcaaggtactttggt

SEQ ID NO: 95073 - DNA, 22 bp, Artificial Sequence
  Synthetic oligonucleotide; CTT chr11 5290042 5290063 5290059 5290064 +
tggtctggacaggaacattttg

SEQ ID NO: 95074 - DNA, 22 bp, Artificial Sequence
  Synthetic oligonucleotide; TTT chr11 5290043 5290064 5290060 5290065 +
ggtctggacaggaacattttga

SEQ ID NO: 95075 - DNA, 22 bp, Artificial Sequence
  Synthetic oligonucleotide; TTG chr11 5290044 5290065 5290061 5290066 +
gtctggacaggaacattttgaa

SEQ ID NO: 95076 - DNA, 22 bp, Artificial Sequence
  Synthetic oligonucleotide; CTG chr11 5290049 5290070 5290066 5290071 +
gacaggaacattttgaacaagg

SEQ ID NO: 95077 - DNA, 22 bp, Artificial Sequence
  Synthetic oligonucleotide; TTT chr11 5290062 5290083 5290079 5290084 +
tgaacaaggtagggagacagct

SEQ ID NO: 95078 - DNA, 22 bp, Artificial Sequence
  Synthetic oligonucleotide; TTT chr11 5290063 5290084 5290080 5290085 +
gaacaaggtagggagacagcta

SEQ ID NO: 95079 - DNA, 22 bp, Artificial Sequence
  Synthetic oligonucleotide; TTG chr11 5290064 5290085 5290081 5290086 +
aacaaggtagggagacagctat

SEQ ID NO: 95080 - DNA, 22 bp, Artificial Sequence
  Synthetic oligonucleotide; CTA chr11 5290085 5290106 5290102 5290107 +
tgaaggcaagcatttattctat

SEQ ID NO: 95081 - DNA, 22 bp, Artificial Sequence
  Synthetic oligonucleotide; TTT chr11 5290100 5290121 5290117 5290122 +
attctatctatcatctatctgt

SEQ ID NO: 95082 - DNA, 22 bp, Artificial Sequence
  Synthetic oligonucleotide; TTA chr11 5290101 5290122 5290118 5290123 +
ttctatctatcatctatctgtc

SEQ ID NO: 95083 - DNA, 22 bp, Artificial Sequence
  Synthetic oligonucleotide; TTC chr11 5290104 5290125 5290121 5290126 +
tatctatcatctatctgtctat

SEQ ID NO: 95084 - DNA, 22 bp, Artificial Sequence
  Synthetic oligonucleotide; CTA chr11 5290106 5290127 5290123 5290128 +
tctatcatctatctgtctatct

SEQ ID NO: 95085 - DNA, 22 bp, Artificial Sequence
  Synthetic oligonucleotide; CTA chr11 5290110 5290131 5290127 5290132 +
tcatctatctgtctatctatct

SEQ ID NO: 95086 - DNA, 22 bp, Artificial Sequence
  Synthetic oligonucleotide; CTA chr11 5290117 5290138 5290134 5290139 +
tctgtctatctatctatctatt

SEQ ID NO: 95087 - DNA, 22 bp, Artificial Sequence
  Synthetic oligonucleotide; CTG chr11 5290121 5290142 5290138 5290143 +
tctatctatctatctattcttt

SEQ ID NO: 95088 - DNA, 22 bp, Artificial Sequence
  Synthetic oligonucleotide; CTA chr11 5290125 5290146 5290142 5290147 +
tctatctatctattctttcatc

SEQ ID NO: 95089 - DNA, 22 bp, Artificial Sequence
  Synthetic oligonucleotide; CTA chr11 5290129 5290150 5290146 5290151 +
tctatctattctttcatccact

SEQ ID NO: 95090 - DNA, 22 bp, Artificial Sequence
  Synthetic oligonucleotide; CTA chr11 5290133 5290154 5290150 5290155 +
tctattctttcatccacttatt

SEQ ID NO: 95091 - DNA, 22 bp, Artificial Sequence
  Synthetic oligonucleotide; CTA chr11 5290137 5290158 5290154 5290159 +
ttctttcatccacttatttata

SEQ ID NO: 95092 - DNA, 22 bp, Artificial Sequence
  Synthetic oligonucleotide; TTC chr11 5290140 5290161 5290157 5290162 +
tttcatccacttatttatacat

SEQ ID NO: 95093 - DNA, 22 bp, Artificial Sequence
  Synthetic oligonucleotide; CTT chr11 5290142 5290163 5290159 5290164 +
tcatccacttatttatacattt

SEQ ID NO: 95094 - DNA, 22 bp, Artificial Sequence
  Synthetic oligonucleotide; TTT chr11 5290143 5290164 5290160 5290165 +
catccacttatttatacattta

SEQ ID NO: 95095 - DNA, 22 bp, Artificial Sequence
  Synthetic oligonucleotide; TTC chr11 5290144 5290165 5290161 5290166 +
atccacttatttatacatttaa

SEQ ID NO: 95096 - DNA, 22 bp, Artificial Sequence
  Synthetic oligonucleotide; CTT chr11 5290152 5290173 5290169 5290174 +
atttatacatttaaacaaaaag

SEQ ID NO: 95097 - DNA, 22 bp, Artificial Sequence
  Synthetic oligonucleotide; TTA chr11 5290153 5290174 5290170 5290175 +
tttatacatttaaacaaaaagt

SEQ ID NO: 95098 - DNA, 22 bp, Artificial Sequence
  Synthetic oligonucleotide; TTT chr11 5290156 5290177 5290173 5290178 +
atacatttaaacaaaaagtata

SEQ ID NO: 95099 - DNA, 22 bp, Artificial Sequence
  Synthetic oligonucleotide; TTA chr11 5290157 5290178 5290174 5290179 +
tacatttaaacaaaaagtatag

SEQ ID NO: 95100 - DNA, 22 bp, Artificial Sequence
  Synthetic oligonucleotide; TTT chr11 5290164 5290185 5290181 5290186 +
aaacaaaaagtatagagcgtag

SEQ ID NO: 95101 - DNA, 22 bp, Artificial Sequence
  Synthetic oligonucleotide; TTA chr11 5290165 5290186 5290182 5290187 +
aacaaaaagtatagagcgtagt

SEQ ID NO: 95102 - DNA, 22 bp, Artificial Sequence
  Synthetic oligonucleotide; TTT chr11 5290194 5290215 5290211 5290216 +
gtaagtgctcagggctgtgtgt

SEQ ID NO: 95103 - DNA, 22 bp, Artificial Sequence
  Synthetic oligonucleotide; TTG chr11 5290195 5290216 5290212 5290217 +
taagtgctcagggctgtgtgtg

SEQ ID NO: 95104 - DNA, 22 bp, Artificial Sequence
  Synthetic oligonucleotide; CTC chr11 5290204 5290225 5290221 5290226 +
agggctgtgtgtgtatggattg

SEQ ID NO: 95105 - DNA, 22 bp, Artificial Sequence
  Synthetic oligonucleotide; CTG chr11 5290211 5290232 5290228 5290233 +
tgtgtgtatggattgtttgaaa

SEQ ID NO: 95106 - DNA, 22 bp, Artificial Sequence
  Synthetic oligonucleotide; TTG chr11 5290226 5290247 5290243 5290248 +
tttgaaatgaaactaaagtggg

SEQ ID NO: 95107 - DNA, 22 bp, Artificial Sequence
  Synthetic oligonucleotide; TTT chr11 5290229 5290250 5290246 5290251 +
gaaatgaaactaaagtgggagt

SEQ ID NO: 95108 - DNA, 22 bp, Artificial Sequence
  Synthetic oligonucleotide; TTG chr11 5290230 5290251 5290247 5290252 +
aaatgaaactaaagtgggagta

SEQ ID NO: 95109 - DNA, 22 bp, Artificial Sequence
  Synthetic oligonucleotide; CTA chr11 5290241 5290262 5290258 5290263 +
aagtgggagtataattctactg

SEQ ID NO: 95110 - DNA, 22 bp, Artificial Sequence
  Synthetic oligonucleotide; TTC chr11 5290258 5290279 5290275 5290280 +
tactgcccccttaaccctgtgg

SEQ ID NO: 95111 - DNA, 22 bp, Artificial Sequence
  Synthetic oligonucleotide; CTA chr11 5290260 5290281 5290277 5290282 +
ctgcccccttaaccctgtggtc

SEQ ID NO: 95112 - DNA, 22 bp, Artificial Sequence
  Synthetic oligonucleotide; CTG chr11 5290263 5290284 5290280 5290285 +
cccccttaaccctgtggtccct

SEQ ID NO: 95113 - DNA, 22 bp, Artificial Sequence
  Synthetic oligonucleotide; CTT chr11 5290270 5290291 5290287 5290292 +
aaccctgtggtccctacactac

SEQ ID NO: 95114 - DNA, 22 bp, Artificial Sequence
  Synthetic oligonucleotide; TTA chr11 5290271 5290292 5290288 5290293 +
accctgtggtccctacactacc

SEQ ID NO: 95115 - DNA, 22 bp, Artificial Sequence
  Synthetic oligonucleotide; CTG chr11 5290277 5290298 5290294 5290299 +
tggtccctacactaccctgcaa

SEQ ID NO: 95116 - DNA, 22 bp, Artificial Sequence
  Synthetic oligonucleotide; CTA chr11 5290286 5290307 5290303 5290308 +
cactaccctgcaagactcttag

SEQ ID NO: 95117 - DNA, 22 bp, Artificial Sequence
  Synthetic oligonucleotide; CTA chr11 5290291 5290312 5290308 5290313 +
ccctgcaagactcttagctgct

SEQ ID NO: 95118 - DNA, 22 bp, Artificial Sequence
  Synthetic oligonucleotide; CTG chr11 5290296 5290317 5290313 5290318 +
caagactcttagctgcttagct

SEQ ID NO: 95119 - DNA, 22 bp, Artificial Sequence
  Synthetic oligonucleotide; CTC chr11 5290304 5290325 5290321 5290326 +
ttagctgcttagcttaattgtg

SEQ ID NO: 95120 - DNA, 22 bp, Artificial Sequence
  Synthetic oligonucleotide; CTT chr11 5290306 5290327 5290323 5290328 +
agctgcttagcttaattgtgag

SEQ ID NO: 95121 - DNA, 22 bp, Artificial Sequence
  Synthetic oligonucleotide; TTA chr11 5290307 5290328 5290324 5290329 +
gctgcttagcttaattgtgagg

SEQ ID NO: 95122 - DNA, 22 bp, Artificial Sequence
  Synthetic oligonucleotide; CTG chr11 5290311 5290332 5290328 5290333 +
cttagcttaattgtgaggctga

SEQ ID NO: 95123 - DNA, 22 bp, Artificial Sequence
  Synthetic oligonucleotide; CTT chr11 5290314 5290335 5290331 5290336 +
agcttaattgtgaggctgattt

SEQ ID NO: 95124 - DNA, 22 bp, Artificial Sequence
  Synthetic oligonucleotide; TTA chr11 5290315 5290336 5290332 5290337 +
gcttaattgtgaggctgatttg

SEQ ID NO: 95125 - DNA, 22 bp, Artificial Sequence
  Synthetic oligonucleotide; CTT chr11 5290319 5290340 5290336 5290341 +
aattgtgaggctgatttggggc

SEQ ID NO: 95126 - DNA, 22 bp, Artificial Sequence
  Synthetic oligonucleotide; TTA chr11 5290320 5290341 5290337 5290342 +
attgtgaggctgatttggggca

SEQ ID NO: 95127 - DNA, 22 bp, Artificial Sequence
  Synthetic oligonucleotide; TTG chr11 5290324 5290345 5290341 5290346 +
tgaggctgatttggggcatagc

SEQ ID NO: 95128 - DNA, 22 bp, Artificial Sequence
  Synthetic oligonucleotide; CTG chr11 5290332 5290353 5290349 5290354 +
atttggggcatagcaccccatc

SEQ ID NO: 95129 - DNA, 22 bp, Artificial Sequence
  Synthetic oligonucleotide; TTT chr11 5290336 5290357 5290353 5290358 +
ggggcatagcaccccatcctct

SEQ ID NO: 95130 - DNA, 22 bp, Artificial Sequence
  Synthetic oligonucleotide; TTG chr11 5290337 5290358 5290354 5290359 +
gggcatagcaccccatcctctc

SEQ ID NO: 95131 - DNA, 22 bp, Artificial Sequence
  Synthetic oligonucleotide; CTC chr11 5290357 5290378 5290374 5290379 +
tctgtctttcaacatcctcata

SEQ ID NO: 95132 - DNA, 22 bp, Artificial Sequence
  Synthetic oligonucleotide; CTC chr11 5290359 5290380 5290376 5290381 +
tgtctttcaacatcctcataat

SEQ ID NO: 95133 - DNA, 22 bp, Artificial Sequence
  Synthetic oligonucleotide; CTG chr11 5290361 5290382 5290378 5290383 +
tctttcaacatcctcataataa

SEQ ID NO: 95134 - DNA, 22 bp, Artificial Sequence
  Synthetic oligonucleotide; CTT chr11 5290365 5290386 5290382 5290387 +
tcaacatcctcataataacttg

SEQ ID NO: 95135 - DNA, 22 bp, Artificial Sequence
  Synthetic oligonucleotide; TTT chr11 5290366 5290387 5290383 5290388 +
caacatcctcataataacttga

SEQ ID NO: 95136 - DNA, 22 bp, Artificial Sequence
  Synthetic oligonucleotide; TTC chr11 5290367 5290388 5290384 5290389 +
aacatcctcataataacttgag

SEQ ID NO: 95137 - DNA, 22 bp, Artificial Sequence
  Synthetic oligonucleotide; CTC chr11 5290376 5290397 5290393 5290398 +
ataataacttgagaataatttt

SEQ ID NO: 95138 - DNA, 22 bp, Artificial Sequence
  Synthetic oligonucleotide; CTT chr11 5290386 5290407 5290403 5290408 +
gagaataattttataaaatatc

SEQ ID NO: 95139 - DNA, 22 bp, Artificial Sequence
  Synthetic oligonucleotide; TTG chr11 5290387 5290408 5290404 5290409 +
agaataattttataaaatatca

SEQ ID NO: 95140 - DNA, 22 bp, Artificial Sequence
  Synthetic oligonucleotide; TTT chr11 5290397 5290418 5290414 5290419 +
tataaaatatcacaatagggtc

SEQ ID NO: 95141 - DNA, 22 bp, Artificial Sequence
  Synthetic oligonucleotide; TTT chr11 5290398 5290419 5290415 5290420 +
ataaaatatcacaatagggtca

SEQ ID NO: 95142 - DNA, 22 bp, Artificial Sequence
  Synthetic oligonucleotide; TTA chr11 5290399 5290420 5290416 5290421 +
taaaatatcacaatagggtcat

SEQ ID NO: 95143 - DNA, 22 bp, Artificial Sequence
  Synthetic oligonucleotide; TTC chr11 5290425 5290446 5290442 5290447 +
agtagggtgatatataaaatta

SEQ ID NO: 95144 - DNA, 22 bp, Artificial Sequence
  Synthetic oligonucleotide; TTA chr11 5290447 5290468 5290464 5290469 +
gacaagccatagtttgagttta

SEQ ID NO: 95145 - DNA, 22 bp, Artificial Sequence
  Synthetic oligonucleotide; TTT chr11 5290462 5290483 5290479 5290484 +
gagtttacccttttgaataaat

SEQ ID NO: 95146 - DNA, 22 bp, Artificial Sequence
  Synthetic oligonucleotide; TTG chr11 5290463 5290484 5290480 5290485 +
agtttacccttttgaataaata

SEQ ID NO: 95147 - DNA, 22 bp, Artificial Sequence
  Synthetic oligonucleotide; TTT chr11 5290468 5290489 5290485 5290490 +
acccttttgaataaatatatga

SEQ ID NO: 95148 - DNA, 22 bp, Artificial Sequence
  Synthetic oligonucleotide; TTA chr11 5290469 5290490 5290486 5290491 +
cccttttgaataaatatatgac

SEQ ID NO: 95149 - DNA, 22 bp, Artificial Sequence
  Synthetic oligonucleotide; CTT chr11 5290474 5290495 5290491 5290496 +
ttgaataaatatatgacaaaag

SEQ ID NO: 95150 - DNA, 22 bp, Artificial Sequence
  Synthetic oligonucleotide; TTT chr11 5290475 5290496 5290492 5290497 +
tgaataaatatatgacaaaagg

SEQ ID NO: 95151 - DNA, 22 bp, Artificial Sequence
  Synthetic oligonucleotide; TTT chr11 5290476 5290497 5290493 5290498 +
gaataaatatatgacaaaaggc

SEQ ID NO: 95152 - DNA, 22 bp, Artificial Sequence
  Synthetic oligonucleotide; TTG chr11 5290477 5290498 5290494 5290499 +
aataaatatatgacaaaaggca

SEQ ID NO: 95153 - DNA, 22 bp, Artificial Sequence
  Synthetic oligonucleotide; TTT chr11 5290503 5290524 5290520 5290525 +
aattatctttatgagtttggag

SEQ ID NO: 95154 - DNA, 22 bp, Artificial Sequence
  Synthetic oligonucleotide; TTA chr11 5290504 5290525 5290521 5290526 +
attatctttatgagtttggagg

SEQ ID NO: 95155 - DNA, 22 bp, Artificial Sequence
  Synthetic oligonucleotide; TTA chr11 5290508 5290529 5290525 5290530 +
tctttatgagtttggaggtatc

SEQ ID NO: 95156 - DNA, 22 bp, Artificial Sequence
  Synthetic oligonucleotide; CTT chr11 5290512 5290533 5290529 5290534 +
tatgagtttggaggtatccagt

SEQ ID NO: 95157 - DNA, 22 bp, Artificial Sequence
  Synthetic oligonucleotide; TTT chr11 5290513 5290534 5290530 5290535 +
atgagtttggaggtatccagta

SEQ ID NO: 95158 - DNA, 22 bp, Artificial Sequence
  Synthetic oligonucleotide; TTA chr11 5290514 5290535 5290531 5290536 +
tgagtttggaggtatccagtat

SEQ ID NO: 95159 - DNA, 22 bp, Artificial Sequence
  Synthetic oligonucleotide; TTT chr11 5290521 5290542 5290538 5290543 +
ggaggtatccagtatgaaattt

SEQ ID NO: 95160 - DNA, 22 bp, Artificial Sequence
  Synthetic oligonucleotide; TTG chr11 5290522 5290543 5290539 5290544 +
gaggtatccagtatgaaattta

SEQ ID NO: 95161 - DNA, 22 bp, Artificial Sequence
  Synthetic oligonucleotide; TTT chr11 5290543 5290564 5290560 5290565 +
agataatacctgccttctagtg

SEQ ID NO: 95162 - DNA, 22 bp, Artificial Sequence
  Synthetic oligonucleotide; TTA chr11 5290544 5290565 5290561 5290566 +
gataatacctgccttctagtgt

SEQ ID NO: 95163 - DNA, 22 bp, Artificial Sequence
  Synthetic oligonucleotide; CTG chr11 5290555 5290576 5290572 5290577 +
ccttctagtgttgaaattagaa

SEQ ID NO: 95164 - DNA, 22 bp, Artificial Sequence
  Synthetic oligonucleotide; CTT chr11 5290559 5290580 5290576 5290581 +
ctagtgttgaaattagaactta

SEQ ID NO: 95165 - DNA, 22 bp, Artificial Sequence
  Synthetic oligonucleotide; TTC chr11 5290560 5290581 5290577 5290582 +
tagtgttgaaattagaacttaa

SEQ ID NO: 95166 - DNA, 22 bp, Artificial Sequence
  Synthetic oligonucleotide; CTA chr11 5290562 5290583 5290579 5290584 +
gtgttgaaattagaacttaatg

SEQ ID NO: 95167 - DNA, 22 bp, Artificial Sequence
  Synthetic oligonucleotide; TTG chr11 5290568 5290589 5290585 5290590 +
aaattagaacttaatgatataa

SEQ ID NO: 95168 - DNA, 22 bp, Artificial Sequence
  Synthetic oligonucleotide; TTA chr11 5290574 5290595 5290591 5290596 +
gaacttaatgatataatgcatc

SEQ ID NO: 95169 - DNA, 22 bp, Artificial Sequence
  Synthetic oligonucleotide; CTT chr11 5290580 5290601 5290597 5290602 +
aatgatataatgcatcaatgaa

SEQ ID NO: 95170 - DNA, 22 bp, Artificial Sequence
  Synthetic oligonucleotide; TTA chr11 5290581 5290602 5290598 5290603 +
atgatataatgcatcaatgaac

SEQ ID NO: 95171 - DNA, 22 bp, Artificial Sequence
  Synthetic oligonucleotide; CTT chr11 5290605 5290626 5290622 5290627 +
attatagttcctagcacaaagt

SEQ ID NO: 95172 - DNA, 22 bp, Artificial Sequence
  Synthetic oligonucleotide; TTA chr11 5290606 5290627 5290623 5290628 +
ttatagttcctagcacaaagta

SEQ ID NO: 95173 - DNA, 22 bp, Artificial Sequence
  Synthetic oligonucleotide; TTA chr11 5290609 5290630 5290626 5290631 +
tagttcctagcacaaagtaaga

SEQ ID NO: 95174 - DNA, 22 bp, Artificial Sequence
  Synthetic oligonucleotide; TTC chr11 5290615 5290636 5290632 5290637 +
ctagcacaaagtaagaatcctt

SEQ ID NO: 95175 - DNA, 22 bp, Artificial Sequence
  Synthetic oligonucleotide; CTA chr11 5290618 5290639 5290635 5290640 +
gcacaaagtaagaatcctttca

SEQ ID NO: 95176 - DNA, 22 bp, Artificial Sequence
  Synthetic oligonucleotide; CTT chr11 5290637 5290658 5290654 5290659 +
tcaatgtgtgtgtgtgtgtatg

SEQ ID NO: 95177 - DNA, 22 bp, Artificial Sequence
  Synthetic oligonucleotide; TTT chr11 5290638 5290659 5290655 5290660 +
caatgtgtgtgtgtgtgtatgt

SEQ ID NO: 95178 - DNA, 22 bp, Artificial Sequence
  Synthetic oligonucleotide; TTC chr11 5290639 5290660 5290656 5290661 +
aatgtgtgtgtgtgtgtatgta

SEQ ID NO: 95179 - DNA, 22 bp, Artificial Sequence
  Synthetic oligonucleotide; TTT chr11 5290664 5290685 5290681 5290686 +
atctgttattaataggaatctt

SEQ ID NO: 95180 - DNA, 22 bp, Artificial Sequence
  Synthetic oligonucleotide; TTA chr11 5290665 5290686 5290682 5290687 +
tctgttattaataggaatctta

SEQ ID NO: 95181 - DNA, 22 bp, Artificial Sequence
  Synthetic oligonucleotide; CTG chr11 5290669 5290690 5290686 5290691 +
ttattaataggaatcttatggg

SEQ ID NO: 95182 - DNA, 22 bp, Artificial Sequence
  Synthetic oligonucleotide; TTA chr11 5290672 5290693 5290689 5290694 +
ttaataggaatcttatgggcat

SEQ ID NO: 95183 - DNA, 22 bp, Artificial Sequence
  Synthetic oligonucleotide; TTA chr11 5290675 5290696 5290692 5290697 +
ataggaatcttatgggcattat

SEQ ID NO: 95184 - DNA, 22 bp, Artificial Sequence
  Synthetic oligonucleotide; CTT chr11 5290686 5290707 5290703 5290708 +
atgggcattatctcacttaatc

SEQ ID NO: 95185 - DNA, 22 bp, Artificial Sequence
  Synthetic oligonucleotide; TTA chr11 5290687 5290708 5290704 5290709 +
tgggcattatctcacttaatcc

SEQ ID NO: 95186 - DNA, 22 bp, Artificial Sequence
  Synthetic oligonucleotide; TTA chr11 5290696 5290717 5290713 5290718 +
tctcacttaatccttattaata

SEQ ID NO: 95187 - DNA, 22 bp, Artificial Sequence
  Synthetic oligonucleotide; CTC chr11 5290700 5290721 5290717 5290722 +
acttaatccttattaataacta

SEQ ID NO: 95188 - DNA, 22 bp, Artificial Sequence
  Synthetic oligonucleotide; CTT chr11 5290704 5290725 5290721 5290726 +
aatccttattaataactatgaa

SEQ ID NO: 95189 - DNA, 22 bp, Artificial Sequence
  Synthetic oligonucleotide; TTA chr11 5290705 5290726 5290722 5290727 +
atccttattaataactatgaag

SEQ ID NO: 95190 - DNA, 22 bp, Artificial Sequence
  Synthetic oligonucleotide; CTT chr11 5290711 5290732 5290728 5290733 +
attaataactatgaagcaggta

SEQ ID NO: 95191 - DNA, 22 bp, Artificial Sequence
  Synthetic oligonucleotide; TTA chr11 5290712 5290733 5290729 5290734 +
ttaataactatgaagcaggtat

SEQ ID NO: 95192 - DNA, 22 bp, Artificial Sequence
  Synthetic oligonucleotide; TTA chr11 5290715 5290736 5290732 5290737 +
ataactatgaagcaggtattta

SEQ ID NO: 95193 - DNA, 22 bp, Artificial Sequence
  Synthetic oligonucleotide; CTA chr11 5290722 5290743 5290739 5290744 +
tgaagcaggtatttatttgagt

SEQ ID NO: 95194 - DNA, 22 bp, Artificial Sequence
  Synthetic oligonucleotide; TTT chr11 5290736 5290757 5290753 5290758 +
atttgagttttccaagtgagtt

SEQ ID NO: 95195 - DNA, 22 bp, Artificial Sequence
  Synthetic oligonucleotide; TTA chr11 5290737 5290758 5290754 5290759 +
tttgagttttccaagtgagtta

SEQ ID NO: 95196 - DNA, 22 bp, Artificial Sequence
  Synthetic oligonucleotide; TTT chr11 5290740 5290761 5290757 5290762 +
gagttttccaagtgagttaagt

SEQ ID NO: 95197 - DNA, 22 bp, Artificial Sequence
  Synthetic oligonucleotide; TTG chr11 5290741 5290762 5290758 5290763 +
agttttccaagtgagttaagta

SEQ ID NO: 95198 - DNA, 22 bp, Artificial Sequence
  Synthetic oligonucleotide; TTT chr11 5290746 5290767 5290763 5290768 +
tccaagtgagttaagtatagct

SEQ ID NO: 95199 - DNA, 22 bp, Artificial Sequence
  Synthetic oligonucleotide; TTT chr11 5290747 5290768 5290764 5290769 +
ccaagtgagttaagtatagctt

SEQ ID NO: 95200 - DNA, 22 bp, Artificial Sequence
  Synthetic oligonucleotide; TTC chr11 5290748 5290769 5290765 5290770 +
caagtgagttaagtatagcttg

SEQ ID NO: 95201 - DNA, 22 bp, Artificial Sequence
  Synthetic oligonucleotide; TTA chr11 5290759 5290780 5290776 5290781 +
agtatagcttgtaatacttaag

SEQ ID NO: 95202 - DNA, 22 bp, Artificial Sequence
  Synthetic oligonucleotide; CTT chr11 5290769 5290790 5290786 5290791 +
gtaatacttaaggaaatatcca

SEQ ID NO: 95203 - DNA, 22 bp, Artificial Sequence
  Synthetic oligonucleotide; TTG chr11 5290770 5290791 5290787 5290792 +
taatacttaaggaaatatccac

SEQ ID NO: 95204 - DNA, 22 bp, Artificial Sequence
  Synthetic oligonucleotide; CTT chr11 5290778 5290799 5290795 5290800 +
aaggaaatatccacaggttaca

SEQ ID NO: 95205 - DNA, 22 bp, Artificial Sequence
  Synthetic oligonucleotide; TTA chr11 5290779 5290800 5290796 5290801 +
aggaaatatccacaggttacat

SEQ ID NO: 95206 - DNA, 22 bp, Artificial Sequence
  Synthetic oligonucleotide; TTA chr11 5290798 5290819 5290815 5290820 +
catagctagtatataactgaga

SEQ ID NO: 95207 - DNA, 22 bp, Artificial Sequence
  Synthetic oligonucleotide; CTA chr11 5290806 5290827 5290823 5290828 +
gtatataactgagaaataattt

SEQ ID NO: 95208 - DNA, 22 bp, Artificial Sequence
  Synthetic oligonucleotide; CTG chr11 5290817 5290838 5290834 5290839 +
agaaataattttatttatatta

SEQ ID NO: 95209 - DNA, 22 bp, Artificial Sequence
  Synthetic oligonucleotide; TTT chr11 5290828 5290849 5290845 5290850 +
tatttatattataaaacattct

SEQ ID NO: 95210 - DNA, 22 bp, Artificial Sequence
  Synthetic oligonucleotide; TTT chr11 5290829 5290850 5290846 5290851 +
atttatattataaaacattcta

SEQ ID NO: 95211 - DNA, 22 bp, Artificial Sequence
  Synthetic oligonucleotide; TTA chr11 5290830 5290851 5290847 5290852 +
tttatattataaaacattctaa

SEQ ID NO: 95212 - DNA, 22 bp, Artificial Sequence
  Synthetic oligonucleotide; TTT chr11 5290833 5290854 5290850 5290855 +
atattataaaacattctaacaa

SEQ ID NO: 95213 - DNA, 22 bp, Artificial Sequence
  Synthetic oligonucleotide; TTA chr11 5290834 5290855 5290851 5290856 +
tattataaaacattctaacaat

SEQ ID NO: 95214 - DNA, 22 bp, Artificial Sequence
  Synthetic oligonucleotide; TTA chr11 5290839 5290860 5290856 5290861 +
taaaacattctaacaatacaga

SEQ ID NO: 95215 - DNA, 22 bp, Artificial Sequence
  Synthetic oligonucleotide; TTC chr11 5290849 5290870 5290866 5290871 +
taacaatacagatgtatataaa

SEQ ID NO: 95216 - DNA, 22 bp, Artificial Sequence
  Synthetic oligonucleotide; CTA chr11 5290851 5290872 5290868 5290873 +
acaatacagatgtatataaact

SEQ ID NO: 95217 - DNA, 22 bp, Artificial Sequence
  Synthetic oligonucleotide; CTA chr11 5290874 5290895 5290891 5290896 +
aaaaactgaaagggctcatgca

SEQ ID NO: 95218 - DNA, 22 bp, Artificial Sequence
  Synthetic oligonucleotide; CTG chr11 5290882 5290903 5290899 5290904 +
aaagggctcatgcaaccctacc

SEQ ID NO: 95219 - DNA, 22 bp, Artificial Sequence
  Synthetic oligonucleotide; CTC chr11 5290891 5290912 5290908 5290913 +
atgcaaccctaccttctcaata

SEQ ID NO: 95220 - DNA, 22 bp, Artificial Sequence
  Synthetic oligonucleotide; CTA chr11 5290902 5290923 5290919 5290924 +
ccttctcaatatcacttcttca

SEQ ID NO: 95221 - DNA, 22 bp, Artificial Sequence
  Synthetic oligonucleotide; CTT chr11 5290906 5290927 5290923 5290928 +
ctcaatatcacttcttcactta

SEQ ID NO: 95222 - DNA, 22 bp, Artificial Sequence
  Synthetic oligonucleotide; TTC chr11 5290907 5290928 5290924 5290929 +
tcaatatcacttcttcacttag

SEQ ID NO: 95223 - DNA, 22 bp, Artificial Sequence
  Synthetic oligonucleotide; CTC chr11 5290909 5290930 5290926 5290931 +
aatatcacttcttcacttagaa

SEQ ID NO: 95224 - DNA, 22 bp, Artificial Sequence
  Synthetic oligonucleotide; CTT chr11 5290919 5290940 5290936 5290941 +
cttcacttagaaaaaaccagcc

SEQ ID NO: 95225 - DNA, 22 bp, Artificial Sequence
  Synthetic oligonucleotide; TTC chr11 5290920 5290941 5290937 5290942 +
ttcacttagaaaaaaccagcct

SEQ ID NO: 95226 - DNA, 22 bp, Artificial Sequence
  Synthetic oligonucleotide; CTT chr11 5290922 5290943 5290939 5290944 +
cacttagaaaaaaccagcctta

SEQ ID NO: 95227 - DNA, 22 bp, Artificial Sequence
  Synthetic oligonucleotide; TTC chr11 5290923 5290944 5290940 5290945 +
acttagaaaaaaccagccttag

SEQ ID NO: 95228 - DNA, 22 bp, Artificial Sequence
  Synthetic oligonucleotide; CTT chr11 5290927 5290948 5290944 5290949 +
agaaaaaaccagccttagctgt

SEQ ID NO: 95229 - DNA, 22 bp, Artificial Sequence
  Synthetic oligonucleotide; TTA chr11 5290928 5290949 5290945 5290950 +
gaaaaaaccagccttagctgtc

SEQ ID NO: 95230 - DNA, 22 bp, Artificial Sequence
  Synthetic oligonucleotide; CTT chr11 5290943 5290964 5290960 5290965 +
agctgtctgctatgaatccttt

SEQ ID NO: 95231 - DNA, 22 bp, Artificial Sequence
  Synthetic oligonucleotide; TTA chr11 5290944 5290965 5290961 5290966 +
gctgtctgctatgaatcctttc

SEQ ID NO: 95232 - DNA, 22 bp, Artificial Sequence
  Synthetic oligonucleotide; CTG chr11 5290948 5290969 5290965 5290970 +
tctgctatgaatcctttcaaaa

SEQ ID NO: 95233 - DNA, 22 bp, Artificial Sequence
  Synthetic oligonucleotide; CTG chr11 5290952 5290973 5290969 5290974 +
ctatgaatcctttcaaaatata

SEQ ID NO: 95234 - DNA, 22 bp, Artificial Sequence
  Synthetic oligonucleotide; CTA chr11 5290955 5290976 5290972 5290977 +
tgaatcctttcaaaatatactt

SEQ ID NO: 95235 - DNA, 22 bp, Artificial Sequence
  Synthetic oligonucleotide; CTT chr11 5290964 5290985 5290981 5290986 +
tcaaaatatacttctgagaaat

SEQ ID NO: 95236 - DNA, 22 bp, Artificial Sequence
  Synthetic oligonucleotide; TTT chr11 5290965 5290986 5290982 5290987 +
caaaatatacttctgagaaatg

SEQ ID NO: 95237 - DNA, 22 bp, Artificial Sequence
  Synthetic oligonucleotide; TTC chr11 5290966 5290987 5290983 5290988 +
aaaatatacttctgagaaatga

SEQ ID NO: 95238 - DNA, 22 bp, Artificial Sequence
  Synthetic oligonucleotide; CTT chr11 5290977 5290998 5290994 5290999 +
ctgagaaatgagagagagaaat

SEQ ID NO: 95239 - DNA, 22 bp, Artificial Sequence
  Synthetic oligonucleotide; TTC chr11 5290978 5290999 5290995 5291000 +
tgagaaatgagagagagaaatg

SEQ ID NO: 95240 - DNA, 22 bp, Artificial Sequence
  Synthetic oligonucleotide; CTG chr11 5290980 5291001 5290997 5291002 +
agaaatgagagagagaaatggg

SEQ ID NO: 95241 - DNA, 22 bp, Artificial Sequence
  Synthetic oligonucleotide; TTA chr11 5291063 5291084 5291080 5291085 +
aattattcttttctctgtctct

SEQ ID NO: 95242 - DNA, 22 bp, Artificial Sequence
  Synthetic oligonucleotide; TTA chr11 5291068 5291089 5291085 5291090 +
ttcttttctctgtctcttgaaa

SEQ ID NO: 95243 - DNA, 22 bp, Artificial Sequence
  Synthetic oligonucleotide; TTC chr11 5291071 5291092 5291088 5291093 +
ttttctctgtctcttgaaagag

SEQ ID NO: 95244 - DNA, 22 bp, Artificial Sequence
  Synthetic oligonucleotide; CTT chr11 5291073 5291094 5291090 5291095 +
ttctctgtctcttgaaagagct

SEQ ID NO: 95245 - DNA, 22 bp, Artificial Sequence
  Synthetic oligonucleotide; TTT chr11 5291074 5291095 5291091 5291096 +
tctctgtctcttgaaagagctc

SEQ ID NO: 95246 - DNA, 22 bp, Artificial Sequence
  Synthetic oligonucleotide; TTT chr11 5291075 5291096 5291092 5291097 +
ctctgtctcttgaaagagctct

SEQ ID NO: 95247 - DNA, 22 bp, Artificial Sequence
  Synthetic oligonucleotide; TTC chr11 5291076 5291097 5291093 5291098 +
tctgtctcttgaaagagctctt

SEQ ID NO: 95248 - DNA, 22 bp, Artificial Sequence
  Synthetic oligonucleotide; CTC chr11 5291078 5291099 5291095 5291100 +
tgtctcttgaaagagctctttc

SEQ ID NO: 95249 - DNA, 22 bp, Artificial Sequence
  Synthetic oligonucleotide; CTG chr11 5291080 5291101 5291097 5291102 +
tctcttgaaagagctctttcca

SEQ ID NO: 95250 - DNA, 22 bp, Artificial Sequence
  Synthetic oligonucleotide; CTC chr11 5291084 5291105 5291101 5291106 +
ttgaaagagctctttccattac

SEQ ID NO: 95251 - DNA, 22 bp, Artificial Sequence
  Synthetic oligonucleotide; CTT chr11 5291086 5291107 5291103 5291108 +
gaaagagctctttccattacat

SEQ ID NO: 95252 - DNA, 22 bp, Artificial Sequence
  Synthetic oligonucleotide; TTG chr11 5291087 5291108 5291104 5291109 +
aaagagctctttccattacatt

SEQ ID NO: 95253 - DNA, 22 bp, Artificial Sequence
  Synthetic oligonucleotide; CTC chr11 5291096 5291117 5291113 5291118 +
tttccattacattgaatcaaag

SEQ ID NO: 95254 - DNA, 22 bp, Artificial Sequence
  Synthetic oligonucleotide; CTT chr11 5291098 5291119 5291115 5291120 +
tccattacattgaatcaaaggt

SEQ ID NO: 95255 - DNA, 22 bp, Artificial Sequence
  Synthetic oligonucleotide; TTT chr11 5291099 5291120 5291116 5291121 +
ccattacattgaatcaaaggta

SEQ ID NO: 95256 - DNA, 22 bp, Artificial Sequence
  Synthetic oligonucleotide; TTC chr11 5291100 5291121 5291117 5291122 +
cattacattgaatcaaaggtaa

SEQ ID NO: 95257 - DNA, 22 bp, Artificial Sequence
  Synthetic oligonucleotide; TTA chr11 5291105 5291126 5291122 5291127 +
cattgaatcaaaggtaatgttg

SEQ ID NO: 95258 - DNA, 22 bp, Artificial Sequence
  Synthetic oligonucleotide; TTG chr11 5291110 5291131 5291127 5291132 +
aatcaaaggtaatgttgccatt

SEQ ID NO: 95259 - DNA, 22 bp, Artificial Sequence
  Synthetic oligonucleotide; TTG chr11 5291127 5291148 5291144 5291149 +
ccatttctggactcttgaaata

SEQ ID NO: 95260 - DNA, 22 bp, Artificial Sequence
  Synthetic oligonucleotide; TTT chr11 5291133 5291154 5291150 5291155 +
ctggactcttgaaataaagaaa

SEQ ID NO: 95261 - DNA, 22 bp, Artificial Sequence
  Synthetic oligonucleotide; TTC chr11 5291134 5291155 5291151 5291156 +
tggactcttgaaataaagaaag

SEQ ID NO: 95262 - DNA, 22 bp, Artificial Sequence
  Synthetic oligonucleotide; CTG chr11 5291136 5291157 5291153 5291158 +
gactcttgaaataaagaaagac

SEQ ID NO: 95263 - DNA, 22 bp, Artificial Sequence
  Synthetic oligonucleotide; CTC chr11 5291141 5291162 5291158 5291163 +
ttgaaataaagaaagaccgatg

SEQ ID NO: 95264 - DNA, 22 bp, Artificial Sequence
  Synthetic oligonucleotide; CTT chr11 5291143 5291164 5291160 5291165 +
gaaataaagaaagaccgatgta

SEQ ID NO: 95265 - DNA, 22 bp, Artificial Sequence
  Synthetic oligonucleotide; TTG chr11 5291144 5291165 5291161 5291166 +
aaataaagaaagaccgatgtat

SEQ ID NO: 95266 - DNA, 22 bp, Artificial Sequence
  Synthetic oligonucleotide; TTT chr11 5291176 5291197 5291193 5291198 +
tgaaagtctatggcattttcaa

SEQ ID NO: 95267 - DNA, 22 bp, Artificial Sequence
  Synthetic oligonucleotide; TTT chr11 5291177 5291198 5291194 5291199 +
gaaagtctatggcattttcaaa

SEQ ID NO: 95268 - DNA, 22 bp, Artificial Sequence
  Synthetic oligonucleotide; TTG chr11 5291178 5291199 5291195 5291200 +
aaagtctatggcattttcaaaa

SEQ ID NO: 95269 - DNA, 22 bp, Artificial Sequence
  Synthetic oligonucleotide; CTA chr11 5291186 5291207 5291203 5291208 +
tggcattttcaaaatgcaaggt

SEQ ID NO: 95270 - DNA, 22 bp, Artificial Sequence
  Synthetic oligonucleotide; TTT chr11 5291194 5291215 5291211 5291216 +
tcaaaatgcaaggtgatgtctt

SEQ ID NO: 95271 - DNA, 22 bp, Artificial Sequence
  Synthetic oligonucleotide; TTT chr11 5291195 5291216 5291212 5291217 +
caaaatgcaaggtgatgtctta

SEQ ID NO: 95272 - DNA, 22 bp, Artificial Sequence
  Synthetic oligonucleotide; TTC chr11 5291196 5291217 5291213 5291218 +
aaaatgcaaggtgatgtcttac

SEQ ID NO: 95273 - DNA, 22 bp, Artificial Sequence
  Synthetic oligonucleotide; CTT chr11 5291216 5291237 5291233 5291238 +
actaactagcctttgctttatt

SEQ ID NO: 95274 - DNA, 22 bp, Artificial Sequence
  Synthetic oligonucleotide; TTA chr11 5291217 5291238 5291234 5291239 +
ctaactagcctttgctttatta

SEQ ID NO: 95275 - DNA, 22 bp, Artificial Sequence
  Synthetic oligonucleotide; CTA chr11 5291220 5291241 5291237 5291242 +
actagcctttgctttattatta

SEQ ID NO: 95276 - DNA, 22 bp, Artificial Sequence
  Synthetic oligonucleotide; CTA chr11 5291224 5291245 5291241 5291246 +
gcctttgctttattattagaaa

SEQ ID NO: 95277 - DNA, 22 bp, Artificial Sequence
  Synthetic oligonucleotide; CTT chr11 5291229 5291250 5291246 5291251 +
tgctttattattagaaatgggg

SEQ ID NO: 95278 - DNA, 22 bp, Artificial Sequence
  Synthetic oligonucleotide; TTT chr11 5291230 5291251 5291247 5291252 +
gctttattattagaaatgggga

SEQ ID NO: 95279 - DNA, 22 bp, Artificial Sequence
  Synthetic oligonucleotide; TTG chr11 5291231 5291252 5291248 5291253 +
ctttattattagaaatggggaa

SEQ ID NO: 95280 - DNA, 22 bp, Artificial Sequence
  Synthetic oligonucleotide; CTT chr11 5291234 5291255 5291251 5291256 +
tattattagaaatggggaagtg

SEQ ID NO: 95281 - DNA, 22 bp, Artificial Sequence
  Synthetic oligonucleotide; TTT chr11 5291235 5291256 5291252 5291257 +
attattagaaatggggaagtga

SEQ ID NO: 95282 - DNA, 22 bp, Artificial Sequence
  Synthetic oligonucleotide; TTA chr11 5291236 5291257 5291253 5291258 +
ttattagaaatggggaagtgag

SEQ ID NO: 95283 - DNA, 22 bp, Artificial Sequence
  Synthetic oligonucleotide; TTA chr11 5291239 5291260 5291256 5291261 +
ttagaaatggggaagtgagtat

SEQ ID NO: 95284 - DNA, 22 bp, Artificial Sequence
  Synthetic oligonucleotide; TTA chr11 5291242 5291263 5291259 5291264 +
gaaatggggaagtgagtataga

SEQ ID NO: 95285 - DNA, 22 bp, Artificial Sequence
  Synthetic oligonucleotide; TTT chr11 5291269 5291290 5291286 5291291 +
tatcaggagatatattaggaaa

SEQ ID NO: 95286 - DNA, 22 bp, Artificial Sequence
  Synthetic oligonucleotide; TTT chr11 5291270 5291291 5291287 5291292 +
atcaggagatatattaggaaaa

SEQ ID NO: 95287 - DNA, 22 bp, Artificial Sequence
  Synthetic oligonucleotide; TTA chr11 5291271 5291292 5291288 5291293 +
tcaggagatatattaggaaaaa

SEQ ID NO: 95288 - DNA, 22 bp, Artificial Sequence
  Synthetic oligonucleotide; TTA chr11 5291286 5291307 5291303 5291308 +
ggaaaaagggaaactggagaaa

SEQ ID NO: 95289 - DNA, 22 bp, Artificial Sequence
  Synthetic oligonucleotide; CTG chr11 5291302 5291323 5291319 5291324 +
gagaaactgggaggagtatcca

SEQ ID NO: 95290 - DNA, 22 bp, Artificial Sequence
  Synthetic oligonucleotide; CTG chr11 5291311 5291332 5291328 5291333 +
ggaggagtatccagatgtcctg

SEQ ID NO: 95291 - DNA, 22 bp, Artificial Sequence
  Synthetic oligonucleotide; CTG chr11 5291333 5291354 5291350 5291355 +
tccctgtaaggtgggggcaccc

SEQ ID NO: 95292 - DNA, 22 bp, Artificial Sequence
  Synthetic oligonucleotide; CTG chr11 5291339 5291360 5291356 5291361 +
taaggtgggggcacccaccttc

SEQ ID NO: 95293 - DNA, 22 bp, Artificial Sequence
  Synthetic oligonucleotide; CTT chr11 5291360 5291381 5291377 5291382 +
caatcaaaagggctccttaaca

SEQ ID NO: 95294 - DNA, 22 bp, Artificial Sequence
  Synthetic oligonucleotide; TTC chr11 5291361 5291382 5291378 5291383 +
aatcaaaagggctccttaacaa

SEQ ID NO: 95295 - DNA, 22 bp, Artificial Sequence
  Synthetic oligonucleotide; CTC chr11 5291375 5291396 5291392 5291397 +
cttaacaacttccttgcttggg

SEQ ID NO: 95296 - DNA, 22 bp, Artificial Sequence
  Synthetic oligonucleotide; CTT chr11 5291378 5291399 5291395 5291400 +
aacaacttccttgcttggggct

SEQ ID NO: 95297 - DNA, 22 bp, Artificial Sequence
  Synthetic oligonucleotide; TTA chr11 5291379 5291400 5291396 5291401 +
acaacttccttgcttggggctc

SEQ ID NO: 95298 - DNA, 22 bp, Artificial Sequence
  Synthetic oligonucleotide; CTT chr11 5291386 5291407 5291403 5291408 +
ccttgcttggggctccaccatc

SEQ ID NO: 95299 - DNA, 22 bp, Artificial Sequence
  Synthetic oligonucleotide; TTC chr11 5291387 5291408 5291404 5291409 +
cttgcttggggctccaccatct

SEQ ID NO: 95300 - DNA, 22 bp, Artificial Sequence
  Synthetic oligonucleotide; CTT chr11 5291390 5291411 5291407 5291412 +
gcttggggctccaccatcttgg

SEQ ID NO: 95301 - DNA, 22 bp, Artificial Sequence
  Synthetic oligonucleotide; TTG chr11 5291391 5291412 5291408 5291413 +
cttggggctccaccatcttgga

SEQ ID NO: 95302 - DNA, 22 bp, Artificial Sequence
  Synthetic oligonucleotide; CTT chr11 5291394 5291415 5291411 5291416 +
ggggctccaccatcttggacca

SEQ ID NO: 95303 - DNA, 22 bp, Artificial Sequence
  Synthetic oligonucleotide; TTG chr11 5291395 5291416 5291412 5291417 +
gggctccaccatcttggaccat

SEQ ID NO: 95304 - DNA, 22 bp, Artificial Sequence
  Synthetic oligonucleotide; CTC chr11 5291401 5291422 5291418 5291423 +
caccatcttggaccattagctc

SEQ ID NO: 95305 - DNA, 22 bp, Artificial Sequence
  Synthetic oligonucleotide; CTT chr11 5291410 5291431 5291427 5291432 +
ggaccattagctccacaggtat

SEQ ID NO: 95306 - DNA, 22 bp, Artificial Sequence
  Synthetic oligonucleotide; TTG chr11 5291411 5291432 5291428 5291433 +
gaccattagctccacaggtatc

SEQ ID NO: 95307 - DNA, 22 bp, Artificial Sequence
  Synthetic oligonucleotide; TTA chr11 5291419 5291440 5291436 5291441 +
gctccacaggtatcttcttccc

SEQ ID NO: 95308 - DNA, 22 bp, Artificial Sequence
  Synthetic oligonucleotide; CTC chr11 5291423 5291444 5291440 5291445 +
cacaggtatcttcttccctcta

SEQ ID NO: 95309 - DNA, 22 bp, Artificial Sequence
  Synthetic oligonucleotide; CTT chr11 5291435 5291456 5291452 5291457 +
cttccctctagtggtcataaca

SEQ ID NO: 95310 - DNA, 22 bp, Artificial Sequence
  Synthetic oligonucleotide; TTC chr11 5291436 5291457 5291453 5291458 +
ttccctctagtggtcataacag

SEQ ID NO: 95311 - DNA, 22 bp, Artificial Sequence
  Synthetic oligonucleotide; CTT chr11 5291438 5291459 5291455 5291460 +
ccctctagtggtcataacagca

SEQ ID NO: 95312 - DNA, 22 bp, Artificial Sequence
  Synthetic oligonucleotide; TTC chr11 5291439 5291460 5291456 5291461 +
cctctagtggtcataacagcag

SEQ ID NO: 95313 - DNA, 22 bp, Artificial Sequence
  Synthetic oligonucleotide; CTC chr11 5291443 5291464 5291460 5291465 +
tagtggtcataacagcagcttc

SEQ ID NO: 95314 - DNA, 22 bp, Artificial Sequence
  Synthetic oligonucleotide; CTA chr11 5291445 5291466 5291462 5291467 +
gtggtcataacagcagcttcag

SEQ ID NO: 95315 - DNA, 22 bp, Artificial Sequence
  Synthetic oligonucleotide; CTT chr11 5291464 5291485 5291481 5291486 +
cagctacctctctaaagagtcc

SEQ ID NO: 95316 - DNA, 22 bp, Artificial Sequence
  Synthetic oligonucleotide; TTC chr11 5291465 5291486 5291482 5291487 +
agctacctctctaaagagtcct

SEQ ID NO: 95317 - DNA, 22 bp, Artificial Sequence
  Synthetic oligonucleotide; CTA chr11 5291470 5291491 5291487 5291492 +
cctctctaaagagtcctgccag

SEQ ID NO: 95318 - DNA, 22 bp, Artificial Sequence
  Synthetic oligonucleotide; CTC chr11 5291474 5291495 5291491 5291496 +
tctaaagagtcctgccagatat

SEQ ID NO: 95319 - DNA, 22 bp, Artificial Sequence
  Synthetic oligonucleotide; CTC chr11 5291476 5291497 5291493 5291498 +
taaagagtcctgccagatatag

SEQ ID NO: 95320 - DNA, 22 bp, Artificial Sequence
  Synthetic oligonucleotide; CTA chr11 5291478 5291499 5291495 5291500 +
aagagtcctgccagatataggt

SEQ ID NO: 95321 - DNA, 22 bp, Artificial Sequence
  Synthetic oligonucleotide; CTG chr11 5291488 5291509 5291505 5291510 +
ccagatataggtcaggaaatat

SEQ ID NO: 95322 - DNA, 22 bp, Artificial Sequence
  Synthetic oligonucleotide; CTA chr11 5291519 5291540 5291536 5291541 +
ataaaaagagaaacattttgac

SEQ ID NO: 95323 - DNA, 22 bp, Artificial Sequence
  Synthetic oligonucleotide; TTT chr11 5291537 5291558 5291554 5291559 +
tgactgtagttgtttgtttttt

SEQ ID NO: 95324 - DNA, 22 bp, Artificial Sequence
  Synthetic oligonucleotide; TTT chr11 5291538 5291559 5291555 5291560 +
gactgtagttgtttgttttttg

SEQ ID NO: 95325 - DNA, 22 bp, Artificial Sequence
  Synthetic oligonucleotide; TTG chr11 5291539 5291560 5291556 5291561 +
actgtagttgtttgttttttgt

SEQ ID NO: 95326 - DNA, 22 bp, Artificial Sequence
  Synthetic oligonucleotide; CTG chr11 5291543 5291564 5291560 5291565 +
tagttgtttgttttttgtcatt

SEQ ID NO: 95327 - DNA, 22 bp, Artificial Sequence
  Synthetic oligonucleotide; TTG chr11 5291549 5291570 5291566 5291571 +
tttgttttttgtcattgtgact

SEQ ID NO: 95328 - DNA, 22 bp, Artificial Sequence
  Synthetic oligonucleotide; TTT chr11 5291552 5291573 5291569 5291574 +
gttttttgtcattgtgactatc

SEQ ID NO: 95329 - DNA, 22 bp, Artificial Sequence
  Synthetic oligonucleotide; TTG chr11 5291553 5291574 5291570 5291575 +
ttttttgtcattgtgactatca

SEQ ID NO: 95330 - DNA, 22 bp, Artificial Sequence
  Synthetic oligonucleotide; TTT chr11 5291556 5291577 5291573 5291578 +
tttgtcattgtgactatcaata

SEQ ID NO: 95331 - DNA, 22 bp, Artificial Sequence
  Synthetic oligonucleotide; TTT chr11 5291557 5291578 5291574 5291579 +
ttgtcattgtgactatcaataa

SEQ ID NO: 95332 - DNA, 22 bp, Artificial Sequence
  Synthetic oligonucleotide; TTT chr11 5291558 5291579 5291575 5291580 +
tgtcattgtgactatcaataac

SEQ ID NO: 95333 - DNA, 22 bp, Artificial Sequence
  Synthetic oligonucleotide; TTT chr11 5291559 5291580 5291576 5291581 +
gtcattgtgactatcaataaca

SEQ ID NO: 95334 - DNA, 22 bp, Artificial Sequence
  Synthetic oligonucleotide; TTG chr11 5291560 5291581 5291577 5291582 +
tcattgtgactatcaataacat

SEQ ID NO: 95335 - DNA, 22 bp, Artificial Sequence
  Synthetic oligonucleotide; TTG chr11 5291566 5291587 5291583 5291588 +
tgactatcaataacattctcac

SEQ ID NO: 95336 - DNA, 22 bp, Artificial Sequence
  Synthetic oligonucleotide; CTA chr11 5291572 5291593 5291589 5291594 +
tcaataacattctcactctttc

SEQ ID NO: 95337 - DNA, 22 bp, Artificial Sequence
  Synthetic oligonucleotide; TTC chr11 5291584 5291605 5291601 5291606 +
tcactctttcatcagtaatcac

SEQ ID NO: 95338 - DNA, 22 bp, Artificial Sequence
  Synthetic oligonucleotide; CTC chr11 5291586 5291607 5291603 5291608 +
actctttcatcagtaatcactc

SEQ ID NO: 95339 - DNA, 22 bp, Artificial Sequence
  Synthetic oligonucleotide; CTC chr11 5291590 5291611 5291607 5291612 +
tttcatcagtaatcactcaggt

SEQ ID NO: 95340 - DNA, 22 bp, Artificial Sequence
  Synthetic oligonucleotide; CTT chr11 5291592 5291613 5291609 5291614 +
tcatcagtaatcactcaggtta

SEQ ID NO: 95341 - DNA, 22 bp, Artificial Sequence
  Synthetic oligonucleotide; TTT chr11 5291593 5291614 5291610 5291615 +
catcagtaatcactcaggttat

SEQ ID NO: 95342 - DNA, 22 bp, Artificial Sequence
  Synthetic oligonucleotide; TTC chr11 5291594 5291615 5291611 5291616 +
atcagtaatcactcaggttatt

SEQ ID NO: 95343 - DNA, 22 bp, Artificial Sequence
  Synthetic oligonucleotide; CTC chr11 5291608 5291629 5291625 5291630 +
aggttattctgtgaccaacaga

SEQ ID NO: 95344 - DNA, 22 bp, Artificial Sequence
  Synthetic oligonucleotide; TTA chr11 5291614 5291635 5291631 5291636 +
ttctgtgaccaacagactgtgg

SEQ ID NO: 95345 - DNA, 22 bp, Artificial Sequence
  Synthetic oligonucleotide; TTC chr11 5291617 5291638 5291634 5291639 +
tgtgaccaacagactgtgggaa

SEQ ID NO: 95346 - DNA, 22 bp, Artificial Sequence
  Synthetic oligonucleotide; CTG chr11 5291619 5291640 5291636 5291641 +
tgaccaacagactgtgggaaaa

SEQ ID NO: 95347 - DNA, 22 bp, Artificial Sequence
  Synthetic oligonucleotide; CTG chr11 5291633 5291654 5291650 5291655 +
tgggaaaaatcagagaaggagg

SEQ ID NO: 95348 - DNA, 22 bp, Artificial Sequence
  Synthetic oligonucleotide; CTC chr11 5291662 5291683 5291679 5291684 +
atgcttactagcctaaactgaa

SEQ ID NO: 95349 - DNA, 22 bp, Artificial Sequence
  Synthetic oligonucleotide; CTT chr11 5291668 5291689 5291685 5291690 +
actagcctaaactgaaattgct

SEQ ID NO: 95350 - DNA, 22 bp, Artificial Sequence
  Synthetic oligonucleotide; TTA chr11 5291669 5291690 5291686 5291691 +
ctagcctaaactgaaattgcta

SEQ ID NO: 95351 - DNA, 22 bp, Artificial Sequence
  Synthetic oligonucleotide; CTA chr11 5291672 5291693 5291689 5291694 +
gcctaaactgaaattgctatag

SEQ ID NO: 95352 - DNA, 22 bp, Artificial Sequence
  Synthetic oligonucleotide; CTA chr11 5291677 5291698 5291694 5291699 +
aactgaaattgctatagcagag

SEQ ID NO: 95353 - DNA, 22 bp, Artificial Sequence
  Synthetic oligonucleotide; CTG chr11 5291682 5291703 5291699 5291704 +
aaattgctatagcagagtgaac

SEQ ID NO: 95354 - DNA, 22 bp, Artificial Sequence
  Synthetic oligonucleotide; TTG chr11 5291688 5291709 5291705 5291710 +
ctatagcagagtgaaccagaag

SEQ ID NO: 95355 - DNA, 22 bp, Artificial Sequence
  Synthetic oligonucleotide; CTA chr11 5291691 5291712 5291708 5291713 +
tagcagagtgaaccagaaggtt

SEQ ID NO: 95356 - DNA, 22 bp, Artificial Sequence
  Synthetic oligonucleotide; TTT chr11 5291714 5291735 5291731 5291736 +
acagatattttccacaaagagt

SEQ ID NO: 95357 - DNA, 22 bp, Artificial Sequence
  Synthetic oligonucleotide; TTA chr11 5291715 5291736 5291732 5291737 +
cagatattttccacaaagagta

SEQ ID NO: 95358 - DNA, 22 bp, Artificial Sequence
  Synthetic oligonucleotide; TTT chr11 5291724 5291745 5291741 5291746 +
tccacaaagagtaaaaggattg

SEQ ID NO: 95359 - DNA, 22 bp, Artificial Sequence
  Synthetic oligonucleotide; TTT chr11 5291725 5291746 5291742 5291747 +
ccacaaagagtaaaaggattga

SEQ ID NO: 95360 - DNA, 22 bp, Artificial Sequence
  Synthetic oligonucleotide; TTC chr11 5291726 5291747 5291743 5291748 +
cacaaagagtaaaaggattgaa

SEQ ID NO: 95361 - DNA, 22 bp, Artificial Sequence
  Synthetic oligonucleotide; TTG chr11 5291746 5291767 5291763 5291768 +
aagccttctccagatcaatgca

SEQ ID NO: 95362 - DNA, 22 bp, Artificial Sequence
  Synthetic oligonucleotide; CTT chr11 5291753 5291774 5291770 5291775 +
ctccagatcaatgcataggaaa

SEQ ID NO: 95363 - DNA, 22 bp, Artificial Sequence
  Synthetic oligonucleotide; TTC chr11 5291754 5291775 5291771 5291776 +
tccagatcaatgcataggaaat

SEQ ID NO: 95364 - DNA, 22 bp, Artificial Sequence
  Synthetic oligonucleotide; CTC chr11 5291756 5291777 5291773 5291778 +
cagatcaatgcataggaaataa

SEQ ID NO: 95365 - DNA, 22 bp, Artificial Sequence
  Synthetic oligonucleotide; TTA chr11 5291802 5291823 5291819 5291824 +
tgacgaacaacattaggataag

SEQ ID NO: 95366 - DNA, 22 bp, Artificial Sequence
  Synthetic oligonucleotide; TTA chr11 5291817 5291838 5291834 5291839 +
ggataagtccatatcaattttt

SEQ ID NO: 95367 - DNA, 22 bp, Artificial Sequence
  Synthetic oligonucleotide; TTT chr11 5291837 5291858 5291854 5291859 +
ttaatccagtcataagcacaga

SEQ ID NO: 95368 - DNA, 22 bp, Artificial Sequence
  Synthetic oligonucleotide; TTT chr11 5291838 5291859 5291855 5291860 +
taatccagtcataagcacagac

SEQ ID NO: 95369 - DNA, 22 bp, Artificial Sequence
  Synthetic oligonucleotide; TTT chr11 5291839 5291860 5291856 5291861 +
aatccagtcataagcacagact

SEQ ID NO: 95370 - DNA, 22 bp, Artificial Sequence
  Synthetic oligonucleotide; TTA chr11 5291840 5291861 5291857 5291862 +
atccagtcataagcacagacta

SEQ ID NO: 95371 - DNA, 22 bp, Artificial Sequence
  Synthetic oligonucleotide; CTA chr11 5291862 5291883 5291879 5291884 +
cgtgaagcacgtccaagtgaag

SEQ ID NO: 95372 - DNA, 22 bp, Artificial Sequence
  Synthetic oligonucleotide; TTT chr11 5291922 5291943 5291939 5291944 +
gatcaagaatagcagaaaaagg

SEQ ID NO: 95373 - DNA, 22 bp, Artificial Sequence
  Synthetic oligonucleotide; TTG chr11 5291923 5291944 5291940 5291945 +
atcaagaatagcagaaaaagga

SEQ ID NO: 95374 - DNA, 22 bp, Artificial Sequence
  Synthetic oligonucleotide; TTA chr11 5291961 5291982 5291978 5291983 +
acaaatgattgtcatgccaaca

SEQ ID NO: 95375 - DNA, 22 bp, Artificial Sequence
  Synthetic oligonucleotide; TTG chr11 5291972 5291993 5291989 5291994 +
tcatgccaacagtacagataac

SEQ ID NO: 95376 - DNA, 22 bp, Artificial Sequence
  Synthetic oligonucleotide; CTC chr11 5291996 5292017 5292013 5292018 +
tgctaataaaggtagaggcata

SEQ ID NO: 95377 - DNA, 22 bp, Artificial Sequence
  Synthetic oligonucleotide; CTG chr11 5291998 5292019 5292015 5292020 +
ctaataaaggtagaggcataat

SEQ ID NO: 95378 - DNA, 22 bp, Artificial Sequence
  Synthetic oligonucleotide; CTA chr11 5292001 5292022 5292018 5292023 +
ataaaggtagaggcataataca

SEQ ID NO: 95379 - DNA, 22 bp, Artificial Sequence
  Synthetic oligonucleotide; CTA chr11 5292041 5292062 5292058 5292063 +
catagtagttaaaggacatggc

SEQ ID NO: 95380 - DNA, 22 bp, Artificial Sequence
  Synthetic oligonucleotide; TTA chr11 5292052 5292073 5292069 5292074 +
aaggacatggccatcagtacag

SEQ ID NO: 95381 - DNA, 22 bp, Artificial Sequence
  Synthetic oligonucleotide; TTC chr11 5292081 5292102 5292098 5292103 +
cataaaggagaacctaaagagg

SEQ ID NO: 95382 - DNA, 22 bp, Artificial Sequence
  Synthetic oligonucleotide; CTA chr11 5292097 5292118 5292114 5292119 +
aagaggaagaataatttgtcag

SEQ ID NO: 95383 - DNA, 22 bp, Artificial Sequence
  Synthetic oligonucleotide; TTT chr11 5292114 5292135 5292131 5292136 +
gtcagaagcttaaaagctgaac

SEQ ID NO: 95384 - DNA, 22 bp, Artificial Sequence
  Synthetic oligonucleotide; TTG chr11 5292115 5292136 5292132 5292137 +
tcagaagcttaaaagctgaact

SEQ ID NO: 95385 - DNA, 22 bp, Artificial Sequence
  Synthetic oligonucleotide; CTT chr11 5292125 5292146 5292142 5292147 +
aaaagctgaactctgaggcatt

SEQ ID NO: 95386 - DNA, 22 bp, Artificial Sequence
  Synthetic oligonucleotide; TTA chr11 5292126 5292147 5292143 5292148 +
aaagctgaactctgaggcatta

SEQ ID NO: 95387 - DNA, 22 bp, Artificial Sequence
  Synthetic oligonucleotide; CTG chr11 5292133 5292154 5292150 5292155 +
aactctgaggcattaaactaca

SEQ ID NO: 95388 - DNA, 22 bp, Artificial Sequence
  Synthetic oligonucleotide; CTC chr11 5292138 5292159 5292155 5292160 +
tgaggcattaaactacaatatc

SEQ ID NO: 95389 - DNA, 22 bp, Artificial Sequence
  Synthetic oligonucleotide; CTG chr11 5292140 5292161 5292157 5292162 +
aggcattaaactacaatatcct

SEQ ID NO: 95390 - DNA, 22 bp, Artificial Sequence
  Synthetic oligonucleotide; TTA chr11 5292148 5292169 5292165 5292170 +
aactacaatatccttttgactg

SEQ ID NO: 95391 - DNA, 22 bp, Artificial Sequence
  Synthetic oligonucleotide; CTA chr11 5292153 5292174 5292170 5292175 +
caatatccttttgactgtggaa

SEQ ID NO: 95392 - DNA, 22 bp, Artificial Sequence
  Synthetic oligonucleotide; CTT chr11 5292163 5292184 5292180 5292185 +
ttgactgtggaaagggtggtga

SEQ ID NO: 95393 - DNA, 22 bp, Artificial Sequence
  Synthetic oligonucleotide; TTT chr11 5292164 5292185 5292181 5292186 +
tgactgtggaaagggtggtgaa

SEQ ID NO: 95394 - DNA, 22 bp, Artificial Sequence
  Synthetic oligonucleotide; TTT chr11 5292165 5292186 5292182 5292187 +
gactgtggaaagggtggtgaaa

SEQ ID NO: 95395 - DNA, 22 bp, Artificial Sequence
  Synthetic oligonucleotide; TTG chr11 5292166 5292187 5292183 5292188 +
actgtggaaagggtggtgaaag

SEQ ID NO: 95396 - DNA, 22 bp, Artificial Sequence
  Synthetic oligonucleotide; CTG chr11 5292170 5292191 5292187 5292192 +
tggaaagggtggtgaaaggaaa

SEQ ID NO: 95397 - DNA, 22 bp, Artificial Sequence
  Synthetic oligonucleotide; TTC chr11 5292196 5292217 5292213 5292218 +
aaggacatttgagccaacatag

SEQ ID NO: 95398 - DNA, 22 bp, Artificial Sequence
  Synthetic oligonucleotide; TTT chr11 5292206 5292227 5292223 5292228 +
gagccaacatagagaggaacat

SEQ ID NO: 95399 - DNA, 22 bp, Artificial Sequence
  Synthetic oligonucleotide; TTG chr11 5292207 5292228 5292224 5292229 +
agccaacatagagaggaacatt

SEQ ID NO: 95400 - DNA, 22 bp, Artificial Sequence
  Synthetic oligonucleotide; TTG chr11 5292230 5292251 5292247 5292252 +
gcttggtgagggatatctgtcc

SEQ ID NO: 95401 - DNA, 22 bp, Artificial Sequence
  Synthetic oligonucleotide; CTT chr11 5292234 5292255 5292251 5292256 +
ggtgagggatatctgtcctgat

SEQ ID NO: 95402 - DNA, 22 bp, Artificial Sequence
  Synthetic oligonucleotide; TTG chr11 5292235 5292256 5292252 5292257 +
gtgagggatatctgtcctgatg

SEQ ID NO: 95403 - DNA, 22 bp, Artificial Sequence
  Synthetic oligonucleotide; CTG chr11 5292249 5292270 5292266 5292271 +
tcctgatgttgtccaggatggt

SEQ ID NO: 95404 - DNA, 22 bp, Artificial Sequence
  Synthetic oligonucleotide; CTG chr11 5292254 5292275 5292271 5292276 +
atgttgtccaggatggtgatga

SEQ ID NO: 95405 - DNA, 22 bp, Artificial Sequence
  Synthetic oligonucleotide; TTG chr11 5292260 5292281 5292277 5292282 +
tccaggatggtgatgataccca

SEQ ID NO: 95406 - DNA, 22 bp, Artificial Sequence
  Synthetic oligonucleotide; CTA chr11 5292322 5292343 5292339 5292344 +
gacaaagaggcatcaaagatag

SEQ ID NO: 95407 - DNA, 22 bp, Artificial Sequence
  Synthetic oligonucleotide; TTT chr11 5292352 5292373 5292369 5292374 +
gtaaggatgaaatagaacgttt

SEQ ID NO: 95408 - DNA, 22 bp, Artificial Sequence
  Synthetic oligonucleotide; TTG chr11 5292353 5292374 5292370 5292375 +
taaggatgaaatagaacgtttt

SEQ ID NO: 95409 - DNA, 22 bp, Artificial Sequence
  Synthetic oligonucleotide; TTT chr11 5292374 5292395 5292391 5292396 +
tttgcgttagtcaccgtgagga

SEQ ID NO: 95410 - DNA, 22 bp, Artificial Sequence
  Synthetic oligonucleotide; TTT chr11 5292375 5292396 5292392 5292397 +
ttgcgttagtcaccgtgaggat

SEQ ID NO: 95411 - DNA, 22 bp, Artificial Sequence
  Synthetic oligonucleotide; TTT chr11 5292376 5292397 5292393 5292398 +
tgcgttagtcaccgtgaggatg

SEQ ID NO: 95412 - DNA, 22 bp, Artificial Sequence
  Synthetic oligonucleotide; TTT chr11 5292377 5292398 5292394 5292399 +
gcgttagtcaccgtgaggatga

SEQ ID NO: 95413 - DNA, 22 bp, Artificial Sequence
  Synthetic oligonucleotide; TTG chr11 5292378 5292399 5292395 5292400 +
cgttagtcaccgtgaggatgac

SEQ ID NO: 95414 - DNA, 22 bp, Artificial Sequence
  Synthetic oligonucleotide; TTA chr11 5292383 5292404 5292400 5292405 +
gtcaccgtgaggatgaccggta

SEQ ID NO: 95415 - DNA, 22 bp, Artificial Sequence
  Synthetic oligonucleotide; CTA chr11 5292423 5292444 5292440 5292445 +
atgcctttgttattttttatta

SEQ ID NO: 95416 - DNA, 22 bp, Artificial Sequence
  Synthetic oligonucleotide; CTT chr11 5292430 5292451 5292447 5292452 +
tgttattttttattatttcatt

SEQ ID NO: 95417 - DNA, 22 bp, Artificial Sequence
  Synthetic oligonucleotide; TTT chr11 5292431 5292452 5292448 5292453 +
gttattttttattatttcattt

SEQ ID NO: 95418 - DNA, 22 bp, Artificial Sequence
  Synthetic oligonucleotide; TTG chr11 5292432 5292453 5292449 5292454 +
ttattttttattatttcatttt

SEQ ID NO: 95419 - DNA, 22 bp, Artificial Sequence
  Synthetic oligonucleotide; TTA chr11 5292435 5292456 5292452 5292457 +
ttttttattatttcattttaaa

SEQ ID NO: 95420 - DNA, 22 bp, Artificial Sequence
  Synthetic oligonucleotide; TTT chr11 5292438 5292459 5292455 5292460 +
tttattatttcattttaaattg

SEQ ID NO: 95421 - DNA, 22 bp, Artificial Sequence
  Synthetic oligonucleotide; TTT chr11 5292439 5292460 5292456 5292461 +
ttattatttcattttaaattga

SEQ ID NO: 95422 - DNA, 22 bp, Artificial Sequence
  Synthetic oligonucleotide; TTT chr11 5292440 5292461 5292457 5292462 +
tattatttcattttaaattgac

SEQ ID NO: 95423 - DNA, 22 bp, Artificial Sequence
  Synthetic oligonucleotide; TTT chr11 5292441 5292462 5292458 5292463 +
attatttcattttaaattgaca

SEQ ID NO: 95424 - DNA, 22 bp, Artificial Sequence
  Synthetic oligonucleotide; TTA chr11 5292442 5292463 5292459 5292464 +
ttatttcattttaaattgacaa

SEQ ID NO: 95425 - DNA, 22 bp, Artificial Sequence
  Synthetic oligonucleotide; TTA chr11 5292445 5292466 5292462 5292467 +
tttcattttaaattgacaaata

SEQ ID NO: 95426 - DNA, 22 bp, Artificial Sequence
  Synthetic oligonucleotide; TTT chr11 5292448 5292469 5292465 5292470 +
cattttaaattgacaaataata

SEQ ID NO: 95427 - DNA, 22 bp, Artificial Sequence
  Synthetic oligonucleotide; TTC chr11 5292449 5292470 5292466 5292471 +
attttaaattgacaaataataa

SEQ ID NO: 95428 - DNA, 22 bp, Artificial Sequence
  Synthetic oligonucleotide; TTT chr11 5292453 5292474 5292470 5292475 +
taaattgacaaataataattgt

SEQ ID NO: 95429 - DNA, 22 bp, Artificial Sequence
  Synthetic oligonucleotide; TTT chr11 5292454 5292475 5292471 5292476 +
aaattgacaaataataattgtg

SEQ ID NO: 95430 - DNA, 22 bp, Artificial Sequence
  Synthetic oligonucleotide; TTA chr11 5292455 5292476 5292472 5292477 +
aattgacaaataataattgtgt

SEQ ID NO: 95431 - DNA, 22 bp, Artificial Sequence
  Synthetic oligonucleotide; TTG chr11 5292460 5292481 5292477 5292482 +
acaaataataattgtgtgtatt

SEQ ID NO: 95432 - DNA, 22 bp, Artificial Sequence
  Synthetic oligonucleotide; TTG chr11 5292474 5292495 5292491 5292496 +
tgtgtattcatggggtacaaca

SEQ ID NO: 95433 - DNA, 22 bp, Artificial Sequence
  Synthetic oligonucleotide; TTC chr11 5292483 5292504 5292500 5292505 +
atggggtacaacatgatgcttt

SEQ ID NO: 95434 - DNA, 22 bp, Artificial Sequence
  Synthetic oligonucleotide; CTT chr11 5292504 5292525 5292521 5292526 +
tggtgtacgtgtacaatattaa

SEQ ID NO: 95435 - DNA, 22 bp, Artificial Sequence
  Synthetic oligonucleotide; TTT chr11 5292505 5292526 5292522 5292527 +
ggtgtacgtgtacaatattaaa

SEQ ID NO: 95436 - DNA, 22 bp, Artificial Sequence
  Synthetic oligonucleotide; TTG chr11 5292506 5292527 5292523 5292528 +
gtgtacgtgtacaatattaaat

SEQ ID NO: 95437 - DNA, 22 bp, Artificial Sequence
  Synthetic oligonucleotide; TTA chr11 5292525 5292546 5292542 5292547 +
aatggttaaataaggctaatta

SEQ ID NO: 95438 - DNA, 22 bp, Artificial Sequence
  Synthetic oligonucleotide; TTA chr11 5292533 5292554 5292550 5292555 +
aataaggctaattaacaaatcc

SEQ ID NO: 95439 - DNA, 22 bp, Artificial Sequence
  Synthetic oligonucleotide; CTA chr11 5292543 5292564 5292560 5292565 +
attaacaaatccaccacttcac

SEQ ID NO: 95440 - DNA, 22 bp, Artificial Sequence
  Synthetic oligonucleotide; TTA chr11 5292547 5292568 5292564 5292569 +
acaaatccaccacttcacatac

SEQ ID NO: 95441 - DNA, 22 bp, Artificial Sequence
  Synthetic oligonucleotide; CTT chr11 5292562 5292583 5292579 5292584 +
cacatacttattttttgtggtg

SEQ ID NO: 95442 - DNA, 22 bp, Artificial Sequence
  Synthetic oligonucleotide; TTC chr11 5292563 5292584 5292580 5292585 +
acatacttattttttgtggtga

SEQ ID NO: 95443 - DNA, 22 bp, Artificial Sequence
  Synthetic oligonucleotide; CTT chr11 5292571 5292592 5292588 5292593 +
attttttgtggtgaaaacattt

SEQ ID NO: 95444 - DNA, 22 bp, Artificial Sequence
  Synthetic oligonucleotide; TTA chr11 5292572 5292593 5292589 5292594 +
ttttttgtggtgaaaacattta

SEQ ID NO: 95445 - DNA, 22 bp, Artificial Sequence
  Synthetic oligonucleotide; TTT chr11 5292575 5292596 5292592 5292597 +
tttgtggtgaaaacatttaaaa

SEQ ID NO: 95446 - DNA, 22 bp, Artificial Sequence
  Synthetic oligonucleotide; TTT chr11 5292576 5292597 5292593 5292598 +
ttgtggtgaaaacatttaaaat

SEQ ID NO: 95447 - DNA, 22 bp, Artificial Sequence
  Synthetic oligonucleotide; TTT chr11 5292577 5292598 5292594 5292599 +
tgtggtgaaaacatttaaaatt

SEQ ID NO: 95448 - DNA, 22 bp, Artificial Sequence
  Synthetic oligonucleotide; TTT chr11 5292578 5292599 5292595 5292600 +
gtggtgaaaacatttaaaattt

SEQ ID NO: 95449 - DNA, 22 bp, Artificial Sequence
  Synthetic oligonucleotide; TTG chr11 5292579 5292600 5292596 5292601 +
tggtgaaaacatttaaaattta

SEQ ID NO: 95450 - DNA, 22 bp, Artificial Sequence
  Synthetic oligonucleotide; TTT chr11 5292593 5292614 5292610 5292615 +
aaaatttacactcttcattcaa

SEQ ID NO: 95451 - DNA, 22 bp, Artificial Sequence
  Synthetic oligonucleotide; TTA chr11 5292594 5292615 5292611 5292616 +
aaatttacactcttcattcaaa

SEQ ID NO: 95452 - DNA, 22 bp, Artificial Sequence
  Synthetic oligonucleotide; TTT chr11 5292600 5292621 5292617 5292622 +
acactcttcattcaaaaatctg

SEQ ID NO: 95453 - DNA, 22 bp, Artificial Sequence
  Synthetic oligonucleotide; TTA chr11 5292601 5292622 5292618 5292623 +
cactcttcattcaaaaatctgg

SEQ ID NO: 95454 - DNA, 22 bp, Artificial Sequence
  Synthetic oligonucleotide; CTC chr11 5292606 5292627 5292623 5292628 +
ttcattcaaaaatctggaacat

SEQ ID NO: 95455 - DNA, 22 bp, Artificial Sequence
  Synthetic oligonucleotide; CTT chr11 5292608 5292629 5292625 5292630 +
cattcaaaaatctggaacatag

SEQ ID NO: 95456 - DNA, 22 bp, Artificial Sequence
  Synthetic oligonucleotide; TTC chr11 5292609 5292630 5292626 5292631 +
attcaaaaatctggaacatagt

SEQ ID NO: 95457 - DNA, 22 bp, Artificial Sequence
  Synthetic oligonucleotide; TTC chr11 5292613 5292634 5292630 5292635 +
aaaaatctggaacatagttaaa

SEQ ID NO: 95458 - DNA, 22 bp, Artificial Sequence
  Synthetic oligonucleotide; CTG chr11 5292622 5292643 5292639 5292644 +
gaacatagttaaaatgtcatat

SEQ ID NO: 95459 - DNA, 22 bp, Artificial Sequence
  Synthetic oligonucleotide; TTA chr11 5292633 5292654 5292650 5292655 +
aaatgtcatatgtgtcaggatg

SEQ ID NO: 95460 - DNA, 22 bp, Artificial Sequence
  Synthetic oligonucleotide; TTT chr11 5292668 5292689 5292685 5292690 +
agaaaacattgaatgattcctt

SEQ ID NO: 95461 - DNA, 22 bp, Artificial Sequence
  Synthetic oligonucleotide; TTA chr11 5292669 5292690 5292686 5292691 +
gaaaacattgaatgattccttg

SEQ ID NO: 95462 - DNA, 22 bp, Artificial Sequence
  Synthetic oligonucleotide; TTG chr11 5292679 5292700 5292696 5292701 +
aatgattccttgcaaatcatga

SEQ ID NO: 95463 - DNA, 22 bp, Artificial Sequence
  Synthetic oligonucleotide; TTC chr11 5292687 5292708 5292704 5292709 +
cttgcaaatcatgaataatgat

SEQ ID NO: 95464 - DNA, 22 bp, Artificial Sequence
  Synthetic oligonucleotide; CTT chr11 5292690 5292711 5292707 5292712 +
gcaaatcatgaataatgatcaa

SEQ ID NO: 95465 - DNA, 22 bp, Artificial Sequence
  Synthetic oligonucleotide; TTG chr11 5292691 5292712 5292708 5292713 +
caaatcatgaataatgatcaat

SEQ ID NO: 95466 - DNA, 22 bp, Artificial Sequence
  Synthetic oligonucleotide; CTA chr11 5292726 5292747 5292743 5292748 +
tgaaaatgagaaaattttggag

SEQ ID NO: 95467 - DNA, 22 bp, Artificial Sequence
  Synthetic oligonucleotide; TTT chr11 5292743 5292764 5292760 5292765 +
tggagcctgaactaaaaatatc

SEQ ID NO: 95468 - DNA, 22 bp, Artificial Sequence
  Synthetic oligonucleotide; TTT chr11 5292744 5292765 5292761 5292766 +
ggagcctgaactaaaaatatct

SEQ ID NO: 95469 - DNA, 22 bp, Artificial Sequence
  Synthetic oligonucleotide; TTG chr11 5292745 5292766 5292762 5292767 +
gagcctgaactaaaaatatctt

SEQ ID NO: 95470 - DNA, 22 bp, Artificial Sequence
  Synthetic oligonucleotide; CTG chr11 5292752 5292773 5292769 5292774 +
aactaaaaatatcttgatcact

SEQ ID NO: 95471 - DNA, 22 bp, Artificial Sequence
  Synthetic oligonucleotide; CTA chr11 5292757 5292778 5292774 5292779 +
aaaatatcttgatcacttttgg

SEQ ID NO: 95472 - DNA, 22 bp, Artificial Sequence
  Synthetic oligonucleotide; CTT chr11 5292767 5292788 5292784 5292789 +
gatcacttttggaggtcaggaa

SEQ ID NO: 95473 - DNA, 22 bp, Artificial Sequence
  Synthetic oligonucleotide; TTG chr11 5292768 5292789 5292785 5292790 +
atcacttttggaggtcaggaat

SEQ ID NO: 95474 - DNA, 22 bp, Artificial Sequence
  Synthetic oligonucleotide; CTT chr11 5292775 5292796 5292792 5292797 +
ttggaggtcaggaattcagatt

SEQ ID NO: 95475 - DNA, 22 bp, Artificial Sequence
  Synthetic oligonucleotide; TTT chr11 5292776 5292797 5292793 5292798 +
tggaggtcaggaattcagattc

SEQ ID NO: 95476 - DNA, 22 bp, Artificial Sequence
  Synthetic oligonucleotide; TTT chr11 5292777 5292798 5292794 5292799 +
ggaggtcaggaattcagattca

SEQ ID NO: 95477 - DNA, 22 bp, Artificial Sequence
  Synthetic oligonucleotide; TTG chr11 5292778 5292799 5292795 5292800 +
gaggtcaggaattcagattcat

SEQ ID NO: 95478 - DNA, 22 bp, Artificial Sequence
  Synthetic oligonucleotide; TTC chr11 5292792 5292813 5292809 5292814 +
agattcatttttctcggcctgt

SEQ ID NO: 95479 - DNA, 22 bp, Artificial Sequence
  Synthetic oligonucleotide; TTC chr11 5292798 5292819 5292815 5292820 +
atttttctcggcctgtaaagaa

SEQ ID NO: 95480 - DNA, 22 bp, Artificial Sequence
  Synthetic oligonucleotide; TTT chr11 5292802 5292823 5292819 5292824 +
ttctcggcctgtaaagaacttg

SEQ ID NO: 95481 - DNA, 22 bp, Artificial Sequence
  Synthetic oligonucleotide; TTT chr11 5292803 5292824 5292820 5292825 +
tctcggcctgtaaagaacttga

SEQ ID NO: 95482 - DNA, 22 bp, Artificial Sequence
  Synthetic oligonucleotide; TTT chr11 5292804 5292825 5292821 5292826 +
ctcggcctgtaaagaacttgaa

SEQ ID NO: 95483 - DNA, 22 bp, Artificial Sequence
  Synthetic oligonucleotide; TTC chr11 5292805 5292826 5292822 5292827 +
tcggcctgtaaagaacttgaaa

SEQ ID NO: 95484 - DNA, 22 bp, Artificial Sequence
  Synthetic oligonucleotide; CTC chr11 5292807 5292828 5292824 5292829 +
ggcctgtaaagaacttgaaatt

SEQ ID NO: 95485 - DNA, 22 bp, Artificial Sequence
  Synthetic oligonucleotide; CTG chr11 5292813 5292834 5292830 5292835 +
taaagaacttgaaattgcatta

SEQ ID NO: 95486 - DNA, 22 bp, Artificial Sequence
  Synthetic oligonucleotide; CTT chr11 5292823 5292844 5292840 5292845 +
gaaattgcattatagcagaatg

SEQ ID NO: 95487 - DNA, 22 bp, Artificial Sequence
  Synthetic oligonucleotide; TTG chr11 5292824 5292845 5292841 5292846 +
aaattgcattatagcagaatgt

SEQ ID NO: 95488 - DNA, 22 bp, Artificial Sequence
  Synthetic oligonucleotide; TTG chr11 5292830 5292851 5292847 5292852 +
cattatagcagaatgtaggcct

SEQ ID NO: 95489 - DNA, 22 bp, Artificial Sequence
  Synthetic oligonucleotide; TTA chr11 5292835 5292856 5292852 5292857 +
tagcagaatgtaggccttgagt

SEQ ID NO: 95490 - DNA, 22 bp, Artificial Sequence
  Synthetic oligonucleotide; CTT chr11 5292853 5292874 5292870 5292875 +
gagtggattgatgtggaagcaa

SEQ ID NO: 95491 - DNA, 22 bp, Artificial Sequence
  Synthetic oligonucleotide; TTG chr11 5292854 5292875 5292871 5292876 +
agtggattgatgtggaagcaaa

SEQ ID NO: 95492 - DNA, 22 bp, Artificial Sequence
  Synthetic oligonucleotide; TTG chr11 5292863 5292884 5292880 5292885 +
atgtggaagcaaaacaagccac

SEQ ID NO: 95493 - DNA, 22 bp, Artificial Sequence
  Synthetic oligonucleotide; CTT chr11 5292922 5292943 5292939 5292944 +
gtgccattaattttaagcagtt

SEQ ID NO: 95494 - DNA, 22 bp, Artificial Sequence
  Synthetic oligonucleotide; TTG chr11 5292923 5292944 5292940 5292945 +
tgccattaattttaagcagttt

SEQ ID NO: 95495 - DNA, 22 bp, Artificial Sequence
  Synthetic oligonucleotide; TTA chr11 5292931 5292952 5292948 5292953 +
attttaagcagtttcatatgaa

SEQ ID NO: 95496 - DNA, 22 bp, Artificial Sequence
  Synthetic oligonucleotide; TTT chr11 5292935 5292956 5292952 5292957 +
taagcagtttcatatgaaacgt

SEQ ID NO: 95497 - DNA, 22 bp, Artificial Sequence
  Synthetic oligonucleotide; TTT chr11 5292936 5292957 5292953 5292958 +
aagcagtttcatatgaaacgtg

SEQ ID NO: 95498 - DNA, 22 bp, Artificial Sequence
  Synthetic oligonucleotide; TTA chr11 5292937 5292958 5292954 5292959 +
agcagtttcatatgaaacgtgg

SEQ ID NO: 95499 - DNA, 22 bp, Artificial Sequence
  Synthetic oligonucleotide; TTT chr11 5292945 5292966 5292962 5292967 +
catatgaaacgtgggtttcttt

SEQ ID NO: 95500 - DNA, 22 bp, Artificial Sequence
  Synthetic oligonucleotide; TTC chr11 5292946 5292967 5292963 5292968 +
atatgaaacgtgggtttcttta

SEQ ID NO: 95501 - DNA, 22 bp, Artificial Sequence
  Synthetic oligonucleotide; TTT chr11 5292963 5292984 5292980 5292985 +
ctttattgctacgtcacagtca

SEQ ID NO: 95502 - DNA, 22 bp, Artificial Sequence
  Synthetic oligonucleotide; TTC chr11 5292964 5292985 5292981 5292986 +
tttattgctacgtcacagtcag

SEQ ID NO: 95503 - DNA, 22 bp, Artificial Sequence
  Synthetic oligonucleotide; CTT chr11 5292966 5292987 5292983 5292988 +
tattgctacgtcacagtcagat

SEQ ID NO: 95504 - DNA, 22 bp, Artificial Sequence
  Synthetic oligonucleotide; TTT chr11 5292967 5292988 5292984 5292989 +
attgctacgtcacagtcagatg

SEQ ID NO: 95505 - DNA, 22 bp, Artificial Sequence
  Synthetic oligonucleotide; TTA chr11 5292968 5292989 5292985 5292990 +
ttgctacgtcacagtcagatgt

SEQ ID NO: 95506 - DNA, 22 bp, Artificial Sequence
  Synthetic oligonucleotide; TTG chr11 5292971 5292992 5292988 5292993 +
ctacgtcacagtcagatgttca

SEQ ID NO: 95507 - DNA, 22 bp, Artificial Sequence
  Synthetic oligonucleotide; CTA chr11 5292974 5292995 5292991 5292996 +
cgtcacagtcagatgttcatgg

SEQ ID NO: 95508 - DNA, 22 bp, Artificial Sequence
  Synthetic oligonucleotide; TTC chr11 5292992 5293013 5293009 5293014 +
atggtcctgagtgctctcctcc

SEQ ID NO: 95509 - DNA, 22 bp, Artificial Sequence
  Synthetic oligonucleotide; CTG chr11 5293001 5293022 5293018 5293023 +
agtgctctcctccaagcagtgg

SEQ ID NO: 95510 - DNA, 22 bp, Artificial Sequence
  Synthetic oligonucleotide; CTC chr11 5293008 5293029 5293025 5293030 +
tcctccaagcagtgggccagga

SEQ ID NO: 95511 - DNA, 22 bp, Artificial Sequence
  Synthetic oligonucleotide; CTC chr11 5293010 5293031 5293027 5293032 +
ctccaagcagtgggccaggagt

SEQ ID NO: 95512 - DNA, 22 bp, Artificial Sequence
  Synthetic oligonucleotide; CTC chr11 5293013 5293034 5293030 5293035 +
caagcagtgggccaggagtcca

SEQ ID NO: 95513 - DNA, 22 bp, Artificial Sequence
  Synthetic oligonucleotide; CTT chr11 5293043 5293064 5293060 5293065 +
cctgtgattgactttatcattt

SEQ ID NO: 95514 - DNA, 22 bp, Artificial Sequence
  Synthetic oligonucleotide; TTC chr11 5293044 5293065 5293061 5293066 +
ctgtgattgactttatcatttc

SEQ ID NO: 95515 - DNA, 22 bp, Artificial Sequence
  Synthetic oligonucleotide; CTG chr11 5293047 5293068 5293064 5293069 +
tgattgactttatcatttcaga

SEQ ID NO: 95516 - DNA, 22 bp, Artificial Sequence
  Synthetic oligonucleotide; TTG chr11 5293053 5293074 5293070 5293075 +
actttatcatttcagaatcttt

SEQ ID NO: 95517 - DNA, 22 bp, Artificial Sequence
  Synthetic oligonucleotide; CTT chr11 5293057 5293078 5293074 5293079 +
tatcatttcagaatcttttact

SEQ ID NO: 95518 - DNA, 22 bp, Artificial Sequence
  Synthetic oligonucleotide; TTT chr11 5293058 5293079 5293075 5293080 +
atcatttcagaatcttttactt

SEQ ID NO: 95519 - DNA, 22 bp, Artificial Sequence
  Synthetic oligonucleotide; TTA chr11 5293059 5293080 5293076 5293081 +
tcatttcagaatcttttacttt

SEQ ID NO: 95520 - DNA, 22 bp, Artificial Sequence
  Synthetic oligonucleotide; TTT chr11 5293065 5293086 5293082 5293087 +
cagaatcttttactttctgcca

SEQ ID NO: 95521 - DNA, 22 bp, Artificial Sequence
  Synthetic oligonucleotide; TTC chr11 5293066 5293087 5293083 5293088 +
agaatcttttactttctgccac

SEQ ID NO: 95522 - DNA, 22 bp, Artificial Sequence
  Synthetic oligonucleotide; CTT chr11 5293074 5293095 5293091 5293096 +
ttactttctgccacatagagga

SEQ ID NO: 95523 - DNA, 22 bp, Artificial Sequence
  Synthetic oligonucleotide; TTT chr11 5293075 5293096 5293092 5293097 +
tactttctgccacatagaggaa

SEQ ID NO: 95524 - DNA, 22 bp, Artificial Sequence
  Synthetic oligonucleotide; TTT chr11 5293076 5293097 5293093 5293098 +
actttctgccacatagaggaag

SEQ ID NO: 95525 - DNA, 22 bp, Artificial Sequence
  Synthetic oligonucleotide; TTA chr11 5293077 5293098 5293094 5293099 +
ctttctgccacatagaggaagg

SEQ ID NO: 95526 - DNA, 22 bp, Artificial Sequence
  Synthetic oligonucleotide; CTT chr11 5293080 5293101 5293097 5293102 +
tctgccacatagaggaagggaa

SEQ ID NO: 95527 - DNA, 22 bp, Artificial Sequence
  Synthetic oligonucleotide; TTT chr11 5293081 5293102 5293098 5293103 +
ctgccacatagaggaagggaaa

SEQ ID NO: 95528 - DNA, 22 bp, Artificial Sequence
  Synthetic oligonucleotide; TTC chr11 5293082 5293103 5293099 5293104 +
tgccacatagaggaagggaaag

SEQ ID NO: 95529 - DNA, 22 bp, Artificial Sequence
  Synthetic oligonucleotide; CTG chr11 5293084 5293105 5293101 5293106 +
ccacatagaggaagggaaagag

SEQ ID NO: 95530 - DNA, 22 bp, Artificial Sequence
  Synthetic oligonucleotide; CTC chr11 5293124 5293145 5293141 5293146 +
tgccttagggagtaacacatta

SEQ ID NO: 95531 - DNA, 22 bp, Artificial Sequence
  Synthetic oligonucleotide; CTG chr11 5293126 5293147 5293143 5293148 +
ccttagggagtaacacattatt

SEQ ID NO: 95532 - DNA, 22 bp, Artificial Sequence
  Synthetic oligonucleotide; CTT chr11 5293130 5293151 5293147 5293152 +
agggagtaacacattattatct

SEQ ID NO: 95533 - DNA, 22 bp, Artificial Sequence
  Synthetic oligonucleotide; TTA chr11 5293131 5293152 5293148 5293153 +
gggagtaacacattattatctc

SEQ ID NO: 95534 - DNA, 22 bp, Artificial Sequence
  Synthetic oligonucleotide; TTA chr11 5293146 5293167 5293163 5293168 +
ttatctccacattattttagtc

SEQ ID NO: 95535 - DNA, 22 bp, Artificial Sequence
  Synthetic oligonucleotide; TTA chr11 5293149 5293170 5293166 5293171 +
tctccacattattttagtcaca

SEQ ID NO: 95536 - DNA, 22 bp, Artificial Sequence
  Synthetic oligonucleotide; CTC chr11 5293153 5293174 5293170 5293175 +
cacattattttagtcacaacca

SEQ ID NO: 95537 - DNA, 22 bp, Artificial Sequence
  Synthetic oligonucleotide; TTA chr11 5293160 5293181 5293177 5293182 +
ttttagtcacaaccagtcacat

SEQ ID NO: 95538 - DNA, 22 bp, Artificial Sequence
  Synthetic oligonucleotide; TTT chr11 5293163 5293184 5293180 5293185 +
tagtcacaaccagtcacatggc

SEQ ID NO: 95539 - DNA, 22 bp, Artificial Sequence
  Synthetic oligonucleotide; TTT chr11 5293164 5293185 5293181 5293186 +
agtcacaaccagtcacatggcc

SEQ ID NO: 95540 - DNA, 22 bp, Artificial Sequence
  Synthetic oligonucleotide; TTA chr11 5293165 5293186 5293182 5293187 +
gtcacaaccagtcacatggcca

SEQ ID NO: 95541 - DNA, 22 bp, Artificial Sequence
  Synthetic oligonucleotide; TTA chr11 5293192 5293213 5293209 5293214 +
attgcaagggctgttggaaatt

SEQ ID NO: 95542 - DNA, 22 bp, Artificial Sequence
  Synthetic oligonucleotide; TTG chr11 5293196 5293217 5293213 5293218 +
caagggctgttggaaattgttg

SEQ ID NO: 95543 - DNA, 22 bp, Artificial Sequence
  Synthetic oligonucleotide; CTG chr11 5293205 5293226 5293222 5293227 +
ttggaaattgttgagaagtata

SEQ ID NO: 95544 - DNA, 22 bp, Artificial Sequence
  Synthetic oligonucleotide; TTG chr11 5293208 5293229 5293225 5293230 +
gaaattgttgagaagtatattg

SEQ ID NO: 95545 - DNA, 22 bp, Artificial Sequence
  Synthetic oligonucleotide; TTG chr11 5293215 5293236 5293232 5293237 +
ttgagaagtatattgatttagt

SEQ ID NO: 95546 - DNA, 22 bp, Artificial Sequence
  Synthetic oligonucleotide; TTG chr11 5293218 5293239 5293235 5293240 +
agaagtatattgatttagtgac

SEQ ID NO: 95547 - DNA, 22 bp, Artificial Sequence
  Synthetic oligonucleotide; TTG chr11 5293230 5293251 5293247 5293252 +
atttagtgactcatattgtttc

SEQ ID NO: 95548 - DNA, 22 bp, Artificial Sequence
  Synthetic oligonucleotide; TTT chr11 5293234 5293255 5293251 5293256 +
agtgactcatattgtttctgac

SEQ ID NO: 95549 - DNA, 22 bp, Artificial Sequence
  Synthetic oligonucleotide; TTA chr11 5293235 5293256 5293252 5293257 +
gtgactcatattgtttctgaca

SEQ ID NO: 95550 - DNA, 22 bp, Artificial Sequence
  Synthetic oligonucleotide; CTC chr11 5293242 5293263 5293259 5293264 +
atattgtttctgacatactgtg

SEQ ID NO: 95551 - DNA, 22 bp, Artificial Sequence
  Synthetic oligonucleotide; TTG chr11 5293248 5293269 5293265 5293270 +
tttctgacatactgtgtccgga

SEQ ID NO: 95552 - DNA, 22 bp, Artificial Sequence
  Synthetic oligonucleotide; TTT chr11 5293251 5293272 5293268 5293273 +
ctgacatactgtgtccggaatt

SEQ ID NO: 95553 - DNA, 22 bp, Artificial Sequence
  Synthetic oligonucleotide; TTC chr11 5293252 5293273 5293269 5293274 +
tgacatactgtgtccggaattg

SEQ ID NO: 95554 - DNA, 22 bp, Artificial Sequence
  Synthetic oligonucleotide; CTG chr11 5293254 5293275 5293271 5293276 +
acatactgtgtccggaattggt

SEQ ID NO: 95555 - DNA, 22 bp, Artificial Sequence
  Synthetic oligonucleotide; CTG chr11 5293262 5293283 5293279 5293284 +
tgtccggaattggtgggttctt

SEQ ID NO: 95556 - DNA, 22 bp, Artificial Sequence
  Synthetic oligonucleotide; TTG chr11 5293274 5293295 5293291 5293296 +
gtgggttcttggtttcactgac

SEQ ID NO: 95557 - DNA, 22 bp, Artificial Sequence
  Synthetic oligonucleotide; TTC chr11 5293282 5293303 5293299 5293304 +
ttggtttcactgacttcaagaa

SEQ ID NO: 95558 - DNA, 22 bp, Artificial Sequence
  Synthetic oligonucleotide; CTT chr11 5293284 5293305 5293301 5293306 +
ggtttcactgacttcaagaatg

SEQ ID NO: 95559 - DNA, 22 bp, Artificial Sequence
  Synthetic oligonucleotide; TTG chr11 5293285 5293306 5293302 5293307 +
gtttcactgacttcaagaatga

SEQ ID NO: 95560 - DNA, 22 bp, Artificial Sequence
  Synthetic oligonucleotide; TTT chr11 5293289 5293310 5293306 5293311 +
cactgacttcaagaatgaagcc

SEQ ID NO: 95561 - DNA, 22 bp, Artificial Sequence
  Synthetic oligonucleotide; TTC chr11 5293290 5293311 5293307 5293312 +
actgacttcaagaatgaagccg

SEQ ID NO: 95562 - DNA, 22 bp, Artificial Sequence
  Synthetic oligonucleotide; CTG chr11 5293294 5293315 5293311 5293316 +
acttcaagaatgaagccgggga

SEQ ID NO: 95563 - DNA, 22 bp, Artificial Sequence
  Synthetic oligonucleotide; CTT chr11 5293298 5293319 5293315 5293320 +
caagaatgaagccggggaccct

SEQ ID NO: 95564 - DNA, 22 bp, Artificial Sequence
  Synthetic oligonucleotide; TTC chr11 5293299 5293320 5293316 5293321 +
aagaatgaagccggggaccctc

SEQ ID NO: 95565 - DNA, 22 bp, Artificial Sequence
  Synthetic oligonucleotide; CTC chr11 5293321 5293342 5293338 5293343 +
gtggtgagtgttacagttctta

SEQ ID NO: 95566 - DNA, 22 bp, Artificial Sequence
  Synthetic oligonucleotide; TTA chr11 5293334 5293355 5293351 5293356 +
cagttcttaaaggctgcgtgtg

SEQ ID NO: 95567 - DNA, 22 bp, Artificial Sequence
  Synthetic oligonucleotide; TTC chr11 5293340 5293361 5293357 5293362 +
ttaaaggctgcgtgtgtggagt

SEQ ID NO: 95568 - DNA, 22 bp, Artificial Sequence
  Synthetic oligonucleotide; CTT chr11 5293342 5293363 5293359 5293364 +
aaaggctgcgtgtgtggagttt

SEQ ID NO: 95569 - DNA, 22 bp, Artificial Sequence
  Synthetic oligonucleotide; TTA chr11 5293343 5293364 5293360 5293365 +
aaggctgcgtgtgtggagtttg

SEQ ID NO: 95570 - DNA, 22 bp, Artificial Sequence
  Synthetic oligonucleotide; CTG chr11 5293350 5293371 5293367 5293372 +
cgtgtgtggagtttgttcgttc

SEQ ID NO: 95571 - DNA, 22 bp, Artificial Sequence
  Synthetic oligonucleotide; TTT chr11 5293364 5293385 5293381 5293386 +
gttcgttctgatgtttggatgt

SEQ ID NO: 95572 - DNA, 22 bp, Artificial Sequence
  Synthetic oligonucleotide; TTG chr11 5293365 5293386 5293382 5293387 +
ttcgttctgatgtttggatgtg

SEQ ID NO: 95573 - DNA, 22 bp, Artificial Sequence
  Synthetic oligonucleotide; TTC chr11 5293368 5293389 5293385 5293390 +
gttctgatgtttggatgtgttc

SEQ ID NO: 95574 - DNA, 22 bp, Artificial Sequence
  Synthetic oligonucleotide; TTC chr11 5293372 5293393 5293389 5293394 +
tgatgtttggatgtgttcggag

SEQ ID NO: 95575 - DNA, 22 bp, Artificial Sequence
  Synthetic oligonucleotide; CTG chr11 5293374 5293395 5293391 5293396 +
atgtttggatgtgttcggagtt

SEQ ID NO: 95576 - DNA, 22 bp, Artificial Sequence
  Synthetic oligonucleotide; TTT chr11 5293380 5293401 5293397 5293402 +
ggatgtgttcggagtttcttcc

SEQ ID NO: 95577 - DNA, 22 bp, Artificial Sequence
  Synthetic oligonucleotide; TTG chr11 5293381 5293402 5293398 5293403 +
gatgtgttcggagtttcttcct

SEQ ID NO: 95578 - DNA, 22 bp, Artificial Sequence
  Synthetic oligonucleotide; TTC chr11 5293390 5293411 5293407 5293412 +
ggagtttcttccttctgatggg

SEQ ID NO: 95579 - DNA, 22 bp, Artificial Sequence
  Synthetic oligonucleotide; TTT chr11 5293397 5293418 5293414 5293419 +
cttccttctgatgggttcgtgg

SEQ ID NO: 95580 - DNA, 22 bp, Artificial Sequence
  Synthetic oligonucleotide; TTC chr11 5293398 5293419 5293415 5293420 +
ttccttctgatgggttcgtggt

SEQ ID NO: 95581 - DNA, 22 bp, Artificial Sequence
  Synthetic oligonucleotide; CTT chr11 5293400 5293421 5293417 5293422 +
ccttctgatgggttcgtggtct

SEQ ID NO: 95582 - DNA, 22 bp, Artificial Sequence
  Synthetic oligonucleotide; TTC chr11 5293401 5293422 5293418 5293423 +
cttctgatgggttcgtggtctc

SEQ ID NO: 95583 - DNA, 22 bp, Artificial Sequence
  Synthetic oligonucleotide; CTT chr11 5293404 5293425 5293421 5293426 +
ctgatgggttcgtggtctcgct

SEQ ID NO: 95584 - DNA, 22 bp, Artificial Sequence
  Synthetic oligonucleotide; TTC chr11 5293405 5293426 5293422 5293427 +
tgatgggttcgtggtctcgctg

SEQ ID NO: 95585 - DNA, 22 bp, Artificial Sequence
  Synthetic oligonucleotide; CTG chr11 5293407 5293428 5293424 5293429 +
atgggttcgtggtctcgctggc

SEQ ID NO: 95586 - DNA, 22 bp, Artificial Sequence
  Synthetic oligonucleotide; TTC chr11 5293415 5293436 5293432 5293437 +
gtggtctcgctggctcaggagt

SEQ ID NO: 95587 - DNA, 22 bp, Artificial Sequence
  Synthetic oligonucleotide; CTC chr11 5293423 5293444 5293440 5293445 +
gctggctcaggagtgaagctgc

SEQ ID NO: 95588 - DNA, 22 bp, Artificial Sequence
  Synthetic oligonucleotide; CTG chr11 5293427 5293448 5293444 5293449 +
gctcaggagtgaagctgcagac

SEQ ID NO: 95589 - DNA, 22 bp, Artificial Sequence
  Synthetic oligonucleotide; CTC chr11 5293431 5293452 5293448 5293453 +
aggagtgaagctgcagaccttc

SEQ ID NO: 95590 - DNA, 22 bp, Artificial Sequence
  Synthetic oligonucleotide; CTG chr11 5293444 5293465 5293461 5293466 +
cagaccttcacagtgaacgttc

SEQ ID NO: 95591 - DNA, 22 bp, Artificial Sequence
  Synthetic oligonucleotide; CTT chr11 5293452 5293473 5293469 5293474 +
cacagtgaacgttccagctctt

SEQ ID NO: 95592 - DNA, 22 bp, Artificial Sequence
  Synthetic oligonucleotide; TTC chr11 5293453 5293474 5293470 5293475 +
acagtgaacgttccagctctta

SEQ ID NO: 95593 - DNA, 22 bp, Artificial Sequence
  Synthetic oligonucleotide; TTC chr11 5293466 5293487 5293483 5293488 +
cagctcttaaggcggcgcctct

SEQ ID NO: 95594 - DNA, 22 bp, Artificial Sequence
  Synthetic oligonucleotide; CTC chr11 5293472 5293493 5293489 5293494 +
ttaaggcggcgcctctggagtt

SEQ ID NO: 95595 - DNA, 22 bp, Artificial Sequence
  Synthetic oligonucleotide; CTT chr11 5293474 5293495 5293491 5293496 +
aaggcggcgcctctggagttgt

SEQ ID NO: 95596 - DNA, 22 bp, Artificial Sequence
  Synthetic oligonucleotide; TTA chr11 5293475 5293496 5293492 5293497 +
aggcggcgcctctggagttgtt

SEQ ID NO: 95597 - DNA, 22 bp, Artificial Sequence
  Synthetic oligonucleotide; CTC chr11 5293487 5293508 5293504 5293509 +
tggagttgttcgttcctcccgg

SEQ ID NO: 95598 - DNA, 22 bp, Artificial Sequence
  Synthetic oligonucleotide; CTG chr11 5293489 5293510 5293506 5293511 +
gagttgttcgttcctcccggtg

SEQ ID NO: 95599 - DNA, 22 bp, Artificial Sequence
  Synthetic oligonucleotide; TTG chr11 5293495 5293516 5293512 5293517 +
ttcgttcctcccggtgggttcg

SEQ ID NO: 95600 - DNA, 22 bp, Artificial Sequence
  Synthetic oligonucleotide; TTC chr11 5293498 5293519 5293515 5293520 +
gttcctcccggtgggttcgtgg

SEQ ID NO: 95601 - DNA, 22 bp, Artificial Sequence
  Synthetic oligonucleotide; TTC chr11 5293502 5293523 5293519 5293524 +
ctcccggtgggttcgtggtctc

SEQ ID NO: 95602 - DNA, 22 bp, Artificial Sequence
  Synthetic oligonucleotide; CTC chr11 5293505 5293526 5293522 5293527 +
ccggtgggttcgtggtctcgct

SEQ ID NO: 95603 - DNA, 22 bp, Artificial Sequence
  Synthetic oligonucleotide; TTC chr11 5293516 5293537 5293533 5293538 +
gtggtctcgctggcttcaagag

SEQ ID NO: 95604 - DNA, 22 bp, Artificial Sequence
  Synthetic oligonucleotide; CTC chr11 5293524 5293545 5293541 5293546 +
gctggcttcaagagtgaagctg

SEQ ID NO: 95605 - DNA, 22 bp, Artificial Sequence
  Synthetic oligonucleotide; CTG chr11 5293528 5293549 5293545 5293550 +
gcttcaagagtgaagctgcaga

SEQ ID NO: 95606 - DNA, 22 bp, Artificial Sequence
  Synthetic oligonucleotide; CTT chr11 5293532 5293553 5293549 5293554 +
caagagtgaagctgcagacctt

SEQ ID NO: 95607 - DNA, 22 bp, Artificial Sequence
  Synthetic oligonucleotide; TTC chr11 5293533 5293554 5293550 5293555 +
aagagtgaagctgcagaccttc

SEQ ID NO: 95608 - DNA, 22 bp, Artificial Sequence
  Synthetic oligonucleotide; CTG chr11 5293546 5293567 5293563 5293568 +
cagaccttcgcggtgagcgtta

SEQ ID NO: 95609 - DNA, 22 bp, Artificial Sequence
  Synthetic oligonucleotide; CTT chr11 5293554 5293575 5293571 5293576 +
cgcggtgagcgttacagctcat

SEQ ID NO: 95610 - DNA, 22 bp, Artificial Sequence
  Synthetic oligonucleotide; TTC chr11 5293555 5293576 5293572 5293577 +
gcggtgagcgttacagctcata

SEQ ID NO: 95611 - DNA, 22 bp, Artificial Sequence
  Synthetic oligonucleotide; TTA chr11 5293568 5293589 5293585 5293590 +
cagctcataaaggcagtgtaga

SEQ ID NO: 95612 - DNA, 22 bp, Artificial Sequence
  Synthetic oligonucleotide; CTC chr11 5293574 5293595 5293591 5293596 +
ataaaggcagtgtagacccaaa

SEQ ID NO: 95613 - DNA, 22 bp, Artificial Sequence
  Synthetic oligonucleotide; TTT chr11 5293617 5293638 5293634 5293639 +
attgcaaagagcgaaagaacaa

SEQ ID NO: 95614 - DNA, 22 bp, Artificial Sequence
  Synthetic oligonucleotide; TTA chr11 5293618 5293639 5293635 5293640 +
ttgcaaagagcgaaagaacaaa

SEQ ID NO: 95615 - DNA, 22 bp, Artificial Sequence
  Synthetic oligonucleotide; TTG chr11 5293621 5293642 5293638 5293643 +
caaagagcgaaagaacaaagct

SEQ ID NO: 95616 - DNA, 22 bp, Artificial Sequence
  Synthetic oligonucleotide; CTT chr11 5293644 5293665 5293661 5293666 +
ccacagtgtggaaggggacccg

SEQ ID NO: 95617 - DNA, 22 bp, Artificial Sequence
  Synthetic oligonucleotide; TTC chr11 5293645 5293666 5293662 5293667 +
cacagtgtggaaggggacccga

SEQ ID NO: 95618 - DNA, 22 bp, Artificial Sequence
  Synthetic oligonucleotide; TTG chr11 5293675 5293696 5293692 5293697 +
ccactgctggctcgggcagcct

SEQ ID NO: 95619 - DNA, 22 bp, Artificial Sequence
  Synthetic oligonucleotide; CTG chr11 5293681 5293702 5293698 5293703 +
ctggctcgggcagcctgctttt

SEQ ID NO: 95620 - DNA, 22 bp, Artificial Sequence
  Synthetic oligonucleotide; CTG chr11 5293684 5293705 5293701 5293706 +
gctcgggcagcctgcttttatt

SEQ ID NO: 95621 - DNA, 22 bp, Artificial Sequence
  Synthetic oligonucleotide; CTC chr11 5293688 5293709 5293705 5293710 +
gggcagcctgcttttattctct

SEQ ID NO: 95622 - DNA, 22 bp, Artificial Sequence
  Synthetic oligonucleotide; CTG chr11 5293698 5293719 5293715 5293720 +
cttttattctcttatctggccc

SEQ ID NO: 95623 - DNA, 22 bp, Artificial Sequence
  Synthetic oligonucleotide; CTT chr11 5293701 5293722 5293718 5293723 +
ttattctcttatctggccccac

SEQ ID NO: 95624 - DNA, 22 bp, Artificial Sequence
  Synthetic oligonucleotide; TTT chr11 5293702 5293723 5293719 5293724 +
tattctcttatctggccccacc

SEQ ID NO: 95625 - DNA, 22 bp, Artificial Sequence
  Synthetic oligonucleotide; TTT chr11 5293703 5293724 5293720 5293725 +
attctcttatctggccccaccc

SEQ ID NO: 95626 - DNA, 22 bp, Artificial Sequence
  Synthetic oligonucleotide; TTA chr11 5293704 5293725 5293721 5293726 +
ttctcttatctggccccaccca

SEQ ID NO: 95627 - DNA, 22 bp, Artificial Sequence
  Synthetic oligonucleotide; TTC chr11 5293707 5293728 5293724 5293729 +
tcttatctggccccacccacat

SEQ ID NO: 95628 - DNA, 22 bp, Artificial Sequence
  Synthetic oligonucleotide; CTC chr11 5293709 5293730 5293726 5293731 +
ttatctggccccacccacatcc

SEQ ID NO: 95629 - DNA, 22 bp, Artificial Sequence
  Synthetic oligonucleotide; CTT chr11 5293711 5293732 5293728 5293733 +
atctggccccacccacatcctg

SEQ ID NO: 95630 - DNA, 22 bp, Artificial Sequence
  Synthetic oligonucleotide; TTA chr11 5293712 5293733 5293729 5293734 +
tctggccccacccacatcctgc

SEQ ID NO: 95631 - DNA, 22 bp, Artificial Sequence
  Synthetic oligonucleotide; CTG chr11 5293716 5293737 5293733 5293738 +
gccccacccacatcctgctgat

SEQ ID NO: 95632 - DNA, 22 bp, Artificial Sequence
  Synthetic oligonucleotide; CTG chr11 5293733 5293754 5293750 5293755 +
ctgattggtagagcccagtggt

SEQ ID NO: 95633 - DNA, 22 bp, Artificial Sequence
  Synthetic oligonucleotide; CTG chr11 5293736 5293757 5293753 5293758 +
attggtagagcccagtggtctg

SEQ ID NO: 95634 - DNA, 22 bp, Artificial Sequence
  Synthetic oligonucleotide; TTG chr11 5293740 5293761 5293757 5293762 +
gtagagcccagtggtctgtttt

SEQ ID NO: 95635 - DNA, 22 bp, Artificial Sequence
  Synthetic oligonucleotide; CTG chr11 5293758 5293779 5293775 5293780 +
ttttgacagggcactgattggt

SEQ ID NO: 95636 - DNA, 22 bp, Artificial Sequence
  Synthetic oligonucleotide; TTT chr11 5293761 5293782 5293778 5293783 +
tgacagggcactgattggtgca

SEQ ID NO: 95637 - DNA, 22 bp, Artificial Sequence
  Synthetic oligonucleotide; TTT chr11 5293762 5293783 5293779 5293784 +
gacagggcactgattggtgcat

SEQ ID NO: 95638 - DNA, 22 bp, Artificial Sequence
  Synthetic oligonucleotide; TTG chr11 5293763 5293784 5293780 5293785 +
acagggcactgattggtgcatt

SEQ ID NO: 95639 - DNA, 22 bp, Artificial Sequence
  Synthetic oligonucleotide; CTG chr11 5293774 5293795 5293791 5293796 +
attggtgcatttacaatccatg

SEQ ID NO: 95640 - DNA, 22 bp, Artificial Sequence
  Synthetic oligonucleotide; TTG chr11 5293778 5293799 5293795 5293800 +
gtgcatttacaatccatgagct

SEQ ID NO: 95641 - DNA, 22 bp, Artificial Sequence
  Synthetic oligonucleotide; TTT chr11 5293786 5293807 5293803 5293808 +
acaatccatgagctagacacaa

SEQ ID NO: 95642 - DNA, 22 bp, Artificial Sequence
  Synthetic oligonucleotide; TTA chr11 5293787 5293808 5293804 5293809 +
caatccatgagctagacacaaa

SEQ ID NO: 95643 - DNA, 22 bp, Artificial Sequence
  Synthetic oligonucleotide; CTA chr11 5293801 5293822 5293818 5293823 +
gacacaaaggttctccacgtcc

SEQ ID NO: 95644 - DNA, 22 bp, Artificial Sequence
  Synthetic oligonucleotide; TTC chr11 5293814 5293835 5293831 5293836 +
tccacgtccccaccagattagc

SEQ ID NO: 95645 - DNA, 22 bp, Artificial Sequence
  Synthetic oligonucleotide; CTC chr11 5293816 5293837 5293833 5293838 +
cacgtccccaccagattagcta

SEQ ID NO: 95646 - DNA, 22 bp, Artificial Sequence
  Synthetic oligonucleotide; TTA chr11 5293834 5293855 5293851 5293856 +
gctagatacagagtgtccacac

SEQ ID NO: 95647 - DNA, 22 bp, Artificial Sequence
  Synthetic oligonucleotide; CTA chr11 5293838 5293859 5293855 5293860 +
gatacagagtgtccacacaaag

SEQ ID NO: 95648 - DNA, 22 bp, Artificial Sequence
  Synthetic oligonucleotide; TTC chr11 5293864 5293885 5293881 5293886 +
tccaagtccccaccagagtagc

SEQ ID NO: 95649 - DNA, 22 bp, Artificial Sequence
  Synthetic oligonucleotide; CTC chr11 5293866 5293887 5293883 5293888 +
caagtccccaccagagtagcta

SEQ ID NO: 95650 - DNA, 22 bp, Artificial Sequence
  Synthetic oligonucleotide; CTA chr11 5293888 5293909 5293905 5293910 +
gatacagagtgttgattggtgc

SEQ ID NO: 95651 - DNA, 22 bp, Artificial Sequence
  Synthetic oligonucleotide; TTG chr11 5293902 5293923 5293919 5293924 +
attggtgcattcacaaaccctg

SEQ ID NO: 95652 - DNA, 22 bp, Artificial Sequence
  Synthetic oligonucleotide; TTG chr11 5293906 5293927 5293923 5293928 +
gtgcattcacaaaccctgagct

SEQ ID NO: 95653 - DNA, 22 bp, Artificial Sequence
  Synthetic oligonucleotide; TTC chr11 5293914 5293935 5293931 5293936 +
acaaaccctgagctagacacag

SEQ ID NO: 95654 - DNA, 22 bp, Artificial Sequence
  Synthetic oligonucleotide; CTG chr11 5293924 5293945 5293941 5293946 +
agctagacacagggtgctgatt

SEQ ID NO: 95655 - DNA, 22 bp, Artificial Sequence
  Synthetic oligonucleotide; CTA chr11 5293929 5293950 5293946 5293951 +
gacacagggtgctgattggtgt

SEQ ID NO: 95656 - DNA, 22 bp, Artificial Sequence
  Synthetic oligonucleotide; CTG chr11 5293943 5293964 5293960 5293965 +
attggtgtgtttacaaaccttg

SEQ ID NO: 95657 - DNA, 22 bp, Artificial Sequence
  Synthetic oligonucleotide; TTG chr11 5293947 5293968 5293964 5293969 +
gtgtgtttacaaaccttgagct

SEQ ID NO: 95658 - DNA, 22 bp, Artificial Sequence
  Synthetic oligonucleotide; TTT chr11 5293955 5293976 5293972 5293977 +
acaaaccttgagctagatacag

SEQ ID NO: 95659 - DNA, 22 bp, Artificial Sequence
  Synthetic oligonucleotide; TTA chr11 5293956 5293977 5293973 5293978 +
caaaccttgagctagatacaga

SEQ ID NO: 95660 - DNA, 22 bp, Artificial Sequence
  Synthetic oligonucleotide; CTT chr11 5293964 5293985 5293981 5293986 +
gagctagatacagactgccgag

SEQ ID NO: 95661 - DNA, 22 bp, Artificial Sequence
  Synthetic oligonucleotide; TTG chr11 5293965 5293986 5293982 5293987 +
agctagatacagactgccgagt

SEQ ID NO: 95662 - DNA, 22 bp, Artificial Sequence
  Synthetic oligonucleotide; CTA chr11 5293970 5293991 5293987 5293992 +
gatacagactgccgagtggtgt

SEQ ID NO: 95663 - DNA, 22 bp, Artificial Sequence
  Synthetic oligonucleotide; CTG chr11 5293981 5294002 5293998 5294003 +
ccgagtggtgtatttacaatcc

SEQ ID NO: 95664 - DNA, 22 bp, Artificial Sequence
  Synthetic oligonucleotide; TTT chr11 5293996 5294017 5294013 5294018 +
acaatccctgagctagacataa

SEQ ID NO: 95665 - DNA, 22 bp, Artificial Sequence
  Synthetic oligonucleotide; TTA chr11 5293997 5294018 5294014 5294019 +
caatccctgagctagacataaa

SEQ ID NO: 95666 - DNA, 22 bp, Artificial Sequence
  Synthetic oligonucleotide; CTG chr11 5294006 5294027 5294023 5294028 +
agctagacataaaggttctcca

SEQ ID NO: 95667 - DNA, 22 bp, Artificial Sequence
  Synthetic oligonucleotide; CTA chr11 5294011 5294032 5294028 5294033 +
gacataaaggttctccacgtcc

SEQ ID NO: 95668 - DNA, 22 bp, Artificial Sequence
  Synthetic oligonucleotide; TTC chr11 5294024 5294045 5294041 5294046 +
tccacgtccccaccagagtagc

SEQ ID NO: 95669 - DNA, 22 bp, Artificial Sequence
  Synthetic oligonucleotide; CTC chr11 5294026 5294047 5294043 5294048 +
cacgtccccaccagagtagcta

SEQ ID NO: 95670 - DNA, 22 bp, Artificial Sequence
  Synthetic oligonucleotide; CTA chr11 5294048 5294069 5294065 5294070 +
gatacagagtgttgattggtgc

SEQ ID NO: 95671 - DNA, 22 bp, Artificial Sequence
  Synthetic oligonucleotide; TTG chr11 5294062 5294083 5294079 5294084 +
attggtgcattcacaaaccctg

SEQ ID NO: 95672 - DNA, 22 bp, Artificial Sequence
  Synthetic oligonucleotide; TTG chr11 5294066 5294087 5294083 5294088 +
gtgcattcacaaaccctgagct

SEQ ID NO: 95673 - DNA, 22 bp, Artificial Sequence
  Synthetic oligonucleotide; TTC chr11 5294074 5294095 5294091 5294096 +
acaaaccctgagctagacacag

SEQ ID NO: 95674 - DNA, 22 bp, Artificial Sequence
  Synthetic oligonucleotide; CTG chr11 5294084 5294105 5294101 5294106 +
agctagacacagggtgctgatt

SEQ ID NO: 95675 - DNA, 22 bp, Artificial Sequence
  Synthetic oligonucleotide; CTA chr11 5294089 5294110 5294106 5294111 +
gacacagggtgctgattggtgt

SEQ ID NO: 95676 - DNA, 22 bp, Artificial Sequence
  Synthetic oligonucleotide; CTG chr11 5294103 5294124 5294120 5294125 +
attggtgtgtttacaaaccttg

SEQ ID NO: 95677 - DNA, 22 bp, Artificial Sequence
  Synthetic oligonucleotide; TTG chr11 5294107 5294128 5294124 5294129 +
gtgtgtttacaaaccttgagct

SEQ ID NO: 95678 - DNA, 22 bp, Artificial Sequence
  Synthetic oligonucleotide; TTT chr11 5294115 5294136 5294132 5294137 +
acaaaccttgagctagatacag

SEQ ID NO: 95679 - DNA, 22 bp, Artificial Sequence
  Synthetic oligonucleotide; TTA chr11 5294116 5294137 5294133 5294138 +
caaaccttgagctagatacaga

SEQ ID NO: 95680 - DNA, 22 bp, Artificial Sequence
  Synthetic oligonucleotide; CTT chr11 5294124 5294145 5294141 5294146 +
gagctagatacagactgccgat

SEQ ID NO: 95681 - DNA, 22 bp, Artificial Sequence
  Synthetic oligonucleotide; TTG chr11 5294125 5294146 5294142 5294147 +
agctagatacagactgccgatt

SEQ ID NO: 95682 - DNA, 22 bp, Artificial Sequence
  Synthetic oligonucleotide; CTA chr11 5294130 5294151 5294147 5294152 +
gatacagactgccgattggtgt

SEQ ID NO: 95683 - DNA, 22 bp, Artificial Sequence
  Synthetic oligonucleotide; CTG chr11 5294141 5294162 5294158 5294163 +
ccgattggtgtatttacaatcc

SEQ ID NO: 95684 - DNA, 22 bp, Artificial Sequence
  Synthetic oligonucleotide; TTG chr11 5294148 5294169 5294165 5294170 +
gtgtatttacaatccctgagct

SEQ ID NO: 95685 - DNA, 22 bp, Artificial Sequence
  Synthetic oligonucleotide; TTT chr11 5294156 5294177 5294173 5294178 +
acaatccctgagctagacataa

SEQ ID NO: 95686 - DNA, 22 bp, Artificial Sequence
  Synthetic oligonucleotide; TTA chr11 5294157 5294178 5294174 5294179 +
caatccctgagctagacataaa

SEQ ID NO: 95687 - DNA, 22 bp, Artificial Sequence
  Synthetic oligonucleotide; CTG chr11 5294166 5294187 5294183 5294188 +
agctagacataaaggttctcca

SEQ ID NO: 95688 - DNA, 22 bp, Artificial Sequence
  Synthetic oligonucleotide; CTA chr11 5294171 5294192 5294188 5294193 +
gacataaaggttctccaaggcc

SEQ ID NO: 95689 - DNA, 22 bp, Artificial Sequence
  Synthetic oligonucleotide; TTC chr11 5294184 5294205 5294201 5294206 +
tccaaggccccaccagagtagc

SEQ ID NO: 95690 - DNA, 22 bp, Artificial Sequence
  Synthetic oligonucleotide; CTC chr11 5294186 5294207 5294203 5294208 +
caaggccccaccagagtagcta

SEQ ID NO: 95691 - DNA, 22 bp, Artificial Sequence
  Synthetic oligonucleotide; CTA chr11 5294208 5294229 5294225 5294230 +
gatagagtgttgattggtgcat

SEQ ID NO: 95692 - DNA, 22 bp, Artificial Sequence
  Synthetic oligonucleotide; TTG chr11 5294220 5294241 5294237 5294242 +
attggtgcattcacaaaccctg

SEQ ID NO: 95693 - DNA, 22 bp, Artificial Sequence
  Synthetic oligonucleotide; TTG chr11 5294224 5294245 5294241 5294246 +
gtgcattcacaaaccctgagct

SEQ ID NO: 95694 - DNA, 22 bp, Artificial Sequence
  Synthetic oligonucleotide; TTC chr11 5294232 5294253 5294249 5294254 +
acaaaccctgagctagacacag

SEQ ID NO: 95695 - DNA, 22 bp, Artificial Sequence
  Synthetic oligonucleotide; CTG chr11 5294242 5294263 5294259 5294264 +
agctagacacagggtgctgatt

SEQ ID NO: 95696 - DNA, 22 bp, Artificial Sequence
  Synthetic oligonucleotide; CTA chr11 5294247 5294268 5294264 5294269 +
gacacagggtgctgattggtgt

SEQ ID NO: 95697 - DNA, 22 bp, Artificial Sequence
  Synthetic oligonucleotide; CTG chr11 5294261 5294282 5294278 5294283 +
attggtgtgtttacaaaccttg

SEQ ID NO: 95698 - DNA, 22 bp, Artificial Sequence
  Synthetic oligonucleotide; TTG chr11 5294265 5294286 5294282 5294287 +
gtgtgtttacaaaccttgagct

SEQ ID NO: 95699 - DNA, 22 bp, Artificial Sequence
  Synthetic oligonucleotide; TTT chr11 5294273 5294294 5294290 5294295 +
acaaaccttgagctagatacag

SEQ ID NO: 95700 - DNA, 22 bp, Artificial Sequence
  Synthetic oligonucleotide; TTA chr11 5294274 5294295 5294291 5294296 +
caaaccttgagctagatacaga

SEQ ID NO: 95701 - DNA, 22 bp, Artificial Sequence
  Synthetic oligonucleotide; CTT chr11 5294282 5294303 5294299 5294304 +
gagctagatacagagtgccaat

SEQ ID NO: 95702 - DNA, 22 bp, Artificial Sequence
  Synthetic oligonucleotide; TTG chr11 5294283 5294304 5294300 5294305 +
agctagatacagagtgccaatt

SEQ ID NO: 95703 - DNA, 22 bp, Artificial Sequence
  Synthetic oligonucleotide; CTA chr11 5294288 5294309 5294305 5294310 +
gatacagagtgccaattggtgt

SEQ ID NO: 95704 - DNA, 22 bp, Artificial Sequence
  Synthetic oligonucleotide; TTG chr11 5294306 5294327 5294323 5294328 +
gtgtatttacaatcccttatct

SEQ ID NO: 95705 - DNA, 22 bp, Artificial Sequence
  Synthetic oligonucleotide; TTT chr11 5294314 5294335 5294331 5294336 +
acaatcccttatctagacataa

SEQ ID NO: 95706 - DNA, 22 bp, Artificial Sequence
  Synthetic oligonucleotide; TTA chr11 5294315 5294336 5294332 5294337 +
caatcccttatctagacataag

SEQ ID NO: 95707 - DNA, 22 bp, Artificial Sequence
  Synthetic oligonucleotide; CTT chr11 5294324 5294345 5294341 5294346 +
atctagacataagggttcttcg

SEQ ID NO: 95708 - DNA, 22 bp, Artificial Sequence
  Synthetic oligonucleotide; TTA chr11 5294325 5294346 5294342 5294347 +
tctagacataagggttcttcgc

SEQ ID NO: 95709 - DNA, 22 bp, Artificial Sequence
  Synthetic oligonucleotide; CTA chr11 5294329 5294350 5294346 5294351 +
gacataagggttcttcgcatcc

SEQ ID NO: 95710 - DNA, 22 bp, Artificial Sequence
  Synthetic oligonucleotide; TTC chr11 5294342 5294363 5294359 5294364 +
ttcgcatccccagcaaactcag

SEQ ID NO: 95711 - DNA, 22 bp, Artificial Sequence
  Synthetic oligonucleotide; CTT chr11 5294344 5294365 5294361 5294366 +
cgcatccccagcaaactcagga

SEQ ID NO: 95712 - DNA, 22 bp, Artificial Sequence
  Synthetic oligonucleotide; TTC chr11 5294345 5294366 5294362 5294367 +
gcatccccagcaaactcaggag

SEQ ID NO: 95713 - DNA, 22 bp, Artificial Sequence
  Synthetic oligonucleotide; CTC chr11 5294362 5294383 5294379 5294384 +
aggagcctagccggcttcaccc

SEQ ID NO: 95714 - DNA, 22 bp, Artificial Sequence
  Synthetic oligonucleotide; CTA chr11 5294371 5294392 5294388 5294393 +
gccggcttcacccagtggatcc

SEQ ID NO: 95715 - DNA, 22 bp, Artificial Sequence
  Synthetic oligonucleotide; CTT chr11 5294379 5294400 5294396 5294401 +
cacccagtggatcccgcacctg

SEQ ID NO: 95716 - DNA, 22 bp, Artificial Sequence
  Synthetic oligonucleotide; TTC chr11 5294380 5294401 5294397 5294402 +
acccagtggatcccgcacctgg

SEQ ID NO: 95717 - DNA, 22 bp, Artificial Sequence
  Synthetic oligonucleotide; CTG chr11 5294401 5294422 5294418 5294423 +
ggctgcagggggagctgcctgc

SEQ ID NO: 95718 - DNA, 22 bp, Artificial Sequence
  Synthetic oligonucleotide; CTG chr11 5294406 5294427 5294423 5294428 +
cagggggagctgcctgccagtc

SEQ ID NO: 95719 - DNA, 22 bp, Artificial Sequence
  Synthetic oligonucleotide; CTG chr11 5294418 5294439 5294435 5294440 +
cctgccagtcccctgccgtgcg

SEQ ID NO: 95720 - DNA, 22 bp, Artificial Sequence
  Synthetic oligonucleotide; CTG chr11 5294422 5294443 5294439 5294444 +
ccagtcccctgccgtgcgcccg

SEQ ID NO: 95721 - DNA, 22 bp, Artificial Sequence
  Synthetic oligonucleotide; CTG chr11 5294433 5294454 5294450 5294455 +
ccgtgcgcccgcactcttcagc

SEQ ID NO: 95722 - DNA, 22 bp, Artificial Sequence
  Synthetic oligonucleotide; CTC chr11 5294449 5294470 5294466 5294471 +
ttcagcccttgggtggtcgatg

SEQ ID NO: 95723 - DNA, 22 bp, Artificial Sequence
  Synthetic oligonucleotide; CTT chr11 5294451 5294472 5294468 5294473 +
cagcccttgggtggtcgatggg

SEQ ID NO: 95724 - DNA, 22 bp, Artificial Sequence
  Synthetic oligonucleotide; TTC chr11 5294452 5294473 5294469 5294474 +
agcccttgggtggtcgatggga

SEQ ID NO: 95725 - DNA, 22 bp, Artificial Sequence
  Synthetic oligonucleotide; CTT chr11 5294459 5294480 5294476 5294481 +
gggtggtcgatgggactgggtg

SEQ ID NO: 95726 - DNA, 22 bp, Artificial Sequence
  Synthetic oligonucleotide; TTG chr11 5294460 5294481 5294477 5294482 +
ggtggtcgatgggactgggtgc

SEQ ID NO: 95727 - DNA, 22 bp, Artificial Sequence
  Synthetic oligonucleotide; CTG chr11 5294477 5294498 5294494 5294499 +
ggtgccctggagcagggggcgg

SEQ ID NO: 95728 - DNA, 22 bp, Artificial Sequence
  Synthetic oligonucleotide; CTG chr11 5294486 5294507 5294503 5294508 +
gagcagggggcggcgctcgtcg

SEQ ID NO: 95729 - DNA, 22 bp, Artificial Sequence
  Synthetic oligonucleotide; CTC chr11 5294504 5294525 5294521 5294526 +
gtcggcgaggctcgggccgcac

SEQ ID NO: 95730 - DNA, 22 bp, Artificial Sequence
  Synthetic oligonucleotide; CTC chr11 5294517 5294538 5294534 5294539 +
gggccgcacaggagcccatgaa

SEQ ID NO: 95731 - DNA, 22 bp, Artificial Sequence
  Synthetic oligonucleotide; CTC chr11 5294552 5294573 5294569 5294574 +
aggcatggcgcgctgcaggtcc

SEQ ID NO: 95732 - DNA, 22 bp, Artificial Sequence
  Synthetic oligonucleotide; CTG chr11 5294567 5294588 5294584 5294589 +
caggtcccgagccctgccccgc

SEQ ID NO: 95733 - DNA, 22 bp, Artificial Sequence
  Synthetic oligonucleotide; CTG chr11 5294583 5294604 5294600 5294605 +
ccccgcaggaaggcagctaagg

SEQ ID NO: 95734 - DNA, 22 bp, Artificial Sequence
  Synthetic oligonucleotide; CTA chr11 5294602 5294623 5294619 5294624 +
aggcccggcgaggaattgagca

SEQ ID NO: 95735 - DNA, 22 bp, Artificial Sequence
  Synthetic oligonucleotide; TTG chr11 5294620 5294641 5294637 5294642 +
agcacagcagctgctggcccag

SEQ ID NO: 95736 - DNA, 22 bp, Artificial Sequence
  Synthetic oligonucleotide; CTG chr11 5294633 5294654 5294650 5294655 +
ctggcccaggtgctaagcccct

SEQ ID NO: 95737 - DNA, 22 bp, Artificial Sequence
  Synthetic oligonucleotide; CTG chr11 5294636 5294657 5294653 5294658 +
gcccaggtgctaagcccctcac

SEQ ID NO: 95738 - DNA, 22 bp, Artificial Sequence
  Synthetic oligonucleotide; CTA chr11 5294648 5294669 5294665 5294670 +
agcccctcactgcccgcggccg

SEQ ID NO: 95739 - DNA, 22 bp, Artificial Sequence
  Synthetic oligonucleotide; CTC chr11 5294656 5294677 5294673 5294678 +
actgcccgcggccggtggggcc

SEQ ID NO: 95740 - DNA, 22 bp, Artificial Sequence
  Synthetic oligonucleotide; CTG chr11 5294660 5294681 5294677 5294682 +
cccgcggccggtggggccggct

SEQ ID NO: 95741 - DNA, 22 bp, Artificial Sequence
  Synthetic oligonucleotide; CTG chr11 5294683 5294704 5294700 5294705 +
gcggctccgagtgcggggtcct

SEQ ID NO: 95742 - DNA, 22 bp, Artificial Sequence
  Synthetic oligonucleotide; CTC chr11 5294690 5294711 5294707 5294712 +
cgagtgcggggtcctcggagcc

SEQ ID NO: 95743 - DNA, 22 bp, Artificial Sequence
  Synthetic oligonucleotide; CTC chr11 5294706 5294727 5294723 5294728 +
ggagcccatgcccacccggaac

SEQ ID NO: 95744 - DNA, 22 bp, Artificial Sequence
  Synthetic oligonucleotide; CTC chr11 5294730 5294751 5294747 5294752 +
cctcaagcacggcgcacagccc

SEQ ID NO: 95745 - DNA, 22 bp, Artificial Sequence
  Synthetic oligonucleotide; CTC chr11 5294734 5294755 5294751 5294756 +
aagcacggcgcacagcccggtt

SEQ ID NO: 95746 - DNA, 22 bp, Artificial Sequence
  Synthetic oligonucleotide; TTC chr11 5294757 5294778 5294774 5294779 +
ctgcccgcgtctgtccctccac

SEQ ID NO: 95747 - DNA, 22 bp, Artificial Sequence
  Synthetic oligonucleotide; CTG chr11 5294760 5294781 5294777 5294782 +
cccgcgtctgtccctccacacc

SEQ ID NO: 95748 - DNA, 22 bp, Artificial Sequence
  Synthetic oligonucleotide; CTG chr11 5294770 5294791 5294787 5294792 +
tccctccacacctcctggcaag

SEQ ID NO: 95749 - DNA, 22 bp, Artificial Sequence
  Synthetic oligonucleotide; CTC chr11 5294776 5294797 5294793 5294798 +
cacacctcctggcaagctgagg

SEQ ID NO: 95750 - DNA, 22 bp, Artificial Sequence
  Synthetic oligonucleotide; CTC chr11 5294784 5294805 5294801 5294806 +
ctggcaagctgagggagccggc

SEQ ID NO: 95751 - DNA, 22 bp, Artificial Sequence
  Synthetic oligonucleotide; CTG chr11 5294787 5294808 5294804 5294809 +
gcaagctgagggagccggctct

SEQ ID NO: 95752 - DNA, 22 bp, Artificial Sequence
  Synthetic oligonucleotide; CTG chr11 5294795 5294816 5294812 5294817 +
agggagccggctctggccttgg

SEQ ID NO: 95753 - DNA, 22 bp, Artificial Sequence
  Synthetic oligonucleotide; CTC chr11 5294808 5294829 5294825 5294830 +
tggccttggccagcccagaaaa

SEQ ID NO: 95754 - DNA, 22 bp, Artificial Sequence
  Synthetic oligonucleotide; CTG chr11 5294810 5294831 5294827 5294832 +
gccttggccagcccagaaaagg

SEQ ID NO: 95755 - DNA, 22 bp, Artificial Sequence
  Synthetic oligonucleotide; CTT chr11 5294815 5294836 5294832 5294837 +
ggccagcccagaaaagggctcc

SEQ ID NO: 95756 - DNA, 22 bp, Artificial Sequence
  Synthetic oligonucleotide; TTG chr11 5294816 5294837 5294833 5294838 +
gccagcccagaaaagggctccc

SEQ ID NO: 95757 - DNA, 22 bp, Artificial Sequence
  Synthetic oligonucleotide; CTC chr11 5294836 5294857 5294853 5294858 +
ccacagtgcagcggccggctga

SEQ ID NO: 95758 - DNA, 22 bp, Artificial Sequence
  Synthetic oligonucleotide; CTG chr11 5294857 5294878 5294874 5294879 +
aagggctcctcaagtgccacca

SEQ ID NO: 95759 - DNA, 22 bp, Artificial Sequence
  Synthetic oligonucleotide; CTC chr11 5294865 5294886 5294882 5294887 +
ctcaagtgccaccaatgtggga

SEQ ID NO: 95760 - DNA, 22 bp, Artificial Sequence
  Synthetic oligonucleotide; CTC chr11 5294868 5294889 5294885 5294890 +
aagtgccaccaatgtgggagcc

SEQ ID NO: 95761 - DNA, 22 bp, Artificial Sequence
  Synthetic oligonucleotide; CTG chr11 5294925 5294946 5294942 5294947 +
tgaggactgccagcacgctgtc

SEQ ID NO: 95762 - DNA, 22 bp, Artificial Sequence
  Synthetic oligonucleotide; CTG chr11 5294934 5294955 5294951 5294956 +
ccagcacgctgtcacctctcaa

SEQ ID NO: 95763 - DNA, 22 bp, Artificial Sequence
  Synthetic oligonucleotide; CTG chr11 5294945 5294966 5294962 5294967 +
tcacctctcaatactaatcact

SEQ ID NO: 95764 - DNA, 22 bp, Artificial Sequence
  Synthetic oligonucleotide; CTC chr11 5294952 5294973 5294969 5294974 +
tcaatactaatcactagtaatt

SEQ ID NO: 95765 - DNA, 22 bp, Artificial Sequence
  Synthetic oligonucleotide; CTC chr11 5294954 5294975 5294971 5294976 +
aatactaatcactagtaattag

SEQ ID NO: 95766 - DNA, 22 bp, Artificial Sequence
  Synthetic oligonucleotide; CTA chr11 5294961 5294982 5294978 5294983 +
atcactagtaattagcattatc

SEQ ID NO: 95767 - DNA, 22 bp, Artificial Sequence
  Synthetic oligonucleotide; CTA chr11 5294968 5294989 5294985 5294990 +
gtaattagcattatcccacacc

SEQ ID NO: 95768 - DNA, 22 bp, Artificial Sequence
  Synthetic oligonucleotide; TTA chr11 5294975 5294996 5294992 5294997 +
gcattatcccacaccctgtgct

SEQ ID NO: 95769 - DNA, 22 bp, Artificial Sequence
  Synthetic oligonucleotide; TTA chr11 5294981 5295002 5294998 5295003 +
tcccacaccctgtgcttccaaa

SEQ ID NO: 95770 - DNA, 22 bp, Artificial Sequence
  Synthetic oligonucleotide; CTG chr11 5294993 5295014 5295010 5295015 +
tgcttccaaaaataacaggaat

SEQ ID NO: 95771 - DNA, 22 bp, Artificial Sequence
  Synthetic oligonucleotide; CTT chr11 5294998 5295019 5295015 5295020 +
ccaaaaataacaggaatattat

SEQ ID NO: 95772 - DNA, 22 bp, Artificial Sequence
  Synthetic oligonucleotide; TTC chr11 5294999 5295020 5295016 5295021 +
caaaaataacaggaatattatt

SEQ ID NO: 95773 - DNA, 22 bp, Artificial Sequence
  Synthetic oligonucleotide; TTA chr11 5295019 5295040 5295036 5295041 +
ttgtaaaatcaaaggcatactg

SEQ ID NO: 95774 - DNA, 22 bp, Artificial Sequence
  Synthetic oligonucleotide; TTG chr11 5295022 5295043 5295039 5295044 +
taaaatcaaaggcatactgaac

SEQ ID NO: 95775 - DNA, 22 bp, Artificial Sequence
  Synthetic oligonucleotide; CTG chr11 5295041 5295062 5295058 5295063 +
aaccatatgttttattatgttt

SEQ ID NO: 95776 - DNA, 22 bp, Artificial Sequence
  Synthetic oligonucleotide; TTT chr11 5295053 5295074 5295070 5295075 +
tattatgtttaagcagtaaaaa

SEQ ID NO: 95777 - DNA, 22 bp, Artificial Sequence
  Synthetic oligonucleotide; TTT chr11 5295054 5295075 5295071 5295076 +
attatgtttaagcagtaaaaat

SEQ ID NO: 95778 - DNA, 22 bp, Artificial Sequence
  Synthetic oligonucleotide; TTA chr11 5295055 5295076 5295072 5295077 +
ttatgtttaagcagtaaaaata

SEQ ID NO: 95779 - DNA, 22 bp, Artificial Sequence
  Synthetic oligonucleotide; TTA chr11 5295058 5295079 5295075 5295080 +
tgtttaagcagtaaaaataaga

SEQ ID NO: 95780 - DNA, 22 bp, Artificial Sequence
  Synthetic oligonucleotide; TTT chr11 5295063 5295084 5295080 5295085 +
aagcagtaaaaataagacctgg

SEQ ID NO: 95781 - DNA, 22 bp, Artificial Sequence
  Synthetic oligonucleotide; TTA chr11 5295064 5295085 5295081 5295086 +
agcagtaaaaataagacctgga

SEQ ID NO: 95782 - DNA, 22 bp, Artificial Sequence
  Synthetic oligonucleotide; CTG chr11 5295084 5295105 5295101 5295106 +
gagtgcaaaaagactaccaaat

SEQ ID NO: 95783 - DNA, 22 bp, Artificial Sequence
  Synthetic oligonucleotide; CTA chr11 5295100 5295121 5295117 5295122 +
ccaaatgctgtaatacttcatg

SEQ ID NO: 95784 - DNA, 22 bp, Artificial Sequence
  Synthetic oligonucleotide; CTG chr11 5295110 5295131 5295127 5295132 +
taatacttcatggaatctaagc

SEQ ID NO: 95785 - DNA, 22 bp, Artificial Sequence
  Synthetic oligonucleotide; CTT chr11 5295118 5295139 5295135 5295140 +
catggaatctaagctttctcac

SEQ ID NO: 95786 - DNA, 22 bp, Artificial Sequence
  Synthetic oligonucleotide; TTC chr11 5295119 5295140 5295136 5295141 +
atggaatctaagctttctcacc

SEQ ID NO: 95787 - DNA, 22 bp, Artificial Sequence
  Synthetic oligonucleotide; CTA chr11 5295129 5295150 5295146 5295151 +
agctttctcaccccaaattatg

SEQ ID NO: 95788 - DNA, 22 bp, Artificial Sequence
  Synthetic oligonucleotide; CTT chr11 5295134 5295155 5295151 5295156 +
tctcaccccaaattatgtctta

SEQ ID NO: 95789 - DNA, 22 bp, Artificial Sequence
  Synthetic oligonucleotide; TTT chr11 5295135 5295156 5295152 5295157 +
ctcaccccaaattatgtcttat

SEQ ID NO: 95790 - DNA, 22 bp, Artificial Sequence
  Synthetic oligonucleotide; TTC chr11 5295136 5295157 5295153 5295158 +
tcaccccaaattatgtcttatt

SEQ ID NO: 95791 - DNA, 22 bp, Artificial Sequence
  Synthetic oligonucleotide; CTC chr11 5295138 5295159 5295155 5295160 +
accccaaattatgtcttatttc

SEQ ID NO: 95792 - DNA, 22 bp, Artificial Sequence
  Synthetic oligonucleotide; TTA chr11 5295149 5295170 5295166 5295171 +
tgtcttatttcagagcaaataa

SEQ ID NO: 95793 - DNA, 22 bp, Artificial Sequence
  Synthetic oligonucleotide; CTT chr11 5295155 5295176 5295172 5295177 +
atttcagagcaaataacttagg

SEQ ID NO: 95794 - DNA, 22 bp, Artificial Sequence
  Synthetic oligonucleotide; TTA chr11 5295156 5295177 5295173 5295178 +
tttcagagcaaataacttaggc

SEQ ID NO: 95795 - DNA, 22 bp, Artificial Sequence
  Synthetic oligonucleotide; TTT chr11 5295159 5295180 5295176 5295181 +
cagagcaaataacttaggcttt

SEQ ID NO: 95796 - DNA, 22 bp, Artificial Sequence
  Synthetic oligonucleotide; TTC chr11 5295160 5295181 5295177 5295182 +
agagcaaataacttaggcttta

SEQ ID NO: 95797 - DNA, 22 bp, Artificial Sequence
  Synthetic oligonucleotide; CTT chr11 5295174 5295195 5295191 5295196 +
aggctttaaaaaatgtttcctc

SEQ ID NO: 95798 - DNA, 22 bp, Artificial Sequence
  Synthetic oligonucleotide; TTA chr11 5295175 5295196 5295192 5295197 +
ggctttaaaaaatgtttcctca

SEQ ID NO: 95799 - DNA, 22 bp, Artificial Sequence
  Synthetic oligonucleotide; CTT chr11 5295180 5295201 5295197 5295202 +
taaaaaatgtttcctcatgaat

SEQ ID NO: 95800 - DNA, 22 bp, Artificial Sequence
  Synthetic oligonucleotide; TTT chr11 5295181 5295202 5295198 5295203 +
aaaaaatgtttcctcatgaatt

SEQ ID NO: 95801 - DNA, 22 bp, Artificial Sequence
  Synthetic oligonucleotide; TTA chr11 5295182 5295203 5295199 5295204 +
aaaaatgtttcctcatgaatta

SEQ ID NO: 95802 - DNA, 22 bp, Artificial Sequence
  Synthetic oligonucleotide; TTT chr11 5295192 5295213 5295209 5295214 +
cctcatgaattattattgtata

SEQ ID NO: 95803 - DNA, 22 bp, Artificial Sequence
  Synthetic oligonucleotide; TTC chr11 5295193 5295214 5295210 5295215 +
ctcatgaattattattgtataa

SEQ ID NO: 95804 - DNA, 22 bp, Artificial Sequence
  Synthetic oligonucleotide; CTC chr11 5295196 5295217 5295213 5295218 +
atgaattattattgtataatga

SEQ ID NO: 95805 - DNA, 22 bp, Artificial Sequence
  Synthetic oligonucleotide; TTA chr11 5295204 5295225 5295221 5295226 +
ttattgtataatgattcagagc

SEQ ID NO: 95806 - DNA, 22 bp, Artificial Sequence
  Synthetic oligonucleotide; TTA chr11 5295207 5295228 5295224 5295229 +
ttgtataatgattcagagcatg

SEQ ID NO: 95807 - DNA, 22 bp, Artificial Sequence
  Synthetic oligonucleotide; TTG chr11 5295210 5295231 5295227 5295232 +
tataatgattcagagcatgtat

SEQ ID NO: 95808 - DNA, 22 bp, Artificial Sequence
  Synthetic oligonucleotide; TTC chr11 5295221 5295242 5295238 5295243 +
agagcatgtattctagagccaa

SEQ ID NO: 95809 - DNA, 22 bp, Artificial Sequence
  Synthetic oligonucleotide; TTC chr11 5295234 5295255 5295251 5295256 +
tagagccaaatatcatgagttg

SEQ ID NO: 95810 - DNA, 22 bp, Artificial Sequence
  Synthetic oligonucleotide; CTA chr11 5295236 5295257 5295253 5295258 +
gagccaaatatcatgagttgaa

SEQ ID NO: 95811 - DNA, 22 bp, Artificial Sequence
  Synthetic oligonucleotide; TTG chr11 5295256 5295277 5295273 5295278 +
aattatgccctctgtcagttag

SEQ ID NO: 95812 - DNA, 22 bp, Artificial Sequence
  Synthetic oligonucleotide; TTA chr11 5295261 5295282 5295278 5295283 +
tgccctctgtcagttagtagcc

SEQ ID NO: 95813 - DNA, 22 bp, Artificial Sequence
  Synthetic oligonucleotide; CTC chr11 5295268 5295289 5295285 5295290 +
tgtcagttagtagccacttcat

SEQ ID NO: 95814 - DNA, 22 bp, Artificial Sequence
  Synthetic oligonucleotide; CTG chr11 5295270 5295291 5295287 5295292 +
tcagttagtagccacttcatct

SEQ ID NO: 95815 - DNA, 22 bp, Artificial Sequence
  Synthetic oligonucleotide; TTA chr11 5295277 5295298 5295294 5295299 +
gtagccacttcatcttggaata

SEQ ID NO: 95816 - DNA, 22 bp, Artificial Sequence
  Synthetic oligonucleotide; CTT chr11 5295287 5295308 5295304 5295309 +
catcttggaatattactttagg

SEQ ID NO: 95817 - DNA, 22 bp, Artificial Sequence
  Synthetic oligonucleotide; TTC chr11 5295288 5295309 5295305 5295310 +
atcttggaatattactttaggg

SEQ ID NO: 95818 - DNA, 22 bp, Artificial Sequence
  Synthetic oligonucleotide; CTT chr11 5295293 5295314 5295310 5295315 +
ggaatattactttagggccctg

SEQ ID NO: 95819 - DNA, 22 bp, Artificial Sequence
  Synthetic oligonucleotide; TTG chr11 5295294 5295315 5295311 5295316 +
gaatattactttagggccctgt

SEQ ID NO: 95820 - DNA, 22 bp, Artificial Sequence
  Synthetic oligonucleotide; TTA chr11 5295302 5295323 5295319 5295324 +
ctttagggccctgtgcctcagt

SEQ ID NO: 95821 - DNA, 22 bp, Artificial Sequence
  Synthetic oligonucleotide; CTT chr11 5295305 5295326 5295322 5295327 +
tagggccctgtgcctcagtttc

SEQ ID NO: 95822 - DNA, 22 bp, Artificial Sequence
  Synthetic oligonucleotide; TTT chr11 5295306 5295327 5295323 5295328 +
agggccctgtgcctcagtttcc

SEQ ID NO: 95823 - DNA, 22 bp, Artificial Sequence
  Synthetic oligonucleotide; TTA chr11 5295307 5295328 5295324 5295329 +
gggccctgtgcctcagtttcct

SEQ ID NO: 95824 - DNA, 22 bp, Artificial Sequence
  Synthetic oligonucleotide; CTG chr11 5295315 5295336 5295332 5295337 +
tgcctcagtttcctcctcttaa

SEQ ID NO: 95825 - DNA, 22 bp, Artificial Sequence
  Synthetic oligonucleotide; CTC chr11 5295321 5295342 5295338 5295343 +
agtttcctcctcttaaagggta

SEQ ID NO: 95826 - DNA, 22 bp, Artificial Sequence
  Synthetic oligonucleotide; TTT chr11 5295326 5295347 5295343 5295348 +
cctcctcttaaagggtattaca

SEQ ID NO: 95827 - DNA, 22 bp, Artificial Sequence
  Synthetic oligonucleotide; TTC chr11 5295327 5295348 5295344 5295349 +
ctcctcttaaagggtattacaa

SEQ ID NO: 95828 - DNA, 22 bp, Artificial Sequence
  Synthetic oligonucleotide; CTC chr11 5295330 5295351 5295347 5295352 +
ctcttaaagggtattacaatag

SEQ ID NO: 95829 - DNA, 22 bp, Artificial Sequence
  Synthetic oligonucleotide; CTC chr11 5295333 5295354 5295350 5295355 +
ttaaagggtattacaatagtac

SEQ ID NO: 95830 - DNA, 22 bp, Artificial Sequence
  Synthetic oligonucleotide; CTT chr11 5295335 5295356 5295352 5295357 +
aaagggtattacaatagtactt

SEQ ID NO: 95831 - DNA, 22 bp, Artificial Sequence
  Synthetic oligonucleotide; TTA chr11 5295336 5295357 5295353 5295358 +
aagggtattacaatagtacttg

SEQ ID NO: 95832 - DNA, 22 bp, Artificial Sequence
  Synthetic oligonucleotide; TTA chr11 5295346 5295367 5295363 5295368 +
caatagtacttgaggcacagag

SEQ ID NO: 95833 - DNA, 22 bp, Artificial Sequence
  Synthetic oligonucleotide; CTT chr11 5295357 5295378 5295374 5295379 +
gaggcacagagttactgtgaat

SEQ ID NO: 95834 - DNA, 22 bp, Artificial Sequence
  Synthetic oligonucleotide; TTG chr11 5295358 5295379 5295375 5295380 +
aggcacagagttactgtgaata

SEQ ID NO: 95835 - DNA, 22 bp, Artificial Sequence
  Synthetic oligonucleotide; TTA chr11 5295371 5295392 5295388 5295393 +
ctgtgaatactaaatgaaataa

SEQ ID NO: 95836 - DNA, 22 bp, Artificial Sequence
  Synthetic oligonucleotide; CTG chr11 5295374 5295395 5295391 5295396 +
tgaatactaaatgaaataatat

SEQ ID NO: 95837 - DNA, 22 bp, Artificial Sequence
  Synthetic oligonucleotide; CTA chr11 5295383 5295404 5295400 5295405 +
aatgaaataatatatcaacagt

SEQ ID NO: 95838 - DNA, 22 bp, Artificial Sequence
  Synthetic oligonucleotide; CTT chr11 5295410 5295431 5295427 5295432 +
gtgtatagtataagccataatc

SEQ ID NO: 95839 - DNA, 22 bp, Artificial Sequence
  Synthetic oligonucleotide; TTG chr11 5295411 5295432 5295428 5295433 +
tgtatagtataagccataatca

SEQ ID NO: 95840 - DNA, 22 bp, Artificial Sequence
  Synthetic oligonucleotide; TTG chr11 5295436 5295457 5295453 5295458 +
tattgttattactattactact

SEQ ID NO: 95841 - DNA, 22 bp, Artificial Sequence
  Synthetic oligonucleotide; TTG chr11 5295441 5295462 5295458 5295463 +
ttattactattactactattat

SEQ ID NO: 95842 - DNA, 22 bp, Artificial Sequence
  Synthetic oligonucleotide; TTA chr11 5295444 5295465 5295461 5295466 +
ttactattactactattattac

SEQ ID NO: 95843 - DNA, 22 bp, Artificial Sequence
  Synthetic oligonucleotide; TTA chr11 5295447 5295468 5295464 5295469 +
ctattactactattattactat

SEQ ID NO: 95844 - DNA, 22 bp, Artificial Sequence
  Synthetic oligonucleotide; CTA chr11 5295450 5295471 5295467 5295472 +
ttactactattattactattac

SEQ ID NO: 95845 - DNA, 22 bp, Artificial Sequence
  Synthetic oligonucleotide; TTA chr11 5295453 5295474 5295470 5295475 +
ctactattattactattacttt

SEQ ID NO: 95846 - DNA, 22 bp, Artificial Sequence
  Synthetic oligonucleotide; CTA chr11 5295456 5295477 5295473 5295478 +
ctattattactattacttttat

SEQ ID NO: 95847 - DNA, 22 bp, Artificial Sequence
  Synthetic oligonucleotide; CTA chr11 5295459 5295480 5295476 5295481 +
ttattactattacttttatact

SEQ ID NO: 95848 - DNA, 22 bp, Artificial Sequence
  Synthetic oligonucleotide; TTA chr11 5295462 5295483 5295479 5295484 +
ttactattacttttatactatc

SEQ ID NO: 95849 - DNA, 22 bp, Artificial Sequence
  Synthetic oligonucleotide; TTA chr11 5295465 5295486 5295482 5295487 +
ctattacttttatactatccta

SEQ ID NO: 95850 - DNA, 22 bp, Artificial Sequence
  Synthetic oligonucleotide; CTA chr11 5295468 5295489 5295485 5295490 +
ttacttttatactatcctagtg

SEQ ID NO: 95851 - DNA, 22 bp, Artificial Sequence
  Synthetic oligonucleotide; TTA chr11 5295471 5295492 5295488 5295493 +
cttttatactatcctagtgtgt

SEQ ID NO: 95852 - DNA, 22 bp, Artificial Sequence
  Synthetic oligonucleotide; CTT chr11 5295474 5295495 5295491 5295496 +
ttatactatcctagtgtgtaga

SEQ ID NO: 95853 - DNA, 22 bp, Artificial Sequence
  Synthetic oligonucleotide; TTT chr11 5295475 5295496 5295492 5295497 +
tatactatcctagtgtgtagat

SEQ ID NO: 95854 - DNA, 22 bp, Artificial Sequence
  Synthetic oligonucleotide; TTT chr11 5295476 5295497 5295493 5295498 +
atactatcctagtgtgtagatt

SEQ ID NO: 95855 - DNA, 22 bp, Artificial Sequence
  Synthetic oligonucleotide; TTA chr11 5295477 5295498 5295494 5295499 +
tactatcctagtgtgtagattg

SEQ ID NO: 95856 - DNA, 22 bp, Artificial Sequence
  Synthetic oligonucleotide; CTA chr11 5295482 5295503 5295499 5295504 +
tcctagtgtgtagattgaggat

SEQ ID NO: 95857 - DNA, 22 bp, Artificial Sequence
  Synthetic oligonucleotide; CTA chr11 5295487 5295508 5295504 5295509 +
gtgtgtagattgaggatgtagg

SEQ ID NO: 95858 - DNA, 22 bp, Artificial Sequence
  Synthetic oligonucleotide; TTG chr11 5295499 5295520 5295516 5295521 +
aggatgtaggggcttagagcaa

SEQ ID NO: 95859 - DNA, 22 bp, Artificial Sequence
  Synthetic oligonucleotide; CTT chr11 5295514 5295535 5295531 5295536 +
agagcaaagacatgaaggtcac

SEQ ID NO: 95860 - DNA, 22 bp, Artificial Sequence
  Synthetic oligonucleotide; TTA chr11 5295515 5295536 5295532 5295537 +
gagcaaagacatgaaggtcaca

SEQ ID NO: 95861 - DNA, 22 bp, Artificial Sequence
  Synthetic oligonucleotide; TTG chr11 5295576 5295597 5295593 5295598 +
tcaaggattacacgagtctttc

SEQ ID NO: 95862 - DNA, 22 bp, Artificial Sequence
  Synthetic oligonucleotide; TTA chr11 5295586 5295607 5295603 5295608 +
cacgagtctttctctgcaaagc

SEQ ID NO: 95863 - DNA, 22 bp, Artificial Sequence
  Synthetic oligonucleotide; CTT chr11 5295596 5295617 5295613 5295618 +
tctctgcaaagcgagggaaggt

SEQ ID NO: 95864 - DNA, 22 bp, Artificial Sequence
  Synthetic oligonucleotide; TTT chr11 5295597 5295618 5295614 5295619 +
ctctgcaaagcgagggaaggtt

SEQ ID NO: 95865 - DNA, 22 bp, Artificial Sequence
  Synthetic oligonucleotide; TTC chr11 5295598 5295619 5295615 5295620 +
tctgcaaagcgagggaaggtta

SEQ ID NO: 95866 - DNA, 22 bp, Artificial Sequence
  Synthetic oligonucleotide; CTC chr11 5295600 5295621 5295617 5295622 +
tgcaaagcgagggaaggttagt

SEQ ID NO: 95867 - DNA, 22 bp, Artificial Sequence
  Synthetic oligonucleotide; CTG chr11 5295602 5295623 5295619 5295624 +
caaagcgagggaaggttagtct

SEQ ID NO: 95868 - DNA, 22 bp, Artificial Sequence
  Synthetic oligonucleotide; TTA chr11 5295620 5295641 5295637 5295642 +
gtctctttcagagaacatcatg

SEQ ID NO: 95869 - DNA, 22 bp, Artificial Sequence
  Synthetic oligonucleotide; CTC chr11 5295625 5295646 5295642 5295647 +
tttcagagaacatcatggcaga

SEQ ID NO: 95870 - DNA, 22 bp, Artificial Sequence
  Synthetic oligonucleotide; CTT chr11 5295627 5295648 5295644 5295649 +
tcagagaacatcatggcagaaa

SEQ ID NO: 95871 - DNA, 22 bp, Artificial Sequence
  Synthetic oligonucleotide; TTT chr11 5295628 5295649 5295645 5295650 +
cagagaacatcatggcagaaac

SEQ ID NO: 95872 - DNA, 22 bp, Artificial Sequence
  Synthetic oligonucleotide; TTC chr11 5295629 5295650 5295646 5295651 +
agagaacatcatggcagaaaca

SEQ ID NO: 95873 - DNA, 22 bp, Artificial Sequence
  Synthetic oligonucleotide; TTT chr11 5295654 5295675 5295671 5295676 +
tttcaagagaatccatgcattt

SEQ ID NO: 95874 - DNA, 22 bp, Artificial Sequence
  Synthetic oligonucleotide; TTT chr11 5295655 5295676 5295672 5295677 +
ttcaagagaatccatgcatttt

SEQ ID NO: 95875 - DNA, 22 bp, Artificial Sequence
  Synthetic oligonucleotide; TTT chr11 5295656 5295677 5295673 5295678 +
tcaagagaatccatgcatttta

SEQ ID NO: 95876 - DNA, 22 bp, Artificial Sequence
  Synthetic oligonucleotide; TTT chr11 5295657 5295678 5295674 5295679 +
caagagaatccatgcattttac

SEQ ID NO: 95877 - DNA, 22 bp, Artificial Sequence
  Synthetic oligonucleotide; TTC chr11 5295658 5295679 5295675 5295680 +
aagagaatccatgcattttacg

SEQ ID NO: 95878 - DNA, 22 bp, Artificial Sequence
  Synthetic oligonucleotide; TTT chr11 5295676 5295697 5295693 5295698 +
tacgtccatgtagttgcaaaca

SEQ ID NO: 95879 - DNA, 22 bp, Artificial Sequence
  Synthetic oligonucleotide; TTT chr11 5295677 5295698 5295694 5295699 +
acgtccatgtagttgcaaacaa

SEQ ID NO: 95880 - DNA, 22 bp, Artificial Sequence
  Synthetic oligonucleotide; TTA chr11 5295678 5295699 5295695 5295700 +
cgtccatgtagttgcaaacaat

SEQ ID NO: 95881 - DNA, 22 bp, Artificial Sequence
  Synthetic oligonucleotide; TTG chr11 5295692 5295713 5295709 5295714 +
caaacaatgccaagtagaactc

SEQ ID NO: 95882 - DNA, 22 bp, Artificial Sequence
  Synthetic oligonucleotide; CTC chr11 5295714 5295735 5295731 5295736 +
caatccagagctaagtggggct

SEQ ID NO: 95883 - DNA, 22 bp, Artificial Sequence
  Synthetic oligonucleotide; CTA chr11 5295727 5295748 5295744 5295749 +
agtggggctgtgggaactatgt

SEQ ID NO: 95884 - DNA, 22 bp, Artificial Sequence
  Synthetic oligonucleotide; CTG chr11 5295737 5295758 5295754 5295759 +
tgggaactatgtaccaattgat

SEQ ID NO: 95885 - DNA, 22 bp, Artificial Sequence
  Synthetic oligonucleotide; CTA chr11 5295746 5295767 5295763 5295768 +
tgtaccaattgatggacatgct

SEQ ID NO: 95886 - DNA, 22 bp, Artificial Sequence
  Synthetic oligonucleotide; TTG chr11 5295757 5295778 5295774 5295779 +
atggacatgctgctttttgact

SEQ ID NO: 95887 - DNA, 22 bp, Artificial Sequence
  Synthetic oligonucleotide; CTG chr11 5295769 5295790 5295786 5295791 +
ctttttgactcagaggtggata

SEQ ID NO: 95888 - DNA, 22 bp, Artificial Sequence
  Synthetic oligonucleotide; CTT chr11 5295772 5295793 5295789 5295794 +
tttgactcagaggtggataaga

SEQ ID NO: 95889 - DNA, 22 bp, Artificial Sequence
  Synthetic oligonucleotide; TTT chr11 5295773 5295794 5295790 5295795 +
ttgactcagaggtggataagag

SEQ ID NO: 95890 - DNA, 22 bp, Artificial Sequence
  Synthetic oligonucleotide; TTT chr11 5295774 5295795 5295791 5295796 +
tgactcagaggtggataagaga

SEQ ID NO: 95891 - DNA, 22 bp, Artificial Sequence
  Synthetic oligonucleotide; TTT chr11 5295775 5295796 5295792 5295797 +
gactcagaggtggataagagac

SEQ ID NO: 95892 - DNA, 22 bp, Artificial Sequence
  Synthetic oligonucleotide; TTG chr11 5295776 5295797 5295793 5295798 +
actcagaggtggataagagaca

SEQ ID NO: 95893 - DNA, 22 bp, Artificial Sequence
  Synthetic oligonucleotide; CTC chr11 5295780 5295801 5295797 5295802 +
agaggtggataagagacaaaac

SEQ ID NO: 95894 - DNA, 22 bp, Artificial Sequence
  Synthetic oligonucleotide; CTC chr11 5295804 5295825 5295821 5295826 +
ttttcttcttagatgtactaaa

SEQ ID NO: 95895 - DNA, 22 bp, Artificial Sequence
  Synthetic oligonucleotide; CTT chr11 5295806 5295827 5295823 5295828 +
ttcttcttagatgtactaaaaa

SEQ ID NO: 95896 - DNA, 22 bp, Artificial Sequence
  Synthetic oligonucleotide; TTT chr11 5295807 5295828 5295824 5295829 +
tcttcttagatgtactaaaaag

SEQ ID NO: 95897 - DNA, 22 bp, Artificial Sequence
  Synthetic oligonucleotide; TTT chr11 5295808 5295829 5295825 5295830 +
cttcttagatgtactaaaaagt

SEQ ID NO: 95898 - DNA, 22 bp, Artificial Sequence
  Synthetic oligonucleotide; TTC chr11 5295809 5295830 5295826 5295831 +
ttcttagatgtactaaaaagta

SEQ ID NO: 95899 - DNA, 22 bp, Artificial Sequence
  Synthetic oligonucleotide; CTT chr11 5295811 5295832 5295828 5295833 +
cttagatgtactaaaaagtagt

SEQ ID NO: 95900 - DNA, 22 bp, Artificial Sequence
  Synthetic oligonucleotide; TTC chr11 5295812 5295833 5295829 5295834 +
ttagatgtactaaaaagtagtt

SEQ ID NO: 95901 - DNA, 22 bp, Artificial Sequence
  Synthetic oligonucleotide; CTT chr11 5295814 5295835 5295831 5295836 +
agatgtactaaaaagtagttag

SEQ ID NO: 95902 - DNA, 22 bp, Artificial Sequence
  Synthetic oligonucleotide; TTA chr11 5295815 5295836 5295832 5295837 +
gatgtactaaaaagtagttagt

SEQ ID NO: 95903 - DNA, 22 bp, Artificial Sequence
  Synthetic oligonucleotide; CTA chr11 5295824 5295845 5295841 5295846 +
aaaagtagttagtctggaagta

SEQ ID NO: 95904 - DNA, 22 bp, Artificial Sequence
  Synthetic oligonucleotide; TTA chr11 5295835 5295856 5295852 5295857 +
gtctggaagtatttagaaggct

SEQ ID NO: 95905 - DNA, 22 bp, Artificial Sequence
  Synthetic oligonucleotide; CTG chr11 5295840 5295861 5295857 5295862 +
gaagtatttagaaggctttgga

SEQ ID NO: 95906 - DNA, 22 bp, Artificial Sequence
  Synthetic oligonucleotide; TTT chr11 5295849 5295870 5295866 5295871 +
agaaggctttggagaggaatgt

SEQ ID NO: 95907 - DNA, 22 bp, Artificial Sequence
  Synthetic oligonucleotide; TTA chr11 5295850 5295871 5295867 5295872 +
gaaggctttggagaggaatgtg

SEQ ID NO: 95908 - DNA, 22 bp, Artificial Sequence
  Synthetic oligonucleotide; CTT chr11 5295858 5295879 5295875 5295880 +
tggagaggaatgtgattttatc

SEQ ID NO: 95909 - DNA, 22 bp, Artificial Sequence
  Synthetic oligonucleotide; TTT chr11 5295859 5295880 5295876 5295881 +
ggagaggaatgtgattttatca

SEQ ID NO: 95910 - DNA, 22 bp, Artificial Sequence
  Synthetic oligonucleotide; TTG chr11 5295860 5295881 5295877 5295882 +
gagaggaatgtgattttatcag

SEQ ID NO: 95911 - DNA, 22 bp, Artificial Sequence
  Synthetic oligonucleotide; TTT chr11 5295876 5295897 5295893 5295898 +
tatcaggtaaatcaaaaataga

SEQ ID NO: 95912 - DNA, 22 bp, Artificial Sequence
  Synthetic oligonucleotide; TTT chr11 5295877 5295898 5295894 5295899 +
atcaggtaaatcaaaaatagag

SEQ ID NO: 95913 - DNA, 22 bp, Artificial Sequence
  Synthetic oligonucleotide; TTA chr11 5295878 5295899 5295895 5295900 +
tcaggtaaatcaaaaatagagg

SEQ ID NO: 95914 - DNA, 22 bp, Artificial Sequence
  Synthetic oligonucleotide; CTA chr11 5295903 5295924 5295920 5295925 +
tttctgaaagaagcaactagaa

SEQ ID NO: 95915 - DNA, 22 bp, Artificial Sequence
  Synthetic oligonucleotide; TTT chr11 5295906 5295927 5295923 5295928 +
ctgaaagaagcaactagaacca

SEQ ID NO: 95916 - DNA, 22 bp, Artificial Sequence
  Synthetic oligonucleotide; TTC chr11 5295907 5295928 5295924 5295929 +
tgaaagaagcaactagaaccaa

SEQ ID NO: 95917 - DNA, 22 bp, Artificial Sequence
  Synthetic oligonucleotide; CTG chr11 5295909 5295930 5295926 5295931 +
aaagaagcaactagaaccaagt

SEQ ID NO: 95918 - DNA, 22 bp, Artificial Sequence
  Synthetic oligonucleotide; CTA chr11 5295922 5295943 5295939 5295944 +
gaaccaagttacacacagaaaa

SEQ ID NO: 95919 - DNA, 22 bp, Artificial Sequence
  Synthetic oligonucleotide; TTA chr11 5295933 5295954 5295950 5295955 +
cacacagaaaatacccataatg

SEQ ID NO: 95920 - DNA, 22 bp, Artificial Sequence
  Synthetic oligonucleotide; TTT chr11 5295966 5295987 5295983 5295988 +
ttgactagagtagcatgtgcaa

SEQ ID NO: 95921 - DNA, 22 bp, Artificial Sequence
  Synthetic oligonucleotide; TTT chr11 5295967 5295988 5295984 5295989 +
tgactagagtagcatgtgcaaa

SEQ ID NO: 95922 - DNA, 22 bp, Artificial Sequence
  Synthetic oligonucleotide; TTT chr11 5295968 5295989 5295985 5295990 +
gactagagtagcatgtgcaaat

SEQ ID NO: 95923 - DNA, 22 bp, Artificial Sequence
  Synthetic oligonucleotide; TTG chr11 5295969 5295990 5295986 5295991 +
actagagtagcatgtgcaaatt

SEQ ID NO: 95924 - DNA, 22 bp, Artificial Sequence
  Synthetic oligonucleotide; CTA chr11 5295973 5295994 5295990 5295995 +
gagtagcatgtgcaaatttgta

SEQ ID NO: 95925 - DNA, 22 bp, Artificial Sequence
  Synthetic oligonucleotide; TTT chr11 5295992 5296013 5296009 5296014 +
gtataaaatatttgcaggtaag

SEQ ID NO: 95926 - DNA, 22 bp, Artificial Sequence
  Synthetic oligonucleotide; TTG chr11 5295993 5296014 5296010 5296015 +
tataaaatatttgcaggtaagt

SEQ ID NO: 95927 - DNA, 22 bp, Artificial Sequence
  Synthetic oligonucleotide; TTT chr11 5296005 5296026 5296022 5296027 +
gcaggtaagttaggtaatgcaa

SEQ ID NO: 95928 - DNA, 22 bp, Artificial Sequence
  Synthetic oligonucleotide; TTG chr11 5296006 5296027 5296023 5296028 +
caggtaagttaggtaatgcaac

SEQ ID NO: 95929 - DNA, 22 bp, Artificial Sequence
  Synthetic oligonucleotide; TTA chr11 5296017 5296038 5296034 5296039 +
ggtaatgcaacatttgagactc

SEQ ID NO: 95930 - DNA, 22 bp, Artificial Sequence
  Synthetic oligonucleotide; TTT chr11 5296032 5296053 5296049 5296054 +
gagactctaagtttgtgggaaa

SEQ ID NO: 95931 - DNA, 22 bp, Artificial Sequence
  Synthetic oligonucleotide; TTG chr11 5296033 5296054 5296050 5296055 +
agactctaagtttgtgggaaac

SEQ ID NO: 95932 - DNA, 22 bp, Artificial Sequence
  Synthetic oligonucleotide; CTC chr11 5296039 5296060 5296056 5296061 +
taagtttgtgggaaacttagaa

SEQ ID NO: 95933 - DNA, 22 bp, Artificial Sequence
  Synthetic oligonucleotide; CTA chr11 5296041 5296062 5296058 5296063 +
agtttgtgggaaacttagaact

SEQ ID NO: 95934 - DNA, 22 bp, Artificial Sequence
  Synthetic oligonucleotide; TTT chr11 5296046 5296067 5296063 5296068 +
gtgggaaacttagaactgtttc

SEQ ID NO: 95935 - DNA, 22 bp, Artificial Sequence
  Synthetic oligonucleotide; TTG chr11 5296047 5296068 5296064 5296069 +
tgggaaacttagaactgtttca

SEQ ID NO: 95936 - DNA, 22 bp, Artificial Sequence
  Synthetic oligonucleotide; CTT chr11 5296057 5296078 5296074 5296079 +
agaactgtttcagttttctaca

SEQ ID NO: 95937 - DNA, 22 bp, Artificial Sequence
  Synthetic oligonucleotide; TTA chr11 5296058 5296079 5296075 5296080 +
gaactgtttcagttttctacat

SEQ ID NO: 95938 - DNA, 22 bp, Artificial Sequence
  Synthetic oligonucleotide; CTG chr11 5296064 5296085 5296081 5296086 +
tttcagttttctacattattcc

SEQ ID NO: 95939 - DNA, 22 bp, Artificial Sequence
  Synthetic oligonucleotide; TTT chr11 5296067 5296088 5296084 5296089 +
cagttttctacattattcctaa

SEQ ID NO: 95940 - DNA, 22 bp, Artificial Sequence
  Synthetic oligonucleotide; TTC chr11 5296068 5296089 5296085 5296090 +
agttttctacattattcctaac

SEQ ID NO: 95941 - DNA, 22 bp, Artificial Sequence
  Synthetic oligonucleotide; TTT chr11 5296073 5296094 5296090 5296095 +
tctacattattcctaactattt

SEQ ID NO: 95942 - DNA, 22 bp, Artificial Sequence
  Synthetic oligonucleotide; TTT chr11 5296074 5296095 5296091 5296096 +
ctacattattcctaactattta

SEQ ID NO: 95943 - DNA, 22 bp, Artificial Sequence
  Synthetic oligonucleotide; TTC chr11 5296075 5296096 5296092 5296097 +
tacattattcctaactatttaa

SEQ ID NO: 95944 - DNA, 22 bp, Artificial Sequence
  Synthetic oligonucleotide; CTA chr11 5296077 5296098 5296094 5296099 +
cattattcctaactatttaaaa

SEQ ID NO: 95945 - DNA, 22 bp, Artificial Sequence
  Synthetic oligonucleotide; TTA chr11 5296082 5296103 5296099 5296104 +
ttcctaactatttaaaatgcta

SEQ ID NO: 95946 - DNA, 22 bp, Artificial Sequence
  Synthetic oligonucleotide; TTC chr11 5296085 5296106 5296102 5296107 +
ctaactatttaaaatgctatga

SEQ ID NO: 95947 - DNA, 22 bp, Artificial Sequence
  Synthetic oligonucleotide; CTA chr11 5296088 5296109 5296105 5296110 +
actatttaaaatgctatgaaat

SEQ ID NO: 95948 - DNA, 22 bp, Artificial Sequence
  Synthetic oligonucleotide; CTA chr11 5296092 5296113 5296109 5296114 +
tttaaaatgctatgaaatgatt

SEQ ID NO: 95949 - DNA, 22 bp, Artificial Sequence
  Synthetic oligonucleotide; TTT chr11 5296095 5296116 5296112 5296117 +
aaaatgctatgaaatgattttg

SEQ ID NO: 95950 - DNA, 22 bp, Artificial Sequence
  Synthetic oligonucleotide; TTA chr11 5296096 5296117 5296113 5296118 +
aaatgctatgaaatgattttgc

SEQ ID NO: 95951 - DNA, 22 bp, Artificial Sequence
  Synthetic oligonucleotide; CTA chr11 5296104 5296125 5296121 5296126 +
tgaaatgattttgcagattttt

SEQ ID NO: 95952 - DNA, 22 bp, Artificial Sequence
  Synthetic oligonucleotide; TTT chr11 5296115 5296136 5296132 5296137 +
tgcagatttttctgagatgttt

SEQ ID NO: 95953 - DNA, 22 bp, Artificial Sequence
  Synthetic oligonucleotide; TTT chr11 5296116 5296137 5296133 5296138 +
gcagatttttctgagatgttta

SEQ ID NO: 95954 - DNA, 22 bp, Artificial Sequence
  Synthetic oligonucleotide; TTG chr11 5296117 5296138 5296134 5296139 +
cagatttttctgagatgtttat

SEQ ID NO: 95955 - DNA, 22 bp, Artificial Sequence
  Synthetic oligonucleotide; TTT chr11 5296124 5296145 5296141 5296146 +
ttctgagatgtttatagtgata

SEQ ID NO: 95956 - DNA, 22 bp, Artificial Sequence
  Synthetic oligonucleotide; TTT chr11 5296125 5296146 5296142 5296147 +
tctgagatgtttatagtgataa

SEQ ID NO: 95957 - DNA, 22 bp, Artificial Sequence
  Synthetic oligonucleotide; TTT chr11 5296126 5296147 5296143 5296148 +
ctgagatgtttatagtgataag

SEQ ID NO: 95958 - DNA, 22 bp, Artificial Sequence
  Synthetic oligonucleotide; TTC chr11 5296127 5296148 5296144 5296149 +
tgagatgtttatagtgataagt

SEQ ID NO: 95959 - DNA, 22 bp, Artificial Sequence
  Synthetic oligonucleotide; CTG chr11 5296129 5296150 5296146 5296151 +
agatgtttatagtgataagtga

SEQ ID NO: 95960 - DNA, 22 bp, Artificial Sequence
  Synthetic oligonucleotide; TTT chr11 5296137 5296158 5296154 5296159 +
atagtgataagtgagaatatat

SEQ ID NO: 95961 - DNA, 22 bp, Artificial Sequence
  Synthetic oligonucleotide; TTA chr11 5296138 5296159 5296155 5296160 +
tagtgataagtgagaatatatg

SEQ ID NO: 95962 - DNA, 22 bp, Artificial Sequence
  Synthetic oligonucleotide; CTG chr11 5296170 5296191 5296187 5296192 +
ttcctttgttgtataactctgt

SEQ ID NO: 95963 - DNA, 22 bp, Artificial Sequence
  Synthetic oligonucleotide; TTC chr11 5296173 5296194 5296190 5296195 +
ctttgttgtataactctgttta

SEQ ID NO: 95964 - DNA, 22 bp, Artificial Sequence
  Synthetic oligonucleotide; CTT chr11 5296176 5296197 5296193 5296198 +
tgttgtataactctgtttaaaa

SEQ ID NO: 95965 - DNA, 22 bp, Artificial Sequence
  Synthetic oligonucleotide; TTT chr11 5296177 5296198 5296194 5296199 +
gttgtataactctgtttaaaat

SEQ ID NO: 95966 - DNA, 22 bp, Artificial Sequence
  Synthetic oligonucleotide; TTG chr11 5296178 5296199 5296195 5296200 +
ttgtataactctgtttaaaata

SEQ ID NO: 95967 - DNA, 22 bp, Artificial Sequence
  Synthetic oligonucleotide; TTG chr11 5296181 5296202 5296198 5296203 +
tataactctgtttaaaatatct

SEQ ID NO: 95968 - DNA, 22 bp, Artificial Sequence
  Synthetic oligonucleotide; CTC chr11 5296189 5296210 5296206 5296211 +
tgtttaaaatatcttttatata

SEQ ID NO: 95969 - DNA, 22 bp, Artificial Sequence
  Synthetic oligonucleotide; CTG chr11 5296191 5296212 5296208 5296213 +
tttaaaatatcttttatataat

SEQ ID NO: 95970 - DNA, 22 bp, Artificial Sequence
  Synthetic oligonucleotide; TTT chr11 5296194 5296215 5296211 5296216 +
aaaatatcttttatataatgat

SEQ ID NO: 95971 - DNA, 22 bp, Artificial Sequence
  Synthetic oligonucleotide; TTA chr11 5296195 5296216 5296212 5296217 +
aaatatcttttatataatgata

SEQ ID NO: 95972 - DNA, 22 bp, Artificial Sequence
  Synthetic oligonucleotide; CTT chr11 5296204 5296225 5296221 5296226 +
ttatataatgataaaaaatcta

SEQ ID NO: 95973 - DNA, 22 bp, Artificial Sequence
  Synthetic oligonucleotide; TTT chr11 5296205 5296226 5296222 5296227 +
tatataatgataaaaaatctat

SEQ ID NO: 95974 - DNA, 22 bp, Artificial Sequence
  Synthetic oligonucleotide; TTT chr11 5296206 5296227 5296223 5296228 +
atataatgataaaaaatctatc

SEQ ID NO: 95975 - DNA, 22 bp, Artificial Sequence
  Synthetic oligonucleotide; TTA chr11 5296207 5296228 5296224 5296229 +
tataatgataaaaaatctatct

SEQ ID NO: 95976 - DNA, 22 bp, Artificial Sequence
  Synthetic oligonucleotide; CTA chr11 5296226 5296247 5296243 5296248 +
tctctttgtaacttaccacagc

SEQ ID NO: 95977 - DNA, 22 bp, Artificial Sequence
  Synthetic oligonucleotide; CTC chr11 5296230 5296251 5296247 5296252 +
tttgtaacttaccacagcagat

SEQ ID NO: 95978 - DNA, 22 bp, Artificial Sequence
  Synthetic oligonucleotide; CTT chr11 5296232 5296253 5296249 5296254 +
tgtaacttaccacagcagattt

SEQ ID NO: 95979 - DNA, 22 bp, Artificial Sequence
  Synthetic oligonucleotide; TTT chr11 5296233 5296254 5296250 5296255 +
gtaacttaccacagcagatttg

SEQ ID NO: 95980 - DNA, 22 bp, Artificial Sequence
  Synthetic oligonucleotide; TTG chr11 5296234 5296255 5296251 5296256 +
taacttaccacagcagatttgt

SEQ ID NO: 95981 - DNA, 22 bp, Artificial Sequence
  Synthetic oligonucleotide; CTT chr11 5296240 5296261 5296257 5296262 +
accacagcagatttgtattatt

SEQ ID NO: 95982 - DNA, 22 bp, Artificial Sequence
  Synthetic oligonucleotide; TTA chr11 5296241 5296262 5296258 5296263 +
ccacagcagatttgtattattt

SEQ ID NO: 95983 - DNA, 22 bp, Artificial Sequence
  Synthetic oligonucleotide; TTT chr11 5296254 5296275 5296271 5296276 +
gtattattttatgtgaagaaac

SEQ ID NO: 95984 - DNA, 22 bp, Artificial Sequence
  Synthetic oligonucleotide; TTG chr11 5296255 5296276 5296272 5296277 +
tattattttatgtgaagaaact

SEQ ID NO: 95985 - DNA, 22 bp, Artificial Sequence
  Synthetic oligonucleotide; TTA chr11 5296260 5296281 5296277 5296282 +
ttttatgtgaagaaactcagaa

SEQ ID NO: 95986 - DNA, 22 bp, Artificial Sequence
  Synthetic oligonucleotide; TTT chr11 5296263 5296284 5296280 5296285 +
tatgtgaagaaactcagaatat

SEQ ID NO: 95987 - DNA, 22 bp, Artificial Sequence
  Synthetic oligonucleotide; TTT chr11 5296264 5296285 5296281 5296286 +
atgtgaagaaactcagaatatg

SEQ ID NO: 95988 - DNA, 22 bp, Artificial Sequence
  Synthetic oligonucleotide; TTA chr11 5296265 5296286 5296282 5296287 +
tgtgaagaaactcagaatatgg

SEQ ID NO: 95989 - DNA, 22 bp, Artificial Sequence
  Synthetic oligonucleotide; CTC chr11 5296278 5296299 5296295 5296300 +
agaatatggagtattttttttc

SEQ ID NO: 95990 - DNA, 22 bp, Artificial Sequence
  Synthetic oligonucleotide; TTT chr11 5296294 5296315 5296311 5296316 +
tttttctcaaattatcactttt

SEQ ID NO: 95991 - DNA, 22 bp, Artificial Sequence
  Synthetic oligonucleotide; TTT chr11 5296295 5296316 5296312 5296317 +
ttttctcaaattatcactttta

SEQ ID NO: 95992 - DNA, 22 bp, Artificial Sequence
  Synthetic oligonucleotide; TTT chr11 5296296 5296317 5296313 5296318 +
tttctcaaattatcacttttat

SEQ ID NO: 95993 - DNA, 22 bp, Artificial Sequence
  Synthetic oligonucleotide; TTT chr11 5296297 5296318 5296314 5296319 +
ttctcaaattatcacttttata

SEQ ID NO: 95994 - DNA, 22 bp, Artificial Sequence
  Synthetic oligonucleotide; TTT chr11 5296298 5296319 5296315 5296320 +
tctcaaattatcacttttataa

SEQ ID NO: 95995 - DNA, 22 bp, Artificial Sequence
  Synthetic oligonucleotide; TTT chr11 5296299 5296320 5296316 5296321 +
ctcaaattatcacttttataag

SEQ ID NO: 95996 - DNA, 22 bp, Artificial Sequence
  Synthetic oligonucleotide; TTC chr11 5296300 5296321 5296317 5296322 +
tcaaattatcacttttataagg

SEQ ID NO: 95997 - DNA, 22 bp, Artificial Sequence
  Synthetic oligonucleotide; CTC chr11 5296302 5296323 5296319 5296324 +
aaattatcacttttataaggat

SEQ ID NO: 95998 - DNA, 22 bp, Artificial Sequence
  Synthetic oligonucleotide; TTA chr11 5296308 5296329 5296325 5296330 +
tcacttttataaggatctgcta

SEQ ID NO: 95999 - DNA, 22 bp, Artificial Sequence
  Synthetic oligonucleotide; CTT chr11 5296314 5296335 5296331 5296336 +
ttataaggatctgctatctatc

SEQ ID NO: 96000 - DNA, 22 bp, Artificial Sequence
  Synthetic oligonucleotide; TTT chr11 5296315 5296336 5296332 5296337 +
tataaggatctgctatctatcc

SEQ ID NO: 96001 - DNA, 22 bp, Artificial Sequence
  Synthetic oligonucleotide; TTT chr11 5296316 5296337 5296333 5296338 +
ataaggatctgctatctatcca

SEQ ID NO: 96002 - DNA, 22 bp, Artificial Sequence
  Synthetic oligonucleotide; TTA chr11 5296317 5296338 5296334 5296339 +
taaggatctgctatctatccat

SEQ ID NO: 96003 - DNA, 22 bp, Artificial Sequence
  Synthetic oligonucleotide; CTG chr11 5296327 5296348 5296344 5296349 +
ctatctatccatcttattttct

SEQ ID NO: 96004 - DNA, 22 bp, Artificial Sequence
  Synthetic oligonucleotide; CTA chr11 5296330 5296351 5296347 5296352 +
tctatccatcttattttcttta

SEQ ID NO: 96005 - DNA, 22 bp, Artificial Sequence
  Synthetic oligonucleotide; CTA chr11 5296334 5296355 5296351 5296356 +
tccatcttattttctttatgta

SEQ ID NO: 96006 - DNA, 22 bp, Artificial Sequence
  Synthetic oligonucleotide; CTT chr11 5296342 5296363 5296359 5296364 +
attttctttatgtaaaccagtg

SEQ ID NO: 96007 - DNA, 22 bp, Artificial Sequence
  Synthetic oligonucleotide; TTA chr11 5296343 5296364 5296360 5296365 +
ttttctttatgtaaaccagtgt

SEQ ID NO: 96008 - DNA, 22 bp, Artificial Sequence
  Synthetic oligonucleotide; TTT chr11 5296346 5296367 5296363 5296368 +
tctttatgtaaaccagtgtttt

SEQ ID NO: 96009 - DNA, 22 bp, Artificial Sequence
  Synthetic oligonucleotide; TTT chr11 5296347 5296368 5296364 5296369 +
ctttatgtaaaccagtgtttta

SEQ ID NO: 96010 - DNA, 22 bp, Artificial Sequence
  Synthetic oligonucleotide; TTC chr11 5296348 5296369 5296365 5296370 +
tttatgtaaaccagtgttttat

SEQ ID NO: 96011 - DNA, 22 bp, Artificial Sequence
  Synthetic oligonucleotide; CTT chr11 5296350 5296371 5296367 5296372 +
tatgtaaaccagtgttttatct

SEQ ID NO: 96012 - DNA, 22 bp, Artificial Sequence
  Synthetic oligonucleotide; TTT chr11 5296351 5296372 5296368 5296373 +
atgtaaaccagtgttttatctc

SEQ ID NO: 96013 - DNA, 22 bp, Artificial Sequence
  Synthetic oligonucleotide; TTA chr11 5296352 5296373 5296369 5296374 +
tgtaaaccagtgttttatctct

SEQ ID NO: 96014 - DNA, 22 bp, Artificial Sequence
  Synthetic oligonucleotide; TTT chr11 5296367 5296388 5296384 5296389 +
tatctcttctcattttctatca

SEQ ID NO: 96015 - DNA, 22 bp, Artificial Sequence
  Synthetic oligonucleotide; TTT chr11 5296368 5296389 5296385 5296390 +
atctcttctcattttctatcaa

SEQ ID NO: 96016 - DNA, 22 bp, Artificial Sequence
  Synthetic oligonucleotide; TTA chr11 5296369 5296390 5296386 5296391 +
tctcttctcattttctatcaag

SEQ ID NO: 96017 - DNA, 22 bp, Artificial Sequence
  Synthetic oligonucleotide; CTC chr11 5296373 5296394 5296390 5296395 +
ttctcattttctatcaaggatt

SEQ ID NO: 96018 - DNA, 22 bp, Artificial Sequence
  Synthetic oligonucleotide; CTT chr11 5296375 5296396 5296392 5296397 +
ctcattttctatcaaggattaa

SEQ ID NO: 96019 - DNA, 22 bp, Artificial Sequence
  Synthetic oligonucleotide; TTC chr11 5296376 5296397 5296393 5296398 +
tcattttctatcaaggattaat

SEQ ID NO: 96020 - DNA, 22 bp, Artificial Sequence
  Synthetic oligonucleotide; CTC chr11 5296378 5296399 5296395 5296400 +
attttctatcaaggattaatag

SEQ ID NO: 96021 - DNA, 22 bp, Artificial Sequence
  Synthetic oligonucleotide; TTT chr11 5296382 5296403 5296399 5296404 +
tctatcaaggattaatagattt

SEQ ID NO: 96022 - DNA, 22 bp, Artificial Sequence
  Synthetic oligonucleotide; TTT chr11 5296383 5296404 5296400 5296405 +
ctatcaaggattaatagatttt

SEQ ID NO: 96023 - DNA, 22 bp, Artificial Sequence
  Synthetic oligonucleotide; TTC chr11 5296384 5296405 5296401 5296406 +
tatcaaggattaatagattttt

SEQ ID NO: 96024 - DNA, 22 bp, Artificial Sequence
  Synthetic oligonucleotide; CTA chr11 5296386 5296407 5296403 5296408 +
tcaaggattaatagatttttgt

SEQ ID NO: 96025 - DNA, 22 bp, Artificial Sequence
  Synthetic oligonucleotide; TTA chr11 5296396 5296417 5296413 5296418 +
atagatttttgtcatctttatt

SEQ ID NO: 96026 - DNA, 22 bp, Artificial Sequence
  Synthetic oligonucleotide; TTT chr11 5296404 5296425 5296421 5296426 +
ttgtcatctttattgtcttttt

SEQ ID NO: 96027 - DNA, 22 bp, Artificial Sequence
  Synthetic oligonucleotide; TTT chr11 5296405 5296426 5296422 5296427 +
tgtcatctttattgtctttttt

SEQ ID NO: 96028 - DNA, 22 bp, Artificial Sequence
  Synthetic oligonucleotide; TTT chr11 5296406 5296427 5296423 5296428 +
gtcatctttattgtcttttttt

SEQ ID NO: 96029 - DNA, 22 bp, Artificial Sequence
  Synthetic oligonucleotide; TTG chr11 5296407 5296428 5296424 5296429 +
tcatctttattgtctttttttc

SEQ ID NO: 96030 - DNA, 22 bp, Artificial Sequence
  Synthetic oligonucleotide; CTT chr11 5296414 5296435 5296431 5296436 +
tattgtctttttttctccaact

SEQ ID NO: 96031 - DNA, 22 bp, Artificial Sequence
  Synthetic oligonucleotide; TTT chr11 5296415 5296436 5296432 5296437 +
attgtctttttttctccaactt

SEQ ID NO: 96032 - DNA, 22 bp, Artificial Sequence
  Synthetic oligonucleotide; TTA chr11 5296416 5296437 5296433 5296438 +
ttgtctttttttctccaacttt

SEQ ID NO: 96033 - DNA, 22 bp, Artificial Sequence
  Synthetic oligonucleotide; TTG chr11 5296419 5296440 5296436 5296441 +
tctttttttctccaactttttg

SEQ ID NO: 96034 - DNA, 22 bp, Artificial Sequence
  Synthetic oligonucleotide; CTT chr11 5296423 5296444 5296440 5296445 +
tttttctccaactttttgtatc

SEQ ID NO: 96035 - DNA, 22 bp, Artificial Sequence
  Synthetic oligonucleotide; TTT chr11 5296424 5296445 5296441 5296446 +
ttttctccaactttttgtatct

SEQ ID NO: 96036 - DNA, 22 bp, Artificial Sequence
  Synthetic oligonucleotide; TTT chr11 5296425 5296446 5296442 5296447 +
tttctccaactttttgtatcta

SEQ ID NO: 96037 - DNA, 22 bp, Artificial Sequence
  Synthetic oligonucleotide; TTT chr11 5296426 5296447 5296443 5296448 +
ttctccaactttttgtatctac

SEQ ID NO: 96038 - DNA, 22 bp, Artificial Sequence
  Synthetic oligonucleotide; TTT chr11 5296427 5296448 5296444 5296449 +
tctccaactttttgtatctaca

SEQ ID NO: 96039 - DNA, 22 bp, Artificial Sequence
  Synthetic oligonucleotide; TTT chr11 5296428 5296449 5296445 5296450 +
ctccaactttttgtatctacag

SEQ ID NO: 96040 - DNA, 22 bp, Artificial Sequence
  Synthetic oligonucleotide; TTC chr11 5296429 5296450 5296446 5296451 +
tccaactttttgtatctacagg

SEQ ID NO: 96041 - DNA, 22 bp, Artificial Sequence
  Synthetic oligonucleotide; CTC chr11 5296431 5296452 5296448 5296453 +
caactttttgtatctacaggtt

SEQ ID NO: 96042 - DNA, 22 bp, Artificial Sequence
  Synthetic oligonucleotide; CTT chr11 5296437 5296458 5296454 5296459 +
tttgtatctacaggttcctacc

SEQ ID NO: 96043 - DNA, 22 bp, Artificial Sequence
  Synthetic oligonucleotide; TTT chr11 5296438 5296459 5296455 5296460 +
ttgtatctacaggttcctacct

SEQ ID NO: 96044 - DNA, 22 bp, Artificial Sequence
  Synthetic oligonucleotide; TTT chr11 5296439 5296460 5296456 5296461 +
tgtatctacaggttcctacctt

SEQ ID NO: 96045 - DNA, 22 bp, Artificial Sequence
  Synthetic oligonucleotide; TTT chr11 5296440 5296461 5296457 5296462 +
gtatctacaggttcctaccttc

SEQ ID NO: 96046 - DNA, 22 bp, Artificial Sequence
  Synthetic oligonucleotide; TTG chr11 5296441 5296462 5296458 5296463 +
tatctacaggttcctaccttca

SEQ ID NO: 96047 - DNA, 22 bp, Artificial Sequence
  Synthetic oligonucleotide; CTA chr11 5296447 5296468 5296464 5296469 +
caggttcctaccttcatttata

SEQ ID NO: 96048 - DNA, 22 bp, Artificial Sequence
  Synthetic oligonucleotide; TTC chr11 5296454 5296475 5296471 5296476 +
ctaccttcatttatattttaaa

SEQ ID NO: 96049 - DNA, 22 bp, Artificial Sequence
  Synthetic oligonucleotide; CTA chr11 5296457 5296478 5296474 5296479 +
ccttcatttatattttaaagta

SEQ ID NO: 96050 - DNA, 22 bp, Artificial Sequence
  Synthetic oligonucleotide; CTT chr11 5296461 5296482 5296478 5296483 +
catttatattttaaagtaggtg

SEQ ID NO: 96051 - DNA, 22 bp, Artificial Sequence
  Synthetic oligonucleotide; TTC chr11 5296462 5296483 5296479 5296484 +
atttatattttaaagtaggtga

SEQ ID NO: 96052 - DNA, 22 bp, Artificial Sequence
  Synthetic oligonucleotide; TTT chr11 5296466 5296487 5296483 5296488 +
atattttaaagtaggtgagcaa

SEQ ID NO: 96053 - DNA, 22 bp, Artificial Sequence
  Synthetic oligonucleotide; TTA chr11 5296467 5296488 5296484 5296489 +
tattttaaagtaggtgagcaaa

SEQ ID NO: 96054 - DNA, 22 bp, Artificial Sequence
  Synthetic oligonucleotide; TTT chr11 5296472 5296493 5296489 5296494 +
taaagtaggtgagcaaatgcat

SEQ ID NO: 96055 - DNA, 22 bp, Artificial Sequence
  Synthetic oligonucleotide; TTT chr11 5296473 5296494 5296490 5296495 +
aaagtaggtgagcaaatgcatt

SEQ ID NO: 96056 - DNA, 22 bp, Artificial Sequence
  Synthetic oligonucleotide; TTA chr11 5296474 5296495 5296491 5296496 +
aagtaggtgagcaaatgcattt

SEQ ID NO: 96057 - DNA, 22 bp, Artificial Sequence
  Synthetic oligonucleotide; TTT chr11 5296496 5296517 5296513 5296518 +
taacactccaagatagatttag

SEQ ID NO: 96058 - DNA, 22 bp, Artificial Sequence
  Synthetic oligonucleotide; TTT chr11 5296497 5296518 5296514 5296519 +
aacactccaagatagatttaga

SEQ ID NO: 96059 - DNA, 22 bp, Artificial Sequence
  Synthetic oligonucleotide; TTA chr11 5296498 5296519 5296515 5296520 +
acactccaagatagatttagat

SEQ ID NO: 96060 - DNA, 22 bp, Artificial Sequence
  Synthetic oligonucleotide; CTC chr11 5296504 5296525 5296521 5296526 +
caagatagatttagattaaaac

SEQ ID NO: 96061 - DNA, 22 bp, Artificial Sequence
  Synthetic oligonucleotide; TTT chr11 5296516 5296537 5296533 5296538 +
agattaaaacatctaaccagga

SEQ ID NO: 96062 - DNA, 22 bp, Artificial Sequence
  Synthetic oligonucleotide; TTA chr11 5296517 5296538 5296534 5296539 +
gattaaaacatctaaccaggat

SEQ ID NO: 96063 - DNA, 22 bp, Artificial Sequence
  Synthetic oligonucleotide; TTA chr11 5296522 5296543 5296539 5296544 +
aaacatctaaccaggataaaca

SEQ ID NO: 96064 - DNA, 22 bp, Artificial Sequence
  Synthetic oligonucleotide; CTA chr11 5296531 5296552 5296548 5296553 +
accaggataaacattgctgtct

SEQ ID NO: 96065 - DNA, 22 bp, Artificial Sequence
  Synthetic oligonucleotide; TTG chr11 5296547 5296568 5296564 5296569 +
ctgtctaaatgtatttgttgtt

SEQ ID NO: 96066 - DNA, 22 bp, Artificial Sequence
  Synthetic oligonucleotide; CTG chr11 5296550 5296571 5296567 5296572 +
tctaaatgtatttgttgtttta

SEQ ID NO: 96067 - DNA, 22 bp, Artificial Sequence
  Synthetic oligonucleotide; CTA chr11 5296554 5296575 5296571 5296576 +
aatgtatttgttgttttaatct

SEQ ID NO: 96068 - DNA, 22 bp, Artificial Sequence
  Synthetic oligonucleotide; TTT chr11 5296563 5296584 5296580 5296585 +
gttgttttaatctcttccgtta

SEQ ID NO: 96069 - DNA, 22 bp, Artificial Sequence
  Synthetic oligonucleotide; TTG chr11 5296564 5296585 5296581 5296586 +
ttgttttaatctcttccgttat

SEQ ID NO: 96070 - DNA, 22 bp, Artificial Sequence
  Synthetic oligonucleotide; TTG chr11 5296567 5296588 5296584 5296589 +
ttttaatctcttccgttattgt

SEQ ID NO: 96071 - DNA, 22 bp, Artificial Sequence
  Synthetic oligonucleotide; TTT chr11 5296570 5296591 5296587 5296592 +
taatctcttccgttattgtaac

SEQ ID NO: 96072 - DNA, 22 bp, Artificial Sequence
  Synthetic oligonucleotide; TTT chr11 5296571 5296592 5296588 5296593 +
aatctcttccgttattgtaaca

SEQ ID NO: 96073 - DNA, 22 bp, Artificial Sequence
  Synthetic oligonucleotide; TTA chr11 5296572 5296593 5296589 5296594 +
atctcttccgttattgtaacat

SEQ ID NO: 96074 - DNA, 22 bp, Artificial Sequence
  Synthetic oligonucleotide; CTC chr11 5296577 5296598 5296594 5296599 +
ttccgttattgtaacatgatga

SEQ ID NO: 96075 - DNA, 22 bp, Artificial Sequence
  Synthetic oligonucleotide; CTT chr11 5296579 5296600 5296596 5296601 +
ccgttattgtaacatgatgagg

SEQ ID NO: 96076 - DNA, 22 bp, Artificial Sequence
  Synthetic oligonucleotide; TTC chr11 5296580 5296601 5296597 5296602 +
cgttattgtaacatgatgagga

SEQ ID NO: 96077 - DNA, 22 bp, Artificial Sequence
  Synthetic oligonucleotide; TTA chr11 5296585 5296606 5296602 5296607 +
ttgtaacatgatgaggagacat

SEQ ID NO: 96078 - DNA, 22 bp, Artificial Sequence
  Synthetic oligonucleotide; TTG chr11 5296588 5296609 5296605 5296610 +
taacatgatgaggagacatgga

SEQ ID NO: 96079 - DNA, 22 bp, Artificial Sequence
  Synthetic oligonucleotide; CTT chr11 5296620 5296641 5296637 5296642 +
ctgctaatttctcctttaaagt

SEQ ID NO: 96080 - DNA, 22 bp, Artificial Sequence
  Synthetic oligonucleotide; TTC chr11 5296621 5296642 5296638 5296643 +
tgctaatttctcctttaaagtc

SEQ ID NO: 96081 - DNA, 22 bp, Artificial Sequence
  Synthetic oligonucleotide; CTG chr11 5296623 5296644 5296640 5296645 +
ctaatttctcctttaaagtcac

SEQ ID NO: 96082 - DNA, 22 bp, Artificial Sequence
  Synthetic oligonucleotide; CTA chr11 5296626 5296647 5296643 5296648 +
atttctcctttaaagtcacttc

SEQ ID NO: 96083 - DNA, 22 bp, Artificial Sequence
  Synthetic oligonucleotide; TTT chr11 5296630 5296651 5296647 5296652 +
ctcctttaaagtcacttcacat

SEQ ID NO: 96084 - DNA, 22 bp, Artificial Sequence
  Synthetic oligonucleotide; TTC chr11 5296631 5296652 5296648 5296653 +
tcctttaaagtcacttcacatt

SEQ ID NO: 96085 - DNA, 22 bp, Artificial Sequence
  Synthetic oligonucleotide; CTC chr11 5296633 5296654 5296650 5296655 +
ctttaaagtcacttcacattag

SEQ ID NO: 96086 - DNA, 22 bp, Artificial Sequence
  Synthetic oligonucleotide; CTT chr11 5296636 5296657 5296653 5296658 +
taaagtcacttcacattagtta

SEQ ID NO: 96087 - DNA, 22 bp, Artificial Sequence
  Synthetic oligonucleotide; TTT chr11 5296637 5296658 5296654 5296659 +
aaagtcacttcacattagttat

SEQ ID NO: 96088 - DNA, 22 bp, Artificial Sequence
  Synthetic oligonucleotide; TTA chr11 5296638 5296659 5296655 5296660 +
aagtcacttcacattagttatc

SEQ ID NO: 96089 - DNA, 22 bp, Artificial Sequence
  Synthetic oligonucleotide; CTT chr11 5296647 5296668 5296664 5296669 +
cacattagttatctcttacata

SEQ ID NO: 96090 - DNA, 22 bp, Artificial Sequence
  Synthetic oligonucleotide; TTC chr11 5296648 5296669 5296665 5296670 +
acattagttatctcttacatat

SEQ ID NO: 96091 - DNA, 22 bp, Artificial Sequence
  Synthetic oligonucleotide; TTA chr11 5296654 5296675 5296671 5296676 +
gttatctcttacatatgagtcc

SEQ ID NO: 96092 - DNA, 22 bp, Artificial Sequence
  Synthetic oligonucleotide; TTA chr11 5296658 5296679 5296675 5296680 +
tctcttacatatgagtccctgg

SEQ ID NO: 96093 - DNA, 22 bp, Artificial Sequence
  Synthetic oligonucleotide; CTC chr11 5296662 5296683 5296679 5296684 +
ttacatatgagtccctggcagt

SEQ ID NO: 96094 - DNA, 22 bp, Artificial Sequence
  Synthetic oligonucleotide; CTT chr11 5296664 5296685 5296681 5296686 +
acatatgagtccctggcagtgt

SEQ ID NO: 96095 - DNA, 22 bp, Artificial Sequence
  Synthetic oligonucleotide; TTA chr11 5296665 5296686 5296682 5296687 +
catatgagtccctggcagtgtc

SEQ ID NO: 96096 - DNA, 22 bp, Artificial Sequence
  Synthetic oligonucleotide; CTG chr11 5296679 5296700 5296696 5296701 +
gcagtgtcagttgaccattcct

SEQ ID NO: 96097 - DNA, 22 bp, Artificial Sequence
  Synthetic oligonucleotide; TTG chr11 5296692 5296713 5296709 5296714 +
accattccttttcatgacccta

SEQ ID NO: 96098 - DNA, 22 bp, Artificial Sequence
  Synthetic oligonucleotide; TTC chr11 5296699 5296720 5296716 5296721 +
cttttcatgaccctaaagactt

SEQ ID NO: 96099 - DNA, 22 bp, Artificial Sequence
  Synthetic oligonucleotide; CTT chr11 5296702 5296723 5296719 5296724 +
ttcatgaccctaaagacttctg

SEQ ID NO: 96100 - DNA, 22 bp, Artificial Sequence
  Synthetic oligonucleotide; TTT chr11 5296703 5296724 5296720 5296725 +
tcatgaccctaaagacttctga

SEQ ID NO: 96101 - DNA, 22 bp, Artificial Sequence
  Synthetic oligonucleotide; TTT chr11 5296704 5296725 5296721 5296726 +
catgaccctaaagacttctgat

SEQ ID NO: 96102 - DNA, 22 bp, Artificial Sequence
  Synthetic oligonucleotide; TTC chr11 5296705 5296726 5296722 5296727 +
atgaccctaaagacttctgata

SEQ ID NO: 96103 - DNA, 22 bp, Artificial Sequence
  Synthetic oligonucleotide; CTA chr11 5296714 5296735 5296731 5296736 +
aagacttctgataaatatactg

SEQ ID NO: 96104 - DNA, 22 bp, Artificial Sequence
  Synthetic oligonucleotide; CTT chr11 5296721 5296742 5296738 5296743 +
ctgataaatatactgcattttt

SEQ ID NO: 96105 - DNA, 22 bp, Artificial Sequence
  Synthetic oligonucleotide; TTC chr11 5296722 5296743 5296739 5296744 +
tgataaatatactgcatttttc

SEQ ID NO: 96106 - DNA, 22 bp, Artificial Sequence
  Synthetic oligonucleotide; CTG chr11 5296724 5296745 5296741 5296746 +
ataaatatactgcatttttcta

SEQ ID NO: 96107 - DNA, 22 bp, Artificial Sequence
  Synthetic oligonucleotide; CTG chr11 5296736 5296757 5296753 5296758 +
catttttctatagctcatttca

SEQ ID NO: 96108 - DNA, 22 bp, Artificial Sequence
  Synthetic oligonucleotide; TTT chr11 5296741 5296762 5296758 5296763 +
ttctatagctcatttcaaccta

SEQ ID NO: 96109 - DNA, 22 bp, Artificial Sequence
  Synthetic oligonucleotide; TTT chr11 5296742 5296763 5296759 5296764 +
tctatagctcatttcaacctac

SEQ ID NO: 96110 - DNA, 22 bp, Artificial Sequence
  Synthetic oligonucleotide; TTT chr11 5296743 5296764 5296760 5296765 +
ctatagctcatttcaacctaca

SEQ ID NO: 96111 - DNA, 22 bp, Artificial Sequence
  Synthetic oligonucleotide; TTC chr11 5296744 5296765 5296761 5296766 +
tatagctcatttcaacctacac

SEQ ID NO: 96112 - DNA, 22 bp, Artificial Sequence
  Synthetic oligonucleotide; CTA chr11 5296746 5296767 5296763 5296768 +
tagctcatttcaacctacacaa

SEQ ID NO: 96113 - DNA, 22 bp, Artificial Sequence
  Synthetic oligonucleotide; CTC chr11 5296752 5296773 5296769 5296774 +
atttcaacctacacaaattatg

SEQ ID NO: 96114 - DNA, 22 bp, Artificial Sequence
  Synthetic oligonucleotide; TTT chr11 5296756 5296777 5296773 5296778 +
caacctacacaaattatgggtt

SEQ ID NO: 96115 - DNA, 22 bp, Artificial Sequence
  Synthetic oligonucleotide; TTC chr11 5296757 5296778 5296774 5296779 +
aacctacacaaattatgggttt

SEQ ID NO: 96116 - DNA, 22 bp, Artificial Sequence
  Synthetic oligonucleotide; CTA chr11 5296763 5296784 5296780 5296785 +
cacaaattatgggtttgcatgc

SEQ ID NO: 96117 - DNA, 22 bp, Artificial Sequence
  Synthetic oligonucleotide; TTA chr11 5296772 5296793 5296789 5296794 +
tgggtttgcatgcctttatccc

SEQ ID NO: 96118 - DNA, 22 bp, Artificial Sequence
  Synthetic oligonucleotide; TTT chr11 5296779 5296800 5296796 5296801 +
gcatgcctttatccctaattag

SEQ ID NO: 96119 - DNA, 22 bp, Artificial Sequence
  Synthetic oligonucleotide; TTG chr11 5296780 5296801 5296797 5296802 +
catgcctttatccctaattagg

SEQ ID NO: 96120 - DNA, 22 bp, Artificial Sequence
  Synthetic oligonucleotide; CTT chr11 5296788 5296809 5296805 5296810 +
tatccctaattaggctacacag

SEQ ID NO: 96121 - DNA, 22 bp, Artificial Sequence
  Synthetic oligonucleotide; TTT chr11 5296789 5296810 5296806 5296811 +
atccctaattaggctacacagc

SEQ ID NO: 96122 - DNA, 22 bp, Artificial Sequence
  Synthetic oligonucleotide; TTA chr11 5296790 5296811 5296807 5296812 +
tccctaattaggctacacagct

SEQ ID NO: 96123 - DNA, 22 bp, Artificial Sequence
  Synthetic oligonucleotide; CTA chr11 5296796 5296817 5296813 5296818 +
attaggctacacagctgtttaa

SEQ ID NO: 96124 - DNA, 22 bp, Artificial Sequence
  Synthetic oligonucleotide; TTA chr11 5296800 5296821 5296817 5296822 +
ggctacacagctgtttaaatta

SEQ ID NO: 96125 - DNA, 22 bp, Artificial Sequence
  Synthetic oligonucleotide; CTA chr11 5296805 5296826 5296822 5296827 +
cacagctgtttaaattaggaat

SEQ ID NO: 96126 - DNA, 22 bp, Artificial Sequence
  Synthetic oligonucleotide; CTG chr11 5296813 5296834 5296830 5296835 +
tttaaattaggaattacagatt

SEQ ID NO: 96127 - DNA, 22 bp, Artificial Sequence
  Synthetic oligonucleotide; TTT chr11 5296816 5296837 5296833 5296838 +
aaattaggaattacagatttcg

SEQ ID NO: 96128 - DNA, 22 bp, Artificial Sequence
  Synthetic oligonucleotide; TTA chr11 5296817 5296838 5296834 5296839 +
aattaggaattacagatttcgc

SEQ ID NO: 96129 - DNA, 22 bp, Artificial Sequence
  Synthetic oligonucleotide; TTA chr11 5296822 5296843 5296839 5296844 +
ggaattacagatttcgccagat

SEQ ID NO: 96130 - DNA, 22 bp, Artificial Sequence
  Synthetic oligonucleotide; TTA chr11 5296829 5296850 5296846 5296851 +
cagatttcgccagataattgta

SEQ ID NO: 96131 - DNA, 22 bp, Artificial Sequence
  Synthetic oligonucleotide; TTT chr11 5296836 5296857 5296853 5296858 +
cgccagataattgtatatctga

SEQ ID NO: 96132 - DNA, 22 bp, Artificial Sequence
  Synthetic oligonucleotide; TTC chr11 5296837 5296858 5296854 5296859 +
gccagataattgtatatctgat

SEQ ID NO: 96133 - DNA, 22 bp, Artificial Sequence
  Synthetic oligonucleotide; TTG chr11 5296849 5296870 5296866 5296871 +
tatatctgatacagattaggca

SEQ ID NO: 96134 - DNA, 22 bp, Artificial Sequence
  Synthetic oligonucleotide; CTG chr11 5296857 5296878 5296874 5296879 +
atacagattaggcatttaataa

SEQ ID NO: 96135 - DNA, 22 bp, Artificial Sequence
  Synthetic oligonucleotide; TTA chr11 5296867 5296888 5296884 5296889 +
ggcatttaataaattttggtga

SEQ ID NO: 96136 - DNA, 22 bp, Artificial Sequence
  Synthetic oligonucleotide; TTT chr11 5296874 5296895 5296891 5296896 +
aataaattttggtgaataggta

SEQ ID NO: 96137 - DNA, 22 bp, Artificial Sequence
  Synthetic oligonucleotide; TTA chr11 5296875 5296896 5296892 5296897 +
ataaattttggtgaataggtaa

SEQ ID NO: 96138 - DNA, 22 bp, Artificial Sequence
  Synthetic oligonucleotide; TTT chr11 5296883 5296904 5296900 5296905 +
tggtgaataggtaaacactaaa

SEQ ID NO: 96139 - DNA, 22 bp, Artificial Sequence
  Synthetic oligonucleotide; TTT chr11 5296884 5296905 5296901 5296906 +
ggtgaataggtaaacactaaat

SEQ ID NO: 96140 - DNA, 22 bp, Artificial Sequence
  Synthetic oligonucleotide; TTG chr11 5296885 5296906 5296902 5296907 +
gtgaataggtaaacactaaatt

SEQ ID NO: 96141 - DNA, 22 bp, Artificial Sequence
  Synthetic oligonucleotide; CTA chr11 5296903 5296924 5296920 5296925 +
aattgttcctcaaacatttgtc

SEQ ID NO: 96142 - DNA, 22 bp, Artificial Sequence
  Synthetic oligonucleotide; TTG chr11 5296908 5296929 5296925 5296930 +
ttcctcaaacatttgtcagatg

SEQ ID NO: 96143 - DNA, 22 bp, Artificial Sequence
  Synthetic oligonucleotide; TTC chr11 5296911 5296932 5296928 5296933 +
ctcaaacatttgtcagatgttc

SEQ ID NO: 96144 - DNA, 22 bp, Artificial Sequence
  Synthetic oligonucleotide; CTC chr11 5296914 5296935 5296931 5296936 +
aaacatttgtcagatgttcact

SEQ ID NO: 96145 - DNA, 22 bp, Artificial Sequence
  Synthetic oligonucleotide; TTT chr11 5296922 5296943 5296939 5296944 +
gtcagatgttcactatgatacc

SEQ ID NO: 96146 - DNA, 22 bp, Artificial Sequence
  Synthetic oligonucleotide; TTG chr11 5296923 5296944 5296940 5296945 +
tcagatgttcactatgatacct

SEQ ID NO: 96147 - DNA, 22 bp, Artificial Sequence
  Synthetic oligonucleotide; TTC chr11 5296933 5296954 5296950 5296955 +
actatgatacctacttattgag

SEQ ID NO: 96148 - DNA, 22 bp, Artificial Sequence
  Synthetic oligonucleotide; CTA chr11 5296937 5296958 5296954 5296959 +
tgatacctacttattgagaatc

SEQ ID NO: 96149 - DNA, 22 bp, Artificial Sequence
  Synthetic oligonucleotide; CTA chr11 5296946 5296967 5296963 5296968 +
cttattgagaatcaagtaaata

SEQ ID NO: 96150 - DNA, 22 bp, Artificial Sequence
  Synthetic oligonucleotide; CTT chr11 5296949 5296970 5296966 5296971 +
attgagaatcaagtaaatagag

SEQ ID NO: 96151 - DNA, 22 bp, Artificial Sequence
  Synthetic oligonucleotide; TTA chr11 5296950 5296971 5296967 5296972 +
ttgagaatcaagtaaatagaga

SEQ ID NO: 96152 - DNA, 22 bp, Artificial Sequence
  Synthetic oligonucleotide; TTG chr11 5296953 5296974 5296970 5296975 +
agaatcaagtaaatagagatat

SEQ ID NO: 96153 - DNA, 22 bp, Artificial Sequence
  Synthetic oligonucleotide; TTC chr11 5296977 5296998 5296994 5296999 +
agacacattacagagaagtata

SEQ ID NO: 96154 - DNA, 22 bp, Artificial Sequence
  Synthetic oligonucleotide; TTA chr11 5296987 5297008 5297004 5297009 +
cagagaagtatatacttacaaa

SEQ ID NO: 96155 - DNA, 22 bp, Artificial Sequence
  Synthetic oligonucleotide; CTT chr11 5297004 5297025 5297021 5297026 +
acaaactcaaagtatttgacac

SEQ ID NO: 96156 - DNA, 22 bp, Artificial Sequence
  Synthetic oligonucleotide; TTA chr11 5297005 5297026 5297022 5297027 +
caaactcaaagtatttgacacc

SEQ ID NO: 96157 - DNA, 22 bp, Artificial Sequence
  Synthetic oligonucleotide; CTC chr11 5297012 5297033 5297029 5297034 +
aaagtatttgacacccctaggc

SEQ ID NO: 96158 - DNA, 22 bp, Artificial Sequence
  Synthetic oligonucleotide; TTT chr11 5297021 5297042 5297038 5297043 +
gacacccctaggcacatgaaac

SEQ ID NO: 96159 - DNA, 22 bp, Artificial Sequence
  Synthetic oligonucleotide; TTG chr11 5297022 5297043 5297039 5297044 +
acacccctaggcacatgaaaca

SEQ ID NO: 96160 - DNA, 22 bp, Artificial Sequence
  Synthetic oligonucleotide; CTA chr11 5297031 5297052 5297048 5297053 +
ggcacatgaaacacttttgaat

SEQ ID NO: 96161 - DNA, 22 bp, Artificial Sequence
  Synthetic oligonucleotide; CTT chr11 5297047 5297068 5297064 5297069 +
ttgaatatacagcacactttta

SEQ ID NO: 96162 - DNA, 22 bp, Artificial Sequence
  Synthetic oligonucleotide; TTT chr11 5297048 5297069 5297065 5297070 +
tgaatatacagcacacttttac

SEQ ID NO: 96163 - DNA, 22 bp, Artificial Sequence
  Synthetic oligonucleotide; TTT chr11 5297049 5297070 5297066 5297071 +
gaatatacagcacacttttaca

SEQ ID NO: 96164 - DNA, 22 bp, Artificial Sequence
  Synthetic oligonucleotide; TTG chr11 5297050 5297071 5297067 5297072 +
aatatacagcacacttttacat

SEQ ID NO: 96165 - DNA, 22 bp, Artificial Sequence
  Synthetic oligonucleotide; CTT chr11 5297066 5297087 5297083 5297088 +
ttacatacacattattcataaa

SEQ ID NO: 96166 - DNA, 22 bp, Artificial Sequence
  Synthetic oligonucleotide; TTT chr11 5297067 5297088 5297084 5297089 +
tacatacacattattcataaac

SEQ ID NO: 96167 - DNA, 22 bp, Artificial Sequence
  Synthetic oligonucleotide; TTT chr11 5297068 5297089 5297085 5297090 +
acatacacattattcataaaca

SEQ ID NO: 96168 - DNA, 22 bp, Artificial Sequence
  Synthetic oligonucleotide; TTA chr11 5297069 5297090 5297086 5297091 +
catacacattattcataaacat

SEQ ID NO: 96169 - DNA, 22 bp, Artificial Sequence
  Synthetic oligonucleotide; TTA chr11 5297080 5297101 5297097 5297102 +
ttcataaacattgccaatgcat

SEQ ID NO: 96170 - DNA, 22 bp, Artificial Sequence
  Synthetic oligonucleotide; TTC chr11 5297083 5297104 5297100 5297105 +
ataaacattgccaatgcatgca

SEQ ID NO: 96171 - DNA, 22 bp, Artificial Sequence
  Synthetic oligonucleotide; TTG chr11 5297093 5297114 5297110 5297115 +
ccaatgcatgcagaaagaagct

SEQ ID NO: 96172 - DNA, 22 bp, Artificial Sequence
  Synthetic oligonucleotide; CTT chr11 5297116 5297137 5297133 5297138 +
aatgtggattttacatatactt

SEQ ID NO: 96173 - DNA, 22 bp, Artificial Sequence
  Synthetic oligonucleotide; TTA chr11 5297117 5297138 5297134 5297139 +
atgtggattttacatatacttt

SEQ ID NO: 96174 - DNA, 22 bp, Artificial Sequence
  Synthetic oligonucleotide; TTT chr11 5297127 5297148 5297144 5297149 +
tacatatactttcatgaacata

SEQ ID NO: 96175 - DNA, 22 bp, Artificial Sequence
  Synthetic oligonucleotide; TTT chr11 5297128 5297149 5297145 5297150 +
acatatactttcatgaacatag

SEQ ID NO: 96176 - DNA, 22 bp, Artificial Sequence
  Synthetic oligonucleotide; TTA chr11 5297129 5297150 5297146 5297151 +
catatactttcatgaacatagc

SEQ ID NO: 96177 - DNA, 22 bp, Artificial Sequence
  Synthetic oligonucleotide; CTT chr11 5297138 5297159 5297155 5297160 +
tcatgaacatagccttgccaac

SEQ ID NO: 96178 - DNA, 22 bp, Artificial Sequence
  Synthetic oligonucleotide; TTT chr11 5297139 5297160 5297156 5297161 +
catgaacatagccttgccaaca

SEQ ID NO: 96179 - DNA, 22 bp, Artificial Sequence
  Synthetic oligonucleotide; TTC chr11 5297140 5297161 5297157 5297162 +
atgaacatagccttgccaacat

SEQ ID NO: 96180 - DNA, 22 bp, Artificial Sequence
  Synthetic oligonucleotide; CTT chr11 5297154 5297175 5297171 5297176 +
gccaacatcctttccctttctg

SEQ ID NO: 96181 - DNA, 22 bp, Artificial Sequence
  Synthetic oligonucleotide; TTG chr11 5297155 5297176 5297172 5297177 +
ccaacatcctttccctttctgt

SEQ ID NO: 96182 - DNA, 22 bp, Artificial Sequence
  Synthetic oligonucleotide; CTT chr11 5297166 5297187 5297183 5297188 +
tccctttctgttagagtcacct

SEQ ID NO: 96183 - DNA, 22 bp, Artificial Sequence
  Synthetic oligonucleotide; TTT chr11 5297167 5297188 5297184 5297189 +
ccctttctgttagagtcacctg

SEQ ID NO: 96184 - DNA, 22 bp, Artificial Sequence
  Synthetic oligonucleotide; TTC chr11 5297168 5297189 5297185 5297190 +
cctttctgttagagtcacctgc

SEQ ID NO: 96185 - DNA, 22 bp, Artificial Sequence
  Synthetic oligonucleotide; CTT chr11 5297172 5297193 5297189 5297194 +
tctgttagagtcacctgccttc

SEQ ID NO: 96186 - DNA, 22 bp, Artificial Sequence
  Synthetic oligonucleotide; TTT chr11 5297173 5297194 5297190 5297195 +
ctgttagagtcacctgccttca

SEQ ID NO: 96187 - DNA, 22 bp, Artificial Sequence
  Synthetic oligonucleotide; TTC chr11 5297174 5297195 5297191 5297196 +
tgttagagtcacctgccttcat

SEQ ID NO: 96188 - DNA, 22 bp, Artificial Sequence
  Synthetic oligonucleotide; CTG chr11 5297176 5297197 5297193 5297198 +
ttagagtcacctgccttcatcc

SEQ ID NO: 96189 - DNA, 22 bp, Artificial Sequence
  Synthetic oligonucleotide; TTA chr11 5297179 5297200 5297196 5297201 +
gagtcacctgccttcatccatc

SEQ ID NO: 96190 - DNA, 22 bp, Artificial Sequence
  Synthetic oligonucleotide; CTG chr11 5297189 5297210 5297206 5297211 +
ccttcatccatcccttggatat

SEQ ID NO: 96191 - DNA, 22 bp, Artificial Sequence
  Synthetic oligonucleotide; CTT chr11 5297193 5297214 5297210 5297215 +
catccatcccttggatatgata

SEQ ID NO: 96192 - DNA, 22 bp, Artificial Sequence
  Synthetic oligonucleotide; TTC chr11 5297194 5297215 5297211 5297216 +
atccatcccttggatatgatac

SEQ ID NO: 96193 - DNA, 22 bp, Artificial Sequence
  Synthetic oligonucleotide; CTT chr11 5297205 5297226 5297222 5297227 +
ggatatgataccttgagttatc

SEQ ID NO: 96194 - DNA, 22 bp, Artificial Sequence
  Synthetic oligonucleotide; TTG chr11 5297206 5297227 5297223 5297228 +
gatatgataccttgagttatcc

SEQ ID NO: 96195 - DNA, 22 bp, Artificial Sequence
  Synthetic oligonucleotide; CTT chr11 5297219 5297240 5297236 5297241 +
gagttatccccacacccaaatc

SEQ ID NO: 96196 - DNA, 22 bp, Artificial Sequence
  Synthetic oligonucleotide; TTG chr11 5297220 5297241 5297237 5297242 +
agttatccccacacccaaatct

SEQ ID NO: 96197 - DNA, 22 bp, Artificial Sequence
  Synthetic oligonucleotide; TTA chr11 5297225 5297246 5297242 5297247 +
tccccacacccaaatcttcaac

SEQ ID NO: 96198 - DNA, 22 bp, Artificial Sequence
  Synthetic oligonucleotide; CTT chr11 5297243 5297264 5297260 5297265 +
caacagacagaaatgtaaagtc

SEQ ID NO: 96199 - DNA, 22 bp, Artificial Sequence
  Synthetic oligonucleotide; TTC chr11 5297244 5297265 5297261 5297266 +
aacagacagaaatgtaaagtcc

SEQ ID NO: 96200 - DNA, 22 bp, Artificial Sequence
  Synthetic oligonucleotide; TTT chr11 5297271 5297292 5297288 5297293 +
aatgtgtgatagatgaactaaa

SEQ ID NO: 96201 - DNA, 22 bp, Artificial Sequence
  Synthetic oligonucleotide; TTA chr11 5297272 5297293 5297289 5297294 +
atgtgtgatagatgaactaaat

SEQ ID NO: 96202 - DNA, 22 bp, Artificial Sequence
  Synthetic oligonucleotide; CTA chr11 5297291 5297312 5297308 5297313 +
aatattctatctcagtattcat

SEQ ID NO: 96203 - DNA, 22 bp, Artificial Sequence
  Synthetic oligonucleotide; TTC chr11 5297298 5297319 5297315 5297320 +
tatctcagtattcatctgacag

SEQ ID NO: 96204 - DNA, 22 bp, Artificial Sequence
  Synthetic oligonucleotide; CTA chr11 5297300 5297321 5297317 5297322 +
tctcagtattcatctgacagca

SEQ ID NO: 96205 - DNA, 22 bp, Artificial Sequence
  Synthetic oligonucleotide; CTC chr11 5297304 5297325 5297321 5297326 +
agtattcatctgacagcatagg

SEQ ID NO: 96206 - DNA, 22 bp, Artificial Sequence
  Synthetic oligonucleotide; TTC chr11 5297311 5297332 5297328 5297333 +
atctgacagcataggaaggaga

SEQ ID NO: 96207 - DNA, 22 bp, Artificial Sequence
  Synthetic oligonucleotide; CTG chr11 5297316 5297337 5297333 5297338 +
acagcataggaaggagagaaat

SEQ ID NO: 96208 - DNA, 22 bp, Artificial Sequence
  Synthetic oligonucleotide; CTC chr11 5297343 5297364 5297360 5297365 +
tgtctcatttataccacatatt

SEQ ID NO: 96209 - DNA, 22 bp, Artificial Sequence
  Synthetic oligonucleotide; CTG chr11 5297345 5297366 5297362 5297367 +
tctcatttataccacatattgt

SEQ ID NO: 96210 - DNA, 22 bp, Artificial Sequence
  Synthetic oligonucleotide; CTC chr11 5297349 5297370 5297366 5297371 +
atttataccacatattgtgttt

SEQ ID NO: 96211 - DNA, 22 bp, Artificial Sequence
  Synthetic oligonucleotide; TTT chr11 5297353 5297374 5297370 5297375 +
ataccacatattgtgtttctat

SEQ ID NO: 96212 - DNA, 22 bp, Artificial Sequence
  Synthetic oligonucleotide; TTA chr11 5297354 5297375 5297371 5297376 +
taccacatattgtgtttctatg

SEQ ID NO: 96213 - DNA, 22 bp, Artificial Sequence
  Synthetic oligonucleotide; TTG chr11 5297366 5297387 5297383 5297388 +
tgtttctatggccgaatcagct

SEQ ID NO: 96214 - DNA, 22 bp, Artificial Sequence
  Synthetic oligonucleotide; TTT chr11 5297371 5297392 5297388 5297393 +
ctatggccgaatcagcttaggt

SEQ ID NO: 96215 - DNA, 22 bp, Artificial Sequence
  Synthetic oligonucleotide; TTC chr11 5297372 5297393 5297389 5297394 +
tatggccgaatcagcttaggtt

SEQ ID NO: 96216 - DNA, 22 bp, Artificial Sequence
  Synthetic oligonucleotide; CTA chr11 5297374 5297395 5297391 5297396 +
tggccgaatcagcttaggttct

SEQ ID NO: 96217 - DNA, 22 bp, Artificial Sequence
  Synthetic oligonucleotide; CTT chr11 5297389 5297410 5297406 5297411 +
aggttctacattgtgtggtttt

SEQ ID NO: 96218 - DNA, 22 bp, Artificial Sequence
  Synthetic oligonucleotide; TTA chr11 5297390 5297411 5297407 5297412 +
ggttctacattgtgtggttttg

SEQ ID NO: 96219 - DNA, 22 bp, Artificial Sequence
  Synthetic oligonucleotide; TTC chr11 5297395 5297416 5297412 5297417 +
tacattgtgtggttttggataa

SEQ ID NO: 96220 - DNA, 22 bp, Artificial Sequence
  Synthetic oligonucleotide; CTA chr11 5297397 5297418 5297414 5297419 +
cattgtgtggttttggataaat

SEQ ID NO: 96221 - DNA, 22 bp, Artificial Sequence
  Synthetic oligonucleotide; TTG chr11 5297402 5297423 5297419 5297424 +
tgtggttttggataaattactt

SEQ ID NO: 96222 - DNA, 22 bp, Artificial Sequence
  Synthetic oligonucleotide; TTT chr11 5297410 5297431 5297427 5297432 +
tggataaattacttaacctacc

SEQ ID NO: 96223 - DNA, 22 bp, Artificial Sequence
  Synthetic oligonucleotide; TTT chr11 5297411 5297432 5297428 5297433 +
ggataaattacttaacctacct

SEQ ID NO: 96224 - DNA, 22 bp, Artificial Sequence
  Synthetic oligonucleotide; TTG chr11 5297412 5297433 5297429 5297434 +
gataaattacttaacctaccta

SEQ ID NO: 96225 - DNA, 22 bp, Artificial Sequence
  Synthetic oligonucleotide; TTA chr11 5297421 5297442 5297438 5297443 +
cttaacctacctaagtaaggca

SEQ ID NO: 96226 - DNA, 22 bp, Artificial Sequence
  Synthetic oligonucleotide; CTT chr11 5297424 5297445 5297441 5297446 +
aacctacctaagtaaggcacct

SEQ ID NO: 96227 - DNA, 22 bp, Artificial Sequence
  Synthetic oligonucleotide; TTA chr11 5297425 5297446 5297442 5297447 +
acctacctaagtaaggcaccta

SEQ ID NO: 96228 - DNA, 22 bp, Artificial Sequence
  Synthetic oligonucleotide; CTA chr11 5297430 5297451 5297447 5297452 +
cctaagtaaggcacctacgtgt

SEQ ID NO: 96229 - DNA, 22 bp, Artificial Sequence
  Synthetic oligonucleotide; CTA chr11 5297434 5297455 5297451 5297456 +
agtaaggcacctacgtgtcagt

SEQ ID NO: 96230 - DNA, 22 bp, Artificial Sequence
  Synthetic oligonucleotide; CTA chr11 5297447 5297468 5297464 5297469 +
cgtgtcagtctcttcatgtgta

SEQ ID NO: 96231 - DNA, 22 bp, Artificial Sequence
  Synthetic oligonucleotide; CTC chr11 5297459 5297480 5297476 5297481 +
ttcatgtgtagtcaggaattat

SEQ ID NO: 96232 - DNA, 22 bp, Artificial Sequence
  Synthetic oligonucleotide; CTT chr11 5297461 5297482 5297478 5297483 +
catgtgtagtcaggaattataa

SEQ ID NO: 96233 - DNA, 22 bp, Artificial Sequence
  Synthetic oligonucleotide; TTC chr11 5297462 5297483 5297479 5297484 +
atgtgtagtcaggaattataat

SEQ ID NO: 96234 - DNA, 22 bp, Artificial Sequence
  Synthetic oligonucleotide; TTA chr11 5297480 5297501 5297497 5297502 +
taatgaaaagtaactcgaagta

SEQ ID NO: 96235 - DNA, 22 bp, Artificial Sequence
  Synthetic oligonucleotide; CTC chr11 5297496 5297517 5297513 5297518 +
gaagtatttttgtgataatcag

SEQ ID NO: 96236 - DNA, 22 bp, Artificial Sequence
  Synthetic oligonucleotide; TTT chr11 5297505 5297526 5297522 5297527 +
ttgtgataatcagttagataaa

SEQ ID NO: 96237 - DNA, 22 bp, Artificial Sequence
  Synthetic oligonucleotide; TTT chr11 5297506 5297527 5297523 5297528 +
tgtgataatcagttagataaaa

SEQ ID NO: 96238 - DNA, 22 bp, Artificial Sequence
  Synthetic oligonucleotide; TTT chr11 5297507 5297528 5297524 5297529 +
gtgataatcagttagataaaaa

SEQ ID NO: 96239 - DNA, 22 bp, Artificial Sequence
  Synthetic oligonucleotide; TTG chr11 5297508 5297529 5297525 5297530 +
tgataatcagttagataaaaat

SEQ ID NO: 96240 - DNA, 22 bp, Artificial Sequence
  Synthetic oligonucleotide; TTA chr11 5297521 5297542 5297538 5297543 +
gataaaaatgtgaacctcttaa

SEQ ID NO: 96241 - DNA, 22 bp, Artificial Sequence
  Synthetic oligonucleotide; CTC chr11 5297539 5297560 5297556 5297561 +
ttaagacactagcaacttgaat

SEQ ID NO: 96242 - DNA, 22 bp, Artificial Sequence
  Synthetic oligonucleotide; CTT chr11 5297541 5297562 5297558 5297563 +
aagacactagcaacttgaatac

SEQ ID NO: 96243 - DNA, 22 bp, Artificial Sequence
  Synthetic oligonucleotide; TTA chr11 5297542 5297563 5297559 5297564 +
agacactagcaacttgaataca

SEQ ID NO: 96244 - DNA, 22 bp, Artificial Sequence
  Synthetic oligonucleotide; CTA chr11 5297550 5297571 5297567 5297572 +
gcaacttgaatacataattgat

SEQ ID NO: 96245 - DNA, 22 bp, Artificial Sequence
  Synthetic oligonucleotide; CTT chr11 5297557 5297578 5297574 5297579 +
gaatacataattgattttttat

SEQ ID NO: 96246 - DNA, 22 bp, Artificial Sequence
  Synthetic oligonucleotide; TTG chr11 5297558 5297579 5297575 5297580 +
aatacataattgattttttatt

SEQ ID NO: 96247 - DNA, 22 bp, Artificial Sequence
  Synthetic oligonucleotide; TTG chr11 5297570 5297591 5297587 5297592 +
attttttattctgttacaatta

SEQ ID NO: 96248 - DNA, 22 bp, Artificial Sequence
  Synthetic oligonucleotide; TTT chr11 5297574 5297595 5297591 5297596 +
tttattctgttacaattatata

SEQ ID NO: 96249 - DNA, 22 bp, Artificial Sequence
  Synthetic oligonucleotide; TTT chr11 5297575 5297596 5297592 5297597 +
ttattctgttacaattatatac

SEQ ID NO: 96250 - DNA, 22 bp, Artificial Sequence
  Synthetic oligonucleotide; TTT chr11 5297576 5297597 5297593 5297598 +
tattctgttacaattatatact

SEQ ID NO: 96251 - DNA, 22 bp, Artificial Sequence
  Synthetic oligonucleotide; TTT chr11 5297577 5297598 5297594 5297599 +
attctgttacaattatatactg

SEQ ID NO: 96252 - DNA, 22 bp, Artificial Sequence
  Synthetic oligonucleotide; TTA chr11 5297578 5297599 5297595 5297600 +
ttctgttacaattatatactga

SEQ ID NO: 96253 - DNA, 22 bp, Artificial Sequence
  Synthetic oligonucleotide; TTC chr11 5297581 5297602 5297598 5297603 +
tgttacaattatatactgaact

SEQ ID NO: 96254 - DNA, 22 bp, Artificial Sequence
  Synthetic oligonucleotide; CTG chr11 5297583 5297604 5297600 5297605 +
ttacaattatatactgaactca

SEQ ID NO: 96255 - DNA, 22 bp, Artificial Sequence
  Synthetic oligonucleotide; TTA chr11 5297586 5297607 5297603 5297608 +
caattatatactgaactcatgt

SEQ ID NO: 96256 - DNA, 22 bp, Artificial Sequence
  Synthetic oligonucleotide; TTA chr11 5297592 5297613 5297609 5297614 +
tatactgaactcatgtgaggat

SEQ ID NO: 96257 - DNA, 22 bp, Artificial Sequence
  Synthetic oligonucleotide; CTG chr11 5297599 5297620 5297616 5297621 +
aactcatgtgaggatccagttt

SEQ ID NO: 96258 - DNA, 22 bp, Artificial Sequence
  Synthetic oligonucleotide; CTC chr11 5297604 5297625 5297621 5297626 +
atgtgaggatccagtttctata

SEQ ID NO: 96259 - DNA, 22 bp, Artificial Sequence
  Synthetic oligonucleotide; TTT chr11 5297621 5297642 5297638 5297643 +
ctatatctaggcttttcaaact

SEQ ID NO: 96260 - DNA, 22 bp, Artificial Sequence
  Synthetic oligonucleotide; TTC chr11 5297622 5297643 5297639 5297644 +
tatatctaggcttttcaaacta

SEQ ID NO: 96261 - DNA, 22 bp, Artificial Sequence
  Synthetic oligonucleotide; CTA chr11 5297624 5297645 5297641 5297646 +
tatctaggcttttcaaactacc

SEQ ID NO: 96262 - DNA, 22 bp, Artificial Sequence
  Synthetic oligonucleotide; CTA chr11 5297630 5297651 5297647 5297652 +
ggcttttcaaactaccttagag

SEQ ID NO: 96263 - DNA, 22 bp, Artificial Sequence
  Synthetic oligonucleotide; CTT chr11 5297635 5297656 5297652 5297657 +
ttcaaactaccttagagaaata

SEQ ID NO: 96264 - DNA, 22 bp, Artificial Sequence
  Synthetic oligonucleotide; TTT chr11 5297636 5297657 5297653 5297658 +
tcaaactaccttagagaaatac

SEQ ID NO: 96265 - DNA, 22 bp, Artificial Sequence
  Synthetic oligonucleotide; TTT chr11 5297637 5297658 5297654 5297659 +
caaactaccttagagaaatact

SEQ ID NO: 96266 - DNA, 22 bp, Artificial Sequence
  Synthetic oligonucleotide; TTC chr11 5297638 5297659 5297655 5297660 +
aaactaccttagagaaatactt

SEQ ID NO: 96267 - DNA, 22 bp, Artificial Sequence
  Synthetic oligonucleotide; CTA chr11 5297644 5297665 5297661 5297666 +
ccttagagaaatacttgtatat

SEQ ID NO: 96268 - DNA, 22 bp, Artificial Sequence
  Synthetic oligonucleotide; CTT chr11 5297648 5297669 5297665 5297670 +
agagaaatacttgtatatcttc

SEQ ID NO: 96269 - DNA, 22 bp, Artificial Sequence
  Synthetic oligonucleotide; TTA chr11 5297649 5297670 5297666 5297671 +
gagaaatacttgtatatcttcc

SEQ ID NO: 96270 - DNA, 22 bp, Artificial Sequence
  Synthetic oligonucleotide; CTT chr11 5297660 5297681 5297677 5297682 +
gtatatcttccttgtaggtata

SEQ ID NO: 96271 - DNA, 22 bp, Artificial Sequence
  Synthetic oligonucleotide; TTG chr11 5297661 5297682 5297678 5297683 +
tatatcttccttgtaggtatag

SEQ ID NO: 96272 - DNA, 22 bp, Artificial Sequence
  Synthetic oligonucleotide; CTT chr11 5297669 5297690 5297686 5297691 +
ccttgtaggtatagagtaaaat

SEQ ID NO: 96273 - DNA, 22 bp, Artificial Sequence
  Synthetic oligonucleotide; TTC chr11 5297670 5297691 5297687 5297692 +
cttgtaggtatagagtaaaata

SEQ ID NO: 96274 - DNA, 22 bp, Artificial Sequence
  Synthetic oligonucleotide; CTT chr11 5297673 5297694 5297690 5297695 +
gtaggtatagagtaaaatacta

SEQ ID NO: 96275 - DNA, 22 bp, Artificial Sequence
  Synthetic oligonucleotide; TTG chr11 5297674 5297695 5297691 5297696 +
taggtatagagtaaaatactaa

SEQ ID NO: 96276 - DNA, 22 bp, Artificial Sequence
  Synthetic oligonucleotide; CTA chr11 5297695 5297716 5297712 5297717 +
acttcaggtttagtaccaatgc

SEQ ID NO: 96277 - DNA, 22 bp, Artificial Sequence
  Synthetic oligonucleotide; CTT chr11 5297699 5297720 5297716 5297721 +
caggtttagtaccaatgcttat

SEQ ID NO: 96278 - DNA, 22 bp, Artificial Sequence
  Synthetic oligonucleotide; TTC chr11 5297700 5297721 5297717 5297722 +
aggtttagtaccaatgcttatc

SEQ ID NO: 96279 - DNA, 22 bp, Artificial Sequence
  Synthetic oligonucleotide; TTT chr11 5297706 5297727 5297723 5297728 +
agtaccaatgcttatccatatt

SEQ ID NO: 96280 - DNA, 22 bp, Artificial Sequence
  Synthetic oligonucleotide; TTA chr11 5297707 5297728 5297724 5297729 +
gtaccaatgcttatccatatta

SEQ ID NO: 96281 - DNA, 22 bp, Artificial Sequence
  Synthetic oligonucleotide; CTT chr11 5297719 5297740 5297736 5297741 +
atccatattataatttacattg

SEQ ID NO: 96282 - DNA, 22 bp, Artificial Sequence
  Synthetic oligonucleotide; TTA chr11 5297720 5297741 5297737 5297742 +
tccatattataatttacattgc

SEQ ID NO: 96283 - DNA, 22 bp, Artificial Sequence
  Synthetic oligonucleotide; TTA chr11 5297729 5297750 5297746 5297751 +
taatttacattgcaagttttat

SEQ ID NO: 96284 - DNA, 22 bp, Artificial Sequence
  Synthetic oligonucleotide; TTT chr11 5297735 5297756 5297752 5297757 +
acattgcaagttttattttctg

SEQ ID NO: 96285 - DNA, 22 bp, Artificial Sequence
  Synthetic oligonucleotide; TTA chr11 5297736 5297757 5297753 5297758 +
cattgcaagttttattttctgt

SEQ ID NO: 96286 - DNA, 22 bp, Artificial Sequence
  Synthetic oligonucleotide; TTG chr11 5297741 5297762 5297758 5297763 +
caagttttattttctgttcctt

SEQ ID NO: 96287 - DNA, 22 bp, Artificial Sequence
  Synthetic oligonucleotide; TTT chr11 5297748 5297769 5297765 5297770 +
tattttctgttccttattggtc

SEQ ID NO: 96288 - DNA, 22 bp, Artificial Sequence
  Synthetic oligonucleotide; TTT chr11 5297749 5297770 5297766 5297771 +
attttctgttccttattggtca

SEQ ID NO: 96289 - DNA, 22 bp, Artificial Sequence
  Synthetic oligonucleotide; TTA chr11 5297750 5297771 5297767 5297772 +
ttttctgttccttattggtcaa

SEQ ID NO: 96290 - DNA, 22 bp, Artificial Sequence
  Synthetic oligonucleotide; TTT chr11 5297753 5297774 5297770 5297775 +
tctgttccttattggtcaatac

SEQ ID NO: 96291 - DNA, 22 bp, Artificial Sequence
  Synthetic oligonucleotide; TTT chr11 5297754 5297775 5297771 5297776 +
ctgttccttattggtcaatact

SEQ ID NO: 96292 - DNA, 22 bp, Artificial Sequence
  Synthetic oligonucleotide; TTC chr11 5297755 5297776 5297772 5297777 +
tgttccttattggtcaatactt

SEQ ID NO: 96293 - DNA, 22 bp, Artificial Sequence
  Synthetic oligonucleotide; CTG chr11 5297757 5297778 5297774 5297779 +
ttccttattggtcaatactttt

SEQ ID NO: 96294 - DNA, 22 bp, Artificial Sequence
  Synthetic oligonucleotide; TTC chr11 5297760 5297781 5297777 5297782 +
cttattggtcaatacttttgga

SEQ ID NO: 96295 - DNA, 22 bp, Artificial Sequence
  Synthetic oligonucleotide; CTT chr11 5297763 5297784 5297780 5297785 +
attggtcaatacttttggatcc

SEQ ID NO: 96296 - DNA, 22 bp, Artificial Sequence
  Synthetic oligonucleotide; TTA chr11 5297764 5297785 5297781 5297786 +
ttggtcaatacttttggatcca

SEQ ID NO: 96297 - DNA, 22 bp, Artificial Sequence
  Synthetic oligonucleotide; TTG chr11 5297767 5297788 5297784 5297789 +
gtcaatacttttggatccagct

SEQ ID NO: 96298 - DNA, 22 bp, Artificial Sequence
  Synthetic oligonucleotide; CTT chr11 5297777 5297798 5297794 5297799 +
ttggatccagctgttcaactgt

SEQ ID NO: 96299 - DNA, 22 bp, Artificial Sequence
  Synthetic oligonucleotide; TTT chr11 5297778 5297799 5297795 5297800 +
tggatccagctgttcaactgtg

SEQ ID NO: 96300 - DNA, 22 bp, Artificial Sequence
  Synthetic oligonucleotide; TTT chr11 5297779 5297800 5297796 5297801 +
ggatccagctgttcaactgtgg

SEQ ID NO: 96301 - DNA, 22 bp, Artificial Sequence
  Synthetic oligonucleotide; TTG chr11 5297780 5297801 5297797 5297802 +
gatccagctgttcaactgtggt

SEQ ID NO: 96302 - DNA, 22 bp, Artificial Sequence
  Synthetic oligonucleotide; CTG chr11 5297790 5297811 5297807 5297812 +
ttcaactgtggtaacacttgat

SEQ ID NO: 96303 - DNA, 22 bp, Artificial Sequence
  Synthetic oligonucleotide; TTC chr11 5297793 5297814 5297810 5297815 +
aactgtggtaacacttgataat

SEQ ID NO: 96304 - DNA, 22 bp, Artificial Sequence
  Synthetic oligonucleotide; CTG chr11 5297798 5297819 5297815 5297820 +
tggtaacacttgataataatgc

SEQ ID NO: 96305 - DNA, 22 bp, Artificial Sequence
  Synthetic oligonucleotide; CTT chr11 5297809 5297830 5297826 5297831 +
gataataatgccaagaggctgg

SEQ ID NO: 96306 - DNA, 22 bp, Artificial Sequence
  Synthetic oligonucleotide; TTG chr11 5297810 5297831 5297827 5297832 +
ataataatgccaagaggctggg

SEQ ID NO: 96307 - DNA, 22 bp, Artificial Sequence
  Synthetic oligonucleotide; CTG chr11 5297830 5297851 5297847 5297852 +
gggtgagctataagaggagtca

SEQ ID NO: 96308 - DNA, 22 bp, Artificial Sequence
  Synthetic oligonucleotide; CTA chr11 5297840 5297861 5297857 5297862 +
taagaggagtcaaggctaatca

SEQ ID NO: 96309 - DNA, 22 bp, Artificial Sequence
  Synthetic oligonucleotide; CTA chr11 5297858 5297879 5297875 5297880 +
atcagtacagcaagaggaatga

SEQ ID NO: 96310 - DNA, 22 bp, Artificial Sequence
  Synthetic oligonucleotide; CTA chr11 5297891 5297912 5297908 5297913 +
gataaagggaacggcgtgggag

SEQ ID NO: 96311 - DNA, 22 bp, Artificial Sequence
  Synthetic oligonucleotide; TTT chr11 5297920 5297941 5297937 5297942 +
cctgagggaatattcatgagac

SEQ ID NO: 96312 - DNA, 22 bp, Artificial Sequence
  Synthetic oligonucleotide; TTC chr11 5297921 5297942 5297938 5297943 +
ctgagggaatattcatgagaca

SEQ ID NO: 96313 - DNA, 22 bp, Artificial Sequence
  Synthetic oligonucleotide; CTG chr11 5297924 5297945 5297941 5297946 +
agggaatattcatgagacaaac

SEQ ID NO: 96314 - DNA, 22 bp, Artificial Sequence
  Synthetic oligonucleotide; TTC chr11 5297935 5297956 5297952 5297957 +
atgagacaaacagagaataaag

SEQ ID NO: 96315 - DNA, 22 bp, Artificial Sequence
  Synthetic oligonucleotide; TTA chr11 5297993 5298014 5298010 5298015 +
atatacaagtgatttctagaaa

SEQ ID NO: 96316 - DNA, 22 bp, Artificial Sequence
  Synthetic oligonucleotide; TTT chr11 5298008 5298029 5298025 5298030 +
ctagaaagtgcatgaataagac

SEQ ID NO: 96317 - DNA, 22 bp, Artificial Sequence
  Synthetic oligonucleotide; TTC chr11 5298009 5298030 5298026 5298031 +
tagaaagtgcatgaataagaca

SEQ ID NO: 96318 - DNA, 22 bp, Artificial Sequence
  Synthetic oligonucleotide; CTA chr11 5298011 5298032 5298028 5298033 +
gaaagtgcatgaataagacagc

SEQ ID NO: 96319 - DNA, 22 bp, Artificial Sequence
  Synthetic oligonucleotide; CTA chr11 5298035 5298056 5298052 5298057 +
gaaagatagaaagacctggcac

SEQ ID NO: 96320 - DNA, 22 bp, Artificial Sequence
  Synthetic oligonucleotide; CTG chr11 5298053 5298074 5298070 5298075 +
gcacttaaaatgtgaatgtgaa

SEQ ID NO: 96321 - DNA, 22 bp, Artificial Sequence
  Synthetic oligonucleotide; CTT chr11 5298059 5298080 5298076 5298081 +
aaaatgtgaatgtgaaacagtt

SEQ ID NO: 96322 - DNA, 22 bp, Artificial Sequence
  Synthetic oligonucleotide; TTA chr11 5298060 5298081 5298077 5298082 +
aaatgtgaatgtgaaacagttc

SEQ ID NO: 96323 - DNA, 22 bp, Artificial Sequence
  Synthetic oligonucleotide; TTC chr11 5298082 5298103 5298099 5298104 +
tggctgagagaaatatctcagg

SEQ ID NO: 96324 - DNA, 22 bp, Artificial Sequence
  Synthetic oligonucleotide; CTG chr11 5298084 5298105 5298101 5298106 +
gctgagagaaatatctcaggaa

SEQ ID NO: 96325 - DNA, 22 bp, Artificial Sequence
  Synthetic oligonucleotide; CTG chr11 5298088 5298109 5298105 5298110 +
agagaaatatctcaggaatggc

SEQ ID NO: 96326 - DNA, 22 bp, Artificial Sequence
  Synthetic oligonucleotide; CTC chr11 5298101 5298122 5298118 5298123 +
aggaatggccatgttccaggct

SEQ ID NO: 96327 - DNA, 22 bp, Artificial Sequence
  Synthetic oligonucleotide; TTC chr11 5298117 5298138 5298134 5298139 +
caggcttcagggtaggacccat

SEQ ID NO: 96328 - DNA, 22 bp, Artificial Sequence
  Synthetic oligonucleotide; CTT chr11 5298124 5298145 5298141 5298146 +
cagggtaggacccatgccaggg

SEQ ID NO: 96329 - DNA, 22 bp, Artificial Sequence
  Synthetic oligonucleotide; TTC chr11 5298125 5298146 5298142 5298147 +
agggtaggacccatgccaggga

SEQ ID NO: 96330 - DNA, 22 bp, Artificial Sequence
  Synthetic oligonucleotide; CTT chr11 5298157 5298178 5298174 5298179 +
ttctgcctaaaatttctctgcc

SEQ ID NO: 96331 - DNA, 22 bp, Artificial Sequence
  Synthetic oligonucleotide; TTT chr11 5298158 5298179 5298175 5298180 +
tctgcctaaaatttctctgcct

SEQ ID NO: 96332 - DNA, 22 bp, Artificial Sequence
  Synthetic oligonucleotide; TTT chr11 5298159 5298180 5298176 5298181 +
ctgcctaaaatttctctgcctc

SEQ ID NO: 96333 - DNA, 22 bp, Artificial Sequence
  Synthetic oligonucleotide; TTC chr11 5298160 5298181 5298177 5298182 +
tgcctaaaatttctctgcctcc

SEQ ID NO: 96334 - DNA, 22 bp, Artificial Sequence
  Synthetic oligonucleotide; CTG chr11 5298162 5298183 5298179 5298184 +
cctaaaatttctctgcctcctg

SEQ ID NO: 96335 - DNA, 22 bp, Artificial Sequence
  Synthetic oligonucleotide; CTA chr11 5298166 5298187 5298183 5298188 +
aaatttctctgcctcctgtccc

SEQ ID NO: 96336 - DNA, 22 bp, Artificial Sequence
  Synthetic oligonucleotide; TTT chr11 5298172 5298193 5298189 5298194 +
ctctgcctcctgtccctatcat

SEQ ID NO: 96337 - DNA, 22 bp, Artificial Sequence
  Synthetic oligonucleotide; TTC chr11 5298173 5298194 5298190 5298195 +
tctgcctcctgtccctatcatt

SEQ ID NO: 96338 - DNA, 22 bp, Artificial Sequence
  Synthetic oligonucleotide; CTC chr11 5298175 5298196 5298192 5298197 +
tgcctcctgtccctatcattag

SEQ ID NO: 96339 - DNA, 22 bp, Artificial Sequence
  Synthetic oligonucleotide; CTG chr11 5298177 5298198 5298194 5298199 +
cctcctgtccctatcattagga

SEQ ID NO: 96340 - DNA, 22 bp, Artificial Sequence
  Synthetic oligonucleotide; CTC chr11 5298181 5298202 5298198 5298203 +
ctgtccctatcattaggaggcc

SEQ ID NO: 96341 - DNA, 22 bp, Artificial Sequence
  Synthetic oligonucleotide; CTG chr11 5298184 5298205 5298201 5298206 +
tccctatcattaggaggccagg

SEQ ID NO: 96342 - DNA, 22 bp, Artificial Sequence
  Synthetic oligonucleotide; CTA chr11 5298190 5298211 5298207 5298212 +
tcattaggaggccagggtggga

SEQ ID NO: 96343 - DNA, 22 bp, Artificial Sequence
  Synthetic oligonucleotide; TTA chr11 5298196 5298217 5298213 5298218 +
ggaggccagggtgggaggattg

SEQ ID NO: 96344 - DNA, 22 bp, Artificial Sequence
  Synthetic oligonucleotide; TTG chr11 5298218 5298239 5298235 5298240 +
cttgaggttaggaattggagag

SEQ ID NO: 96345 - DNA, 22 bp, Artificial Sequence
  Synthetic oligonucleotide; CTT chr11 5298221 5298242 5298238 5298243 +
gaggttaggaattggagagcag

SEQ ID NO: 96346 - DNA, 22 bp, Artificial Sequence
  Synthetic oligonucleotide; TTG chr11 5298222 5298243 5298239 5298244 +
aggttaggaattggagagcagc

SEQ ID NO: 96347 - DNA, 22 bp, Artificial Sequence
  Synthetic oligonucleotide; TTA chr11 5298228 5298249 5298245 5298250 +
ggaattggagagcagcctcggc

SEQ ID NO: 96348 - DNA, 22 bp, Artificial Sequence
  Synthetic oligonucleotide; TTG chr11 5298235 5298256 5298252 5298257 +
gagagcagcctcggcaacataa

SEQ ID NO: 96349 - DNA, 22 bp, Artificial Sequence
  Synthetic oligonucleotide; CTC chr11 5298247 5298268 5298264 5298269 +
ggcaacataacatgatcccata

SEQ ID NO: 96350 - DNA, 22 bp, Artificial Sequence
  Synthetic oligonucleotide; TTT chr11 5298272 5298293 5298289 5298294 +
acaaaaaataaaaacattagct

SEQ ID NO: 96351 - DNA, 22 bp, Artificial Sequence
  Synthetic oligonucleotide; TTA chr11 5298273 5298294 5298290 5298295 +
caaaaaataaaaacattagcta

SEQ ID NO: 96352 - DNA, 22 bp, Artificial Sequence
  Synthetic oligonucleotide; TTA chr11 5298291 5298312 5298308 5298313 +
gctaggtgcagtggcataaacc

SEQ ID NO: 96353 - DNA, 22 bp, Artificial Sequence
  Synthetic oligonucleotide; CTA chr11 5298295 5298316 5298312 5298317 +
ggtgcagtggcataaacctgta

SEQ ID NO: 96354 - DNA, 22 bp, Artificial Sequence
  Synthetic oligonucleotide; CTG chr11 5298315 5298336 5298332 5298337 +
tagtcctaggtactcaaaaagc

SEQ ID NO: 96355 - DNA, 22 bp, Artificial Sequence
  Synthetic oligonucleotide; CTA chr11 5298323 5298344 5298340 5298345 +
ggtactcaaaaagctgaggaag

SEQ ID NO: 96356 - DNA, 22 bp, Artificial Sequence
  Synthetic oligonucleotide; CTC chr11 5298330 5298351 5298347 5298352 +
aaaaagctgaggaagaaggatt

SEQ ID NO: 96357 - DNA, 22 bp, Artificial Sequence
  Synthetic oligonucleotide; CTG chr11 5298339 5298360 5298356 5298361 +
aggaagaaggattgcttgagcc

SEQ ID NO: 96358 - DNA, 22 bp, Artificial Sequence
  Synthetic oligonucleotide; TTG chr11 5298353 5298374 5298370 5298375 +
cttgagcccaggatttcaaggc

SEQ ID NO: 96359 - DNA, 22 bp, Artificial Sequence
  Synthetic oligonucleotide; CTT chr11 5298356 5298377 5298373 5298378 +
gagcccaggatttcaaggctgc

SEQ ID NO: 96360 - DNA, 22 bp, Artificial Sequence
  Synthetic oligonucleotide; TTG chr11 5298357 5298378 5298374 5298379 +
agcccaggatttcaaggctgca

SEQ ID NO: 96361 - DNA, 22 bp, Artificial Sequence
  Synthetic oligonucleotide; TTT chr11 5298369 5298390 5298386 5298391 +
caaggctgcagtgagctgtgat

SEQ ID NO: 96362 - DNA, 22 bp, Artificial Sequence
  Synthetic oligonucleotide; TTC chr11 5298370 5298391 5298387 5298392 +
aaggctgcagtgagctgtgatg

SEQ ID NO: 96363 - DNA, 22 bp, Artificial Sequence
  Synthetic oligonucleotide; CTG chr11 5298377 5298398 5298394 5298399 +
cagtgagctgtgatggcaccac

SEQ ID NO: 96364 - DNA, 22 bp, Artificial Sequence
  Synthetic oligonucleotide; CTG chr11 5298387 5298408 5298404 5298409 +
tgatggcaccactgcactccag

SEQ ID NO: 96365 - DNA, 22 bp, Artificial Sequence
  Synthetic oligonucleotide; CTG chr11 5298401 5298422 5298418 5298423 +
cactccagcctgggcaacagag

SEQ ID NO: 96366 - DNA, 22 bp, Artificial Sequence
  Synthetic oligonucleotide; CTC chr11 5298406 5298427 5298423 5298428 +
cagcctgggcaacagagcaaga

SEQ ID NO: 96367 - DNA, 22 bp, Artificial Sequence
  Synthetic oligonucleotide; CTG chr11 5298413 5298434 5298430 5298435 +
ggcaacagagcaagatcatgtc

SEQ ID NO: 96368 - DNA, 22 bp, Artificial Sequence
  Synthetic oligonucleotide; CTA chr11 5298437 5298458 5298454 5298459 +
taaaaataaataaataaataaa

SEQ ID NO: 96369 - DNA, 22 bp, Artificial Sequence
  Synthetic oligonucleotide; CTT chr11 5298470 5298491 5298487 5298492 +
tagccacaccagacaagtaaca

SEQ ID NO: 96370 - DNA, 22 bp, Artificial Sequence
  Synthetic oligonucleotide; TTT chr11 5298471 5298492 5298488 5298493 +
agccacaccagacaagtaacat

SEQ ID NO: 96371 - DNA, 22 bp, Artificial Sequence
  Synthetic oligonucleotide; TTA chr11 5298472 5298493 5298489 5298494 +
gccacaccagacaagtaacatt

SEQ ID NO: 96372 - DNA, 22 bp, Artificial Sequence
  Synthetic oligonucleotide; TTG chr11 5298495 5298516 5298512 5298517 +
tgtatttttaaaggactgcatt

SEQ ID NO: 96373 - DNA, 22 bp, Artificial Sequence
  Synthetic oligonucleotide; TTT chr11 5298502 5298523 5298519 5298524 +
ttaaaggactgcattaataaat

SEQ ID NO: 96374 - DNA, 22 bp, Artificial Sequence
  Synthetic oligonucleotide; TTT chr11 5298503 5298524 5298520 5298525 +
taaaggactgcattaataaatt

SEQ ID NO: 96375 - DNA, 22 bp, Artificial Sequence
  Synthetic oligonucleotide; TTT chr11 5298504 5298525 5298521 5298526 +
aaaggactgcattaataaattt

SEQ ID NO: 96376 - DNA, 22 bp, Artificial Sequence
  Synthetic oligonucleotide; TTA chr11 5298505 5298526 5298522 5298527 +
aaggactgcattaataaatttg

SEQ ID NO: 96377 - DNA, 22 bp, Artificial Sequence
  Synthetic oligonucleotide; CTG chr11 5298513 5298534 5298530 5298535 +
cattaataaatttgggggttta

SEQ ID NO: 96378 - DNA, 22 bp, Artificial Sequence
  Synthetic oligonucleotide; TTA chr11 5298518 5298539 5298535 5298540 +
ataaatttgggggtttacagaa

SEQ ID NO: 96379 - DNA, 22 bp, Artificial Sequence
  Synthetic oligonucleotide; TTT chr11 5298526 5298547 5298543 5298548 +
gggggtttacagaatggcaggt

SEQ ID NO: 96380 - DNA, 22 bp, Artificial Sequence
  Synthetic oligonucleotide; TTG chr11 5298527 5298548 5298544 5298549 +
ggggtttacagaatggcaggta

SEQ ID NO: 96381 - DNA, 22 bp, Artificial Sequence
  Synthetic oligonucleotide; TTT chr11 5298534 5298555 5298551 5298556 +
acagaatggcaggtagttatcc

SEQ ID NO: 96382 - DNA, 22 bp, Artificial Sequence
  Synthetic oligonucleotide; TTA chr11 5298535 5298556 5298552 5298557 +
cagaatggcaggtagttatcct

SEQ ID NO: 96383 - DNA, 22 bp, Artificial Sequence
  Synthetic oligonucleotide; TTA chr11 5298553 5298574 5298570 5298575 +
tccttgggaagacaatatgctg

SEQ ID NO: 96384 - DNA, 22 bp, Artificial Sequence
  Synthetic oligonucleotide; CTT chr11 5298558 5298579 5298575 5298580 +
gggaagacaatatgctgatggg

SEQ ID NO: 96385 - DNA, 22 bp, Artificial Sequence
  Synthetic oligonucleotide; TTG chr11 5298559 5298580 5298576 5298581 +
ggaagacaatatgctgatgggg

SEQ ID NO: 96386 - DNA, 22 bp, Artificial Sequence
  Synthetic oligonucleotide; CTG chr11 5298575 5298596 5298592 5298597 +
atggggaaatataattactgcc

SEQ ID NO: 96387 - DNA, 22 bp, Artificial Sequence
  Synthetic oligonucleotide; TTA chr11 5298592 5298613 5298609 5298614 +
ctgccctgactaaactcacagt

SEQ ID NO: 96388 - DNA, 22 bp, Artificial Sequence
  Synthetic oligonucleotide; CTG chr11 5298595 5298616 5298612 5298617 +
ccctgactaaactcacagtatg

SEQ ID NO: 96389 - DNA, 22 bp, Artificial Sequence
  Synthetic oligonucleotide; CTG chr11 5298600 5298621 5298617 5298622 +
actaaactcacagtatgacaga

SEQ ID NO: 96390 - DNA, 22 bp, Artificial Sequence
  Synthetic oligonucleotide; CTA chr11 5298604 5298625 5298621 5298626 +
aactcacagtatgacagagaat

SEQ ID NO: 96391 - DNA, 22 bp, Artificial Sequence
  Synthetic oligonucleotide; CTC chr11 5298609 5298630 5298626 5298631 +
acagtatgacagagaattaact

SEQ ID NO: 96392 - DNA, 22 bp, Artificial Sequence
  Synthetic oligonucleotide; TTA chr11 5298628 5298649 5298645 5298650 +
actgtgctgacttgataattcc

SEQ ID NO: 96393 - DNA, 22 bp, Artificial Sequence
  Synthetic oligonucleotide; CTG chr11 5298632 5298653 5298649 5298654 +
tgctgacttgataattcctcag

SEQ ID NO: 96394 - DNA, 22 bp, Artificial Sequence
  Synthetic oligonucleotide; CTG chr11 5298637 5298658 5298654 5298659 +
acttgataattcctcagagcag

SEQ ID NO: 96395 - DNA, 22 bp, Artificial Sequence
  Synthetic oligonucleotide; CTT chr11 5298641 5298662 5298658 5298663 +
gataattcctcagagcagatct

SEQ ID NO: 96396 - DNA, 22 bp, Artificial Sequence
  Synthetic oligonucleotide; TTG chr11 5298642 5298663 5298659 5298664 +
ataattcctcagagcagatctc

SEQ ID NO: 96397 - DNA, 22 bp, Artificial Sequence
  Synthetic oligonucleotide; TTC chr11 5298649 5298670 5298666 5298671 +
ctcagagcagatctctaagaga

SEQ ID NO: 96398 - DNA, 22 bp, Artificial Sequence
  Synthetic oligonucleotide; CTC chr11 5298652 5298673 5298669 5298674 +
agagcagatctctaagagagct

SEQ ID NO: 96399 - DNA, 22 bp, Artificial Sequence
  Synthetic oligonucleotide; CTC chr11 5298664 5298685 5298681 5298686 +
taagagagcttatagacacaac

SEQ ID NO: 96400 - DNA, 22 bp, Artificial Sequence
  Synthetic oligonucleotide; CTA chr11 5298666 5298687 5298683 5298688 +
agagagcttatagacacaacgc

SEQ ID NO: 96401 - DNA, 22 bp, Artificial Sequence
  Synthetic oligonucleotide; CTT chr11 5298675 5298696 5298692 5298697 +
atagacacaacgcctgcttcac

SEQ ID NO: 96402 - DNA, 22 bp, Artificial Sequence
  Synthetic oligonucleotide; TTA chr11 5298676 5298697 5298693 5298698 +
tagacacaacgcctgcttcaca

SEQ ID NO: 96403 - DNA, 22 bp, Artificial Sequence
  Synthetic oligonucleotide; CTG chr11 5298691 5298712 5298708 5298713 +
cttcacaaggttctcaagtatg

SEQ ID NO: 96404 - DNA, 22 bp, Artificial Sequence
  Synthetic oligonucleotide; CTT chr11 5298694 5298715 5298711 5298716 +
cacaaggttctcaagtatggca

SEQ ID NO: 96405 - DNA, 22 bp, Artificial Sequence
  Synthetic oligonucleotide; TTC chr11 5298695 5298716 5298712 5298717 +
acaaggttctcaagtatggcaa

SEQ ID NO: 96406 - DNA, 22 bp, Artificial Sequence
  Synthetic oligonucleotide; TTC chr11 5298704 5298725 5298721 5298726 +
tcaagtatggcaaacttgtcag

SEQ ID NO: 96407 - DNA, 22 bp, Artificial Sequence
  Synthetic oligonucleotide; CTC chr11 5298706 5298727 5298723 5298728 +
aagtatggcaaacttgtcagtc

SEQ ID NO: 96408 - DNA, 22 bp, Artificial Sequence
  Synthetic oligonucleotide; CTT chr11 5298721 5298742 5298738 5298743 +
gtcagtcagggtgagactgagg

SEQ ID NO: 96409 - DNA, 22 bp, Artificial Sequence
  Synthetic oligonucleotide; TTG chr11 5298722 5298743 5298739 5298744 +
tcagtcagggtgagactgagga

SEQ ID NO: 96410 - DNA, 22 bp, Artificial Sequence
  Synthetic oligonucleotide; CTG chr11 5298740 5298761 5298757 5298762 +
aggatgaggtctaagagacttg

SEQ ID NO: 96411 - DNA, 22 bp, Artificial Sequence
  Synthetic oligonucleotide; CTA chr11 5298753 5298774 5298770 5298775 +
agagacttgtctggaagctgca

SEQ ID NO: 96412 - DNA, 22 bp, Artificial Sequence
  Synthetic oligonucleotide; CTT chr11 5298761 5298782 5298778 5298783 +
gtctggaagctgcacttgtttg

SEQ ID NO: 96413 - DNA, 22 bp, Artificial Sequence
  Synthetic oligonucleotide; TTG chr11 5298762 5298783 5298779 5298784 +
tctggaagctgcacttgtttga

SEQ ID NO: 96414 - DNA, 22 bp, Artificial Sequence
  Synthetic oligonucleotide; CTG chr11 5298766 5298787 5298783 5298788 +
gaagctgcacttgtttgaaagg

SEQ ID NO: 96415 - DNA, 22 bp, Artificial Sequence
  Synthetic oligonucleotide; CTG chr11 5298773 5298794 5298790 5298795 +
cacttgtttgaaaggacactga

SEQ ID NO: 96416 - DNA, 22 bp, Artificial Sequence
  Synthetic oligonucleotide; CTT chr11 5298778 5298799 5298795 5298800 +
gtttgaaaggacactgatttta

SEQ ID NO: 96417 - DNA, 22 bp, Artificial Sequence
  Synthetic oligonucleotide; TTG chr11 5298779 5298800 5298796 5298801 +
tttgaaaggacactgattttac

SEQ ID NO: 96418 - DNA, 22 bp, Artificial Sequence
  Synthetic oligonucleotide; TTT chr11 5298782 5298803 5298799 5298804 +
gaaaggacactgattttacttc

SEQ ID NO: 96419 - DNA, 22 bp, Artificial Sequence
  Synthetic oligonucleotide; TTG chr11 5298783 5298804 5298800 5298805 +
aaaggacactgattttacttca

SEQ ID NO: 96420 - DNA, 22 bp, Artificial Sequence
  Synthetic oligonucleotide; CTG chr11 5298794 5298815 5298811 5298816 +
attttacttcagtggtgcaata

SEQ ID NO: 96421 - DNA, 22 bp, Artificial Sequence
  Synthetic oligonucleotide; TTT chr11 5298798 5298819 5298815 5298820 +
tacttcagtggtgcaataaatg

SEQ ID NO: 96422 - DNA, 22 bp, Artificial Sequence
  Synthetic oligonucleotide; TTT chr11 5298799 5298820 5298816 5298821 +
acttcagtggtgcaataaatgt

SEQ ID NO: 96423 - DNA, 22 bp, Artificial Sequence
  Synthetic oligonucleotide; TTA chr11 5298800 5298821 5298817 5298822 +
cttcagtggtgcaataaatgtc

SEQ ID NO: 96424 - DNA, 22 bp, Artificial Sequence
  Synthetic oligonucleotide; CTT chr11 5298803 5298824 5298820 5298825 +
cagtggtgcaataaatgtcctt

SEQ ID NO: 96425 - DNA, 22 bp, Artificial Sequence
  Synthetic oligonucleotide; TTC chr11 5298804 5298825 5298821 5298826 +
agtggtgcaataaatgtcctta

SEQ ID NO: 96426 - DNA, 22 bp, Artificial Sequence
  Synthetic oligonucleotide; CTT chr11 5298825 5298846 5298842 5298847 +
atatatcactggatcagcaggt

SEQ ID NO: 96427 - DNA, 22 bp, Artificial Sequence
  Synthetic oligonucleotide; TTA chr11 5298826 5298847 5298843 5298848 +
tatatcactggatcagcaggtg

SEQ ID NO: 96428 - DNA, 22 bp, Artificial Sequence
  Synthetic oligonucleotide; CTG chr11 5298836 5298857 5298853 5298858 +
gatcagcaggtggatgctgact

SEQ ID NO: 96429 - DNA, 22 bp, Artificial Sequence
  Synthetic oligonucleotide; CTG chr11 5298855 5298876 5298872 5298877 +
acttaataattgaaaggatttt

SEQ ID NO: 96430 - DNA, 22 bp, Artificial Sequence
  Synthetic oligonucleotide; CTT chr11 5298859 5298880 5298876 5298881 +
aataattgaaaggattttcaaa

SEQ ID NO: 96431 - DNA, 22 bp, Artificial Sequence
  Synthetic oligonucleotide; TTA chr11 5298860 5298881 5298877 5298882 +
ataattgaaaggattttcaaac

SEQ ID NO: 96432 - DNA, 22 bp, Artificial Sequence
  Synthetic oligonucleotide; TTG chr11 5298867 5298888 5298884 5298889 +
aaaggattttcaaactaagaag

SEQ ID NO: 96433 - DNA, 22 bp, Artificial Sequence
  Synthetic oligonucleotide; TTT chr11 5298876 5298897 5298893 5298898 +
tcaaactaagaagttgtaaaat

SEQ ID NO: 96434 - DNA, 22 bp, Artificial Sequence
  Synthetic oligonucleotide; TTT chr11 5298877 5298898 5298894 5298899 +
caaactaagaagttgtaaaata

SEQ ID NO: 96435 - DNA, 22 bp, Artificial Sequence
  Synthetic oligonucleotide; TTC chr11 5298878 5298899 5298895 5298900 +
aaactaagaagttgtaaaatat

SEQ ID NO: 96436 - DNA, 22 bp, Artificial Sequence
  Synthetic oligonucleotide; CTA chr11 5298884 5298905 5298901 5298906 +
agaagttgtaaaatataatata

SEQ ID NO: 96437 - DNA, 22 bp, Artificial Sequence
  Synthetic oligonucleotide; TTG chr11 5298892 5298913 5298909 5298914 +
taaaatataatatataggttat

SEQ ID NO: 96438 - DNA, 22 bp, Artificial Sequence
  Synthetic oligonucleotide; TTA chr11 5298913 5298934 5298930 5298935 +
tgaatataattaaaattaaaac

SEQ ID NO: 96439 - DNA, 22 bp, Artificial Sequence
  Synthetic oligonucleotide; TTA chr11 5298925 5298946 5298942 5298947 +
aaattaaaacgcataaatatac

SEQ ID NO: 96440 - DNA, 22 bp, Artificial Sequence
  Synthetic oligonucleotide; TTA chr11 5298931 5298952 5298948 5298953 +
aaacgcataaatatacatttac

SEQ ID NO: 96441 - DNA, 22 bp, Artificial Sequence
  Synthetic oligonucleotide; TTT chr11 5298951 5298972 5298968 5298973 +
acttaagaaaatgagtgatttt

SEQ ID NO: 96442 - DNA, 22 bp, Artificial Sequence
  Synthetic oligonucleotide; TTA chr11 5298952 5298973 5298969 5298974 +
cttaagaaaatgagtgattttt

SEQ ID NO: 96443 - DNA, 22 bp, Artificial Sequence
  Synthetic oligonucleotide; CTT chr11 5298955 5298976 5298972 5298977 +
aagaaaatgagtgatttttaaa

SEQ ID NO: 96444 - DNA, 22 bp, Artificial Sequence
  Synthetic oligonucleotide; TTA chr11 5298956 5298977 5298973 5298978 +
agaaaatgagtgatttttaaaa

SEQ ID NO: 96445 - DNA, 22 bp, Artificial Sequence
  Synthetic oligonucleotide; TTT chr11 5298972 5298993 5298989 5298994 +
ttaaaatttatcctttttaatt

SEQ ID NO: 96446 - DNA, 22 bp, Artificial Sequence
  Synthetic oligonucleotide; TTT chr11 5298973 5298994 5298990 5298995 +
taaaatttatcctttttaattg

SEQ ID NO: 96447 - DNA, 22 bp, Artificial Sequence
  Synthetic oligonucleotide; TTT chr11 5298974 5298995 5298991 5298996 +
aaaatttatcctttttaattga

SEQ ID NO: 96448 - DNA, 22 bp, Artificial Sequence
  Synthetic oligonucleotide; TTA chr11 5298975 5298996 5298992 5298997 +
aaatttatcctttttaattgat

SEQ ID NO: 96449 - DNA, 22 bp, Artificial Sequence
  Synthetic oligonucleotide; TTT chr11 5298981 5299002 5298998 5299003 +
atcctttttaattgatttttga

SEQ ID NO: 96450 - DNA, 22 bp, Artificial Sequence
  Synthetic oligonucleotide; TTA chr11 5298982 5299003 5298999 5299004 +
tcctttttaattgatttttgac

SEQ ID NO: 96451 - DNA, 22 bp, Artificial Sequence
  Synthetic oligonucleotide; CTT chr11 5298987 5299008 5299004 5299009 +
tttaattgatttttgactattg

SEQ ID NO: 96452 - DNA, 22 bp, Artificial Sequence
  Synthetic oligonucleotide; TTT chr11 5298988 5299009 5299005 5299010 +
ttaattgatttttgactattga

SEQ ID NO: 96453 - DNA, 22 bp, Artificial Sequence
  Synthetic oligonucleotide; TTT chr11 5298989 5299010 5299006 5299011 +
taattgatttttgactattgat

SEQ ID NO: 96454 - DNA, 22 bp, Artificial Sequence
  Synthetic oligonucleotide; TTT chr11 5298990 5299011 5299007 5299012 +
aattgatttttgactattgata

SEQ ID NO: 96455 - DNA, 22 bp, Artificial Sequence
  Synthetic oligonucleotide; TTA chr11 5298991 5299012 5299008 5299013 +
attgatttttgactattgatac

SEQ ID NO: 96456 - DNA, 22 bp, Artificial Sequence
  Synthetic oligonucleotide; TTG chr11 5298995 5299016 5299012 5299017 +
atttttgactattgatacaggc

SEQ ID NO: 96457 - DNA, 22 bp, Artificial Sequence
  Synthetic oligonucleotide; TTT chr11 5298999 5299020 5299016 5299021 +
ttgactattgatacaggctgtt

SEQ ID NO: 96458 - DNA, 22 bp, Artificial Sequence
  Synthetic oligonucleotide; TTT chr11 5299000 5299021 5299017 5299022 +
tgactattgatacaggctgttt

SEQ ID NO: 96459 - DNA, 22 bp, Artificial Sequence
  Synthetic oligonucleotide; TTT chr11 5299001 5299022 5299018 5299023 +
gactattgatacaggctgttta

SEQ ID NO: 96460 - DNA, 22 bp, Artificial Sequence
  Synthetic oligonucleotide; TTG chr11 5299002 5299023 5299019 5299024 +
actattgatacaggctgtttaa

SEQ ID NO: 96461 - DNA, 22 bp, Artificial Sequence
  Synthetic oligonucleotide; CTA chr11 5299006 5299027 5299023 5299028 +
ttgatacaggctgtttaaagat

SEQ ID NO: 96462 - DNA, 22 bp, Artificial Sequence
  Synthetic oligonucleotide; TTG chr11 5299009 5299030 5299026 5299031 +
atacaggctgtttaaagatcaa

SEQ ID NO: 96463 - DNA, 22 bp, Artificial Sequence
  Synthetic oligonucleotide; CTG chr11 5299019 5299040 5299036 5299041 +
tttaaagatcaataggctataa

SEQ ID NO: 96464 - DNA, 22 bp, Artificial Sequence
  Synthetic oligonucleotide; TTT chr11 5299022 5299043 5299039 5299044 +
aaagatcaataggctataatat

SEQ ID NO: 96465 - DNA, 22 bp, Artificial Sequence
  Synthetic oligonucleotide; TTA chr11 5299023 5299044 5299040 5299045 +
aagatcaataggctataatatc

SEQ ID NO: 96466 - DNA, 22 bp, Artificial Sequence
  Synthetic oligonucleotide; CTA chr11 5299038 5299059 5299055 5299060 +
taatatcatattatgtcatccc

SEQ ID NO: 96467 - DNA, 22 bp, Artificial Sequence
  Synthetic oligonucleotide; TTA chr11 5299051 5299072 5299068 5299073 +
tgtcatcccttgctaacatatg

SEQ ID NO: 96468 - DNA, 22 bp, Artificial Sequence
  Synthetic oligonucleotide; CTT chr11 5299062 5299083 5299079 5299084 +
gctaacatatgagtaaacttga

SEQ ID NO: 96469 - DNA, 22 bp, Artificial Sequence
  Synthetic oligonucleotide; TTG chr11 5299063 5299084 5299080 5299085 +
ctaacatatgagtaaacttgag

SEQ ID NO: 96470 - DNA, 22 bp, Artificial Sequence
  Synthetic oligonucleotide; CTA chr11 5299066 5299087 5299083 5299088 +
acatatgagtaaacttgagctc

SEQ ID NO: 96471 - DNA, 22 bp, Artificial Sequence
  Synthetic oligonucleotide; CTT chr11 5299082 5299103 5299099 5299104 +
gagctctcaacttgatcttccc

SEQ ID NO: 96472 - DNA, 22 bp, Artificial Sequence
  Synthetic oligonucleotide; TTG chr11 5299083 5299104 5299100 5299105 +
agctctcaacttgatcttccca

SEQ ID NO: 96473 - DNA, 22 bp, Artificial Sequence
  Synthetic oligonucleotide; CTC chr11 5299088 5299109 5299105 5299110 +
tcaacttgatcttcccacttct

SEQ ID NO: 96474 - DNA, 22 bp, Artificial Sequence
  Synthetic oligonucleotide; CTC chr11 5299090 5299111 5299107 5299112 +
aacttgatcttcccacttcttc

SEQ ID NO: 96475 - DNA, 22 bp, Artificial Sequence
  Synthetic oligonucleotide; CTT chr11 5299095 5299116 5299112 5299117 +
gatcttcccacttcttcttatt

SEQ ID NO: 96476 - DNA, 22 bp, Artificial Sequence
  Synthetic oligonucleotide; TTG chr11 5299096 5299117 5299113 5299118 +
atcttcccacttcttcttattt

SEQ ID NO: 96477 - DNA, 22 bp, Artificial Sequence
  Synthetic oligonucleotide; CTT chr11 5299101 5299122 5299118 5299123 +
cccacttcttcttatttataat

SEQ ID NO: 96478 - DNA, 22 bp, Artificial Sequence
  Synthetic oligonucleotide; TTC chr11 5299102 5299123 5299119 5299124 +
ccacttcttcttatttataatt

SEQ ID NO: 96479 - DNA, 22 bp, Artificial Sequence
  Synthetic oligonucleotide; CTT chr11 5299108 5299129 5299125 5299130 +
cttcttatttataattagatac

SEQ ID NO: 96480 - DNA, 22 bp, Artificial Sequence
  Synthetic oligonucleotide; TTC chr11 5299109 5299130 5299126 5299131 +
ttcttatttataattagatacc

SEQ ID NO: 96481 - DNA, 22 bp, Artificial Sequence
  Synthetic oligonucleotide; CTT chr11 5299111 5299132 5299128 5299133 +
cttatttataattagatacctc

SEQ ID NO: 96482 - DNA, 22 bp, Artificial Sequence
  Synthetic oligonucleotide; TTC chr11 5299112 5299133 5299129 5299134 +
ttatttataattagatacctct

SEQ ID NO: 96483 - DNA, 22 bp, Artificial Sequence
  Synthetic oligonucleotide; CTT chr11 5299114 5299135 5299131 5299136 +
atttataattagatacctctgt

SEQ ID NO: 96484 - DNA, 22 bp, Artificial Sequence
  Synthetic oligonucleotide; TTA chr11 5299115 5299136 5299132 5299137 +
tttataattagatacctctgtt

SEQ ID NO: 96485 - DNA, 22 bp, Artificial Sequence
  Synthetic oligonucleotide; TTT chr11 5299118 5299139 5299135 5299140 +
ataattagatacctctgtttct

SEQ ID NO: 96486 - DNA, 22 bp, Artificial Sequence
  Synthetic oligonucleotide; TTA chr11 5299119 5299140 5299136 5299141 +
taattagatacctctgtttctt

SEQ ID NO: 96487 - DNA, 22 bp, Artificial Sequence
  Synthetic oligonucleotide; TTA chr11 5299125 5299146 5299142 5299147 +
gatacctctgtttcttagactt

SEQ ID NO: 96488 - DNA, 22 bp, Artificial Sequence
  Synthetic oligonucleotide; CTC chr11 5299133 5299154 5299150 5299155 +
tgtttcttagacttcgctatca

SEQ ID NO: 96489 - DNA, 22 bp, Artificial Sequence
  Synthetic oligonucleotide; CTG chr11 5299135 5299156 5299152 5299157 +
tttcttagacttcgctatcata

SEQ ID NO: 96490 - DNA, 22 bp, Artificial Sequence
  Synthetic oligonucleotide; TTT chr11 5299138 5299159 5299155 5299160 +
cttagacttcgctatcatacct

SEQ ID NO: 96491 - DNA, 22 bp, Artificial Sequence
  Synthetic oligonucleotide; TTC chr11 5299139 5299160 5299156 5299161 +
ttagacttcgctatcatacctt

SEQ ID NO: 96492 - DNA, 22 bp, Artificial Sequence
  Synthetic oligonucleotide; CTT chr11 5299141 5299162 5299158 5299163 +
agacttcgctatcataccttat

SEQ ID NO: 96493 - DNA, 22 bp, Artificial Sequence
  Synthetic oligonucleotide; TTA chr11 5299142 5299163 5299159 5299164 +
gacttcgctatcataccttatt

SEQ ID NO: 96494 - DNA, 22 bp, Artificial Sequence
  Synthetic oligonucleotide; CTT chr11 5299147 5299168 5299164 5299169 +
cgctatcataccttattttcag

SEQ ID NO: 96495 - DNA, 22 bp, Artificial Sequence
  Synthetic oligonucleotide; TTC chr11 5299148 5299169 5299165 5299170 +
gctatcataccttattttcagc

SEQ ID NO: 96496 - DNA, 22 bp, Artificial Sequence
  Synthetic oligonucleotide; CTA chr11 5299152 5299173 5299169 5299174 +
tcataccttattttcagcacat

SEQ ID NO: 96497 - DNA, 22 bp, Artificial Sequence
  Synthetic oligonucleotide; CTT chr11 5299161 5299182 5299178 5299183 +
attttcagcacatcgcccctaa

SEQ ID NO: 96498 - DNA, 22 bp, Artificial Sequence
  Synthetic oligonucleotide; TTA chr11 5299162 5299183 5299179 5299184 +
ttttcagcacatcgcccctaag

SEQ ID NO: 96499 - DNA, 22 bp, Artificial Sequence
  Synthetic oligonucleotide; TTT chr11 5299165 5299186 5299182 5299187 +
tcagcacatcgcccctaagttt

SEQ ID NO: 96500 - DNA, 22 bp, Artificial Sequence
  Synthetic oligonucleotide; TTT chr11 5299166 5299187 5299183 5299188 +
cagcacatcgcccctaagtttg

SEQ ID NO: 96501 - DNA, 22 bp, Artificial Sequence
  Synthetic oligonucleotide; TTC chr11 5299167 5299188 5299184 5299189 +
agcacatcgcccctaagtttgc

SEQ ID NO: 96502 - DNA, 22 bp, Artificial Sequence
  Synthetic oligonucleotide; CTA chr11 5299182 5299203 5299199 5299204 +
agtttgcattacacatttacac

SEQ ID NO: 96503 - DNA, 22 bp, Artificial Sequence
  Synthetic oligonucleotide; TTT chr11 5299187 5299208 5299204 5299209 +
gcattacacatttacacattgt

SEQ ID NO: 96504 - DNA, 22 bp, Artificial Sequence
  Synthetic oligonucleotide; TTG chr11 5299188 5299209 5299205 5299210 +
cattacacatttacacattgtt

SEQ ID NO: 96505 - DNA, 22 bp, Artificial Sequence
  Synthetic oligonucleotide; TTA chr11 5299193 5299214 5299210 5299215 +
cacatttacacattgttgtagg

SEQ ID NO: 96506 - DNA, 22 bp, Artificial Sequence
  Synthetic oligonucleotide; TTT chr11 5299200 5299221 5299217 5299222 +
acacattgttgtaggctgtctt

SEQ ID NO: 96507 - DNA, 22 bp, Artificial Sequence
  Synthetic oligonucleotide; TTA chr11 5299201 5299222 5299218 5299223 +
cacattgttgtaggctgtcttc

SEQ ID NO: 96508 - DNA, 22 bp, Artificial Sequence
  Synthetic oligonucleotide; TTG chr11 5299208 5299229 5299225 5299230 +
ttgtaggctgtcttcttataac

SEQ ID NO: 96509 - DNA, 22 bp, Artificial Sequence
  Synthetic oligonucleotide; TTG chr11 5299211 5299232 5299228 5299233 +
taggctgtcttcttataacaat

SEQ ID NO: 96510 - DNA, 22 bp, Artificial Sequence
  Synthetic oligonucleotide; CTG chr11 5299218 5299239 5299235 5299240 +
tcttcttataacaatcaagaaa

SEQ ID NO: 96511 - DNA, 22 bp, Artificial Sequence
  Synthetic oligonucleotide; CTT chr11 5299222 5299243 5299239 5299244 +
cttataacaatcaagaaaacag

SEQ ID NO: 96512 - DNA, 22 bp, Artificial Sequence
  Synthetic oligonucleotide; TTC chr11 5299223 5299244 5299240 5299245 +
ttataacaatcaagaaaacagc

SEQ ID NO: 96513 - DNA, 22 bp, Artificial Sequence
  Synthetic oligonucleotide; CTT chr11 5299225 5299246 5299242 5299247 +
ataacaatcaagaaaacagcat

SEQ ID NO: 96514 - DNA, 22 bp, Artificial Sequence
  Synthetic oligonucleotide; TTA chr11 5299226 5299247 5299243 5299248 +
taacaatcaagaaaacagcatc

SEQ ID NO: 96515 - DNA, 22 bp, Artificial Sequence
  Synthetic oligonucleotide; CTA chr11 5299259 5299280 5299276 5299281 +
ctgacaaatacatttgccattt

SEQ ID NO: 96516 - DNA, 22 bp, Artificial Sequence
  Synthetic oligonucleotide; CTG chr11 5299262 5299283 5299279 5299284 +
acaaatacatttgccattttta

SEQ ID NO: 96517 - DNA, 22 bp, Artificial Sequence
  Synthetic oligonucleotide; TTT chr11 5299274 5299295 5299291 5299296 +
gccatttttacaaaaaaccctt

SEQ ID NO: 96518 - DNA, 22 bp, Artificial Sequence
  Synthetic oligonucleotide; TTG chr11 5299275 5299296 5299292 5299297 +
ccatttttacaaaaaaccctta

SEQ ID NO: 96519 - DNA, 22 bp, Artificial Sequence
  Synthetic oligonucleotide; TTT chr11 5299281 5299302 5299298 5299303 +
ttacaaaaaacccttattcgcc

SEQ ID NO: 96520 - DNA, 22 bp, Artificial Sequence
  Synthetic oligonucleotide; TTT chr11 5299282 5299303 5299299 5299304 +
tacaaaaaacccttattcgcct

SEQ ID NO: 96521 - DNA, 22 bp, Artificial Sequence
  Synthetic oligonucleotide; TTT chr11 5299283 5299304 5299300 5299305 +
acaaaaaacccttattcgcctg

SEQ ID NO: 96522 - DNA, 22 bp, Artificial Sequence
  Synthetic oligonucleotide; TTA chr11 5299284 5299305 5299301 5299306 +
caaaaaacccttattcgcctga

SEQ ID NO: 96523 - DNA, 22 bp, Artificial Sequence
  Synthetic oligonucleotide; CTT chr11 5299296 5299317 5299313 5299318 +
attcgcctgaaaattttaatac

SEQ ID NO: 96524 - DNA, 22 bp, Artificial Sequence
  Synthetic oligonucleotide; TTA chr11 5299297 5299318 5299314 5299319 +
ttcgcctgaaaattttaatacc

SEQ ID NO: 96525 - DNA, 22 bp, Artificial Sequence
  Synthetic oligonucleotide; TTC chr11 5299300 5299321 5299317 5299322 +
gcctgaaaattttaataccgct

SEQ ID NO: 96526 - DNA, 22 bp, Artificial Sequence
  Synthetic oligonucleotide; CTG chr11 5299305 5299326 5299322 5299327 +
aaaattttaataccgctatgtt

SEQ ID NO: 96527 - DNA, 22 bp, Artificial Sequence
  Synthetic oligonucleotide; TTT chr11 5299312 5299333 5299329 5299334 +
taataccgctatgttttttact

SEQ ID NO: 96528 - DNA, 22 bp, Artificial Sequence
  Synthetic oligonucleotide; TTT chr11 5299313 5299334 5299330 5299335 +
aataccgctatgttttttactc

SEQ ID NO: 96529 - DNA, 22 bp, Artificial Sequence
  Synthetic oligonucleotide; TTA chr11 5299314 5299335 5299331 5299336 +
ataccgctatgttttttactct

SEQ ID NO: 96530 - DNA, 22 bp, Artificial Sequence
  Synthetic oligonucleotide; CTA chr11 5299323 5299344 5299340 5299345 +
tgttttttactcttacagacat

SEQ ID NO: 96531 - DNA, 22 bp, Artificial Sequence
  Synthetic oligonucleotide; TTT chr11 5299328 5299349 5299345 5299350 +
tttactcttacagacatccttt

SEQ ID NO: 96532 - DNA, 22 bp, Artificial Sequence
  Synthetic oligonucleotide; TTT chr11 5299329 5299350 5299346 5299351 +
ttactcttacagacatcctttc

SEQ ID NO: 96533 - DNA, 22 bp, Artificial Sequence
  Synthetic oligonucleotide; TTT chr11 5299330 5299351 5299347 5299352 +
tactcttacagacatcctttca

SEQ ID NO: 96534 - DNA, 22 bp, Artificial Sequence
  Synthetic oligonucleotide; TTT chr11 5299331 5299352 5299348 5299353 +
actcttacagacatcctttcag

SEQ ID NO: 96535 - DNA, 22 bp, Artificial Sequence
  Synthetic oligonucleotide; TTA chr11 5299332 5299353 5299349 5299354 +
ctcttacagacatcctttcagt

SEQ ID NO: 96536 - DNA, 22 bp, Artificial Sequence
  Synthetic oligonucleotide; CTC chr11 5299335 5299356 5299352 5299357 +
ttacagacatcctttcagtggt

SEQ ID NO: 96537 - DNA, 22 bp, Artificial Sequence
  Synthetic oligonucleotide; CTT chr11 5299337 5299358 5299354 5299359 +
acagacatcctttcagtggtca

SEQ ID NO: 96538 - DNA, 22 bp, Artificial Sequence
  Synthetic oligonucleotide; TTA chr11 5299338 5299359 5299355 5299360 +
cagacatcctttcagtggtcaa

SEQ ID NO: 96539 - DNA, 22 bp, Artificial Sequence
  Synthetic oligonucleotide; CTT chr11 5299349 5299370 5299366 5299371 +
tcagtggtcaatagagatgcag

SEQ ID NO: 96540 - DNA, 22 bp, Artificial Sequence
  Synthetic oligonucleotide; TTT chr11 5299350 5299371 5299367 5299372 +
cagtggtcaatagagatgcagc

SEQ ID NO: 96541 - DNA, 22 bp, Artificial Sequence
  Synthetic oligonucleotide; TTC chr11 5299351 5299372 5299368 5299373 +
agtggtcaatagagatgcagct

SEQ ID NO: 96542 - DNA, 22 bp, Artificial Sequence
  Synthetic oligonucleotide; CTT chr11 5299374 5299395 5299391 5299396 +
tcctaaatgtagtttgtatgtt

SEQ ID NO: 96543 - DNA, 22 bp, Artificial Sequence
  Synthetic oligonucleotide; TTT chr11 5299375 5299396 5299392 5299397 +
cctaaatgtagtttgtatgtta

SEQ ID NO: 96544 - DNA, 22 bp, Artificial Sequence
  Synthetic oligonucleotide; TTC chr11 5299376 5299397 5299393 5299398 +
ctaaatgtagtttgtatgttag

SEQ ID NO: 96545 - DNA, 22 bp, Artificial Sequence
  Synthetic oligonucleotide; CTA chr11 5299379 5299400 5299396 5299401 +
aatgtagtttgtatgttagcac

SEQ ID NO: 96546 - DNA, 22 bp, Artificial Sequence
  Synthetic oligonucleotide; TTT chr11 5299389 5299410 5299406 5299411 +
gtatgttagcacaatgtgcatt

SEQ ID NO: 96547 - DNA, 22 bp, Artificial Sequence
  Synthetic oligonucleotide; TTG chr11 5299390 5299411 5299407 5299412 +
tatgttagcacaatgtgcattt

SEQ ID NO: 96548 - DNA, 22 bp, Artificial Sequence
  Synthetic oligonucleotide; TTA chr11 5299397 5299418 5299414 5299419 +
gcacaatgtgcattttagacca

SEQ ID NO: 96549 - DNA, 22 bp, Artificial Sequence
  Synthetic oligonucleotide; TTT chr11 5299412 5299433 5299429 5299434 +
tagaccaaacaacaaaggcaac

SEQ ID NO: 96550 - DNA, 22 bp, Artificial Sequence
  Synthetic oligonucleotide; TTT chr11 5299413 5299434 5299430 5299435 +
agaccaaacaacaaaggcaacc

SEQ ID NO: 96551 - DNA, 22 bp, Artificial Sequence
  Synthetic oligonucleotide; TTA chr11 5299414 5299435 5299431 5299436 +
gaccaaacaacaaaggcaacca

SEQ ID NO: 96552 - DNA, 22 bp, Artificial Sequence
  Synthetic oligonucleotide; TTT chr11 5299449 5299470 5299466 5299471 +
ctaaatagaataaactctgtat

SEQ ID NO: 96553 - DNA, 22 bp, Artificial Sequence
  Synthetic oligonucleotide; TTC chr11 5299450 5299471 5299467 5299472 +
taaatagaataaactctgtatg

SEQ ID NO: 96554 - DNA, 22 bp, Artificial Sequence
  Synthetic oligonucleotide; CTA chr11 5299452 5299473 5299469 5299474 +
aatagaataaactctgtatgcc

SEQ ID NO: 96555 - DNA, 22 bp, Artificial Sequence
  Synthetic oligonucleotide; CTC chr11 5299466 5299487 5299483 5299488 +
tgtatgccaactttggaaaaac

SEQ ID NO: 96556 - DNA, 22 bp, Artificial Sequence
  Synthetic oligonucleotide; CTG chr11 5299468 5299489 5299485 5299490 +
tatgccaactttggaaaaacaa

SEQ ID NO: 96557 - DNA, 22 bp, Artificial Sequence
  Synthetic oligonucleotide; CTT chr11 5299479 5299500 5299496 5299501 +
tggaaaaacaaataaataaatt

SEQ ID NO: 96558 - DNA, 22 bp, Artificial Sequence
  Synthetic oligonucleotide; TTT chr11 5299480 5299501 5299497 5299502 +
ggaaaaacaaataaataaattt

SEQ ID NO: 96559 - DNA, 22 bp, Artificial Sequence
  Synthetic oligonucleotide; TTG chr11 5299481 5299502 5299498 5299503 +
gaaaaacaaataaataaatttt

SEQ ID NO: 96560 - DNA, 22 bp, Artificial Sequence
  Synthetic oligonucleotide; TTT chr11 5299502 5299523 5299519 5299524 +
tacacagagaataacaactaaa

SEQ ID NO: 96561 - DNA, 22 bp, Artificial Sequence
  Synthetic oligonucleotide; TTT chr11 5299503 5299524 5299520 5299525 +
acacagagaataacaactaaaa

SEQ ID NO: 96562 - DNA, 22 bp, Artificial Sequence
  Synthetic oligonucleotide; TTA chr11 5299504 5299525 5299521 5299526 +
cacagagaataacaactaaaat

SEQ ID NO: 96563 - DNA, 22 bp, Artificial Sequence
  Synthetic oligonucleotide; CTA chr11 5299522 5299543 5299539 5299544 +
aaatgacaatgaataaaccccc

SEQ ID NO: 96564 - DNA, 22 bp, Artificial Sequence
  Synthetic oligonucleotide; CTA chr11 5299553 5299574 5299570 5299575 +
ctttcaaagaactctcacaaac

SEQ ID NO: 96565 - DNA, 22 bp, Artificial Sequence
  Synthetic oligonucleotide; CTT chr11 5299556 5299577 5299573 5299578 +
tcaaagaactctcacaaacaat

SEQ ID NO: 96566 - DNA, 22 bp, Artificial Sequence
  Synthetic oligonucleotide; TTT chr11 5299557 5299578 5299574 5299579 +
caaagaactctcacaaacaatt

SEQ ID NO: 96567 - DNA, 22 bp, Artificial Sequence
  Synthetic oligonucleotide; TTC chr11 5299558 5299579 5299575 5299580 +
aaagaactctcacaaacaattc

SEQ ID NO: 96568 - DNA, 22 bp, Artificial Sequence
  Synthetic oligonucleotide; CTC chr11 5299567 5299588 5299584 5299589 +
tcacaaacaattcgcacaataa

SEQ ID NO: 96569 - DNA, 22 bp, Artificial Sequence
  Synthetic oligonucleotide; CTC chr11 5299569 5299590 5299586 5299591 +
acaaacaattcgcacaataact

SEQ ID NO: 96570 - DNA, 22 bp, Artificial Sequence
  Synthetic oligonucleotide; TTC chr11 5299580 5299601 5299597 5299602 +
gcacaataactgaatccttcag

SEQ ID NO: 96571 - DNA, 22 bp, Artificial Sequence
  Synthetic oligonucleotide; CTG chr11 5299592 5299613 5299609 5299614 +
aatccttcaggagtagtcattt

SEQ ID NO: 96572 - DNA, 22 bp, Artificial Sequence
  Synthetic oligonucleotide; CTT chr11 5299599 5299620 5299616 5299621 +
caggagtagtcatttattagtt

SEQ ID NO: 96573 - DNA, 22 bp, Artificial Sequence
  Synthetic oligonucleotide; TTC chr11 5299600 5299621 5299617 5299622 +
aggagtagtcatttattagttt

SEQ ID NO: 96574 - DNA, 22 bp, Artificial Sequence
  Synthetic oligonucleotide; TTT chr11 5299614 5299635 5299631 5299636 +
attagtttttatttttcctgca

SEQ ID NO: 96575 - DNA, 22 bp, Artificial Sequence
  Synthetic oligonucleotide; TTA chr11 5299615 5299636 5299632 5299637 +
ttagtttttatttttcctgcat

SEQ ID NO: 96576 - DNA, 22 bp, Artificial Sequence
  Synthetic oligonucleotide; TTA chr11 5299618 5299639 5299635 5299640 +
gtttttatttttcctgcatcca

SEQ ID NO: 96577 - DNA, 22 bp, Artificial Sequence
  Synthetic oligonucleotide; TTT chr11 5299622 5299643 5299639 5299644 +
ttatttttcctgcatccaaatg

SEQ ID NO: 96578 - DNA, 22 bp, Artificial Sequence
  Synthetic oligonucleotide; TTT chr11 5299623 5299644 5299640 5299645 +
tatttttcctgcatccaaatgg

SEQ ID NO: 96579 - DNA, 22 bp, Artificial Sequence
  Synthetic oligonucleotide; TTT chr11 5299624 5299645 5299641 5299646 +
atttttcctgcatccaaatggg

SEQ ID NO: 96580 - DNA, 22 bp, Artificial Sequence
  Synthetic oligonucleotide; TTA chr11 5299625 5299646 5299642 5299647 +
tttttcctgcatccaaatgggc

SEQ ID NO: 96581 - DNA, 22 bp, Artificial Sequence
  Synthetic oligonucleotide; TTT chr11 5299628 5299649 5299645 5299650 +
ttcctgcatccaaatgggcctt

SEQ ID NO: 96582 - DNA, 22 bp, Artificial Sequence
  Synthetic oligonucleotide; TTT chr11 5299629 5299650 5299646 5299651 +
tcctgcatccaaatgggccttc

SEQ ID NO: 96583 - DNA, 22 bp, Artificial Sequence
  Synthetic oligonucleotide; TTT chr11 5299630 5299651 5299647 5299652 +
cctgcatccaaatgggccttct

SEQ ID NO: 96584 - DNA, 22 bp, Artificial Sequence
  Synthetic oligonucleotide; TTC chr11 5299631 5299652 5299648 5299653 +
ctgcatccaaatgggccttcta

SEQ ID NO: 96585 - DNA, 22 bp, Artificial Sequence
  Synthetic oligonucleotide; CTG chr11 5299634 5299655 5299651 5299656 +
catccaaatgggccttctaatt

SEQ ID NO: 96586 - DNA, 22 bp, Artificial Sequence
  Synthetic oligonucleotide; CTT chr11 5299650 5299671 5299667 5299672 +
ctaatttggagaaatactgcat

SEQ ID NO: 96587 - DNA, 22 bp, Artificial Sequence
  Synthetic oligonucleotide; TTC chr11 5299651 5299672 5299668 5299673 +
taatttggagaaatactgcatt

SEQ ID NO: 96588 - DNA, 22 bp, Artificial Sequence
  Synthetic oligonucleotide; CTA chr11 5299653 5299674 5299670 5299675 +
atttggagaaatactgcattat

SEQ ID NO: 96589 - DNA, 22 bp, Artificial Sequence
  Synthetic oligonucleotide; TTT chr11 5299657 5299678 5299674 5299679 +
ggagaaatactgcattatttag

SEQ ID NO: 96590 - DNA, 22 bp, Artificial Sequence
  Synthetic oligonucleotide; TTG chr11 5299658 5299679 5299675 5299680 +
gagaaatactgcattatttagc

SEQ ID NO: 96591 - DNA, 22 bp, Artificial Sequence
  Synthetic oligonucleotide; CTG chr11 5299669 5299690 5299686 5299691 +
cattatttagctttagttttca

SEQ ID NO: 96592 - DNA, 22 bp, Artificial Sequence
  Synthetic oligonucleotide; TTA chr11 5299674 5299695 5299691 5299696 +
tttagctttagttttcagtaag

SEQ ID NO: 96593 - DNA, 22 bp, Artificial Sequence
  Synthetic oligonucleotide; TTT chr11 5299677 5299698 5299694 5299699 +
agctttagttttcagtaagtat

SEQ ID NO: 96594 - DNA, 22 bp, Artificial Sequence
  Synthetic oligonucleotide; TTA chr11 5299678 5299699 5299695 5299700 +
gctttagttttcagtaagtatt

SEQ ID NO: 96595 - DNA, 22 bp, Artificial Sequence
  Synthetic oligonucleotide; CTT chr11 5299682 5299703 5299699 5299704 +
tagttttcagtaagtattttct

SEQ ID NO: 96596 - DNA, 22 bp, Artificial Sequence
  Synthetic oligonucleotide; TTT chr11 5299683 5299704 5299700 5299705 +
agttttcagtaagtattttctt

SEQ ID NO: 96597 - DNA, 22 bp, Artificial Sequence
  Synthetic oligonucleotide; TTA chr11 5299684 5299705 5299701 5299706 +
gttttcagtaagtattttctta

SEQ ID NO: 96598 - DNA, 22 bp, Artificial Sequence
  Synthetic oligonucleotide; TTT chr11 5299688 5299709 5299705 5299710 +
tcagtaagtattttcttatcaa

SEQ ID NO: 96599 - DNA, 22 bp, Artificial Sequence
  Synthetic oligonucleotide; TTT chr11 5299689 5299710 5299706 5299711 +
cagtaagtattttcttatcaaa

SEQ ID NO: 96600 - DNA, 22 bp, Artificial Sequence
  Synthetic oligonucleotide; TTC chr11 5299690 5299711 5299707 5299712 +
agtaagtattttcttatcaaat

SEQ ID NO: 96601 - DNA, 22 bp, Artificial Sequence
  Synthetic oligonucleotide; TTT chr11 5299701 5299722 5299718 5299723 +
tcttatcaaatctctggaatat

SEQ ID NO: 96602 - DNA, 22 bp, Artificial Sequence
  Synthetic oligonucleotide; TTT chr11 5299702 5299723 5299719 5299724 +
cttatcaaatctctggaatatt

SEQ ID NO: 96603 - DNA, 22 bp, Artificial Sequence
  Synthetic oligonucleotide; TTC chr11 5299703 5299724 5299720 5299725 +
ttatcaaatctctggaatattt

SEQ ID NO: 96604 - DNA, 22 bp, Artificial Sequence
  Synthetic oligonucleotide; CTT chr11 5299705 5299726 5299722 5299727 +
atcaaatctctggaatattttc

SEQ ID NO: 96605 - DNA, 22 bp, Artificial Sequence
  Synthetic oligonucleotide; TTA chr11 5299706 5299727 5299723 5299728 +
tcaaatctctggaatattttca

SEQ ID NO: 96606 - DNA, 22 bp, Artificial Sequence
  Synthetic oligonucleotide; CTC chr11 5299715 5299736 5299732 5299737 +
tggaatattttcagagtgctca

SEQ ID NO: 96607 - DNA, 22 bp, Artificial Sequence
  Synthetic oligonucleotide; CTG chr11 5299717 5299738 5299734 5299739 +
gaatattttcagagtgctcact

SEQ ID NO: 96608 - DNA, 22 bp, Artificial Sequence
  Synthetic oligonucleotide; TTT chr11 5299725 5299746 5299742 5299747 +
tcagagtgctcactgtccagat

SEQ ID NO: 96609 - DNA, 22 bp, Artificial Sequence
  Synthetic oligonucleotide; TTT chr11 5299726 5299747 5299743 5299748 +
cagagtgctcactgtccagatg

SEQ ID NO: 96610 - DNA, 22 bp, Artificial Sequence
  Synthetic oligonucleotide; TTC chr11 5299727 5299748 5299744 5299749 +
agagtgctcactgtccagatgt

SEQ ID NO: 96611 - DNA, 22 bp, Artificial Sequence
  Synthetic oligonucleotide; CTC chr11 5299736 5299757 5299753 5299758 +
actgtccagatgtaaaataaat

SEQ ID NO: 96612 - DNA, 22 bp, Artificial Sequence
  Synthetic oligonucleotide; CTG chr11 5299740 5299761 5299757 5299762 +
tccagatgtaaaataaatatga

SEQ ID NO: 96613 - DNA, 22 bp, Artificial Sequence
  Synthetic oligonucleotide; TTT chr11 5299769 5299790 5299786 5299791 +
cttaagtgaagcagagagaatt

SEQ ID NO: 96614 - DNA, 22 bp, Artificial Sequence
  Synthetic oligonucleotide; TTC chr11 5299770 5299791 5299787 5299792 +
ttaagtgaagcagagagaattt

SEQ ID NO: 96615 - DNA, 22 bp, Artificial Sequence
  Synthetic oligonucleotide; CTT chr11 5299772 5299793 5299789 5299794 +
aagtgaagcagagagaatttag

SEQ ID NO: 96616 - DNA, 22 bp, Artificial Sequence
  Synthetic oligonucleotide; TTA chr11 5299773 5299794 5299790 5299795 +
agtgaagcagagagaatttaga

SEQ ID NO: 96617 - DNA, 22 bp, Artificial Sequence
  Synthetic oligonucleotide; TTT chr11 5299792 5299813 5299809 5299814 +
agaatggaataattatatactg

SEQ ID NO: 96618 - DNA, 22 bp, Artificial Sequence
  Synthetic oligonucleotide; TTA chr11 5299793 5299814 5299810 5299815 +
gaatggaataattatatactgg

SEQ ID NO: 96619 - DNA, 22 bp, Artificial Sequence
  Synthetic oligonucleotide; TTA chr11 5299807 5299828 5299824 5299829 +
tatactgggttctgaacatgga

SEQ ID NO: 96620 - DNA, 22 bp, Artificial Sequence
  Synthetic oligonucleotide; CTG chr11 5299814 5299835 5299831 5299836 +
ggttctgaacatggactttcaa

SEQ ID NO: 96621 - DNA, 22 bp, Artificial Sequence
  Synthetic oligonucleotide; TTC chr11 5299819 5299840 5299836 5299841 +
tgaacatggactttcaatcaga

SEQ ID NO: 96622 - DNA, 22 bp, Artificial Sequence
  Synthetic oligonucleotide; CTG chr11 5299821 5299842 5299838 5299843 +
aacatggactttcaatcagaaa

SEQ ID NO: 96623 - DNA, 22 bp, Artificial Sequence
  Synthetic oligonucleotide; CTT chr11 5299832 5299853 5299849 5299854 +
tcaatcagaaaagaaaatatta

SEQ ID NO: 96624 - DNA, 22 bp, Artificial Sequence
  Synthetic oligonucleotide; TTT chr11 5299833 5299854 5299850 5299855 +
caatcagaaaagaaaatattag

SEQ ID NO: 96625 - DNA, 22 bp, Artificial Sequence
  Synthetic oligonucleotide; TTC chr11 5299834 5299855 5299851 5299856 +
aatcagaaaagaaaatattaga

SEQ ID NO: 96626 - DNA, 22 bp, Artificial Sequence
  Synthetic oligonucleotide; TTA chr11 5299854 5299875 5299871 5299876 +
gaagcaagctcaacgagaactt

SEQ ID NO: 96627 - DNA, 22 bp, Artificial Sequence
  Synthetic oligonucleotide; CTC chr11 5299865 5299886 5299882 5299887 +
aacgagaacttaaaaattggaa

SEQ ID NO: 96628 - DNA, 22 bp, Artificial Sequence
  Synthetic oligonucleotide; CTT chr11 5299876 5299897 5299893 5299898 +
aaaaattggaagaaacagcagt

SEQ ID NO: 96629 - DNA, 22 bp, Artificial Sequence
  Synthetic oligonucleotide; TTA chr11 5299877 5299898 5299894 5299899 +
aaaattggaagaaacagcagtc

SEQ ID NO: 96630 - DNA, 22 bp, Artificial Sequence
  Synthetic oligonucleotide; TTG chr11 5299884 5299905 5299901 5299906 +
gaagaaacagcagtcttcagag

SEQ ID NO: 96631 - DNA, 22 bp, Artificial Sequence
  Synthetic oligonucleotide; CTT chr11 5299901 5299922 5299918 5299923 +
cagagaggaatgaatgcaactt

SEQ ID NO: 96632 - DNA, 22 bp, Artificial Sequence
  Synthetic oligonucleotide; TTC chr11 5299902 5299923 5299919 5299924 +
agagaggaatgaatgcaacttt

SEQ ID NO: 96633 - DNA, 22 bp, Artificial Sequence
  Synthetic oligonucleotide; CTT chr11 5299923 5299944 5299940 5299945 +
ttgagattagtttcctataagg

SEQ ID NO: 96634 - DNA, 22 bp, Artificial Sequence
  Synthetic oligonucleotide; TTT chr11 5299924 5299945 5299941 5299946 +
tgagattagtttcctataagga

SEQ ID NO: 96635 - DNA, 22 bp, Artificial Sequence
  Synthetic oligonucleotide; TTT chr11 5299925 5299946 5299942 5299947 +
gagattagtttcctataaggag

SEQ ID NO: 96636 - DNA, 22 bp, Artificial Sequence
  Synthetic oligonucleotide; TTG chr11 5299926 5299947 5299943 5299948 +
agattagtttcctataaggaga

SEQ ID NO: 96637 - DNA, 22 bp, Artificial Sequence
  Synthetic oligonucleotide; TTA chr11 5299932 5299953 5299949 5299954 +
gtttcctataaggagatcagct

SEQ ID NO: 96638 - DNA, 22 bp, Artificial Sequence
  Synthetic oligonucleotide; TTT chr11 5299936 5299957 5299953 5299958 +
cctataaggagatcagctgcaa

SEQ ID NO: 96639 - DNA, 22 bp, Artificial Sequence
  Synthetic oligonucleotide; TTC chr11 5299937 5299958 5299954 5299959 +
ctataaggagatcagctgcaaa

SEQ ID NO: 96640 - DNA, 22 bp, Artificial Sequence
  Synthetic oligonucleotide; CTA chr11 5299940 5299961 5299957 5299962 +
taaggagatcagctgcaaatac

SEQ ID NO: 96641 - DNA, 22 bp, Artificial Sequence
  Synthetic oligonucleotide; CTG chr11 5299955 5299976 5299972 5299977 +
caaatactagcgcagaactagc

SEQ ID NO: 96642 - DNA, 22 bp, Artificial Sequence
  Synthetic oligonucleotide; CTA chr11 5299964 5299985 5299981 5299986 +
gcgcagaactagcagtagatga

SEQ ID NO: 96643 - DNA, 22 bp, Artificial Sequence
  Synthetic oligonucleotide; CTA chr11 5299975 5299996 5299992 5299997 +
gcagtagatgaagaaattgtca

SEQ ID NO: 96644 - DNA, 22 bp, Artificial Sequence
  Synthetic oligonucleotide; TTG chr11 5299994 5300015 5300011 5300016 +
tcatcccctgttacactaatag

SEQ ID NO: 96645 - DNA, 22 bp, Artificial Sequence
  Synthetic oligonucleotide; CTG chr11 5300004 5300025 5300021 5300026 +
ttacactaatagcaagtggtag

SEQ ID NO: 96646 - DNA, 22 bp, Artificial Sequence
  Synthetic oligonucleotide; TTA chr11 5300007 5300028 5300024 5300029 +
cactaatagcaagtggtagact

SEQ ID NO: 96647 - DNA, 22 bp, Artificial Sequence
  Synthetic oligonucleotide; CTA chr11 5300012 5300033 5300029 5300034 +
atagcaagtggtagactgcggt

SEQ ID NO: 96648 - DNA, 22 bp, Artificial Sequence
  Synthetic oligonucleotide; CTG chr11 5300030 5300051 5300047 5300052 +
cggttcagacccaatgaacagc

SEQ ID NO: 96649 - DNA, 22 bp, Artificial Sequence
  Synthetic oligonucleotide; TTC chr11 5300036 5300057 5300053 5300058 +
agacccaatgaacagcataaag

SEQ ID NO: 96650 - DNA, 22 bp, Artificial Sequence
  Synthetic oligonucleotide; CTT chr11 5300062 5300083 5300079 5300084 +
acaaacactttgaagaagattg

SEQ ID NO: 96651 - DNA, 22 bp, Artificial Sequence
  Synthetic oligonucleotide; TTA chr11 5300063 5300084 5300080 5300085 +
caaacactttgaagaagattga

SEQ ID NO: 96652 - DNA, 22 bp, Artificial Sequence
  Synthetic oligonucleotide; CTT chr11 5300072 5300093 5300089 5300094 +
tgaagaagattgaaggaagaaa

SEQ ID NO: 96653 - DNA, 22 bp, Artificial Sequence
  Synthetic oligonucleotide; TTT chr11 5300073 5300094 5300090 5300095 +
gaagaagattgaaggaagaaac

SEQ ID NO: 96654 - DNA, 22 bp, Artificial Sequence
  Synthetic oligonucleotide; TTG chr11 5300074 5300095 5300091 5300096 +
aagaagattgaaggaagaaact

SEQ ID NO: 96655 - DNA, 22 bp, Artificial Sequence
  Synthetic oligonucleotide; TTG chr11 5300084 5300105 5300101 5300106 +
aaggaagaaactattccatcag

SEQ ID NO: 96656 - DNA, 22 bp, Artificial Sequence
  Synthetic oligonucleotide; CTA chr11 5300097 5300118 5300114 5300119 +
ttccatcagtgaaaaatttcta

SEQ ID NO: 96657 - DNA, 22 bp, Artificial Sequence
  Synthetic oligonucleotide; TTC chr11 5300100 5300121 5300117 5300122 +
catcagtgaaaaatttctaaaa

SEQ ID NO: 96658 - DNA, 22 bp, Artificial Sequence
  Synthetic oligonucleotide; TTT chr11 5300116 5300137 5300133 5300138 +
ctaaaatataacattacctttg

SEQ ID NO: 96659 - DNA, 22 bp, Artificial Sequence
  Synthetic oligonucleotide; TTC chr11 5300117 5300138 5300134 5300139 +
taaaatataacattacctttgc

SEQ ID NO: 96660 - DNA, 22 bp, Artificial Sequence
  Synthetic oligonucleotide; CTA chr11 5300119 5300140 5300136 5300141 +
aaatataacattacctttgcca

SEQ ID NO: 96661 - DNA, 22 bp, Artificial Sequence
  Synthetic oligonucleotide; TTA chr11 5300132 5300153 5300149 5300154 +
cctttgccaagtttttgcatta

SEQ ID NO: 96662 - DNA, 22 bp, Artificial Sequence
  Synthetic oligonucleotide; CTT chr11 5300136 5300157 5300153 5300158 +
tgccaagtttttgcattaatta

SEQ ID NO: 96663 - DNA, 22 bp, Artificial Sequence
  Synthetic oligonucleotide; TTT chr11 5300137 5300158 5300154 5300159 +
gccaagtttttgcattaattat

SEQ ID NO: 96664 - DNA, 22 bp, Artificial Sequence
  Synthetic oligonucleotide; TTG chr11 5300138 5300159 5300155 5300160 +
ccaagtttttgcattaattatc

SEQ ID NO: 96665 - DNA, 22 bp, Artificial Sequence
  Synthetic oligonucleotide; TTT chr11 5300146 5300167 5300163 5300168 +
ttgcattaattatcaaaactat

SEQ ID NO: 96666 - DNA, 22 bp, Artificial Sequence
  Synthetic oligonucleotide; TTT chr11 5300147 5300168 5300164 5300169 +
tgcattaattatcaaaactatt

SEQ ID NO: 96667 - DNA, 22 bp, Artificial Sequence
  Synthetic oligonucleotide; TTT chr11 5300148 5300169 5300165 5300170 +
gcattaattatcaaaactattt

SEQ ID NO: 96668 - DNA, 22 bp, Artificial Sequence
  Synthetic oligonucleotide; TTG chr11 5300149 5300170 5300166 5300171 +
cattaattatcaaaactatttc

SEQ ID NO: 96669 - DNA, 22 bp, Artificial Sequence
  Synthetic oligonucleotide; TTA chr11 5300154 5300175 5300171 5300176 +
attatcaaaactatttcatgaa

SEQ ID NO: 96670 - DNA, 22 bp, Artificial Sequence
  Synthetic oligonucleotide; TTA chr11 5300158 5300179 5300175 5300180 +
tcaaaactatttcatgaagtga

SEQ ID NO: 96671 - DNA, 22 bp, Artificial Sequence
  Synthetic oligonucleotide; CTA chr11 5300167 5300188 5300184 5300189 +
tttcatgaagtgaaaaagtctc

SEQ ID NO: 96672 - DNA, 22 bp, Artificial Sequence
  Synthetic oligonucleotide; TTT chr11 5300170 5300191 5300187 5300192 +
catgaagtgaaaaagtctcgag

SEQ ID NO: 96673 - DNA, 22 bp, Artificial Sequence
  Synthetic oligonucleotide; TTC chr11 5300171 5300192 5300188 5300193 +
atgaagtgaaaaagtctcgaga

SEQ ID NO: 96674 - DNA, 22 bp, Artificial Sequence
  Synthetic oligonucleotide; CTC chr11 5300189 5300210 5300206 5300211 +
gagattttttatgtgagaagca

SEQ ID NO: 96675 - DNA, 22 bp, Artificial Sequence
  Synthetic oligonucleotide; TTT chr11 5300196 5300217 5300213 5300218 +
tttatgtgagaagcaagagggg

SEQ ID NO: 96676 - DNA, 22 bp, Artificial Sequence
  Synthetic oligonucleotide; TTT chr11 5300197 5300218 5300214 5300219 +
ttatgtgagaagcaagagggga

SEQ ID NO: 96677 - DNA, 22 bp, Artificial Sequence
  Synthetic oligonucleotide; TTT chr11 5300198 5300219 5300215 5300220 +
tatgtgagaagcaagaggggaa

SEQ ID NO: 96678 - DNA, 22 bp, Artificial Sequence
  Synthetic oligonucleotide; TTT chr11 5300199 5300220 5300216 5300221 +
atgtgagaagcaagaggggaaa

SEQ ID NO: 96679 - DNA, 22 bp, Artificial Sequence
  Synthetic oligonucleotide; TTA chr11 5300200 5300221 5300217 5300222 +
tgtgagaagcaagaggggaaat

SEQ ID NO: 96680 - DNA, 22 bp, Artificial Sequence
  Synthetic oligonucleotide; CTA chr11 5300243 5300264 5300260 5300265 +
aatttatagttggttatttttt

SEQ ID NO: 96681 - DNA, 22 bp, Artificial Sequence
  Synthetic oligonucleotide; TTT chr11 5300248 5300269 5300265 5300270 +
atagttggttatttttttcaga

SEQ ID NO: 96682 - DNA, 22 bp, Artificial Sequence
  Synthetic oligonucleotide; TTA chr11 5300249 5300270 5300266 5300271 +
tagttggttatttttttcagaa

SEQ ID NO: 96683 - DNA, 22 bp, Artificial Sequence
  Synthetic oligonucleotide; TTG chr11 5300255 5300276 5300272 5300277 +
gttatttttttcagaagaaaaa

SEQ ID NO: 96684 - DNA, 22 bp, Artificial Sequence
  Synthetic oligonucleotide; TTA chr11 5300259 5300280 5300276 5300281 +
tttttttcagaagaaaaatgtc

SEQ ID NO: 96685 - DNA, 22 bp, Artificial Sequence
  Synthetic oligonucleotide; TTT chr11 5300262 5300283 5300279 5300284 +
ttttcagaagaaaaatgtcagg

SEQ ID NO: 96686 - DNA, 22 bp, Artificial Sequence
  Synthetic oligonucleotide; TTT chr11 5300263 5300284 5300280 5300285 +
tttcagaagaaaaatgtcagga

SEQ ID NO: 96687 - DNA, 22 bp, Artificial Sequence
  Synthetic oligonucleotide; TTT chr11 5300264 5300285 5300281 5300286 +
ttcagaagaaaaatgtcaggag

SEQ ID NO: 96688 - DNA, 22 bp, Artificial Sequence
  Synthetic oligonucleotide; TTT chr11 5300265 5300286 5300282 5300287 +
tcagaagaaaaatgtcaggaga

SEQ ID NO: 96689 - DNA, 22 bp, Artificial Sequence
  Synthetic oligonucleotide; TTT chr11 5300266 5300287 5300283 5300288 +
cagaagaaaaatgtcaggagac

SEQ ID NO: 96690 - DNA, 22 bp, Artificial Sequence
  Synthetic oligonucleotide; TTC chr11 5300267 5300288 5300284 5300289 +
agaagaaaaatgtcaggagaca

SEQ ID NO: 96691 - DNA, 22 bp, Artificial Sequence
  Synthetic oligonucleotide; CTG chr11 5300302 5300323 5300319 5300324 +
gaaagaagaaaaagtattaagt

SEQ ID NO: 96692 - DNA, 22 bp, Artificial Sequence
  Synthetic oligonucleotide; TTA chr11 5300321 5300342 5300338 5300343 +
agttagtttcagcagacaatgg

SEQ ID NO: 96693 - DNA, 22 bp, Artificial Sequence
  Synthetic oligonucleotide; TTA chr11 5300326 5300347 5300343 5300348 +
gtttcagcagacaatgggaaga

SEQ ID NO: 96694 - DNA, 22 bp, Artificial Sequence
  Synthetic oligonucleotide; TTT chr11 5300330 5300351 5300347 5300352 +
cagcagacaatgggaagaagga

SEQ ID NO: 96695 - DNA, 22 bp, Artificial Sequence
  Synthetic oligonucleotide; TTC chr11 5300331 5300352 5300348 5300353 +
agcagacaatgggaagaaggaa

SEQ ID NO: 96696 - DNA, 22 bp, Artificial Sequence
  Synthetic oligonucleotide; CTG chr11 5300363 5300384 5300380 5300385 +
ggatatctggcttccacgagat

SEQ ID NO: 96697 - DNA, 22 bp, Artificial Sequence
  Synthetic oligonucleotide; CTG chr11 5300372 5300393 5300389 5300394 +
gcttccacgagatgataagaaa

SEQ ID NO: 96698 - DNA, 22 bp, Artificial Sequence
  Synthetic oligonucleotide; CTT chr11 5300376 5300397 5300393 5300398 +
ccacgagatgataagaaatgtg

SEQ ID NO: 96699 - DNA, 22 bp, Artificial Sequence
  Synthetic oligonucleotide; TTC chr11 5300377 5300398 5300394 5300399 +
cacgagatgataagaaatgtgt

SEQ ID NO: 96700 - DNA, 22 bp, Artificial Sequence
  Synthetic oligonucleotide; TTT chr11 5300401 5300422 5300418 5300423 +
gctgctatttagctgttagtct

SEQ ID NO: 96701 - DNA, 22 bp, Artificial Sequence
  Synthetic oligonucleotide; TTG chr11 5300402 5300423 5300419 5300424 +
ctgctatttagctgttagtctg

SEQ ID NO: 96702 - DNA, 22 bp, Artificial Sequence
  Synthetic oligonucleotide; CTG chr11 5300405 5300426 5300422 5300427 +
ctatttagctgttagtctgtat

SEQ ID NO: 96703 - DNA, 22 bp, Artificial Sequence
  Synthetic oligonucleotide; CTA chr11 5300408 5300429 5300425 5300430 +
tttagctgttagtctgtatcac

SEQ ID NO: 96704 - DNA, 22 bp, Artificial Sequence
  Synthetic oligonucleotide; TTT chr11 5300411 5300432 5300428 5300433 +
agctgttagtctgtatcacacg

SEQ ID NO: 96705 - DNA, 22 bp, Artificial Sequence
  Synthetic oligonucleotide; TTA chr11 5300412 5300433 5300429 5300434 +
gctgttagtctgtatcacacgc

SEQ ID NO: 96706 - DNA, 22 bp, Artificial Sequence
  Synthetic oligonucleotide; CTG chr11 5300416 5300437 5300433 5300438 +
ttagtctgtatcacacgccttt

SEQ ID NO: 96707 - DNA, 22 bp, Artificial Sequence
  Synthetic oligonucleotide; TTA chr11 5300419 5300440 5300436 5300441 +
gtctgtatcacacgccttttag

SEQ ID NO: 96708 - DNA, 22 bp, Artificial Sequence
  Synthetic oligonucleotide; CTG chr11 5300424 5300445 5300441 5300446 +
tatcacacgccttttagtagta

SEQ ID NO: 96709 - DNA, 22 bp, Artificial Sequence
  Synthetic oligonucleotide; CTT chr11 5300437 5300458 5300454 5300459 +
ttagtagtaaaatatgccagtc

SEQ ID NO: 96710 - DNA, 22 bp, Artificial Sequence
  Synthetic oligonucleotide; TTT chr11 5300438 5300459 5300455 5300460 +
tagtagtaaaatatgccagtct

SEQ ID NO: 96711 - DNA, 22 bp, Artificial Sequence
  Synthetic oligonucleotide; TTT chr11 5300439 5300460 5300456 5300461 +
agtagtaaaatatgccagtcta

SEQ ID NO: 96712 - DNA, 22 bp, Artificial Sequence
  Synthetic oligonucleotide; TTA chr11 5300440 5300461 5300457 5300462 +
gtagtaaaatatgccagtctac

SEQ ID NO: 96713 - DNA, 22 bp, Artificial Sequence
  Synthetic oligonucleotide; CTA chr11 5300461 5300482 5300478 5300483 +
ctaagggaaattacatttcatg

SEQ ID NO: 96714 - DNA, 22 bp, Artificial Sequence
  Synthetic oligonucleotide; CTA chr11 5300464 5300485 5300481 5300486 +
agggaaattacatttcatgagt

SEQ ID NO: 96715 - DNA, 22 bp, Artificial Sequence
  Synthetic oligonucleotide; TTA chr11 5300474 5300495 5300491 5300496 +
catttcatgagtaagcttccta

SEQ ID NO: 96716 - DNA, 22 bp, Artificial Sequence
  Synthetic oligonucleotide; TTT chr11 5300479 5300500 5300496 5300501 +
catgagtaagcttcctaaagtt

SEQ ID NO: 96717 - DNA, 22 bp, Artificial Sequence
  Synthetic oligonucleotide; TTC chr11 5300480 5300501 5300497 5300502 +
atgagtaagcttcctaaagttc

SEQ ID NO: 96718 - DNA, 22 bp, Artificial Sequence
  Synthetic oligonucleotide; CTT chr11 5300492 5300513 5300509 5300514 +
cctaaagttctagatatttgct

SEQ ID NO: 96719 - DNA, 22 bp, Artificial Sequence
  Synthetic oligonucleotide; TTC chr11 5300493 5300514 5300510 5300515 +
ctaaagttctagatatttgctg

SEQ ID NO: 96720 - DNA, 22 bp, Artificial Sequence
  Synthetic oligonucleotide; CTA chr11 5300496 5300517 5300513 5300518 +
aagttctagatatttgctgttt

SEQ ID NO: 96721 - DNA, 22 bp, Artificial Sequence
  Synthetic oligonucleotide; TTC chr11 5300502 5300523 5300519 5300524 +
tagatatttgctgtttagcctc

SEQ ID NO: 96722 - DNA, 22 bp, Artificial Sequence
  Synthetic oligonucleotide; CTA chr11 5300504 5300525 5300521 5300526 +
gatatttgctgtttagcctcac

SEQ ID NO: 96723 - DNA, 22 bp, Artificial Sequence
  Synthetic oligonucleotide; TTT chr11 5300511 5300532 5300528 5300533 +
gctgtttagcctcacacaagtt

SEQ ID NO: 96724 - DNA, 22 bp, Artificial Sequence
  Synthetic oligonucleotide; TTG chr11 5300512 5300533 5300529 5300534 +
ctgtttagcctcacacaagttt

SEQ ID NO: 96725 - DNA, 22 bp, Artificial Sequence
  Synthetic oligonucleotide; CTG chr11 5300515 5300536 5300532 5300537 +
tttagcctcacacaagtttgct

SEQ ID NO: 96726 - DNA, 22 bp, Artificial Sequence
  Synthetic oligonucleotide; TTT chr11 5300518 5300539 5300535 5300540 +
agcctcacacaagtttgcttac

SEQ ID NO: 96727 - DNA, 22 bp, Artificial Sequence
  Synthetic oligonucleotide; TTA chr11 5300519 5300540 5300536 5300541 +
gcctcacacaagtttgcttact

SEQ ID NO: 96728 - DNA, 22 bp, Artificial Sequence
  Synthetic oligonucleotide; CTC chr11 5300524 5300545 5300541 5300546 +
acacaagtttgcttactaatca

SEQ ID NO: 96729 - DNA, 22 bp, Artificial Sequence
  Synthetic oligonucleotide; TTT chr11 5300534 5300555 5300551 5300556 +
gcttactaatcaagcaagatcc

SEQ ID NO: 96730 - DNA, 22 bp, Artificial Sequence
  Synthetic oligonucleotide; TTG chr11 5300535 5300556 5300552 5300557 +
cttactaatcaagcaagatcct

SEQ ID NO: 96731 - DNA, 22 bp, Artificial Sequence
  Synthetic oligonucleotide; CTT chr11 5300538 5300559 5300555 5300560 +
actaatcaagcaagatcctttt

SEQ ID NO: 96732 - DNA, 22 bp, Artificial Sequence
  Synthetic oligonucleotide; TTA chr11 5300539 5300560 5300556 5300561 +
ctaatcaagcaagatccttttc

SEQ ID NO: 96733 - DNA, 22 bp, Artificial Sequence
  Synthetic oligonucleotide; CTA chr11 5300542 5300563 5300559 5300564 +
atcaagcaagatccttttcaga

SEQ ID NO: 96734 - DNA, 22 bp, Artificial Sequence
  Synthetic oligonucleotide; CTT chr11 5300558 5300579 5300575 5300580 +
ttcagagtaactagtttcaaag

SEQ ID NO: 96735 - DNA, 22 bp, Artificial Sequence
  Synthetic oligonucleotide; TTT chr11 5300559 5300580 5300576 5300581 +
tcagagtaactagtttcaaagt

SEQ ID NO: 96736 - DNA, 22 bp, Artificial Sequence
  Synthetic oligonucleotide; TTT chr11 5300560 5300581 5300577 5300582 +
cagagtaactagtttcaaagta

SEQ ID NO: 96737 - DNA, 22 bp, Artificial Sequence
  Synthetic oligonucleotide; TTC chr11 5300561 5300582 5300578 5300583 +
agagtaactagtttcaaagtat

SEQ ID NO: 96738 - DNA, 22 bp, Artificial Sequence
  Synthetic oligonucleotide; CTA chr11 5300571 5300592 5300588 5300593 +
gtttcaaagtatggagatgaaa

SEQ ID NO: 96739 - DNA, 22 bp, Artificial Sequence
  Synthetic oligonucleotide; TTT chr11 5300575 5300596 5300592 5300597 +
caaagtatggagatgaaaatat

SEQ ID NO: 96740 - DNA, 22 bp, Artificial Sequence
  Synthetic oligonucleotide; TTC chr11 5300576 5300597 5300593 5300598 +
aaagtatggagatgaaaatatg

SEQ ID NO: 96741 - DNA, 22 bp, Artificial Sequence
  Synthetic oligonucleotide; TTA chr11 5300609 5300630 5300626 5300631 +
ttcaaattcacctttataagac

SEQ ID NO: 96742 - DNA, 22 bp, Artificial Sequence
  Synthetic oligonucleotide; TTC chr11 5300612 5300633 5300629 5300634 +
aaattcacctttataagacaca

SEQ ID NO: 96743 - DNA, 22 bp, Artificial Sequence
  Synthetic oligonucleotide; TTC chr11 5300618 5300639 5300635 5300640 +
acctttataagacacataaaat

SEQ ID NO: 96744 - DNA, 22 bp, Artificial Sequence
  Synthetic oligonucleotide; CTT chr11 5300623 5300644 5300640 5300645 +
tataagacacataaaatgtacc

SEQ ID NO: 96745 - DNA, 22 bp, Artificial Sequence
  Synthetic oligonucleotide; TTT chr11 5300624 5300645 5300641 5300646 +
ataagacacataaaatgtacct

SEQ ID NO: 96746 - DNA, 22 bp, Artificial Sequence
  Synthetic oligonucleotide; TTA chr11 5300625 5300646 5300642 5300647 +
taagacacataaaatgtacctc

SEQ ID NO: 96747 - DNA, 22 bp, Artificial Sequence
  Synthetic oligonucleotide; CTC chr11 5300647 5300668 5300664 5300669 +
caactgcacatttttctttaga

SEQ ID NO: 96748 - DNA, 22 bp, Artificial Sequence
  Synthetic oligonucleotide; CTG chr11 5300653 5300674 5300670 5300675 +
cacatttttctttagatgaact

SEQ ID NO: 96749 - DNA, 22 bp, Artificial Sequence
  Synthetic oligonucleotide; TTT chr11 5300660 5300681 5300677 5300682 +
ttctttagatgaactgtatttg

SEQ ID NO: 96750 - DNA, 22 bp, Artificial Sequence
  Synthetic oligonucleotide; TTT chr11 5300661 5300682 5300678 5300683 +
tctttagatgaactgtatttga

SEQ ID NO: 96751 - DNA, 22 bp, Artificial Sequence
  Synthetic oligonucleotide; TTT chr11 5300662 5300683 5300679 5300684 +
ctttagatgaactgtatttgac

SEQ ID NO: 96752 - DNA, 22 bp, Artificial Sequence
  Synthetic oligonucleotide; TTC chr11 5300663 5300684 5300680 5300685 +
tttagatgaactgtatttgacc

SEQ ID NO: 96753 - DNA, 22 bp, Artificial Sequence
  Synthetic oligonucleotide; CTT chr11 5300665 5300686 5300682 5300687 +
tagatgaactgtatttgaccca

SEQ ID NO: 96754 - DNA, 22 bp, Artificial Sequence
  Synthetic oligonucleotide; TTT chr11 5300666 5300687 5300683 5300688 +
agatgaactgtatttgacccaa

SEQ ID NO: 96755 - DNA, 22 bp, Artificial Sequence
  Synthetic oligonucleotide; TTA chr11 5300667 5300688 5300684 5300689 +
gatgaactgtatttgacccaag

SEQ ID NO: 96756 - DNA, 22 bp, Artificial Sequence
  Synthetic oligonucleotide; CTG chr11 5300676 5300697 5300693 5300698 +
tatttgacccaagctgctttag

SEQ ID NO: 96757 - DNA, 22 bp, Artificial Sequence
  Synthetic oligonucleotide; TTT chr11 5300681 5300702 5300698 5300703 +
gacccaagctgctttagtccac

SEQ ID NO: 96758 - DNA, 22 bp, Artificial Sequence
  Synthetic oligonucleotide; TTG chr11 5300682 5300703 5300699 5300704 +
acccaagctgctttagtccact

SEQ ID NO: 96759 - DNA, 22 bp, Artificial Sequence
  Synthetic oligonucleotide; CTG chr11 5300692 5300713 5300709 5300714 +
ctttagtccacttatcttgact

SEQ ID NO: 96760 - DNA, 22 bp, Artificial Sequence
  Synthetic oligonucleotide; CTT chr11 5300695 5300716 5300712 5300717 +
tagtccacttatcttgactatt

SEQ ID NO: 96761 - DNA, 22 bp, Artificial Sequence
  Synthetic oligonucleotide; TTT chr11 5300696 5300717 5300713 5300718 +
agtccacttatcttgactattt

SEQ ID NO: 96762 - DNA, 22 bp, Artificial Sequence
  Synthetic oligonucleotide; TTA chr11 5300697 5300718 5300714 5300719 +
gtccacttatcttgactatttc

SEQ ID NO: 96763 - DNA, 22 bp, Artificial Sequence
  Synthetic oligonucleotide; CTT chr11 5300705 5300726 5300722 5300727 +
atcttgactatttctgaaatca

SEQ ID NO: 96764 - DNA, 22 bp, Artificial Sequence
  Synthetic oligonucleotide; TTA chr11 5300706 5300727 5300723 5300728 +
tcttgactatttctgaaatcat

SEQ ID NO: 96765 - DNA, 22 bp, Artificial Sequence
  Synthetic oligonucleotide; CTT chr11 5300710 5300731 5300727 5300732 +
gactatttctgaaatcatagtt

SEQ ID NO: 96766 - DNA, 22 bp, Artificial Sequence
  Synthetic oligonucleotide; TTG chr11 5300711 5300732 5300728 5300733 +
actatttctgaaatcatagtta

SEQ ID NO: 96767 - DNA, 22 bp, Artificial Sequence
  Synthetic oligonucleotide; CTA chr11 5300715 5300736 5300732 5300737 +
tttctgaaatcatagttactct

SEQ ID NO: 96768 - DNA, 22 bp, Artificial Sequence
  Synthetic oligonucleotide; TTT chr11 5300718 5300739 5300735 5300740 +
ctgaaatcatagttactcttct

SEQ ID NO: 96769 - DNA, 22 bp, Artificial Sequence
  Synthetic oligonucleotide; TTC chr11 5300719 5300740 5300736 5300741 +
tgaaatcatagttactcttctt

SEQ ID NO: 96770 - DNA, 22 bp, Artificial Sequence
  Synthetic oligonucleotide; CTG chr11 5300721 5300742 5300738 5300743 +
aaatcatagttactcttctttt

SEQ ID NO: 96771 - DNA, 22 bp, Artificial Sequence
  Synthetic oligonucleotide; TTA chr11 5300733 5300754 5300750 5300755 +
ctcttcttttggattgttatat

SEQ ID NO: 96772 - DNA, 22 bp, Artificial Sequence
  Synthetic oligonucleotide; CTC chr11 5300736 5300757 5300753 5300758 +
ttcttttggattgttatatctc

SEQ ID NO: 96773 - DNA, 22 bp, Artificial Sequence
  Synthetic oligonucleotide; CTT chr11 5300738 5300759 5300755 5300760 +
cttttggattgttatatctcct

SEQ ID NO: 96774 - DNA, 22 bp, Artificial Sequence
  Synthetic oligonucleotide; TTC chr11 5300739 5300760 5300756 5300761 +
ttttggattgttatatctcctc

SEQ ID NO: 96775 - DNA, 22 bp, Artificial Sequence
  Synthetic oligonucleotide; CTT chr11 5300741 5300762 5300758 5300763 +
ttggattgttatatctcctctg

SEQ ID NO: 96776 - DNA, 22 bp, Artificial Sequence
  Synthetic oligonucleotide; TTT chr11 5300742 5300763 5300759 5300764 +
tggattgttatatctcctctgc

SEQ ID NO: 96777 - DNA, 22 bp, Artificial Sequence
  Synthetic oligonucleotide; TTT chr11 5300743 5300764 5300760 5300765 +
ggattgttatatctcctctgct

SEQ ID NO: 96778 - DNA, 22 bp, Artificial Sequence
  Synthetic oligonucleotide; TTG chr11 5300744 5300765 5300761 5300766 +
gattgttatatctcctctgctt

SEQ ID NO: 96779 - DNA, 22 bp, Artificial Sequence
  Synthetic oligonucleotide; TTG chr11 5300749 5300770 5300766 5300771 +
ttatatctcctctgcttcctgt

SEQ ID NO: 96780 - DNA, 22 bp, Artificial Sequence
  Synthetic oligonucleotide; TTA chr11 5300752 5300773 5300769 5300774 +
tatctcctctgcttcctgtatt

SEQ ID NO: 96781 - DNA, 22 bp, Artificial Sequence
  Synthetic oligonucleotide; CTC chr11 5300758 5300779 5300775 5300780 +
ctctgcttcctgtattcttttt

SEQ ID NO: 96782 - DNA, 22 bp, Artificial Sequence
  Synthetic oligonucleotide; CTC chr11 5300761 5300782 5300778 5300783 +
tgcttcctgtattctttttctt

SEQ ID NO: 96783 - DNA, 22 bp, Artificial Sequence
  Synthetic oligonucleotide; CTG chr11 5300763 5300784 5300780 5300785 +
cttcctgtattctttttcttca

SEQ ID NO: 96784 - DNA, 22 bp, Artificial Sequence
  Synthetic oligonucleotide; CTT chr11 5300766 5300787 5300783 5300788 +
cctgtattctttttcttcagca

SEQ ID NO: 96785 - DNA, 22 bp, Artificial Sequence
  Synthetic oligonucleotide; TTC chr11 5300767 5300788 5300784 5300789 +
ctgtattctttttcttcagcat

SEQ ID NO: 96786 - DNA, 22 bp, Artificial Sequence
  Synthetic oligonucleotide; CTG chr11 5300770 5300791 5300787 5300792 +
tattctttttcttcagcatcac

SEQ ID NO: 96787 - DNA, 22 bp, Artificial Sequence
  Synthetic oligonucleotide; TTC chr11 5300775 5300796 5300792 5300797 +
tttttcttcagcatcactggca

SEQ ID NO: 96788 - DNA, 22 bp, Artificial Sequence
  Synthetic oligonucleotide; CTT chr11 5300777 5300798 5300794 5300799 +
tttcttcagcatcactggcatt

SEQ ID NO: 96789 - DNA, 22 bp, Artificial Sequence
  Synthetic oligonucleotide; TTT chr11 5300778 5300799 5300795 5300800 +
ttcttcagcatcactggcattc

SEQ ID NO: 96790 - DNA, 22 bp, Artificial Sequence
  Synthetic oligonucleotide; TTT chr11 5300779 5300800 5300796 5300801 +
tcttcagcatcactggcattcc

SEQ ID NO: 96791 - DNA, 22 bp, Artificial Sequence
  Synthetic oligonucleotide; TTT chr11 5300780 5300801 5300797 5300802 +
cttcagcatcactggcattccc

SEQ ID NO: 96792 - DNA, 22 bp, Artificial Sequence
  Synthetic oligonucleotide; TTC chr11 5300781 5300802 5300798 5300803 +
ttcagcatcactggcattccct

SEQ ID NO: 96793 - DNA, 22 bp, Artificial Sequence
  Synthetic oligonucleotide; CTT chr11 5300783 5300804 5300800 5300805 +
cagcatcactggcattccctct

SEQ ID NO: 96794 - DNA, 22 bp, Artificial Sequence
  Synthetic oligonucleotide; TTC chr11 5300784 5300805 5300801 5300806 +
agcatcactggcattccctctt

SEQ ID NO: 96795 - DNA, 22 bp, Artificial Sequence
  Synthetic oligonucleotide; CTG chr11 5300794 5300815 5300811 5300816 +
gcattccctctttattaggtga

SEQ ID NO: 96796 - DNA, 22 bp, Artificial Sequence
  Synthetic oligonucleotide; TTC chr11 5300800 5300821 5300817 5300822 +
cctctttattaggtgatatata

SEQ ID NO: 96797 - DNA, 22 bp, Artificial Sequence
  Synthetic oligonucleotide; CTC chr11 5300804 5300825 5300821 5300826 +
tttattaggtgatatatatata

SEQ ID NO: 96798 - DNA, 22 bp, Artificial Sequence
  Synthetic oligonucleotide; CTT chr11 5300806 5300827 5300823 5300828 +
tattaggtgatatatatatata

SEQ ID NO: 96799 - DNA, 22 bp, Artificial Sequence
  Synthetic oligonucleotide; TTT chr11 5300807 5300828 5300824 5300829 +
attaggtgatatatatatatat

SEQ ID NO: 96800 - DNA, 22 bp, Artificial Sequence
  Synthetic oligonucleotide; TTA chr11 5300808 5300829 5300825 5300830 +
ttaggtgatatatatatatata

SEQ ID NO: 96801 - DNA, 22 bp, Artificial Sequence
  Synthetic oligonucleotide; TTA chr11 5300811 5300832 5300828 5300833 +
ggtgatatatatatatatatat

SEQ ID NO: 96802 - DNA, 22 bp, Artificial Sequence
  Synthetic oligonucleotide; TTT chr11 5300869 5300890 5300886 5300891 +
ctcgctcacatcagctttttca

SEQ ID NO: 96803 - DNA, 22 bp, Artificial Sequence
  Synthetic oligonucleotide; TTC chr11 5300870 5300891 5300887 5300892 +
tcgctcacatcagctttttcat

SEQ ID NO: 96804 - DNA, 22 bp, Artificial Sequence
  Synthetic oligonucleotide; CTC chr11 5300872 5300893 5300889 5300894 +
gctcacatcagctttttcatgt

SEQ ID NO: 96805 - DNA, 22 bp, Artificial Sequence
  Synthetic oligonucleotide; CTC chr11 5300876 5300897 5300893 5300898 +
acatcagctttttcatgtgata

SEQ ID NO: 96806 - DNA, 22 bp, Artificial Sequence
  Synthetic oligonucleotide; CTT chr11 5300886 5300907 5300903 5300908 +
tttcatgtgataattaaaattg

SEQ ID NO: 96807 - DNA, 22 bp, Artificial Sequence
  Synthetic oligonucleotide; TTT chr11 5300887 5300908 5300904 5300909 +
ttcatgtgataattaaaattga

SEQ ID NO: 96808 - DNA, 22 bp, Artificial Sequence
  Synthetic oligonucleotide; TTT chr11 5300888 5300909 5300905 5300910 +
tcatgtgataattaaaattgaa

SEQ ID NO: 96809 - DNA, 22 bp, Artificial Sequence
  Synthetic oligonucleotide; TTT chr11 5300889 5300910 5300906 5300911 +
catgtgataattaaaattgaat

SEQ ID NO: 96810 - DNA, 22 bp, Artificial Sequence
  Synthetic oligonucleotide; TTC chr11 5300890 5300911 5300907 5300912 +
atgtgataattaaaattgaatc

SEQ ID NO: 96811 - DNA, 22 bp, Artificial Sequence
  Synthetic oligonucleotide; TTA chr11 5300902 5300923 5300919 5300924 +
aaattgaatctaactctgagga

SEQ ID NO: 96812 - DNA, 22 bp, Artificial Sequence
  Synthetic oligonucleotide; TTG chr11 5300908 5300929 5300925 5300930 +
aatctaactctgaggaaaaaaa

SEQ ID NO: 96813 - DNA, 22 bp, Artificial Sequence
  Synthetic oligonucleotide; CTA chr11 5300914 5300935 5300931 5300936 +
actctgaggaaaaaaaagtgtg

SEQ ID NO: 96814 - DNA, 22 bp, Artificial Sequence
  Synthetic oligonucleotide; CTC chr11 5300918 5300939 5300935 5300940 +
tgaggaaaaaaaagtgtggata

SEQ ID NO: 96815 - DNA, 22 bp, Artificial Sequence
  Synthetic oligonucleotide; CTG chr11 5300920 5300941 5300937 5300942 +
aggaaaaaaaagtgtggatata

SEQ ID NO: 96816 - DNA, 22 bp, Artificial Sequence
  Synthetic oligonucleotide; TTC chr11 5300954 5300975 5300971 5300976 +
cttttcagtaatgggagaggcc

SEQ ID NO: 96817 - DNA, 22 bp, Artificial Sequence
  Synthetic oligonucleotide; CTT chr11 5300957 5300978 5300974 5300979 +
ttcagtaatgggagaggcccag

SEQ ID NO: 96818 - DNA, 22 bp, Artificial Sequence
  Synthetic oligonucleotide; TTT chr11 5300958 5300979 5300975 5300980 +
tcagtaatgggagaggcccaga

SEQ ID NO: 96819 - DNA, 22 bp, Artificial Sequence
  Synthetic oligonucleotide; TTT chr11 5300959 5300980 5300976 5300981 +
cagtaatgggagaggcccagaa

SEQ ID NO: 96820 - DNA, 22 bp, Artificial Sequence
  Synthetic oligonucleotide; TTC chr11 5300960 5300981 5300977 5300982 +
agtaatgggagaggcccagaaa

SEQ ID NO: 96821 - DNA, 22 bp, Artificial Sequence
  Synthetic oligonucleotide; CTA chr11 5300987 5301008 5301004 5301009 +
gagatcttgagattctgaaata

SEQ ID NO: 96822 - DNA, 22 bp, Artificial Sequence
  Synthetic oligonucleotide; CTT chr11 5300995 5301016 5301012 5301017 +
gagattctgaaataagggctca

SEQ ID NO: 96823 - DNA, 22 bp, Artificial Sequence
  Synthetic oligonucleotide; TTG chr11 5300996 5301017 5301013 5301018 +
agattctgaaataagggctcaa

SEQ ID NO: 96824 - DNA, 22 bp, Artificial Sequence
  Synthetic oligonucleotide; TTC chr11 5301002 5301023 5301019 5301024 +
tgaaataagggctcaagcccta

SEQ ID NO: 96825 - DNA, 22 bp, Artificial Sequence
  Synthetic oligonucleotide; CTG chr11 5301004 5301025 5301021 5301026 +
aaataagggctcaagccctact

SEQ ID NO: 96826 - DNA, 22 bp, Artificial Sequence
  Synthetic oligonucleotide; CTC chr11 5301016 5301037 5301033 5301038 +
aagccctactctgcccagaaaa

SEQ ID NO: 96827 - DNA, 22 bp, Artificial Sequence
  Synthetic oligonucleotide; CTA chr11 5301024 5301045 5301041 5301046 +
ctctgcccagaaaataggcgaa

SEQ ID NO: 96828 - DNA, 22 bp, Artificial Sequence
  Synthetic oligonucleotide; CTC chr11 5301027 5301048 5301044 5301049 +
tgcccagaaaataggcgaataa

SEQ ID NO: 96829 - DNA, 22 bp, Artificial Sequence
  Synthetic oligonucleotide; CTG chr11 5301029 5301050 5301046 5301051 +
cccagaaaataggcgaataatg

SEQ ID NO: 96830 - DNA, 22 bp, Artificial Sequence
  Synthetic oligonucleotide; CTT chr11 5301054 5301075 5301071 5301076 +
ctttgaatctgcttggtcttga

SEQ ID NO: 96831 - DNA, 22 bp, Artificial Sequence
  Synthetic oligonucleotide; TTC chr11 5301055 5301076 5301072 5301077 +
tttgaatctgcttggtcttgat

SEQ ID NO: 96832 - DNA, 22 bp, Artificial Sequence
  Synthetic oligonucleotide; CTT chr11 5301057 5301078 5301074 5301079 +
tgaatctgcttggtcttgatgc

SEQ ID NO: 96833 - DNA, 22 bp, Artificial Sequence
  Synthetic oligonucleotide; TTT chr11 5301058 5301079 5301075 5301080 +
gaatctgcttggtcttgatgct

SEQ ID NO: 96834 - DNA, 22 bp, Artificial Sequence
  Synthetic oligonucleotide; TTG chr11 5301059 5301080 5301076 5301081 +
aatctgcttggtcttgatgcta

SEQ ID NO: 96835 - DNA, 22 bp, Artificial Sequence
  Synthetic oligonucleotide; CTG chr11 5301065 5301086 5301082 5301087 +
cttggtcttgatgctataaatg

SEQ ID NO: 96836 - DNA, 22 bp, Artificial Sequence
  Synthetic oligonucleotide; CTT chr11 5301068 5301089 5301085 5301090 +
ggtcttgatgctataaatgata

SEQ ID NO: 96837 - DNA, 22 bp, Artificial Sequence
  Synthetic oligonucleotide; TTG chr11 5301069 5301090 5301086 5301091 +
gtcttgatgctataaatgatag

SEQ ID NO: 96838 - DNA, 22 bp, Artificial Sequence
  Synthetic oligonucleotide; CTT chr11 5301074 5301095 5301091 5301096 +
gatgctataaatgataggattc

SEQ ID NO: 96839 - DNA, 22 bp, Artificial Sequence
  Synthetic oligonucleotide; TTG chr11 5301075 5301096 5301092 5301097 +
atgctataaatgataggattca

SEQ ID NO: 96840 - DNA, 22 bp, Artificial Sequence
  Synthetic oligonucleotide; CTA chr11 5301081 5301102 5301098 5301103 +
taaatgataggattcacgaatg

SEQ ID NO: 96841 - DNA, 22 bp, Artificial Sequence
  Synthetic oligonucleotide; TTC chr11 5301096 5301117 5301113 5301118 +
acgaatggaggaaagagaaaat

SEQ ID NO: 96842 - DNA, 22 bp, Artificial Sequence
  Synthetic oligonucleotide; CTC chr11 5301129 5301150 5301146 5301151 +
atggtaatggggaccacatgag

SEQ ID NO: 96843 - DNA, 22 bp, Artificial Sequence
  Synthetic oligonucleotide; TTT chr11 5301161 5301182 5301178 5301183 +
cccaaacctgtgaatgaatgac

SEQ ID NO: 96844 - DNA, 22 bp, Artificial Sequence
  Synthetic oligonucleotide; TTC chr11 5301162 5301183 5301179 5301184 +
ccaaacctgtgaatgaatgaca

SEQ ID NO: 96845 - DNA, 22 bp, Artificial Sequence
  Synthetic oligonucleotide; CTG chr11 5301171 5301192 5301188 5301193 +
tgaatgaatgacagtcccatca

SEQ ID NO: 96846 - DNA, 22 bp, Artificial Sequence
  Synthetic oligonucleotide; CTA chr11 5301211 5301232 5301228 5301233 +
ggacacagctaatatgggagac

SEQ ID NO: 96847 - DNA, 22 bp, Artificial Sequence
  Synthetic oligonucleotide; CTA chr11 5301222 5301243 5301239 5301244 +
atatgggagacacaagtgttga

SEQ ID NO: 96848 - DNA, 22 bp, Artificial Sequence
  Synthetic oligonucleotide; TTG chr11 5301243 5301264 5301260 5301265 +
agagatttagcttcctcttgtc

SEQ ID NO: 96849 - DNA, 22 bp, Artificial Sequence
  Synthetic oligonucleotide; TTT chr11 5301251 5301272 5301268 5301273 +
agcttcctcttgtccagacgca

SEQ ID NO: 96850 - DNA, 22 bp, Artificial Sequence
  Synthetic oligonucleotide; TTA chr11 5301252 5301273 5301269 5301274 +
gcttcctcttgtccagacgcaa

SEQ ID NO: 96851 - DNA, 22 bp, Artificial Sequence
  Synthetic oligonucleotide; CTT chr11 5301256 5301277 5301273 5301278 +
cctcttgtccagacgcaatgcc

SEQ ID NO: 96852 - DNA, 22 bp, Artificial Sequence
  Synthetic oligonucleotide; TTC chr11 5301257 5301278 5301274 5301279 +
ctcttgtccagacgcaatgccc

SEQ ID NO: 96853 - DNA, 22 bp, Artificial Sequence
  Synthetic oligonucleotide; CTC chr11 5301260 5301281 5301277 5301282 +
ttgtccagacgcaatgcccatc

SEQ ID NO: 96854 - DNA, 22 bp, Artificial Sequence
  Synthetic oligonucleotide; CTT chr11 5301262 5301283 5301279 5301284 +
gtccagacgcaatgcccatcac

SEQ ID NO: 96855 - DNA, 22 bp, Artificial Sequence
  Synthetic oligonucleotide; TTG chr11 5301263 5301284 5301280 5301285 +
tccagacgcaatgcccatcact

SEQ ID NO: 96856 - DNA, 22 bp, Artificial Sequence
  Synthetic oligonucleotide; CTG chr11 5301286 5301307 5301303 5301308 +
tcttgaggattagtatataaga

SEQ ID NO: 96857 - DNA, 22 bp, Artificial Sequence
  Synthetic oligonucleotide; CTT chr11 5301290 5301311 5301307 5301312 +
gaggattagtatataagaaaag

SEQ ID NO: 96858 - DNA, 22 bp, Artificial Sequence
  Synthetic oligonucleotide; TTG chr11 5301291 5301312 5301308 5301313 +
aggattagtatataagaaaaga

SEQ ID NO: 96859 - DNA, 22 bp, Artificial Sequence
  Synthetic oligonucleotide; TTA chr11 5301298 5301319 5301315 5301320 +
gtatataagaaaagatgatgat

SEQ ID NO: 96860 - DNA, 22 bp, Artificial Sequence
  Synthetic oligonucleotide; TTA chr11 5301322 5301343 5301339 5301344 +
gagcatctaaaaagacagtcaa

SEQ ID NO: 96861 - DNA, 22 bp, Artificial Sequence
  Synthetic oligonucleotide; CTA chr11 5301331 5301352 5301348 5301353 +
aaaagacagtcaaagaagtctg

SEQ ID NO: 96862 - DNA, 22 bp, Artificial Sequence
  Synthetic oligonucleotide; CTG chr11 5301353 5301374 5301370 5301375 +
aataattggatatatgtgatta

SEQ ID NO: 96863 - DNA, 22 bp, Artificial Sequence
  Synthetic oligonucleotide; TTG chr11 5301361 5301382 5301378 5301383 +
gatatatgtgattaaacgtgat

SEQ ID NO: 96864 - DNA, 22 bp, Artificial Sequence
  Synthetic oligonucleotide; TTA chr11 5301375 5301396 5301392 5301397 +
aacgtgatatcagcacaggcga

SEQ ID NO: 96865 - DNA, 22 bp, Artificial Sequence
  Synthetic oligonucleotide; TTT chr11 5301401 5301422 5301418 5301423 +
tatgacatcttgatggaggcaa

SEQ ID NO: 96866 - DNA, 22 bp, Artificial Sequence
  Synthetic oligonucleotide; TTT chr11 5301402 5301423 5301419 5301424 +
atgacatcttgatggaggcaaa

SEQ ID NO: 96867 - DNA, 22 bp, Artificial Sequence
  Synthetic oligonucleotide; TTA chr11 5301403 5301424 5301420 5301425 +
tgacatcttgatggaggcaaaa

SEQ ID NO: 96868 - DNA, 22 bp, Artificial Sequence
  Synthetic oligonucleotide; CTT chr11 5301412 5301433 5301429 5301434 +
gatggaggcaaaatgtgtgcaa

SEQ ID NO: 96869 - DNA, 22 bp, Artificial Sequence
  Synthetic oligonucleotide; TTG chr11 5301413 5301434 5301430 5301435 +
atggaggcaaaatgtgtgcaag

SEQ ID NO: 96870 - DNA, 22 bp, Artificial Sequence
  Synthetic oligonucleotide; TTA chr11 5301481 5301502 5301498 5301503 +
tgggcaaaatggacataaaacc

SEQ ID NO: 96871 - DNA, 22 bp, Artificial Sequence
  Synthetic oligonucleotide; CTC chr11 5301505 5301526 5301522 5301527 +
tcatcagtacccccagtcctat

SEQ ID NO: 96872 - DNA, 22 bp, Artificial Sequence
  Synthetic oligonucleotide; CTC chr11 5301507 5301528 5301524 5301529 +
atcagtacccccagtcctatgt

SEQ ID NO: 96873 - DNA, 22 bp, Artificial Sequence
  Synthetic oligonucleotide; CTA chr11 5301526 5301547 5301543 5301548 +
tgttcatcactcgggaattggt

SEQ ID NO: 96874 - DNA, 22 bp, Artificial Sequence
  Synthetic oligonucleotide; TTC chr11 5301531 5301552 5301548 5301553 +
atcactcgggaattggtaagaa

SEQ ID NO: 96875 - DNA, 22 bp, Artificial Sequence
  Synthetic oligonucleotide; CTC chr11 5301538 5301559 5301555 5301560 +
gggaattggtaagaatgcagtt

SEQ ID NO: 96876 - DNA, 22 bp, Artificial Sequence
  Synthetic oligonucleotide; TTG chr11 5301546 5301567 5301563 5301568 +
gtaagaatgcagttgtacctca

SEQ ID NO: 96877 - DNA, 22 bp, Artificial Sequence
  Synthetic oligonucleotide; TTG chr11 5301561 5301582 5301578 5301583 +
tacctcagtggtgtgcggatgg

SEQ ID NO: 96878 - DNA, 22 bp, Artificial Sequence
  Synthetic oligonucleotide; CTC chr11 5301567 5301588 5301584 5301589 +
agtggtgtgcggatggcaatga

SEQ ID NO: 96879 - DNA, 22 bp, Artificial Sequence
  Synthetic oligonucleotide; CTG chr11 5301622 5301643 5301639 5301644 +
attctacaatggccagtgaatg

SEQ ID NO: 96880 - DNA, 22 bp, Artificial Sequence
  Synthetic oligonucleotide; TTC chr11 5301626 5301647 5301643 5301648 +
tacaatggccagtgaatgaatg

SEQ ID NO: 96881 - DNA, 22 bp, Artificial Sequence
  Synthetic oligonucleotide; CTA chr11 5301628 5301649 5301645 5301650 +
caatggccagtgaatgaatgaa

SEQ ID NO: 96882 - DNA, 22 bp, Artificial Sequence
  Synthetic oligonucleotide; TTG chr11 5301656 5301677 5301673 5301678 +
ggtgaaacaggcagcatgggca

SEQ ID NO: 96883 - DNA, 22 bp, Artificial Sequence
  Synthetic oligonucleotide; CTC chr11 5301683 5301704 5301700 5301705 +
cctctggtctagcagcaggaca

SEQ ID NO: 96884 - DNA, 22 bp, Artificial Sequence
  Synthetic oligonucleotide; CTC chr11 5301687 5301708 5301704 5301709 +
tggtctagcagcaggacaccca

SEQ ID NO: 96885 - DNA, 22 bp, Artificial Sequence
  Synthetic oligonucleotide; CTG chr11 5301689 5301710 5301706 5301711 +
gtctagcagcaggacacccagg

SEQ ID NO: 96886 - DNA, 22 bp, Artificial Sequence
  Synthetic oligonucleotide; CTA chr11 5301694 5301715 5301711 5301716 +
gcagcaggacacccaggactgt

SEQ ID NO: 96887 - DNA, 22 bp, Artificial Sequence
  Synthetic oligonucleotide; CTG chr11 5301715 5301736 5301732 5301737 +
tgggcattgtagtgaatgtcat

SEQ ID NO: 96888 - DNA, 22 bp, Artificial Sequence
  Synthetic oligonucleotide; TTG chr11 5301724 5301745 5301741 5301746 +
tagtgaatgtcatcccaaggtc

SEQ ID NO: 96889 - DNA, 22 bp, Artificial Sequence
  Synthetic oligonucleotide; CTG chr11 5301754 5301775 5301771 5301776 +
ccagcatagccaggaagtagta

SEQ ID NO: 96890 - DNA, 22 bp, Artificial Sequence
  Synthetic oligonucleotide; CTC chr11 5301785 5301806 5301802 5301807 +
atggaggctgtgatcattccaa

SEQ ID NO: 96891 - DNA, 22 bp, Artificial Sequence
  Synthetic oligonucleotide; CTG chr11 5301795 5301816 5301812 5301817 +
tgatcattccaaatgaggacaa

SEQ ID NO: 96892 - DNA, 22 bp, Artificial Sequence
  Synthetic oligonucleotide; TTC chr11 5301804 5301825 5301821 5301826 +
caaatgaggacaagaagagtgc

SEQ ID NO: 96893 - DNA, 22 bp, Artificial Sequence
  Synthetic oligonucleotide; TTT chr11 5301831 5301852 5301848 5301853 +
ccaaaaaggacggagaagtaga

SEQ ID NO: 96894 - DNA, 22 bp, Artificial Sequence
  Synthetic oligonucleotide; TTC chr11 5301832 5301853 5301849 5301854 +
caaaaaggacggagaagtagat

SEQ ID NO: 96895 - DNA, 22 bp, Artificial Sequence
  Synthetic oligonucleotide; CTG chr11 5301889 5301910 5301906 5301911 +
cctctgagcccaagaagccagt

SEQ ID NO: 96896 - DNA, 22 bp, Artificial Sequence
  Synthetic oligonucleotide; CTC chr11 5301893 5301914 5301910 5301915 +
tgagcccaagaagccagtcagc

SEQ ID NO: 96897 - DNA, 22 bp, Artificial Sequence
  Synthetic oligonucleotide; CTG chr11 5301895 5301916 5301912 5301917 +
agcccaagaagccagtcagcaa

SEQ ID NO: 96898 - DNA, 22 bp, Artificial Sequence
  Synthetic oligonucleotide; CTG chr11 5301933 5301954 5301950 5301955 +
ttgttataccacatggtaggtt

SEQ ID NO: 96899 - DNA, 22 bp, Artificial Sequence
  Synthetic oligonucleotide; TTG chr11 5301936 5301957 5301953 5301958 +
ttataccacatggtaggttttg

SEQ ID NO: 96900 - DNA, 22 bp, Artificial Sequence
  Synthetic oligonucleotide; TTA chr11 5301939 5301960 5301956 5301961 +
taccacatggtaggttttgcag

SEQ ID NO: 96901 - DNA, 22 bp, Artificial Sequence
  Synthetic oligonucleotide; TTT chr11 5301956 5301977 5301973 5301978 +
tgcaggtggagaagatattttt

SEQ ID NO: 96902 - DNA, 22 bp, Artificial Sequence
  Synthetic oligonucleotide; TTT chr11 5301957 5301978 5301974 5301979 +
gcaggtggagaagatatttttt

SEQ ID NO: 96903 - DNA, 22 bp, Artificial Sequence
  Synthetic oligonucleotide; TTG chr11 5301958 5301979 5301975 5301980 +
caggtggagaagatatttttta

SEQ ID NO: 96904 - DNA, 22 bp, Artificial Sequence
  Synthetic oligonucleotide; TTT chr11 5301976 5301997 5301993 5301998 +
tttaggggtgatgacctccaaa

SEQ ID NO: 96905 - DNA, 22 bp, Artificial Sequence
  Synthetic oligonucleotide; TTT chr11 5301977 5301998 5301994 5301999 +
ttaggggtgatgacctccaaag

SEQ ID NO: 96906 - DNA, 22 bp, Artificial Sequence
  Synthetic oligonucleotide; TTT chr11 5301978 5301999 5301995 5302000 +
taggggtgatgacctccaaaga

SEQ ID NO: 96907 - DNA, 22 bp, Artificial Sequence
  Synthetic oligonucleotide; TTT chr11 5301979 5302000 5301996 5302001 +
aggggtgatgacctccaaagat

SEQ ID NO: 96908 - DNA, 22 bp, Artificial Sequence
  Synthetic oligonucleotide; TTA chr11 5301980 5302001 5301997 5302002 +
ggggtgatgacctccaaagatg

SEQ ID NO: 96909 - DNA, 22 bp, Artificial Sequence
  Synthetic oligonucleotide; CTC chr11 5301994 5302015 5302011 5302016 +
caaagatgcagttttctttttt

SEQ ID NO: 96910 - DNA, 22 bp, Artificial Sequence
  Synthetic oligonucleotide; TTT chr11 5302008 5302029 5302025 5302030 +
tcttttttctctcacaatcttc

SEQ ID NO: 96911 - DNA, 22 bp, Artificial Sequence
  Synthetic oligonucleotide; TTT chr11 5302009 5302030 5302026 5302031 +
cttttttctctcacaatcttct

SEQ ID NO: 96912 - DNA, 22 bp, Artificial Sequence
  Synthetic oligonucleotide; TTC chr11 5302010 5302031 5302027 5302032 +
ttttttctctcacaatcttctt

SEQ ID NO: 96913 - DNA, 22 bp, Artificial Sequence
  Synthetic oligonucleotide; CTT chr11 5302012 5302033 5302029 5302034 +
ttttctctcacaatcttcttgt

SEQ ID NO: 96914 - DNA, 22 bp, Artificial Sequence
  Synthetic oligonucleotide; TTT chr11 5302013 5302034 5302030 5302035 +
tttctctcacaatcttcttgta

SEQ ID NO: 96915 - DNA, 22 bp, Artificial Sequence
  Synthetic oligonucleotide; TTT chr11 5302014 5302035 5302031 5302036 +
ttctctcacaatcttcttgtag

SEQ ID NO: 96916 - DNA, 22 bp, Artificial Sequence
  Synthetic oligonucleotide; TTT chr11 5302015 5302036 5302032 5302037 +
tctctcacaatcttcttgtagc

SEQ ID NO: 96917 - DNA, 22 bp, Artificial Sequence
  Synthetic oligonucleotide; TTT chr11 5302016 5302037 5302033 5302038 +
ctctcacaatcttcttgtagca

SEQ ID NO: 96918 - DNA, 22 bp, Artificial Sequence
  Synthetic oligonucleotide; TTC chr11 5302017 5302038 5302034 5302039 +
tctcacaatcttcttgtagcac

SEQ ID NO: 96919 - DNA, 22 bp, Artificial Sequence
  Synthetic oligonucleotide; CTC chr11 5302019 5302040 5302036 5302041 +
tcacaatcttcttgtagcacat

SEQ ID NO: 96920 - DNA, 22 bp, Artificial Sequence
  Synthetic oligonucleotide; CTC chr11 5302021 5302042 5302038 5302043 +
acaatcttcttgtagcacatca

SEQ ID NO: 96921 - DNA, 22 bp, Artificial Sequence
  Synthetic oligonucleotide; CTT chr11 5302029 5302050 5302046 5302051 +
cttgtagcacatcatcaggcca

SEQ ID NO: 96922 - DNA, 22 bp, Artificial Sequence
  Synthetic oligonucleotide; TTC chr11 5302030 5302051 5302047 5302052 +
ttgtagcacatcatcaggccat

SEQ ID NO: 96923 - DNA, 22 bp, Artificial Sequence
  Synthetic oligonucleotide; CTT chr11 5302032 5302053 5302049 5302054 +
gtagcacatcatcaggccattt

SEQ ID NO: 96924 - DNA, 22 bp, Artificial Sequence
  Synthetic oligonucleotide; TTG chr11 5302033 5302054 5302050 5302055 +
tagcacatcatcaggccatttt

SEQ ID NO: 96925 - DNA, 22 bp, Artificial Sequence
  Synthetic oligonucleotide; TTT chr11 5302054 5302075 5302071 5302076 +
tttacctcaaaacttaaatatt

SEQ ID NO: 96926 - DNA, 22 bp, Artificial Sequence
  Synthetic oligonucleotide; TTT chr11 5302055 5302076 5302072 5302077 +
ttacctcaaaacttaaatattt

SEQ ID NO: 96927 - DNA, 22 bp, Artificial Sequence
  Synthetic oligonucleotide; TTT chr11 5302056 5302077 5302073 5302078 +
tacctcaaaacttaaatatttt

SEQ ID NO: 96928 - DNA, 22 bp, Artificial Sequence
  Synthetic oligonucleotide; TTT chr11 5302057 5302078 5302074 5302079 +
acctcaaaacttaaatattttt

SEQ ID NO: 96929 - DNA, 22 bp, Artificial Sequence
  Synthetic oligonucleotide; TTA chr11 5302058 5302079 5302075 5302080 +
cctcaaaacttaaatatttttc

SEQ ID NO: 96930 - DNA, 22 bp, Artificial Sequence
  Synthetic oligonucleotide; CTC chr11 5302062 5302083 5302079 5302084 +
aaaacttaaatatttttctgga

SEQ ID NO: 96931 - DNA, 22 bp, Artificial Sequence
  Synthetic oligonucleotide; CTT chr11 5302069 5302090 5302086 5302091 +
aaatatttttctggattgtctc

SEQ ID NO: 96932 - DNA, 22 bp, Artificial Sequence
  Synthetic oligonucleotide; TTA chr11 5302070 5302091 5302087 5302092 +
aatatttttctggattgtctca

SEQ ID NO: 96933 - DNA, 22 bp, Artificial Sequence
  Synthetic oligonucleotide; TTT chr11 5302077 5302098 5302094 5302099 +
ttctggattgtctcatacttaa

SEQ ID NO: 96934 - DNA, 22 bp, Artificial Sequence
  Synthetic oligonucleotide; TTT chr11 5302078 5302099 5302095 5302100 +
tctggattgtctcatacttaat

SEQ ID NO: 96935 - DNA, 22 bp, Artificial Sequence
  Synthetic oligonucleotide; TTT chr11 5302079 5302100 5302096 5302101 +
ctggattgtctcatacttaatt

SEQ ID NO: 96936 - DNA, 22 bp, Artificial Sequence
  Synthetic oligonucleotide; TTC chr11 5302080 5302101 5302097 5302102 +
tggattgtctcatacttaatta

SEQ ID NO: 96937 - DNA, 22 bp, Artificial Sequence
  Synthetic oligonucleotide; CTG chr11 5302082 5302103 5302099 5302104 +
gattgtctcatacttaattaat

SEQ ID NO: 96938 - DNA, 22 bp, Artificial Sequence
  Synthetic oligonucleotide; TTG chr11 5302087 5302108 5302104 5302109 +
tctcatacttaattaattgtaa

SEQ ID NO: 96939 - DNA, 22 bp, Artificial Sequence
  Synthetic oligonucleotide; CTC chr11 5302091 5302112 5302108 5302113 +
atacttaattaattgtaagcct

SEQ ID NO: 96940 - DNA, 22 bp, Artificial Sequence
  Synthetic oligonucleotide; CTT chr11 5302097 5302118 5302114 5302119 +
aattaattgtaagcctgtactc

SEQ ID NO: 96941 - DNA, 22 bp, Artificial Sequence
  Synthetic oligonucleotide; TTA chr11 5302098 5302119 5302115 5302120 +
attaattgtaagcctgtactca

SEQ ID NO: 96942 - DNA, 22 bp, Artificial Sequence
  Synthetic oligonucleotide; TTA chr11 5302102 5302123 5302119 5302124 +
attgtaagcctgtactcacaag

SEQ ID NO: 96943 - DNA, 22 bp, Artificial Sequence
  Synthetic oligonucleotide; TTG chr11 5302106 5302127 5302123 5302128 +
taagcctgtactcacaaggcct

SEQ ID NO: 96944 - DNA, 22 bp, Artificial Sequence
  Synthetic oligonucleotide; CTG chr11 5302114 5302135 5302131 5302136 +
tactcacaaggcctttccctag

SEQ ID NO: 96945 - DNA, 22 bp, Artificial Sequence
  Synthetic oligonucleotide; CTC chr11 5302119 5302140 5302136 5302141 +
acaaggcctttccctagaataa

SEQ ID NO: 96946 - DNA, 22 bp, Artificial Sequence
  Synthetic oligonucleotide; CTT chr11 5302129 5302150 5302146 5302151 +
tccctagaataacaaataacaa

SEQ ID NO: 96947 - DNA, 22 bp, Artificial Sequence
  Synthetic oligonucleotide; TTT chr11 5302130 5302151 5302147 5302152 +
ccctagaataacaaataacaaa

SEQ ID NO: 96948 - DNA, 22 bp, Artificial Sequence
  Synthetic oligonucleotide; TTC chr11 5302131 5302152 5302148 5302153 +
cctagaataacaaataacaaaa

SEQ ID NO: 96949 - DNA, 22 bp, Artificial Sequence
  Synthetic oligonucleotide; CTA chr11 5302135 5302156 5302152 5302157 +
gaataacaaataacaaaaatca

SEQ ID NO: 96950 - DNA, 22 bp, Artificial Sequence
  Synthetic oligonucleotide; TTC chr11 5302175 5302196 5302192 5302197 +
caattcactatgaagcatacaa

SEQ ID NO: 96951 - DNA, 22 bp, Artificial Sequence
  Synthetic oligonucleotide; TTC chr11 5302181 5302202 5302198 5302203 +
actatgaagcatacaaccttta

SEQ ID NO: 96952 - DNA, 22 bp, Artificial Sequence
  Synthetic oligonucleotide; CTA chr11 5302185 5302206 5302202 5302207 +
tgaagcatacaacctttatttt

SEQ ID NO: 96953 - DNA, 22 bp, Artificial Sequence
  Synthetic oligonucleotide; CTT chr11 5302201 5302222 5302218 5302223 +
tattttttcaacactcatctta

SEQ ID NO: 96954 - DNA, 22 bp, Artificial Sequence
  Synthetic oligonucleotide; TTT chr11 5302202 5302223 5302219 5302224 +
attttttcaacactcatcttac

SEQ ID NO: 96955 - DNA, 22 bp, Artificial Sequence
  Synthetic oligonucleotide; TTA chr11 5302203 5302224 5302220 5302225 +
ttttttcaacactcatcttacg

SEQ ID NO: 96956 - DNA, 22 bp, Artificial Sequence
  Synthetic oligonucleotide; TTT chr11 5302206 5302227 5302223 5302228 +
tttcaacactcatcttacgtct

SEQ ID NO: 96957 - DNA, 22 bp, Artificial Sequence
  Synthetic oligonucleotide; TTT chr11 5302207 5302228 5302224 5302229 +
ttcaacactcatcttacgtctg

SEQ ID NO: 96958 - DNA, 22 bp, Artificial Sequence
  Synthetic oligonucleotide; TTT chr11 5302208 5302229 5302225 5302230 +
tcaacactcatcttacgtctgt

SEQ ID NO: 96959 - DNA, 22 bp, Artificial Sequence
  Synthetic oligonucleotide; TTT chr11 5302209 5302230 5302226 5302231 +
caacactcatcttacgtctgtg

SEQ ID NO: 96960 - DNA, 22 bp, Artificial Sequence
  Synthetic oligonucleotide; TTC chr11 5302210 5302231 5302227 5302232 +
aacactcatcttacgtctgtgc

SEQ ID NO: 96961 - DNA, 22 bp, Artificial Sequence
  Synthetic oligonucleotide; CTC chr11 5302217 5302238 5302234 5302239 +
atcttacgtctgtgctcatagc

SEQ ID NO: 96962 - DNA, 22 bp, Artificial Sequence
  Synthetic oligonucleotide; CTT chr11 5302222 5302243 5302239 5302244 +
acgtctgtgctcatagccttga

SEQ ID NO: 96963 - DNA, 22 bp, Artificial Sequence
  Synthetic oligonucleotide; TTA chr11 5302223 5302244 5302240 5302245 +
cgtctgtgctcatagccttgac

SEQ ID NO: 96964 - DNA, 22 bp, Artificial Sequence
  Synthetic oligonucleotide; CTG chr11 5302229 5302250 5302246 5302251 +
tgctcatagccttgactcttgg

SEQ ID NO: 96965 - DNA, 22 bp, Artificial Sequence
  Synthetic oligonucleotide; CTC chr11 5302234 5302255 5302251 5302256 +
atagccttgactcttggtccca

SEQ ID NO: 96966 - DNA, 22 bp, Artificial Sequence
  Synthetic oligonucleotide; CTT chr11 5302242 5302263 5302259 5302264 +
gactcttggtcccaaataggac

SEQ ID NO: 96967 - DNA, 22 bp, Artificial Sequence
  Synthetic oligonucleotide; TTG chr11 5302243 5302264 5302260 5302265 +
actcttggtcccaaataggact

SEQ ID NO: 96968 - DNA, 22 bp, Artificial Sequence
  Synthetic oligonucleotide; CTC chr11 5302247 5302268 5302264 5302269 +
ttggtcccaaataggactcctt

SEQ ID NO: 96969 - DNA, 22 bp, Artificial Sequence
  Synthetic oligonucleotide; CTT chr11 5302249 5302270 5302266 5302271 +
ggtcccaaataggactcctttg

SEQ ID NO: 96970 - DNA, 22 bp, Artificial Sequence
  Synthetic oligonucleotide; TTG chr11 5302250 5302271 5302267 5302272 +
gtcccaaataggactcctttgt

SEQ ID NO: 96971 - DNA, 22 bp, Artificial Sequence
  Synthetic oligonucleotide; CTC chr11 5302266 5302287 5302283 5302288 +
ctttgttcccttttattctctt

SEQ ID NO: 96972 - DNA, 22 bp, Artificial Sequence
  Synthetic oligonucleotide; CTT chr11 5302269 5302290 5302286 5302291 +
tgttcccttttattctctttac

SEQ ID NO: 96973 - DNA, 22 bp, Artificial Sequence
  Synthetic oligonucleotide; TTT chr11 5302270 5302291 5302287 5302292 +
gttcccttttattctctttact

SEQ ID NO: 96974 - DNA, 22 bp, Artificial Sequence
  Synthetic oligonucleotide; TTG chr11 5302271 5302292 5302288 5302293 +
ttcccttttattctctttactc

SEQ ID NO: 96975 - DNA, 22 bp, Artificial Sequence
  Synthetic oligonucleotide; TTC chr11 5302274 5302295 5302291 5302296 +
ccttttattctctttactcttt

SEQ ID NO: 96976 - DNA, 22 bp, Artificial Sequence
  Synthetic oligonucleotide; CTT chr11 5302278 5302299 5302295 5302300 +
ttattctctttactcttttatt

SEQ ID NO: 96977 - DNA, 22 bp, Artificial Sequence
  Synthetic oligonucleotide; TTT chr11 5302279 5302300 5302296 5302301 +
tattctctttactcttttattc

SEQ ID NO: 96978 - DNA, 22 bp, Artificial Sequence
  Synthetic oligonucleotide; TTT chr11 5302280 5302301 5302297 5302302 +
attctctttactcttttattcc

SEQ ID NO: 96979 - DNA, 22 bp, Artificial Sequence
  Synthetic oligonucleotide; TTA chr11 5302281 5302302 5302298 5302303 +
ttctctttactcttttattcct

SEQ ID NO: 96980 - DNA, 22 bp, Artificial Sequence
  Synthetic oligonucleotide; TTC chr11 5302284 5302305 5302301 5302306 +
tctttactcttttattcctcct

SEQ ID NO: 96981 - DNA, 22 bp, Artificial Sequence
  Synthetic oligonucleotide; CTC chr11 5302286 5302307 5302303 5302308 +
tttactcttttattcctcctcc

SEQ ID NO: 96982 - DNA, 22 bp, Artificial Sequence
  Synthetic oligonucleotide; CTT chr11 5302288 5302309 5302305 5302310 +
tactcttttattcctcctccta

SEQ ID NO: 96983 - DNA, 22 bp, Artificial Sequence
  Synthetic oligonucleotide; TTT chr11 5302289 5302310 5302306 5302311 +
actcttttattcctcctcctat

SEQ ID NO: 96984 - DNA, 22 bp, Artificial Sequence
  Synthetic oligonucleotide; TTA chr11 5302290 5302311 5302307 5302312 +
ctcttttattcctcctcctatt

SEQ ID NO: 96985 - DNA, 22 bp, Artificial Sequence
  Synthetic oligonucleotide; CTC chr11 5302293 5302314 5302310 5302315 +
ttttattcctcctcctattatt

SEQ ID NO: 96986 - DNA, 22 bp, Artificial Sequence
  Synthetic oligonucleotide; CTT chr11 5302295 5302316 5302312 5302317 +
ttattcctcctcctattattta

SEQ ID NO: 96987 - DNA, 22 bp, Artificial Sequence
  Synthetic oligonucleotide; TTT chr11 5302296 5302317 5302313 5302318 +
tattcctcctcctattatttat

SEQ ID NO: 96988 - DNA, 22 bp, Artificial Sequence
  Synthetic oligonucleotide; TTT chr11 5302297 5302318 5302314 5302319 +
attcctcctcctattatttatc

SEQ ID NO: 96989 - DNA, 22 bp, Artificial Sequence
  Synthetic oligonucleotide; TTA chr11 5302298 5302319 5302315 5302320 +
ttcctcctcctattatttatca

SEQ ID NO: 96990 - DNA, 22 bp, Artificial Sequence
  Synthetic oligonucleotide; TTC chr11 5302301 5302322 5302318 5302323 +
ctcctcctattatttatcatat

SEQ ID NO: 96991 - DNA, 22 bp, Artificial Sequence
  Synthetic oligonucleotide; CTC chr11 5302304 5302325 5302321 5302326 +
ctcctattatttatcatatggg

SEQ ID NO: 96992 - DNA, 22 bp, Artificial Sequence
  Synthetic oligonucleotide; CTC chr11 5302307 5302328 5302324 5302329 +
ctattatttatcatatgggccc

SEQ ID NO: 96993 - DNA, 22 bp, Artificial Sequence
  Synthetic oligonucleotide; CTA chr11 5302310 5302331 5302327 5302332 +
ttatttatcatatgggccctta

SEQ ID NO: 96994 - DNA, 22 bp, Artificial Sequence
  Synthetic oligonucleotide; TTA chr11 5302313 5302334 5302330 5302335 +
tttatcatatgggcccttactg

SEQ ID NO: 96995 - DNA, 22 bp, Artificial Sequence
  Synthetic oligonucleotide; TTT chr11 5302316 5302337 5302333 5302338 +
atcatatgggcccttactgtgt

SEQ ID NO: 96996 - DNA, 22 bp, Artificial Sequence
  Synthetic oligonucleotide; TTA chr11 5302317 5302338 5302334 5302339 +
tcatatgggcccttactgtgtt

SEQ ID NO: 96997 - DNA, 22 bp, Artificial Sequence
  Synthetic oligonucleotide; CTT chr11 5302331 5302352 5302348 5302353 +
actgtgttactatccaagttga

SEQ ID NO: 96998 - DNA, 22 bp, Artificial Sequence
  Synthetic oligonucleotide; TTA chr11 5302332 5302353 5302349 5302354 +
ctgtgttactatccaagttgag

SEQ ID NO: 96999 - DNA, 22 bp, Artificial Sequence
  Synthetic oligonucleotide; CTG chr11 5302335 5302356 5302352 5302357 +
tgttactatccaagttgagtca

SEQ ID NO: 97000 - DNA, 22 bp, Artificial Sequence
  Synthetic oligonucleotide; TTA chr11 5302340 5302361 5302357 5302362 +
ctatccaagttgagtcagttca

SEQ ID NO: 97001 - DNA, 22 bp, Artificial Sequence
  Synthetic oligonucleotide; CTA chr11 5302343 5302364 5302360 5302365 +
tccaagttgagtcagttcaaat

SEQ ID NO: 97002 - DNA, 22 bp, Artificial Sequence
  Synthetic oligonucleotide; TTG chr11 5302352 5302373 5302369 5302374 +
agtcagttcaaattttttctct

SEQ ID NO: 97003 - DNA, 22 bp, Artificial Sequence
  Synthetic oligonucleotide; TTC chr11 5302361 5302382 5302378 5302383 +
aaattttttctcttgaaactaa

SEQ ID NO: 97004 - DNA, 22 bp, Artificial Sequence
  Synthetic oligonucleotide; TTT chr11 5302367 5302388 5302384 5302389 +
tttctcttgaaactaatgggac

SEQ ID NO: 97005 - DNA, 22 bp, Artificial Sequence
  Synthetic oligonucleotide; TTT chr11 5302368 5302389 5302385 5302390 +
ttctcttgaaactaatgggaca

SEQ ID NO: 97006 - DNA, 22 bp, Artificial Sequence
  Synthetic oligonucleotide; TTT chr11 5302369 5302390 5302386 5302391 +
tctcttgaaactaatgggacag

SEQ ID NO: 97007 - DNA, 22 bp, Artificial Sequence
  Synthetic oligonucleotide; TTT chr11 5302370 5302391 5302387 5302392 +
ctcttgaaactaatgggacagc

SEQ ID NO: 97008 - DNA, 22 bp, Artificial Sequence
  Synthetic oligonucleotide; TTC chr11 5302371 5302392 5302388 5302393 +
tcttgaaactaatgggacagct

SEQ ID NO: 97009 - DNA, 22 bp, Artificial Sequence
  Synthetic oligonucleotide; CTC chr11 5302373 5302394 5302390 5302395 +
ttgaaactaatgggacagctgt

SEQ ID NO: 97010 - DNA, 22 bp, Artificial Sequence
  Synthetic oligonucleotide; CTT chr11 5302375 5302396 5302392 5302397 +
gaaactaatgggacagctgtat

SEQ ID NO: 97011 - DNA, 22 bp, Artificial Sequence
  Synthetic oligonucleotide; TTG chr11 5302376 5302397 5302393 5302398 +
aaactaatgggacagctgtatt

SEQ ID NO: 97012 - DNA, 22 bp, Artificial Sequence
  Synthetic oligonucleotide; CTA chr11 5302382 5302403 5302399 5302404 +
atgggacagctgtatttaggat

SEQ ID NO: 97013 - DNA, 22 bp, Artificial Sequence
  Synthetic oligonucleotide; CTG chr11 5302394 5302415 5302411 5302416 +
tatttaggattaaccactgagg

SEQ ID NO: 97014 - DNA, 22 bp, Artificial Sequence
  Synthetic oligonucleotide; TTT chr11 5302399 5302420 5302416 5302421 +
aggattaaccactgaggaaaat

SEQ ID NO: 97015 - DNA, 22 bp, Artificial Sequence
  Synthetic oligonucleotide; TTA chr11 5302400 5302421 5302417 5302422 +
ggattaaccactgaggaaaatg

SEQ ID NO: 97016 - DNA, 22 bp, Artificial Sequence
  Synthetic oligonucleotide; TTA chr11 5302406 5302427 5302423 5302428 +
accactgaggaaaatgcttatt

SEQ ID NO: 97017 - DNA, 22 bp, Artificial Sequence
  Synthetic oligonucleotide; CTG chr11 5302413 5302434 5302430 5302435 +
aggaaaatgcttattcaataga

SEQ ID NO: 97018 - DNA, 22 bp, Artificial Sequence
  Synthetic oligonucleotide; CTT chr11 5302425 5302446 5302442 5302447 +
attcaatagaaatgactgagaa

SEQ ID NO: 97019 - DNA, 22 bp, Artificial Sequence
  Synthetic oligonucleotide; TTA chr11 5302426 5302447 5302443 5302448 +
ttcaatagaaatgactgagaaa

SEQ ID NO: 97020 - DNA, 22 bp, Artificial Sequence
  Synthetic oligonucleotide; TTC chr11 5302429 5302450 5302446 5302451 +
aatagaaatgactgagaaatat

SEQ ID NO: 97021 - DNA, 22 bp, Artificial Sequence
  Synthetic oligonucleotide; CTG chr11 5302443 5302464 5302460 5302465 +
agaaatattgtgatcaatgttg

SEQ ID NO: 97022 - DNA, 22 bp, Artificial Sequence
  Synthetic oligonucleotide; TTG chr11 5302453 5302474 5302470 5302475 +
tgatcaatgttgctatctcaag

SEQ ID NO: 97023 - DNA, 22 bp, Artificial Sequence
  Synthetic oligonucleotide; TTG chr11 5302465 5302486 5302482 5302487 +
ctatctcaagtggactgtgaat

SEQ ID NO: 97024 - DNA, 22 bp, Artificial Sequence
  Synthetic oligonucleotide; CTA chr11 5302468 5302489 5302485 5302490 +
tctcaagtggactgtgaataag

SEQ ID NO: 97025 - DNA, 22 bp, Artificial Sequence
  Synthetic oligonucleotide; CTC chr11 5302472 5302493 5302489 5302494 +
aagtggactgtgaataagaaga

SEQ ID NO: 97026 - DNA, 22 bp, Artificial Sequence
  Synthetic oligonucleotide; CTG chr11 5302482 5302503 5302499 5302504 +
tgaataagaagagaacccagcc

SEQ ID NO: 97027 - DNA, 22 bp, Artificial Sequence
  Synthetic oligonucleotide; CTG chr11 5302506 5302527 5302523 5302528 +
ggcaacatagctagaccctgcc

SEQ ID NO: 97028 - DNA, 22 bp, Artificial Sequence
  Synthetic oligonucleotide; CTA chr11 5302519 5302540 5302536 5302541 +
gaccctgcctccaccaaaaaaa

SEQ ID NO: 97029 - DNA, 22 bp, Artificial Sequence
  Synthetic oligonucleotide; CTG chr11 5302526 5302547 5302543 5302548 +
cctccaccaaaaaaaaaagaaa

SEQ ID NO: 97030 - DNA, 22 bp, Artificial Sequence
  Synthetic oligonucleotide; CTC chr11 5302530 5302551 5302547 5302552 +
caccaaaaaaaaaagaaaagat

SEQ ID NO: 97031 - DNA, 22 bp, Artificial Sequence
  Synthetic oligonucleotide; TTA chr11 5302560 5302581 5302577 5302582 +
gctgggcacaggggcacacatc

SEQ ID NO: 97032 - DNA, 22 bp, Artificial Sequence
  Synthetic oligonucleotide; CTG chr11 5302564 5302585 5302581 5302586 +
ggcacaggggcacacatcacct

SEQ ID NO: 97033 - DNA, 22 bp, Artificial Sequence
  Synthetic oligonucleotide; CTG chr11 5302587 5302608 5302604 5302609 +
agcccaggactgtgaggctgca

SEQ ID NO: 97034 - DNA, 22 bp, Artificial Sequence
  Synthetic oligonucleotide; CTG chr11 5302599 5302620 5302616 5302621 +
tgaggctgcagggagctatgat

SEQ ID NO: 97035 - DNA, 22 bp, Artificial Sequence
  Synthetic oligonucleotide; CTG chr11 5302607 5302628 5302624 5302629 +
cagggagctatgattgcagcac

SEQ ID NO: 97036 - DNA, 22 bp, Artificial Sequence
  Synthetic oligonucleotide; CTA chr11 5302617 5302638 5302634 5302639 +
tgattgcagcactgctctccag

SEQ ID NO: 97037 - DNA, 22 bp, Artificial Sequence
  Synthetic oligonucleotide; TTG chr11 5302623 5302644 5302640 5302645 +
cagcactgctctccagcctggg

SEQ ID NO: 97038 - DNA, 22 bp, Artificial Sequence
  Synthetic oligonucleotide; CTG chr11 5302631 5302652 5302648 5302653 +
ctctccagcctgggcaacggag

SEQ ID NO: 97039 - DNA, 22 bp, Artificial Sequence
  Synthetic oligonucleotide; CTC chr11 5302634 5302655 5302651 5302656 +
tccagcctgggcaacggagtca

SEQ ID NO: 97040 - DNA, 22 bp, Artificial Sequence
  Synthetic oligonucleotide; CTC chr11 5302636 5302657 5302653 5302658 +
cagcctgggcaacggagtcaga

SEQ ID NO: 97041 - DNA, 22 bp, Artificial Sequence
  Synthetic oligonucleotide; CTG chr11 5302643 5302664 5302660 5302665 +
ggcaacggagtcagactctgtc

SEQ ID NO: 97042 - DNA, 22 bp, Artificial Sequence
  Synthetic oligonucleotide; CTC chr11 5302661 5302682 5302678 5302683 +
tgtctctataaaaaataaaata

SEQ ID NO: 97043 - DNA, 22 bp, Artificial Sequence
  Synthetic oligonucleotide; CTG chr11 5302663 5302684 5302680 5302685 +
tctctataaaaaataaaataaa

SEQ ID NO: 97044 - DNA, 22 bp, Artificial Sequence
  Synthetic oligonucleotide; CTC chr11 5302667 5302688 5302684 5302689 +
tataaaaaataaaataaaataa

SEQ ID NO: 97045 - DNA, 22 bp, Artificial Sequence
  Synthetic oligonucleotide; CTA chr11 5302669 5302690 5302686 5302691 +
taaaaaataaaataaaataaaa

SEQ ID NO: 97046 - DNA, 22 bp, Artificial Sequence
  Synthetic oligonucleotide; CTC chr11 5302707 5302728 5302724 5302729 +
atctattgtgagtttccacaga

SEQ ID NO: 97047 - DNA, 22 bp, Artificial Sequence
  Synthetic oligonucleotide; CTA chr11 5302712 5302733 5302729 5302734 +
ttgtgagtttccacagaaatct

SEQ ID NO: 97048 - DNA, 22 bp, Artificial Sequence
  Synthetic oligonucleotide; TTG chr11 5302715 5302736 5302732 5302737 +
tgagtttccacagaaatctgaa

SEQ ID NO: 97049 - DNA, 22 bp, Artificial Sequence
  Synthetic oligonucleotide; TTT chr11 5302722 5302743 5302739 5302744 +
ccacagaaatctgaacacctga

SEQ ID NO: 97050 - DNA, 22 bp, Artificial Sequence
  Synthetic oligonucleotide; TTC chr11 5302723 5302744 5302740 5302745 +
cacagaaatctgaacacctgaa

SEQ ID NO: 97051 - DNA, 22 bp, Artificial Sequence
  Synthetic oligonucleotide; CTG chr11 5302735 5302756 5302752 5302757 +
aacacctgaacaagtgggtaaa

SEQ ID NO: 97052 - DNA, 22 bp, Artificial Sequence
  Synthetic oligonucleotide; CTG chr11 5302743 5302764 5302760 5302765 +
aacaagtgggtaaagttagtaa

SEQ ID NO: 97053 - DNA, 22 bp, Artificial Sequence
  Synthetic oligonucleotide; TTA chr11 5302761 5302782 5302778 5302783 +
gtaaactcattttagaaaggtg

SEQ ID NO: 97054 - DNA, 22 bp, Artificial Sequence
  Synthetic oligonucleotide; CTC chr11 5302769 5302790 5302786 5302791 +
attttagaaaggtgtaattact

SEQ ID NO: 97055 - DNA, 22 bp, Artificial Sequence
  Synthetic oligonucleotide; TTT chr11 5302773 5302794 5302790 5302795 +
tagaaaggtgtaattactcagt

SEQ ID NO: 97056 - DNA, 22 bp, Artificial Sequence
  Synthetic oligonucleotide; TTT chr11 5302774 5302795 5302791 5302796 +
agaaaggtgtaattactcagtg

SEQ ID NO: 97057 - DNA, 22 bp, Artificial Sequence
  Synthetic oligonucleotide; TTA chr11 5302775 5302796 5302792 5302797 +
gaaaggtgtaattactcagtgg

SEQ ID NO: 97058 - DNA, 22 bp, Artificial Sequence
  Synthetic oligonucleotide; TTA chr11 5302789 5302810 5302806 5302811 +
ctcagtggacttgggactcagc

SEQ ID NO: 97059 - DNA, 22 bp, Artificial Sequence
  Synthetic oligonucleotide; CTC chr11 5302792 5302813 5302809 5302814 +
agtggacttgggactcagcaag

SEQ ID NO: 97060 - DNA, 22 bp, Artificial Sequence
  Synthetic oligonucleotide; CTT chr11 5302801 5302822 5302818 5302823 +
gggactcagcaagttccctatg

SEQ ID NO: 97061 - DNA, 22 bp, Artificial Sequence
  Synthetic oligonucleotide; TTG chr11 5302802 5302823 5302819 5302824 +
ggactcagcaagttccctatgc

SEQ ID NO: 97062 - DNA, 22 bp, Artificial Sequence
  Synthetic oligonucleotide; CTC chr11 5302808 5302829 5302825 5302830 +
agcaagttccctatgctgcaaa

SEQ ID NO: 97063 - DNA, 22 bp, Artificial Sequence
  Synthetic oligonucleotide; TTC chr11 5302817 5302838 5302834 5302839 +
cctatgctgcaaaaagtctgag

SEQ ID NO: 97064 - DNA, 22 bp, Artificial Sequence
  Synthetic oligonucleotide; CTA chr11 5302821 5302842 5302838 5302843 +
tgctgcaaaaagtctgagtttt

SEQ ID NO: 97065 - DNA, 22 bp, Artificial Sequence
  Synthetic oligonucleotide; CTG chr11 5302826 5302847 5302843 5302848 +
caaaaagtctgagttttggcac

SEQ ID NO: 97066 - DNA, 22 bp, Artificial Sequence
  Synthetic oligonucleotide; CTG chr11 5302837 5302858 5302854 5302859 +
agttttggcacattagggacaa

SEQ ID NO: 97067 - DNA, 22 bp, Artificial Sequence
  Synthetic oligonucleotide; TTT chr11 5302842 5302863 5302859 5302864 +
tggcacattagggacaaacatg

SEQ ID NO: 97068 - DNA, 22 bp, Artificial Sequence
  Synthetic oligonucleotide; TTT chr11 5302843 5302864 5302860 5302865 +
ggcacattagggacaaacatga

SEQ ID NO: 97069 - DNA, 22 bp, Artificial Sequence
  Synthetic oligonucleotide; TTG chr11 5302844 5302865 5302861 5302866 +
gcacattagggacaaacatgaa

SEQ ID NO: 97070 - DNA, 22 bp, Artificial Sequence
  Synthetic oligonucleotide; TTA chr11 5302852 5302873 5302869 5302874 +
gggacaaacatgaaaataggag

SEQ ID NO: 97071 - DNA, 22 bp, Artificial Sequence
  Synthetic oligonucleotide; CTC chr11 5302878 5302899 5302895 5302900 +
atgttggaagctcataacggaa

SEQ ID NO: 97072 - DNA, 22 bp, Artificial Sequence
  Synthetic oligonucleotide; TTG chr11 5302884 5302905 5302901 5302906 +
gaagctcataacggaaatattt

SEQ ID NO: 97073 - DNA, 22 bp, Artificial Sequence
  Synthetic oligonucleotide; CTC chr11 5302891 5302912 5302908 5302913 +
ataacggaaatattttaaggac

SEQ ID NO: 97074 - DNA, 22 bp, Artificial Sequence
  Synthetic oligonucleotide; TTT chr11 5302906 5302927 5302923 5302928 +
taaggacatacttctacaatga

SEQ ID NO: 97075 - DNA, 22 bp, Artificial Sequence
  Synthetic oligonucleotide; TTT chr11 5302907 5302928 5302924 5302929 +
aaggacatacttctacaatgag

SEQ ID NO: 97076 - DNA, 22 bp, Artificial Sequence
  Synthetic oligonucleotide; TTA chr11 5302908 5302929 5302925 5302930 +
aggacatacttctacaatgagg

SEQ ID NO: 97077 - DNA, 22 bp, Artificial Sequence
  Synthetic oligonucleotide; CTT chr11 5302919 5302940 5302936 5302941 +
ctacaatgagggcctccacaaa

SEQ ID NO: 97078 - DNA, 22 bp, Artificial Sequence
  Synthetic oligonucleotide; TTC chr11 5302920 5302941 5302937 5302942 +
tacaatgagggcctccacaaaa

SEQ ID NO: 97079 - DNA, 22 bp, Artificial Sequence
  Synthetic oligonucleotide; CTA chr11 5302922 5302943 5302939 5302944 +
caatgagggcctccacaaaagc

SEQ ID NO: 97080 - DNA, 22 bp, Artificial Sequence
  Synthetic oligonucleotide; CTC chr11 5302935 5302956 5302952 5302957 +
cacaaaagcctaatacttgtta

SEQ ID NO: 97081 - DNA, 22 bp, Artificial Sequence
  Synthetic oligonucleotide; CTA chr11 5302947 5302968 5302964 5302969 +
atacttgttagagtcatagatt

SEQ ID NO: 97082 - DNA, 22 bp, Artificial Sequence
  Synthetic oligonucleotide; CTT chr11 5302953 5302974 5302970 5302975 +
gttagagtcatagattcgtaag

SEQ ID NO: 97083 - DNA, 22 bp, Artificial Sequence
  Synthetic oligonucleotide; TTG chr11 5302954 5302975 5302971 5302976 +
ttagagtcatagattcgtaagt

SEQ ID NO: 97084 - DNA, 22 bp, Artificial Sequence
  Synthetic oligonucleotide; TTA chr11 5302957 5302978 5302974 5302979 +
gagtcatagattcgtaagtatg

SEQ ID NO: 97085 - DNA, 22 bp, Artificial Sequence
  Synthetic oligonucleotide; TTC chr11 5302970 5302991 5302987 5302992 +
gtaagtatgttgatctgaaggg

SEQ ID NO: 97086 - DNA, 22 bp, Artificial Sequence
  Synthetic oligonucleotide; TTG chr11 5302982 5303003 5302999 5303004 +
atctgaagggcaatagtaatat

SEQ ID NO: 97087 - DNA, 22 bp, Artificial Sequence
  Synthetic oligonucleotide; CTG chr11 5302987 5303008 5303004 5303009 +
aagggcaatagtaatatcggaa

SEQ ID NO: 97088 - DNA, 22 bp, Artificial Sequence
  Synthetic oligonucleotide; TTG chr11 5303013 5303034 5303030 5303035 +
gtaattgagttaataaacttca

SEQ ID NO: 97089 - DNA, 22 bp, Artificial Sequence
  Synthetic oligonucleotide; TTG chr11 5303020 5303041 5303037 5303042 +
agttaataaacttcacacaacc

SEQ ID NO: 97090 - DNA, 22 bp, Artificial Sequence
  Synthetic oligonucleotide; TTA chr11 5303025 5303046 5303042 5303047 +
ataaacttcacacaaccagttc

SEQ ID NO: 97091 - DNA, 22 bp, Artificial Sequence
  Synthetic oligonucleotide; CTT chr11 5303033 5303054 5303050 5303055 +
cacacaaccagttctagggaaa

SEQ ID NO: 97092 - DNA, 22 bp, Artificial Sequence
  Synthetic oligonucleotide; TTC chr11 5303034 5303055 5303051 5303056 +
acacaaccagttctagggaaaa

SEQ ID NO: 97093 - DNA, 22 bp, Artificial Sequence
  Synthetic oligonucleotide; TTC chr11 5303047 5303068 5303064 5303069 +
tagggaaaagataagcactccc

SEQ ID NO: 97094 - DNA, 22 bp, Artificial Sequence
  Synthetic oligonucleotide; CTA chr11 5303049 5303070 5303066 5303071 +
gggaaaagataagcactcccag

SEQ ID NO: 97095 - DNA, 22 bp, Artificial Sequence
  Synthetic oligonucleotide; CTC chr11 5303067 5303088 5303084 5303089 +
ccagagagaaaatacggcaact

SEQ ID NO: 97096 - DNA, 22 bp, Artificial Sequence
  Synthetic oligonucleotide; CTA chr11 5303090 5303111 5303107 5303112 +
tgttgctgatggagacaatctt

SEQ ID NO: 97097 - DNA, 22 bp, Artificial Sequence
  Synthetic oligonucleotide; TTG chr11 5303095 5303116 5303112 5303117 +
ctgatggagacaatcttacaga

SEQ ID NO: 97098 - DNA, 22 bp, Artificial Sequence
  Synthetic oligonucleotide; CTG chr11 5303098 5303119 5303115 5303120 +
atggagacaatcttacagaccc

SEQ ID NO: 97099 - DNA, 22 bp, Artificial Sequence
  Synthetic oligonucleotide; CTT chr11 5303112 5303133 5303129 5303134 +
acagaccctctaatcattatga

SEQ ID NO: 97100 - DNA, 22 bp, Artificial Sequence
  Synthetic oligonucleotide; TTA chr11 5303113 5303134 5303130 5303135 +
cagaccctctaatcattatgaa

SEQ ID NO: 97101 - DNA, 22 bp, Artificial Sequence
  Synthetic oligonucleotide; CTC chr11 5303122 5303143 5303139 5303144 +
taatcattatgaatctgtaaga

SEQ ID NO: 97102 - DNA, 22 bp, Artificial Sequence
  Synthetic oligonucleotide; CTA chr11 5303124 5303145 5303141 5303146 +
atcattatgaatctgtaagact

SEQ ID NO: 97103 - DNA, 22 bp, Artificial Sequence
  Synthetic oligonucleotide; TTA chr11 5303131 5303152 5303148 5303153 +
tgaatctgtaagactcgtattg

SEQ ID NO: 97104 - DNA, 22 bp, Artificial Sequence
  Synthetic oligonucleotide; CTG chr11 5303139 5303160 5303156 5303161 +
taagactcgtattgagaaaaat

SEQ ID NO: 97105 - DNA, 22 bp, Artificial Sequence
  Synthetic oligonucleotide; CTC chr11 5303147 5303168 5303164 5303169 +
gtattgagaaaaattcacaagg

SEQ ID NO: 97106 - DNA, 22 bp, Artificial Sequence
  Synthetic oligonucleotide; TTG chr11 5303153 5303174 5303170 5303175 +
agaaaaattcacaaggatcctc

SEQ ID NO: 97107 - DNA, 22 bp, Artificial Sequence
  Synthetic oligonucleotide; TTC chr11 5303163 5303184 5303180 5303185 +
acaaggatcctcatagggaact

SEQ ID NO: 97108 - DNA, 22 bp, Artificial Sequence
  Synthetic oligonucleotide; CTC chr11 5303175 5303196 5303192 5303197 +
atagggaactatgaagtctatt

SEQ ID NO: 97109 - DNA, 22 bp, Artificial Sequence
  Synthetic oligonucleotide; CTA chr11 5303186 5303207 5303203 5303208 +
tgaagtctatttataattaata

SEQ ID NO: 97110 - DNA, 22 bp, Artificial Sequence
  Synthetic oligonucleotide; CTA chr11 5303195 5303216 5303212 5303217 +
tttataattaatatttatttat

SEQ ID NO: 97111 - DNA, 22 bp, Artificial Sequence
  Synthetic oligonucleotide; TTT chr11 5303198 5303219 5303215 5303220 +
ataattaatatttatttatatt

SEQ ID NO: 97112 - DNA, 22 bp, Artificial Sequence
  Synthetic oligonucleotide; TTA chr11 5303199 5303220 5303216 5303221 +
taattaatatttatttatattt

SEQ ID NO: 97113 - DNA, 22 bp, Artificial Sequence
  Synthetic oligonucleotide; TTA chr11 5303205 5303226 5303222 5303227 +
atatttatttatatttataatt

SEQ ID NO: 97114 - DNA, 22 bp, Artificial Sequence
  Synthetic oligonucleotide; TTT chr11 5303211 5303232 5303228 5303233 +
atttatatttataattacactt

SEQ ID NO: 97115 - DNA, 22 bp, Artificial Sequence
  Synthetic oligonucleotide; TTA chr11 5303212 5303233 5303229 5303234 +
tttatatttataattacacttt

SEQ ID NO: 97116 - DNA, 22 bp, Artificial Sequence
  Synthetic oligonucleotide; TTT chr11 5303215 5303236 5303232 5303237 +
atatttataattacacttttac

SEQ ID NO: 97117 - DNA, 22 bp, Artificial Sequence
  Synthetic oligonucleotide; TTA chr11 5303216 5303237 5303233 5303238 +
tatttataattacacttttaca

SEQ ID NO: 97118 - DNA, 22 bp, Artificial Sequence
  Synthetic oligonucleotide; TTT chr11 5303221 5303242 5303238 5303243 +
ataattacacttttacaaagtc

SEQ ID NO: 97119 - DNA, 22 bp, Artificial Sequence
  Synthetic oligonucleotide; TTA chr11 5303222 5303243 5303239 5303244 +
taattacacttttacaaagtca

SEQ ID NO: 97120 - DNA, 22 bp, Artificial Sequence
  Synthetic oligonucleotide; TTA chr11 5303228 5303249 5303245 5303250 +
cacttttacaaagtcaagattt

SEQ ID NO: 97121 - DNA, 22 bp, Artificial Sequence
  Synthetic oligonucleotide; CTT chr11 5303233 5303254 5303250 5303255 +
ttacaaagtcaagatttttgtt

SEQ ID NO: 97122 - DNA, 22 bp, Artificial Sequence
  Synthetic oligonucleotide; TTT chr11 5303234 5303255 5303251 5303256 +
tacaaagtcaagatttttgttg

SEQ ID NO: 97123 - DNA, 22 bp, Artificial Sequence
  Synthetic oligonucleotide; TTT chr11 5303235 5303256 5303252 5303257 +
acaaagtcaagatttttgttgt

SEQ ID NO: 97124 - DNA, 22 bp, Artificial Sequence
  Synthetic oligonucleotide; TTA chr11 5303236 5303257 5303253 5303258 +
caaagtcaagatttttgttgtt

SEQ ID NO: 97125 - DNA, 22 bp, Artificial Sequence
  Synthetic oligonucleotide; TTT chr11 5303250 5303271 5303267 5303272 +
ttgttgttgtgataccaagaaa

SEQ ID NO: 97126 - DNA, 22 bp, Artificial Sequence
  Synthetic oligonucleotide; TTT chr11 5303251 5303272 5303268 5303273 +
tgttgttgtgataccaagaaat

SEQ ID NO: 97127 - DNA, 22 bp, Artificial Sequence
  Synthetic oligonucleotide; TTT chr11 5303252 5303273 5303269 5303274 +
gttgttgtgataccaagaaatt

SEQ ID NO: 97128 - DNA, 22 bp, Artificial Sequence
  Synthetic oligonucleotide; TTG chr11 5303253 5303274 5303270 5303275 +
ttgttgtgataccaagaaattt

SEQ ID NO: 97129 - DNA, 22 bp, Artificial Sequence
  Synthetic oligonucleotide; TTG chr11 5303256 5303277 5303273 5303278 +
ttgtgataccaagaaattttgt

SEQ ID NO: 97130 - DNA, 22 bp, Artificial Sequence
  Synthetic oligonucleotide; TTG chr11 5303259 5303280 5303276 5303281 +
tgataccaagaaattttgtagc

SEQ ID NO: 97131 - DNA, 22 bp, Artificial Sequence
  Synthetic oligonucleotide; TTT chr11 5303275 5303296 5303292 5303297 +
tgtagcaggtttattgggaaaa

SEQ ID NO: 97132 - DNA, 22 bp, Artificial Sequence
  Synthetic oligonucleotide; TTT chr11 5303276 5303297 5303293 5303298 +
gtagcaggtttattgggaaaac

SEQ ID NO: 97133 - DNA, 22 bp, Artificial Sequence
  Synthetic oligonucleotide; TTG chr11 5303277 5303298 5303294 5303299 +
tagcaggtttattgggaaaaca

SEQ ID NO: 97134 - DNA, 22 bp, Artificial Sequence
  Synthetic oligonucleotide; TTT chr11 5303287 5303308 5303304 5303309 +
attgggaaaacaaagagaacta

SEQ ID NO: 97135 - DNA, 22 bp, Artificial Sequence
  Synthetic oligonucleotide; TTA chr11 5303288 5303309 5303305 5303310 +
ttgggaaaacaaagagaactac

SEQ ID NO: 97136 - DNA, 22 bp, Artificial Sequence
  Synthetic oligonucleotide; TTG chr11 5303291 5303312 5303308 5303313 +
ggaaaacaaagagaactacaag

SEQ ID NO: 97137 - DNA, 22 bp, Artificial Sequence
  Synthetic oligonucleotide; CTA chr11 5303309 5303330 5303326 5303331 +
caagggaaactcagtttctccc

SEQ ID NO: 97138 - DNA, 22 bp, Artificial Sequence
  Synthetic oligonucleotide; CTC chr11 5303321 5303342 5303338 5303343 +
agtttctcccaaattcaattga

SEQ ID NO: 97139 - DNA, 22 bp, Artificial Sequence
  Synthetic oligonucleotide; TTT chr11 5303326 5303347 5303343 5303348 +
ctcccaaattcaattgattctg

SEQ ID NO: 97140 - DNA, 22 bp, Artificial Sequence
  Synthetic oligonucleotide; TTC chr11 5303327 5303348 5303344 5303349 +
tcccaaattcaattgattctgt

SEQ ID NO: 97141 - DNA, 22 bp, Artificial Sequence
  Synthetic oligonucleotide; CTC chr11 5303329 5303350 5303346 5303351 +
ccaaattcaattgattctgtat

SEQ ID NO: 97142 - DNA, 22 bp, Artificial Sequence
  Synthetic oligonucleotide; TTC chr11 5303337 5303358 5303354 5303359 +
aattgattctgtatgtgtccag

SEQ ID NO: 97143 - DNA, 22 bp, Artificial Sequence
  Synthetic oligonucleotide; TTG chr11 5303342 5303363 5303359 5303364 +
attctgtatgtgtccagagtct

SEQ ID NO: 97144 - DNA, 22 bp, Artificial Sequence
  Synthetic oligonucleotide; TTC chr11 5303346 5303367 5303363 5303368 +
tgtatgtgtccagagtctttta

SEQ ID NO: 97145 - DNA, 22 bp, Artificial Sequence
  Synthetic oligonucleotide; CTG chr11 5303348 5303369 5303365 5303370 +
tatgtgtccagagtcttttaaa

SEQ ID NO: 97146 - DNA, 22 bp, Artificial Sequence
  Synthetic oligonucleotide; CTT chr11 5303365 5303386 5303382 5303387 +
ttaaaatatcattcaatattat

SEQ ID NO: 97147 - DNA, 22 bp, Artificial Sequence
  Synthetic oligonucleotide; TTT chr11 5303366 5303387 5303383 5303388 +
taaaatatcattcaatattata

SEQ ID NO: 97148 - DNA, 22 bp, Artificial Sequence
  Synthetic oligonucleotide; TTT chr11 5303367 5303388 5303384 5303389 +
aaaatatcattcaatattataa

SEQ ID NO: 97149 - DNA, 22 bp, Artificial Sequence
  Synthetic oligonucleotide; TTA chr11 5303368 5303389 5303385 5303390 +
aaatatcattcaatattataaa

SEQ ID NO: 97150 - DNA, 22 bp, Artificial Sequence
  Synthetic oligonucleotide; TTC chr11 5303379 5303400 5303396 5303401 +
aatattataaatattactaccg

SEQ ID NO: 97151 - DNA, 22 bp, Artificial Sequence
  Synthetic oligonucleotide; TTA chr11 5303386 5303407 5303403 5303408 +
taaatattactaccgacacctt

SEQ ID NO: 97152 - DNA, 22 bp, Artificial Sequence
  Synthetic oligonucleotide; TTA chr11 5303395 5303416 5303412 5303417 +
ctaccgacacctttgaagtgta

SEQ ID NO: 97153 - DNA, 22 bp, Artificial Sequence
  Synthetic oligonucleotide; CTA chr11 5303398 5303419 5303415 5303420 +
ccgacacctttgaagtgtaatt

SEQ ID NO: 97154 - DNA, 22 bp, Artificial Sequence
  Synthetic oligonucleotide; CTT chr11 5303408 5303429 5303425 5303430 +
tgaagtgtaattcagtaaaaat

SEQ ID NO: 97155 - DNA, 22 bp, Artificial Sequence
  Synthetic oligonucleotide; TTT chr11 5303409 5303430 5303426 5303431 +
gaagtgtaattcagtaaaaatg

SEQ ID NO: 97156 - DNA, 22 bp, Artificial Sequence
  Synthetic oligonucleotide; TTG chr11 5303410 5303431 5303427 5303432 +
aagtgtaattcagtaaaaatga

SEQ ID NO: 97157 - DNA, 22 bp, Artificial Sequence
  Synthetic oligonucleotide; TTC chr11 5303421 5303442 5303438 5303443 +
agtaaaaatgaagtgataacaa

SEQ ID NO: 97158 - DNA, 22 bp, Artificial Sequence
  Synthetic oligonucleotide; CTT chr11 5303447 5303468 5303464 5303469 +
tgcaccttttttattttataaa

SEQ ID NO: 97159 - DNA, 22 bp, Artificial Sequence
  Synthetic oligonucleotide; TTT chr11 5303448 5303469 5303465 5303470 +
gcaccttttttattttataaaa

SEQ ID NO: 97160 - DNA, 22 bp, Artificial Sequence
  Synthetic oligonucleotide; TTG chr11 5303449 5303470 5303466 5303471 +
caccttttttattttataaaaa

SEQ ID NO: 97161 - DNA, 22 bp, Artificial Sequence
  Synthetic oligonucleotide; CTT chr11 5303455 5303476 5303472 5303477 +
ttttattttataaaaacctata

SEQ ID NO: 97162 - DNA, 22 bp, Artificial Sequence
  Synthetic oligonucleotide; TTT chr11 5303456 5303477 5303473 5303478 +
tttattttataaaaacctatag

SEQ ID NO: 97163 - DNA, 22 bp, Artificial Sequence
  Synthetic oligonucleotide; TTT chr11 5303457 5303478 5303474 5303479 +
ttattttataaaaacctataga

SEQ ID NO: 97164 - DNA, 22 bp, Artificial Sequence
  Synthetic oligonucleotide; TTT chr11 5303458 5303479 5303475 5303480 +
tattttataaaaacctatagaa

SEQ ID NO: 97165 - DNA, 22 bp, Artificial Sequence
  Synthetic oligonucleotide; TTT chr11 5303459 5303480 5303476 5303481 +
attttataaaaacctatagaaa

SEQ ID NO: 97166 - DNA, 22 bp, Artificial Sequence
  Synthetic oligonucleotide; TTA chr11 5303460 5303481 5303477 5303482 +
ttttataaaaacctatagaaac

SEQ ID NO: 97167 - DNA, 22 bp, Artificial Sequence
  Synthetic oligonucleotide; TTT chr11 5303463 5303484 5303480 5303485 +
tataaaaacctatagaaacaat

SEQ ID NO: 97168 - DNA, 22 bp, Artificial Sequence
  Synthetic oligonucleotide; TTT chr11 5303464 5303485 5303481 5303486 +
ataaaaacctatagaaacaata

SEQ ID NO: 97169 - DNA, 22 bp, Artificial Sequence
  Synthetic oligonucleotide; TTA chr11 5303465 5303486 5303482 5303487 +
taaaaacctatagaaacaataa

SEQ ID NO: 97170 - DNA, 22 bp, Artificial Sequence
  Synthetic oligonucleotide; CTA chr11 5303475 5303496 5303492 5303497 +
tagaaacaataataattatatg

SEQ ID NO: 97171 - DNA, 22 bp, Artificial Sequence
  Synthetic oligonucleotide; TTA chr11 5303493 5303514 5303510 5303515 +
tatgtttcagaattttggcaca

SEQ ID NO: 97172 - DNA, 22 bp, Artificial Sequence
  Synthetic oligonucleotide; TTT chr11 5303500 5303521 5303517 5303522 +
cagaattttggcacatagtaac

SEQ ID NO: 97173 - DNA, 22 bp, Artificial Sequence
  Synthetic oligonucleotide; TTC chr11 5303501 5303522 5303518 5303523 +
agaattttggcacatagtaaca

SEQ ID NO: 97174 - DNA, 22 bp, Artificial Sequence
  Synthetic oligonucleotide; TTT chr11 5303508 5303529 5303525 5303530 +
tggcacatagtaacatctctaa

SEQ ID NO: 97175 - DNA, 22 bp, Artificial Sequence
  Synthetic oligonucleotide; TTT chr11 5303509 5303530 5303526 5303531 +
ggcacatagtaacatctctaat

SEQ ID NO: 97176 - DNA, 22 bp, Artificial Sequence
  Synthetic oligonucleotide; TTG chr11 5303510 5303531 5303527 5303532 +
gcacatagtaacatctctaata

SEQ ID NO: 97177 - DNA, 22 bp, Artificial Sequence
  Synthetic oligonucleotide; CTC chr11 5303527 5303548 5303544 5303549 +
taatataagcaattattggtgg

SEQ ID NO: 97178 - DNA, 22 bp, Artificial Sequence
  Synthetic oligonucleotide; CTA chr11 5303529 5303550 5303546 5303551 +
atataagcaattattggtggag

SEQ ID NO: 97179 - DNA, 22 bp, Artificial Sequence
  Synthetic oligonucleotide; TTA chr11 5303542 5303563 5303559 5303564 +
ttggtggagagagatggacaga

SEQ ID NO: 97180 - DNA, 22 bp, Artificial Sequence
  Synthetic oligonucleotide; TTG chr11 5303545 5303566 5303562 5303567 +
gtggagagagatggacagagga

SEQ ID NO: 97181 - DNA, 22 bp, Artificial Sequence
  Synthetic oligonucleotide; CTT chr11 5303582 5303603 5303599 5303604 +
ttgaaagggctgctacttcagg

SEQ ID NO: 97182 - DNA, 22 bp, Artificial Sequence
  Synthetic oligonucleotide; TTT chr11 5303583 5303604 5303600 5303605 +
tgaaagggctgctacttcaggg

SEQ ID NO: 97183 - DNA, 22 bp, Artificial Sequence
  Synthetic oligonucleotide; TTT chr11 5303584 5303605 5303601 5303606 +
gaaagggctgctacttcagggg

SEQ ID NO: 97184 - DNA, 22 bp, Artificial Sequence
  Synthetic oligonucleotide; TTG chr11 5303585 5303606 5303602 5303607 +
aaagggctgctacttcagggga

SEQ ID NO: 97185 - DNA, 22 bp, Artificial Sequence
  Synthetic oligonucleotide; CTG chr11 5303594 5303615 5303611 5303616 +
ctacttcaggggacactgttga

SEQ ID NO: 97186 - DNA, 22 bp, Artificial Sequence
  Synthetic oligonucleotide; CTA chr11 5303597 5303618 5303614 5303619 +
cttcaggggacactgttgataa

SEQ ID NO: 97187 - DNA, 22 bp, Artificial Sequence
  Synthetic oligonucleotide; CTT chr11 5303600 5303621 5303617 5303622 +
caggggacactgttgataacaa

SEQ ID NO: 97188 - DNA, 22 bp, Artificial Sequence
  Synthetic oligonucleotide; TTC chr11 5303601 5303622 5303618 5303623 +
aggggacactgttgataacaaa

SEQ ID NO: 97189 - DNA, 22 bp, Artificial Sequence
  Synthetic oligonucleotide; CTG chr11 5303612 5303633 5303629 5303634 +
ttgataacaaaaatgtcagtct

SEQ ID NO: 97190 - DNA, 22 bp, Artificial Sequence
  Synthetic oligonucleotide; TTG chr11 5303615 5303636 5303632 5303637 +
ataacaaaaatgtcagtctagg

SEQ ID NO: 97191 - DNA, 22 bp, Artificial Sequence
  Synthetic oligonucleotide; CTA chr11 5303635 5303656 5303652 5303657 +
ggcactgcagtagcagagacta

SEQ ID NO: 97192 - DNA, 22 bp, Artificial Sequence
  Synthetic oligonucleotide; CTG chr11 5303642 5303663 5303659 5303664 +
cagtagcagagactatgttcat

SEQ ID NO: 97193 - DNA, 22 bp, Artificial Sequence
  Synthetic oligonucleotide; CTA chr11 5303657 5303678 5303674 5303679 +
tgttcatatggatactaaaaac

SEQ ID NO: 97194 - DNA, 22 bp, Artificial Sequence
  Synthetic oligonucleotide; TTC chr11 5303662 5303683 5303679 5303684 +
atatggatactaaaaacactgc

SEQ ID NO: 97195 - DNA, 22 bp, Artificial Sequence
  Synthetic oligonucleotide; CTA chr11 5303674 5303695 5303691 5303696 +
aaaacactgctaactaacttga

SEQ ID NO: 97196 - DNA, 22 bp, Artificial Sequence
  Synthetic oligonucleotide; CTG chr11 5303683 5303704 5303700 5303705 +
ctaactaacttgatccactgaa

SEQ ID NO: 97197 - DNA, 22 bp, Artificial Sequence
  Synthetic oligonucleotide; CTA chr11 5303686 5303707 5303703 5303708 +
actaacttgatccactgaatta

SEQ ID NO: 97198 - DNA, 22 bp, Artificial Sequence
  Synthetic oligonucleotide; CTA chr11 5303690 5303711 5303707 5303712 +
acttgatccactgaattatgac

SEQ ID NO: 97199 - DNA, 22 bp, Artificial Sequence
  Synthetic oligonucleotide; CTT chr11 5303694 5303715 5303711 5303716 +
gatccactgaattatgacctgc

SEQ ID NO: 97200 - DNA, 22 bp, Artificial Sequence
  Synthetic oligonucleotide; TTG chr11 5303695 5303716 5303712 5303717 +
atccactgaattatgacctgca

SEQ ID NO: 97201 - DNA, 22 bp, Artificial Sequence
  Synthetic oligonucleotide; CTG chr11 5303703 5303724 5303720 5303725 +
aattatgacctgcatagtgctt

SEQ ID NO: 97202 - DNA, 22 bp, Artificial Sequence
  Synthetic oligonucleotide; TTA chr11 5303708 5303729 5303725 5303730 +
tgacctgcatagtgcttaatgt

SEQ ID NO: 97203 - DNA, 22 bp, Artificial Sequence
  Synthetic oligonucleotide; CTG chr11 5303715 5303736 5303732 5303737 +
catagtgcttaatgtggcagaa

SEQ ID NO: 97204 - DNA, 22 bp, Artificial Sequence
  Synthetic oligonucleotide; CTT chr11 5303725 5303746 5303742 5303747 +
aatgtggcagaacttatctacc

SEQ ID NO: 97205 - DNA, 22 bp, Artificial Sequence
  Synthetic oligonucleotide; TTA chr11 5303726 5303747 5303743 5303748 +
atgtggcagaacttatctaccg

SEQ ID NO: 97206 - DNA, 22 bp, Artificial Sequence
  Synthetic oligonucleotide; CTT chr11 5303740 5303761 5303757 5303762 +
atctaccgccacaggagtgatg

SEQ ID NO: 97207 - DNA, 22 bp, Artificial Sequence
  Synthetic oligonucleotide; TTA chr11 5303741 5303762 5303758 5303763 +
tctaccgccacaggagtgatgt

SEQ ID NO: 97208 - DNA, 22 bp, Artificial Sequence
  Synthetic oligonucleotide; CTA chr11 5303745 5303766 5303762 5303767 +
ccgccacaggagtgatgtgtat

SEQ ID NO: 97209 - DNA, 22 bp, Artificial Sequence
  Synthetic oligonucleotide; TTA chr11 5303774 5303795 5303791 5303796 +
taagttctcttaaccttccaat

SEQ ID NO: 97210 - DNA, 22 bp, Artificial Sequence
  Synthetic oligonucleotide; TTC chr11 5303781 5303802 5303798 5303803 +
tcttaaccttccaatgttgcct

SEQ ID NO: 97211 - DNA, 22 bp, Artificial Sequence
  Synthetic oligonucleotide; CTC chr11 5303783 5303804 5303800 5303805 +
ttaaccttccaatgttgcctta

SEQ ID NO: 97212 - DNA, 22 bp, Artificial Sequence
  Synthetic oligonucleotide; CTT chr11 5303785 5303806 5303802 5303807 +
aaccttccaatgttgccttata

SEQ ID NO: 97213 - DNA, 22 bp, Artificial Sequence
  Synthetic oligonucleotide; TTA chr11 5303786 5303807 5303803 5303808 +
accttccaatgttgccttataa

SEQ ID NO: 97214 - DNA, 22 bp, Artificial Sequence
  Synthetic oligonucleotide; CTT chr11 5303791 5303812 5303808 5303813 +
ccaatgttgccttataagagaa

SEQ ID NO: 97215 - DNA, 22 bp, Artificial Sequence
  Synthetic oligonucleotide; TTC chr11 5303792 5303813 5303809 5303814 +
caatgttgccttataagagaat

SEQ ID NO: 97216 - DNA, 22 bp, Artificial Sequence
  Synthetic oligonucleotide; TTG chr11 5303800 5303821 5303817 5303822 +
ccttataagagaatggattaat

SEQ ID NO: 97217 - DNA, 22 bp, Artificial Sequence
  Synthetic oligonucleotide; CTT chr11 5303804 5303825 5303821 5303826 +
ataagagaatggattaatgcca

SEQ ID NO: 97218 - DNA, 22 bp, Artificial Sequence
  Synthetic oligonucleotide; TTA chr11 5303805 5303826 5303822 5303827 +
taagagaatggattaatgccaa

SEQ ID NO: 97219 - DNA, 22 bp, Artificial Sequence
  Synthetic oligonucleotide; TTA chr11 5303820 5303841 5303837 5303842 +
atgccaaaatttgttgtacagg

SEQ ID NO: 97220 - DNA, 22 bp, Artificial Sequence
  Synthetic oligonucleotide; TTT chr11 5303832 5303853 5303849 5303854 +
gttgtacaggataagagctaac

SEQ ID NO: 97221 - DNA, 22 bp, Artificial Sequence
  Synthetic oligonucleotide; TTG chr11 5303833 5303854 5303850 5303855 +
ttgtacaggataagagctaacc

SEQ ID NO: 97222 - DNA, 22 bp, Artificial Sequence
  Synthetic oligonucleotide; TTG chr11 5303836 5303857 5303853 5303858 +
tacaggataagagctaaccact

SEQ ID NO: 97223 - DNA, 22 bp, Artificial Sequence
  Synthetic oligonucleotide; CTA chr11 5303852 5303873 5303869 5303874 +
accacttatttggatctactgt

SEQ ID NO: 97224 - DNA, 22 bp, Artificial Sequence
  Synthetic oligonucleotide; CTT chr11 5303859 5303880 5303876 5303881 +
atttggatctactgtcacccag

SEQ ID NO: 97225 - DNA, 22 bp, Artificial Sequence
  Synthetic oligonucleotide; TTA chr11 5303860 5303881 5303877 5303882 +
tttggatctactgtcacccaga

SEQ ID NO: 97226 - DNA, 22 bp, Artificial Sequence
  Synthetic oligonucleotide; TTT chr11 5303863 5303884 5303880 5303885 +
ggatctactgtcacccagataa

SEQ ID NO: 97227 - DNA, 22 bp, Artificial Sequence
  Synthetic oligonucleotide; TTG chr11 5303864 5303885 5303881 5303886 +
gatctactgtcacccagataat

SEQ ID NO: 97228 - DNA, 22 bp, Artificial Sequence
  Synthetic oligonucleotide; CTA chr11 5303870 5303891 5303887 5303892 +
ctgtcacccagataatggacca

SEQ ID NO: 97229 - DNA, 22 bp, Artificial Sequence
  Synthetic oligonucleotide; CTG chr11 5303873 5303894 5303890 5303895 +
tcacccagataatggaccagat

SEQ ID NO: 97230 - DNA, 22 bp, Artificial Sequence
  Synthetic oligonucleotide; CTG chr11 5303917 5303938 5303934 5303939 +
attattcttaaactatagtcgt

SEQ ID NO: 97231 - DNA, 22 bp, Artificial Sequence
  Synthetic oligonucleotide; TTA chr11 5303921 5303942 5303938 5303943 +
ttcttaaactatagtcgtgttt

SEQ ID NO: 97232 - DNA, 22 bp, Artificial Sequence
  Synthetic oligonucleotide; TTC chr11 5303924 5303945 5303941 5303946 +
ttaaactatagtcgtgttttca

SEQ ID NO: 97233 - DNA, 22 bp, Artificial Sequence
  Synthetic oligonucleotide; CTT chr11 5303926 5303947 5303943 5303948 +
aaactatagtcgtgttttcaaa

SEQ ID NO: 97234 - DNA, 22 bp, Artificial Sequence
  Synthetic oligonucleotide; TTA chr11 5303927 5303948 5303944 5303949 +
aactatagtcgtgttttcaaaa

SEQ ID NO: 97235 - DNA, 22 bp, Artificial Sequence
  Synthetic oligonucleotide; CTA chr11 5303932 5303953 5303949 5303954 +
tagtcgtgttttcaaaacctga

SEQ ID NO: 97236 - DNA, 22 bp, Artificial Sequence
  Synthetic oligonucleotide; TTT chr11 5303943 5303964 5303960 5303965 +
tcaaaacctgagctgcgtttgg

SEQ ID NO: 97237 - DNA, 22 bp, Artificial Sequence
  Synthetic oligonucleotide; TTT chr11 5303944 5303965 5303961 5303966 +
caaaacctgagctgcgtttggg

SEQ ID NO: 97238 - DNA, 22 bp, Artificial Sequence
  Synthetic oligonucleotide; TTC chr11 5303945 5303966 5303962 5303967 +
aaaacctgagctgcgtttggga

SEQ ID NO: 97239 - DNA, 22 bp, Artificial Sequence
  Synthetic oligonucleotide; CTG chr11 5303953 5303974 5303970 5303975 +
agctgcgtttgggacatgcgga

SEQ ID NO: 97240 - DNA, 22 bp, Artificial Sequence
  Synthetic oligonucleotide; CTG chr11 5303958 5303979 5303975 5303980 +
cgtttgggacatgcggatgcac

SEQ ID NO: 97241 - DNA, 22 bp, Artificial Sequence
  Synthetic oligonucleotide; TTT chr11 5303963 5303984 5303980 5303985 +
gggacatgcggatgcacagggt

SEQ ID NO: 97242 - DNA, 22 bp, Artificial Sequence
  Synthetic oligonucleotide; TTG chr11 5303964 5303985 5303981 5303986 +
ggacatgcggatgcacagggtt

SEQ ID NO: 97243 - DNA, 22 bp, Artificial Sequence
  Synthetic oligonucleotide; TTT chr11 5303987 5304008 5304004 5304009 +
tattaaaactgtgtggtaatta

SEQ ID NO: 97244 - DNA, 22 bp, Artificial Sequence
  Synthetic oligonucleotide; TTT chr11 5303988 5304009 5304005 5304010 +
attaaaactgtgtggtaattac

SEQ ID NO: 97245 - DNA, 22 bp, Artificial Sequence
  Synthetic oligonucleotide; TTA chr11 5303989 5304010 5304006 5304011 +
ttaaaactgtgtggtaattact

SEQ ID NO: 97246 - DNA, 22 bp, Artificial Sequence
  Synthetic oligonucleotide; TTA chr11 5303992 5304013 5304009 5304014 +
aaactgtgtggtaattactggg

SEQ ID NO: 97247 - DNA, 22 bp, Artificial Sequence
  Synthetic oligonucleotide; CTG chr11 5303998 5304019 5304015 5304020 +
tgtggtaattactggggaaata

SEQ ID NO: 97248 - DNA, 22 bp, Artificial Sequence
  Synthetic oligonucleotide; TTA chr11 5304009 5304030 5304026 5304031 +
ctggggaaatagttaatacaat

SEQ ID NO: 97249 - DNA, 22 bp, Artificial Sequence
  Synthetic oligonucleotide; CTG chr11 5304012 5304033 5304029 5304034 +
gggaaatagttaatacaattta

SEQ ID NO: 97250 - DNA, 22 bp, Artificial Sequence
  Synthetic oligonucleotide; TTA chr11 5304024 5304045 5304041 5304046 +
atacaatttataagtatatttt

SEQ ID NO: 97251 - DNA, 22 bp, Artificial Sequence
  Synthetic oligonucleotide; TTT chr11 5304033 5304054 5304050 5304055 +
ataagtatattttattgaccta

SEQ ID NO: 97252 - DNA, 22 bp, Artificial Sequence
  Synthetic oligonucleotide; TTA chr11 5304034 5304055 5304051 5304056 +
taagtatattttattgacctaa

SEQ ID NO: 97253 - DNA, 22 bp, Artificial Sequence
  Synthetic oligonucleotide; TTT chr11 5304045 5304066 5304062 5304067 +
tattgacctaaagatagccctc

SEQ ID NO: 97254 - DNA, 22 bp, Artificial Sequence
  Synthetic oligonucleotide; TTT chr11 5304046 5304067 5304063 5304068 +
attgacctaaagatagccctct

SEQ ID NO: 97255 - DNA, 22 bp, Artificial Sequence
  Synthetic oligonucleotide; TTA chr11 5304047 5304068 5304064 5304069 +
ttgacctaaagatagccctcta

SEQ ID NO: 97256 - DNA, 22 bp, Artificial Sequence
  Synthetic oligonucleotide; TTG chr11 5304050 5304071 5304067 5304072 +
acctaaagatagccctctattt

SEQ ID NO: 97257 - DNA, 22 bp, Artificial Sequence
  Synthetic oligonucleotide; CTA chr11 5304055 5304076 5304072 5304077 +
aagatagccctctatttaacat

SEQ ID NO: 97258 - DNA, 22 bp, Artificial Sequence
  Synthetic oligonucleotide; CTC chr11 5304067 5304088 5304084 5304089 +
tatttaacatctgcagtctcta

SEQ ID NO: 97259 - DNA, 22 bp, Artificial Sequence
  Synthetic oligonucleotide; CTA chr11 5304069 5304090 5304086 5304091 +
tttaacatctgcagtctctagc

SEQ ID NO: 97260 - DNA, 22 bp, Artificial Sequence
  Synthetic oligonucleotide; TTT chr11 5304072 5304093 5304089 5304094 +
aacatctgcagtctctagcaaa

SEQ ID NO: 97261 - DNA, 22 bp, Artificial Sequence
  Synthetic oligonucleotide; TTA chr11 5304073 5304094 5304090 5304095 +
acatctgcagtctctagcaaaa

SEQ ID NO: 97262 - DNA, 22 bp, Artificial Sequence
  Synthetic oligonucleotide; CTG chr11 5304080 5304101 5304097 5304102 +
cagtctctagcaaaacagctac

SEQ ID NO: 97263 - DNA, 22 bp, Artificial Sequence
  Synthetic oligonucleotide; CTC chr11 5304087 5304108 5304104 5304109 +
tagcaaaacagctacgctggca

SEQ ID NO: 97264 - DNA, 22 bp, Artificial Sequence
  Synthetic oligonucleotide; CTA chr11 5304089 5304110 5304106 5304111 +
gcaaaacagctacgctggcatt

SEQ ID NO: 97265 - DNA, 22 bp, Artificial Sequence
  Synthetic oligonucleotide; CTA chr11 5304101 5304122 5304118 5304123 +
cgctggcatttaattgtggcaa

SEQ ID NO: 97266 - DNA, 22 bp, Artificial Sequence
  Synthetic oligonucleotide; CTG chr11 5304106 5304127 5304123 5304128 +
gcatttaattgtggcaaatttg

SEQ ID NO: 97267 - DNA, 22 bp, Artificial Sequence
  Synthetic oligonucleotide; TTT chr11 5304112 5304133 5304129 5304134 +
aattgtggcaaatttggtagta

SEQ ID NO: 97268 - DNA, 22 bp, Artificial Sequence
  Synthetic oligonucleotide; TTA chr11 5304113 5304134 5304130 5304135 +
attgtggcaaatttggtagtac

SEQ ID NO: 97269 - DNA, 22 bp, Artificial Sequence
  Synthetic oligonucleotide; TTG chr11 5304117 5304138 5304134 5304139 +
tggcaaatttggtagtaccaga

SEQ ID NO: 97270 - DNA, 22 bp, Artificial Sequence
  Synthetic oligonucleotide; TTT chr11 5304127 5304148 5304144 5304149 +
ggtagtaccagaaactgtccac

SEQ ID NO: 97271 - DNA, 22 bp, Artificial Sequence
  Synthetic oligonucleotide; TTG chr11 5304128 5304149 5304145 5304150 +
gtagtaccagaaactgtccaca

SEQ ID NO: 97272 - DNA, 22 bp, Artificial Sequence
  Synthetic oligonucleotide; CTG chr11 5304144 5304165 5304161 5304166 +
tccacatacccaaatattccag

SEQ ID NO: 97273 - DNA, 22 bp, Artificial Sequence
  Synthetic oligonucleotide; TTC chr11 5304163 5304184 5304180 5304185 +
cagggagaatagttgccctaat

SEQ ID NO: 97274 - DNA, 22 bp, Artificial Sequence
  Synthetic oligonucleotide; TTG chr11 5304178 5304199 5304195 5304200 +
ccctaatagtttagggagtctc

SEQ ID NO: 97275 - DNA, 22 bp, Artificial Sequence
  Synthetic oligonucleotide; CTA chr11 5304183 5304204 5304200 5304205 +
atagtttagggagtctcctaga

SEQ ID NO: 97276 - DNA, 22 bp, Artificial Sequence
  Synthetic oligonucleotide; TTT chr11 5304190 5304211 5304207 5304212 +
agggagtctcctagaatgtgat

SEQ ID NO: 97277 - DNA, 22 bp, Artificial Sequence
  Synthetic oligonucleotide; TTA chr11 5304191 5304212 5304208 5304213 +
gggagtctcctagaatgtgata

SEQ ID NO: 97278 - DNA, 22 bp, Artificial Sequence
  Synthetic oligonucleotide; CTC chr11 5304200 5304221 5304217 5304222 +
ctagaatgtgatacatgacaaa

SEQ ID NO: 97279 - DNA, 22 bp, Artificial Sequence
  Synthetic oligonucleotide; CTA chr11 5304203 5304224 5304220 5304225 +
gaatgtgatacatgacaaaagt

SEQ ID NO: 97280 - DNA, 22 bp, Artificial Sequence
  Synthetic oligonucleotide; CTT chr11 5304239 5304260 5304256 5304261 +
tagtggaatttatcactctcag

SEQ ID NO: 97281 - DNA, 22 bp, Artificial Sequence
  Synthetic oligonucleotide; TTT chr11 5304240 5304261 5304257 5304262 +
agtggaatttatcactctcagg

SEQ ID NO: 97282 - DNA, 22 bp, Artificial Sequence
  Synthetic oligonucleotide; TTA chr11 5304241 5304262 5304258 5304263 +
gtggaatttatcactctcaggc

SEQ ID NO: 97283 - DNA, 22 bp, Artificial Sequence
  Synthetic oligonucleotide; TTT chr11 5304250 5304271 5304267 5304272 +
atcactctcaggcaagcataga

SEQ ID NO: 97284 - DNA, 22 bp, Artificial Sequence
  Synthetic oligonucleotide; TTA chr11 5304251 5304272 5304268 5304273 +
tcactctcaggcaagcatagag

SEQ ID NO: 97285 - DNA, 22 bp, Artificial Sequence
  Synthetic oligonucleotide; CTC chr11 5304257 5304278 5304274 5304279 +
tcaggcaagcatagaggccccc

SEQ ID NO: 97286 - DNA, 22 bp, Artificial Sequence
  Synthetic oligonucleotide; CTC chr11 5304259 5304280 5304276 5304281 +
aggcaagcatagaggccccctg

SEQ ID NO: 97287 - DNA, 22 bp, Artificial Sequence
  Synthetic oligonucleotide; CTG chr11 5304281 5304302 5304298 5304303 +
agggatgcaaaaatgactggct

SEQ ID NO: 97288 - DNA, 22 bp, Artificial Sequence
  Synthetic oligonucleotide; CTG chr11 5304300 5304321 5304317 5304322 +
gctcactgttctcttgcccctt

SEQ ID NO: 97289 - DNA, 22 bp, Artificial Sequence
  Synthetic oligonucleotide; CTC chr11 5304304 5304325 5304321 5304326 +
actgttctcttgcccctttctg

SEQ ID NO: 97290 - DNA, 22 bp, Artificial Sequence
  Synthetic oligonucleotide; CTG chr11 5304308 5304329 5304325 5304330 +
ttctcttgcccctttctgagtg

SEQ ID NO: 97291 - DNA, 22 bp, Artificial Sequence
  Synthetic oligonucleotide; TTC chr11 5304311 5304332 5304328 5304333 +
tcttgcccctttctgagtgcct

SEQ ID NO: 97292 - DNA, 22 bp, Artificial Sequence
  Synthetic oligonucleotide; CTC chr11 5304313 5304334 5304330 5304335 +
ttgcccctttctgagtgccttt

SEQ ID NO: 97293 - DNA, 22 bp, Artificial Sequence
  Synthetic oligonucleotide; CTT chr11 5304315 5304336 5304332 5304337 +
gcccctttctgagtgcctttgg

SEQ ID NO: 97294 - DNA, 22 bp, Artificial Sequence
  Synthetic oligonucleotide; TTG chr11 5304316 5304337 5304333 5304338 +
cccctttctgagtgcctttgga

SEQ ID NO: 97295 - DNA, 22 bp, Artificial Sequence
  Synthetic oligonucleotide; CTT chr11 5304322 5304343 5304339 5304344 +
tctgagtgcctttggactgatt

SEQ ID NO: 97296 - DNA, 22 bp, Artificial Sequence
  Synthetic oligonucleotide; TTT chr11 5304323 5304344 5304340 5304345 +
ctgagtgcctttggactgattc

SEQ ID NO: 97297 - DNA, 22 bp, Artificial Sequence
  Synthetic oligonucleotide; TTC chr11 5304324 5304345 5304341 5304346 +
tgagtgcctttggactgattct

SEQ ID NO: 97298 - DNA, 22 bp, Artificial Sequence
  Synthetic oligonucleotide; CTG chr11 5304326 5304347 5304343 5304348 +
agtgcctttggactgattcttt

SEQ ID NO: 97299 - DNA, 22 bp, Artificial Sequence
  Synthetic oligonucleotide; CTT chr11 5304334 5304355 5304351 5304356 +
tggactgattctttgacagcaa

SEQ ID NO: 97300 - DNA, 22 bp, Artificial Sequence
  Synthetic oligonucleotide; TTT chr11 5304335 5304356 5304352 5304357 +
ggactgattctttgacagcaac

SEQ ID NO: 97301 - DNA, 22 bp, Artificial Sequence
  Synthetic oligonucleotide; TTG chr11 5304336 5304357 5304353 5304358 +
gactgattctttgacagcaact

SEQ ID NO: 97302 - DNA, 22 bp, Artificial Sequence
  Synthetic oligonucleotide; CTG chr11 5304341 5304362 5304358 5304363 +
attctttgacagcaactatccc

SEQ ID NO: 97303 - DNA, 22 bp, Artificial Sequence
  Synthetic oligonucleotide; TTC chr11 5304345 5304366 5304362 5304367 +
tttgacagcaactatcccagag

SEQ ID NO: 97304 - DNA, 22 bp, Artificial Sequence
  Synthetic oligonucleotide; CTT chr11 5304347 5304368 5304364 5304369 +
tgacagcaactatcccagagtc

SEQ ID NO: 97305 - DNA, 22 bp, Artificial Sequence
  Synthetic oligonucleotide; TTT chr11 5304348 5304369 5304365 5304370 +
gacagcaactatcccagagtcc

SEQ ID NO: 97306 - DNA, 22 bp, Artificial Sequence
  Synthetic oligonucleotide; TTG chr11 5304349 5304370 5304366 5304371 +
acagcaactatcccagagtcct

SEQ ID NO: 97307 - DNA, 22 bp, Artificial Sequence
  Synthetic oligonucleotide; CTA chr11 5304359 5304380 5304376 5304381 +
tcccagagtcctcaagagtttc

SEQ ID NO: 97308 - DNA, 22 bp, Artificial Sequence
  Synthetic oligonucleotide; CTC chr11 5304372 5304393 5304389 5304394 +
aagagtttctgaaggtaacata

SEQ ID NO: 97309 - DNA, 22 bp, Artificial Sequence
  Synthetic oligonucleotide; TTT chr11 5304380 5304401 5304397 5304402 +
ctgaaggtaacatagatccatc

SEQ ID NO: 97310 - DNA, 22 bp, Artificial Sequence
  Synthetic oligonucleotide; TTC chr11 5304381 5304402 5304398 5304403 +
tgaaggtaacatagatccatca

SEQ ID NO: 97311 - DNA, 22 bp, Artificial Sequence
  Synthetic oligonucleotide; CTG chr11 5304383 5304404 5304400 5304405 +
aaggtaacatagatccatcatc

SEQ ID NO: 97312 - DNA, 22 bp, Artificial Sequence
  Synthetic oligonucleotide; CTT chr11 5304413 5304434 5304430 5304435 +
cttcaacttgccatgctgacaa

SEQ ID NO: 97313 - DNA, 22 bp, Artificial Sequence
  Synthetic oligonucleotide; TTC chr11 5304414 5304435 5304431 5304436 +
ttcaacttgccatgctgacaaa

SEQ ID NO: 97314 - DNA, 22 bp, Artificial Sequence
  Synthetic oligonucleotide; CTT chr11 5304416 5304437 5304433 5304438 +
caacttgccatgctgacaaaaa

SEQ ID NO: 97315 - DNA, 22 bp, Artificial Sequence
  Synthetic oligonucleotide; TTC chr11 5304417 5304438 5304434 5304439 +
aacttgccatgctgacaaaaag

SEQ ID NO: 97316 - DNA, 22 bp, Artificial Sequence
  Synthetic oligonucleotide; CTT chr11 5304422 5304443 5304439 5304444 +
gccatgctgacaaaaagcttag

SEQ ID NO: 97317 - DNA, 22 bp, Artificial Sequence
  Synthetic oligonucleotide; TTG chr11 5304423 5304444 5304440 5304445 +
ccatgctgacaaaaagcttagg

SEQ ID NO: 97318 - DNA, 22 bp, Artificial Sequence
  Synthetic oligonucleotide; CTG chr11 5304431 5304452 5304448 5304453 +
acaaaaagcttaggaactgttc

SEQ ID NO: 97319 - DNA, 22 bp, Artificial Sequence
  Synthetic oligonucleotide; CTT chr11 5304442 5304463 5304459 5304464 +
aggaactgttcaggaaaccatt

SEQ ID NO: 97320 - DNA, 22 bp, Artificial Sequence
  Synthetic oligonucleotide; TTA chr11 5304443 5304464 5304460 5304465 +
ggaactgttcaggaaaccattt

SEQ ID NO: 97321 - DNA, 22 bp, Artificial Sequence
  Synthetic oligonucleotide; CTG chr11 5304450 5304471 5304467 5304472 +
ttcaggaaaccatttataaaga

SEQ ID NO: 97322 - DNA, 22 bp, Artificial Sequence
  Synthetic oligonucleotide; TTC chr11 5304453 5304474 5304470 5304475 +
aggaaaccatttataaagacat

SEQ ID NO: 97323 - DNA, 22 bp, Artificial Sequence
  Synthetic oligonucleotide; TTT chr11 5304465 5304486 5304482 5304487 +
ataaagacataaactaaaatga

SEQ ID NO: 97324 - DNA, 22 bp, Artificial Sequence
  Synthetic oligonucleotide; TTA chr11 5304466 5304487 5304483 5304488 +
taaagacataaactaaaatgag

SEQ ID NO: 97325 - DNA, 22 bp, Artificial Sequence
  Synthetic oligonucleotide; CTA chr11 5304481 5304502 5304498 5304503 +
aaatgagaagacaaaaagagaa

SEQ ID NO: 97326 - DNA, 22 bp, Artificial Sequence
  Synthetic oligonucleotide; TTA chr11 5304508 5304529 5304525 5304530 +
agatcgtgttaaaaaagaacag

SEQ ID NO: 97327 - DNA, 22 bp, Artificial Sequence
  Synthetic oligonucleotide; TTA chr11 5304519 5304540 5304536 5304541 +
aaaaagaacagtcttccgttta

SEQ ID NO: 97328 - DNA, 22 bp, Artificial Sequence
  Synthetic oligonucleotide; CTT chr11 5304534 5304555 5304551 5304556 +
ccgtttagttccagataatctg

SEQ ID NO: 97329 - DNA, 22 bp, Artificial Sequence
  Synthetic oligonucleotide; TTC chr11 5304535 5304556 5304552 5304557 +
cgtttagttccagataatctgc

SEQ ID NO: 97330 - DNA, 22 bp, Artificial Sequence
  Synthetic oligonucleotide; TTT chr11 5304540 5304561 5304557 5304562 +
agttccagataatctgcaagtg

SEQ ID NO: 97331 - DNA, 22 bp, Artificial Sequence
  Synthetic oligonucleotide; TTA chr11 5304541 5304562 5304558 5304563 +
gttccagataatctgcaagtgc

SEQ ID NO: 97332 - DNA, 22 bp, Artificial Sequence
  Synthetic oligonucleotide; TTC chr11 5304545 5304566 5304562 5304567 +
cagataatctgcaagtgccctg

SEQ ID NO: 97333 - DNA, 22 bp, Artificial Sequence
  Synthetic oligonucleotide; CTG chr11 5304556 5304577 5304573 5304578 +
caagtgccctgtacaatcagtg

SEQ ID NO: 97334 - DNA, 22 bp, Artificial Sequence
  Synthetic oligonucleotide; CTG chr11 5304567 5304588 5304584 5304589 +
tacaatcagtgtcccctgaatc

SEQ ID NO: 97335 - DNA, 22 bp, Artificial Sequence
  Synthetic oligonucleotide; CTG chr11 5304585 5304606 5304602 5304607 +
aatccactttttcatctccaca

SEQ ID NO: 97336 - DNA, 22 bp, Artificial Sequence
  Synthetic oligonucleotide; CTT chr11 5304594 5304615 5304611 5304616 +
tttcatctccacatattgcccc

SEQ ID NO: 97337 - DNA, 22 bp, Artificial Sequence
  Synthetic oligonucleotide; TTT chr11 5304595 5304616 5304612 5304617 +
ttcatctccacatattgcccca

SEQ ID NO: 97338 - DNA, 22 bp, Artificial Sequence
  Synthetic oligonucleotide; TTT chr11 5304596 5304617 5304613 5304618 +
tcatctccacatattgccccaa

SEQ ID NO: 97339 - DNA, 22 bp, Artificial Sequence
  Synthetic oligonucleotide; TTT chr11 5304597 5304618 5304614 5304619 +
catctccacatattgccccaaa

SEQ ID NO: 97340 - DNA, 22 bp, Artificial Sequence
  Synthetic oligonucleotide; TTC chr11 5304598 5304619 5304615 5304620 +
atctccacatattgccccaaaa

SEQ ID NO: 97341 - DNA, 22 bp, Artificial Sequence
  Synthetic oligonucleotide; CTC chr11 5304603 5304624 5304620 5304625 +
cacatattgccccaaaattgtg

SEQ ID NO: 97342 - DNA, 22 bp, Artificial Sequence
  Synthetic oligonucleotide; TTG chr11 5304612 5304633 5304629 5304634 +
ccccaaaattgtgttcctatag

SEQ ID NO: 97343 - DNA, 22 bp, Artificial Sequence
  Synthetic oligonucleotide; TTG chr11 5304623 5304644 5304640 5304645 +
tgttcctatagaagaaattaat

SEQ ID NO: 97344 - DNA, 22 bp, Artificial Sequence
  Synthetic oligonucleotide; TTC chr11 5304628 5304649 5304645 5304650 +
ctatagaagaaattaataaata

SEQ ID NO: 97345 - DNA, 22 bp, Artificial Sequence
  Synthetic oligonucleotide; CTA chr11 5304631 5304652 5304648 5304653 +
tagaagaaattaataaatatac

SEQ ID NO: 97346 - DNA, 22 bp, Artificial Sequence
  Synthetic oligonucleotide; TTA chr11 5304643 5304664 5304660 5304665 +
ataaatataccaaaataaatat

SEQ ID NO: 97347 - DNA, 22 bp, Artificial Sequence
  Synthetic oligonucleotide; TTT chr11 5304667 5304688 5304684 5304689 +
aaagtcaactgacaatgggaag

SEQ ID NO: 97348 - DNA, 22 bp, Artificial Sequence
  Synthetic oligonucleotide; TTA chr11 5304668 5304689 5304685 5304690 +
aagtcaactgacaatgggaagc

SEQ ID NO: 97349 - DNA, 22 bp, Artificial Sequence
  Synthetic oligonucleotide; CTG chr11 5304678 5304699 5304695 5304700 +
acaatgggaagccatgagatga

SEQ ID NO: 97350 - DNA, 22 bp, Artificial Sequence
  Synthetic oligonucleotide; CTG chr11 5304714 5304735 5304731 5304736 +
aaaaatctcagcttttaagtga

SEQ ID NO: 97351 - DNA, 22 bp, Artificial Sequence
  Synthetic oligonucleotide; CTC chr11 5304723 5304744 5304740 5304745 +
agcttttaagtgacttttttat

SEQ ID NO: 97352 - DNA, 22 bp, Artificial Sequence
  Synthetic oligonucleotide; CTT chr11 5304728 5304749 5304745 5304750 +
ttaagtgacttttttatatctt

SEQ ID NO: 97353 - DNA, 22 bp, Artificial Sequence
  Synthetic oligonucleotide; TTT chr11 5304729 5304750 5304746 5304751 +
taagtgacttttttatatctta

SEQ ID NO: 97354 - DNA, 22 bp, Artificial Sequence
  Synthetic oligonucleotide; TTT chr11 5304730 5304751 5304747 5304752 +
aagtgacttttttatatcttac

SEQ ID NO: 97355 - DNA, 22 bp, Artificial Sequence
  Synthetic oligonucleotide; TTA chr11 5304731 5304752 5304748 5304753 +
agtgacttttttatatcttacc

SEQ ID NO: 97356 - DNA, 22 bp, Artificial Sequence
  Synthetic oligonucleotide; CTT chr11 5304739 5304760 5304756 5304761 +
ttttatatcttaccttaagtac

SEQ ID NO: 97357 - DNA, 22 bp, Artificial Sequence
  Synthetic oligonucleotide; TTT chr11 5304740 5304761 5304757 5304762 +
tttatatcttaccttaagtaca

SEQ ID NO: 97358 - DNA, 22 bp, Artificial Sequence
  Synthetic oligonucleotide; TTT chr11 5304741 5304762 5304758 5304763 +
ttatatcttaccttaagtacaa

SEQ ID NO: 97359 - DNA, 22 bp, Artificial Sequence
  Synthetic oligonucleotide; TTT chr11 5304742 5304763 5304759 5304764 +
tatatcttaccttaagtacaaa

SEQ ID NO: 97360 - DNA, 22 bp, Artificial Sequence
  Synthetic oligonucleotide; TTT chr11 5304743 5304764 5304760 5304765 +
atatcttaccttaagtacaaat

SEQ ID NO: 97361 - DNA, 22 bp, Artificial Sequence
  Synthetic oligonucleotide; TTA chr11 5304744 5304765 5304761 5304766 +
tatcttaccttaagtacaaatt

SEQ ID NO: 97362 - DNA, 22 bp, Artificial Sequence
  Synthetic oligonucleotide; CTT chr11 5304750 5304771 5304767 5304772 +
accttaagtacaaattaaaatg

SEQ ID NO: 97363 - DNA, 22 bp, Artificial Sequence
  Synthetic oligonucleotide; TTA chr11 5304751 5304772 5304768 5304773 +
ccttaagtacaaattaaaatgg

SEQ ID NO: 97364 - DNA, 22 bp, Artificial Sequence
  Synthetic oligonucleotide; CTT chr11 5304755 5304776 5304772 5304777 +
aagtacaaattaaaatggaaga

SEQ ID NO: 97365 - DNA, 22 bp, Artificial Sequence
  Synthetic oligonucleotide; TTA chr11 5304756 5304777 5304773 5304778 +
agtacaaattaaaatggaagag

SEQ ID NO: 97366 - DNA, 22 bp, Artificial Sequence
  Synthetic oligonucleotide; TTA chr11 5304767 5304788 5304784 5304789 +
aaatggaagaggtggccaggca

SEQ ID NO: 97367 - DNA, 22 bp, Artificial Sequence
  Synthetic oligonucleotide; CTC chr11 5304798 5304819 5304815 5304820 +
atgcctgtaatcctagcacttt

SEQ ID NO: 97368 - DNA, 22 bp, Artificial Sequence
  Synthetic oligonucleotide; CTG chr11 5304805 5304826 5304822 5304827 +
taatcctagcactttggaaggc

SEQ ID NO: 97369 - DNA, 22 bp, Artificial Sequence
  Synthetic oligonucleotide; CTA chr11 5304813 5304834 5304830 5304835 +
gcactttggaaggctgaggtgg

SEQ ID NO: 97370 - DNA, 22 bp, Artificial Sequence
  Synthetic oligonucleotide; CTT chr11 5304819 5304840 5304836 5304841 +
tggaaggctgaggtggatcacg

SEQ ID NO: 97371 - DNA, 22 bp, Artificial Sequence
  Synthetic oligonucleotide; TTT chr11 5304820 5304841 5304837 5304842 +
ggaaggctgaggtggatcacga

SEQ ID NO: 97372 - DNA, 22 bp, Artificial Sequence
  Synthetic oligonucleotide; TTG chr11 5304821 5304842 5304838 5304843 +
gaaggctgaggtggatcacgag

SEQ ID NO: 97373 - DNA, 22 bp, Artificial Sequence
  Synthetic oligonucleotide; CTG chr11 5304829 5304850 5304846 5304851 +
aggtggatcacgaggtcagcag

SEQ ID NO: 97374 - DNA, 22 bp, Artificial Sequence
  Synthetic oligonucleotide; TTT chr11 5304854 5304875 5304871 5304876 +
gagactagcctggccaacatgg

SEQ ID NO: 97375 - DNA, 22 bp, Artificial Sequence
  Synthetic oligonucleotide; TTG chr11 5304855 5304876 5304872 5304877 +
agactagcctggccaacatggt

SEQ ID NO: 97376 - DNA, 22 bp, Artificial Sequence
  Synthetic oligonucleotide; CTA chr11 5304861 5304882 5304878 5304883 +
gcctggccaacatggtgaaacc

SEQ ID NO: 97377 - DNA, 22 bp, Artificial Sequence
  Synthetic oligonucleotide; CTG chr11 5304866 5304887 5304883 5304888 +
gccaacatggtgaaaccctgtc

SEQ ID NO: 97378 - DNA, 22 bp, Artificial Sequence
  Synthetic oligonucleotide; CTG chr11 5304886 5304907 5304903 5304908 +
tctctactaaaaatacaaaaat

SEQ ID NO: 97379 - DNA, 22 bp, Artificial Sequence
  Synthetic oligonucleotide; CTC chr11 5304890 5304911 5304907 5304912 +
tactaaaaatacaaaaattagc

SEQ ID NO: 97380 - DNA, 22 bp, Artificial Sequence
  Synthetic oligonucleotide; CTA chr11 5304892 5304913 5304909 5304914 +
ctaaaaatacaaaaattagctg

SEQ ID NO: 97381 - DNA, 22 bp, Artificial Sequence
  Synthetic oligonucleotide; CTA chr11 5304895 5304916 5304912 5304917 +
aaaatacaaaaattagctgggt

SEQ ID NO: 97382 - DNA, 22 bp, Artificial Sequence
  Synthetic oligonucleotide; TTA chr11 5304910 5304931 5304927 5304932 +
gctgggtgtggtggtgagcgcc

SEQ ID NO: 97383 - DNA, 22 bp, Artificial Sequence
  Synthetic oligonucleotide; CTG chr11 5304914 5304935 5304931 5304936 +
ggtgtggtggtgagcgcctgta

SEQ ID NO: 97384 - DNA, 22 bp, Artificial Sequence
  Synthetic oligonucleotide; CTG chr11 5304934 5304955 5304951 5304956 +
taatcccagctactcgggaggc

SEQ ID NO: 97385 - DNA, 22 bp, Artificial Sequence
  Synthetic oligonucleotide; CTA chr11 5304946 5304967 5304963 5304968 +
ctcgggaggctgaggcaggaga

SEQ ID NO: 97386 - DNA, 22 bp, Artificial Sequence
  Synthetic oligonucleotide; CTC chr11 5304949 5304970 5304966 5304971 +
gggaggctgaggcaggagaatt

SEQ ID NO: 97387 - DNA, 22 bp, Artificial Sequence
  Synthetic oligonucleotide; CTG chr11 5304958 5304979 5304975 5304980 +
aggcaggagaattgctttaaaa

SEQ ID NO: 97388 - DNA, 22 bp, Artificial Sequence
  Synthetic oligonucleotide; TTG chr11 5304972 5304993 5304989 5304994 +
ctttaaaaaaactggggagcag

SEQ ID NO: 97389 - DNA, 22 bp, Artificial Sequence
  Synthetic oligonucleotide; CTT chr11 5304975 5304996 5304992 5304997 +
taaaaaaactggggagcagagg

SEQ ID NO: 97390 - DNA, 22 bp, Artificial Sequence
  Synthetic oligonucleotide; TTT chr11 5304976 5304997 5304993 5304998 +
aaaaaaactggggagcagaggt

SEQ ID NO: 97391 - DNA, 22 bp, Artificial Sequence
  Synthetic oligonucleotide; TTA chr11 5304977 5304998 5304994 5304999 +
aaaaaactggggagcagaggtc

SEQ ID NO: 97392 - DNA, 22 bp, Artificial Sequence
  Synthetic oligonucleotide; CTG chr11 5304986 5305007 5305003 5305008 +
gggagcagaggtcgtcgcagtg

SEQ ID NO: 97393 - DNA, 22 bp, Artificial Sequence
  Synthetic oligonucleotide; TTG chr11 5305019 5305040 5305036 5305041 +
tgccactgcactacagcctggg

SEQ ID NO: 97394 - DNA, 22 bp, Artificial Sequence
  Synthetic oligonucleotide; CTG chr11 5305027 5305048 5305044 5305049 +
cactacagcctgggcgacaaag

SEQ ID NO: 97395 - DNA, 22 bp, Artificial Sequence
  Synthetic oligonucleotide; CTA chr11 5305032 5305053 5305049 5305054 +
cagcctgggcgacaaagcaagg

SEQ ID NO: 97396 - DNA, 22 bp, Artificial Sequence
  Synthetic oligonucleotide; CTG chr11 5305039 5305060 5305056 5305061 +
ggcgacaaagcaaggctctgtc

SEQ ID NO: 97397 - DNA, 22 bp, Artificial Sequence
  Synthetic oligonucleotide; CTC chr11 5305057 5305078 5305074 5305079 +
tgtctcaaaaaaaaaaaaaaaa

SEQ ID NO: 97398 - DNA, 22 bp, Artificial Sequence
  Synthetic oligonucleotide; CTG chr11 5305059 5305080 5305076 5305081 +
tctcaaaaaaaaaaaaaaaaaa

SEQ ID NO: 97399 - DNA, 22 bp, Artificial Sequence
  Synthetic oligonucleotide; CTC chr11 5305063 5305084 5305080 5305085 +
aaaaaaaaaaaaaaaaaaggtt

SEQ ID NO: 97400 - DNA, 22 bp, Artificial Sequence
  Synthetic oligonucleotide; TTT chr11 5305086 5305107 5305103 5305108 +
ggagagaaacattgggaaacta

SEQ ID NO: 97401 - DNA, 22 bp, Artificial Sequence
  Synthetic oligonucleotide; TTG chr11 5305087 5305108 5305104 5305109 +
gagagaaacattgggaaactag

SEQ ID NO: 97402 - DNA, 22 bp, Artificial Sequence
  Synthetic oligonucleotide; TTG chr11 5305100 5305121 5305117 5305122 +
ggaaactaggacaaattttgct

SEQ ID NO: 97403 - DNA, 22 bp, Artificial Sequence
  Synthetic oligonucleotide; CTA chr11 5305108 5305129 5305125 5305130 +
ggacaaattttgctctcagtaa

SEQ ID NO: 97404 - DNA, 22 bp, Artificial Sequence
  Synthetic oligonucleotide; TTT chr11 5305118 5305139 5305135 5305140 +
tgctctcagtaaaaagaaagat

SEQ ID NO: 97405 - DNA, 22 bp, Artificial Sequence
  Synthetic oligonucleotide; TTT chr11 5305119 5305140 5305136 5305141 +
gctctcagtaaaaagaaagatc

SEQ ID NO: 97406 - DNA, 22 bp, Artificial Sequence
  Synthetic oligonucleotide; TTG chr11 5305120 5305141 5305137 5305142 +
ctctcagtaaaaagaaagatct

SEQ ID NO: 97407 - DNA, 22 bp, Artificial Sequence
  Synthetic oligonucleotide; CTC chr11 5305123 5305144 5305140 5305145 +
tcagtaaaaagaaagatctcaa

SEQ ID NO: 97408 - DNA, 22 bp, Artificial Sequence
  Synthetic oligonucleotide; CTC chr11 5305125 5305146 5305142 5305147 +
agtaaaaagaaagatctcaaag

SEQ ID NO: 97409 - DNA, 22 bp, Artificial Sequence
  Synthetic oligonucleotide; CTC chr11 5305143 5305164 5305160 5305165 +
aaaggagatagacaaagaagca

SEQ ID NO: 97410 - DNA, 22 bp, Artificial Sequence
  Synthetic oligonucleotide; TTG chr11 5305194 5305215 5305211 5305216 +
atctgtatttacaaaaaaacaa

SEQ ID NO: 97411 - DNA, 22 bp, Artificial Sequence
  Synthetic oligonucleotide; CTG chr11 5305199 5305220 5305216 5305221 +
tatttacaaaaaaacaatgaaa

SEQ ID NO: 97412 - DNA, 22 bp, Artificial Sequence
  Synthetic oligonucleotide; TTT chr11 5305204 5305225 5305221 5305226 +
acaaaaaaacaatgaaaaggga

SEQ ID NO: 97413 - DNA, 22 bp, Artificial Sequence
  Synthetic oligonucleotide; TTA chr11 5305205 5305226 5305222 5305227 +
caaaaaaacaatgaaaagggaa

SEQ ID NO: 97414 - DNA, 22 bp, Artificial Sequence
  Synthetic oligonucleotide; TTT chr11 5305231 5305252 5305248 5305253 +
ataggagtggatactatggtag

SEQ ID NO: 97415 - DNA, 22 bp, Artificial Sequence
  Synthetic oligonucleotide; TTA chr11 5305232 5305253 5305249 5305254 +
taggagtggatactatggtagg

SEQ ID NO: 97416 - DNA, 22 bp, Artificial Sequence
  Synthetic oligonucleotide; CTA chr11 5305247 5305268 5305264 5305269 +
tggtaggttaatagtgaaaaat

SEQ ID NO: 97417 - DNA, 22 bp, Artificial Sequence
  Synthetic oligonucleotide; TTA chr11 5305257 5305278 5305274 5305279 +
atagtgaaaaatatagaattat

SEQ ID NO: 97418 - DNA, 22 bp, Artificial Sequence
  Synthetic oligonucleotide; TTA chr11 5305278 5305299 5305295 5305300 +
tcaattaatataaacatagagg

SEQ ID NO: 97419 - DNA, 22 bp, Artificial Sequence
  Synthetic oligonucleotide; TTA chr11 5305285 5305306 5305302 5305307 +
atataaacatagaggtgttgat

SEQ ID NO: 97420 - DNA, 22 bp, Artificial Sequence
  Synthetic oligonucleotide; TTG chr11 5305305 5305326 5305322 5305327 +
attgtttggggcaactaggtct

SEQ ID NO: 97421 - DNA, 22 bp, Artificial Sequence
  Synthetic oligonucleotide; TTG chr11 5305309 5305330 5305326 5305331 +
tttggggcaactaggtctttgg

SEQ ID NO: 97422 - DNA, 22 bp, Artificial Sequence
  Synthetic oligonucleotide; TTT chr11 5305312 5305333 5305329 5305334 +
ggggcaactaggtctttggtaa

SEQ ID NO: 97423 - DNA, 22 bp, Artificial Sequence
  Synthetic oligonucleotide; TTG chr11 5305313 5305334 5305330 5305335 +
gggcaactaggtctttggtaat

SEQ ID NO: 97424 - DNA, 22 bp, Artificial Sequence
  Synthetic oligonucleotide; CTA chr11 5305322 5305343 5305339 5305344 +
ggtctttggtaatattgacaat

SEQ ID NO: 97425 - DNA, 22 bp, Artificial Sequence
  Synthetic oligonucleotide; CTT chr11 5305328 5305349 5305345 5305350 +
tggtaatattgacaatttcaac

SEQ ID NO: 97426 - DNA, 22 bp, Artificial Sequence
  Synthetic oligonucleotide; TTT chr11 5305329 5305350 5305346 5305351 +
ggtaatattgacaatttcaaca

SEQ ID NO: 97427 - DNA, 22 bp, Artificial Sequence
  Synthetic oligonucleotide; TTG chr11 5305330 5305351 5305347 5305352 +
gtaatattgacaatttcaacat

SEQ ID NO: 97428 - DNA, 22 bp, Artificial Sequence
  Synthetic oligonucleotide; TTG chr11 5305339 5305360 5305356 5305361 +
acaatttcaacataatggcaga

SEQ ID NO: 97429 - DNA, 22 bp, Artificial Sequence
  Synthetic oligonucleotide; TTT chr11 5305346 5305367 5305363 5305368 +
caacataatggcagaaatgaat

SEQ ID NO: 97430 - DNA, 22 bp, Artificial Sequence
  Synthetic oligonucleotide; TTC chr11 5305347 5305368 5305364 5305369 +
aacataatggcagaaatgaatg

SEQ ID NO: 97431 - DNA, 22 bp, Artificial Sequence
  Synthetic oligonucleotide; CTA chr11 5305373 5305394 5305390 5305395 +
atgactgtgagacaaaaagtga

SEQ ID NO: 97432 - DNA, 22 bp, Artificial Sequence
  Synthetic oligonucleotide; CTG chr11 5305380 5305401 5305397 5305402 +
tgagacaaaaagtgagtaaaaa

SEQ ID NO: 97433 - DNA, 22 bp, Artificial Sequence
  Synthetic oligonucleotide; CTG chr11 5305409 5305430 5305426 5305431 +
ggcacggtggctcatgcctata

SEQ ID NO: 97434 - DNA, 22 bp, Artificial Sequence
  Synthetic oligonucleotide; CTC chr11 5305422 5305443 5305439 5305444 +
atgcctataatcccagcacttt

SEQ ID NO: 97435 - DNA, 22 bp, Artificial Sequence
  Synthetic oligonucleotide; CTA chr11 5305429 5305450 5305446 5305451 +
taatcccagcactttgggaggc

SEQ ID NO: 97436 - DNA, 22 bp, Artificial Sequence
  Synthetic oligonucleotide; CTT chr11 5305443 5305464 5305460 5305465 +
tgggaggccgaggagggtggat

SEQ ID NO: 97437 - DNA, 22 bp, Artificial Sequence
  Synthetic oligonucleotide; TTT chr11 5305444 5305465 5305461 5305466 +
gggaggccgaggagggtggatc

SEQ ID NO: 97438 - DNA, 22 bp, Artificial Sequence
  Synthetic oligonucleotide; TTG chr11 5305445 5305466 5305462 5305467 +
ggaggccgaggagggtggatca

SEQ ID NO: 97439 - DNA, 22 bp, Artificial Sequence
  Synthetic oligonucleotide; CTT chr11 5305470 5305491 5305487 5305492 +
gagttcaggagttcgagaccag

SEQ ID NO: 97440 - DNA, 22 bp, Artificial Sequence
  Synthetic oligonucleotide; TTG chr11 5305471 5305492 5305488 5305493 +
agttcaggagttcgagaccagc

SEQ ID NO: 97441 - DNA, 22 bp, Artificial Sequence
  Synthetic oligonucleotide; TTC chr11 5305476 5305497 5305493 5305498 +
aggagttcgagaccagctgggc

SEQ ID NO: 97442 - DNA, 22 bp, Artificial Sequence
  Synthetic oligonucleotide; TTC chr11 5305484 5305505 5305501 5305506 +
gagaccagctgggccaacatgg

SEQ ID NO: 97443 - DNA, 22 bp, Artificial Sequence
  Synthetic oligonucleotide; CTG chr11 5305495 5305516 5305512 5305517 +
ggccaacatggcaaaacaccat

SEQ ID NO: 97444 - DNA, 22 bp, Artificial Sequence
  Synthetic oligonucleotide; CTA chr11 5305522 5305543 5305539 5305544 +
ctataattacaaaaataagcca

SEQ ID NO: 97445 - DNA, 22 bp, Artificial Sequence
  Synthetic oligonucleotide; CTA chr11 5305525 5305546 5305542 5305547 +
taattacaaaaataagccaggt

SEQ ID NO: 97446 - DNA, 22 bp, Artificial Sequence
  Synthetic oligonucleotide; TTA chr11 5305531 5305552 5305548 5305553 +
caaaaataagccaggtgtggtg

SEQ ID NO: 97447 - DNA, 22 bp, Artificial Sequence
  Synthetic oligonucleotide; CTA chr11 5305576 5305597 5305593 5305598 +
ctctggaggctgaggcatgaga

SEQ ID NO: 97448 - DNA, 22 bp, Artificial Sequence
  Synthetic oligonucleotide; CTC chr11 5305579 5305600 5305596 5305601 +
tggaggctgaggcatgagaatc

SEQ ID NO: 97449 - DNA, 22 bp, Artificial Sequence
  Synthetic oligonucleotide; CTG chr11 5305581 5305602 5305598 5305603 +
gaggctgaggcatgagaatccc

SEQ ID NO: 97450 - DNA, 22 bp, Artificial Sequence
  Synthetic oligonucleotide; CTG chr11 5305588 5305609 5305605 5305610 +
aggcatgagaatcccctgaacc

SEQ ID NO: 97451 - DNA, 22 bp, Artificial Sequence
  Synthetic oligonucleotide; CTG chr11 5305606 5305627 5305623 5305628 +
aaccctggtggaggaggtcgca

SEQ ID NO: 97452 - DNA, 22 bp, Artificial Sequence
  Synthetic oligonucleotide; CTG chr11 5305613 5305634 5305630 5305635 +
gtggaggaggtcgcagtgagct

SEQ ID NO: 97453 - DNA, 22 bp, Artificial Sequence
  Synthetic oligonucleotide; CTG chr11 5305636 5305657 5305653 5305658 +
agatcgcaccactgcactctag

SEQ ID NO: 97454 - DNA, 22 bp, Artificial Sequence
  Synthetic oligonucleotide; CTG chr11 5305650 5305671 5305667 5305672 +
cactctagcctgggcaacagag

SEQ ID NO: 97455 - DNA, 22 bp, Artificial Sequence
  Synthetic oligonucleotide; CTC chr11 5305655 5305676 5305672 5305677 +
tagcctgggcaacagagaaaaa

SEQ ID NO: 97456 - DNA, 22 bp, Artificial Sequence
  Synthetic oligonucleotide; CTA chr11 5305657 5305678 5305674 5305679 +
gcctgggcaacagagaaaaatc

SEQ ID NO: 97457 - DNA, 22 bp, Artificial Sequence
  Synthetic oligonucleotide; CTG chr11 5305662 5305683 5305679 5305684 +
ggcaacagagaaaaatctgtta

SEQ ID NO: 97458 - DNA, 22 bp, Artificial Sequence
  Synthetic oligonucleotide; CTG chr11 5305681 5305702 5305698 5305703 +
ttaaagagagagagagaaaaga

SEQ ID NO: 97459 - DNA, 22 bp, Artificial Sequence
  Synthetic oligonucleotide; TTA chr11 5305684 5305705 5305701 5305706 +
aagagagagagagaaaagaaaa

SEQ ID NO: 97460 - DNA, 22 bp, Artificial Sequence
  Synthetic oligonucleotide; TTA chr11 5305742 5305763 5305759 5305764 +
ttttatttatattgttatggtg

SEQ ID NO: 97461 - DNA, 22 bp, Artificial Sequence
  Synthetic oligonucleotide; TTT chr11 5305745 5305766 5305762 5305767 +
tatttatattgttatggtgagg

SEQ ID NO: 97462 - DNA, 22 bp, Artificial Sequence
  Synthetic oligonucleotide; TTT chr11 5305746 5305767 5305763 5305768 +
atttatattgttatggtgagga

SEQ ID NO: 97463 - DNA, 22 bp, Artificial Sequence
  Synthetic oligonucleotide; TTA chr11 5305747 5305768 5305764 5305769 +
tttatattgttatggtgaggaa

SEQ ID NO: 97464 - DNA, 22 bp, Artificial Sequence
  Synthetic oligonucleotide; TTT chr11 5305750 5305771 5305767 5305772 +
atattgttatggtgaggaaatt

SEQ ID NO: 97465 - DNA, 22 bp, Artificial Sequence
  Synthetic oligonucleotide; TTA chr11 5305751 5305772 5305768 5305773 +
tattgttatggtgaggaaattg

SEQ ID NO: 97466 - DNA, 22 bp, Artificial Sequence
  Synthetic oligonucleotide; TTG chr11 5305756 5305777 5305773 5305778 +
ttatggtgaggaaattgagcct

SEQ ID NO: 97467 - DNA, 22 bp, Artificial Sequence
  Synthetic oligonucleotide; TTA chr11 5305759 5305780 5305776 5305781 +
tggtgaggaaattgagccttag

SEQ ID NO: 97468 - DNA, 22 bp, Artificial Sequence
  Synthetic oligonucleotide; TTG chr11 5305773 5305794 5305790 5305795 +
agccttagacaagttaagcaat

SEQ ID NO: 97469 - DNA, 22 bp, Artificial Sequence
  Synthetic oligonucleotide; CTT chr11 5305779 5305800 5305796 5305801 +
agacaagttaagcaattagcct

SEQ ID NO: 97470 - DNA, 22 bp, Artificial Sequence
  Synthetic oligonucleotide; TTA chr11 5305780 5305801 5305797 5305802 +
gacaagttaagcaattagccta

SEQ ID NO: 97471 - DNA, 22 bp, Artificial Sequence
  Synthetic oligonucleotide; TTA chr11 5305789 5305810 5305806 5305811 +
agcaattagcctaagatcacgc

SEQ ID NO: 97472 - DNA, 22 bp, Artificial Sequence
  Synthetic oligonucleotide; TTA chr11 5305797 5305818 5305814 5305819 +
gcctaagatcacgcaactaata

SEQ ID NO: 97473 - DNA, 22 bp, Artificial Sequence
  Synthetic oligonucleotide; CTA chr11 5305802 5305823 5305819 5305824 +
agatcacgcaactaatatgtgt

SEQ ID NO: 97474 - DNA, 22 bp, Artificial Sequence
  Synthetic oligonucleotide; CTA chr11 5305816 5305837 5305833 5305838 +
atatgtgtcataaaggaattca

SEQ ID NO: 97475 - DNA, 22 bp, Artificial Sequence
  Synthetic oligonucleotide; TTC chr11 5305837 5305858 5305854 5305859 +
aaacacaggtttatctaaccca

SEQ ID NO: 97476 - DNA, 22 bp, Artificial Sequence
  Synthetic oligonucleotide; TTT chr11 5305849 5305870 5305866 5305871 +
atctaacccaaaacccaagctc

SEQ ID NO: 97477 - DNA, 22 bp, Artificial Sequence
  Synthetic oligonucleotide; TTA chr11 5305850 5305871 5305867 5305872 +
tctaacccaaaacccaagctca

SEQ ID NO: 97478 - DNA, 22 bp, Artificial Sequence
  Synthetic oligonucleotide; CTA chr11 5305854 5305875 5305871 5305876 +
acccaaaacccaagctcatatt

SEQ ID NO: 97479 - DNA, 22 bp, Artificial Sequence
  Synthetic oligonucleotide; CTC chr11 5305871 5305892 5305888 5305893 +
atattctcaaccaatgtccatc

SEQ ID NO: 97480 - DNA, 22 bp, Artificial Sequence
  Synthetic oligonucleotide; TTC chr11 5305877 5305898 5305894 5305899 +
tcaaccaatgtccatcaaatgg

SEQ ID NO: 97481 - DNA, 22 bp, Artificial Sequence
  Synthetic oligonucleotide; CTC chr11 5305879 5305900 5305896 5305901 +
aaccaatgtccatcaaatggaa

SEQ ID NO: 97482 - DNA, 22 bp, Artificial Sequence
  Synthetic oligonucleotide; TTA chr11 5305908 5305929 5305925 5305930 +
aacttgcttcccgtatttgaat

SEQ ID NO: 97483 - DNA, 22 bp, Artificial Sequence
  Synthetic oligonucleotide; CTT chr11 5305913 5305934 5305930 5305935 +
gcttcccgtatttgaatccttg

SEQ ID NO: 97484 - DNA, 22 bp, Artificial Sequence
  Synthetic oligonucleotide; TTG chr11 5305914 5305935 5305931 5305936 +
cttcccgtatttgaatccttgg

SEQ ID NO: 97485 - DNA, 22 bp, Artificial Sequence
  Synthetic oligonucleotide; CTT chr11 5305917 5305938 5305934 5305939 +
cccgtatttgaatccttggctt

SEQ ID NO: 97486 - DNA, 22 bp, Artificial Sequence
  Synthetic oligonucleotide; TTC chr11 5305918 5305939 5305935 5305940 +
ccgtatttgaatccttggcttt

SEQ ID NO: 97487 - DNA, 22 bp, Artificial Sequence
  Synthetic oligonucleotide; TTT chr11 5305926 5305947 5305943 5305948 +
gaatccttggcttttcttacct

SEQ ID NO: 97488 - DNA, 22 bp, Artificial Sequence
  Synthetic oligonucleotide; TTG chr11 5305927 5305948 5305944 5305949 +
aatccttggcttttcttacctg

SEQ ID NO: 97489 - DNA, 22 bp, Artificial Sequence
  Synthetic oligonucleotide; CTT chr11 5305934 5305955 5305951 5305956 +
ggcttttcttacctgagccaca

SEQ ID NO: 97490 - DNA, 22 bp, Artificial Sequence
  Synthetic oligonucleotide; TTG chr11 5305935 5305956 5305952 5305957 +
gcttttcttacctgagccacag

SEQ ID NO: 97491 - DNA, 22 bp, Artificial Sequence
  Synthetic oligonucleotide; CTT chr11 5305939 5305960 5305956 5305961 +
ttcttacctgagccacagtttt

SEQ ID NO: 97492 - DNA, 22 bp, Artificial Sequence
  Synthetic oligonucleotide; TTT chr11 5305940 5305961 5305957 5305962 +
tcttacctgagccacagttttc

SEQ ID NO: 97493 - DNA, 22 bp, Artificial Sequence
  Synthetic oligonucleotide; TTT chr11 5305941 5305962 5305958 5305963 +
cttacctgagccacagttttct

SEQ ID NO: 97494 - DNA, 22 bp, Artificial Sequence
  Synthetic oligonucleotide; TTC chr11 5305942 5305963 5305959 5305964 +
ttacctgagccacagttttctc

SEQ ID NO: 97495 - DNA, 22 bp, Artificial Sequence
  Synthetic oligonucleotide; CTT chr11 5305944 5305965 5305961 5305966 +
acctgagccacagttttctctt

SEQ ID NO: 97496 - DNA, 22 bp, Artificial Sequence
  Synthetic oligonucleotide; TTA chr11 5305945 5305966 5305962 5305967 +
cctgagccacagttttctcttt

SEQ ID NO: 97497 - DNA, 22 bp, Artificial Sequence
  Synthetic oligonucleotide; CTG chr11 5305949 5305970 5305966 5305971 +
agccacagttttctctttgcgg

SEQ ID NO: 97498 - DNA, 22 bp, Artificial Sequence
  Synthetic oligonucleotide; TTT chr11 5305960 5305981 5305977 5305982 +
tctctttgcggtttctgagcat

SEQ ID NO: 97499 - DNA, 22 bp, Artificial Sequence
  Synthetic oligonucleotide; TTT chr11 5305961 5305982 5305978 5305983 +
ctctttgcggtttctgagcatg

SEQ ID NO: 97500 - DNA, 22 bp, Artificial Sequence
  Synthetic oligonucleotide; TTC chr11 5305962 5305983 5305979 5305984 +
tctttgcggtttctgagcatga

SEQ ID NO: 97501 - DNA, 22 bp, Artificial Sequence
  Synthetic oligonucleotide; CTC chr11 5305964 5305985 5305981 5305986 +
tttgcggtttctgagcatgacc

SEQ ID NO: 97502 - DNA, 22 bp, Artificial Sequence
  Synthetic oligonucleotide; CTT chr11 5305966 5305987 5305983 5305988 +
tgcggtttctgagcatgacctg

SEQ ID NO: 97503 - DNA, 22 bp, Artificial Sequence
  Synthetic oligonucleotide; TTT chr11 5305967 5305988 5305984 5305989 +
gcggtttctgagcatgacctga

SEQ ID NO: 97504 - DNA, 22 bp, Artificial Sequence
  Synthetic oligonucleotide; TTG chr11 5305968 5305989 5305985 5305990 +
cggtttctgagcatgacctgaa

SEQ ID NO: 97505 - DNA, 22 bp, Artificial Sequence
  Synthetic oligonucleotide; TTT chr11 5305974 5305995 5305991 5305996 +
ctgagcatgacctgaatattgg

SEQ ID NO: 97506 - DNA, 22 bp, Artificial Sequence
  Synthetic oligonucleotide; TTC chr11 5305975 5305996 5305992 5305997 +
tgagcatgacctgaatattggt

SEQ ID NO: 97507 - DNA, 22 bp, Artificial Sequence
  Synthetic oligonucleotide; CTG chr11 5305977 5305998 5305994 5305999 +
agcatgacctgaatattggttg

SEQ ID NO: 97508 - DNA, 22 bp, Artificial Sequence
  Synthetic oligonucleotide; CTG chr11 5305988 5306009 5306005 5306010 +
aatattggttgtttgctatatc

SEQ ID NO: 97509 - DNA, 22 bp, Artificial Sequence
  Synthetic oligonucleotide; TTG chr11 5305995 5306016 5306012 5306017 +
gttgtttgctatatcctcagta

SEQ ID NO: 97510 - DNA, 22 bp, Artificial Sequence
  Synthetic oligonucleotide; TTG chr11 5305999 5306020 5306016 5306021 +
tttgctatatcctcagtattta

SEQ ID NO: 97511 - DNA, 22 bp, Artificial Sequence
  Synthetic oligonucleotide; TTT chr11 5306002 5306023 5306019 5306024 +
gctatatcctcagtatttactc

SEQ ID NO: 97512 - DNA, 22 bp, Artificial Sequence
  Synthetic oligonucleotide; TTG chr11 5306003 5306024 5306020 5306025 +
ctatatcctcagtatttactct

SEQ ID NO: 97513 - DNA, 22 bp, Artificial Sequence
  Synthetic oligonucleotide; CTA chr11 5306006 5306027 5306023 5306028 +
tatcctcagtatttactcttaa

SEQ ID NO: 97514 - DNA, 22 bp, Artificial Sequence
  Synthetic oligonucleotide; CTC chr11 5306013 5306034 5306030 5306035 +
agtatttactcttaattctgat

SEQ ID NO: 97515 - DNA, 22 bp, Artificial Sequence
  Synthetic oligonucleotide; TTT chr11 5306020 5306041 5306037 5306042 +
actcttaattctgatgagagat

SEQ ID NO: 97516 - DNA, 22 bp, Artificial Sequence
  Synthetic oligonucleotide; TTA chr11 5306021 5306042 5306038 5306043 +
ctcttaattctgatgagagata

SEQ ID NO: 97517 - DNA, 22 bp, Artificial Sequence
  Synthetic oligonucleotide; CTC chr11 5306024 5306045 5306041 5306046 +
ttaattctgatgagagatatat

SEQ ID NO: 97518 - DNA, 22 bp, Artificial Sequence
  Synthetic oligonucleotide; CTT chr11 5306026 5306047 5306043 5306048 +
aattctgatgagagatatattt

SEQ ID NO: 97519 - DNA, 22 bp, Artificial Sequence
  Synthetic oligonucleotide; TTA chr11 5306027 5306048 5306044 5306049 +
attctgatgagagatatatttg

SEQ ID NO: 97520 - DNA, 22 bp, Artificial Sequence
  Synthetic oligonucleotide; TTC chr11 5306031 5306052 5306048 5306053 +
tgatgagagatatatttgttac

SEQ ID NO: 97521 - DNA, 22 bp, Artificial Sequence
  Synthetic oligonucleotide; CTG chr11 5306033 5306054 5306050 5306055 +
atgagagatatatttgttacac

SEQ ID NO: 97522 - DNA, 22 bp, Artificial Sequence
  Synthetic oligonucleotide; TTT chr11 5306048 5306069 5306065 5306070 +
gttacacaaacaactctcaagg

SEQ ID NO: 97523 - DNA, 22 bp, Artificial Sequence
  Synthetic oligonucleotide; TTG chr11 5306049 5306070 5306066 5306071 +
ttacacaaacaactctcaaggg

SEQ ID NO: 97524 - DNA, 22 bp, Artificial Sequence
  Synthetic oligonucleotide; TTA chr11 5306052 5306073 5306069 5306074 +
cacaaacaactctcaaggggtt

SEQ ID NO: 97525 - DNA, 22 bp, Artificial Sequence
  Synthetic oligonucleotide; CTC chr11 5306064 5306085 5306081 5306086 +
tcaaggggttattctagctcat

SEQ ID NO: 97526 - DNA, 22 bp, Artificial Sequence
  Synthetic oligonucleotide; CTC chr11 5306066 5306087 5306083 5306088 +
aaggggttattctagctcattt

SEQ ID NO: 97527 - DNA, 22 bp, Artificial Sequence
  Synthetic oligonucleotide; TTA chr11 5306075 5306096 5306092 5306097 +
ttctagctcatttccacatagg

SEQ ID NO: 97528 - DNA, 22 bp, Artificial Sequence
  Synthetic oligonucleotide; TTC chr11 5306078 5306099 5306095 5306100 +
tagctcatttccacataggata

SEQ ID NO: 97529 - DNA, 22 bp, Artificial Sequence
  Synthetic oligonucleotide; CTA chr11 5306080 5306101 5306097 5306102 +
gctcatttccacataggatatt

SEQ ID NO: 97530 - DNA, 22 bp, Artificial Sequence
  Synthetic oligonucleotide; CTC chr11 5306084 5306105 5306101 5306106 +
atttccacataggatatttggg

SEQ ID NO: 97531 - DNA, 22 bp, Artificial Sequence
  Synthetic oligonucleotide; TTT chr11 5306088 5306109 5306105 5306110 +
ccacataggatatttgggaata

SEQ ID NO: 97532 - DNA, 22 bp, Artificial Sequence
  Synthetic oligonucleotide; TTC chr11 5306089 5306110 5306106 5306111 +
cacataggatatttgggaatag

SEQ ID NO: 97533 - DNA, 22 bp, Artificial Sequence
  Synthetic oligonucleotide; TTT chr11 5306103 5306124 5306120 5306125 +
gggaatagtgtaccaaataatt

SEQ ID NO: 97534 - DNA, 22 bp, Artificial Sequence
  Synthetic oligonucleotide; TTG chr11 5306104 5306125 5306121 5306126 +
ggaatagtgtaccaaataattc

SEQ ID NO: 97535 - DNA, 22 bp, Artificial Sequence
  Synthetic oligonucleotide; TTC chr11 5306126 5306147 5306143 5306148 +
tcttttcctccccaacctggga

SEQ ID NO: 97536 - DNA, 22 bp, Artificial Sequence
  Synthetic oligonucleotide; CTC chr11 5306128 5306149 5306145 5306150 +
ttttcctccccaacctgggaaa

SEQ ID NO: 97537 - DNA, 22 bp, Artificial Sequence
  Synthetic oligonucleotide; CTT chr11 5306130 5306151 5306147 5306152 +
ttcctccccaacctgggaaaga

SEQ ID NO: 97538 - DNA, 22 bp, Artificial Sequence
  Synthetic oligonucleotide; TTT chr11 5306131 5306152 5306148 5306153 +
tcctccccaacctgggaaagat

SEQ ID NO: 97539 - DNA, 22 bp, Artificial Sequence
  Synthetic oligonucleotide; TTT chr11 5306132 5306153 5306149 5306154 +
cctccccaacctgggaaagatc

SEQ ID NO: 97540 - DNA, 22 bp, Artificial Sequence
  Synthetic oligonucleotide; TTC chr11 5306133 5306154 5306150 5306155 +
ctccccaacctgggaaagatct

SEQ ID NO: 97541 - DNA, 22 bp, Artificial Sequence
  Synthetic oligonucleotide; CTC chr11 5306136 5306157 5306153 5306158 +
cccaacctgggaaagatctggg

SEQ ID NO: 97542 - DNA, 22 bp, Artificial Sequence
  Synthetic oligonucleotide; CTG chr11 5306145 5306166 5306162 5306167 +
ggaaagatctgggccattgaaa

SEQ ID NO: 97543 - DNA, 22 bp, Artificial Sequence
  Synthetic oligonucleotide; CTG chr11 5306156 5306177 5306173 5306178 +
ggccattgaaactggtccccat

SEQ ID NO: 97544 - DNA, 22 bp, Artificial Sequence
  Synthetic oligonucleotide; TTG chr11 5306164 5306185 5306181 5306186 +
aaactggtccccatggccttta

SEQ ID NO: 97545 - DNA, 22 bp, Artificial Sequence
  Synthetic oligonucleotide; CTG chr11 5306170 5306191 5306187 5306192 +
gtccccatggcctttatttttt

SEQ ID NO: 97546 - DNA, 22 bp, Artificial Sequence
  Synthetic oligonucleotide; CTT chr11 5306184 5306205 5306201 5306206 +
tattttttctttggaaggagag

SEQ ID NO: 97547 - DNA, 22 bp, Artificial Sequence
  Synthetic oligonucleotide; TTT chr11 5306185 5306206 5306202 5306207 +
attttttctttggaaggagagt

SEQ ID NO: 97548 - DNA, 22 bp, Artificial Sequence
  Synthetic oligonucleotide; TTA chr11 5306186 5306207 5306203 5306208 +
ttttttctttggaaggagagtc

SEQ ID NO: 97549 - DNA, 22 bp, Artificial Sequence
  Synthetic oligonucleotide; TTT chr11 5306189 5306210 5306206 5306211 +
tttctttggaaggagagtctct

SEQ ID NO: 97550 - DNA, 22 bp, Artificial Sequence
  Synthetic oligonucleotide; TTT chr11 5306190 5306211 5306207 5306212 +
ttctttggaaggagagtctcta

SEQ ID NO: 97551 - DNA, 22 bp, Artificial Sequence
  Synthetic oligonucleotide; TTT chr11 5306191 5306212 5306208 5306213 +
tctttggaaggagagtctctaa

SEQ ID NO: 97552 - DNA, 22 bp, Artificial Sequence
  Synthetic oligonucleotide; TTT chr11 5306192 5306213 5306209 5306214 +
ctttggaaggagagtctctaag

SEQ ID NO: 97553 - DNA, 22 bp, Artificial Sequence
  Synthetic oligonucleotide; TTC chr11 5306193 5306214 5306210 5306215 +
tttggaaggagagtctctaaga

SEQ ID NO: 97554 - DNA, 22 bp, Artificial Sequence
  Synthetic oligonucleotide; CTT chr11 5306195 5306216 5306212 5306217 +
tggaaggagagtctctaagaga

SEQ ID NO: 97555 - DNA, 22 bp, Artificial Sequence
  Synthetic oligonucleotide; TTT chr11 5306196 5306217 5306213 5306218 +
ggaaggagagtctctaagagaa

SEQ ID NO: 97556 - DNA, 22 bp, Artificial Sequence
  Synthetic oligonucleotide; TTG chr11 5306197 5306218 5306214 5306219 +
gaaggagagtctctaagagaag

SEQ ID NO: 97557 - DNA, 22 bp, Artificial Sequence
  Synthetic oligonucleotide; CTC chr11 5306210 5306231 5306227 5306232 +
taagagaagttgtgtctctaac

SEQ ID NO: 97558 - DNA, 22 bp, Artificial Sequence
  Synthetic oligonucleotide; CTA chr11 5306212 5306233 5306229 5306234 +
agagaagttgtgtctctaacat

SEQ ID NO: 97559 - DNA, 22 bp, Artificial Sequence
  Synthetic oligonucleotide; TTG chr11 5306222 5306243 5306239 5306244 +
tgtctctaacatcagatgaggc

SEQ ID NO: 97560 - DNA, 22 bp, Artificial Sequence
  Synthetic oligonucleotide; CTC chr11 5306228 5306249 5306245 5306250 +
taacatcagatgaggcatgacc

SEQ ID NO: 97561 - DNA, 22 bp, Artificial Sequence
  Synthetic oligonucleotide; CTA chr11 5306230 5306251 5306247 5306252 +
acatcagatgaggcatgaccga

SEQ ID NO: 97562 - DNA, 22 bp, Artificial Sequence
  Synthetic oligonucleotide; CTC chr11 5306264 5306285 5306281 5306286 +
tcaagtgttccattggtcttag

SEQ ID NO: 97563 - DNA, 22 bp, Artificial Sequence
  Synthetic oligonucleotide; CTC chr11 5306266 5306287 5306283 5306288 +
aagtgttccattggtcttagag

SEQ ID NO: 97564 - DNA, 22 bp, Artificial Sequence
  Synthetic oligonucleotide; TTC chr11 5306274 5306295 5306291 5306296 +
cattggtcttagagtgggaaga

SEQ ID NO: 97565 - DNA, 22 bp, Artificial Sequence
  Synthetic oligonucleotide; TTG chr11 5306279 5306300 5306296 5306301 +
gtcttagagtgggaagaccagt

SEQ ID NO: 97566 - DNA, 22 bp, Artificial Sequence
  Synthetic oligonucleotide; CTT chr11 5306284 5306305 5306301 5306306 +
agagtgggaagaccagtcactt

SEQ ID NO: 97567 - DNA, 22 bp, Artificial Sequence
  Synthetic oligonucleotide; TTA chr11 5306285 5306306 5306302 5306307 +
gagtgggaagaccagtcacttt

SEQ ID NO: 97568 - DNA, 22 bp, Artificial Sequence
  Synthetic oligonucleotide; CTT chr11 5306306 5306327 5306323 5306328 +
tgtctttgtaaatgttaacatt

SEQ ID NO: 97569 - DNA, 22 bp, Artificial Sequence
  Synthetic oligonucleotide; TTT chr11 5306307 5306328 5306324 5306329 +
gtctttgtaaatgttaacattt

SEQ ID NO: 97570 - DNA, 22 bp, Artificial Sequence
  Synthetic oligonucleotide; TTG chr11 5306308 5306329 5306325 5306330 +
tctttgtaaatgttaacatttg

SEQ ID NO: 97571 - DNA, 22 bp, Artificial Sequence
  Synthetic oligonucleotide; CTT chr11 5306312 5306333 5306329 5306334 +
tgtaaatgttaacatttgaaga

SEQ ID NO: 97572 - DNA, 22 bp, Artificial Sequence
  Synthetic oligonucleotide; TTT chr11 5306313 5306334 5306330 5306335 +
gtaaatgttaacatttgaagaa

SEQ ID NO: 97573 - DNA, 22 bp, Artificial Sequence
  Synthetic oligonucleotide; TTG chr11 5306314 5306335 5306331 5306336 +
taaatgttaacatttgaagaac

SEQ ID NO: 97574 - DNA, 22 bp, Artificial Sequence
  Synthetic oligonucleotide; TTA chr11 5306323 5306344 5306340 5306345 +
acatttgaagaacattgcccct

SEQ ID NO: 97575 - DNA, 22 bp, Artificial Sequence
  Synthetic oligonucleotide; TTT chr11 5306329 5306350 5306346 5306351 +
gaagaacattgccccttttcaa

SEQ ID NO: 97576 - DNA, 22 bp, Artificial Sequence
  Synthetic oligonucleotide; TTG chr11 5306330 5306351 5306347 5306352 +
aagaacattgccccttttcaaa

SEQ ID NO: 97577 - DNA, 22 bp, Artificial Sequence
  Synthetic oligonucleotide; TTG chr11 5306340 5306361 5306357 5306362 +
ccccttttcaaactgtattata

SEQ ID NO: 97578 - DNA, 22 bp, Artificial Sequence
  Synthetic oligonucleotide; CTT chr11 5306346 5306367 5306363 5306368 +
ttcaaactgtattatattctct

SEQ ID NO: 97579 - DNA, 22 bp, Artificial Sequence
  Synthetic oligonucleotide; TTT chr11 5306347 5306368 5306364 5306369 +
tcaaactgtattatattctcta

SEQ ID NO: 97580 - DNA, 22 bp, Artificial Sequence
  Synthetic oligonucleotide; TTT chr11 5306348 5306369 5306365 5306370 +
caaactgtattatattctctaa

SEQ ID NO: 97581 - DNA, 22 bp, Artificial Sequence
  Synthetic oligonucleotide; TTC chr11 5306349 5306370 5306366 5306371 +
aaactgtattatattctctaat

SEQ ID NO: 97582 - DNA, 22 bp, Artificial Sequence
  Synthetic oligonucleotide; CTG chr11 5306355 5306376 5306372 5306377 +
tattatattctctaattcaacc

SEQ ID NO: 97583 - DNA, 22 bp, Artificial Sequence
  Synthetic oligonucleotide; TTA chr11 5306360 5306381 5306377 5306382 +
tattctctaattcaacccttta

SEQ ID NO: 97584 - DNA, 22 bp, Artificial Sequence
  Synthetic oligonucleotide; TTC chr11 5306365 5306386 5306382 5306387 +
tctaattcaaccctttacaaaa

SEQ ID NO: 97585 - DNA, 22 bp, Artificial Sequence
  Synthetic oligonucleotide; CTC chr11 5306367 5306388 5306384 5306389 +
taattcaaccctttacaaaatc

SEQ ID NO: 97586 - DNA, 22 bp, Artificial Sequence
  Synthetic oligonucleotide; CTA chr11 5306369 5306390 5306386 5306391 +
attcaaccctttacaaaatcct

SEQ ID NO: 97587 - DNA, 22 bp, Artificial Sequence
  Synthetic oligonucleotide; TTC chr11 5306373 5306394 5306390 5306395 +
aaccctttacaaaatccttgag

SEQ ID NO: 97588 - DNA, 22 bp, Artificial Sequence
  Synthetic oligonucleotide; CTT chr11 5306380 5306401 5306397 5306402 +
tacaaaatccttgagccaccac

SEQ ID NO: 97589 - DNA, 22 bp, Artificial Sequence
  Synthetic oligonucleotide; TTT chr11 5306381 5306402 5306398 5306403 +
acaaaatccttgagccaccacc

SEQ ID NO: 97590 - DNA, 22 bp, Artificial Sequence
  Synthetic oligonucleotide; TTA chr11 5306382 5306403 5306399 5306404 +
caaaatccttgagccaccacca

SEQ ID NO: 97591 - DNA, 22 bp, Artificial Sequence
  Synthetic oligonucleotide; CTT chr11 5306392 5306413 5306409 5306414 +
gagccaccaccaaaccttttcg

SEQ ID NO: 97592 - DNA, 22 bp, Artificial Sequence
  Synthetic oligonucleotide; TTG chr11 5306393 5306414 5306410 5306415 +
agccaccaccaaaccttttcgt

SEQ ID NO: 97593 - DNA, 22 bp, Artificial Sequence
  Synthetic oligonucleotide; CTT chr11 5306410 5306431 5306427 5306432 +
ttcgtcttgatgattattcatc

SEQ ID NO: 97594 - DNA, 22 bp, Artificial Sequence
  Synthetic oligonucleotide; TTT chr11 5306411 5306432 5306428 5306433 +
tcgtcttgatgattattcatca

SEQ ID NO: 97595 - DNA, 22 bp, Artificial Sequence
  Synthetic oligonucleotide; TTT chr11 5306412 5306433 5306429 5306434 +
cgtcttgatgattattcatcag

SEQ ID NO: 97596 - DNA, 22 bp, Artificial Sequence
  Synthetic oligonucleotide; TTC chr11 5306413 5306434 5306430 5306435 +
gtcttgatgattattcatcaga

SEQ ID NO: 97597 - DNA, 22 bp, Artificial Sequence
  Synthetic oligonucleotide; CTT chr11 5306418 5306439 5306435 5306440 +
gatgattattcatcagacattt

SEQ ID NO: 97598 - DNA, 22 bp, Artificial Sequence
  Synthetic oligonucleotide; TTG chr11 5306419 5306440 5306436 5306441 +
atgattattcatcagacattta

SEQ ID NO: 97599 - DNA, 22 bp, Artificial Sequence
  Synthetic oligonucleotide; TTA chr11 5306426 5306447 5306443 5306448 +
ttcatcagacatttatttattc

SEQ ID NO: 97600 - DNA, 22 bp, Artificial Sequence
  Synthetic oligonucleotide; TTC chr11 5306429 5306450 5306446 5306451 +
atcagacatttatttattcttt

SEQ ID NO: 97601 - DNA, 22 bp, Artificial Sequence
  Synthetic oligonucleotide; TTT chr11 5306440 5306461 5306457 5306462 +
atttattctttctattgattca

SEQ ID NO: 97602 - DNA, 22 bp, Artificial Sequence
  Synthetic oligonucleotide; TTA chr11 5306441 5306462 5306458 5306463 +
tttattctttctattgattcaa

SEQ ID NO: 97603 - DNA, 22 bp, Artificial Sequence
  Synthetic oligonucleotide; TTT chr11 5306444 5306465 5306461 5306466 +
attctttctattgattcaaaac

SEQ ID NO: 97604 - DNA, 22 bp, Artificial Sequence
  Synthetic oligonucleotide; TTA chr11 5306445 5306466 5306462 5306467 +
ttctttctattgattcaaaact

SEQ ID NO: 97605 - DNA, 22 bp, Artificial Sequence
  Synthetic oligonucleotide; TTC chr11 5306448 5306469 5306465 5306470 +
tttctattgattcaaaactcac

SEQ ID NO: 97606 - DNA, 22 bp, Artificial Sequence
  Synthetic oligonucleotide; CTT chr11 5306450 5306471 5306467 5306472 +
tctattgattcaaaactcacta

SEQ ID NO: 97607 - DNA, 22 bp, Artificial Sequence
  Synthetic oligonucleotide; TTT chr11 5306451 5306472 5306468 5306473 +
ctattgattcaaaactcactac

SEQ ID NO: 97608 - DNA, 22 bp, Artificial Sequence
  Synthetic oligonucleotide; TTC chr11 5306452 5306473 5306469 5306474 +
tattgattcaaaactcactacc

SEQ ID NO: 97609 - DNA, 22 bp, Artificial Sequence
  Synthetic oligonucleotide; CTA chr11 5306454 5306475 5306471 5306476 +
ttgattcaaaactcactaccct

SEQ ID NO: 97610 - DNA, 22 bp, Artificial Sequence
  Synthetic oligonucleotide; TTG chr11 5306457 5306478 5306474 5306479 +
attcaaaactcactaccctacc

SEQ ID NO: 97611 - DNA, 22 bp, Artificial Sequence
  Synthetic oligonucleotide; TTC chr11 5306461 5306482 5306478 5306483 +
aaaactcactaccctaccctga

SEQ ID NO: 97612 - DNA, 22 bp, Artificial Sequence
  Synthetic oligonucleotide; CTC chr11 5306468 5306489 5306485 5306490 +
actaccctaccctgagctatct

SEQ ID NO: 97613 - DNA, 22 bp, Artificial Sequence
  Synthetic oligonucleotide; CTA chr11 5306472 5306493 5306489 5306494 +
ccctaccctgagctatctcatt

SEQ ID NO: 97614 - DNA, 22 bp, Artificial Sequence
  Synthetic oligonucleotide; CTA chr11 5306477 5306498 5306494 5306499 +
ccctgagctatctcattcatat

SEQ ID NO: 97615 - DNA, 22 bp, Artificial Sequence
  Synthetic oligonucleotide; CTG chr11 5306482 5306503 5306499 5306504 +
agctatctcattcatatatatg

SEQ ID NO: 97616 - DNA, 22 bp, Artificial Sequence
  Synthetic oligonucleotide; CTA chr11 5306487 5306508 5306504 5306509 +
tctcattcatatatatgtgggt

SEQ ID NO: 97617 - DNA, 22 bp, Artificial Sequence
  Synthetic oligonucleotide; CTC chr11 5306491 5306512 5306508 5306513 +
attcatatatatgtgggtttca

SEQ ID NO: 97618 - DNA, 22 bp, Artificial Sequence
  Synthetic oligonucleotide; TTC chr11 5306495 5306516 5306512 5306517 +
atatatatgtgggtttcattta

SEQ ID NO: 97619 - DNA, 22 bp, Artificial Sequence
  Synthetic oligonucleotide; TTT chr11 5306511 5306532 5306528 5306533 +
catttaattatttagtatatgt

SEQ ID NO: 97620 - DNA, 22 bp, Artificial Sequence
  Synthetic oligonucleotide; TTC chr11 5306512 5306533 5306529 5306534 +
atttaattatttagtatatgta

SEQ ID NO: 97621 - DNA, 22 bp, Artificial Sequence
  Synthetic oligonucleotide; TTT chr11 5306516 5306537 5306533 5306538 +
aattatttagtatatgtatata

SEQ ID NO: 97622 - DNA, 22 bp, Artificial Sequence
  Synthetic oligonucleotide; TTA chr11 5306517 5306538 5306534 5306539 +
attatttagtatatgtatatat

SEQ ID NO: 97623 - DNA, 22 bp, Artificial Sequence
  Synthetic oligonucleotide; TTA chr11 5306521 5306542 5306538 5306543 +
tttagtatatgtatatatggta

SEQ ID NO: 97624 - DNA, 22 bp, Artificial Sequence
  Synthetic oligonucleotide; TTT chr11 5306524 5306545 5306541 5306546 +
agtatatgtatatatggtattt

SEQ ID NO: 97625 - DNA, 22 bp, Artificial Sequence
  Synthetic oligonucleotide; TTA chr11 5306525 5306546 5306542 5306547 +
gtatatgtatatatggtattta

SEQ ID NO: 97626 - DNA, 22 bp, Artificial Sequence
  Synthetic oligonucleotide; TTT chr11 5306546 5306567 5306563 5306568 +
actatcaatatatgtatgcata

SEQ ID NO: 97627 - DNA, 22 bp, Artificial Sequence
  Synthetic oligonucleotide; TTA chr11 5306547 5306568 5306564 5306569 +
ctatcaatatatgtatgcatag

SEQ ID NO: 97628 - DNA, 22 bp, Artificial Sequence
  Synthetic oligonucleotide; CTA chr11 5306550 5306571 5306567 5306572 +
tcaatatatgtatgcataggtg

SEQ ID NO: 97629 - DNA, 22 bp, Artificial Sequence
  Synthetic oligonucleotide; TTC chr11 5306599 5306620 5306616 5306621 +
acagacagagacagtgagagag

SEQ ID NO: 97630 - DNA, 22 bp, Artificial Sequence
  Synthetic oligonucleotide; CTT chr11 5306639 5306660 5306656 5306661 +
ctctgaaacatataatatctac

SEQ ID NO: 97631 - DNA, 22 bp, Artificial Sequence
  Synthetic oligonucleotide; TTC chr11 5306640 5306661 5306657 5306662 +
tctgaaacatataatatctact

SEQ ID NO: 97632 - DNA, 22 bp, Artificial Sequence
  Synthetic oligonucleotide; CTC chr11 5306642 5306663 5306659 5306664 +
tgaaacatataatatctactcc

SEQ ID NO: 97633 - DNA, 22 bp, Artificial Sequence
  Synthetic oligonucleotide; CTG chr11 5306644 5306665 5306661 5306666 +
aaacatataatatctactcctt

SEQ ID NO: 97634 - DNA, 22 bp, Artificial Sequence
  Synthetic oligonucleotide; CTA chr11 5306660 5306681 5306677 5306682 +
ctccttatatttaggtctgatc

SEQ ID NO: 97635 - DNA, 22 bp, Artificial Sequence
  Synthetic oligonucleotide; CTC chr11 5306663 5306684 5306680 5306685 +
cttatatttaggtctgatctcc

SEQ ID NO: 97636 - DNA, 22 bp, Artificial Sequence
  Synthetic oligonucleotide; CTT chr11 5306666 5306687 5306683 5306688 +
atatttaggtctgatctccaga

SEQ ID NO: 97637 - DNA, 22 bp, Artificial Sequence
  Synthetic oligonucleotide; TTA chr11 5306667 5306688 5306684 5306689 +
tatttaggtctgatctccagaa

SEQ ID NO: 97638 - DNA, 22 bp, Artificial Sequence
  Synthetic oligonucleotide; TTT chr11 5306672 5306693 5306689 5306694 +
aggtctgatctccagaataaaa

SEQ ID NO: 97639 - DNA, 22 bp, Artificial Sequence
  Synthetic oligonucleotide; TTA chr11 5306673 5306694 5306690 5306695 +
ggtctgatctccagaataaaat

SEQ ID NO: 97640 - DNA, 22 bp, Artificial Sequence
  Synthetic oligonucleotide; CTG chr11 5306679 5306700 5306696 5306701 +
atctccagaataaaataaccat

SEQ ID NO: 97641 - DNA, 22 bp, Artificial Sequence
  Synthetic oligonucleotide; CTC chr11 5306684 5306705 5306701 5306706 +
cagaataaaataaccatatatt

SEQ ID NO: 97642 - DNA, 22 bp, Artificial Sequence
  Synthetic oligonucleotide; TTA chr11 5306707 5306728 5306724 5306729 +
gccattatattcatacataatt

SEQ ID NO: 97643 - DNA, 22 bp, Artificial Sequence
  Synthetic oligonucleotide; TTA chr11 5306714 5306735 5306731 5306736 +
tattcatacataatttttttct

SEQ ID NO: 97644 - DNA, 22 bp, Artificial Sequence
  Synthetic oligonucleotide; TTC chr11 5306719 5306740 5306736 5306741 +
atacataatttttttctagatg

SEQ ID NO: 97645 - DNA, 22 bp, Artificial Sequence
  Synthetic oligonucleotide; TTT chr11 5306730 5306751 5306747 5306752 +
ttttctagatgtataaagatat

SEQ ID NO: 97646 - DNA, 22 bp, Artificial Sequence
  Synthetic oligonucleotide; TTT chr11 5306731 5306752 5306748 5306753 +
tttctagatgtataaagatatc

SEQ ID NO: 97647 - DNA, 22 bp, Artificial Sequence
  Synthetic oligonucleotide; TTT chr11 5306732 5306753 5306749 5306754 +
ttctagatgtataaagatatct

SEQ ID NO: 97648 - DNA, 22 bp, Artificial Sequence
  Synthetic oligonucleotide; TTT chr11 5306733 5306754 5306750 5306755 +
tctagatgtataaagatatctg

SEQ ID NO: 97649 - DNA, 22 bp, Artificial Sequence
  Synthetic oligonucleotide; TTT chr11 5306734 5306755 5306751 5306756 +
ctagatgtataaagatatctgc

SEQ ID NO: 97650 - DNA, 22 bp, Artificial Sequence
  Synthetic oligonucleotide; TTC chr11 5306735 5306756 5306752 5306757 +
tagatgtataaagatatctgca

SEQ ID NO: 97651 - DNA, 22 bp, Artificial Sequence
  Synthetic oligonucleotide; CTA chr11 5306737 5306758 5306754 5306759 +
gatgtataaagatatctgcatt

SEQ ID NO: 97652 - DNA, 22 bp, Artificial Sequence
  Synthetic oligonucleotide; CTG chr11 5306755 5306776 5306772 5306777 +
cattaaaaaccctaagacttct

SEQ ID NO: 97653 - DNA, 22 bp, Artificial Sequence
  Synthetic oligonucleotide; TTA chr11 5306760 5306781 5306777 5306782 +
aaaaccctaagacttctttcct

SEQ ID NO: 97654 - DNA, 22 bp, Artificial Sequence
  Synthetic oligonucleotide; CTA chr11 5306769 5306790 5306786 5306791 +
agacttctttcctgatgggtga

SEQ ID NO: 97655 - DNA, 22 bp, Artificial Sequence
  Synthetic oligonucleotide; CTT chr11 5306775 5306796 5306792 5306797 +
ctttcctgatgggtgaaccaat

SEQ ID NO: 97656 - DNA, 22 bp, Artificial Sequence
  Synthetic oligonucleotide; TTC chr11 5306776 5306797 5306793 5306798 +
tttcctgatgggtgaaccaata

SEQ ID NO: 97657 - DNA, 22 bp, Artificial Sequence
  Synthetic oligonucleotide; CTT chr11 5306778 5306799 5306795 5306800 +
tcctgatgggtgaaccaatatc

SEQ ID NO: 97658 - DNA, 22 bp, Artificial Sequence
  Synthetic oligonucleotide; TTT chr11 5306779 5306800 5306796 5306801 +
cctgatgggtgaaccaatatca

SEQ ID NO: 97659 - DNA, 22 bp, Artificial Sequence
  Synthetic oligonucleotide; TTC chr11 5306780 5306801 5306797 5306802 +
ctgatgggtgaaccaatatcaa

SEQ ID NO: 97660 - DNA, 22 bp, Artificial Sequence
  Synthetic oligonucleotide; CTG chr11 5306783 5306804 5306800 5306805 +
atgggtgaaccaatatcaacag

SEQ ID NO: 97661 - DNA, 22 bp, Artificial Sequence
  Synthetic oligonucleotide; CTT chr11 5306810 5306831 5306827 5306832 +
taaatgtttatcatgtaattat

SEQ ID NO: 97662 - DNA, 22 bp, Artificial Sequence
  Synthetic oligonucleotide; TTT chr11 5306811 5306832 5306828 5306833 +
aaatgtttatcatgtaattatt

SEQ ID NO: 97663 - DNA, 22 bp, Artificial Sequence
  Synthetic oligonucleotide; TTA chr11 5306812 5306833 5306829 5306834 +
aatgtttatcatgtaattattc

SEQ ID NO: 97664 - DNA, 22 bp, Artificial Sequence
  Synthetic oligonucleotide; TTT chr11 5306819 5306840 5306836 5306841 +
atcatgtaattattcctaatcc

SEQ ID NO: 97665 - DNA, 22 bp, Artificial Sequence
  Synthetic oligonucleotide; TTA chr11 5306820 5306841 5306837 5306842 +
tcatgtaattattcctaatcct

SEQ ID NO: 97666 - DNA, 22 bp, Artificial Sequence
  Synthetic oligonucleotide; TTA chr11 5306831 5306852 5306848 5306853 +
ttcctaatcctgatttatttcc

SEQ ID NO: 97667 - DNA, 22 bp, Artificial Sequence
  Synthetic oligonucleotide; TTC chr11 5306834 5306855 5306851 5306856 +
ctaatcctgatttatttcctat

SEQ ID NO: 97668 - DNA, 22 bp, Artificial Sequence
  Synthetic oligonucleotide; CTA chr11 5306837 5306858 5306854 5306859 +
atcctgatttatttcctatgat

SEQ ID NO: 97669 - DNA, 22 bp, Artificial Sequence
  Synthetic oligonucleotide; CTG chr11 5306843 5306864 5306860 5306865 +
atttatttcctatgatgctcca

SEQ ID NO: 97670 - DNA, 22 bp, Artificial Sequence
  Synthetic oligonucleotide; TTT chr11 5306847 5306868 5306864 5306869 +
atttcctatgatgctccacctt

SEQ ID NO: 97671 - DNA, 22 bp, Artificial Sequence
  Synthetic oligonucleotide; TTA chr11 5306848 5306869 5306865 5306870 +
tttcctatgatgctccacctta

SEQ ID NO: 97672 - DNA, 22 bp, Artificial Sequence
  Synthetic oligonucleotide; TTT chr11 5306851 5306872 5306868 5306873 +
cctatgatgctccaccttattg

SEQ ID NO: 97673 - DNA, 22 bp, Artificial Sequence
  Synthetic oligonucleotide; TTC chr11 5306852 5306873 5306869 5306874 +
ctatgatgctccaccttattga

SEQ ID NO: 97674 - DNA, 22 bp, Artificial Sequence
  Synthetic oligonucleotide; CTA chr11 5306855 5306876 5306872 5306877 +
tgatgctccaccttattgaaca

SEQ ID NO: 97675 - DNA, 22 bp, Artificial Sequence
  Synthetic oligonucleotide; CTC chr11 5306863 5306884 5306880 5306885 +
caccttattgaacataataatc

SEQ ID NO: 97676 - DNA, 22 bp, Artificial Sequence
  Synthetic oligonucleotide; CTT chr11 5306869 5306890 5306886 5306891 +
attgaacataataatccagatg

SEQ ID NO: 97677 - DNA, 22 bp, Artificial Sequence
  Synthetic oligonucleotide; TTA chr11 5306870 5306891 5306887 5306892 +
ttgaacataataatccagatgt

SEQ ID NO: 97678 - DNA, 22 bp, Artificial Sequence
  Synthetic oligonucleotide; TTG chr11 5306873 5306894 5306890 5306895 +
aacataataatccagatgttgt

SEQ ID NO: 97679 - DNA, 22 bp, Artificial Sequence
  Synthetic oligonucleotide; TTG chr11 5306894 5306915 5306911 5306916 +
tcatattagtcccattctgaaa

SEQ ID NO: 97680 - DNA, 22 bp, Artificial Sequence
  Synthetic oligonucleotide; TTA chr11 5306902 5306923 5306919 5306924 +
gtcccattctgaaatctctttt

SEQ ID NO: 97681 - DNA, 22 bp, Artificial Sequence
  Synthetic oligonucleotide; TTC chr11 5306911 5306932 5306928 5306933 +
tgaaatctcttttttcattgga

SEQ ID NO: 97682 - DNA, 22 bp, Artificial Sequence
  Synthetic oligonucleotide; CTG chr11 5306913 5306934 5306930 5306935 +
aaatctcttttttcattggatt

SEQ ID NO: 97683 - DNA, 22 bp, Artificial Sequence
  Synthetic oligonucleotide; CTC chr11 5306920 5306941 5306937 5306942 +
ttttttcattggattatgtgct

SEQ ID NO: 97684 - DNA, 22 bp, Artificial Sequence
  Synthetic oligonucleotide; CTT chr11 5306922 5306943 5306939 5306944 +
ttttcattggattatgtgctga

SEQ ID NO: 97685 - DNA, 22 bp, Artificial Sequence
  Synthetic oligonucleotide; TTT chr11 5306923 5306944 5306940 5306945 +
tttcattggattatgtgctgag

SEQ ID NO: 97686 - DNA, 22 bp, Artificial Sequence
  Synthetic oligonucleotide; TTT chr11 5306924 5306945 5306941 5306946 +
ttcattggattatgtgctgagt

SEQ ID NO: 97687 - DNA, 22 bp, Artificial Sequence
  Synthetic oligonucleotide; TTT chr11 5306925 5306946 5306942 5306947 +
tcattggattatgtgctgagtt

SEQ ID NO: 97688 - DNA, 22 bp, Artificial Sequence
  Synthetic oligonucleotide; TTT chr11 5306926 5306947 5306943 5306948 +
cattggattatgtgctgagttt

SEQ ID NO: 97689 - DNA, 22 bp, Artificial Sequence
  Synthetic oligonucleotide; TTC chr11 5306927 5306948 5306944 5306949 +
attggattatgtgctgagtttc

SEQ ID NO: 97690 - DNA, 22 bp, Artificial Sequence
  Synthetic oligonucleotide; TTG chr11 5306931 5306952 5306948 5306953 +
gattatgtgctgagtttctatt

SEQ ID NO: 97691 - DNA, 22 bp, Artificial Sequence
  Synthetic oligonucleotide; TTA chr11 5306936 5306957 5306953 5306958 +
tgtgctgagtttctatttaagt

SEQ ID NO: 97692 - DNA, 22 bp, Artificial Sequence
  Synthetic oligonucleotide; CTG chr11 5306943 5306964 5306960 5306965 +
agtttctatttaagtagtctaa

SEQ ID NO: 97693 - DNA, 22 bp, Artificial Sequence
  Synthetic oligonucleotide; TTT chr11 5306948 5306969 5306965 5306970 +
ctatttaagtagtctaagatcg

SEQ ID NO: 97694 - DNA, 22 bp, Artificial Sequence
  Synthetic oligonucleotide; TTC chr11 5306949 5306970 5306966 5306971 +
tatttaagtagtctaagatcgt

SEQ ID NO: 97695 - DNA, 22 bp, Artificial Sequence
  Synthetic oligonucleotide; CTA chr11 5306951 5306972 5306968 5306973 +
tttaagtagtctaagatcgtgc

SEQ ID NO: 97696 - DNA, 22 bp, Artificial Sequence
  Synthetic oligonucleotide; TTT chr11 5306954 5306975 5306971 5306976 +
aagtagtctaagatcgtgcaga

SEQ ID NO: 97697 - DNA, 22 bp, Artificial Sequence
  Synthetic oligonucleotide; TTA chr11 5306955 5306976 5306972 5306977 +
agtagtctaagatcgtgcagat

SEQ ID NO: 97698 - DNA, 22 bp, Artificial Sequence
  Synthetic oligonucleotide; CTA chr11 5306964 5306985 5306981 5306986 +
agatcgtgcagatacacaactc

SEQ ID NO: 97699 - DNA, 22 bp, Artificial Sequence
  Synthetic oligonucleotide; CTC chr11 5306986 5307007 5307003 5307008 +
taccctaaactcttatctcaaa

SEQ ID NO: 97700 - DNA, 22 bp, Artificial Sequence
  Synthetic oligonucleotide; CTA chr11 5306988 5307009 5307005 5307010 +
ccctaaactcttatctcaaaac

SEQ ID NO: 97701 - DNA, 22 bp, Artificial Sequence
  Synthetic oligonucleotide; CTA chr11 5306993 5307014 5307010 5307015 +
aactcttatctcaaaacatgtc

SEQ ID NO: 97702 - DNA, 22 bp, Artificial Sequence
  Synthetic oligonucleotide; CTC chr11 5306998 5307019 5307015 5307020 +
ttatctcaaaacatgtcaaatt

SEQ ID NO: 97703 - DNA, 22 bp, Artificial Sequence
  Synthetic oligonucleotide; CTT chr11 5307000 5307021 5307017 5307022 +
atctcaaaacatgtcaaattca

SEQ ID NO: 97704 - DNA, 22 bp, Artificial Sequence
  Synthetic oligonucleotide; TTA chr11 5307001 5307022 5307018 5307023 +
tctcaaaacatgtcaaattcag

SEQ ID NO: 97705 - DNA, 22 bp, Artificial Sequence
  Synthetic oligonucleotide; CTC chr11 5307005 5307026 5307022 5307027 +
aaaacatgtcaaattcagtctt

SEQ ID NO: 97706 - DNA, 22 bp, Artificial Sequence
  Synthetic oligonucleotide; TTC chr11 5307021 5307042 5307038 5307043 +
agtctttcagatttaaaatagt

SEQ ID NO: 97707 - DNA, 22 bp, Artificial Sequence
  Synthetic oligonucleotide; CTT chr11 5307027 5307048 5307044 5307049 +
tcagatttaaaatagtgataaa

SEQ ID NO: 97708 - DNA, 22 bp, Artificial Sequence
  Synthetic oligonucleotide; TTT chr11 5307028 5307049 5307045 5307050 +
cagatttaaaatagtgataaaa

SEQ ID NO: 97709 - DNA, 22 bp, Artificial Sequence
  Synthetic oligonucleotide; TTC chr11 5307029 5307050 5307046 5307051 +
agatttaaaatagtgataaaat

SEQ ID NO: 97710 - DNA, 22 bp, Artificial Sequence
  Synthetic oligonucleotide; TTT chr11 5307035 5307056 5307052 5307057 +
aaaatagtgataaaatgcatat

SEQ ID NO: 97711 - DNA, 22 bp, Artificial Sequence
  Synthetic oligonucleotide; TTA chr11 5307036 5307057 5307053 5307058 +
aaatagtgataaaatgcatatt

SEQ ID NO: 97712 - DNA, 22 bp, Artificial Sequence
  Synthetic oligonucleotide; TTC chr11 5307059 5307080 5307076 5307081 +
tacataatatatgtgacactcg

SEQ ID NO: 97713 - DNA, 22 bp, Artificial Sequence
  Synthetic oligonucleotide; CTA chr11 5307061 5307082 5307078 5307083 +
cataatatatgtgacactcgca

SEQ ID NO: 97714 - DNA, 22 bp, Artificial Sequence
  Synthetic oligonucleotide; CTC chr11 5307080 5307101 5307097 5307102 +
gcagcaagttactctatttact

SEQ ID NO: 97715 - DNA, 22 bp, Artificial Sequence
  Synthetic oligonucleotide; TTA chr11 5307091 5307112 5307108 5307113 +
ctctatttactatcacctgttt

SEQ ID NO: 97716 - DNA, 22 bp, Artificial Sequence
  Synthetic oligonucleotide; CTC chr11 5307094 5307115 5307111 5307116 +
tatttactatcacctgtttata

SEQ ID NO: 97717 - DNA, 22 bp, Artificial Sequence
  Synthetic oligonucleotide; CTA chr11 5307096 5307117 5307113 5307118 +
tttactatcacctgtttatact

SEQ ID NO: 97718 - DNA, 22 bp, Artificial Sequence
  Synthetic oligonucleotide; TTT chr11 5307099 5307120 5307116 5307121 +
actatcacctgtttatacttag

SEQ ID NO: 97719 - DNA, 22 bp, Artificial Sequence
  Synthetic oligonucleotide; TTA chr11 5307100 5307121 5307117 5307122 +
ctatcacctgtttatacttagg

SEQ ID NO: 97720 - DNA, 22 bp, Artificial Sequence
  Synthetic oligonucleotide; CTA chr11 5307103 5307124 5307120 5307125 +
tcacctgtttatacttagggga

SEQ ID NO: 97721 - DNA, 22 bp, Artificial Sequence
  Synthetic oligonucleotide; CTG chr11 5307110 5307131 5307127 5307132 +
tttatacttaggggaaaaaaac

SEQ ID NO: 97722 - DNA, 22 bp, Artificial Sequence
  Synthetic oligonucleotide; TTT chr11 5307113 5307134 5307130 5307135 +
atacttaggggaaaaaaaccta

SEQ ID NO: 97723 - DNA, 22 bp, Artificial Sequence
  Synthetic oligonucleotide; TTA chr11 5307114 5307135 5307131 5307136 +
tacttaggggaaaaaaacctaa

SEQ ID NO: 97724 - DNA, 22 bp, Artificial Sequence
  Synthetic oligonucleotide; CTT chr11 5307119 5307140 5307136 5307141 +
aggggaaaaaaacctaaatatc

SEQ ID NO: 97725 - DNA, 22 bp, Artificial Sequence
  Synthetic oligonucleotide; TTA chr11 5307120 5307141 5307137 5307142 +
ggggaaaaaaacctaaatatcc

SEQ ID NO: 97726 - DNA, 22 bp, Artificial Sequence
  Synthetic oligonucleotide; CTA chr11 5307135 5307156 5307152 5307157 +
aatatcctctcatatattcagg

SEQ ID NO: 97727 - DNA, 22 bp, Artificial Sequence
  Synthetic oligonucleotide; CTC chr11 5307144 5307165 5307161 5307166 +
tcatatattcaggtaagatttt

SEQ ID NO: 97728 - DNA, 22 bp, Artificial Sequence
  Synthetic oligonucleotide; CTC chr11 5307146 5307167 5307163 5307168 +
atatattcaggtaagattttgc

SEQ ID NO: 97729 - DNA, 22 bp, Artificial Sequence
  Synthetic oligonucleotide; TTC chr11 5307154 5307175 5307171 5307176 +
aggtaagattttgccaaaacgt

SEQ ID NO: 97730 - DNA, 22 bp, Artificial Sequence
  Synthetic oligonucleotide; TTT chr11 5307165 5307186 5307182 5307187 +
tgccaaaacgtgattttaggtc

SEQ ID NO: 97731 - DNA, 22 bp, Artificial Sequence
  Synthetic oligonucleotide; TTT chr11 5307166 5307187 5307183 5307188 +
gccaaaacgtgattttaggtca

SEQ ID NO: 97732 - DNA, 22 bp, Artificial Sequence
  Synthetic oligonucleotide; TTG chr11 5307167 5307188 5307184 5307189 +
ccaaaacgtgattttaggtcat

SEQ ID NO: 97733 - DNA, 22 bp, Artificial Sequence
  Synthetic oligonucleotide; TTT chr11 5307181 5307202 5307198 5307203 +
taggtcatacagcaataaatgc

SEQ ID NO: 97734 - DNA, 22 bp, Artificial Sequence
  Synthetic oligonucleotide; TTT chr11 5307182 5307203 5307199 5307204 +
aggtcatacagcaataaatgca

SEQ ID NO: 97735 - DNA, 22 bp, Artificial Sequence
  Synthetic oligonucleotide; TTA chr11 5307183 5307204 5307200 5307205 +
ggtcatacagcaataaatgcat

SEQ ID NO: 97736 - DNA, 22 bp, Artificial Sequence
  Synthetic oligonucleotide; TTC chr11 5307207 5307228 5307224 5307229 +
cagaattcattttgcagaacct

SEQ ID NO: 97737 - DNA, 22 bp, Artificial Sequence
  Synthetic oligonucleotide; TTC chr11 5307215 5307236 5307232 5307237 +
attttgcagaacctgttgattc

SEQ ID NO: 97738 - DNA, 22 bp, Artificial Sequence
  Synthetic oligonucleotide; TTT chr11 5307219 5307240 5307236 5307241 +
tgcagaacctgttgattctaga

SEQ ID NO: 97739 - DNA, 22 bp, Artificial Sequence
  Synthetic oligonucleotide; TTT chr11 5307220 5307241 5307237 5307242 +
gcagaacctgttgattctagac

SEQ ID NO: 97740 - DNA, 22 bp, Artificial Sequence
  Synthetic oligonucleotide; TTG chr11 5307221 5307242 5307238 5307243 +
cagaacctgttgattctagact

SEQ ID NO: 97741 - DNA, 22 bp, Artificial Sequence
  Synthetic oligonucleotide; CTG chr11 5307230 5307251 5307247 5307252 +
ttgattctagacttgtagctaa

SEQ ID NO: 97742 - DNA, 22 bp, Artificial Sequence
  Synthetic oligonucleotide; TTG chr11 5307233 5307254 5307250 5307255 +
attctagacttgtagctaagaa

SEQ ID NO: 97743 - DNA, 22 bp, Artificial Sequence
  Synthetic oligonucleotide; TTC chr11 5307237 5307258 5307254 5307259 +
tagacttgtagctaagaagtga

SEQ ID NO: 97744 - DNA, 22 bp, Artificial Sequence
  Synthetic oligonucleotide; CTA chr11 5307239 5307260 5307256 5307261 +
gacttgtagctaagaagtgacg

SEQ ID NO: 97745 - DNA, 22 bp, Artificial Sequence
  Synthetic oligonucleotide; CTT chr11 5307244 5307265 5307261 5307266 +
gtagctaagaagtgacggcttg

SEQ ID NO: 97746 - DNA, 22 bp, Artificial Sequence
  Synthetic oligonucleotide; TTG chr11 5307245 5307266 5307262 5307267 +
tagctaagaagtgacggcttgg

SEQ ID NO: 97747 - DNA, 22 bp, Artificial Sequence
  Synthetic oligonucleotide; CTA chr11 5307251 5307272 5307268 5307273 +
agaagtgacggcttggtaaata

SEQ ID NO: 97748 - DNA, 22 bp, Artificial Sequence
  Synthetic oligonucleotide; CTT chr11 5307265 5307286 5307282 5307287 +
ggtaaataaccatatcataaag

SEQ ID NO: 97749 - DNA, 22 bp, Artificial Sequence
  Synthetic oligonucleotide; TTG chr11 5307266 5307287 5307283 5307288 +
gtaaataaccatatcataaagt

SEQ ID NO: 97750 - DNA, 22 bp, Artificial Sequence
  Synthetic oligonucleotide; TTC chr11 5307294 5307315 5307311 5307316 +
tctttgtactcacagtaaaaca

SEQ ID NO: 97751 - DNA, 22 bp, Artificial Sequence
  Synthetic oligonucleotide; CTC chr11 5307296 5307317 5307313 5307318 +
tttgtactcacagtaaaacaaa

SEQ ID NO: 97752 - DNA, 22 bp, Artificial Sequence
  Synthetic oligonucleotide; CTT chr11 5307298 5307319 5307315 5307320 +
tgtactcacagtaaaacaaaac

SEQ ID NO: 97753 - DNA, 22 bp, Artificial Sequence
  Synthetic oligonucleotide; TTT chr11 5307299 5307320 5307316 5307321 +
gtactcacagtaaaacaaaact

SEQ ID NO: 97754 - DNA, 22 bp, Artificial Sequence
  Synthetic oligonucleotide; TTG chr11 5307300 5307321 5307317 5307322 +
tactcacagtaaaacaaaactt

SEQ ID NO: 97755 - DNA, 22 bp, Artificial Sequence
  Synthetic oligonucleotide; CTC chr11 5307305 5307326 5307322 5307327 +
acagtaaaacaaaacttctgaa

SEQ ID NO: 97756 - DNA, 22 bp, Artificial Sequence
  Synthetic oligonucleotide; CTT chr11 5307322 5307343 5307339 5307344 +
ctgaaagattttaagtgagtga

SEQ ID NO: 97757 - DNA, 22 bp, Artificial Sequence
  Synthetic oligonucleotide; TTC chr11 5307323 5307344 5307340 5307345 +
tgaaagattttaagtgagtgac

SEQ ID NO: 97758 - DNA, 22 bp, Artificial Sequence
  Synthetic oligonucleotide; CTG chr11 5307325 5307346 5307342 5307347 +
aaagattttaagtgagtgacat

SEQ ID NO: 97759 - DNA, 22 bp, Artificial Sequence
  Synthetic oligonucleotide; TTT chr11 5307333 5307354 5307350 5307355 +
taagtgagtgacattttcagtg

SEQ ID NO: 97760 - DNA, 22 bp, Artificial Sequence
  Synthetic oligonucleotide; TTT chr11 5307334 5307355 5307351 5307356 +
aagtgagtgacattttcagtgc

SEQ ID NO: 97761 - DNA, 22 bp, Artificial Sequence
  Synthetic oligonucleotide; TTA chr11 5307335 5307356 5307352 5307357 +
agtgagtgacattttcagtgct

SEQ ID NO: 97762 - DNA, 22 bp, Artificial Sequence
  Synthetic oligonucleotide; TTT chr11 5307349 5307370 5307366 5307371 +
tcagtgcttaaaatggagctta

SEQ ID NO: 97763 - DNA, 22 bp, Artificial Sequence
  Synthetic oligonucleotide; TTT chr11 5307350 5307371 5307367 5307372 +
cagtgcttaaaatggagcttaa

SEQ ID NO: 97764 - DNA, 22 bp, Artificial Sequence
  Synthetic oligonucleotide; TTC chr11 5307351 5307372 5307368 5307373 +
agtgcttaaaatggagcttaac

SEQ ID NO: 97765 - DNA, 22 bp, Artificial Sequence
  Synthetic oligonucleotide; CTT chr11 5307358 5307379 5307375 5307380 +
aaaatggagcttaacatatagt

SEQ ID NO: 97766 - DNA, 22 bp, Artificial Sequence
  Synthetic oligonucleotide; TTA chr11 5307359 5307380 5307376 5307381 +
aaatggagcttaacatatagtg

SEQ ID NO: 97767 - DNA, 22 bp, Artificial Sequence
  Synthetic oligonucleotide; CTT chr11 5307370 5307391 5307387 5307392 +
aacatatagtgggtgctcagta

SEQ ID NO: 97768 - DNA, 22 bp, Artificial Sequence
  Synthetic oligonucleotide; TTA chr11 5307371 5307392 5307388 5307393 +
acatatagtgggtgctcagtaa

SEQ ID NO: 97769 - DNA, 22 bp, Artificial Sequence
  Synthetic oligonucleotide; CTC chr11 5307388 5307409 5307405 5307410 +
agtaagtactagttaagcaaat

SEQ ID NO: 97770 - DNA, 22 bp, Artificial Sequence
  Synthetic oligonucleotide; CTA chr11 5307399 5307420 5307416 5307421 +
gttaagcaaatgaatgctattc

SEQ ID NO: 97771 - DNA, 22 bp, Artificial Sequence
  Synthetic oligonucleotide; TTA chr11 5307403 5307424 5307420 5307425 +
agcaaatgaatgctattcttgt

SEQ ID NO: 97772 - DNA, 22 bp, Artificial Sequence
  Synthetic oligonucleotide; CTA chr11 5307418 5307439 5307435 5307440 +
ttcttgtgatcaagccattggt

SEQ ID NO: 97773 - DNA, 22 bp, Artificial Sequence
  Synthetic oligonucleotide; TTC chr11 5307421 5307442 5307438 5307443 +
ttgtgatcaagccattggtttt

SEQ ID NO: 97774 - DNA, 22 bp, Artificial Sequence
  Synthetic oligonucleotide; CTT chr11 5307423 5307444 5307440 5307445 +
gtgatcaagccattggttttgt

SEQ ID NO: 97775 - DNA, 22 bp, Artificial Sequence
  Synthetic oligonucleotide; TTG chr11 5307424 5307445 5307441 5307446 +
tgatcaagccattggttttgta

SEQ ID NO: 97776 - DNA, 22 bp, Artificial Sequence
  Synthetic oligonucleotide; TTG chr11 5307438 5307459 5307455 5307460 +
gttttgtagccaaattgtagac

SEQ ID NO: 97777 - DNA, 22 bp, Artificial Sequence
  Synthetic oligonucleotide; TTT chr11 5307442 5307463 5307459 5307464 +
tgtagccaaattgtagaccttt

SEQ ID NO: 97778 - DNA, 22 bp, Artificial Sequence
  Synthetic oligonucleotide; TTT chr11 5307443 5307464 5307460 5307465 +
gtagccaaattgtagaccttta

SEQ ID NO: 97779 - DNA, 22 bp, Artificial Sequence
  Synthetic oligonucleotide; TTG chr11 5307444 5307465 5307461 5307466 +
tagccaaattgtagacctttac

SEQ ID NO: 97780 - DNA, 22 bp, Artificial Sequence
  Synthetic oligonucleotide; TTG chr11 5307455 5307476 5307472 5307477 +
tagacctttacaacctctacat

SEQ ID NO: 97781 - DNA, 22 bp, Artificial Sequence
  Synthetic oligonucleotide; CTT chr11 5307463 5307484 5307480 5307485 +
tacaacctctacatctgtttgt

SEQ ID NO: 97782 - DNA, 22 bp, Artificial Sequence
  Synthetic oligonucleotide; TTT chr11 5307464 5307485 5307481 5307486 +
acaacctctacatctgtttgta

SEQ ID NO: 97783 - DNA, 22 bp, Artificial Sequence
  Synthetic oligonucleotide; TTA chr11 5307465 5307486 5307482 5307487 +
caacctctacatctgtttgtaa

SEQ ID NO: 97784 - DNA, 22 bp, Artificial Sequence
  Synthetic oligonucleotide; CTC chr11 5307472 5307493 5307489 5307494 +
tacatctgtttgtaataagatt

SEQ ID NO: 97785 - DNA, 22 bp, Artificial Sequence
  Synthetic oligonucleotide; CTA chr11 5307474 5307495 5307491 5307496 +
catctgtttgtaataagattac

SEQ ID NO: 97786 - DNA, 22 bp, Artificial Sequence
  Synthetic oligonucleotide; CTG chr11 5307480 5307501 5307497 5307502 +
tttgtaataagattactagttc

SEQ ID NO: 97787 - DNA, 22 bp, Artificial Sequence
  Synthetic oligonucleotide; TTT chr11 5307483 5307504 5307500 5307505 +
gtaataagattactagttcaag

SEQ ID NO: 97788 - DNA, 22 bp, Artificial Sequence
  Synthetic oligonucleotide; TTG chr11 5307484 5307505 5307501 5307506 +
taataagattactagttcaagc

SEQ ID NO: 97789 - DNA, 22 bp, Artificial Sequence
  Synthetic oligonucleotide; TTA chr11 5307495 5307516 5307512 5307517 +
ctagttcaagcatgccaaacaa

SEQ ID NO: 97790 - DNA, 22 bp, Artificial Sequence
  Synthetic oligonucleotide; CTA chr11 5307498 5307519 5307515 5307520 +
gttcaagcatgccaaacaatgc

SEQ ID NO: 97791 - DNA, 22 bp, Artificial Sequence
  Synthetic oligonucleotide; TTC chr11 5307502 5307523 5307519 5307524 +
aagcatgccaaacaatgctatc

SEQ ID NO: 97792 - DNA, 22 bp, Artificial Sequence
  Synthetic oligonucleotide; CTA chr11 5307522 5307543 5307539 5307544 +
tctccttttctttattgtttag

SEQ ID NO: 97793 - DNA, 22 bp, Artificial Sequence
  Synthetic oligonucleotide; CTC chr11 5307526 5307547 5307543 5307548 +
cttttctttattgtttagtact

SEQ ID NO: 97794 - DNA, 22 bp, Artificial Sequence
  Synthetic oligonucleotide; CTT chr11 5307529 5307550 5307546 5307551 +
ttctttattgtttagtacttcg

SEQ ID NO: 97795 - DNA, 22 bp, Artificial Sequence
  Synthetic oligonucleotide; TTT chr11 5307530 5307551 5307547 5307552 +
tctttattgtttagtacttcga

SEQ ID NO: 97796 - DNA, 22 bp, Artificial Sequence
  Synthetic oligonucleotide; TTT chr11 5307531 5307552 5307548 5307553 +
ctttattgtttagtacttcgat

SEQ ID NO: 97797 - DNA, 22 bp, Artificial Sequence
  Synthetic oligonucleotide; TTC chr11 5307532 5307553 5307549 5307554 +
tttattgtttagtacttcgatg

SEQ ID NO: 97798 - DNA, 22 bp, Artificial Sequence
  Synthetic oligonucleotide; CTT chr11 5307534 5307555 5307551 5307556 +
tattgtttagtacttcgatgtc

SEQ ID NO: 97799 - DNA, 22 bp, Artificial Sequence
  Synthetic oligonucleotide; TTT chr11 5307535 5307556 5307552 5307557 +
attgtttagtacttcgatgtct

SEQ ID NO: 97800 - DNA, 22 bp, Artificial Sequence
  Synthetic oligonucleotide; TTA chr11 5307536 5307557 5307553 5307558 +
ttgtttagtacttcgatgtctc

SEQ ID NO: 97801 - DNA, 22 bp, Artificial Sequence
  Synthetic oligonucleotide; TTG chr11 5307539 5307560 5307556 5307561 +
tttagtacttcgatgtctctaa

SEQ ID NO: 97802 - DNA, 22 bp, Artificial Sequence
  Synthetic oligonucleotide; TTT chr11 5307542 5307563 5307559 5307564 +
agtacttcgatgtctctaattt

SEQ ID NO: 97803 - DNA, 22 bp, Artificial Sequence
  Synthetic oligonucleotide; TTA chr11 5307543 5307564 5307560 5307565 +
gtacttcgatgtctctaatttt

SEQ ID NO: 97804 - DNA, 22 bp, Artificial Sequence
  Synthetic oligonucleotide; CTT chr11 5307549 5307570 5307566 5307571 +
cgatgtctctaatttttacatc

SEQ ID NO: 97805 - DNA, 22 bp, Artificial Sequence
  Synthetic oligonucleotide; TTC chr11 5307550 5307571 5307567 5307572 +
gatgtctctaatttttacatca

SEQ ID NO: 97806 - DNA, 22 bp, Artificial Sequence
  Synthetic oligonucleotide; CTC chr11 5307558 5307579 5307575 5307580 +
taatttttacatcaatcatggt

SEQ ID NO: 97807 - DNA, 22 bp, Artificial Sequence
  Synthetic oligonucleotide; CTA chr11 5307560 5307581 5307577 5307582 +
atttttacatcaatcatggttc

SEQ ID NO: 97808 - DNA, 22 bp, Artificial Sequence
  Synthetic oligonucleotide; TTT chr11 5307564 5307585 5307581 5307586 +
ttacatcaatcatggttcagag

SEQ ID NO: 97809 - DNA, 22 bp, Artificial Sequence
  Synthetic oligonucleotide; TTT chr11 5307565 5307586 5307582 5307587 +
tacatcaatcatggttcagaga

SEQ ID NO: 97810 - DNA, 22 bp, Artificial Sequence
  Synthetic oligonucleotide; TTT chr11 5307566 5307587 5307583 5307588 +
acatcaatcatggttcagagaa

SEQ ID NO: 97811 - DNA, 22 bp, Artificial Sequence
  Synthetic oligonucleotide; TTA chr11 5307567 5307588 5307584 5307589 +
catcaatcatggttcagagaaa

SEQ ID NO: 97812 - DNA, 22 bp, Artificial Sequence
  Synthetic oligonucleotide; TTC chr11 5307582 5307603 5307599 5307604 +
agagaaaaatccataacaacat

SEQ ID NO: 97813 - DNA, 22 bp, Artificial Sequence
  Synthetic oligonucleotide; TTT chr11 5307619 5307640 5307636 5307641 +
tttgaagtttccttccttcctc

SEQ ID NO: 97814 - DNA, 22 bp, Artificial Sequence
  Synthetic oligonucleotide; TTT chr11 5307620 5307641 5307637 5307642 +
ttgaagtttccttccttcctcc

SEQ ID NO: 97815 - DNA, 22 bp, Artificial Sequence
  Synthetic oligonucleotide; TTT chr11 5307621 5307642 5307638 5307643 +
tgaagtttccttccttcctccc

SEQ ID NO: 97816 - DNA, 22 bp, Artificial Sequence
  Synthetic oligonucleotide; TTT chr11 5307622 5307643 5307639 5307644 +
gaagtttccttccttcctccct

SEQ ID NO: 97817 - DNA, 22 bp, Artificial Sequence
  Synthetic oligonucleotide; TTG chr11 5307623 5307644 5307640 5307645 +
aagtttccttccttcctccctc

SEQ ID NO: 97818 - DNA, 22 bp, Artificial Sequence
  Synthetic oligonucleotide; TTT chr11 5307629 5307650 5307646 5307651 +
ccttccttcctccctccctccc

SEQ ID NO: 97819 - DNA, 22 bp, Artificial Sequence
  Synthetic oligonucleotide; TTC chr11 5307630 5307651 5307647 5307652 +
cttccttcctccctccctccct

SEQ ID NO: 97820 - DNA, 22 bp, Artificial Sequence
  Synthetic oligonucleotide; CTT chr11 5307633 5307654 5307650 5307655 +
ccttcctccctccctccctccc

SEQ ID NO: 97821 - DNA, 22 bp, Artificial Sequence
  Synthetic oligonucleotide; TTC chr11 5307634 5307655 5307651 5307656 +
cttcctccctccctccctcccc

SEQ ID NO: 97822 - DNA, 22 bp, Artificial Sequence
  Synthetic oligonucleotide; CTT chr11 5307637 5307658 5307654 5307659 +
cctccctccctccctccccctt

SEQ ID NO: 97823 - DNA, 22 bp, Artificial Sequence
  Synthetic oligonucleotide; TTC chr11 5307638 5307659 5307655 5307660 +
ctccctccctccctcccccttc

SEQ ID NO: 97824 - DNA, 22 bp, Artificial Sequence
  Synthetic oligonucleotide; CTC chr11 5307641 5307662 5307658 5307663 +
cctccctccctcccccttcccc

SEQ ID NO: 97825 - DNA, 22 bp, Artificial Sequence
  Synthetic oligonucleotide; CTC chr11 5307645 5307666 5307662 5307667 +
cctccctcccccttcccccttc

SEQ ID NO: 97826 - DNA, 22 bp, Artificial Sequence
  Synthetic oligonucleotide; CTC chr11 5307649 5307670 5307666 5307671 +
cctcccccttcccccttccccc

SEQ ID NO: 97827 - DNA, 22 bp, Artificial Sequence
  Synthetic oligonucleotide; CTC chr11 5307653 5307674 5307670 5307675 +
ccccttcccccttcccccttcc

SEQ ID NO: 97828 - DNA, 22 bp, Artificial Sequence
  Synthetic oligonucleotide; CTT chr11 5307659 5307680 5307676 5307681 +
cccccttcccccttccctcctt

SEQ ID NO: 97829 - DNA, 22 bp, Artificial Sequence
  Synthetic oligonucleotide; TTC chr11 5307660 5307681 5307677 5307682 +
ccccttcccccttccctccttc

SEQ ID NO: 97830 - DNA, 22 bp, Artificial Sequence
  Synthetic oligonucleotide; CTT chr11 5307666 5307687 5307683 5307688 +
cccccttccctccttccctcct

SEQ ID NO: 97831 - DNA, 22 bp, Artificial Sequence
  Synthetic oligonucleotide; TTC chr11 5307667 5307688 5307684 5307689 +
ccccttccctccttccctcctt

SEQ ID NO: 97832 - DNA, 22 bp, Artificial Sequence
  Synthetic oligonucleotide; CTT chr11 5307673 5307694 5307690 5307695 +
ccctccttccctccttccctca

SEQ ID NO: 97833 - DNA, 22 bp, Artificial Sequence
  Synthetic oligonucleotide; TTC chr11 5307674 5307695 5307691 5307696 +
cctccttccctccttccctcat

SEQ ID NO: 97834 - DNA, 22 bp, Artificial Sequence
  Synthetic oligonucleotide; CTC chr11 5307678 5307699 5307695 5307700 +
cttccctccttccctcattcct

SEQ ID NO: 97835 - DNA, 22 bp, Artificial Sequence
  Synthetic oligonucleotide; CTT chr11 5307681 5307702 5307698 5307703 +
ccctccttccctcattccttcc

SEQ ID NO: 97836 - DNA, 22 bp, Artificial Sequence
  Synthetic oligonucleotide; TTC chr11 5307682 5307703 5307699 5307704 +
cctccttccctcattccttcct

SEQ ID NO: 97837 - DNA, 22 bp, Artificial Sequence
  Synthetic oligonucleotide; CTC chr11 5307686 5307707 5307703 5307708 +
cttccctcattccttcctttct

SEQ ID NO: 97838 - DNA, 22 bp, Artificial Sequence
  Synthetic oligonucleotide; CTT chr11 5307689 5307710 5307706 5307711 +
ccctcattccttcctttctttt

SEQ ID NO: 97839 - DNA, 22 bp, Artificial Sequence
  Synthetic oligonucleotide; TTC chr11 5307690 5307711 5307707 5307712 +
cctcattccttcctttcttttt

SEQ ID NO: 97840 - DNA, 22 bp, Artificial Sequence
  Synthetic oligonucleotide; CTC chr11 5307694 5307715 5307711 5307716 +
attccttcctttcttttttctt

SEQ ID NO: 97841 - DNA, 22 bp, Artificial Sequence
  Synthetic oligonucleotide; TTC chr11 5307698 5307719 5307715 5307720 +
cttcctttcttttttctttctt

SEQ ID NO: 97842 - DNA, 22 bp, Artificial Sequence
  Synthetic oligonucleotide; CTT chr11 5307701 5307722 5307718 5307723 +
cctttcttttttctttctttcc

SEQ ID NO: 97843 - DNA, 22 bp, Artificial Sequence
  Synthetic oligonucleotide; TTC chr11 5307702 5307723 5307719 5307724 +
ctttcttttttctttctttcct

SEQ ID NO: 97844 - DNA, 22 bp, Artificial Sequence
  Synthetic oligonucleotide; CTT chr11 5307705 5307726 5307722 5307727 +
tcttttttctttctttccttat

SEQ ID NO: 97845 - DNA, 22 bp, Artificial Sequence
  Synthetic oligonucleotide; TTT chr11 5307706 5307727 5307723 5307728 +
cttttttctttctttccttatt

SEQ ID NO: 97846 - DNA, 22 bp, Artificial Sequence
  Synthetic oligonucleotide; TTC chr11 5307707 5307728 5307724 5307729 +
ttttttctttctttccttattt

SEQ ID NO: 97847 - DNA, 22 bp, Artificial Sequence
  Synthetic oligonucleotide; CTT chr11 5307709 5307730 5307726 5307731 +
ttttctttctttccttatttct

SEQ ID NO: 97848 - DNA, 22 bp, Artificial Sequence
  Synthetic oligonucleotide; TTT chr11 5307710 5307731 5307727 5307732 +
tttctttctttccttatttctc

SEQ ID NO: 97849 - DNA, 22 bp, Artificial Sequence
  Synthetic oligonucleotide; TTT chr11 5307711 5307732 5307728 5307733 +
ttctttctttccttatttctct

SEQ ID NO: 97850 - DNA, 22 bp, Artificial Sequence
  Synthetic oligonucleotide; TTT chr11 5307712 5307733 5307729 5307734 +
tctttctttccttatttctctc

SEQ ID NO: 97851 - DNA, 22 bp, Artificial Sequence
  Synthetic oligonucleotide; TTT chr11 5307713 5307734 5307730 5307735 +
ctttctttccttatttctctct

SEQ ID NO: 97852 - DNA, 22 bp, Artificial Sequence
  Synthetic oligonucleotide; TTC chr11 5307714 5307735 5307731 5307736 +
tttctttccttatttctctctc

SEQ ID NO: 97853 - DNA, 22 bp, Artificial Sequence
  Synthetic oligonucleotide; CTT chr11 5307716 5307737 5307733 5307738 +
tctttccttatttctctctctc

SEQ ID NO: 97854 - DNA, 22 bp, Artificial Sequence
  Synthetic oligonucleotide; TTT chr11 5307717 5307738 5307734 5307739 +
ctttccttatttctctctctct

SEQ ID NO: 97855 - DNA, 22 bp, Artificial Sequence
  Synthetic oligonucleotide; TTC chr11 5307718 5307739 5307735 5307740 +
tttccttatttctctctctctt

SEQ ID NO: 97856 - DNA, 22 bp, Artificial Sequence
  Synthetic oligonucleotide; CTT chr11 5307720 5307741 5307737 5307742 +
tccttatttctctctctctttt

SEQ ID NO: 97857 - DNA, 22 bp, Artificial Sequence
  Synthetic oligonucleotide; TTT chr11 5307721 5307742 5307738 5307743 +
ccttatttctctctctcttttt

SEQ ID NO: 97858 - DNA, 22 bp, Artificial Sequence
  Synthetic oligonucleotide; TTC chr11 5307722 5307743 5307739 5307744 +
cttatttctctctctctttttc

SEQ ID NO: 97859 - DNA, 22 bp, Artificial Sequence
  Synthetic oligonucleotide; CTT chr11 5307725 5307746 5307742 5307747 +
atttctctctctctttttcttc

SEQ ID NO: 97860 - DNA, 22 bp, Artificial Sequence
  Synthetic oligonucleotide; TTA chr11 5307726 5307747 5307743 5307748 +
tttctctctctctttttcttcc

SEQ ID NO: 97861 - DNA, 22 bp, Artificial Sequence
  Synthetic oligonucleotide; TTT chr11 5307729 5307750 5307746 5307751 +
ctctctctctttttcttccttc

SEQ ID NO: 97862 - DNA, 22 bp, Artificial Sequence
  Synthetic oligonucleotide; TTC chr11 5307730 5307751 5307747 5307752 +
tctctctctttttcttccttcc

SEQ ID NO: 97863 - DNA, 22 bp, Artificial Sequence
  Synthetic oligonucleotide; CTC chr11 5307732 5307753 5307749 5307754 +
tctctctttttcttccttcctt

SEQ ID NO: 97864 - DNA, 22 bp, Artificial Sequence
  Synthetic oligonucleotide; CTC chr11 5307734 5307755 5307751 5307756 +
tctctttttcttccttccttcc

SEQ ID NO: 97865 - DNA, 22 bp, Artificial Sequence
  Synthetic oligonucleotide; CTC chr11 5307736 5307757 5307753 5307758 +
tctttttcttccttccttcctt

SEQ ID NO: 97866 - DNA, 22 bp, Artificial Sequence
  Synthetic oligonucleotide; CTC chr11 5307738 5307759 5307755 5307760 +
tttttcttccttccttcctttc

SEQ ID NO: 97867 - DNA, 22 bp, Artificial Sequence
  Synthetic oligonucleotide; CTT chr11 5307740 5307761 5307757 5307762 +
tttcttccttccttcctttctt

SEQ ID NO: 97868 - DNA, 22 bp, Artificial Sequence
  Synthetic oligonucleotide; TTT chr11 5307741 5307762 5307758 5307763 +
ttcttccttccttcctttcttt

SEQ ID NO: 97869 - DNA, 22 bp, Artificial Sequence
  Synthetic oligonucleotide; TTT chr11 5307742 5307763 5307759 5307764 +
tcttccttccttcctttctttc

SEQ ID NO: 97870 - DNA, 22 bp, Artificial Sequence
  Synthetic oligonucleotide; TTT chr11 5307743 5307764 5307760 5307765 +
cttccttccttcctttctttct

SEQ ID NO: 97871 - DNA, 22 bp, Artificial Sequence
  Synthetic oligonucleotide; TTC chr11 5307744 5307765 5307761 5307766 +
ttccttccttcctttctttctc

SEQ ID NO: 97872 - DNA, 22 bp, Artificial Sequence
  Synthetic oligonucleotide; CTT chr11 5307746 5307767 5307763 5307768 +
ccttccttcctttctttctccc

SEQ ID NO: 97873 - DNA, 22 bp, Artificial Sequence
  Synthetic oligonucleotide; TTC chr11 5307747 5307768 5307764 5307769 +
cttccttcctttctttctccct

SEQ ID NO: 97874 - DNA, 22 bp, Artificial Sequence
  Synthetic oligonucleotide; CTT chr11 5307750 5307771 5307767 5307772 +
ccttcctttctttctccctttc

SEQ ID NO: 97875 - DNA, 22 bp, Artificial Sequence
  Synthetic oligonucleotide; TTC chr11 5307751 5307772 5307768 5307773 +
cttcctttctttctccctttcc

SEQ ID NO: 97876 - DNA, 22 bp, Artificial Sequence
  Synthetic oligonucleotide; CTT chr11 5307754 5307775 5307771 5307776 +
cctttctttctccctttccttt

SEQ ID NO: 97877 - DNA, 22 bp, Artificial Sequence
  Synthetic oligonucleotide; TTC chr11 5307755 5307776 5307772 5307777 +
ctttctttctccctttcctttc

SEQ ID NO: 97878 - DNA, 22 bp, Artificial Sequence
  Synthetic oligonucleotide; CTT chr11 5307758 5307779 5307775 5307780 +
tctttctccctttcctttcctt

SEQ ID NO: 97879 - DNA, 22 bp, Artificial Sequence
  Synthetic oligonucleotide; TTT chr11 5307759 5307780 5307776 5307781 +
ctttctccctttcctttccttt

SEQ ID NO: 97880 - DNA, 22 bp, Artificial Sequence
  Synthetic oligonucleotide; TTC chr11 5307760 5307781 5307777 5307782 +
tttctccctttcctttcctttc

SEQ ID NO: 97881 - DNA, 22 bp, Artificial Sequence
  Synthetic oligonucleotide; CTT chr11 5307762 5307783 5307779 5307784 +
tctccctttcctttcctttcct

SEQ ID NO: 97882 - DNA, 22 bp, Artificial Sequence
  Synthetic oligonucleotide; TTT chr11 5307763 5307784 5307780 5307785 +
ctccctttcctttcctttcctt

SEQ ID NO: 97883 - DNA, 22 bp, Artificial Sequence
  Synthetic oligonucleotide; TTC chr11 5307764 5307785 5307781 5307786 +
tccctttcctttcctttccttt

SEQ ID NO: 97884 - DNA, 22 bp, Artificial Sequence
  Synthetic oligonucleotide; CTC chr11 5307766 5307787 5307783 5307788 +
cctttcctttcctttcctttta

SEQ ID NO: 97885 - DNA, 22 bp, Artificial Sequence
  Synthetic oligonucleotide; CTT chr11 5307770 5307791 5307787 5307792 +
tcctttcctttccttttattct

SEQ ID NO: 97886 - DNA, 22 bp, Artificial Sequence
  Synthetic oligonucleotide; TTT chr11 5307771 5307792 5307788 5307793 +
cctttcctttccttttattctc

SEQ ID NO: 97887 - DNA, 22 bp, Artificial Sequence
  Synthetic oligonucleotide; TTC chr11 5307772 5307793 5307789 5307794 +
ctttcctttccttttattctct

SEQ ID NO: 97888 - DNA, 22 bp, Artificial Sequence
  Synthetic oligonucleotide; CTT chr11 5307775 5307796 5307792 5307797 +
tcctttccttttattctctttt

SEQ ID NO: 97889 - DNA, 22 bp, Artificial Sequence
  Synthetic oligonucleotide; TTT chr11 5307776 5307797 5307793 5307798 +
cctttccttttattctcttttc

SEQ ID NO: 97890 - DNA, 22 bp, Artificial Sequence
  Synthetic oligonucleotide; TTC chr11 5307777 5307798 5307794 5307799 +
ctttccttttattctcttttct

SEQ ID NO: 97891 - DNA, 22 bp, Artificial Sequence
  Synthetic oligonucleotide; CTT chr11 5307780 5307801 5307797 5307802 +
tccttttattctcttttctttt

SEQ ID NO: 97892 - DNA, 22 bp, Artificial Sequence
  Synthetic oligonucleotide; TTT chr11 5307781 5307802 5307798 5307803 +
ccttttattctcttttcttttc

SEQ ID NO: 97893 - DNA, 22 bp, Artificial Sequence
  Synthetic oligonucleotide; TTC chr11 5307782 5307803 5307799 5307804 +
cttttattctcttttcttttct

SEQ ID NO: 97894 - DNA, 22 bp, Artificial Sequence
  Synthetic oligonucleotide; CTT chr11 5307785 5307806 5307802 5307807 +
ttattctcttttcttttctttc

SEQ ID NO: 97895 - DNA, 22 bp, Artificial Sequence
  Synthetic oligonucleotide; TTT chr11 5307786 5307807 5307803 5307808 +
tattctcttttcttttctttcc

SEQ ID NO: 97896 - DNA, 22 bp, Artificial Sequence
  Synthetic oligonucleotide; TTT chr11 5307787 5307808 5307804 5307809 +
attctcttttcttttctttcct

SEQ ID NO: 97897 - DNA, 22 bp, Artificial Sequence
  Synthetic oligonucleotide; TTA chr11 5307788 5307809 5307805 5307810 +
ttctcttttcttttctttcctc

SEQ ID NO: 97898 - DNA, 22 bp, Artificial Sequence
  Synthetic oligonucleotide; TTC chr11 5307791 5307812 5307808 5307813 +
tcttttcttttctttcctctct

SEQ ID NO: 97899 - DNA, 22 bp, Artificial Sequence
  Synthetic oligonucleotide; CTC chr11 5307793 5307814 5307810 5307815 +
ttttcttttctttcctctcttt

SEQ ID NO: 97900 - DNA, 22 bp, Artificial Sequence
  Synthetic oligonucleotide; CTT chr11 5307795 5307816 5307812 5307817 +
ttcttttctttcctctcttttg

SEQ ID NO: 97901 - DNA, 22 bp, Artificial Sequence
  Synthetic oligonucleotide; TTT chr11 5307796 5307817 5307813 5307818 +
tcttttctttcctctcttttga

SEQ ID NO: 97902 - DNA, 22 bp, Artificial Sequence
  Synthetic oligonucleotide; TTT chr11 5307797 5307818 5307814 5307819 +
cttttctttcctctcttttgag

SEQ ID NO: 97903 - DNA, 22 bp, Artificial Sequence
  Synthetic oligonucleotide; TTC chr11 5307798 5307819 5307815 5307820 +
ttttctttcctctcttttgaga

SEQ ID NO: 97904 - DNA, 22 bp, Artificial Sequence
  Synthetic oligonucleotide; CTT chr11 5307800 5307821 5307817 5307822 +
ttctttcctctcttttgagaca

SEQ ID NO: 97905 - DNA, 22 bp, Artificial Sequence
  Synthetic oligonucleotide; TTT chr11 5307801 5307822 5307818 5307823 +
tctttcctctcttttgagacag

SEQ ID NO: 97906 - DNA, 22 bp, Artificial Sequence
  Synthetic oligonucleotide; TTT chr11 5307802 5307823 5307819 5307824 +
ctttcctctcttttgagacagt

SEQ ID NO: 97907 - DNA, 22 bp, Artificial Sequence
  Synthetic oligonucleotide; TTC chr11 5307803 5307824 5307820 5307825 +
tttcctctcttttgagacagtg

SEQ ID NO: 97908 - DNA, 22 bp, Artificial Sequence
  Synthetic oligonucleotide; CTT chr11 5307805 5307826 5307822 5307827 +
tcctctcttttgagacagtgtc

SEQ ID NO: 97909 - DNA, 22 bp, Artificial Sequence
  Synthetic oligonucleotide; TTT chr11 5307806 5307827 5307823 5307828 +
cctctcttttgagacagtgtct

SEQ ID NO: 97910 - DNA, 22 bp, Artificial Sequence
  Synthetic oligonucleotide; TTC chr11 5307807 5307828 5307824 5307829 +
ctctcttttgagacagtgtctt

SEQ ID NO: 97911 - DNA, 22 bp, Artificial Sequence
  Synthetic oligonucleotide; CTC chr11 5307810 5307831 5307827 5307832 +
tcttttgagacagtgtcttgct

SEQ ID NO: 97912 - DNA, 22 bp, Artificial Sequence
  Synthetic oligonucleotide; CTC chr11 5307812 5307833 5307829 5307834 +
ttttgagacagtgtcttgctct

SEQ ID NO: 97913 - DNA, 22 bp, Artificial Sequence
  Synthetic oligonucleotide; CTT chr11 5307814 5307835 5307831 5307836 +
ttgagacagtgtcttgctctgt

SEQ ID NO: 97914 - DNA, 22 bp, Artificial Sequence
  Synthetic oligonucleotide; TTT chr11 5307815 5307836 5307832 5307837 +
tgagacagtgtcttgctctgtc

SEQ ID NO: 97915 - DNA, 22 bp, Artificial Sequence
  Synthetic oligonucleotide; TTT chr11 5307816 5307837 5307833 5307838 +
gagacagtgtcttgctctgtca

SEQ ID NO: 97916 - DNA, 22 bp, Artificial Sequence
  Synthetic oligonucleotide; TTG chr11 5307817 5307838 5307834 5307839 +
agacagtgtcttgctctgtcac

SEQ ID NO: 97917 - DNA, 22 bp, Artificial Sequence
  Synthetic oligonucleotide; CTT chr11 5307829 5307850 5307846 5307851 +
gctctgtcacccaggagggagt

SEQ ID NO: 97918 - DNA, 22 bp, Artificial Sequence
  Synthetic oligonucleotide; TTG chr11 5307830 5307851 5307847 5307852 +
ctctgtcacccaggagggagtg

SEQ ID NO: 97919 - DNA, 22 bp, Artificial Sequence
  Synthetic oligonucleotide; CTC chr11 5307833 5307854 5307850 5307855 +
tgtcacccaggagggagtgcag

SEQ ID NO: 97920 - DNA, 22 bp, Artificial Sequence
  Synthetic oligonucleotide; CTG chr11 5307835 5307856 5307852 5307857 +
tcacccaggagggagtgcagtg

SEQ ID NO: 97921 - DNA, 22 bp, Artificial Sequence
  Synthetic oligonucleotide; TTT chr11 5307872 5307893 5307889 5307894 +
actgcagcctcaagcttttagg

SEQ ID NO: 97922 - DNA, 22 bp, Artificial Sequence
  Synthetic oligonucleotide; TTA chr11 5307873 5307894 5307890 5307895 +
ctgcagcctcaagcttttaggc

SEQ ID NO: 97923 - DNA, 22 bp, Artificial Sequence
  Synthetic oligonucleotide; CTG chr11 5307876 5307897 5307893 5307898 +
cagcctcaagcttttaggctta

SEQ ID NO: 97924 - DNA, 22 bp, Artificial Sequence
  Synthetic oligonucleotide; CTC chr11 5307883 5307904 5307900 5307905 +
aagcttttaggcttaagtgatt

SEQ ID NO: 97925 - DNA, 22 bp, Artificial Sequence
  Synthetic oligonucleotide; CTT chr11 5307889 5307910 5307906 5307911 +
ttaggcttaagtgatttttaca

SEQ ID NO: 97926 - DNA, 22 bp, Artificial Sequence
  Synthetic oligonucleotide; TTT chr11 5307890 5307911 5307907 5307912 +
taggcttaagtgatttttacac

SEQ ID NO: 97927 - DNA, 22 bp, Artificial Sequence
  Synthetic oligonucleotide; TTT chr11 5307891 5307912 5307908 5307913 +
aggcttaagtgatttttacacc

SEQ ID NO: 97928 - DNA, 22 bp, Artificial Sequence
  Synthetic oligonucleotide; TTA chr11 5307892 5307913 5307909 5307914 +
ggcttaagtgatttttacacct

SEQ ID NO: 97929 - DNA, 22 bp, Artificial Sequence
  Synthetic oligonucleotide; CTT chr11 5307897 5307918 5307914 5307919 +
aagtgatttttacacctcagcc

SEQ ID NO: 97930 - DNA, 22 bp, Artificial Sequence
  Synthetic oligonucleotide; TTA chr11 5307898 5307919 5307915 5307920 +
agtgatttttacacctcagcct

SEQ ID NO: 97931 - DNA, 22 bp, Artificial Sequence
  Synthetic oligonucleotide; TTT chr11 5307906 5307927 5307923 5307928 +
ttacacctcagcctcccaaata

SEQ ID NO: 97932 - DNA, 22 bp, Artificial Sequence
  Synthetic oligonucleotide; TTT chr11 5307907 5307928 5307924 5307929 +
tacacctcagcctcccaaatag

SEQ ID NO: 97933 - DNA, 22 bp, Artificial Sequence
  Synthetic oligonucleotide; TTT chr11 5307908 5307929 5307925 5307930 +
acacctcagcctcccaaatagc

SEQ ID NO: 97934 - DNA, 22 bp, Artificial Sequence
  Synthetic oligonucleotide; TTA chr11 5307909 5307930 5307926 5307931 +
cacctcagcctcccaaatagct

SEQ ID NO: 97935 - DNA, 22 bp, Artificial Sequence
  Synthetic oligonucleotide; CTC chr11 5307915 5307936 5307932 5307937 +
agcctcccaaatagctgtgacc

SEQ ID NO: 97936 - DNA, 22 bp, Artificial Sequence
  Synthetic oligonucleotide; CTC chr11 5307921 5307942 5307938 5307943 +
ccaaatagctgtgaccacatga

SEQ ID NO: 97937 - DNA, 22 bp, Artificial Sequence
  Synthetic oligonucleotide; CTG chr11 5307932 5307953 5307949 5307954 +
tgaccacatgagaagagacatt

SEQ ID NO: 97938 - DNA, 22 bp, Artificial Sequence
  Synthetic oligonucleotide; TTT chr11 5307955 5307976 5307972 5307977 +
atgtgtttttttccttcttagt

SEQ ID NO: 97939 - DNA, 22 bp, Artificial Sequence
  Synthetic oligonucleotide; TTA chr11 5307956 5307977 5307973 5307978 +
tgtgtttttttccttcttagta

SEQ ID NO: 97940 - DNA, 22 bp, Artificial Sequence
  Synthetic oligonucleotide; TTT chr11 5307963 5307984 5307980 5307985 +
ttttccttcttagtactttggc

SEQ ID NO: 97941 - DNA, 22 bp, Artificial Sequence
  Synthetic oligonucleotide; TTT chr11 5307964 5307985 5307981 5307986 +
tttccttcttagtactttggct

SEQ ID NO: 97942 - DNA, 22 bp, Artificial Sequence
  Synthetic oligonucleotide; TTT chr11 5307965 5307986 5307982 5307987 +
ttccttcttagtactttggctg

SEQ ID NO: 97943 - DNA, 22 bp, Artificial Sequence
  Synthetic oligonucleotide; TTT chr11 5307966 5307987 5307983 5307988 +
tccttcttagtactttggctgc

SEQ ID NO: 97944 - DNA, 22 bp, Artificial Sequence
  Synthetic oligonucleotide; TTT chr11 5307967 5307988 5307984 5307989 +
ccttcttagtactttggctgca

SEQ ID NO: 97945 - DNA, 22 bp, Artificial Sequence
  Synthetic oligonucleotide; TTC chr11 5307968 5307989 5307985 5307990 +
cttcttagtactttggctgcaa

SEQ ID NO: 97946 - DNA, 22 bp, Artificial Sequence
  Synthetic oligonucleotide; CTT chr11 5307971 5307992 5307988 5307993 +
cttagtactttggctgcaagtg

SEQ ID NO: 97947 - DNA, 22 bp, Artificial Sequence
  Synthetic oligonucleotide; TTC chr11 5307972 5307993 5307989 5307994 +
ttagtactttggctgcaagtga

SEQ ID NO: 97948 - DNA, 22 bp, Artificial Sequence
  Synthetic oligonucleotide; CTT chr11 5307974 5307995 5307991 5307996 +
agtactttggctgcaagtgagt

SEQ ID NO: 97949 - DNA, 22 bp, Artificial Sequence
  Synthetic oligonucleotide; TTA chr11 5307975 5307996 5307992 5307997 +
gtactttggctgcaagtgagtc

SEQ ID NO: 97950 - DNA, 22 bp, Artificial Sequence
  Synthetic oligonucleotide; CTT chr11 5307981 5308002 5307998 5308003 +
tggctgcaagtgagtctcaagg

SEQ ID NO: 97951 - DNA, 22 bp, Artificial Sequence
  Synthetic oligonucleotide; TTT chr11 5307982 5308003 5307999 5308004 +
ggctgcaagtgagtctcaaggt

SEQ ID NO: 97952 - DNA, 22 bp, Artificial Sequence
  Synthetic oligonucleotide; TTG chr11 5307983 5308004 5308000 5308005 +
gctgcaagtgagtctcaaggta

SEQ ID NO: 97953 - DNA, 22 bp, Artificial Sequence
  Synthetic oligonucleotide; CTG chr11 5307987 5308008 5308004 5308009 +
caagtgagtctcaaggtaagat

SEQ ID NO: 97954 - DNA, 22 bp, Artificial Sequence
  Synthetic oligonucleotide; CTC chr11 5307999 5308020 5308016 5308021 +
aaggtaagatgttttaaccact

SEQ ID NO: 97955 - DNA, 22 bp, Artificial Sequence
  Synthetic oligonucleotide; TTT chr11 5308013 5308034 5308030 5308035 +
taaccacttatggaacttatat

SEQ ID NO: 97956 - DNA, 22 bp, Artificial Sequence
  Synthetic oligonucleotide; TTT chr11 5308014 5308035 5308031 5308036 +
aaccacttatggaacttatatt

SEQ ID NO: 97957 - DNA, 22 bp, Artificial Sequence
  Synthetic oligonucleotide; TTA chr11 5308015 5308036 5308032 5308037 +
accacttatggaacttatattc

SEQ ID NO: 97958 - DNA, 22 bp, Artificial Sequence
  Synthetic oligonucleotide; CTT chr11 5308022 5308043 5308039 5308044 +
atggaacttatattctcccatt

SEQ ID NO: 97959 - DNA, 22 bp, Artificial Sequence
  Synthetic oligonucleotide; TTA chr11 5308023 5308044 5308040 5308045 +
tggaacttatattctcccattc

SEQ ID NO: 97960 - DNA, 22 bp, Artificial Sequence
  Synthetic oligonucleotide; CTT chr11 5308031 5308052 5308048 5308053 +
atattctcccattccaatgaaa

SEQ ID NO: 97961 - DNA, 22 bp, Artificial Sequence
  Synthetic oligonucleotide; TTA chr11 5308032 5308053 5308049 5308054 +
tattctcccattccaatgaaaa

SEQ ID NO: 97962 - DNA, 22 bp, Artificial Sequence
  Synthetic oligonucleotide; TTC chr11 5308037 5308058 5308054 5308059 +
tcccattccaatgaaaagacta

SEQ ID NO: 97963 - DNA, 22 bp, Artificial Sequence
  Synthetic oligonucleotide; CTC chr11 5308039 5308060 5308056 5308061 +
ccattccaatgaaaagactact

SEQ ID NO: 97964 - DNA, 22 bp, Artificial Sequence
  Synthetic oligonucleotide; TTC chr11 5308045 5308066 5308062 5308067 +
caatgaaaagactactttgaaa

SEQ ID NO: 97965 - DNA, 22 bp, Artificial Sequence
  Synthetic oligonucleotide; CTA chr11 5308059 5308080 5308076 5308081 +
ctttgaaaatgtttttgttgat

SEQ ID NO: 97966 - DNA, 22 bp, Artificial Sequence
  Synthetic oligonucleotide; CTT chr11 5308062 5308083 5308079 5308084 +
tgaaaatgtttttgttgatgtc

SEQ ID NO: 97967 - DNA, 22 bp, Artificial Sequence
  Synthetic oligonucleotide; TTT chr11 5308063 5308084 5308080 5308085 +
gaaaatgtttttgttgatgtct

SEQ ID NO: 97968 - DNA, 22 bp, Artificial Sequence
  Synthetic oligonucleotide; TTG chr11 5308064 5308085 5308081 5308086 +
aaaatgtttttgttgatgtcta

SEQ ID NO: 97969 - DNA, 22 bp, Artificial Sequence
  Synthetic oligonucleotide; TTT chr11 5308073 5308094 5308090 5308095 +
ttgttgatgtctaaatacacca

SEQ ID NO: 97970 - DNA, 22 bp, Artificial Sequence
  Synthetic oligonucleotide; TTT chr11 5308074 5308095 5308091 5308096 +
tgttgatgtctaaatacaccaa

SEQ ID NO: 97971 - DNA, 22 bp, Artificial Sequence
  Synthetic oligonucleotide; TTT chr11 5308075 5308096 5308092 5308097 +
gttgatgtctaaatacaccaag

SEQ ID NO: 97972 - DNA, 22 bp, Artificial Sequence
  Synthetic oligonucleotide; TTG chr11 5308076 5308097 5308093 5308098 +
ttgatgtctaaatacaccaagt

SEQ ID NO: 97973 - DNA, 22 bp, Artificial Sequence
  Synthetic oligonucleotide; TTG chr11 5308079 5308100 5308096 5308101 +
atgtctaaatacaccaagtcta

SEQ ID NO: 97974 - DNA, 22 bp, Artificial Sequence
  Synthetic oligonucleotide; CTA chr11 5308086 5308107 5308103 5308108 +
aatacaccaagtctacaatttc

SEQ ID NO: 97975 - DNA, 22 bp, Artificial Sequence
  Synthetic oligonucleotide; CTA chr11 5308101 5308122 5308118 5308123 +
caatttcctgtgatctatctat

SEQ ID NO: 97976 - DNA, 22 bp, Artificial Sequence
  Synthetic oligonucleotide; TTT chr11 5308107 5308128 5308124 5308129 +
cctgtgatctatctatactact

SEQ ID NO: 97977 - DNA, 22 bp, Artificial Sequence
  Synthetic oligonucleotide; TTC chr11 5308108 5308129 5308125 5308130 +
ctgtgatctatctatactacta

SEQ ID NO: 97978 - DNA, 22 bp, Artificial Sequence
  Synthetic oligonucleotide; CTG chr11 5308111 5308132 5308128 5308133 +
tgatctatctatactactaaat

SEQ ID NO: 97979 - DNA, 22 bp, Artificial Sequence
  Synthetic oligonucleotide; CTA chr11 5308118 5308139 5308135 5308140 +
tctatactactaaatagctaga

SEQ ID NO: 97980 - DNA, 22 bp, Artificial Sequence
  Synthetic oligonucleotide; CTA chr11 5308122 5308143 5308139 5308144 +
tactactaaatagctagaccaa

SEQ ID NO: 97981 - DNA, 22 bp, Artificial Sequence
  Synthetic oligonucleotide; CTA chr11 5308127 5308148 5308144 5308149 +
ctaaatagctagaccaatacat

SEQ ID NO: 97982 - DNA, 22 bp, Artificial Sequence
  Synthetic oligonucleotide; CTA chr11 5308130 5308151 5308147 5308152 +
aatagctagaccaatacatgaa

SEQ ID NO: 97983 - DNA, 22 bp, Artificial Sequence
  Synthetic oligonucleotide; CTA chr11 5308138 5308159 5308155 5308160 +
gaccaatacatgaaaagaaact

SEQ ID NO: 97984 - DNA, 22 bp, Artificial Sequence
  Synthetic oligonucleotide; CTC chr11 5308161 5308182 5308178 5308183 +
ttattctcaataaagaactgta

SEQ ID NO: 97985 - DNA, 22 bp, Artificial Sequence
  Synthetic oligonucleotide; CTT chr11 5308163 5308184 5308180 5308185 +
attctcaataaagaactgtacc

SEQ ID NO: 97986 - DNA, 22 bp, Artificial Sequence
  Synthetic oligonucleotide; TTA chr11 5308164 5308185 5308181 5308186 +
ttctcaataaagaactgtaccc

SEQ ID NO: 97987 - DNA, 22 bp, Artificial Sequence
  Synthetic oligonucleotide; TTC chr11 5308167 5308188 5308184 5308189 +
tcaataaagaactgtaccccaa

SEQ ID NO: 97988 - DNA, 22 bp, Artificial Sequence
  Synthetic oligonucleotide; CTC chr11 5308169 5308190 5308186 5308191 +
aataaagaactgtaccccaaca

SEQ ID NO: 97989 - DNA, 22 bp, Artificial Sequence
  Synthetic oligonucleotide; CTG chr11 5308181 5308202 5308198 5308203 +
taccccaacaataatatatcag

SEQ ID NO: 97990 - DNA, 22 bp, Artificial Sequence
  Synthetic oligonucleotide; TTA chr11 5308209 5308230 5308226 5308231 +
tatgtcttttttatcttctttg

SEQ ID NO: 97991 - DNA, 22 bp, Artificial Sequence
  Synthetic oligonucleotide; CTT chr11 5308217 5308238 5308234 5308239 +
ttttatcttctttgtgtcttat

SEQ ID NO: 97992 - DNA, 22 bp, Artificial Sequence
  Synthetic oligonucleotide; TTT chr11 5308218 5308239 5308235 5308240 +
tttatcttctttgtgtcttatc

SEQ ID NO: 97993 - DNA, 22 bp, Artificial Sequence
  Synthetic oligonucleotide; TTT chr11 5308219 5308240 5308236 5308241 +
ttatcttctttgtgtcttatca

SEQ ID NO: 97994 - DNA, 22 bp, Artificial Sequence
  Synthetic oligonucleotide; TTT chr11 5308220 5308241 5308237 5308242 +
tatcttctttgtgtcttatcag

SEQ ID NO: 97995 - DNA, 22 bp, Artificial Sequence
  Synthetic oligonucleotide; TTT chr11 5308221 5308242 5308238 5308243 +
atcttctttgtgtcttatcagt

SEQ ID NO: 97996 - DNA, 22 bp, Artificial Sequence
  Synthetic oligonucleotide; TTA chr11 5308222 5308243 5308239 5308244 +
tcttctttgtgtcttatcagtt

SEQ ID NO: 97997 - DNA, 22 bp, Artificial Sequence
  Synthetic oligonucleotide; CTT chr11 5308226 5308247 5308243 5308248 +
ctttgtgtcttatcagttatgt

SEQ ID NO: 97998 - DNA, 22 bp, Artificial Sequence
  Synthetic oligonucleotide; TTC chr11 5308227 5308248 5308244 5308249 +
tttgtgtcttatcagttatgtt

SEQ ID NO: 97999 - DNA, 22 bp, Artificial Sequence
  Synthetic oligonucleotide; CTT chr11 5308229 5308250 5308246 5308251 +
tgtgtcttatcagttatgttac

SEQ ID NO: 98000 - DNA, 22 bp, Artificial Sequence
  Synthetic oligonucleotide; TTT chr11 5308230 5308251 5308247 5308252 +
gtgtcttatcagttatgttacc

SEQ ID NO: 98001 - DNA, 22 bp, Artificial Sequence
  Synthetic oligonucleotide; TTG chr11 5308231 5308252 5308248 5308253 +
tgtcttatcagttatgttacca

SEQ ID NO: 98002 - DNA, 22 bp, Artificial Sequence
  Synthetic oligonucleotide; CTT chr11 5308237 5308258 5308254 5308259 +
atcagttatgttaccatatagg

SEQ ID NO: 98003 - DNA, 22 bp, Artificial Sequence
  Synthetic oligonucleotide; TTA chr11 5308238 5308259 5308255 5308260 +
tcagttatgttaccatatagga

SEQ ID NO: 98004 - DNA, 22 bp, Artificial Sequence
  Synthetic oligonucleotide; TTA chr11 5308245 5308266 5308262 5308267 +
tgttaccatataggaagagaaa

SEQ ID NO: 98005 - DNA, 22 bp, Artificial Sequence
  Synthetic oligonucleotide; TTA chr11 5308250 5308271 5308267 5308272 +
ccatataggaagagaaagaaaa

SEQ ID NO: 98006 - DNA, 22 bp, Artificial Sequence
  Synthetic oligonucleotide; TTA chr11 5308275 5308296 5308292 5308297 +
taagtgaaatcactgtgtacca

SEQ ID NO: 98007 - DNA, 22 bp, Artificial Sequence
  Synthetic oligonucleotide; CTG chr11 5308290 5308311 5308307 5308312 +
tgtaccatctcacatctatgca

SEQ ID NO: 98008 - DNA, 22 bp, Artificial Sequence
  Synthetic oligonucleotide; CTC chr11 5308301 5308322 5308318 5308323 +
acatctatgcaaggcaaatagg

SEQ ID NO: 98009 - DNA, 22 bp, Artificial Sequence
  Synthetic oligonucleotide; CTA chr11 5308308 5308329 5308325 5308330 +
tgcaaggcaaataggactaata

SEQ ID NO: 98010 - DNA, 22 bp, Artificial Sequence
  Synthetic oligonucleotide; CTA chr11 5308327 5308348 5308344 5308349 +
atagtacagggacaaggctgaa

SEQ ID NO: 98011 - DNA, 22 bp, Artificial Sequence
  Synthetic oligonucleotide; CTG chr11 5308347 5308368 5308364 5308369 +
aaaggagacattttaaggttga

SEQ ID NO: 98012 - DNA, 22 bp, Artificial Sequence
  Synthetic oligonucleotide; TTT chr11 5308360 5308381 5308377 5308382 +
taaggttgaaggtatgcagtaa

SEQ ID NO: 98013 - DNA, 22 bp, Artificial Sequence
  Synthetic oligonucleotide; TTT chr11 5308361 5308382 5308378 5308383 +
aaggttgaaggtatgcagtaaa

SEQ ID NO: 98014 - DNA, 22 bp, Artificial Sequence
  Synthetic oligonucleotide; TTA chr11 5308362 5308383 5308379 5308384 +
aggttgaaggtatgcagtaaaa

SEQ ID NO: 98015 - DNA, 22 bp, Artificial Sequence
  Synthetic oligonucleotide; TTG chr11 5308368 5308389 5308385 5308390 +
aaggtatgcagtaaaacttgtt

SEQ ID NO: 98016 - DNA, 22 bp, Artificial Sequence
  Synthetic oligonucleotide; CTT chr11 5308387 5308408 5308404 5308409 +
gttttctggagattacgttgaa

SEQ ID NO: 98017 - DNA, 22 bp, Artificial Sequence
  Synthetic oligonucleotide; TTG chr11 5308388 5308409 5308405 5308410 +
ttttctggagattacgttgaaa

SEQ ID NO: 98018 - DNA, 22 bp, Artificial Sequence
  Synthetic oligonucleotide; TTT chr11 5308391 5308412 5308408 5308413 +
tctggagattacgttgaaagaa

SEQ ID NO: 98019 - DNA, 22 bp, Artificial Sequence
  Synthetic oligonucleotide; TTT chr11 5308392 5308413 5308409 5308414 +
ctggagattacgttgaaagaag

SEQ ID NO: 98020 - DNA, 22 bp, Artificial Sequence
  Synthetic oligonucleotide; TTC chr11 5308393 5308414 5308410 5308415 +
tggagattacgttgaaagaagt

SEQ ID NO: 98021 - DNA, 22 bp, Artificial Sequence
  Synthetic oligonucleotide; CTG chr11 5308395 5308416 5308412 5308417 +
gagattacgttgaaagaagtta

SEQ ID NO: 98022 - DNA, 22 bp, Artificial Sequence
  Synthetic oligonucleotide; TTA chr11 5308402 5308423 5308419 5308424 +
cgttgaaagaagttacagtcag

SEQ ID NO: 98023 - DNA, 22 bp, Artificial Sequence
  Synthetic oligonucleotide; TTG chr11 5308407 5308428 5308424 5308429 +
aaagaagttacagtcagtcaat

SEQ ID NO: 98024 - DNA, 22 bp, Artificial Sequence
  Synthetic oligonucleotide; TTA chr11 5308417 5308438 5308434 5308439 +
cagtcagtcaatctaatgaggt

SEQ ID NO: 98025 - DNA, 22 bp, Artificial Sequence
  Synthetic oligonucleotide; CTA chr11 5308432 5308453 5308449 5308454 +
atgaggttgtagaagatgaaac

SEQ ID NO: 98026 - DNA, 22 bp, Artificial Sequence
  Synthetic oligonucleotide; TTG chr11 5308441 5308462 5308458 5308463 +
tagaagatgaaacaactaagct

SEQ ID NO: 98027 - DNA, 22 bp, Artificial Sequence
  Synthetic oligonucleotide; CTA chr11 5308459 5308480 5308476 5308481 +
agctggtgctcctggtaatgac

SEQ ID NO: 98028 - DNA, 22 bp, Artificial Sequence
  Synthetic oligonucleotide; CTG chr11 5308464 5308485 5308481 5308486 +
gtgctcctggtaatgacttgat

SEQ ID NO: 98029 - DNA, 22 bp, Artificial Sequence
  Synthetic oligonucleotide; CTC chr11 5308470 5308491 5308487 5308492 +
ctggtaatgacttgatacctgc

SEQ ID NO: 98030 - DNA, 22 bp, Artificial Sequence
  Synthetic oligonucleotide; CTG chr11 5308473 5308494 5308490 5308495 +
gtaatgacttgatacctgcgaa

SEQ ID NO: 98031 - DNA, 22 bp, Artificial Sequence
  Synthetic oligonucleotide; CTT chr11 5308483 5308504 5308500 5308505 +
gatacctgcgaagtgtctaaat

SEQ ID NO: 98032 - DNA, 22 bp, Artificial Sequence
  Synthetic oligonucleotide; TTG chr11 5308484 5308505 5308501 5308506 +
atacctgcgaagtgtctaaata

SEQ ID NO: 98033 - DNA, 22 bp, Artificial Sequence
  Synthetic oligonucleotide; CTG chr11 5308491 5308512 5308508 5308513 +
cgaagtgtctaaatatgtatag

SEQ ID NO: 98034 - DNA, 22 bp, Artificial Sequence
  Synthetic oligonucleotide; CTA chr11 5308502 5308523 5308519 5308524 +
aatatgtatagaggagttgata

SEQ ID NO: 98035 - DNA, 22 bp, Artificial Sequence
  Synthetic oligonucleotide; TTG chr11 5308521 5308542 5308538 5308543 +
ataatatagaccaattgcactt

SEQ ID NO: 98036 - DNA, 22 bp, Artificial Sequence
  Synthetic oligonucleotide; TTG chr11 5308538 5308559 5308555 5308560 +
cactttgggcccctgctgagta

SEQ ID NO: 98037 - DNA, 22 bp, Artificial Sequence
  Synthetic oligonucleotide; CTT chr11 5308543 5308564 5308560 5308565 +
tgggcccctgctgagtaagatt

SEQ ID NO: 98038 - DNA, 22 bp, Artificial Sequence
  Synthetic oligonucleotide; TTT chr11 5308544 5308565 5308561 5308566 +
gggcccctgctgagtaagattt

SEQ ID NO: 98039 - DNA, 22 bp, Artificial Sequence
  Synthetic oligonucleotide; TTG chr11 5308545 5308566 5308562 5308567 +
ggcccctgctgagtaagatttt

SEQ ID NO: 98040 - DNA, 22 bp, Artificial Sequence
  Synthetic oligonucleotide; CTG chr11 5308553 5308574 5308570 5308575 +
ctgagtaagattttgtgtcaac

SEQ ID NO: 98041 - DNA, 22 bp, Artificial Sequence
  Synthetic oligonucleotide; CTG chr11 5308556 5308577 5308573 5308578 +
agtaagattttgtgtcaactaa

SEQ ID NO: 98042 - DNA, 22 bp, Artificial Sequence
  Synthetic oligonucleotide; TTT chr11 5308566 5308587 5308583 5308588 +
tgtgtcaactaaacaaaacgat

SEQ ID NO: 98043 - DNA, 22 bp, Artificial Sequence
  Synthetic oligonucleotide; TTT chr11 5308567 5308588 5308584 5308589 +
gtgtcaactaaacaaaacgata

SEQ ID NO: 98044 - DNA, 22 bp, Artificial Sequence
  Synthetic oligonucleotide; TTG chr11 5308568 5308589 5308585 5308590 +
tgtcaactaaacaaaacgatag

SEQ ID NO: 98045 - DNA, 22 bp, Artificial Sequence
  Synthetic oligonucleotide; CTA chr11 5308577 5308598 5308594 5308599 +
aacaaaacgataggaaattgta

SEQ ID NO: 98046 - DNA, 22 bp, Artificial Sequence
  Synthetic oligonucleotide; TTG chr11 5308597 5308618 5308614 5308619 +
tatttccccaaagacattttgg

SEQ ID NO: 98047 - DNA, 22 bp, Artificial Sequence
  Synthetic oligonucleotide; TTT chr11 5308602 5308623 5308619 5308624 +
ccccaaagacattttggaaacg

SEQ ID NO: 98048 - DNA, 22 bp, Artificial Sequence
  Synthetic oligonucleotide; TTC chr11 5308603 5308624 5308620 5308625 +
cccaaagacattttggaaacgt

SEQ ID NO: 98049 - DNA, 22 bp, Artificial Sequence
  Synthetic oligonucleotide; TTT chr11 5308616 5308637 5308633 5308638 +
tggaaacgttctccttcagcac

SEQ ID NO: 98050 - DNA, 22 bp, Artificial Sequence
  Synthetic oligonucleotide; TTT chr11 5308617 5308638 5308634 5308639 +
ggaaacgttctccttcagcacc

SEQ ID NO: 98051 - DNA, 22 bp, Artificial Sequence
  Synthetic oligonucleotide; TTG chr11 5308618 5308639 5308635 5308640 +
gaaacgttctccttcagcacca

SEQ ID NO: 98052 - DNA, 22 bp, Artificial Sequence
  Synthetic oligonucleotide; TTC chr11 5308627 5308648 5308644 5308649 +
tccttcagcaccaatggtagca

SEQ ID NO: 98053 - DNA, 22 bp, Artificial Sequence
  Synthetic oligonucleotide; CTC chr11 5308629 5308650 5308646 5308651 +
cttcagcaccaatggtagcacc

SEQ ID NO: 98054 - DNA, 22 bp, Artificial Sequence
  Synthetic oligonucleotide; CTT chr11 5308632 5308653 5308649 5308654 +
cagcaccaatggtagcacctgg

SEQ ID NO: 98055 - DNA, 22 bp, Artificial Sequence
  Synthetic oligonucleotide; TTC chr11 5308633 5308654 5308650 5308655 +
agcaccaatggtagcacctgga

SEQ ID NO: 98056 - DNA, 22 bp, Artificial Sequence
  Synthetic oligonucleotide; CTG chr11 5308653 5308674 5308670 5308675 +
gaactgaccatccaacttccaa

SEQ ID NO: 98057 - DNA, 22 bp, Artificial Sequence
  Synthetic oligonucleotide; CTG chr11 5308659 5308680 5308676 5308681 +
accatccaacttccaagccaaa

SEQ ID NO: 98058 - DNA, 22 bp, Artificial Sequence
  Synthetic oligonucleotide; CTT chr11 5308671 5308692 5308688 5308693 +
ccaagccaaacaacttcaccca

SEQ ID NO: 98059 - DNA, 22 bp, Artificial Sequence
  Synthetic oligonucleotide; TTC chr11 5308672 5308693 5308689 5308694 +
caagccaaacaacttcacccat

SEQ ID NO: 98060 - DNA, 22 bp, Artificial Sequence
  Synthetic oligonucleotide; CTT chr11 5308687 5308708 5308704 5308709 +
cacccataaatctacattcctc

SEQ ID NO: 98061 - DNA, 22 bp, Artificial Sequence
  Synthetic oligonucleotide; TTC chr11 5308688 5308709 5308705 5308710 +
acccataaatctacattcctcc

SEQ ID NO: 98062 - DNA, 22 bp, Artificial Sequence
  Synthetic oligonucleotide; CTA chr11 5308701 5308722 5308718 5308723 +
cattcctccaatctctttcctc

SEQ ID NO: 98063 - DNA, 22 bp, Artificial Sequence
  Synthetic oligonucleotide; TTC chr11 5308706 5308727 5308723 5308728 +
ctccaatctctttcctccatca

SEQ ID NO: 98064 - DNA, 22 bp, Artificial Sequence
  Synthetic oligonucleotide; CTC chr11 5308709 5308730 5308726 5308731 +
caatctctttcctccatcatgg

SEQ ID NO: 98065 - DNA, 22 bp, Artificial Sequence
  Synthetic oligonucleotide; CTC chr11 5308716 5308737 5308733 5308738 +
tttcctccatcatggaaacagc

SEQ ID NO: 98066 - DNA, 22 bp, Artificial Sequence
  Synthetic oligonucleotide; CTT chr11 5308718 5308739 5308735 5308740 +
tcctccatcatggaaacagccc

SEQ ID NO: 98067 - DNA, 22 bp, Artificial Sequence
  Synthetic oligonucleotide; TTT chr11 5308719 5308740 5308736 5308741 +
cctccatcatggaaacagccct

SEQ ID NO: 98068 - DNA, 22 bp, Artificial Sequence
  Synthetic oligonucleotide; TTC chr11 5308720 5308741 5308737 5308742 +
ctccatcatggaaacagccctg

SEQ ID NO: 98069 - DNA, 22 bp, Artificial Sequence
  Synthetic oligonucleotide; CTC chr11 5308723 5308744 5308740 5308745 +
catcatggaaacagccctgcat

SEQ ID NO: 98070 - DNA, 22 bp, Artificial Sequence
  Synthetic oligonucleotide; CTG chr11 5308742 5308763 5308759 5308764 +
catattcaaaagtgagtgtccc

SEQ ID NO: 98071 - DNA, 22 bp, Artificial Sequence
  Synthetic oligonucleotide; TTC chr11 5308749 5308770 5308766 5308771 +
aaaagtgagtgtccctctctta

SEQ ID NO: 98072 - DNA, 22 bp, Artificial Sequence
  Synthetic oligonucleotide; CTC chr11 5308766 5308787 5308783 5308788 +
tcttatacctcgtcagagagat

SEQ ID NO: 98073 - DNA, 22 bp, Artificial Sequence
  Synthetic oligonucleotide; CTC chr11 5308768 5308789 5308785 5308790 +
ttatacctcgtcagagagattc

SEQ ID NO: 98074 - DNA, 22 bp, Artificial Sequence
  Synthetic oligonucleotide; CTT chr11 5308770 5308791 5308787 5308792 +
atacctcgtcagagagattcaa

SEQ ID NO: 98075 - DNA, 22 bp, Artificial Sequence
  Synthetic oligonucleotide; TTA chr11 5308771 5308792 5308788 5308793 +
tacctcgtcagagagattcaaa

SEQ ID NO: 98076 - DNA, 22 bp, Artificial Sequence
  Synthetic oligonucleotide; CTC chr11 5308777 5308798 5308794 5308799 +
gtcagagagattcaaatattgt

SEQ ID NO: 98077 - DNA, 22 bp, Artificial Sequence
  Synthetic oligonucleotide; TTC chr11 5308790 5308811 5308807 5308812 +
aaatattgtcatattcacaatc

SEQ ID NO: 98078 - DNA, 22 bp, Artificial Sequence
  Synthetic oligonucleotide; TTG chr11 5308798 5308819 5308815 5308820 +
tcatattcacaatccacaacag

SEQ ID NO: 98079 - DNA, 22 bp, Artificial Sequence
  Synthetic oligonucleotide; TTC chr11 5308806 5308827 5308823 5308828 +
acaatccacaacaggcccagat

SEQ ID NO: 98080 - DNA, 22 bp, Artificial Sequence
  Synthetic oligonucleotide; TTC chr11 5308836 5308857 5308853 5308858 +
agtgatgctggtcatcactgaa

SEQ ID NO: 98081 - DNA, 22 bp, Artificial Sequence
  Synthetic oligonucleotide; CTG chr11 5308846 5308867 5308863 5308868 +
gtcatcactgaagatagattga

SEQ ID NO: 98082 - DNA, 22 bp, Artificial Sequence
  Synthetic oligonucleotide; CTG chr11 5308856 5308877 5308873 5308878 +
aagatagattgaatcttccttt

SEQ ID NO: 98083 - DNA, 22 bp, Artificial Sequence
  Synthetic oligonucleotide; TTG chr11 5308867 5308888 5308884 5308889 +
aatcttcctttcttcttggacg

SEQ ID NO: 98084 - DNA, 22 bp, Artificial Sequence
  Synthetic oligonucleotide; CTT chr11 5308873 5308894 5308890 5308895 +
cctttcttcttggacgtaaatt

SEQ ID NO: 98085 - DNA, 22 bp, Artificial Sequence
  Synthetic oligonucleotide; TTC chr11 5308874 5308895 5308891 5308896 +
ctttcttcttggacgtaaattg

SEQ ID NO: 98086 - DNA, 22 bp, Artificial Sequence
  Synthetic oligonucleotide; CTT chr11 5308877 5308898 5308894 5308899 +
tcttcttggacgtaaattgcag

SEQ ID NO: 98087 - DNA, 22 bp, Artificial Sequence
  Synthetic oligonucleotide; TTT chr11 5308878 5308899 5308895 5308900 +
cttcttggacgtaaattgcagg

SEQ ID NO: 98088 - DNA, 22 bp, Artificial Sequence
  Synthetic oligonucleotide; TTC chr11 5308879 5308900 5308896 5308901 +
ttcttggacgtaaattgcaggt

SEQ ID NO: 98089 - DNA, 22 bp, Artificial Sequence
  Synthetic oligonucleotide; CTT chr11 5308881 5308902 5308898 5308903 +
cttggacgtaaattgcaggtta

SEQ ID NO: 98090 - DNA, 22 bp, Artificial Sequence
  Synthetic oligonucleotide; TTC chr11 5308882 5308903 5308899 5308904 +
ttggacgtaaattgcaggttat

SEQ ID NO: 98091 - DNA, 22 bp, Artificial Sequence
  Synthetic oligonucleotide; CTT chr11 5308884 5308905 5308901 5308906 +
ggacgtaaattgcaggttattg

SEQ ID NO: 98092 - DNA, 22 bp, Artificial Sequence
  Synthetic oligonucleotide; TTG chr11 5308885 5308906 5308902 5308907 +
gacgtaaattgcaggttattga

SEQ ID NO: 98093 - DNA, 22 bp, Artificial Sequence
  Synthetic oligonucleotide; TTG chr11 5308896 5308917 5308913 5308918 +
caggttattgaaaaaactataa

SEQ ID NO: 98094 - DNA, 22 bp, Artificial Sequence
  Synthetic oligonucleotide; TTA chr11 5308903 5308924 5308920 5308925 +
ttgaaaaaactataacttgaag

SEQ ID NO: 98095 - DNA, 22 bp, Artificial Sequence
  Synthetic oligonucleotide; TTG chr11 5308906 5308927 5308923 5308928 +
aaaaaactataacttgaagttt

SEQ ID NO: 98096 - DNA, 22 bp, Artificial Sequence
  Synthetic oligonucleotide; CTA chr11 5308915 5308936 5308932 5308937 +
taacttgaagtttcatagcaga

SEQ ID NO: 98097 - DNA, 22 bp, Artificial Sequence
  Synthetic oligonucleotide; CTT chr11 5308921 5308942 5308938 5308943 +
gaagtttcatagcagaaagttg

SEQ ID NO: 98098 - DNA, 22 bp, Artificial Sequence
  Synthetic oligonucleotide; TTG chr11 5308922 5308943 5308939 5308944 +
aagtttcatagcagaaagttgg

SEQ ID NO: 98099 - DNA, 22 bp, Artificial Sequence
  Synthetic oligonucleotide; TTT chr11 5308928 5308949 5308945 5308950 +
catagcagaaagttggcatctt

SEQ ID NO: 98100 - DNA, 22 bp, Artificial Sequence
  Synthetic oligonucleotide; TTC chr11 5308929 5308950 5308946 5308951 +
atagcagaaagttggcatcttt

SEQ ID NO: 98101 - DNA, 22 bp, Artificial Sequence
  Synthetic oligonucleotide; TTG chr11 5308943 5308964 5308960 5308965 +
gcatctttctcactaagcatga

SEQ ID NO: 98102 - DNA, 22 bp, Artificial Sequence
  Synthetic oligonucleotide; CTT chr11 5308950 5308971 5308967 5308972 +
tctcactaagcatgagaaaaac

SEQ ID NO: 98103 - DNA, 22 bp, Artificial Sequence
  Synthetic oligonucleotide; TTT chr11 5308951 5308972 5308968 5308973 +
ctcactaagcatgagaaaaact

SEQ ID NO: 98104 - DNA, 22 bp, Artificial Sequence
  Synthetic oligonucleotide; TTC chr11 5308952 5308973 5308969 5308974 +
tcactaagcatgagaaaaacta

SEQ ID NO: 98105 - DNA, 22 bp, Artificial Sequence
  Synthetic oligonucleotide; CTC chr11 5308954 5308975 5308971 5308976 +
actaagcatgagaaaaactaac

SEQ ID NO: 98106 - DNA, 22 bp, Artificial Sequence
  Synthetic oligonucleotide; CTA chr11 5308958 5308979 5308975 5308980 +
agcatgagaaaaactaacagag

SEQ ID NO: 98107 - DNA, 22 bp, Artificial Sequence
  Synthetic oligonucleotide; CTA chr11 5308974 5308995 5308991 5308996 +
acagagttttaatttgaagggc

SEQ ID NO: 98108 - DNA, 22 bp, Artificial Sequence
  Synthetic oligonucleotide; TTT chr11 5308983 5309004 5309000 5309005 +
taatttgaagggccttagccaa

SEQ ID NO: 98109 - DNA, 22 bp, Artificial Sequence
  Synthetic oligonucleotide; TTT chr11 5308984 5309005 5309001 5309006 +
aatttgaagggccttagccaac

SEQ ID NO: 98110 - DNA, 22 bp, Artificial Sequence
  Synthetic oligonucleotide; TTA chr11 5308985 5309006 5309002 5309007 +
atttgaagggccttagccaact

SEQ ID NO: 98111 - DNA, 22 bp, Artificial Sequence
  Synthetic oligonucleotide; TTT chr11 5308989 5309010 5309006 5309011 +
gaagggccttagccaacttagc

SEQ ID NO: 98112 - DNA, 22 bp, Artificial Sequence
  Synthetic oligonucleotide; TTG chr11 5308990 5309011 5309007 5309012 +
aagggccttagccaacttagct

SEQ ID NO: 98113 - DNA, 22 bp, Artificial Sequence
  Synthetic oligonucleotide; CTT chr11 5308999 5309020 5309016 5309021 +
agccaacttagctgaagtccct

SEQ ID NO: 98114 - DNA, 22 bp, Artificial Sequence
  Synthetic oligonucleotide; TTA chr11 5309000 5309021 5309017 5309022 +
gccaacttagctgaagtccctt

SEQ ID NO: 98115 - DNA, 22 bp, Artificial Sequence
  Synthetic oligonucleotide; CTT chr11 5309008 5309029 5309025 5309030 +
agctgaagtcccttccacctaa

SEQ ID NO: 98116 - DNA, 22 bp, Artificial Sequence
  Synthetic oligonucleotide; TTA chr11 5309009 5309030 5309026 5309031 +
gctgaagtcccttccacctaag

SEQ ID NO: 98117 - DNA, 22 bp, Artificial Sequence
  Synthetic oligonucleotide; CTG chr11 5309013 5309034 5309030 5309035 +
aagtcccttccacctaagataa

SEQ ID NO: 98118 - DNA, 22 bp, Artificial Sequence
  Synthetic oligonucleotide; CTT chr11 5309022 5309043 5309039 5309044 +
ccacctaagataaagctgtaaa

SEQ ID NO: 98119 - DNA, 22 bp, Artificial Sequence
  Synthetic oligonucleotide; TTC chr11 5309023 5309044 5309040 5309045 +
cacctaagataaagctgtaaaa

SEQ ID NO: 98120 - DNA, 22 bp, Artificial Sequence
  Synthetic oligonucleotide; CTA chr11 5309029 5309050 5309046 5309051 +
agataaagctgtaaaagaggag

SEQ ID NO: 98121 - DNA, 22 bp, Artificial Sequence
  Synthetic oligonucleotide; CTG chr11 5309040 5309061 5309057 5309062 +
taaaagaggagcagatgtataa

SEQ ID NO: 98122 - DNA, 22 bp, Artificial Sequence
  Synthetic oligonucleotide; TTT chr11 5309065 5309086 5309082 5309087 +
agatattggagcagcatgcagt

SEQ ID NO: 98123 - DNA, 22 bp, Artificial Sequence
  Synthetic oligonucleotide; TTA chr11 5309066 5309087 5309083 5309088 +
gatattggagcagcatgcagta

SEQ ID NO: 98124 - DNA, 22 bp, Artificial Sequence
  Synthetic oligonucleotide; TTG chr11 5309073 5309094 5309090 5309095 +
gagcagcatgcagtatcaaaat

SEQ ID NO: 98125 - DNA, 22 bp, Artificial Sequence
  Synthetic oligonucleotide; CTC chr11 5309100 5309121 5309117 5309122 +
atgagcaccaaagaagccatat

SEQ ID NO: 98126 - DNA, 22 bp, Artificial Sequence
  Synthetic oligonucleotide; TTT chr11 5309126 5309147 5309143 5309148 +
ttcacagtttctattcttccaa

SEQ ID NO: 98127 - DNA, 22 bp, Artificial Sequence
  Synthetic oligonucleotide; TTT chr11 5309127 5309148 5309144 5309149 +
tcacagtttctattcttccaaa

SEQ ID NO: 98128 - DNA, 22 bp, Artificial Sequence
  Synthetic oligonucleotide; TTT chr11 5309128 5309149 5309145 5309150 +
cacagtttctattcttccaaaa

SEQ ID NO: 98129 - DNA, 22 bp, Artificial Sequence
  Synthetic oligonucleotide; TTC chr11 5309129 5309150 5309146 5309151 +
acagtttctattcttccaaaat

SEQ ID NO: 98130 - DNA, 22 bp, Artificial Sequence
  Synthetic oligonucleotide; TTT chr11 5309136 5309157 5309153 5309158 +
ctattcttccaaaataacttac

SEQ ID NO: 98131 - DNA, 22 bp, Artificial Sequence
  Synthetic oligonucleotide; TTC chr11 5309137 5309158 5309154 5309159 +
tattcttccaaaataacttaca

SEQ ID NO: 98132 - DNA, 22 bp, Artificial Sequence
  Synthetic oligonucleotide; CTA chr11 5309139 5309160 5309156 5309161 +
ttcttccaaaataacttacaaa

SEQ ID NO: 98133 - DNA, 22 bp, Artificial Sequence
  Synthetic oligonucleotide; TTC chr11 5309142 5309163 5309159 5309164 +
ttccaaaataacttacaaagac

SEQ ID NO: 98134 - DNA, 22 bp, Artificial Sequence
  Synthetic oligonucleotide; CTT chr11 5309144 5309165 5309161 5309166 +
ccaaaataacttacaaagacag

SEQ ID NO: 98135 - DNA, 22 bp, Artificial Sequence
  Synthetic oligonucleotide; TTC chr11 5309145 5309166 5309162 5309167 +
caaaataacttacaaagacagt

SEQ ID NO: 98136 - DNA, 22 bp, Artificial Sequence
  Synthetic oligonucleotide; CTT chr11 5309156 5309177 5309173 5309178 +
acaaagacagtctttcctctgt

SEQ ID NO: 98137 - DNA, 22 bp, Artificial Sequence
  Synthetic oligonucleotide; TTA chr11 5309157 5309178 5309174 5309179 +
caaagacagtctttcctctgtc

SEQ ID NO: 98138 - DNA, 22 bp, Artificial Sequence
  Synthetic oligonucleotide; CTT chr11 5309170 5309191 5309187 5309192 +
tcctctgtcataagaacctgca

SEQ ID NO: 98139 - DNA, 22 bp, Artificial Sequence
  Synthetic oligonucleotide; TTT chr11 5309171 5309192 5309188 5309193 +
cctctgtcataagaacctgcac

SEQ ID NO: 98140 - DNA, 22 bp, Artificial Sequence
  Synthetic oligonucleotide; TTC chr11 5309172 5309193 5309189 5309194 +
ctctgtcataagaacctgcacc

SEQ ID NO: 98141 - DNA, 22 bp, Artificial Sequence
  Synthetic oligonucleotide; CTC chr11 5309175 5309196 5309192 5309197 +
tgtcataagaacctgcacccag

SEQ ID NO: 98142 - DNA, 22 bp, Artificial Sequence
  Synthetic oligonucleotide; CTG chr11 5309177 5309198 5309194 5309199 +
tcataagaacctgcacccaggt

SEQ ID NO: 98143 - DNA, 22 bp, Artificial Sequence
  Synthetic oligonucleotide; CTG chr11 5309190 5309211 5309207 5309212 +
cacccaggtcagcaaatcaaga

SEQ ID NO: 98144 - DNA, 22 bp, Artificial Sequence
  Synthetic oligonucleotide; TTG chr11 5309230 5309251 5309247 5309252 +
aaatttcctaccaacacactaa

SEQ ID NO: 98145 - DNA, 22 bp, Artificial Sequence
  Synthetic oligonucleotide; TTT chr11 5309236 5309257 5309253 5309258 +
cctaccaacacactaataaaca

SEQ ID NO: 98146 - DNA, 22 bp, Artificial Sequence
  Synthetic oligonucleotide; TTC chr11 5309237 5309258 5309254 5309259 +
ctaccaacacactaataaacat

SEQ ID NO: 98147 - DNA, 22 bp, Artificial Sequence
  Synthetic oligonucleotide; CTA chr11 5309240 5309261 5309257 5309262 +
ccaacacactaataaacattag

SEQ ID NO: 98148 - DNA, 22 bp, Artificial Sequence
  Synthetic oligonucleotide; CTA chr11 5309251 5309272 5309268 5309273 +
ataaacattaggaacttactgg

SEQ ID NO: 98149 - DNA, 22 bp, Artificial Sequence
  Synthetic oligonucleotide; TTA chr11 5309261 5309282 5309278 5309283 +
ggaacttactgggcacattatg

SEQ ID NO: 98150 - DNA, 22 bp, Artificial Sequence
  Synthetic oligonucleotide; CTT chr11 5309268 5309289 5309285 5309290 +
actgggcacattatgagaaaca

SEQ ID NO: 98151 - DNA, 22 bp, Artificial Sequence
  Synthetic oligonucleotide; TTA chr11 5309269 5309290 5309286 5309291 +
ctgggcacattatgagaaacag

SEQ ID NO: 98152 - DNA, 22 bp, Artificial Sequence
  Synthetic oligonucleotide; CTG chr11 5309272 5309293 5309289 5309294 +
ggcacattatgagaaacagagg

SEQ ID NO: 98153 - DNA, 22 bp, Artificial Sequence
  Synthetic oligonucleotide; TTA chr11 5309281 5309302 5309298 5309303 +
tgagaaacagaggagtctttgg

SEQ ID NO: 98154 - DNA, 22 bp, Artificial Sequence
  Synthetic oligonucleotide; CTT chr11 5309300 5309321 5309317 5309322 +
tgggggataaccagattttaag

SEQ ID NO: 98155 - DNA, 22 bp, Artificial Sequence
  Synthetic oligonucleotide; TTT chr11 5309301 5309322 5309318 5309323 +
gggggataaccagattttaaga

SEQ ID NO: 98156 - DNA, 22 bp, Artificial Sequence
  Synthetic oligonucleotide; TTG chr11 5309302 5309323 5309319 5309324 +
ggggataaccagattttaagat

SEQ ID NO: 98157 - DNA, 22 bp, Artificial Sequence
  Synthetic oligonucleotide; TTT chr11 5309318 5309339 5309335 5309340 +
taagatttgtgtttatactcag

SEQ ID NO: 98158 - DNA, 22 bp, Artificial Sequence
  Synthetic oligonucleotide; TTT chr11 5309319 5309340 5309336 5309341 +
aagatttgtgtttatactcagt

SEQ ID NO: 98159 - DNA, 22 bp, Artificial Sequence
  Synthetic oligonucleotide; TTA chr11 5309320 5309341 5309337 5309342 +
agatttgtgtttatactcagta

SEQ ID NO: 98160 - DNA, 22 bp, Artificial Sequence
  Synthetic oligonucleotide; TTT chr11 5309326 5309347 5309343 5309348 +
gtgtttatactcagtatcaata

SEQ ID NO: 98161 - DNA, 22 bp, Artificial Sequence
  Synthetic oligonucleotide; TTG chr11 5309327 5309348 5309344 5309349 +
tgtttatactcagtatcaatag

SEQ ID NO: 98162 - DNA, 22 bp, Artificial Sequence
  Synthetic oligonucleotide; TTT chr11 5309332 5309353 5309349 5309354 +
atactcagtatcaatagcttaa

SEQ ID NO: 98163 - DNA, 22 bp, Artificial Sequence
  Synthetic oligonucleotide; TTA chr11 5309333 5309354 5309350 5309355 +
tactcagtatcaatagcttaaa

SEQ ID NO: 98164 - DNA, 22 bp, Artificial Sequence
  Synthetic oligonucleotide; CTC chr11 5309338 5309359 5309355 5309360 +
agtatcaatagcttaaacattg

SEQ ID NO: 98165 - DNA, 22 bp, Artificial Sequence
  Synthetic oligonucleotide; CTT chr11 5309352 5309373 5309369 5309374 +
aaacattgtactcaatagcata

SEQ ID NO: 98166 - DNA, 22 bp, Artificial Sequence
  Synthetic oligonucleotide; TTA chr11 5309353 5309374 5309370 5309375 +
aacattgtactcaatagcatat

SEQ ID NO: 98167 - DNA, 22 bp, Artificial Sequence
  Synthetic oligonucleotide; TTG chr11 5309360 5309381 5309377 5309382 +
tactcaatagcatataattttg

SEQ ID NO: 98168 - DNA, 22 bp, Artificial Sequence
  Synthetic oligonucleotide; CTC chr11 5309365 5309386 5309382 5309387 +
aatagcatataattttgcttac

SEQ ID NO: 98169 - DNA, 22 bp, Artificial Sequence
  Synthetic oligonucleotide; TTT chr11 5309380 5309401 5309397 5309402 +
tgcttacagcatgcattgggta

SEQ ID NO: 98170 - DNA, 22 bp, Artificial Sequence
  Synthetic oligonucleotide; TTT chr11 5309381 5309402 5309398 5309403 +
gcttacagcatgcattgggtaa

SEQ ID NO: 98171 - DNA, 22 bp, Artificial Sequence
  Synthetic oligonucleotide; TTG chr11 5309382 5309403 5309399 5309404 +
cttacagcatgcattgggtaaa

SEQ ID NO: 98172 - DNA, 22 bp, Artificial Sequence
  Synthetic oligonucleotide; CTT chr11 5309385 5309406 5309402 5309407 +
acagcatgcattgggtaaataa

SEQ ID NO: 98173 - DNA, 22 bp, Artificial Sequence
  Synthetic oligonucleotide; TTA chr11 5309386 5309407 5309403 5309408 +
cagcatgcattgggtaaataat

SEQ ID NO: 98174 - DNA, 22 bp, Artificial Sequence
  Synthetic oligonucleotide; TTG chr11 5309398 5309419 5309415 5309420 +
ggtaaataatcggttttacaat

SEQ ID NO: 98175 - DNA, 22 bp, Artificial Sequence
  Synthetic oligonucleotide; TTT chr11 5309414 5309435 5309431 5309436 +
tacaattgattcagtatgaaaa

SEQ ID NO: 98176 - DNA, 22 bp, Artificial Sequence
  Synthetic oligonucleotide; TTT chr11 5309415 5309436 5309432 5309437 +
acaattgattcagtatgaaaaa

SEQ ID NO: 98177 - DNA, 22 bp, Artificial Sequence
  Synthetic oligonucleotide; TTA chr11 5309416 5309437 5309433 5309438 +
caattgattcagtatgaaaaag

SEQ ID NO: 98178 - DNA, 22 bp, Artificial Sequence
  Synthetic oligonucleotide; TTG chr11 5309422 5309443 5309439 5309444 +
attcagtatgaaaaagttttaa

SEQ ID NO: 98179 - DNA, 22 bp, Artificial Sequence
  Synthetic oligonucleotide; TTC chr11 5309426 5309447 5309443 5309448 +
agtatgaaaaagttttaataca

SEQ ID NO: 98180 - DNA, 22 bp, Artificial Sequence
  Synthetic oligonucleotide; TTT chr11 5309441 5309462 5309458 5309463 +
taatacaaggacatacagaaaa

SEQ ID NO: 98181 - DNA, 22 bp, Artificial Sequence
  Synthetic oligonucleotide; TTT chr11 5309442 5309463 5309459 5309464 +
aatacaaggacatacagaaaac

SEQ ID NO: 98182 - DNA, 22 bp, Artificial Sequence
  Synthetic oligonucleotide; TTA chr11 5309443 5309464 5309460 5309465 +
atacaaggacatacagaaaact

SEQ ID NO: 98183 - DNA, 22 bp, Artificial Sequence
  Synthetic oligonucleotide; CTT chr11 5309466 5309487 5309483 5309488 +
gcgcctacacctatttttttaa

SEQ ID NO: 98184 - DNA, 22 bp, Artificial Sequence
  Synthetic oligonucleotide; TTG chr11 5309467 5309488 5309484 5309489 +
cgcctacacctatttttttaag

SEQ ID NO: 98185 - DNA, 22 bp, Artificial Sequence
  Synthetic oligonucleotide; CTA chr11 5309473 5309494 5309490 5309495 +
cacctatttttttaagcattcc

SEQ ID NO: 98186 - DNA, 22 bp, Artificial Sequence
  Synthetic oligonucleotide; CTA chr11 5309479 5309500 5309496 5309501 +
tttttttaagcattccatagat

SEQ ID NO: 98187 - DNA, 22 bp, Artificial Sequence
  Synthetic oligonucleotide; TTT chr11 5309482 5309503 5309499 5309504 +
ttttaagcattccatagattgg

SEQ ID NO: 98188 - DNA, 22 bp, Artificial Sequence
  Synthetic oligonucleotide; TTT chr11 5309483 5309504 5309500 5309505 +
tttaagcattccatagattgga

SEQ ID NO: 98189 - DNA, 22 bp, Artificial Sequence
  Synthetic oligonucleotide; TTT chr11 5309484 5309505 5309501 5309506 +
ttaagcattccatagattggat

SEQ ID NO: 98190 - DNA, 22 bp, Artificial Sequence
  Synthetic oligonucleotide; TTT chr11 5309485 5309506 5309502 5309507 +
taagcattccatagattggatc

SEQ ID NO: 98191 - DNA, 22 bp, Artificial Sequence
  Synthetic oligonucleotide; TTT chr11 5309486 5309507 5309503 5309508 +
aagcattccatagattggatct

SEQ ID NO: 98192 - DNA, 22 bp, Artificial Sequence
  Synthetic oligonucleotide; TTA chr11 5309487 5309508 5309504 5309509 +
agcattccatagattggatctc

SEQ ID NO: 98193 - DNA, 22 bp, Artificial Sequence
  Synthetic oligonucleotide; TTC chr11 5309494 5309515 5309511 5309516 +
catagattggatctcatttctc

SEQ ID NO: 98194 - DNA, 22 bp, Artificial Sequence
  Synthetic oligonucleotide; TTG chr11 5309503 5309524 5309520 5309525 +
gatctcatttctctccacattt

SEQ ID NO: 98195 - DNA, 22 bp, Artificial Sequence
  Synthetic oligonucleotide; CTC chr11 5309509 5309530 5309526 5309531 +
atttctctccacatttttatgt

SEQ ID NO: 98196 - DNA, 22 bp, Artificial Sequence
  Synthetic oligonucleotide; TTT chr11 5309513 5309534 5309530 5309535 +
ctctccacatttttatgtcttc

SEQ ID NO: 98197 - DNA, 22 bp, Artificial Sequence
  Synthetic oligonucleotide; TTC chr11 5309514 5309535 5309531 5309536 +
tctccacatttttatgtcttcc

SEQ ID NO: 98198 - DNA, 22 bp, Artificial Sequence
  Synthetic oligonucleotide; CTC chr11 5309516 5309537 5309533 5309538 +
tccacatttttatgtcttccca

SEQ ID NO: 98199 - DNA, 22 bp, Artificial Sequence
  Synthetic oligonucleotide; CTC chr11 5309518 5309539 5309535 5309540 +
cacatttttatgtcttcccaat

SEQ ID NO: 98200 - DNA, 22 bp, Artificial Sequence
  Synthetic oligonucleotide; TTT chr11 5309525 5309546 5309542 5309547 +
ttatgtcttcccaatataaaac

SEQ ID NO: 98201 - DNA, 22 bp, Artificial Sequence
  Synthetic oligonucleotide; TTT chr11 5309526 5309547 5309543 5309548 +
tatgtcttcccaatataaaact

SEQ ID NO: 98202 - DNA, 22 bp, Artificial Sequence
  Synthetic oligonucleotide; TTT chr11 5309527 5309548 5309544 5309549 +
atgtcttcccaatataaaactt

SEQ ID NO: 98203 - DNA, 22 bp, Artificial Sequence
  Synthetic oligonucleotide; TTA chr11 5309528 5309549 5309545 5309550 +
tgtcttcccaatataaaacttt

SEQ ID NO: 98204 - DNA, 22 bp, Artificial Sequence
  Synthetic oligonucleotide; CTT chr11 5309534 5309555 5309551 5309556 +
cccaatataaaactttactcag

SEQ ID NO: 98205 - DNA, 22 bp, Artificial Sequence
  Synthetic oligonucleotide; TTC chr11 5309535 5309556 5309552 5309557 +
ccaatataaaactttactcagg

SEQ ID NO: 98206 - DNA, 22 bp, Artificial Sequence
  Synthetic oligonucleotide; CTT chr11 5309549 5309570 5309566 5309571 +
tactcaggccgggcgcggtggc

SEQ ID NO: 98207 - DNA, 22 bp, Artificial Sequence
  Synthetic oligonucleotide; TTT chr11 5309550 5309571 5309567 5309572 +
actcaggccgggcgcggtggct

SEQ ID NO: 98208 - DNA, 22 bp, Artificial Sequence
  Synthetic oligonucleotide; TTA chr11 5309551 5309572 5309568 5309573 +
ctcaggccgggcgcggtggctc

SEQ ID NO: 98209 - DNA, 22 bp, Artificial Sequence
  Synthetic oligonucleotide; CTC chr11 5309554 5309575 5309571 5309576 +
aggccgggcgcggtggctcacg

SEQ ID NO: 98210 - DNA, 22 bp, Artificial Sequence
  Synthetic oligonucleotide; CTC chr11 5309573 5309594 5309590 5309595 +
acgcctgtaatcccagcacttt

SEQ ID NO: 98211 - DNA, 22 bp, Artificial Sequence
  Synthetic oligonucleotide; CTG chr11 5309580 5309601 5309597 5309602 +
taatcccagcactttgggaggc

SEQ ID NO: 98212 - DNA, 22 bp, Artificial Sequence
  Synthetic oligonucleotide; CTT chr11 5309594 5309615 5309611 5309616 +
tgggaggccgaggcgggtggat

SEQ ID NO: 98213 - DNA, 22 bp, Artificial Sequence
  Synthetic oligonucleotide; TTT chr11 5309595 5309616 5309612 5309617 +
gggaggccgaggcgggtggatc

SEQ ID NO: 98214 - DNA, 22 bp, Artificial Sequence
  Synthetic oligonucleotide; TTG chr11 5309596 5309617 5309613 5309618 +
ggaggccgaggcgggtggatca

SEQ ID NO: 98215 - DNA, 22 bp, Artificial Sequence
  Synthetic oligonucleotide; CTG chr11 5309645 5309666 5309662 5309667 +
gctaacacagtgaaaccccgtc

SEQ ID NO: 98216 - DNA, 22 bp, Artificial Sequence
  Synthetic oligonucleotide; CTA chr11 5309649 5309670 5309666 5309671 +
acacagtgaaaccccgtctcta

SEQ ID NO: 98217 - DNA, 22 bp, Artificial Sequence
  Synthetic oligonucleotide; CTC chr11 5309669 5309690 5309686 5309691 +
tactaaaaagacaaaaaaattt

SEQ ID NO: 98218 - DNA, 22 bp, Artificial Sequence
  Synthetic oligonucleotide; CTA chr11 5309671 5309692 5309688 5309693 +
ctaaaaagacaaaaaaatttgc

SEQ ID NO: 98219 - DNA, 22 bp, Artificial Sequence
  Synthetic oligonucleotide; CTA chr11 5309674 5309695 5309691 5309696 +
aaaagacaaaaaaatttgcctg

SEQ ID NO: 98220 - DNA, 22 bp, Artificial Sequence
  Synthetic oligonucleotide; TTT chr11 5309691 5309712 5309708 5309713 +
gcctggcgtggtggcgggcgcc

SEQ ID NO: 98221 - DNA, 22 bp, Artificial Sequence
  Synthetic oligonucleotide; TTG chr11 5309692 5309713 5309709 5309714 +
cctggcgtggtggcgggcgcct

SEQ ID NO: 98222 - DNA, 22 bp, Artificial Sequence
  Synthetic oligonucleotide; CTG chr11 5309696 5309717 5309713 5309718 +
gcgtggtggcgggcgcctgtag

SEQ ID NO: 98223 - DNA, 22 bp, Artificial Sequence
  Synthetic oligonucleotide; CTG chr11 5309715 5309736 5309732 5309737 +
tagtcccagctactcgggaggc

SEQ ID NO: 98224 - DNA, 22 bp, Artificial Sequence
  Synthetic oligonucleotide; CTA chr11 5309727 5309748 5309744 5309749 +
ctcgggaggctgaggcaggaga

SEQ ID NO: 98225 - DNA, 22 bp, Artificial Sequence
  Synthetic oligonucleotide; CTC chr11 5309730 5309751 5309747 5309752 +
gggaggctgaggcaggagaatg

SEQ ID NO: 98226 - DNA, 22 bp, Artificial Sequence
  Synthetic oligonucleotide; CTG chr11 5309739 5309760 5309756 5309761 +
aggcaggagaatggcgtgaacc

SEQ ID NO: 98227 - DNA, 22 bp, Artificial Sequence
  Synthetic oligonucleotide; CTT chr11 5309776 5309797 5309793 5309798 +
gcagtgagctgagatcacgcca

SEQ ID NO: 98228 - DNA, 22 bp, Artificial Sequence
  Synthetic oligonucleotide; TTG chr11 5309777 5309798 5309794 5309799 +
cagtgagctgagatcacgccac

SEQ ID NO: 98229 - DNA, 22 bp, Artificial Sequence
  Synthetic oligonucleotide; CTG chr11 5309787 5309808 5309804 5309809 +
agatcacgccactgcactccag

SEQ ID NO: 98230 - DNA, 22 bp, Artificial Sequence
  Synthetic oligonucleotide; CTG chr11 5309801 5309822 5309818 5309823 +
cactccagcctgggcgacagag

SEQ ID NO: 98231 - DNA, 22 bp, Artificial Sequence
  Synthetic oligonucleotide; CTC chr11 5309806 5309827 5309823 5309828 +
cagcctgggcgacagagcgaga

SEQ ID NO: 98232 - DNA, 22 bp, Artificial Sequence
  Synthetic oligonucleotide; CTG chr11 5309813 5309834 5309830 5309835 +
ggcgacagagcgagactccatc

SEQ ID NO: 98233 - DNA, 22 bp, Artificial Sequence
  Synthetic oligonucleotide; CTC chr11 5309831 5309852 5309848 5309853 +
catctcaaaaacaaaacaaaac

SEQ ID NO: 98234 - DNA, 22 bp, Artificial Sequence
  Synthetic oligonucleotide; CTC chr11 5309837 5309858 5309854 5309859 +
aaaaacaaaacaaaacaaagca

SEQ ID NO: 98235 - DNA, 22 bp, Artificial Sequence
  Synthetic oligonucleotide; CTT chr11 5309869 5309890 5309886 5309891 +
tactcagtgaagtccagagcaa

SEQ ID NO: 98236 - DNA, 22 bp, Artificial Sequence
  Synthetic oligonucleotide; TTT chr11 5309870 5309891 5309887 5309892 +
actcagtgaagtccagagcaaa

SEQ ID NO: 98237 - DNA, 22 bp, Artificial Sequence
  Synthetic oligonucleotide; TTA chr11 5309871 5309892 5309888 5309893 +
ctcagtgaagtccagagcaaag

SEQ ID NO: 98238 - DNA, 22 bp, Artificial Sequence
  Synthetic oligonucleotide; CTC chr11 5309874 5309895 5309891 5309896 +
agtgaagtccagagcaaagatt

SEQ ID NO: 98239 - DNA, 22 bp, Artificial Sequence
  Synthetic oligonucleotide; TTT chr11 5309897 5309918 5309914 5309919 +
gttgcaaacaaatcaccagttc

SEQ ID NO: 98240 - DNA, 22 bp, Artificial Sequence
  Synthetic oligonucleotide; TTG chr11 5309898 5309919 5309915 5309920 +
ttgcaaacaaatcaccagttct

SEQ ID NO: 98241 - DNA, 22 bp, Artificial Sequence
  Synthetic oligonucleotide; TTG chr11 5309901 5309922 5309918 5309923 +
caaacaaatcaccagttcttat

SEQ ID NO: 98242 - DNA, 22 bp, Artificial Sequence
  Synthetic oligonucleotide; TTC chr11 5309919 5309940 5309936 5309941 +
ttatctttctccgtgaaaatgt

SEQ ID NO: 98243 - DNA, 22 bp, Artificial Sequence
  Synthetic oligonucleotide; CTT chr11 5309921 5309942 5309938 5309943 +
atctttctccgtgaaaatgtac

SEQ ID NO: 98244 - DNA, 22 bp, Artificial Sequence
  Synthetic oligonucleotide; TTA chr11 5309922 5309943 5309939 5309944 +
tctttctccgtgaaaatgtacc

SEQ ID NO: 98245 - DNA, 22 bp, Artificial Sequence
  Synthetic oligonucleotide; CTT chr11 5309926 5309947 5309943 5309948 +
tctccgtgaaaatgtacctgta

SEQ ID NO: 98246 - DNA, 22 bp, Artificial Sequence
  Synthetic oligonucleotide; TTT chr11 5309927 5309948 5309944 5309949 +
ctccgtgaaaatgtacctgtaa

SEQ ID NO: 98247 - DNA, 22 bp, Artificial Sequence
  Synthetic oligonucleotide; TTC chr11 5309928 5309949 5309945 5309950 +
tccgtgaaaatgtacctgtaaa

SEQ ID NO: 98248 - DNA, 22 bp, Artificial Sequence
  Synthetic oligonucleotide; CTC chr11 5309930 5309951 5309947 5309952 +
cgtgaaaatgtacctgtaaaat

SEQ ID NO: 98249 - DNA, 22 bp, Artificial Sequence
  Synthetic oligonucleotide; CTG chr11 5309946 5309967 5309963 5309968 +
taaaatgtggatgccacatatt

SEQ ID NO: 98250 - DNA, 22 bp, Artificial Sequence
  Synthetic oligonucleotide; TTT chr11 5309969 5309990 5309986 5309991 +
ttaggtctggaaggattgcatt

SEQ ID NO: 98251 - DNA, 22 bp, Artificial Sequence
  Synthetic oligonucleotide; TTT chr11 5309970 5309991 5309987 5309992 +
taggtctggaaggattgcatta

SEQ ID NO: 98252 - DNA, 22 bp, Artificial Sequence
  Synthetic oligonucleotide; TTT chr11 5309971 5309992 5309988 5309993 +
aggtctggaaggattgcattat

SEQ ID NO: 98253 - DNA, 22 bp, Artificial Sequence
  Synthetic oligonucleotide; TTA chr11 5309972 5309993 5309989 5309994 +
ggtctggaaggattgcattatc

SEQ ID NO: 98254 - DNA, 22 bp, Artificial Sequence
  Synthetic oligonucleotide; CTG chr11 5309978 5309999 5309995 5310000 +
gaaggattgcattatcttttat

SEQ ID NO: 98255 - DNA, 22 bp, Artificial Sequence
  Synthetic oligonucleotide; TTG chr11 5309987 5310008 5310004 5310009 +
cattatcttttatctgtattgc

SEQ ID NO: 98256 - DNA, 22 bp, Artificial Sequence
  Synthetic oligonucleotide; TTA chr11 5309992 5310013 5310009 5310014 +
tcttttatctgtattgcattat

SEQ ID NO: 98257 - DNA, 22 bp, Artificial Sequence
  Synthetic oligonucleotide; CTT chr11 5309996 5310017 5310013 5310018 +
ttatctgtattgcattatcata

SEQ ID NO: 98258 - DNA, 22 bp, Artificial Sequence
  Synthetic oligonucleotide; TTT chr11 5309997 5310018 5310014 5310019 +
tatctgtattgcattatcataa

SEQ ID NO: 98259 - DNA, 22 bp, Artificial Sequence
  Synthetic oligonucleotide; TTT chr11 5309998 5310019 5310015 5310020 +
atctgtattgcattatcataaa

SEQ ID NO: 98260 - DNA, 22 bp, Artificial Sequence
  Synthetic oligonucleotide; TTA chr11 5309999 5310020 5310016 5310021 +
tctgtattgcattatcataaaa

SEQ ID NO: 98261 - DNA, 22 bp, Artificial Sequence
  Synthetic oligonucleotide; CTG chr11 5310003 5310024 5310020 5310025 +
tattgcattatcataaaatctc

SEQ ID NO: 98262 - DNA, 22 bp, Artificial Sequence
  Synthetic oligonucleotide; TTG chr11 5310008 5310029 5310025 5310030 +
cattatcataaaatctctagtt

SEQ ID NO: 98263 - DNA, 22 bp, Artificial Sequence
  Synthetic oligonucleotide; TTA chr11 5310013 5310034 5310030 5310035 +
tcataaaatctctagttgagtg

SEQ ID NO: 98264 - DNA, 22 bp, Artificial Sequence
  Synthetic oligonucleotide; CTC chr11 5310025 5310046 5310042 5310047 +
tagttgagtgaaaaaatttgtt

SEQ ID NO: 98265 - DNA, 22 bp, Artificial Sequence
  Synthetic oligonucleotide; CTA chr11 5310027 5310048 5310044 5310049 +
gttgagtgaaaaaatttgttaa

SEQ ID NO: 98266 - DNA, 22 bp, Artificial Sequence
  Synthetic oligonucleotide; TTG chr11 5310031 5310052 5310048 5310053 +
agtgaaaaaatttgttaaatca

SEQ ID NO: 98267 - DNA, 22 bp, Artificial Sequence
  Synthetic oligonucleotide; TTT chr11 5310044 5310065 5310061 5310066 +
gttaaatcatttctttaactga

SEQ ID NO: 98268 - DNA, 22 bp, Artificial Sequence
  Synthetic oligonucleotide; TTG chr11 5310045 5310066 5310062 5310067 +
ttaaatcatttctttaactgaa

SEQ ID NO: 98269 - DNA, 22 bp, Artificial Sequence
  Synthetic oligonucleotide; TTA chr11 5310048 5310069 5310065 5310070 +
aatcatttctttaactgaaaac

SEQ ID NO: 98270 - DNA, 22 bp, Artificial Sequence
  Synthetic oligonucleotide; TTT chr11 5310056 5310077 5310073 5310078 +
ctttaactgaaaactgaaccca

SEQ ID NO: 98271 - DNA, 22 bp, Artificial Sequence
  Synthetic oligonucleotide; TTC chr11 5310057 5310078 5310074 5310079 +
tttaactgaaaactgaacccag

SEQ ID NO: 98272 - DNA, 22 bp, Artificial Sequence
  Synthetic oligonucleotide; CTT chr11 5310059 5310080 5310076 5310081 +
taactgaaaactgaacccagga

SEQ ID NO: 98273 - DNA, 22 bp, Artificial Sequence
  Synthetic oligonucleotide; TTT chr11 5310060 5310081 5310077 5310082 +
aactgaaaactgaacccaggag

SEQ ID NO: 98274 - DNA, 22 bp, Artificial Sequence
  Synthetic oligonucleotide; TTA chr11 5310061 5310082 5310078 5310083 +
actgaaaactgaacccaggagg

SEQ ID NO: 98275 - DNA, 22 bp, Artificial Sequence
  Synthetic oligonucleotide; CTG chr11 5310065 5310086 5310082 5310087 +
aaaactgaacccaggaggcaga

SEQ ID NO: 98276 - DNA, 22 bp, Artificial Sequence
  Synthetic oligonucleotide; CTG chr11 5310072 5310093 5310089 5310094 +
aacccaggaggcagaggttgca

SEQ ID NO: 98277 - DNA, 22 bp, Artificial Sequence
  Synthetic oligonucleotide; TTG chr11 5310092 5310113 5310109 5310114 +
cagtcagccgagatcaaggcac

SEQ ID NO: 98278 - DNA, 22 bp, Artificial Sequence
  Synthetic oligonucleotide; CTG chr11 5310116 5310137 5310133 5310138 +
aaaacttcctttctccagaaag

SEQ ID NO: 98279 - DNA, 22 bp, Artificial Sequence
  Synthetic oligonucleotide; CTT chr11 5310123 5310144 5310140 5310145 +
cctttctccagaaagcttgtct

SEQ ID NO: 98280 - DNA, 22 bp, Artificial Sequence
  Synthetic oligonucleotide; TTC chr11 5310124 5310145 5310141 5310146 +
ctttctccagaaagcttgtctc

SEQ ID NO: 98281 - DNA, 22 bp, Artificial Sequence
  Synthetic oligonucleotide; CTT chr11 5310127 5310148 5310144 5310149 +
tctccagaaagcttgtctcatt

SEQ ID NO: 98282 - DNA, 22 bp, Artificial Sequence
  Synthetic oligonucleotide; TTT chr11 5310128 5310149 5310145 5310150 +
ctccagaaagcttgtctcattt

SEQ ID NO: 98283 - DNA, 22 bp, Artificial Sequence
  Synthetic oligonucleotide; TTC chr11 5310129 5310150 5310146 5310151 +
tccagaaagcttgtctcatttt

SEQ ID NO: 98284 - DNA, 22 bp, Artificial Sequence
  Synthetic oligonucleotide; CTC chr11 5310131 5310152 5310148 5310153 +
cagaaagcttgtctcattttct

SEQ ID NO: 98285 - DNA, 22 bp, Artificial Sequence
  Synthetic oligonucleotide; CTT chr11 5310141 5310162 5310158 5310163 +
gtctcattttcttcttccatgg

SEQ ID NO: 98286 - DNA, 22 bp, Artificial Sequence
  Synthetic oligonucleotide; TTG chr11 5310142 5310163 5310159 5310164 +
tctcattttcttcttccatgga

SEQ ID NO: 98287 - DNA, 22 bp, Artificial Sequence
  Synthetic oligonucleotide; CTC chr11 5310146 5310167 5310163 5310168 +
attttcttcttccatggaatat

SEQ ID NO: 98288 - DNA, 22 bp, Artificial Sequence
  Synthetic oligonucleotide; TTT chr11 5310150 5310171 5310167 5310172 +
tcttcttccatggaatattcca

SEQ ID NO: 98289 - DNA, 22 bp, Artificial Sequence
  Synthetic oligonucleotide; TTT chr11 5310151 5310172 5310168 5310173 +
cttcttccatggaatattccaa

SEQ ID NO: 98290 - DNA, 22 bp, Artificial Sequence
  Synthetic oligonucleotide; TTC chr11 5310152 5310173 5310169 5310174 +
ttcttccatggaatattccaag

SEQ ID NO: 98291 - DNA, 22 bp, Artificial Sequence
  Synthetic oligonucleotide; CTT chr11 5310154 5310175 5310171 5310176 +
cttccatggaatattccaagga

SEQ ID NO: 98292 - DNA, 22 bp, Artificial Sequence
  Synthetic oligonucleotide; TTC chr11 5310155 5310176 5310172 5310177 +
ttccatggaatattccaaggaa

SEQ ID NO: 98293 - DNA, 22 bp, Artificial Sequence
  Synthetic oligonucleotide; CTT chr11 5310157 5310178 5310174 5310179 +
ccatggaatattccaaggaata

SEQ ID NO: 98294 - DNA, 22 bp, Artificial Sequence
  Synthetic oligonucleotide; TTC chr11 5310158 5310179 5310175 5310180 +
catggaatattccaaggaatat

SEQ ID NO: 98295 - DNA, 22 bp, Artificial Sequence
  Synthetic oligonucleotide; TTC chr11 5310170 5310191 5310187 5310192 +
caaggaatattctttgaaaagc

SEQ ID NO: 98296 - DNA, 22 bp, Artificial Sequence
  Synthetic oligonucleotide; TTC chr11 5310182 5310203 5310199 5310204 +
tttgaaaagcagaatattcaga

SEQ ID NO: 98297 - DNA, 22 bp, Artificial Sequence
  Synthetic oligonucleotide; CTT chr11 5310184 5310205 5310201 5310206 +
tgaaaagcagaatattcagagt

SEQ ID NO: 98298 - DNA, 22 bp, Artificial Sequence
  Synthetic oligonucleotide; TTT chr11 5310185 5310206 5310202 5310207 +
gaaaagcagaatattcagagtg

SEQ ID NO: 98299 - DNA, 22 bp, Artificial Sequence
  Synthetic oligonucleotide; TTG chr11 5310186 5310207 5310203 5310208 +
aaaagcagaatattcagagtga

SEQ ID NO: 98300 - DNA, 22 bp, Artificial Sequence
  Synthetic oligonucleotide; TTC chr11 5310201 5310222 5310218 5310223 +
agagtgagaggaagtagagaga

SEQ ID NO: 98301 - DNA, 22 bp, Artificial Sequence
  Synthetic oligonucleotide; TTT chr11 5310230 5310251 5310247 5310252 +
aggtagaatctgggcatattga

SEQ ID NO: 98302 - DNA, 22 bp, Artificial Sequence
  Synthetic oligonucleotide; TTA chr11 5310231 5310252 5310248 5310253 +
ggtagaatctgggcatattgaa

SEQ ID NO: 98303 - DNA, 22 bp, Artificial Sequence
  Synthetic oligonucleotide; CTG chr11 5310242 5310263 5310259 5310264 +
ggcatattgaagggaagacatc

SEQ ID NO: 98304 - DNA, 22 bp, Artificial Sequence
  Synthetic oligonucleotide; TTG chr11 5310251 5310272 5310268 5310273 +
aagggaagacatcaataattca

SEQ ID NO: 98305 - DNA, 22 bp, Artificial Sequence
  Synthetic oligonucleotide; TTC chr11 5310272 5310293 5310289 5310294 +
acagtagccaaggaatagaaac

SEQ ID NO: 98306 - DNA, 22 bp, Artificial Sequence
  Synthetic oligonucleotide; CTA chr11 5310308 5310329 5310325 5310330 +
tcaacagatgcgtatatcaaca

SEQ ID NO: 98307 - DNA, 22 bp, Artificial Sequence
  Synthetic oligonucleotide; CTT chr11 5310339 5310360 5310356 5310361 +
atatatgtgatagaatattatt

SEQ ID NO: 98308 - DNA, 22 bp, Artificial Sequence
  Synthetic oligonucleotide; TTA chr11 5310340 5310361 5310357 5310362 +
tatatgtgatagaatattattt

SEQ ID NO: 98309 - DNA, 22 bp, Artificial Sequence
  Synthetic oligonucleotide; TTA chr11 5310359 5310380 5310376 5310381 +
tttatctataaaaagtaggtct

SEQ ID NO: 98310 - DNA, 22 bp, Artificial Sequence
  Synthetic oligonucleotide; TTT chr11 5310362 5310383 5310379 5310384 +
atctataaaaagtaggtctgac

SEQ ID NO: 98311 - DNA, 22 bp, Artificial Sequence
  Synthetic oligonucleotide; TTA chr11 5310363 5310384 5310380 5310385 +
tctataaaaagtaggtctgaca

SEQ ID NO: 98312 - DNA, 22 bp, Artificial Sequence
  Synthetic oligonucleotide; CTA chr11 5310367 5310388 5310384 5310389 +
taaaaagtaggtctgacacatg

SEQ ID NO: 98313 - DNA, 22 bp, Artificial Sequence
  Synthetic oligonucleotide; CTG chr11 5310382 5310403 5310399 5310404 +
acacatgctacaacatgaataa

SEQ ID NO: 98314 - DNA, 22 bp, Artificial Sequence
  Synthetic oligonucleotide; CTA chr11 5310392 5310413 5310409 5310414 +
caacatgaataaaccttaaaaa

SEQ ID NO: 98315 - DNA, 22 bp, Artificial Sequence
  Synthetic oligonucleotide; CTT chr11 5310409 5310430 5310426 5310431 +
aaaaaactatcctaagtgcaat

SEQ ID NO: 98316 - DNA, 22 bp, Artificial Sequence
  Synthetic oligonucleotide; TTA chr11 5310410 5310431 5310427 5310432 +
aaaaactatcctaagtgcaata

SEQ ID NO: 98317 - DNA, 22 bp, Artificial Sequence
  Synthetic oligonucleotide; CTA chr11 5310418 5310439 5310435 5310440 +
tcctaagtgcaataagtcatac

SEQ ID NO: 98318 - DNA, 22 bp, Artificial Sequence
  Synthetic oligonucleotide; CTA chr11 5310423 5310444 5310440 5310445 +
agtgcaataagtcatacgcaaa

SEQ ID NO: 98319 - DNA, 22 bp, Artificial Sequence
  Synthetic oligonucleotide; TTG chr11 5310454 5310475 5310471 5310476 +
tctgatttcacttacatgagct

SEQ ID NO: 98320 - DNA, 22 bp, Artificial Sequence
  Synthetic oligonucleotide; CTG chr11 5310458 5310479 5310475 5310480 +
atttcacttacatgagctatct

SEQ ID NO: 98321 - DNA, 22 bp, Artificial Sequence
  Synthetic oligonucleotide; TTT chr11 5310462 5310483 5310479 5310484 +
cacttacatgagctatctagaa

SEQ ID NO: 98322 - DNA, 22 bp, Artificial Sequence
  Synthetic oligonucleotide; TTC chr11 5310463 5310484 5310480 5310485 +
acttacatgagctatctagaat

SEQ ID NO: 98323 - DNA, 22 bp, Artificial Sequence
  Synthetic oligonucleotide; CTT chr11 5310467 5310488 5310484 5310489 +
acatgagctatctagaataggc

SEQ ID NO: 98324 - DNA, 22 bp, Artificial Sequence
  Synthetic oligonucleotide; TTA chr11 5310468 5310489 5310485 5310490 +
catgagctatctagaataggca

SEQ ID NO: 98325 - DNA, 22 bp, Artificial Sequence
  Synthetic oligonucleotide; CTA chr11 5310477 5310498 5310494 5310499 +
tctagaataggcaaattcatag

SEQ ID NO: 98326 - DNA, 22 bp, Artificial Sequence
  Synthetic oligonucleotide; CTA chr11 5310481 5310502 5310498 5310503 +
gaataggcaaattcatagagac

SEQ ID NO: 98327 - DNA, 22 bp, Artificial Sequence
  Synthetic oligonucleotide; TTC chr11 5310495 5310516 5310512 5310517 +
atagagacaaaaagtagattag

SEQ ID NO: 98328 - DNA, 22 bp, Artificial Sequence
  Synthetic oligonucleotide; TTA chr11 5310516 5310537 5310533 5310538 +
gaagttaccagagtgtaggaag

SEQ ID NO: 98329 - DNA, 22 bp, Artificial Sequence
  Synthetic oligonucleotide; TTA chr11 5310523 5310544 5310540 5310545 +
ccagagtgtaggaagaacatgg

SEQ ID NO: 98330 - DNA, 22 bp, Artificial Sequence
  Synthetic oligonucleotide; TTG chr11 5310549 5310570 5310566 5310571 +
gggagtaactgattaatcaata

SEQ ID NO: 98331 - DNA, 22 bp, Artificial Sequence
  Synthetic oligonucleotide; CTG chr11 5310560 5310581 5310577 5310582 +
attaatcaatatagagttttta

SEQ ID NO: 98332 - DNA, 22 bp, Artificial Sequence
  Synthetic oligonucleotide; TTA chr11 5310564 5310585 5310581 5310586 +
atcaatatagagtttttatttg

SEQ ID NO: 98333 - DNA, 22 bp, Artificial Sequence
  Synthetic oligonucleotide; TTT chr11 5310579 5310600 5310596 5310601 +
ttatttggtgtaatacaaaatt

SEQ ID NO: 98334 - DNA, 22 bp, Artificial Sequence
  Synthetic oligonucleotide; TTT chr11 5310580 5310601 5310597 5310602 +
tatttggtgtaatacaaaattt

SEQ ID NO: 98335 - DNA, 22 bp, Artificial Sequence
  Synthetic oligonucleotide; TTT chr11 5310581 5310602 5310598 5310603 +
atttggtgtaatacaaaatttt

SEQ ID NO: 98336 - DNA, 22 bp, Artificial Sequence
  Synthetic oligonucleotide; TTA chr11 5310582 5310603 5310599 5310604 +
tttggtgtaatacaaaatttta

SEQ ID NO: 98337 - DNA, 22 bp, Artificial Sequence
  Synthetic oligonucleotide; TTT chr11 5310585 5310606 5310602 5310607 +
ggtgtaatacaaaattttagaa

SEQ ID NO: 98338 - DNA, 22 bp, Artificial Sequence
  Synthetic oligonucleotide; TTG chr11 5310586 5310607 5310603 5310608 +
gtgtaatacaaaattttagaaa

SEQ ID NO: 98339 - DNA, 22 bp, Artificial Sequence
  Synthetic oligonucleotide; TTT chr11 5310602 5310623 5310619 5310624 +
tagaaatagtggtggtgattgc

SEQ ID NO: 98340 - DNA, 22 bp, Artificial Sequence
  Synthetic oligonucleotide; TTT chr11 5310603 5310624 5310620 5310625 +
agaaatagtggtggtgattgca

SEQ ID NO: 98341 - DNA, 22 bp, Artificial Sequence
  Synthetic oligonucleotide; TTA chr11 5310604 5310625 5310621 5310626 +
gaaatagtggtggtgattgcac

SEQ ID NO: 98342 - DNA, 22 bp, Artificial Sequence
  Synthetic oligonucleotide; TTG chr11 5310623 5310644 5310640 5310645 +
cacaacatggcaaatgtaataa

SEQ ID NO: 98343 - DNA, 22 bp, Artificial Sequence
  Synthetic oligonucleotide; CTG chr11 5310654 5310675 5310671 5310676 +
cattatacattataaaaaggct

SEQ ID NO: 98344 - DNA, 22 bp, Artificial Sequence
  Synthetic oligonucleotide; TTA chr11 5310659 5310680 5310676 5310681 +
tacattataaaaaggctaaagt

SEQ ID NO: 98345 - DNA, 22 bp, Artificial Sequence
  Synthetic oligonucleotide; TTA chr11 5310666 5310687 5310683 5310688 +
taaaaaggctaaagtggcaaat

SEQ ID NO: 98346 - DNA, 22 bp, Artificial Sequence
  Synthetic oligonucleotide; CTA chr11 5310677 5310698 5310694 5310699 +
aagtggcaaattgtatatatta

SEQ ID NO: 98347 - DNA, 22 bp, Artificial Sequence
  Synthetic oligonucleotide; TTG chr11 5310690 5310711 5310707 5310712 +
tatatattaccactataaaaat

SEQ ID NO: 98348 - DNA, 22 bp, Artificial Sequence
  Synthetic oligonucleotide; TTA chr11 5310699 5310720 5310716 5310721 +
ccactataaaaataaaacaata

SEQ ID NO: 98349 - DNA, 22 bp, Artificial Sequence
  Synthetic oligonucleotide; CTA chr11 5310705 5310726 5310722 5310727 +
taaaaataaaacaataaatgta

SEQ ID NO: 98350 - DNA, 22 bp, Artificial Sequence
  Synthetic oligonucleotide; TTT chr11 5310730 5310751 5310747 5310752 +
caattcattaaatttattgtga

SEQ ID NO: 98351 - DNA, 22 bp, Artificial Sequence
  Synthetic oligonucleotide; TTC chr11 5310731 5310752 5310748 5310753 +
aattcattaaatttattgtgaa

SEQ ID NO: 98352 - DNA, 22 bp, Artificial Sequence
  Synthetic oligonucleotide; TTC chr11 5310736 5310757 5310753 5310758 +
attaaatttattgtgaaaggtt

SEQ ID NO: 98353 - DNA, 22 bp, Artificial Sequence
  Synthetic oligonucleotide; TTA chr11 5310740 5310761 5310757 5310762 +
aatttattgtgaaaggtttaaa

SEQ ID NO: 98354 - DNA, 22 bp, Artificial Sequence
  Synthetic oligonucleotide; TTT chr11 5310745 5310766 5310762 5310767 +
attgtgaaaggtttaaaaacaa

SEQ ID NO: 98355 - DNA, 22 bp, Artificial Sequence
  Synthetic oligonucleotide; TTA chr11 5310746 5310767 5310763 5310768 +
ttgtgaaaggtttaaaaacaag

SEQ ID NO: 98356 - DNA, 22 bp, Artificial Sequence
  Synthetic oligonucleotide; TTG chr11 5310749 5310770 5310766 5310771 +
tgaaaggtttaaaaacaagagt

SEQ ID NO: 98357 - DNA, 22 bp, Artificial Sequence
  Synthetic oligonucleotide; TTT chr11 5310759 5310780 5310776 5310781 +
aaaaacaagagtttgaggttaa

SEQ ID NO: 98358 - DNA, 22 bp, Artificial Sequence
  Synthetic oligonucleotide; TTA chr11 5310760 5310781 5310777 5310782 +
aaaacaagagtttgaggttaaa

SEQ ID NO: 98359 - DNA, 22 bp, Artificial Sequence
  Synthetic oligonucleotide; TTT chr11 5310773 5310794 5310790 5310795 +
gaggttaaaaattatgtctaag

SEQ ID NO: 98360 - DNA, 22 bp, Artificial Sequence
  Synthetic oligonucleotide; TTG chr11 5310774 5310795 5310791 5310796 +
aggttaaaaattatgtctaaga

SEQ ID NO: 98361 - DNA, 22 bp, Artificial Sequence
  Synthetic oligonucleotide; TTA chr11 5310780 5310801 5310797 5310802 +
aaaattatgtctaagataaaat

SEQ ID NO: 98362 - DNA, 22 bp, Artificial Sequence
  Synthetic oligonucleotide; TTA chr11 5310787 5310808 5310804 5310809 +
tgtctaagataaaatattaaaa

SEQ ID NO: 98363 - DNA, 22 bp, Artificial Sequence
  Synthetic oligonucleotide; CTA chr11 5310793 5310814 5310810 5310815 +
agataaaatattaaaagattta

SEQ ID NO: 98364 - DNA, 22 bp, Artificial Sequence
  Synthetic oligonucleotide; TTA chr11 5310806 5310827 5310823 5310828 +
aaagatttattccacatgtgca

SEQ ID NO: 98365 - DNA, 22 bp, Artificial Sequence
  Synthetic oligonucleotide; TTT chr11 5310814 5310835 5310831 5310836 +
attccacatgtgcaggtgtcca

SEQ ID NO: 98366 - DNA, 22 bp, Artificial Sequence
  Synthetic oligonucleotide; TTA chr11 5310815 5310836 5310832 5310837 +
ttccacatgtgcaggtgtccac

SEQ ID NO: 98367 - DNA, 22 bp, Artificial Sequence
  Synthetic oligonucleotide; TTC chr11 5310818 5310839 5310835 5310840 +
cacatgtgcaggtgtccacaca

SEQ ID NO: 98368 - DNA, 22 bp, Artificial Sequence
  Synthetic oligonucleotide; CTA chr11 5310858 5310879 5310875 5310880 +
tatatatacatactaggataaa

SEQ ID NO: 98369 - DNA, 22 bp, Artificial Sequence
  Synthetic oligonucleotide; CTA chr11 5310873 5310894 5310890 5310895 +
ggataaagtctcttatatctta

SEQ ID NO: 98370 - DNA, 22 bp, Artificial Sequence
  Synthetic oligonucleotide; CTC chr11 5310885 5310906 5310902 5310907 +
ttatatcttaaagaccatttat

SEQ ID NO: 98371 - DNA, 22 bp, Artificial Sequence
  Synthetic oligonucleotide; CTT chr11 5310887 5310908 5310904 5310909 +
atatcttaaagaccatttattt

SEQ ID NO: 98372 - DNA, 22 bp, Artificial Sequence
  Synthetic oligonucleotide; TTA chr11 5310888 5310909 5310905 5310910 +
tatcttaaagaccatttatttg

SEQ ID NO: 98373 - DNA, 22 bp, Artificial Sequence
  Synthetic oligonucleotide; CTT chr11 5310894 5310915 5310911 5310916 +
aaagaccatttatttgatttta

SEQ ID NO: 98374 - DNA, 22 bp, Artificial Sequence
  Synthetic oligonucleotide; TTA chr11 5310895 5310916 5310912 5310917 +
aagaccatttatttgattttaa

SEQ ID NO: 98375 - DNA, 22 bp, Artificial Sequence
  Synthetic oligonucleotide; TTT chr11 5310905 5310926 5310922 5310927 +
atttgattttaataaatagaat

SEQ ID NO: 98376 - DNA, 22 bp, Artificial Sequence
  Synthetic oligonucleotide; TTA chr11 5310906 5310927 5310923 5310928 +
tttgattttaataaatagaata

SEQ ID NO: 98377 - DNA, 22 bp, Artificial Sequence
  Synthetic oligonucleotide; TTT chr11 5310909 5310930 5310926 5310931 +
gattttaataaatagaatagga

SEQ ID NO: 98378 - DNA, 22 bp, Artificial Sequence
  Synthetic oligonucleotide; TTG chr11 5310910 5310931 5310927 5310932 +
attttaataaatagaataggat

SEQ ID NO: 98379 - DNA, 22 bp, Artificial Sequence
  Synthetic oligonucleotide; TTT chr11 5310914 5310935 5310931 5310936 +
taataaatagaataggatggtt

SEQ ID NO: 98380 - DNA, 22 bp, Artificial Sequence
  Synthetic oligonucleotide; TTT chr11 5310915 5310936 5310932 5310937 +
aataaatagaataggatggttg

SEQ ID NO: 98381 - DNA, 22 bp, Artificial Sequence
  Synthetic oligonucleotide; TTA chr11 5310916 5310937 5310933 5310938 +
ataaatagaataggatggttga

SEQ ID NO: 98382 - DNA, 22 bp, Artificial Sequence
  Synthetic oligonucleotide; TTG chr11 5310937 5310958 5310954 5310959 +
actcaacaatttcacttgagag

SEQ ID NO: 98383 - DNA, 22 bp, Artificial Sequence
  Synthetic oligonucleotide; CTC chr11 5310941 5310962 5310958 5310963 +
aacaatttcacttgagagaaag

SEQ ID NO: 98384 - DNA, 22 bp, Artificial Sequence
  Synthetic oligonucleotide; TTT chr11 5310949 5310970 5310966 5310971 +
cacttgagagaaagaatcaagc

SEQ ID NO: 98385 - DNA, 22 bp, Artificial Sequence
  Synthetic oligonucleotide; TTC chr11 5310950 5310971 5310967 5310972 +
acttgagagaaagaatcaagca

SEQ ID NO: 98386 - DNA, 22 bp, Artificial Sequence
  Synthetic oligonucleotide; CTT chr11 5310954 5310975 5310971 5310976 +
gagagaaagaatcaagcataga

SEQ ID NO: 98387 - DNA, 22 bp, Artificial Sequence
  Synthetic oligonucleotide; TTG chr11 5310955 5310976 5310972 5310977 +
agagaaagaatcaagcatagat

SEQ ID NO: 98388 - DNA, 22 bp, Artificial Sequence
  Synthetic oligonucleotide; TTA chr11 5310979 5311000 5310996 5311001 +
ttttcagttccatatggtcctc

SEQ ID NO: 98389 - DNA, 22 bp, Artificial Sequence
  Synthetic oligonucleotide; TTT chr11 5310982 5311003 5310999 5311004 +
tcagttccatatggtcctcctc

SEQ ID NO: 98390 - DNA, 22 bp, Artificial Sequence
  Synthetic oligonucleotide; TTT chr11 5310983 5311004 5311000 5311005 +
cagttccatatggtcctcctca

SEQ ID NO: 98391 - DNA, 22 bp, Artificial Sequence
  Synthetic oligonucleotide; TTC chr11 5310984 5311005 5311001 5311006 +
agttccatatggtcctcctcaa

SEQ ID NO: 98392 - DNA, 22 bp, Artificial Sequence
  Synthetic oligonucleotide; TTC chr11 5310989 5311010 5311006 5311011 +
catatggtcctcctcaaatatc

SEQ ID NO: 98393 - DNA, 22 bp, Artificial Sequence
  Synthetic oligonucleotide; CTC chr11 5311001 5311022 5311018 5311023 +
ctcaaatatctatgattggaca

SEQ ID NO: 98394 - DNA, 22 bp, Artificial Sequence
  Synthetic oligonucleotide; CTC chr11 5311004 5311025 5311021 5311026 +
aaatatctatgattggacatct

SEQ ID NO: 98395 - DNA, 22 bp, Artificial Sequence
  Synthetic oligonucleotide; CTA chr11 5311013 5311034 5311030 5311035 +
tgattggacatctgtgaaggca

SEQ ID NO: 98396 - DNA, 22 bp, Artificial Sequence
  Synthetic oligonucleotide; TTG chr11 5311019 5311040 5311036 5311041 +
gacatctgtgaaggcatgccgc

SEQ ID NO: 98397 - DNA, 22 bp, Artificial Sequence
  Synthetic oligonucleotide; CTG chr11 5311027 5311048 5311044 5311049 +
tgaaggcatgccgcaaatctag

SEQ ID NO: 98398 - DNA, 22 bp, Artificial Sequence
  Synthetic oligonucleotide; CTA chr11 5311048 5311069 5311065 5311070 +
gggtaactaacataagcactca

SEQ ID NO: 98399 - DNA, 22 bp, Artificial Sequence
  Synthetic oligonucleotide; CTA chr11 5311057 5311078 5311074 5311079 +
acataagcactcatgaaaaaac

SEQ ID NO: 98400 - DNA, 22 bp, Artificial Sequence
  Synthetic oligonucleotide; CTC chr11 5311069 5311090 5311086 5311091 +
atgaaaaaacttcatttttcaa

SEQ ID NO: 98401 - DNA, 22 bp, Artificial Sequence
  Synthetic oligonucleotide; CTT chr11 5311081 5311102 5311098 5311103 +
catttttcaataaattcttgtt

SEQ ID NO: 98402 - DNA, 22 bp, Artificial Sequence
  Synthetic oligonucleotide; TTC chr11 5311082 5311103 5311099 5311104 +
atttttcaataaattcttgtta

SEQ ID NO: 98403 - DNA, 22 bp, Artificial Sequence
  Synthetic oligonucleotide; TTT chr11 5311086 5311107 5311103 5311108 +
ttcaataaattcttgttattta

SEQ ID NO: 98404 - DNA, 22 bp, Artificial Sequence
  Synthetic oligonucleotide; TTT chr11 5311087 5311108 5311104 5311109 +
tcaataaattcttgttatttac

SEQ ID NO: 98405 - DNA, 22 bp, Artificial Sequence
  Synthetic oligonucleotide; TTT chr11 5311088 5311109 5311105 5311110 +
caataaattcttgttatttact

SEQ ID NO: 98406 - DNA, 22 bp, Artificial Sequence
  Synthetic oligonucleotide; TTC chr11 5311089 5311110 5311106 5311111 +
aataaattcttgttatttactc

SEQ ID NO: 98407 - DNA, 22 bp, Artificial Sequence
  Synthetic oligonucleotide; TTC chr11 5311098 5311119 5311115 5311120 +
ttgttatttactcatctggtaa

SEQ ID NO: 98408 - DNA, 22 bp, Artificial Sequence
  Synthetic oligonucleotide; CTT chr11 5311100 5311121 5311117 5311122 +
gttatttactcatctggtaatt

SEQ ID NO: 98409 - DNA, 22 bp, Artificial Sequence
  Synthetic oligonucleotide; TTG chr11 5311101 5311122 5311118 5311123 +
ttatttactcatctggtaattc

SEQ ID NO: 98410 - DNA, 22 bp, Artificial Sequence
  Synthetic oligonucleotide; TTA chr11 5311104 5311125 5311121 5311126 +
tttactcatctggtaattcaga

SEQ ID NO: 98411 - DNA, 22 bp, Artificial Sequence
  Synthetic oligonucleotide; TTT chr11 5311107 5311128 5311124 5311129 +
actcatctggtaattcagaatt

SEQ ID NO: 98412 - DNA, 22 bp, Artificial Sequence
  Synthetic oligonucleotide; TTA chr11 5311108 5311129 5311125 5311130 +
ctcatctggtaattcagaattt

SEQ ID NO: 98413 - DNA, 22 bp, Artificial Sequence
  Synthetic oligonucleotide; CTC chr11 5311111 5311132 5311128 5311133 +
atctggtaattcagaatttagt

SEQ ID NO: 98414 - DNA, 22 bp, Artificial Sequence
  Synthetic oligonucleotide; CTG chr11 5311116 5311137 5311133 5311138 +
gtaattcagaatttagttaatc

SEQ ID NO: 98415 - DNA, 22 bp, Artificial Sequence
  Synthetic oligonucleotide; TTC chr11 5311123 5311144 5311140 5311145 +
agaatttagttaatccatcttc

SEQ ID NO: 98416 - DNA, 22 bp, Artificial Sequence
  Synthetic oligonucleotide; TTT chr11 5311130 5311151 5311147 5311152 +
agttaatccatcttcctattta

SEQ ID NO: 98417 - DNA, 22 bp, Artificial Sequence
  Synthetic oligonucleotide; TTA chr11 5311131 5311152 5311148 5311153 +
gttaatccatcttcctatttat

SEQ ID NO: 98418 - DNA, 22 bp, Artificial Sequence
  Synthetic oligonucleotide; TTA chr11 5311135 5311156 5311152 5311157 +
atccatcttcctatttatgttt

SEQ ID NO: 98419 - DNA, 22 bp, Artificial Sequence
  Synthetic oligonucleotide; CTT chr11 5311144 5311165 5311161 5311166 +
cctatttatgtttgtatcagat

SEQ ID NO: 98420 - DNA, 22 bp, Artificial Sequence
  Synthetic oligonucleotide; TTC chr11 5311145 5311166 5311162 5311167 +
ctatttatgtttgtatcagatt

SEQ ID NO: 98421 - DNA, 22 bp, Artificial Sequence
  Synthetic oligonucleotide; CTA chr11 5311148 5311169 5311165 5311170 +
tttatgtttgtatcagattatc

SEQ ID NO: 98422 - DNA, 22 bp, Artificial Sequence
  Synthetic oligonucleotide; TTT chr11 5311151 5311172 5311168 5311173 +
atgtttgtatcagattatctgg

SEQ ID NO: 98423 - DNA, 22 bp, Artificial Sequence
  Synthetic oligonucleotide; TTA chr11 5311152 5311173 5311169 5311174 +
tgtttgtatcagattatctggc

SEQ ID NO: 98424 - DNA, 22 bp, Artificial Sequence
  Synthetic oligonucleotide; TTT chr11 5311157 5311178 5311174 5311179 +
gtatcagattatctggctctaa

SEQ ID NO: 98425 - DNA, 22 bp, Artificial Sequence
  Synthetic oligonucleotide; TTG chr11 5311158 5311179 5311175 5311180 +
tatcagattatctggctctaac

SEQ ID NO: 98426 - DNA, 22 bp, Artificial Sequence
  Synthetic oligonucleotide; TTA chr11 5311168 5311189 5311185 5311190 +
tctggctctaaccagttgtatc

SEQ ID NO: 98427 - DNA, 22 bp, Artificial Sequence
  Synthetic oligonucleotide; CTG chr11 5311172 5311193 5311189 5311194 +
gctctaaccagttgtatcatat

SEQ ID NO: 98428 - DNA, 22 bp, Artificial Sequence
  Synthetic oligonucleotide; CTC chr11 5311176 5311197 5311193 5311198 +
taaccagttgtatcatataatt

SEQ ID NO: 98429 - DNA, 22 bp, Artificial Sequence
  Synthetic oligonucleotide; CTA chr11 5311178 5311199 5311195 5311200 +
accagttgtatcatataattga

SEQ ID NO: 98430 - DNA, 22 bp, Artificial Sequence
  Synthetic oligonucleotide; TTG chr11 5311186 5311207 5311203 5311208 +
tatcatataattgatatattat

SEQ ID NO: 98431 - DNA, 22 bp, Artificial Sequence
  Synthetic oligonucleotide; TTG chr11 5311199 5311220 5311216 5311221 +
atatattatctcacgtttggca

SEQ ID NO: 98432 - DNA, 22 bp, Artificial Sequence
  Synthetic oligonucleotide; TTA chr11 5311207 5311228 5311224 5311229 +
tctcacgtttggcagtattttt

SEQ ID NO: 98433 - DNA, 22 bp, Artificial Sequence
  Synthetic oligonucleotide; CTC chr11 5311211 5311232 5311228 5311233 +
acgtttggcagtattttttgga

SEQ ID NO: 98434 - DNA, 22 bp, Artificial Sequence
  Synthetic oligonucleotide; TTT chr11 5311217 5311238 5311234 5311239 +
ggcagtattttttggactgcta

SEQ ID NO: 98435 - DNA, 22 bp, Artificial Sequence
  Synthetic oligonucleotide; TTG chr11 5311218 5311239 5311235 5311240 +
gcagtattttttggactgctat

SEQ ID NO: 98436 - DNA, 22 bp, Artificial Sequence
  Synthetic oligonucleotide; TTT chr11 5311227 5311248 5311244 5311249 +
tttggactgctattttaaaact

SEQ ID NO: 98437 - DNA, 22 bp, Artificial Sequence
  Synthetic oligonucleotide; TTT chr11 5311228 5311249 5311245 5311250 +
ttggactgctattttaaaactg

SEQ ID NO: 98438 - DNA, 22 bp, Artificial Sequence
  Synthetic oligonucleotide; TTT chr11 5311229 5311250 5311246 5311251 +
tggactgctattttaaaactgg

SEQ ID NO: 98439 - DNA, 22 bp, Artificial Sequence
  Synthetic oligonucleotide; TTT chr11 5311230 5311251 5311247 5311252 +
ggactgctattttaaaactggg

SEQ ID NO: 98440 - DNA, 22 bp, Artificial Sequence
  Synthetic oligonucleotide; TTG chr11 5311231 5311252 5311248 5311253 +
gactgctattttaaaactgggt

SEQ ID NO: 98441 - DNA, 22 bp, Artificial Sequence
  Synthetic oligonucleotide; CTG chr11 5311236 5311257 5311253 5311258 +
ctattttaaaactgggtctact

SEQ ID NO: 98442 - DNA, 22 bp, Artificial Sequence
  Synthetic oligonucleotide; CTA chr11 5311239 5311260 5311256 5311261 +
ttttaaaactgggtctacttca

SEQ ID NO: 98443 - DNA, 22 bp, Artificial Sequence
  Synthetic oligonucleotide; TTT chr11 5311242 5311263 5311259 5311264 +
taaaactgggtctacttcagtg

SEQ ID NO: 98444 - DNA, 22 bp, Artificial Sequence
  Synthetic oligonucleotide; TTT chr11 5311243 5311264 5311260 5311265 +
aaaactgggtctacttcagtga

SEQ ID NO: 98445 - DNA, 22 bp, Artificial Sequence
  Synthetic oligonucleotide; TTA chr11 5311244 5311265 5311261 5311266 +
aaactgggtctacttcagtgaa

SEQ ID NO: 98446 - DNA, 22 bp, Artificial Sequence
  Synthetic oligonucleotide; CTG chr11 5311250 5311271 5311267 5311272 +
ggtctacttcagtgaatgacac

SEQ ID NO: 98447 - DNA, 22 bp, Artificial Sequence
  Synthetic oligonucleotide; CTA chr11 5311256 5311277 5311273 5311278 +
cttcagtgaatgacacccaaga

SEQ ID NO: 98448 - DNA, 22 bp, Artificial Sequence
  Synthetic oligonucleotide; CTT chr11 5311259 5311280 5311276 5311281 +
cagtgaatgacacccaagaaaa

SEQ ID NO: 98449 - DNA, 22 bp, Artificial Sequence
  Synthetic oligonucleotide; TTC chr11 5311260 5311281 5311277 5311282 +
agtgaatgacacccaagaaaaa

SEQ ID NO: 98450 - DNA, 22 bp, Artificial Sequence
  Synthetic oligonucleotide; CTA chr11 5311292 5311313 5311309 5311314 +
tcctgctttctcctaggatagt

SEQ ID NO: 98451 - DNA, 22 bp, Artificial Sequence
  Synthetic oligonucleotide; CTG chr11 5311297 5311318 5311314 5311319 +
ctttctcctaggatagtgagcc

SEQ ID NO: 98452 - DNA, 22 bp, Artificial Sequence
  Synthetic oligonucleotide; CTT chr11 5311300 5311321 5311317 5311322 +
tctcctaggatagtgagccact

SEQ ID NO: 98453 - DNA, 22 bp, Artificial Sequence
  Synthetic oligonucleotide; TTT chr11 5311301 5311322 5311318 5311323 +
ctcctaggatagtgagccactg

SEQ ID NO: 98454 - DNA, 22 bp, Artificial Sequence
  Synthetic oligonucleotide; TTC chr11 5311302 5311323 5311319 5311324 +
tcctaggatagtgagccactgt

SEQ ID NO: 98455 - DNA, 22 bp, Artificial Sequence
  Synthetic oligonucleotide; CTC chr11 5311304 5311325 5311321 5311326 +
ctaggatagtgagccactgttt

SEQ ID NO: 98456 - DNA, 22 bp, Artificial Sequence
  Synthetic oligonucleotide; CTA chr11 5311307 5311328 5311324 5311329 +
ggatagtgagccactgtttcac

SEQ ID NO: 98457 - DNA, 22 bp, Artificial Sequence
  Synthetic oligonucleotide; CTG chr11 5311323 5311344 5311340 5311345 +
tttcacttattctctgaccttc

SEQ ID NO: 98458 - DNA, 22 bp, Artificial Sequence
  Synthetic oligonucleotide; TTT chr11 5311326 5311347 5311343 5311348 +
cacttattctctgaccttcttt

SEQ ID NO: 98459 - DNA, 22 bp, Artificial Sequence
  Synthetic oligonucleotide; TTC chr11 5311327 5311348 5311344 5311349 +
acttattctctgaccttctttg

SEQ ID NO: 98460 - DNA, 22 bp, Artificial Sequence
  Synthetic oligonucleotide; CTT chr11 5311331 5311352 5311348 5311353 +
attctctgaccttctttgggtg

SEQ ID NO: 98461 - DNA, 22 bp, Artificial Sequence
  Synthetic oligonucleotide; TTA chr11 5311332 5311353 5311349 5311354 +
ttctctgaccttctttgggtgt

SEQ ID NO: 98462 - DNA, 22 bp, Artificial Sequence
  Synthetic oligonucleotide; TTC chr11 5311335 5311356 5311352 5311357 +
tctgaccttctttgggtgtcat

SEQ ID NO: 98463 - DNA, 22 bp, Artificial Sequence
  Synthetic oligonucleotide; CTC chr11 5311337 5311358 5311354 5311359 +
tgaccttctttgggtgtcatct

SEQ ID NO: 98464 - DNA, 22 bp, Artificial Sequence
  Synthetic oligonucleotide; CTG chr11 5311339 5311360 5311356 5311361 +
accttctttgggtgtcatctgc

SEQ ID NO: 98465 - DNA, 22 bp, Artificial Sequence
  Synthetic oligonucleotide; CTT chr11 5311344 5311365 5311361 5311366 +
ctttgggtgtcatctgcttcag

SEQ ID NO: 98466 - DNA, 22 bp, Artificial Sequence
  Synthetic oligonucleotide; TTC chr11 5311345 5311366 5311362 5311367 +
tttgggtgtcatctgcttcagt

SEQ ID NO: 98467 - DNA, 22 bp, Artificial Sequence
  Synthetic oligonucleotide; CTT chr11 5311347 5311368 5311364 5311369 +
tgggtgtcatctgcttcagttt

SEQ ID NO: 98468 - DNA, 22 bp, Artificial Sequence
  Synthetic oligonucleotide; TTT chr11 5311348 5311369 5311365 5311370 +
gggtgtcatctgcttcagtttg

SEQ ID NO: 98469 - DNA, 22 bp, Artificial Sequence
  Synthetic oligonucleotide; TTG chr11 5311349 5311370 5311366 5311371 +
ggtgtcatctgcttcagtttgt

SEQ ID NO: 98470 - DNA, 22 bp, Artificial Sequence
  Synthetic oligonucleotide; CTG chr11 5311360 5311381 5311377 5311382 +
cttcagtttgtttctgttgtct

SEQ ID NO: 98471 - DNA, 22 bp, Artificial Sequence
  Synthetic oligonucleotide; CTT chr11 5311363 5311384 5311380 5311385 +
cagtttgtttctgttgtcttgc

SEQ ID NO: 98472 - DNA, 22 bp, Artificial Sequence
  Synthetic oligonucleotide; TTC chr11 5311364 5311385 5311381 5311386 +
agtttgtttctgttgtcttgca

SEQ ID NO: 98473 - DNA, 22 bp, Artificial Sequence
  Synthetic oligonucleotide; TTT chr11 5311369 5311390 5311386 5311391 +
gtttctgttgtcttgcatctgt

SEQ ID NO: 98474 - DNA, 22 bp, Artificial Sequence
  Synthetic oligonucleotide; TTG chr11 5311370 5311391 5311387 5311392 +
tttctgttgtcttgcatctgta

SEQ ID NO: 98475 - DNA, 22 bp, Artificial Sequence
  Synthetic oligonucleotide; TTT chr11 5311373 5311394 5311390 5311395 +
ctgttgtcttgcatctgtaaat

SEQ ID NO: 98476 - DNA, 22 bp, Artificial Sequence
  Synthetic oligonucleotide; TTC chr11 5311374 5311395 5311391 5311396 +
tgttgtcttgcatctgtaaatt

SEQ ID NO: 98477 - DNA, 22 bp, Artificial Sequence
  Synthetic oligonucleotide; CTG chr11 5311376 5311397 5311393 5311398 +
ttgtcttgcatctgtaaattct

SEQ ID NO: 98478 - DNA, 22 bp, Artificial Sequence
  Synthetic oligonucleotide; TTG chr11 5311379 5311400 5311396 5311401 +
tcttgcatctgtaaattctcat

SEQ ID NO: 98479 - DNA, 22 bp, Artificial Sequence
  Synthetic oligonucleotide; CTT chr11 5311383 5311404 5311400 5311405 +
gcatctgtaaattctcatcatt

SEQ ID NO: 98480 - DNA, 22 bp, Artificial Sequence
  Synthetic oligonucleotide; TTG chr11 5311384 5311405 5311401 5311406 +
catctgtaaattctcatcattt

SEQ ID NO: 98481 - DNA, 22 bp, Artificial Sequence
  Synthetic oligonucleotide; CTG chr11 5311390 5311411 5311407 5311412 +
taaattctcatcattttctgac

SEQ ID NO: 98482 - DNA, 22 bp, Artificial Sequence
  Synthetic oligonucleotide; TTC chr11 5311397 5311418 5311414 5311419 +
tcatcattttctgacatatgtc

SEQ ID NO: 98483 - DNA, 22 bp, Artificial Sequence
  Synthetic oligonucleotide; CTC chr11 5311399 5311420 5311416 5311421 +
atcattttctgacatatgtctt

SEQ ID NO: 98484 - DNA, 22 bp, Artificial Sequence
  Synthetic oligonucleotide; TTT chr11 5311406 5311427 5311423 5311428 +
tctgacatatgtcttgccttta

SEQ ID NO: 98485 - DNA, 22 bp, Artificial Sequence
  Synthetic oligonucleotide; TTT chr11 5311407 5311428 5311424 5311429 +
ctgacatatgtcttgcctttac

SEQ ID NO: 98486 - DNA, 22 bp, Artificial Sequence
  Synthetic oligonucleotide; TTC chr11 5311408 5311429 5311425 5311430 +
tgacatatgtcttgcctttact

SEQ ID NO: 98487 - DNA, 22 bp, Artificial Sequence
  Synthetic oligonucleotide; CTG chr11 5311410 5311431 5311427 5311432 +
acatatgtcttgcctttactat

SEQ ID NO: 98488 - DNA, 22 bp, Artificial Sequence
  Synthetic oligonucleotide; CTT chr11 5311421 5311442 5311438 5311443 +
gcctttactatgactcttcatg

SEQ ID NO: 98489 - DNA, 22 bp, Artificial Sequence
  Synthetic oligonucleotide; TTG chr11 5311422 5311443 5311439 5311444 +
cctttactatgactcttcatga

SEQ ID NO: 98490 - DNA, 22 bp, Artificial Sequence
  Synthetic oligonucleotide; CTT chr11 5311426 5311447 5311443 5311448 +
tactatgactcttcatgatcag

SEQ ID NO: 98491 - DNA, 22 bp, Artificial Sequence
  Synthetic oligonucleotide; TTT chr11 5311427 5311448 5311444 5311449 +
actatgactcttcatgatcagg

SEQ ID NO: 98492 - DNA, 22 bp, Artificial Sequence
  Synthetic oligonucleotide; TTA chr11 5311428 5311449 5311445 5311450 +
ctatgactcttcatgatcaggc

SEQ ID NO: 98493 - DNA, 22 bp, Artificial Sequence
  Synthetic oligonucleotide; CTA chr11 5311431 5311452 5311448 5311453 +
tgactcttcatgatcaggcaaa

SEQ ID NO: 98494 - DNA, 22 bp, Artificial Sequence
  Synthetic oligonucleotide; CTC chr11 5311437 5311458 5311454 5311459 +
ttcatgatcaggcaaaaagaaa

SEQ ID NO: 98495 - DNA, 22 bp, Artificial Sequence
  Synthetic oligonucleotide; CTT chr11 5311439 5311460 5311456 5311461 +
catgatcaggcaaaaagaaata

SEQ ID NO: 98496 - DNA, 22 bp, Artificial Sequence
  Synthetic oligonucleotide; TTC chr11 5311440 5311461 5311457 5311462 +
atgatcaggcaaaaagaaatac

SEQ ID NO: 98497 - DNA, 22 bp, Artificial Sequence
  Synthetic oligonucleotide; CTG chr11 5311468 5311489 5311485 5311490 +
aaatgatttgaatgaatgattt

SEQ ID NO: 98498 - DNA, 22 bp, Artificial Sequence
  Synthetic oligonucleotide; TTT chr11 5311477 5311498 5311494 5311499 +
gaatgaatgatttttttaatta

SEQ ID NO: 98499 - DNA, 22 bp, Artificial Sequence
  Synthetic oligonucleotide; TTG chr11 5311478 5311499 5311495 5311500 +
aatgaatgatttttttaattat

SEQ ID NO: 98500 - DNA, 22 bp, Artificial Sequence
  Synthetic oligonucleotide; TTT chr11 5311490 5311511 5311507 5311512 +
ttttaattattaagctaatatt

SEQ ID NO: 98501 - DNA, 22 bp, Artificial Sequence
  Synthetic oligonucleotide; TTT chr11 5311491 5311512 5311508 5311513 +
tttaattattaagctaatattt

SEQ ID NO: 98502 - DNA, 22 bp, Artificial Sequence
  Synthetic oligonucleotide; TTT chr11 5311492 5311513 5311509 5311514 +
ttaattattaagctaatatttt

SEQ ID NO: 98503 - DNA, 22 bp, Artificial Sequence
  Synthetic oligonucleotide; TTT chr11 5311493 5311514 5311510 5311515 +
taattattaagctaatattttg

SEQ ID NO: 98504 - DNA, 22 bp, Artificial Sequence
  Synthetic oligonucleotide; TTT chr11 5311494 5311515 5311511 5311516 +
aattattaagctaatattttgt

SEQ ID NO: 98505 - DNA, 22 bp, Artificial Sequence
  Synthetic oligonucleotide; TTA chr11 5311495 5311516 5311512 5311517 +
attattaagctaatattttgtt

SEQ ID NO: 98506 - DNA, 22 bp, Artificial Sequence
  Synthetic oligonucleotide; TTA chr11 5311499 5311520 5311516 5311521 +
ttaagctaatattttgttttta

SEQ ID NO: 98507 - DNA, 22 bp, Artificial Sequence
  Synthetic oligonucleotide; TTA chr11 5311502 5311523 5311519 5311524 +
agctaatattttgtttttaaaa

SEQ ID NO: 98508 - DNA, 22 bp, Artificial Sequence
  Synthetic oligonucleotide; CTA chr11 5311507 5311528 5311524 5311529 +
atattttgtttttaaaagtcta

SEQ ID NO: 98509 - DNA, 22 bp, Artificial Sequence
  Synthetic oligonucleotide; TTT chr11 5311513 5311534 5311530 5311535 +
tgtttttaaaagtctagttcta

SEQ ID NO: 98510 - DNA, 22 bp, Artificial Sequence
  Synthetic oligonucleotide; TTT chr11 5311514 5311535 5311531 5311536 +
gtttttaaaagtctagttctac

SEQ ID NO: 98511 - DNA, 22 bp, Artificial Sequence
  Synthetic oligonucleotide; TTG chr11 5311515 5311536 5311532 5311537 +
tttttaaaagtctagttctaca

SEQ ID NO: 98512 - DNA, 22 bp, Artificial Sequence
  Synthetic oligonucleotide; TTT chr11 5311518 5311539 5311535 5311540 +
ttaaaagtctagttctacagtt

SEQ ID NO: 98513 - DNA, 22 bp, Artificial Sequence
  Synthetic oligonucleotide; TTT chr11 5311519 5311540 5311536 5311541 +
taaaagtctagttctacagttt

SEQ ID NO: 98514 - DNA, 22 bp, Artificial Sequence
  Synthetic oligonucleotide; TTT chr11 5311520 5311541 5311537 5311542 +
aaaagtctagttctacagtttg

SEQ ID NO: 98515 - DNA, 22 bp, Artificial Sequence
  Synthetic oligonucleotide; TTA chr11 5311521 5311542 5311538 5311543 +
aaagtctagttctacagtttga

SEQ ID NO: 98516 - DNA, 22 bp, Artificial Sequence
  Synthetic oligonucleotide; CTA chr11 5311529 5311550 5311546 5311551 +
gttctacagtttgaaatacttc

SEQ ID NO: 98517 - DNA, 22 bp, Artificial Sequence
  Synthetic oligonucleotide; TTC chr11 5311533 5311554 5311550 5311555 +
tacagtttgaaatacttccttc

SEQ ID NO: 98518 - DNA, 22 bp, Artificial Sequence
  Synthetic oligonucleotide; CTA chr11 5311535 5311556 5311552 5311557 +
cagtttgaaatacttccttcaa

SEQ ID NO: 98519 - DNA, 22 bp, Artificial Sequence
  Synthetic oligonucleotide; TTT chr11 5311541 5311562 5311558 5311563 +
gaaatacttccttcaattgctt

SEQ ID NO: 98520 - DNA, 22 bp, Artificial Sequence
  Synthetic oligonucleotide; TTG chr11 5311542 5311563 5311559 5311564 +
aaatacttccttcaattgcttt

SEQ ID NO: 98521 - DNA, 22 bp, Artificial Sequence
  Synthetic oligonucleotide; CTT chr11 5311550 5311571 5311567 5311572 +
ccttcaattgctttcttaaatc

SEQ ID NO: 98522 - DNA, 22 bp, Artificial Sequence
  Synthetic oligonucleotide; TTC chr11 5311551 5311572 5311568 5311573 +
cttcaattgctttcttaaatca

SEQ ID NO: 98523 - DNA, 22 bp, Artificial Sequence
  Synthetic oligonucleotide; CTT chr11 5311554 5311575 5311571 5311576 +
caattgctttcttaaatcacat

SEQ ID NO: 98524 - DNA, 22 bp, Artificial Sequence
  Synthetic oligonucleotide; TTC chr11 5311555 5311576 5311572 5311577 +
aattgctttcttaaatcacatg

SEQ ID NO: 98525 - DNA, 22 bp, Artificial Sequence
  Synthetic oligonucleotide; TTG chr11 5311560 5311581 5311577 5311582 +
ctttcttaaatcacatgtttat

SEQ ID NO: 98526 - DNA, 22 bp, Artificial Sequence
  Synthetic oligonucleotide; CTT chr11 5311563 5311584 5311580 5311585 +
tcttaaatcacatgtttattat

SEQ ID NO: 98527 - DNA, 22 bp, Artificial Sequence
  Synthetic oligonucleotide; TTT chr11 5311564 5311585 5311581 5311586 +
cttaaatcacatgtttattatt

SEQ ID NO: 98528 - DNA, 22 bp, Artificial Sequence
  Synthetic oligonucleotide; TTC chr11 5311565 5311586 5311582 5311587 +
ttaaatcacatgtttattattt

SEQ ID NO: 98529 - DNA, 22 bp, Artificial Sequence
  Synthetic oligonucleotide; CTT chr11 5311567 5311588 5311584 5311589 +
aaatcacatgtttattattttg

SEQ ID NO: 98530 - DNA, 22 bp, Artificial Sequence
  Synthetic oligonucleotide; TTA chr11 5311568 5311589 5311585 5311590 +
aatcacatgtttattattttga

SEQ ID NO: 98531 - DNA, 22 bp, Artificial Sequence
  Synthetic oligonucleotide; TTT chr11 5311580 5311601 5311597 5311602 +
attattttgactcattctcagt

SEQ ID NO: 98532 - DNA, 22 bp, Artificial Sequence
  Synthetic oligonucleotide; TTA chr11 5311581 5311602 5311598 5311603 +
ttattttgactcattctcagtg

SEQ ID NO: 98533 - DNA, 22 bp, Artificial Sequence
  Synthetic oligonucleotide; TTA chr11 5311584 5311605 5311601 5311606 +
ttttgactcattctcagtgtcc

SEQ ID NO: 98534 - DNA, 22 bp, Artificial Sequence
  Synthetic oligonucleotide; TTT chr11 5311587 5311608 5311604 5311609 +
tgactcattctcagtgtcccac

SEQ ID NO: 98535 - DNA, 22 bp, Artificial Sequence
  Synthetic oligonucleotide; TTT chr11 5311588 5311609 5311605 5311610 +
gactcattctcagtgtcccaca

SEQ ID NO: 98536 - DNA, 22 bp, Artificial Sequence
  Synthetic oligonucleotide; TTG chr11 5311589 5311610 5311606 5311611 +
actcattctcagtgtcccacaa

SEQ ID NO: 98537 - DNA, 22 bp, Artificial Sequence
  Synthetic oligonucleotide; CTC chr11 5311593 5311614 5311610 5311615 +
attctcagtgtcccacaacttt

SEQ ID NO: 98538 - DNA, 22 bp, Artificial Sequence
  Synthetic oligonucleotide; TTC chr11 5311597 5311618 5311614 5311619 +
tcagtgtcccacaactttaaaa

SEQ ID NO: 98539 - DNA, 22 bp, Artificial Sequence
  Synthetic oligonucleotide; CTC chr11 5311599 5311620 5311616 5311621 +
agtgtcccacaactttaaaaat

SEQ ID NO: 98540 - DNA, 22 bp, Artificial Sequence
  Synthetic oligonucleotide; CTT chr11 5311614 5311635 5311631 5311636 +
taaaaattataatgattcttct

SEQ ID NO: 98541 - DNA, 22 bp, Artificial Sequence
  Synthetic oligonucleotide; TTT chr11 5311615 5311636 5311632 5311637 +
aaaaattataatgattcttctt

SEQ ID NO: 98542 - DNA, 22 bp, Artificial Sequence
  Synthetic oligonucleotide; TTA chr11 5311616 5311637 5311633 5311638 +
aaaattataatgattcttctta

SEQ ID NO: 98543 - DNA, 22 bp, Artificial Sequence
  Synthetic oligonucleotide; TTA chr11 5311623 5311644 5311640 5311645 +
taatgattcttcttatttatag

SEQ ID NO: 98544 - DNA, 22 bp, Artificial Sequence
  Synthetic oligonucleotide; TTC chr11 5311632 5311653 5311649 5311654 +
ttcttatttatagacaatacat

SEQ ID NO: 98545 - DNA, 22 bp, Artificial Sequence
  Synthetic oligonucleotide; CTT chr11 5311634 5311655 5311651 5311656 +
cttatttatagacaatacataa

SEQ ID NO: 98546 - DNA, 22 bp, Artificial Sequence
  Synthetic oligonucleotide; TTC chr11 5311635 5311656 5311652 5311657 +
ttatttatagacaatacataat

SEQ ID NO: 98547 - DNA, 22 bp, Artificial Sequence
  Synthetic oligonucleotide; CTT chr11 5311637 5311658 5311654 5311659 +
atttatagacaatacataatca

SEQ ID NO: 98548 - DNA, 22 bp, Artificial Sequence
  Synthetic oligonucleotide; TTA chr11 5311638 5311659 5311655 5311660 +
tttatagacaatacataatcag

SEQ ID NO: 98549 - DNA, 22 bp, Artificial Sequence
  Synthetic oligonucleotide; TTT chr11 5311641 5311662 5311658 5311663 +
atagacaatacataatcagtga

SEQ ID NO: 98550 - DNA, 22 bp, Artificial Sequence
  Synthetic oligonucleotide; TTA chr11 5311642 5311663 5311659 5311664 +
tagacaatacataatcagtgac

SEQ ID NO: 98551 - DNA, 22 bp, Artificial Sequence
  Synthetic oligonucleotide; CTG chr11 5311666 5311687 5311683 5311688 +
cctttcttttggcactgccttt

SEQ ID NO: 98552 - DNA, 22 bp, Artificial Sequence
  Synthetic oligonucleotide; CTT chr11 5311670 5311691 5311687 5311692 +
tcttttggcactgcctttcttc

SEQ ID NO: 98553 - DNA, 22 bp, Artificial Sequence
  Synthetic oligonucleotide; TTT chr11 5311671 5311692 5311688 5311693 +
cttttggcactgcctttcttcc

SEQ ID NO: 98554 - DNA, 22 bp, Artificial Sequence
  Synthetic oligonucleotide; TTC chr11 5311672 5311693 5311689 5311694 +
ttttggcactgcctttcttcca

SEQ ID NO: 98555 - DNA, 22 bp, Artificial Sequence
  Synthetic oligonucleotide; CTT chr11 5311674 5311695 5311691 5311696 +
ttggcactgcctttcttccaag

SEQ ID NO: 98556 - DNA, 22 bp, Artificial Sequence
  Synthetic oligonucleotide; TTT chr11 5311675 5311696 5311692 5311697 +
tggcactgcctttcttccaaga

SEQ ID NO: 98557 - DNA, 22 bp, Artificial Sequence
  Synthetic oligonucleotide; TTT chr11 5311676 5311697 5311693 5311698 +
ggcactgcctttcttccaagaa

SEQ ID NO: 98558 - DNA, 22 bp, Artificial Sequence
  Synthetic oligonucleotide; TTG chr11 5311677 5311698 5311694 5311699 +
gcactgcctttcttccaagaac

SEQ ID NO: 98559 - DNA, 22 bp, Artificial Sequence
  Synthetic oligonucleotide; CTG chr11 5311683 5311704 5311700 5311705 +
cctttcttccaagaacatgtca

SEQ ID NO: 98560 - DNA, 22 bp, Artificial Sequence
  Synthetic oligonucleotide; CTT chr11 5311687 5311708 5311704 5311709 +
tcttccaagaacatgtcagaaa

SEQ ID NO: 98561 - DNA, 22 bp, Artificial Sequence
  Synthetic oligonucleotide; TTT chr11 5311688 5311709 5311705 5311710 +
cttccaagaacatgtcagaaat

SEQ ID NO: 98562 - DNA, 22 bp, Artificial Sequence
  Synthetic oligonucleotide; TTC chr11 5311689 5311710 5311706 5311711 +
ttccaagaacatgtcagaaatt

SEQ ID NO: 98563 - DNA, 22 bp, Artificial Sequence
  Synthetic oligonucleotide; CTT chr11 5311691 5311712 5311708 5311713 +
ccaagaacatgtcagaaattga

SEQ ID NO: 98564 - DNA, 22 bp, Artificial Sequence
  Synthetic oligonucleotide; TTC chr11 5311692 5311713 5311709 5311714 +
caagaacatgtcagaaattgat

SEQ ID NO: 98565 - DNA, 22 bp, Artificial Sequence
  Synthetic oligonucleotide; TTG chr11 5311712 5311733 5311729 5311734 +
atggtgatttttgctcctttcc

SEQ ID NO: 98566 - DNA, 22 bp, Artificial Sequence
  Synthetic oligonucleotide; TTT chr11 5311722 5311743 5311739 5311744 +
ttgctcctttccaactctttct

SEQ ID NO: 98567 - DNA, 22 bp, Artificial Sequence
  Synthetic oligonucleotide; TTT chr11 5311723 5311744 5311740 5311745 +
tgctcctttccaactctttctt

SEQ ID NO: 98568 - DNA, 22 bp, Artificial Sequence
  Synthetic oligonucleotide; TTT chr11 5311724 5311745 5311741 5311746 +
gctcctttccaactctttcttt

SEQ ID NO: 98569 - DNA, 22 bp, Artificial Sequence
  Synthetic oligonucleotide; TTG chr11 5311725 5311746 5311742 5311747 +
ctcctttccaactctttctttc

SEQ ID NO: 98570 - DNA, 22 bp, Artificial Sequence
  Synthetic oligonucleotide; CTC chr11 5311728 5311749 5311745 5311750 +
ctttccaactctttctttcctc

SEQ ID NO: 98571 - DNA, 22 bp, Artificial Sequence
  Synthetic oligonucleotide; CTT chr11 5311731 5311752 5311748 5311753 +
tccaactctttctttcctctgc

SEQ ID NO: 98572 - DNA, 22 bp, Artificial Sequence
  Synthetic oligonucleotide; TTT chr11 5311732 5311753 5311749 5311754 +
ccaactctttctttcctctgct

SEQ ID NO: 98573 - DNA, 22 bp, Artificial Sequence
  Synthetic oligonucleotide; TTC chr11 5311733 5311754 5311750 5311755 +
caactctttctttcctctgctt

SEQ ID NO: 98574 - DNA, 22 bp, Artificial Sequence
  Synthetic oligonucleotide; CTC chr11 5311739 5311760 5311756 5311761 +
tttctttcctctgcttttctaa

SEQ ID NO: 98575 - DNA, 22 bp, Artificial Sequence
  Synthetic oligonucleotide; CTT chr11 5311741 5311762 5311758 5311763 +
tctttcctctgcttttctaaat

SEQ ID NO: 98576 - DNA, 22 bp, Artificial Sequence
  Synthetic oligonucleotide; TTT chr11 5311742 5311763 5311759 5311764 +
ctttcctctgcttttctaaata

SEQ ID NO: 98577 - DNA, 22 bp, Artificial Sequence
  Synthetic oligonucleotide; TTC chr11 5311743 5311764 5311760 5311765 +
tttcctctgcttttctaaataa

SEQ ID NO: 98578 - DNA, 22 bp, Artificial Sequence
  Synthetic oligonucleotide; CTT chr11 5311745 5311766 5311762 5311767 +
tcctctgcttttctaaataacc

SEQ ID NO: 98579 - DNA, 22 bp, Artificial Sequence
  Synthetic oligonucleotide; TTT chr11 5311746 5311767 5311763 5311768 +
cctctgcttttctaaataacct

SEQ ID NO: 98580 - DNA, 22 bp, Artificial Sequence
  Synthetic oligonucleotide; TTC chr11 5311747 5311768 5311764 5311769 +
ctctgcttttctaaataacctg

SEQ ID NO: 98581 - DNA, 22 bp, Artificial Sequence
  Synthetic oligonucleotide; CTC chr11 5311750 5311771 5311767 5311772 +
tgcttttctaaataacctgtaa

SEQ ID NO: 98582 - DNA, 22 bp, Artificial Sequence
  Synthetic oligonucleotide; CTG chr11 5311752 5311773 5311769 5311774 +
cttttctaaataacctgtaaac

SEQ ID NO: 98583 - DNA, 22 bp, Artificial Sequence
  Synthetic oligonucleotide; CTT chr11 5311755 5311776 5311772 5311777 +
ttctaaataacctgtaaacctt

SEQ ID NO: 98584 - DNA, 22 bp, Artificial Sequence
  Synthetic oligonucleotide; TTT chr11 5311756 5311777 5311773 5311778 +
tctaaataacctgtaaacctta

SEQ ID NO: 98585 - DNA, 22 bp, Artificial Sequence
  Synthetic oligonucleotide; TTT chr11 5311757 5311778 5311774 5311779 +
ctaaataacctgtaaaccttat

SEQ ID NO: 98586 - DNA, 22 bp, Artificial Sequence
  Synthetic oligonucleotide; TTC chr11 5311758 5311779 5311775 5311780 +
taaataacctgtaaaccttatt

SEQ ID NO: 98587 - DNA, 22 bp, Artificial Sequence
  Synthetic oligonucleotide; CTA chr11 5311760 5311781 5311777 5311782 +
aataacctgtaaaccttattat

SEQ ID NO: 98588 - DNA, 22 bp, Artificial Sequence
  Synthetic oligonucleotide; CTG chr11 5311769 5311790 5311786 5311791 +
taaaccttattatatttagacc

SEQ ID NO: 98589 - DNA, 22 bp, Artificial Sequence
  Synthetic oligonucleotide; CTT chr11 5311777 5311798 5311794 5311799 +
attatatttagaccttaaatat

SEQ ID NO: 98590 - DNA, 22 bp, Artificial Sequence
  Synthetic oligonucleotide; TTA chr11 5311778 5311799 5311795 5311800 +
ttatatttagaccttaaatatt

SEQ ID NO: 98591 - DNA, 22 bp, Artificial Sequence
  Synthetic oligonucleotide; TTA chr11 5311781 5311802 5311798 5311803 +
tatttagaccttaaatatttgt

SEQ ID NO: 98592 - DNA, 22 bp, Artificial Sequence
  Synthetic oligonucleotide; TTT chr11 5311786 5311807 5311803 5311808 +
agaccttaaatatttgtcatat

SEQ ID NO: 98593 - DNA, 22 bp, Artificial Sequence
  Synthetic oligonucleotide; TTA chr11 5311787 5311808 5311804 5311809 +
gaccttaaatatttgtcatatc

SEQ ID NO: 98594 - DNA, 22 bp, Artificial Sequence
  Synthetic oligonucleotide; CTT chr11 5311793 5311814 5311810 5311815 +
aaatatttgtcatatctctcca

SEQ ID NO: 98595 - DNA, 22 bp, Artificial Sequence
  Synthetic oligonucleotide; TTA chr11 5311794 5311815 5311811 5311816 +
aatatttgtcatatctctccat

SEQ ID NO: 98596 - DNA, 22 bp, Artificial Sequence
  Synthetic oligonucleotide; TTT chr11 5311801 5311822 5311818 5311823 +
gtcatatctctccattaccatt

SEQ ID NO: 98597 - DNA, 22 bp, Artificial Sequence
  Synthetic oligonucleotide; TTG chr11 5311802 5311823 5311819 5311824 +
tcatatctctccattaccattt

SEQ ID NO: 98598 - DNA, 22 bp, Artificial Sequence
  Synthetic oligonucleotide; CTC chr11 5311811 5311832 5311828 5311833 +
tccattaccatttccactttcc

SEQ ID NO: 98599 - DNA, 22 bp, Artificial Sequence
  Synthetic oligonucleotide; CTC chr11 5311813 5311834 5311830 5311835 +
cattaccatttccactttccta

SEQ ID NO: 98600 - DNA, 22 bp, Artificial Sequence
  Synthetic oligonucleotide; TTA chr11 5311818 5311839 5311835 5311840 +
ccatttccactttcctaaattg

SEQ ID NO: 98601 - DNA, 22 bp, Artificial Sequence
  Synthetic oligonucleotide; TTT chr11 5311824 5311845 5311841 5311846 +
ccactttcctaaattgagttac

SEQ ID NO: 98602 - DNA, 22 bp, Artificial Sequence
  Synthetic oligonucleotide; TTC chr11 5311825 5311846 5311842 5311847 +
cactttcctaaattgagttact

SEQ ID NO: 98603 - DNA, 22 bp, Artificial Sequence
  Synthetic oligonucleotide; CTT chr11 5311830 5311851 5311847 5311852 +
tcctaaattgagttactattat

SEQ ID NO: 98604 - DNA, 22 bp, Artificial Sequence
  Synthetic oligonucleotide; TTT chr11 5311831 5311852 5311848 5311853 +
cctaaattgagttactattatc

SEQ ID NO: 98605 - DNA, 22 bp, Artificial Sequence
  Synthetic oligonucleotide; TTC chr11 5311832 5311853 5311849 5311854 +
ctaaattgagttactattatct

SEQ ID NO: 98606 - DNA, 22 bp, Artificial Sequence
  Synthetic oligonucleotide; CTA chr11 5311835 5311856 5311852 5311857 +
aattgagttactattatctttc

SEQ ID NO: 98607 - DNA, 22 bp, Artificial Sequence
  Synthetic oligonucleotide; TTG chr11 5311840 5311861 5311857 5311862 +
agttactattatctttcttcaa

SEQ ID NO: 98608 - DNA, 22 bp, Artificial Sequence
  Synthetic oligonucleotide; TTA chr11 5311845 5311866 5311862 5311867 +
ctattatctttcttcaaattac

SEQ ID NO: 98609 - DNA, 22 bp, Artificial Sequence
  Synthetic oligonucleotide; CTA chr11 5311848 5311869 5311865 5311870 +
ttatctttcttcaaattactct

SEQ ID NO: 98610 - DNA, 22 bp, Artificial Sequence
  Synthetic oligonucleotide; TTA chr11 5311851 5311872 5311868 5311873 +
tctttcttcaaattactctaat

SEQ ID NO: 98611 - DNA, 22 bp, Artificial Sequence
  Synthetic oligonucleotide; CTT chr11 5311855 5311876 5311872 5311877 +
tcttcaaattactctaatattc

SEQ ID NO: 98612 - DNA, 22 bp, Artificial Sequence
  Synthetic oligonucleotide; TTT chr11 5311856 5311877 5311873 5311878 +
cttcaaattactctaatattct

SEQ ID NO: 98613 - DNA, 22 bp, Artificial Sequence
  Synthetic oligonucleotide; TTC chr11 5311857 5311878 5311874 5311879 +
ttcaaattactctaatattctg

SEQ ID NO: 98614 - DNA, 22 bp, Artificial Sequence
  Synthetic oligonucleotide; CTT chr11 5311859 5311880 5311876 5311881 +
caaattactctaatattctgcc

SEQ ID NO: 98615 - DNA, 22 bp, Artificial Sequence
  Synthetic oligonucleotide; TTC chr11 5311860 5311881 5311877 5311882 +
aaattactctaatattctgccc

SEQ ID NO: 98616 - DNA, 22 bp, Artificial Sequence
  Synthetic oligonucleotide; TTA chr11 5311866 5311887 5311883 5311888 +
ctctaatattctgccctttccc

SEQ ID NO: 98617 - DNA, 22 bp, Artificial Sequence
  Synthetic oligonucleotide; CTC chr11 5311869 5311890 5311886 5311891 +
taatattctgccctttccctgc

SEQ ID NO: 98618 - DNA, 22 bp, Artificial Sequence
  Synthetic oligonucleotide; CTA chr11 5311871 5311892 5311888 5311893 +
atattctgccctttccctgcct

SEQ ID NO: 98619 - DNA, 22 bp, Artificial Sequence
  Synthetic oligonucleotide; TTC chr11 5311877 5311898 5311894 5311899 +
tgccctttccctgcctccctca

SEQ ID NO: 98620 - DNA, 22 bp, Artificial Sequence
  Synthetic oligonucleotide; CTG chr11 5311879 5311900 5311896 5311901 +
ccctttccctgcctccctcaat

SEQ ID NO: 98621 - DNA, 22 bp, Artificial Sequence
  Synthetic oligonucleotide; CTT chr11 5311884 5311905 5311901 5311906 +
tccctgcctccctcaattccat

SEQ ID NO: 98622 - DNA, 22 bp, Artificial Sequence
  Synthetic oligonucleotide; TTT chr11 5311885 5311906 5311902 5311907 +
ccctgcctccctcaattccatt

SEQ ID NO: 98623 - DNA, 22 bp, Artificial Sequence
  Synthetic oligonucleotide; TTC chr11 5311886 5311907 5311903 5311908 +
cctgcctccctcaattccattt

SEQ ID NO: 98624 - DNA, 22 bp, Artificial Sequence
  Synthetic oligonucleotide; CTG chr11 5311890 5311911 5311907 5311912 +
cctccctcaattccattttata

SEQ ID NO: 98625 - DNA, 22 bp, Artificial Sequence
  Synthetic oligonucleotide; CTC chr11 5311894 5311915 5311911 5311916 +
cctcaattccattttataaata

SEQ ID NO: 98626 - DNA, 22 bp, Artificial Sequence
  Synthetic oligonucleotide; CTC chr11 5311898 5311919 5311915 5311920 +
aattccattttataaataatat

SEQ ID NO: 98627 - DNA, 22 bp, Artificial Sequence
  Synthetic oligonucleotide; TTC chr11 5311903 5311924 5311920 5311925 +
cattttataaataatattgaag

SEQ ID NO: 98628 - DNA, 22 bp, Artificial Sequence
  Synthetic oligonucleotide; TTT chr11 5311908 5311929 5311925 5311930 +
tataaataatattgaagtaatt

SEQ ID NO: 98629 - DNA, 22 bp, Artificial Sequence
  Synthetic oligonucleotide; TTT chr11 5311909 5311930 5311926 5311931 +
ataaataatattgaagtaattt

SEQ ID NO: 98630 - DNA, 22 bp, Artificial Sequence
  Synthetic oligonucleotide; TTA chr11 5311910 5311931 5311927 5311932 +
taaataatattgaagtaatttt

SEQ ID NO: 98631 - DNA, 22 bp, Artificial Sequence
  Synthetic oligonucleotide; TTG chr11 5311922 5311943 5311939 5311944 +
aagtaattttaaaacatcaatg

SEQ ID NO: 98632 - DNA, 22 bp, Artificial Sequence
  Synthetic oligonucleotide; TTT chr11 5311931 5311952 5311948 5311953 +
taaaacatcaatgaattatgca

SEQ ID NO: 98633 - DNA, 22 bp, Artificial Sequence
  Synthetic oligonucleotide; TTT chr11 5311932 5311953 5311949 5311954 +
aaaacatcaatgaattatgcag

SEQ ID NO: 98634 - DNA, 22 bp, Artificial Sequence
  Synthetic oligonucleotide; TTA chr11 5311933 5311954 5311950 5311955 +
aaacatcaatgaattatgcagc

SEQ ID NO: 98635 - DNA, 22 bp, Artificial Sequence
  Synthetic oligonucleotide; TTA chr11 5311949 5311970 5311966 5311971 +
tgcagcttctttcagtagcttt

SEQ ID NO: 98636 - DNA, 22 bp, Artificial Sequence
  Synthetic oligonucleotide; CTT chr11 5311957 5311978 5311974 5311979 +
ctttcagtagctttccatgact

SEQ ID NO: 98637 - DNA, 22 bp, Artificial Sequence
  Synthetic oligonucleotide; TTC chr11 5311958 5311979 5311975 5311980 +
tttcagtagctttccatgactc

SEQ ID NO: 98638 - DNA, 22 bp, Artificial Sequence
  Synthetic oligonucleotide; CTT chr11 5311960 5311981 5311977 5311982 +
tcagtagctttccatgactccg

SEQ ID NO: 98639 - DNA, 22 bp, Artificial Sequence
  Synthetic oligonucleotide; TTT chr11 5311961 5311982 5311978 5311983 +
cagtagctttccatgactccga

SEQ ID NO: 98640 - DNA, 22 bp, Artificial Sequence
  Synthetic oligonucleotide; TTC chr11 5311962 5311983 5311979 5311984 +
agtagctttccatgactccgag

SEQ ID NO: 98641 - DNA, 22 bp, Artificial Sequence
  Synthetic oligonucleotide; CTT chr11 5311970 5311991 5311987 5311992 +
tccatgactccgagtagagact

SEQ ID NO: 98642 - DNA, 22 bp, Artificial Sequence
  Synthetic oligonucleotide; TTT chr11 5311971 5311992 5311988 5311993 +
ccatgactccgagtagagactc

SEQ ID NO: 98643 - DNA, 22 bp, Artificial Sequence
  Synthetic oligonucleotide; TTC chr11 5311972 5311993 5311989 5311994 +
catgactccgagtagagactca

SEQ ID NO: 98644 - DNA, 22 bp, Artificial Sequence
  Synthetic oligonucleotide; CTC chr11 5311980 5312001 5311997 5312002 +
cgagtagagactcaaactctta

SEQ ID NO: 98645 - DNA, 22 bp, Artificial Sequence
  Synthetic oligonucleotide; CTC chr11 5311993 5312014 5312010 5312015 +
aaactcttatgatgaccaataa

SEQ ID NO: 98646 - DNA, 22 bp, Artificial Sequence
  Synthetic oligonucleotide; CTC chr11 5311999 5312020 5312016 5312021 +
ttatgatgaccaataaggccat

SEQ ID NO: 98647 - DNA, 22 bp, Artificial Sequence
  Synthetic oligonucleotide; CTT chr11 5312001 5312022 5312018 5312023 +
atgatgaccaataaggccattc

SEQ ID NO: 98648 - DNA, 22 bp, Artificial Sequence
  Synthetic oligonucleotide; TTA chr11 5312002 5312023 5312019 5312024 +
tgatgaccaataaggccattcc

SEQ ID NO: 98649 - DNA, 22 bp, Artificial Sequence
  Synthetic oligonucleotide; TTC chr11 5312023 5312044 5312040 5312045 +
cttccctcttcagcctcttctc

SEQ ID NO: 98650 - DNA, 22 bp, Artificial Sequence
  Synthetic oligonucleotide; CTT chr11 5312026 5312047 5312043 5312048 +
ccctcttcagcctcttctcaaa

SEQ ID NO: 98651 - DNA, 22 bp, Artificial Sequence
  Synthetic oligonucleotide; TTC chr11 5312027 5312048 5312044 5312049 +
cctcttcagcctcttctcaaag

SEQ ID NO: 98652 - DNA, 22 bp, Artificial Sequence
  Synthetic oligonucleotide; CTC chr11 5312031 5312052 5312048 5312053 +
ttcagcctcttctcaaagcaaa

SEQ ID NO: 98653 - DNA, 22 bp, Artificial Sequence
  Synthetic oligonucleotide; CTT chr11 5312033 5312054 5312050 5312055 +
cagcctcttctcaaagcaaaca

SEQ ID NO: 98654 - DNA, 22 bp, Artificial Sequence
  Synthetic oligonucleotide; TTC chr11 5312034 5312055 5312051 5312056 +
agcctcttctcaaagcaaacac

SEQ ID NO: 98655 - DNA, 22 bp, Artificial Sequence
  Synthetic oligonucleotide; CTC chr11 5312040 5312061 5312057 5312062 +
ttctcaaagcaaacaccctctt

SEQ ID NO: 98656 - DNA, 22 bp, Artificial Sequence
  Synthetic oligonucleotide; CTT chr11 5312042 5312063 5312059 5312064 +
ctcaaagcaaacaccctcttcc

SEQ ID NO: 98657 - DNA, 22 bp, Artificial Sequence
  Synthetic oligonucleotide; TTC chr11 5312043 5312064 5312060 5312065 +
tcaaagcaaacaccctcttcca

SEQ ID NO: 98658 - DNA, 22 bp, Artificial Sequence
  Synthetic oligonucleotide; CTC chr11 5312045 5312066 5312062 5312067 +
aaagcaaacaccctcttccagt

SEQ ID NO: 98659 - DNA, 22 bp, Artificial Sequence
  Synthetic oligonucleotide; CTC chr11 5312060 5312081 5312077 5312082 +
ttccagtagccaccttccctaa

SEQ ID NO: 98660 - DNA, 22 bp, Artificial Sequence
  Synthetic oligonucleotide; CTT chr11 5312062 5312083 5312079 5312084 +
ccagtagccaccttccctaata

SEQ ID NO: 98661 - DNA, 22 bp, Artificial Sequence
  Synthetic oligonucleotide; TTC chr11 5312063 5312084 5312080 5312085 +
cagtagccaccttccctaatat

SEQ ID NO: 98662 - DNA, 22 bp, Artificial Sequence
  Synthetic oligonucleotide; CTT chr11 5312076 5312097 5312093 5312098 +
ccctaatataaaccaacctagc

SEQ ID NO: 98663 - DNA, 22 bp, Artificial Sequence
  Synthetic oligonucleotide; TTC chr11 5312077 5312098 5312094 5312099 +
cctaatataaaccaacctagct

SEQ ID NO: 98664 - DNA, 22 bp, Artificial Sequence
  Synthetic oligonucleotide; CTA chr11 5312081 5312102 5312098 5312103 +
atataaaccaacctagctgagg

SEQ ID NO: 98665 - DNA, 22 bp, Artificial Sequence
  Synthetic oligonucleotide; CTA chr11 5312096 5312117 5312113 5312118 +
gctgaggtctccacacacactc

SEQ ID NO: 98666 - DNA, 22 bp, Artificial Sequence
  Synthetic oligonucleotide; CTG chr11 5312100 5312121 5312117 5312122 +
aggtctccacacacactccttc

SEQ ID NO: 98667 - DNA, 22 bp, Artificial Sequence
  Synthetic oligonucleotide; CTC chr11 5312107 5312128 5312124 5312129 +
cacacacactccttcagtctta

SEQ ID NO: 98668 - DNA, 22 bp, Artificial Sequence
  Synthetic oligonucleotide; CTC chr11 5312118 5312139 5312135 5312140 +
cttcagtcttagaatattcttg

SEQ ID NO: 98669 - DNA, 22 bp, Artificial Sequence
  Synthetic oligonucleotide; CTT chr11 5312121 5312142 5312138 5312143 +
cagtcttagaatattcttgtct

SEQ ID NO: 98670 - DNA, 22 bp, Artificial Sequence
  Synthetic oligonucleotide; TTC chr11 5312122 5312143 5312139 5312144 +
agtcttagaatattcttgtctg

SEQ ID NO: 98671 - DNA, 22 bp, Artificial Sequence
  Synthetic oligonucleotide; CTT chr11 5312128 5312149 5312145 5312150 +
agaatattcttgtctgtatttt

SEQ ID NO: 98672 - DNA, 22 bp, Artificial Sequence
  Synthetic oligonucleotide; TTA chr11 5312129 5312150 5312146 5312151 +
gaatattcttgtctgtattttc

SEQ ID NO: 98673 - DNA, 22 bp, Artificial Sequence
  Synthetic oligonucleotide; TTC chr11 5312137 5312158 5312154 5312159 +
ttgtctgtattttcaccagtta

SEQ ID NO: 98674 - DNA, 22 bp, Artificial Sequence
  Synthetic oligonucleotide; CTT chr11 5312139 5312160 5312156 5312161 +
gtctgtattttcaccagttagt

SEQ ID NO: 98675 - DNA, 22 bp, Artificial Sequence
  Synthetic oligonucleotide; TTG chr11 5312140 5312161 5312157 5312162 +
tctgtattttcaccagttagtt

SEQ ID NO: 98676 - DNA, 22 bp, Artificial Sequence
  Synthetic oligonucleotide; CTG chr11 5312144 5312165 5312161 5312166 +
tattttcaccagttagtttcta

SEQ ID NO: 98677 - DNA, 22 bp, Artificial Sequence
  Synthetic oligonucleotide; TTT chr11 5312149 5312170 5312166 5312171 +
tcaccagttagtttctaatcca

SEQ ID NO: 98678 - DNA, 22 bp, Artificial Sequence
  Synthetic oligonucleotide; TTT chr11 5312150 5312171 5312167 5312172 +
caccagttagtttctaatccat

SEQ ID NO: 98679 - DNA, 22 bp, Artificial Sequence
  Synthetic oligonucleotide; TTC chr11 5312151 5312172 5312168 5312173 +
accagttagtttctaatccatt

SEQ ID NO: 98680 - DNA, 22 bp, Artificial Sequence
  Synthetic oligonucleotide; TTA chr11 5312159 5312180 5312176 5312181 +
gtttctaatccattttcaggtc

SEQ ID NO: 98681 - DNA, 22 bp, Artificial Sequence
  Synthetic oligonucleotide; TTT chr11 5312163 5312184 5312180 5312185 +
ctaatccattttcaggtctcag

SEQ ID NO: 98682 - DNA, 22 bp, Artificial Sequence
  Synthetic oligonucleotide; TTC chr11 5312164 5312185 5312181 5312186 +
taatccattttcaggtctcagc

SEQ ID NO: 98683 - DNA, 22 bp, Artificial Sequence
  Synthetic oligonucleotide; CTA chr11 5312166 5312187 5312183 5312188 +
atccattttcaggtctcagctg

SEQ ID NO: 98684 - DNA, 22 bp, Artificial Sequence
  Synthetic oligonucleotide; TTT chr11 5312174 5312195 5312191 5312196 +
tcaggtctcagctgaagggaca

SEQ ID NO: 98685 - DNA, 22 bp, Artificial Sequence
  Synthetic oligonucleotide; TTT chr11 5312175 5312196 5312192 5312197 +
caggtctcagctgaagggacac

SEQ ID NO: 98686 - DNA, 22 bp, Artificial Sequence
  Synthetic oligonucleotide; TTC chr11 5312176 5312197 5312193 5312198 +
aggtctcagctgaagggacact

SEQ ID NO: 98687 - DNA, 22 bp, Artificial Sequence
  Synthetic oligonucleotide; CTC chr11 5312183 5312204 5312200 5312205 +
agctgaagggacactttctcag

SEQ ID NO: 98688 - DNA, 22 bp, Artificial Sequence
  Synthetic oligonucleotide; CTG chr11 5312188 5312209 5312205 5312210 +
aagggacactttctcagggaat

SEQ ID NO: 98689 - DNA, 22 bp, Artificial Sequence
  Synthetic oligonucleotide; CTT chr11 5312199 5312220 5312216 5312221 +
tctcagggaatcttacccttat

SEQ ID NO: 98690 - DNA, 22 bp, Artificial Sequence
  Synthetic oligonucleotide; TTT chr11 5312200 5312221 5312217 5312222 +
ctcagggaatcttacccttatt

SEQ ID NO: 98691 - DNA, 22 bp, Artificial Sequence
  Synthetic oligonucleotide; TTC chr11 5312201 5312222 5312218 5312223 +
tcagggaatcttacccttattt

SEQ ID NO: 98692 - DNA, 22 bp, Artificial Sequence
  Synthetic oligonucleotide; CTC chr11 5312203 5312224 5312220 5312225 +
agggaatcttacccttatttca

SEQ ID NO: 98693 - DNA, 22 bp, Artificial Sequence
  Synthetic oligonucleotide; CTT chr11 5312213 5312234 5312230 5312235 +
acccttatttcaagccataacc

SEQ ID NO: 98694 - DNA, 22 bp, Artificial Sequence
  Synthetic oligonucleotide; TTA chr11 5312214 5312235 5312231 5312236 +
cccttatttcaagccataacct

SEQ ID NO: 98695 - DNA, 22 bp, Artificial Sequence
  Synthetic oligonucleotide; CTT chr11 5312219 5312240 5312236 5312241 +
atttcaagccataacctcaagc

SEQ ID NO: 98696 - DNA, 22 bp, Artificial Sequence
  Synthetic oligonucleotide; TTA chr11 5312220 5312241 5312237 5312242 +
tttcaagccataacctcaagcc

SEQ ID NO: 98697 - DNA, 22 bp, Artificial Sequence
  Synthetic oligonucleotide; TTT chr11 5312223 5312244 5312240 5312245 +
caagccataacctcaagccttt

SEQ ID NO: 98698 - DNA, 22 bp, Artificial Sequence
  Synthetic oligonucleotide; TTC chr11 5312224 5312245 5312241 5312246 +
aagccataacctcaagcctttt

SEQ ID NO: 98699 - DNA, 22 bp, Artificial Sequence
  Synthetic oligonucleotide; CTC chr11 5312237 5312258 5312254 5312259 +
aagccttttttgagacccacac

SEQ ID NO: 98700 - DNA, 22 bp, Artificial Sequence
  Synthetic oligonucleotide; CTT chr11 5312244 5312265 5312261 5312266 +
ttttgagacccacactctccat

SEQ ID NO: 98701 - DNA, 22 bp, Artificial Sequence
  Synthetic oligonucleotide; TTT chr11 5312245 5312266 5312262 5312267 +
tttgagacccacactctccatt

SEQ ID NO: 98702 - DNA, 22 bp, Artificial Sequence
  Synthetic oligonucleotide; TTT chr11 5312246 5312267 5312263 5312268 +
ttgagacccacactctccattc

SEQ ID NO: 98703 - DNA, 22 bp, Artificial Sequence
  Synthetic oligonucleotide; TTT chr11 5312247 5312268 5312264 5312269 +
tgagacccacactctccattca

SEQ ID NO: 98704 - DNA, 22 bp, Artificial Sequence
  Synthetic oligonucleotide; TTT chr11 5312248 5312269 5312265 5312270 +
gagacccacactctccattcag

SEQ ID NO: 98705 - DNA, 22 bp, Artificial Sequence
  Synthetic oligonucleotide; TTG chr11 5312249 5312270 5312266 5312271 +
agacccacactctccattcagt

SEQ ID NO: 98706 - DNA, 22 bp, Artificial Sequence
  Synthetic oligonucleotide; CTC chr11 5312261 5312282 5312278 5312283 +
tccattcagtgtcttctttctg

SEQ ID NO: 98707 - DNA, 22 bp, Artificial Sequence
  Synthetic oligonucleotide; CTC chr11 5312263 5312284 5312280 5312285 +
cattcagtgtcttctttctgct

SEQ ID NO: 98708 - DNA, 22 bp, Artificial Sequence
  Synthetic oligonucleotide; TTC chr11 5312268 5312289 5312285 5312290 +
agtgtcttctttctgctttatg

SEQ ID NO: 98709 - DNA, 22 bp, Artificial Sequence
  Synthetic oligonucleotide; CTT chr11 5312276 5312297 5312293 5312298 +
ctttctgctttatgattaatca

SEQ ID NO: 98710 - DNA, 22 bp, Artificial Sequence
  Synthetic oligonucleotide; TTC chr11 5312277 5312298 5312294 5312299 +
tttctgctttatgattaatcac

SEQ ID NO: 98711 - DNA, 22 bp, Artificial Sequence
  Synthetic oligonucleotide; CTT chr11 5312279 5312300 5312296 5312301 +
tctgctttatgattaatcacag

SEQ ID NO: 98712 - DNA, 22 bp, Artificial Sequence
  Synthetic oligonucleotide; TTT chr11 5312280 5312301 5312297 5312302 +
ctgctttatgattaatcacagc

SEQ ID NO: 98713 - DNA, 22 bp, Artificial Sequence
  Synthetic oligonucleotide; TTC chr11 5312281 5312302 5312298 5312303 +
tgctttatgattaatcacagca

SEQ ID NO: 98714 - DNA, 22 bp, Artificial Sequence
  Synthetic oligonucleotide; CTG chr11 5312283 5312304 5312300 5312305 +
ctttatgattaatcacagcact

SEQ ID NO: 98715 - DNA, 22 bp, Artificial Sequence
  Synthetic oligonucleotide; CTT chr11 5312286 5312307 5312303 5312308 +
tatgattaatcacagcacttgt

SEQ ID NO: 98716 - DNA, 22 bp, Artificial Sequence
  Synthetic oligonucleotide; TTT chr11 5312287 5312308 5312304 5312309 +
atgattaatcacagcacttgtt

SEQ ID NO: 98717 - DNA, 22 bp, Artificial Sequence
  Synthetic oligonucleotide; TTA chr11 5312288 5312309 5312305 5312310 +
tgattaatcacagcacttgttt

SEQ ID NO: 98718 - DNA, 22 bp, Artificial Sequence
  Synthetic oligonucleotide; TTA chr11 5312294 5312315 5312311 5312316 +
atcacagcacttgttttaaatt

SEQ ID NO: 98719 - DNA, 22 bp, Artificial Sequence
  Synthetic oligonucleotide; CTT chr11 5312306 5312327 5312323 5312328 +
gttttaaatttggatttctttt

SEQ ID NO: 98720 - DNA, 22 bp, Artificial Sequence
  Synthetic oligonucleotide; TTG chr11 5312307 5312328 5312324 5312329 +
ttttaaatttggatttctttta

SEQ ID NO: 98721 - DNA, 22 bp, Artificial Sequence
  Synthetic oligonucleotide; TTT chr11 5312310 5312331 5312327 5312332 +
taaatttggatttcttttattc

SEQ ID NO: 98722 - DNA, 22 bp, Artificial Sequence
  Synthetic oligonucleotide; TTT chr11 5312311 5312332 5312328 5312333 +
aaatttggatttcttttattct

SEQ ID NO: 98723 - DNA, 22 bp, Artificial Sequence
  Synthetic oligonucleotide; TTA chr11 5312312 5312333 5312329 5312334 +
aatttggatttcttttattctt

SEQ ID NO: 98724 - DNA, 22 bp, Artificial Sequence
  Synthetic oligonucleotide; TTT chr11 5312317 5312338 5312334 5312339 +
ggatttcttttattctttgagt

SEQ ID NO: 98725 - DNA, 22 bp, Artificial Sequence
  Synthetic oligonucleotide; TTG chr11 5312318 5312339 5312335 5312340 +
gatttcttttattctttgagtc

SEQ ID NO: 98726 - DNA, 22 bp, Artificial Sequence
  Synthetic oligonucleotide; TTT chr11 5312323 5312344 5312340 5312345 +
cttttattctttgagtccccac

SEQ ID NO: 98727 - DNA, 22 bp, Artificial Sequence
  Synthetic oligonucleotide; TTC chr11 5312324 5312345 5312341 5312346 +
ttttattctttgagtccccact

SEQ ID NO: 98728 - DNA, 22 bp, Artificial Sequence
  Synthetic oligonucleotide; CTT chr11 5312326 5312347 5312343 5312348 +
ttattctttgagtccccactta

SEQ ID NO: 98729 - DNA, 22 bp, Artificial Sequence
  Synthetic oligonucleotide; TTT chr11 5312327 5312348 5312344 5312349 +
tattctttgagtccccacttat

SEQ ID NO: 98730 - DNA, 22 bp, Artificial Sequence
  Synthetic oligonucleotide; TTT chr11 5312328 5312349 5312345 5312350 +
attctttgagtccccacttatt

SEQ ID NO: 98731 - DNA, 22 bp, Artificial Sequence
  Synthetic oligonucleotide; TTA chr11 5312329 5312350 5312346 5312351 +
ttctttgagtccccacttattt

SEQ ID NO: 98732 - DNA, 22 bp, Artificial Sequence
  Synthetic oligonucleotide; TTC chr11 5312332 5312353 5312349 5312354 +
tttgagtccccacttatttgaa

SEQ ID NO: 98733 - DNA, 22 bp, Artificial Sequence
  Synthetic oligonucleotide; CTT chr11 5312334 5312355 5312351 5312356 +
tgagtccccacttatttgaaga

SEQ ID NO: 98734 - DNA, 22 bp, Artificial Sequence
  Synthetic oligonucleotide; TTT chr11 5312335 5312356 5312352 5312357 +
gagtccccacttatttgaagac

SEQ ID NO: 98735 - DNA, 22 bp, Artificial Sequence
  Synthetic oligonucleotide; TTG chr11 5312336 5312357 5312353 5312358 +
agtccccacttatttgaagact

SEQ ID NO: 98736 - DNA, 22 bp, Artificial Sequence
  Synthetic oligonucleotide; CTT chr11 5312347 5312368 5312364 5312369 +
atttgaagactttaagaagaaa

SEQ ID NO: 98737 - DNA, 22 bp, Artificial Sequence
  Synthetic oligonucleotide; TTA chr11 5312348 5312369 5312365 5312370 +
tttgaagactttaagaagaaaa

SEQ ID NO: 98738 - DNA, 22 bp, Artificial Sequence
  Synthetic oligonucleotide; TTT chr11 5312351 5312372 5312368 5312373 +
gaagactttaagaagaaaagtt

SEQ ID NO: 98739 - DNA, 22 bp, Artificial Sequence
  Synthetic oligonucleotide; TTG chr11 5312352 5312373 5312369 5312374 +
aagactttaagaagaaaagttt

SEQ ID NO: 98740 - DNA, 22 bp, Artificial Sequence
  Synthetic oligonucleotide; CTT chr11 5312359 5312380 5312376 5312381 +
taagaagaaaagtttgtctatt

SEQ ID NO: 98741 - DNA, 22 bp, Artificial Sequence
  Synthetic oligonucleotide; TTT chr11 5312360 5312381 5312377 5312382 +
aagaagaaaagtttgtctattt

SEQ ID NO: 98742 - DNA, 22 bp, Artificial Sequence
  Synthetic oligonucleotide; TTA chr11 5312361 5312382 5312378 5312383 +
agaagaaaagtttgtctatttg

SEQ ID NO: 98743 - DNA, 22 bp, Artificial Sequence
  Synthetic oligonucleotide; TTT chr11 5312374 5312395 5312391 5312396 +
gtctatttgctctcttatatca

SEQ ID NO: 98744 - DNA, 22 bp, Artificial Sequence
  Synthetic oligonucleotide; TTG chr11 5312375 5312396 5312392 5312397 +
tctatttgctctcttatatcat

SEQ ID NO: 98745 - DNA, 22 bp, Artificial Sequence
  Synthetic oligonucleotide; CTA chr11 5312379 5312400 5312396 5312401 +
tttgctctcttatatcattttt

SEQ ID NO: 98746 - DNA, 22 bp, Artificial Sequence
  Synthetic oligonucleotide; TTT chr11 5312382 5312403 5312399 5312404 +
gctctcttatatcatttttgct

SEQ ID NO: 98747 - DNA, 22 bp, Artificial Sequence
  Synthetic oligonucleotide; TTG chr11 5312383 5312404 5312400 5312405 +
ctctcttatatcatttttgctt

SEQ ID NO: 98748 - DNA, 22 bp, Artificial Sequence
  Synthetic oligonucleotide; CTC chr11 5312386 5312407 5312403 5312408 +
tcttatatcatttttgcttagc

SEQ ID NO: 98749 - DNA, 22 bp, Artificial Sequence
  Synthetic oligonucleotide; CTC chr11 5312388 5312409 5312405 5312410 +
ttatatcatttttgcttagcaa

SEQ ID NO: 98750 - DNA, 22 bp, Artificial Sequence
  Synthetic oligonucleotide; CTT chr11 5312390 5312411 5312407 5312412 +
atatcatttttgcttagcaagg

SEQ ID NO: 98751 - DNA, 22 bp, Artificial Sequence
  Synthetic oligonucleotide; TTA chr11 5312391 5312412 5312408 5312413 +
tatcatttttgcttagcaaggt

SEQ ID NO: 98752 - DNA, 22 bp, Artificial Sequence
  Synthetic oligonucleotide; TTT chr11 5312399 5312420 5312416 5312421 +
ttgcttagcaaggtgacccata

SEQ ID NO: 98753 - DNA, 22 bp, Artificial Sequence
  Synthetic oligonucleotide; TTT chr11 5312400 5312421 5312417 5312422 +
tgcttagcaaggtgacccataa

SEQ ID NO: 98754 - DNA, 22 bp, Artificial Sequence
  Synthetic oligonucleotide; TTT chr11 5312401 5312422 5312418 5312423 +
gcttagcaaggtgacccataat

SEQ ID NO: 98755 - DNA, 22 bp, Artificial Sequence
  Synthetic oligonucleotide; TTG chr11 5312402 5312423 5312419 5312424 +
cttagcaaggtgacccataata

SEQ ID NO: 98756 - DNA, 22 bp, Artificial Sequence
  Synthetic oligonucleotide; CTT chr11 5312405 5312426 5312422 5312427 +
agcaaggtgacccataatagtg

SEQ ID NO: 98757 - DNA, 22 bp, Artificial Sequence
  Synthetic oligonucleotide; TTA chr11 5312406 5312427 5312423 5312428 +
gcaaggtgacccataatagtgc

SEQ ID NO: 98758 - DNA, 22 bp, Artificial Sequence
  Synthetic oligonucleotide; CTT chr11 5312432 5312453 5312449 5312454 +
aaaaaattaaccaaaggaatga

SEQ ID NO: 98759 - DNA, 22 bp, Artificial Sequence
  Synthetic oligonucleotide; TTA chr11 5312433 5312454 5312450 5312455 +
aaaaattaaccaaaggaatgat

SEQ ID NO: 98760 - DNA, 22 bp, Artificial Sequence
  Synthetic oligonucleotide; TTA chr11 5312441 5312462 5312458 5312463 +
accaaaggaatgattaaatatt

SEQ ID NO: 98761 - DNA, 22 bp, Artificial Sequence
  Synthetic oligonucleotide; TTA chr11 5312457 5312478 5312474 5312479 +
aatattagtggtgtttccacga

SEQ ID NO: 98762 - DNA, 22 bp, Artificial Sequence
  Synthetic oligonucleotide; TTA chr11 5312464 5312485 5312481 5312486 +
gtggtgtttccacgaaaatagg

SEQ ID NO: 98763 - DNA, 22 bp, Artificial Sequence
  Synthetic oligonucleotide; TTT chr11 5312473 5312494 5312490 5312495 +
ccacgaaaataggcacatgagg

SEQ ID NO: 98764 - DNA, 22 bp, Artificial Sequence
  Synthetic oligonucleotide; TTC chr11 5312474 5312495 5312491 5312496 +
cacgaaaataggcacatgagga

SEQ ID NO: 98765 - DNA, 22 bp, Artificial Sequence
  Synthetic oligonucleotide; TTT chr11 5312503 5312524 5312520 5312525 +
aaagtcctactctcctccaaac

SEQ ID NO: 98766 - DNA, 22 bp, Artificial Sequence
  Synthetic oligonucleotide; TTA chr11 5312504 5312525 5312521 5312526 +
aagtcctactctcctccaaaca

SEQ ID NO: 98767 - DNA, 22 bp, Artificial Sequence
  Synthetic oligonucleotide; CTA chr11 5312512 5312533 5312529 5312534 +
ctctcctccaaacacaaaccct

SEQ ID NO: 98768 - DNA, 22 bp, Artificial Sequence
  Synthetic oligonucleotide; CTC chr11 5312515 5312536 5312532 5312537 +
tcctccaaacacaaaccctttt

SEQ ID NO: 98769 - DNA, 22 bp, Artificial Sequence
  Synthetic oligonucleotide; CTC chr11 5312517 5312538 5312534 5312539 +
ctccaaacacaaacccttttaa

SEQ ID NO: 98770 - DNA, 22 bp, Artificial Sequence
  Synthetic oligonucleotide; CTC chr11 5312520 5312541 5312537 5312542 +
caaacacaaacccttttaaaca

SEQ ID NO: 98771 - DNA, 22 bp, Artificial Sequence
  Synthetic oligonucleotide; CTT chr11 5312535 5312556 5312552 5312557 +
ttaaacataggatatgtacaaa

SEQ ID NO: 98772 - DNA, 22 bp, Artificial Sequence
  Synthetic oligonucleotide; TTT chr11 5312536 5312557 5312553 5312558 +
taaacataggatatgtacaaat

SEQ ID NO: 98773 - DNA, 22 bp, Artificial Sequence
  Synthetic oligonucleotide; TTT chr11 5312537 5312558 5312554 5312559 +
aaacataggatatgtacaaata

SEQ ID NO: 98774 - DNA, 22 bp, Artificial Sequence
  Synthetic oligonucleotide; TTA chr11 5312538 5312559 5312555 5312560 +
aacataggatatgtacaaataa

SEQ ID NO: 98775 - DNA, 22 bp, Artificial Sequence
  Synthetic oligonucleotide; TTA chr11 5312564 5312585 5312581 5312586 +
ggcaaaagtataagaaaaagat

SEQ ID NO: 98776 - DNA, 22 bp, Artificial Sequence
  Synthetic oligonucleotide; CTG chr11 5312599 5312620 5312616 5312621 +
aagtcagcaagggctttgatag

SEQ ID NO: 98777 - DNA, 22 bp, Artificial Sequence
  Synthetic oligonucleotide; CTT chr11 5312615 5312636 5312632 5312637 +
tgatagtatggctccaatactt

SEQ ID NO: 98778 - DNA, 22 bp, Artificial Sequence
  Synthetic oligonucleotide; TTT chr11 5312616 5312637 5312633 5312638 +
gatagtatggctccaatacttc

SEQ ID NO: 98779 - DNA, 22 bp, Artificial Sequence
  Synthetic oligonucleotide; TTG chr11 5312617 5312638 5312634 5312639 +
atagtatggctccaatacttca

SEQ ID NO: 98780 - DNA, 22 bp, Artificial Sequence
  Synthetic oligonucleotide; CTC chr11 5312629 5312650 5312646 5312651 +
caatacttcagtagataaagta

SEQ ID NO: 98781 - DNA, 22 bp, Artificial Sequence
  Synthetic oligonucleotide; CTT chr11 5312637 5312658 5312654 5312659 +
cagtagataaagtaaataataa

SEQ ID NO: 98782 - DNA, 22 bp, Artificial Sequence
  Synthetic oligonucleotide; TTC chr11 5312638 5312659 5312655 5312660 +
agtagataaagtaaataataaa

SEQ ID NO: 98783 - DNA, 22 bp, Artificial Sequence
  Synthetic oligonucleotide; CTT chr11 5312679 5312700 5312696 5312701 +
ttaaattgtgtatatagcaaga

SEQ ID NO: 98784 - DNA, 22 bp, Artificial Sequence
  Synthetic oligonucleotide; TTT chr11 5312680 5312701 5312697 5312702 +
taaattgtgtatatagcaagac

SEQ ID NO: 98785 - DNA, 22 bp, Artificial Sequence
  Synthetic oligonucleotide; TTT chr11 5312681 5312702 5312698 5312703 +
aaattgtgtatatagcaagaca

SEQ ID NO: 98786 - DNA, 22 bp, Artificial Sequence
  Synthetic oligonucleotide; TTA chr11 5312682 5312703 5312699 5312704 +
aattgtgtatatagcaagacaa

SEQ ID NO: 98787 - DNA, 22 bp, Artificial Sequence
  Synthetic oligonucleotide; TTG chr11 5312687 5312708 5312704 5312709 +
tgtatatagcaagacaaacaga

SEQ ID NO: 98788 - DNA, 22 bp, Artificial Sequence
  Synthetic oligonucleotide; CTG chr11 5312715 5312736 5312732 5312737 +
ggaaaatacgtacactaaaaat

SEQ ID NO: 98789 - DNA, 22 bp, Artificial Sequence
  Synthetic oligonucleotide; CTA chr11 5312732 5312753 5312749 5312754 +
aaaataaaacactagagataat

SEQ ID NO: 98790 - DNA, 22 bp, Artificial Sequence
  Synthetic oligonucleotide; CTA chr11 5312746 5312767 5312763 5312768 +
gagataatacataataaacttc

SEQ ID NO: 98791 - DNA, 22 bp, Artificial Sequence
  Synthetic oligonucleotide; CTT chr11 5312767 5312788 5312784 5312789 +
cttaaaatcaattataaaagga

SEQ ID NO: 98792 - DNA, 22 bp, Artificial Sequence
  Synthetic oligonucleotide; TTC chr11 5312768 5312789 5312785 5312790 +
ttaaaatcaattataaaaggat

SEQ ID NO: 98793 - DNA, 22 bp, Artificial Sequence
  Synthetic oligonucleotide; CTT chr11 5312770 5312791 5312787 5312792 +
aaaatcaattataaaaggatga

SEQ ID NO: 98794 - DNA, 22 bp, Artificial Sequence
  Synthetic oligonucleotide; TTA chr11 5312771 5312792 5312788 5312793 +
aaatcaattataaaaggatgaa

SEQ ID NO: 98795 - DNA, 22 bp, Artificial Sequence
  Synthetic oligonucleotide; TTA chr11 5312781 5312802 5312798 5312803 +
taaaaggatgaaaattagcaaa

SEQ ID NO: 98796 - DNA, 22 bp, Artificial Sequence
  Synthetic oligonucleotide; TTA chr11 5312798 5312819 5312815 5312820 +
gcaaaatatatgatcaaataaa

SEQ ID NO: 98797 - DNA, 22 bp, Artificial Sequence
  Synthetic oligonucleotide; CTA chr11 5312825 5312846 5312842 5312847 +
gtgagatttccaagttgctgca

SEQ ID NO: 98798 - DNA, 22 bp, Artificial Sequence
  Synthetic oligonucleotide; TTT chr11 5312834 5312855 5312851 5312856 +
ccaagttgctgcaacaaattga

SEQ ID NO: 98799 - DNA, 22 bp, Artificial Sequence
  Synthetic oligonucleotide; TTC chr11 5312835 5312856 5312852 5312857 +
caagttgctgcaacaaattgag

SEQ ID NO: 98800 - DNA, 22 bp, Artificial Sequence
  Synthetic oligonucleotide; TTG chr11 5312842 5312863 5312859 5312864 +
ctgcaacaaattgagatcactt

SEQ ID NO: 98801 - DNA, 22 bp, Artificial Sequence
  Synthetic oligonucleotide; CTG chr11 5312845 5312866 5312862 5312867 +
caacaaattgagatcacttgtg

SEQ ID NO: 98802 - DNA, 22 bp, Artificial Sequence
  Synthetic oligonucleotide; TTG chr11 5312855 5312876 5312872 5312877 +
agatcacttgtgatttattaga

SEQ ID NO: 98803 - DNA, 22 bp, Artificial Sequence
  Synthetic oligonucleotide; CTT chr11 5312864 5312885 5312881 5312886 +
gtgatttattagaataaaaaat

SEQ ID NO: 98804 - DNA, 22 bp, Artificial Sequence
  Synthetic oligonucleotide; TTG chr11 5312865 5312886 5312882 5312887 +
tgatttattagaataaaaaata

SEQ ID NO: 98805 - DNA, 22 bp, Artificial Sequence
  Synthetic oligonucleotide; TTT chr11 5312871 5312892 5312888 5312893 +
attagaataaaaaataaattga

SEQ ID NO: 98806 - DNA, 22 bp, Artificial Sequence
  Synthetic oligonucleotide; TTA chr11 5312872 5312893 5312889 5312894 +
ttagaataaaaaataaattgaa

SEQ ID NO: 98807 - DNA, 22 bp, Artificial Sequence
  Synthetic oligonucleotide; TTA chr11 5312875 5312896 5312892 5312897 +
gaataaaaaataaattgaatat

SEQ ID NO: 98808 - DNA, 22 bp, Artificial Sequence
  Synthetic oligonucleotide; TTG chr11 5312892 5312913 5312909 5312914 +
aatatacaaaaaggaaaatatc

SEQ ID NO: 98809 - DNA, 22 bp, Artificial Sequence
  Synthetic oligonucleotide; TTA chr11 5312920 5312941 5312937 5312942 +
tatttcatctattggacatatc

SEQ ID NO: 98810 - DNA, 22 bp, Artificial Sequence
  Synthetic oligonucleotide; TTT chr11 5312925 5312946 5312942 5312947 +
catctattggacatatcagaaa

SEQ ID NO: 98811 - DNA, 22 bp, Artificial Sequence
  Synthetic oligonucleotide; TTC chr11 5312926 5312947 5312943 5312948 +
atctattggacatatcagaaat

SEQ ID NO: 98812 - DNA, 22 bp, Artificial Sequence
  Synthetic oligonucleotide; CTA chr11 5312931 5312952 5312948 5312953 +
ttggacatatcagaaatgtttc

SEQ ID NO: 98813 - DNA, 22 bp, Artificial Sequence
  Synthetic oligonucleotide; TTG chr11 5312934 5312955 5312951 5312956 +
gacatatcagaaatgtttctat

SEQ ID NO: 98814 - DNA, 22 bp, Artificial Sequence
  Synthetic oligonucleotide; TTT chr11 5312952 5312973 5312969 5312974 +
ctatccagcatttagagagaac

SEQ ID NO: 98815 - DNA, 22 bp, Artificial Sequence
  Synthetic oligonucleotide; TTC chr11 5312953 5312974 5312970 5312975 +
tatccagcatttagagagaaca

SEQ ID NO: 98816 - DNA, 22 bp, Artificial Sequence
  Synthetic oligonucleotide; CTA chr11 5312955 5312976 5312972 5312977 +
tccagcatttagagagaacaca

SEQ ID NO: 98817 - DNA, 22 bp, Artificial Sequence
  Synthetic oligonucleotide; TTT chr11 5312965 5312986 5312982 5312987 +
agagagaacacaagatcaaaag

SEQ ID NO: 98818 - DNA, 22 bp, Artificial Sequence
  Synthetic oligonucleotide; TTA chr11 5312966 5312987 5312983 5312988 +
gagagaacacaagatcaaaaga

SEQ ID NO: 98819 - DNA, 22 bp, Artificial Sequence
  Synthetic oligonucleotide; TTA chr11 5312997 5313018 5313014 5313019 +
actcatgaaatgagcaactagg

SEQ ID NO: 98820 - DNA, 22 bp, Artificial Sequence
  Synthetic oligonucleotide; CTC chr11 5313001 5313022 5313018 5313023 +
atgaaatgagcaactaggaaat

SEQ ID NO: 98821 - DNA, 22 bp, Artificial Sequence
  Synthetic oligonucleotide; CTA chr11 5313017 5313038 5313034 5313039 +
ggaaatttatgaatttagagag

SEQ ID NO: 98822 - DNA, 22 bp, Artificial Sequence
  Synthetic oligonucleotide; TTT chr11 5313025 5313046 5313042 5313047 +
atgaatttagagagtctctact

SEQ ID NO: 98823 - DNA, 22 bp, Artificial Sequence
  Synthetic oligonucleotide; TTA chr11 5313026 5313047 5313043 5313048 +
tgaatttagagagtctctactg

SEQ ID NO: 98824 - DNA, 22 bp, Artificial Sequence
  Synthetic oligonucleotide; TTT chr11 5313033 5313054 5313050 5313055 +
agagagtctctactgtaaaact

SEQ ID NO: 98825 - DNA, 22 bp, Artificial Sequence
  Synthetic oligonucleotide; TTA chr11 5313034 5313055 5313051 5313056 +
gagagtctctactgtaaaactt

SEQ ID NO: 98826 - DNA, 22 bp, Artificial Sequence
  Synthetic oligonucleotide; CTC chr11 5313043 5313064 5313060 5313065 +
tactgtaaaactttatagatga

SEQ ID NO: 98827 - DNA, 22 bp, Artificial Sequence
  Synthetic oligonucleotide; CTA chr11 5313045 5313066 5313062 5313067 +
ctgtaaaactttatagatgaca

SEQ ID NO: 98828 - DNA, 22 bp, Artificial Sequence
  Synthetic oligonucleotide; CTG chr11 5313048 5313069 5313065 5313070 +
taaaactttatagatgacattg

SEQ ID NO: 98829 - DNA, 22 bp, Artificial Sequence
  Synthetic oligonucleotide; CTT chr11 5313056 5313077 5313073 5313078 +
tatagatgacattgtatcattt

SEQ ID NO: 98830 - DNA, 22 bp, Artificial Sequence
  Synthetic oligonucleotide; TTT chr11 5313057 5313078 5313074 5313079 +
atagatgacattgtatcatttt

SEQ ID NO: 98831 - DNA, 22 bp, Artificial Sequence
  Synthetic oligonucleotide; TTA chr11 5313058 5313079 5313075 5313080 +
tagatgacattgtatcattttg

SEQ ID NO: 98832 - DNA, 22 bp, Artificial Sequence
  Synthetic oligonucleotide; TTG chr11 5313070 5313091 5313087 5313092 +
tatcattttgaaagaaaactca

SEQ ID NO: 98833 - DNA, 22 bp, Artificial Sequence
  Synthetic oligonucleotide; TTT chr11 5313078 5313099 5313095 5313100 +
tgaaagaaaactcaagacacca

SEQ ID NO: 98834 - DNA, 22 bp, Artificial Sequence
  Synthetic oligonucleotide; TTT chr11 5313079 5313100 5313096 5313101 +
gaaagaaaactcaagacaccaa

SEQ ID NO: 98835 - DNA, 22 bp, Artificial Sequence
  Synthetic oligonucleotide; TTG chr11 5313080 5313101 5313097 5313102 +
aaagaaaactcaagacaccaaa

SEQ ID NO: 98836 - DNA, 22 bp, Artificial Sequence
  Synthetic oligonucleotide; CTC chr11 5313091 5313112 5313108 5313113 +
aagacaccaaaagcaactgcaa

SEQ ID NO: 98837 - DNA, 22 bp, Artificial Sequence
  Synthetic oligonucleotide; CTG chr11 5313110 5313131 5313127 5313132 +
caaaaaaaaattgacaaatggg

SEQ ID NO: 98838 - DNA, 22 bp, Artificial Sequence
  Synthetic oligonucleotide; TTG chr11 5313123 5313144 5313140 5313145 +
acaaatgggatctaattaaatt

SEQ ID NO: 98839 - DNA, 22 bp, Artificial Sequence
  Synthetic oligonucleotide; CTA chr11 5313137 5313158 5313154 5313159 +
attaaattaaagagcttctgca

SEQ ID NO: 98840 - DNA, 22 bp, Artificial Sequence
  Synthetic oligonucleotide; TTA chr11 5313141 5313162 5313158 5313163 +
aattaaagagcttctgcacagc

SEQ ID NO: 98841 - DNA, 22 bp, Artificial Sequence
  Synthetic oligonucleotide; TTA chr11 5313146 5313167 5313163 5313168 +
aagagcttctgcacagcaaaag

SEQ ID NO: 98842 - DNA, 22 bp, Artificial Sequence
  Synthetic oligonucleotide; CTT chr11 5313154 5313175 5313171 5313176 +
ctgcacagcaaaagaaactatc

SEQ ID NO: 98843 - DNA, 22 bp, Artificial Sequence
  Synthetic oligonucleotide; TTC chr11 5313155 5313176 5313172 5313177 +
tgcacagcaaaagaaactatca

SEQ ID NO: 98844 - DNA, 22 bp, Artificial Sequence
  Synthetic oligonucleotide; CTG chr11 5313157 5313178 5313174 5313179 +
cacagcaaaagaaactatcatc

SEQ ID NO: 98845 - DNA, 22 bp, Artificial Sequence
  Synthetic oligonucleotide; CTA chr11 5313174 5313195 5313191 5313196 +
tcatcagagataacagacaacc

SEQ ID NO: 98846 - DNA, 22 bp, Artificial Sequence
  Synthetic oligonucleotide; CTA chr11 5313198 5313219 5313215 5313220 +
cagaatagaagaaaatttttgc

SEQ ID NO: 98847 - DNA, 22 bp, Artificial Sequence
  Synthetic oligonucleotide; TTT chr11 5313216 5313237 5313233 5313238 +
ttgcaatttctccatctgacaa

SEQ ID NO: 98848 - DNA, 22 bp, Artificial Sequence
  Synthetic oligonucleotide; TTT chr11 5313217 5313238 5313234 5313239 +
tgcaatttctccatctgacaaa

SEQ ID NO: 98849 - DNA, 22 bp, Artificial Sequence
  Synthetic oligonucleotide; TTT chr11 5313218 5313239 5313235 5313240 +
gcaatttctccatctgacaaaa

SEQ ID NO: 98850 - DNA, 22 bp, Artificial Sequence
  Synthetic oligonucleotide; TTG chr11 5313219 5313240 5313236 5313241 +
caatttctccatctgacaaaag

SEQ ID NO: 98851 - DNA, 22 bp, Artificial Sequence
  Synthetic oligonucleotide; TTT chr11 5313225 5313246 5313242 5313247 +
ctccatctgacaaaagtctaat

SEQ ID NO: 98852 - DNA, 22 bp, Artificial Sequence
  Synthetic oligonucleotide; TTC chr11 5313226 5313247 5313243 5313248 +
tccatctgacaaaagtctaata

SEQ ID NO: 98853 - DNA, 22 bp, Artificial Sequence
  Synthetic oligonucleotide; CTC chr11 5313228 5313249 5313245 5313250 +
catctgacaaaagtctaatatc

SEQ ID NO: 98854 - DNA, 22 bp, Artificial Sequence
  Synthetic oligonucleotide; CTG chr11 5313234 5313255 5313251 5313256 +
acaaaagtctaatatctggagt

SEQ ID NO: 98855 - DNA, 22 bp, Artificial Sequence
  Synthetic oligonucleotide; CTA chr11 5313245 5313266 5313262 5313267 +
atatctggagtctatgaggaac

SEQ ID NO: 98856 - DNA, 22 bp, Artificial Sequence
  Synthetic oligonucleotide; CTG chr11 5313252 5313273 5313269 5313274 +
gagtctatgaggaactaaaaca

SEQ ID NO: 98857 - DNA, 22 bp, Artificial Sequence
  Synthetic oligonucleotide; CTA chr11 5313259 5313280 5313276 5313281 +
tgaggaactaaaacaaatttac

SEQ ID NO: 98858 - DNA, 22 bp, Artificial Sequence
  Synthetic oligonucleotide; CTA chr11 5313269 5313290 5313286 5313291 +
aaacaaatttacaagaaaaaaa

SEQ ID NO: 98859 - DNA, 22 bp, Artificial Sequence
  Synthetic oligonucleotide; TTT chr11 5313279 5313300 5313296 5313301 +
acaagaaaaaaacaaccccatt

SEQ ID NO: 98860 - DNA, 22 bp, Artificial Sequence
  Synthetic oligonucleotide; TTA chr11 5313280 5313301 5313297 5313302 +
caagaaaaaaacaaccccatta

SEQ ID NO: 98861 - DNA, 22 bp, Artificial Sequence
  Synthetic oligonucleotide; TTA chr11 5313302 5313323 5313319 5313324 +
aaaagtggggaatgacatgaat

SEQ ID NO: 98862 - DNA, 22 bp, Artificial Sequence
  Synthetic oligonucleotide; CTT chr11 5313332 5313353 5313349 5313354 +
ctctaaagaagacattcatgct

SEQ ID NO: 98863 - DNA, 22 bp, Artificial Sequence
  Synthetic oligonucleotide; TTC chr11 5313333 5313354 5313350 5313355 +
tctaaagaagacattcatgctt

SEQ ID NO: 98864 - DNA, 22 bp, Artificial Sequence
  Synthetic oligonucleotide; CTC chr11 5313335 5313356 5313352 5313357 +
taaagaagacattcatgcttct

SEQ ID NO: 98865 - DNA, 22 bp, Artificial Sequence
  Synthetic oligonucleotide; CTA chr11 5313337 5313358 5313354 5313359 +
aagaagacattcatgcttctaa

SEQ ID NO: 98866 - DNA, 22 bp, Artificial Sequence
  Synthetic oligonucleotide; TTC chr11 5313349 5313370 5313366 5313371 +
atgcttctaataaacatatgaa

SEQ ID NO: 98867 - DNA, 22 bp, Artificial Sequence
  Synthetic oligonucleotide; CTT chr11 5313355 5313376 5313372 5313377 +
ctaataaacatatgaaaaaaaa

SEQ ID NO: 98868 - DNA, 22 bp, Artificial Sequence
  Synthetic oligonucleotide; TTC chr11 5313356 5313377 5313373 5313378 +
taataaacatatgaaaaaaaaa

SEQ ID NO: 98869 - DNA, 22 bp, Artificial Sequence
  Synthetic oligonucleotide; CTA chr11 5313358 5313379 5313375 5313380 +
ataaacatatgaaaaaaaaaaa

SEQ ID NO: 98870 - DNA, 22 bp, Artificial Sequence
  Synthetic oligonucleotide; CTC chr11 5313384 5313405 5313401 5313406 +
aaccttactggtcattagaaaa

SEQ ID NO: 98871 - DNA, 22 bp, Artificial Sequence
  Synthetic oligonucleotide; CTT chr11 5313390 5313411 5313407 5313412 +
actggtcattagaaaaatgcaa

SEQ ID NO: 98872 - DNA, 22 bp, Artificial Sequence
  Synthetic oligonucleotide; TTA chr11 5313391 5313412 5313408 5313413 +
ctggtcattagaaaaatgcaaa

SEQ ID NO: 98873 - DNA, 22 bp, Artificial Sequence
  Synthetic oligonucleotide; CTG chr11 5313394 5313415 5313411 5313416 +
gtcattagaaaaatgcaaatca

SEQ ID NO: 98874 - DNA, 22 bp, Artificial Sequence
  Synthetic oligonucleotide; TTA chr11 5313401 5313422 5313418 5313423 +
gaaaaatgcaaatcaaaaccac

SEQ ID NO: 98875 - DNA, 22 bp, Artificial Sequence
  Synthetic oligonucleotide; CTC chr11 5313439 5313460 5313456 5313461 +
acaccagtcagaatggcaatta

SEQ ID NO: 98876 - DNA, 22 bp, Artificial Sequence
  Synthetic oligonucleotide; TTA chr11 5313461 5313482 5313478 5313483 +
ttaaaaagtcaagaaacaacag

SEQ ID NO: 98877 - DNA, 22 bp, Artificial Sequence
  Synthetic oligonucleotide; TTA chr11 5313464 5313485 5313481 5313486 +
aaaagtcaagaaacaacagttg

SEQ ID NO: 98878 - DNA, 22 bp, Artificial Sequence
  Synthetic oligonucleotide; TTG chr11 5313486 5313507 5313503 5313508 +
ctggcaaggttgcagagagaaa

SEQ ID NO: 98879 - DNA, 22 bp, Artificial Sequence
  Synthetic oligonucleotide; CTG chr11 5313489 5313510 5313506 5313511 +
gcaaggttgcagagagaaagga

SEQ ID NO: 98880 - DNA, 22 bp, Artificial Sequence
  Synthetic oligonucleotide; TTG chr11 5313498 5313519 5313515 5313520 +
cagagagaaaggaatggaatgc

SEQ ID NO: 98881 - DNA, 22 bp, Artificial Sequence
  Synthetic oligonucleotide; CTT chr11 5313522 5313543 5313539 5313544 +
ttacactgttaacgggagagta

SEQ ID NO: 98882 - DNA, 22 bp, Artificial Sequence
  Synthetic oligonucleotide; TTT chr11 5313523 5313544 5313540 5313545 +
tacactgttaacgggagagtaa

SEQ ID NO: 98883 - DNA, 22 bp, Artificial Sequence
  Synthetic oligonucleotide; TTT chr11 5313524 5313545 5313541 5313546 +
acactgttaacgggagagtaaa

SEQ ID NO: 98884 - DNA, 22 bp, Artificial Sequence
  Synthetic oligonucleotide; TTA chr11 5313525 5313546 5313542 5313547 +
cactgttaacgggagagtaaat

SEQ ID NO: 98885 - DNA, 22 bp, Artificial Sequence
  Synthetic oligonucleotide; CTG chr11 5313530 5313551 5313547 5313552 +
ttaacgggagagtaaattagtt

SEQ ID NO: 98886 - DNA, 22 bp, Artificial Sequence
  Synthetic oligonucleotide; TTA chr11 5313533 5313554 5313550 5313555 +
acgggagagtaaattagttcaa

SEQ ID NO: 98887 - DNA, 22 bp, Artificial Sequence
  Synthetic oligonucleotide; TTA chr11 5313549 5313570 5313566 5313571 +
gttcaaacattgtggaagagag

SEQ ID NO: 98888 - DNA, 22 bp, Artificial Sequence
  Synthetic oligonucleotide; TTC chr11 5313553 5313574 5313570 5313575 +
aaacattgtggaagagagtgta

SEQ ID NO: 98889 - DNA, 22 bp, Artificial Sequence
  Synthetic oligonucleotide; TTG chr11 5313561 5313582 5313578 5313583 +
tggaagagagtgtagcctttcc

SEQ ID NO: 98890 - DNA, 22 bp, Artificial Sequence
  Synthetic oligonucleotide; CTT chr11 5313580 5313601 5313597 5313602 +
tcctcaaagatgtagaagcaga

SEQ ID NO: 98891 - DNA, 22 bp, Artificial Sequence
  Synthetic oligonucleotide; TTT chr11 5313581 5313602 5313598 5313603 +
cctcaaagatgtagaagcagaa

SEQ ID NO: 98892 - DNA, 22 bp, Artificial Sequence
  Synthetic oligonucleotide; TTC chr11 5313582 5313603 5313599 5313604 +
ctcaaagatgtagaagcagaaa

SEQ ID NO: 98893 - DNA, 22 bp, Artificial Sequence
  Synthetic oligonucleotide; CTC chr11 5313585 5313606 5313602 5313607 +
aaagatgtagaagcagaaatac

SEQ ID NO: 98894 - DNA, 22 bp, Artificial Sequence
  Synthetic oligonucleotide; CTT chr11 5313612 5313633 5313629 5313634 +
gactcagcaatctcattactgg

SEQ ID NO: 98895 - DNA, 22 bp, Artificial Sequence
  Synthetic oligonucleotide; TTG chr11 5313613 5313634 5313630 5313635 +
actcagcaatctcattactggg

SEQ ID NO: 98896 - DNA, 22 bp, Artificial Sequence
  Synthetic oligonucleotide; CTC chr11 5313617 5313638 5313634 5313639 +
agcaatctcattactgggtata

SEQ ID NO: 98897 - DNA, 22 bp, Artificial Sequence
  Synthetic oligonucleotide; CTC chr11 5313626 5313647 5313643 5313648 +
attactgggtatatacccaaag

SEQ ID NO: 98898 - DNA, 22 bp, Artificial Sequence
  Synthetic oligonucleotide; TTA chr11 5313630 5313651 5313647 5313652 +
ctgggtatatacccaaaggaat

SEQ ID NO: 98899 - DNA, 22 bp, Artificial Sequence
  Synthetic oligonucleotide; CTG chr11 5313633 5313654 5313650 5313655 +
ggtatatacccaaaggaatata

SEQ ID NO: 98900 - DNA, 22 bp, Artificial Sequence
  Synthetic oligonucleotide; CTA chr11 5313665 5313686 5313682 5313687 +
ttataaaaatacaggcatgctt

SEQ ID NO: 98901 - DNA, 22 bp, Artificial Sequence
  Synthetic oligonucleotide; TTA chr11 5313668 5313689 5313685 5313690 +
taaaaatacaggcatgcttatg

SEQ ID NO: 98902 - DNA, 22 bp, Artificial Sequence
  Synthetic oligonucleotide; CTT chr11 5313687 5313708 5313704 5313709 +
atgttcattgcagcattattca

SEQ ID NO: 98903 - DNA, 22 bp, Artificial Sequence
  Synthetic oligonucleotide; TTA chr11 5313688 5313709 5313705 5313710 +
tgttcattgcagcattattcat

SEQ ID NO: 98904 - DNA, 22 bp, Artificial Sequence
  Synthetic oligonucleotide; TTC chr11 5313693 5313714 5313710 5313715 +
attgcagcattattcataatag

SEQ ID NO: 98905 - DNA, 22 bp, Artificial Sequence
  Synthetic oligonucleotide; TTG chr11 5313697 5313718 5313714 5313719 +
cagcattattcataatagccaa

SEQ ID NO: 98906 - DNA, 22 bp, Artificial Sequence
  Synthetic oligonucleotide; TTA chr11 5313705 5313726 5313722 5313727 +
ttcataatagccaagatgtgga

SEQ ID NO: 98907 - DNA, 22 bp, Artificial Sequence
  Synthetic oligonucleotide; TTC chr11 5313708 5313729 5313725 5313730 +
ataatagccaagatgtggaatc

SEQ ID NO: 98908 - DNA, 22 bp, Artificial Sequence
  Synthetic oligonucleotide; CTA chr11 5313797 5313818 5313814 5313819 +
tacagccataaaaaggaaaagg

SEQ ID NO: 98909 - DNA, 22 bp, Artificial Sequence
  Synthetic oligonucleotide; TTG chr11 5313823 5313844 5313840 5313845 +
tgttccttgcagggacatgaat

SEQ ID NO: 98910 - DNA, 22 bp, Artificial Sequence
  Synthetic oligonucleotide; TTC chr11 5313828 5313849 5313845 5313850 +
cttgcagggacatgaatggagc

SEQ ID NO: 98911 - DNA, 22 bp, Artificial Sequence
  Synthetic oligonucleotide; CTT chr11 5313831 5313852 5313848 5313853 +
gcagggacatgaatggagctgg

SEQ ID NO: 98912 - DNA, 22 bp, Artificial Sequence
  Synthetic oligonucleotide; TTG chr11 5313832 5313853 5313849 5313854 +
cagggacatgaatggagctgga

SEQ ID NO: 98913 - DNA, 22 bp, Artificial Sequence
  Synthetic oligonucleotide; CTG chr11 5313852 5313873 5313869 5313874 +
gaagccattatcctcatcaaac

SEQ ID NO: 98914 - DNA, 22 bp, Artificial Sequence
  Synthetic oligonucleotide; TTA chr11 5313862 5313883 5313879 5313884 +
tcctcatcaaactaacacagga

SEQ ID NO: 98915 - DNA, 22 bp, Artificial Sequence
  Synthetic oligonucleotide; CTC chr11 5313867 5313888 5313884 5313889 +
atcaaactaacacaggaacaga

SEQ ID NO: 98916 - DNA, 22 bp, Artificial Sequence
  Synthetic oligonucleotide; CTA chr11 5313876 5313897 5313893 5313898 +
acacaggaacagaaaaccaaac

SEQ ID NO: 98917 - DNA, 22 bp, Artificial Sequence
  Synthetic oligonucleotide; TTC chr11 5313908 5313929 5313925 5313930 +
tcacacagaaatgggagctgaa

SEQ ID NO: 98918 - DNA, 22 bp, Artificial Sequence
  Synthetic oligonucleotide; CTC chr11 5313910 5313931 5313927 5313932 +
acacagaaatgggagctgaaca

SEQ ID NO: 98919 - DNA, 22 bp, Artificial Sequence
  Synthetic oligonucleotide; CTG chr11 5313928 5313949 5313945 5313950 +
aacagtgagaacacatggacac

SEQ ID NO: 98920 - DNA, 22 bp, Artificial Sequence
  Synthetic oligonucleotide; CTT chr11 5313952 5313973 5313969 5313974 +
gtggggaacaacacacacaggg

SEQ ID NO: 98921 - DNA, 22 bp, Artificial Sequence
  Synthetic oligonucleotide; TTG chr11 5313953 5313974 5313970 5313975 +
tggggaacaacacacacagggg

SEQ ID NO: 98922 - DNA, 22 bp, Artificial Sequence
  Synthetic oligonucleotide; CTG chr11 5313979 5314000 5313996 5314001 +
tccggtagtgggtggggaggag

SEQ ID NO: 98923 - DNA, 22 bp, Artificial Sequence
  Synthetic oligonucleotide; CTA chr11 5314027 5314048 5314044 5314049 +
acgaatgcagcaaacctgcatg

SEQ ID NO: 98924 - DNA, 22 bp, Artificial Sequence
  Synthetic oligonucleotide; CTG chr11 5314045 5314066 5314062 5314067 +
catggcacacatttacctatgt

SEQ ID NO: 98925 - DNA, 22 bp, Artificial Sequence
  Synthetic oligonucleotide; TTT chr11 5314059 5314080 5314076 5314081 +
acctatgtaataaacctgcaca

SEQ ID NO: 98926 - DNA, 22 bp, Artificial Sequence
  Synthetic oligonucleotide; TTA chr11 5314060 5314081 5314077 5314082 +
cctatgtaataaacctgcacat

SEQ ID NO: 98927 - DNA, 22 bp, Artificial Sequence
  Synthetic oligonucleotide; CTA chr11 5314064 5314085 5314081 5314086 +
tgtaataaacctgcacatcctg

SEQ ID NO: 98928 - DNA, 22 bp, Artificial Sequence
  Synthetic oligonucleotide; CTG chr11 5314077 5314098 5314094 5314099 +
cacatcctgcacatgtgccctg

SEQ ID NO: 98929 - DNA, 22 bp, Artificial Sequence
  Synthetic oligonucleotide; CTG chr11 5314086 5314107 5314103 5314108 +
cacatgtgccctggaacttaaa

SEQ ID NO: 98930 - DNA, 22 bp, Artificial Sequence
  Synthetic oligonucleotide; CTG chr11 5314099 5314120 5314116 5314121 +
gaacttaaaatatattatgttg

SEQ ID NO: 98931 - DNA, 22 bp, Artificial Sequence
  Synthetic oligonucleotide; CTT chr11 5314105 5314126 5314122 5314127 +
aaaatatattatgttggtacaa

SEQ ID NO: 98932 - DNA, 22 bp, Artificial Sequence
  Synthetic oligonucleotide; TTA chr11 5314106 5314127 5314123 5314128 +
aaatatattatgttggtacaaa

SEQ ID NO: 98933 - DNA, 22 bp, Artificial Sequence
  Synthetic oligonucleotide; TTA chr11 5314116 5314137 5314133 5314138 +
tgttggtacaaaagtaatttct

SEQ ID NO: 98934 - DNA, 22 bp, Artificial Sequence
  Synthetic oligonucleotide; TTG chr11 5314121 5314142 5314138 5314143 +
gtacaaaagtaatttctgtgaa

SEQ ID NO: 98935 - DNA, 22 bp, Artificial Sequence
  Synthetic oligonucleotide; TTT chr11 5314136 5314157 5314153 5314158 +
ctgtgaactgcaattacctttg

SEQ ID NO: 98936 - DNA, 22 bp, Artificial Sequence
  Synthetic oligonucleotide; TTC chr11 5314137 5314158 5314154 5314159 +
tgtgaactgcaattacctttgc

SEQ ID NO: 98937 - DNA, 22 bp, Artificial Sequence
  Synthetic oligonucleotide; CTG chr11 5314139 5314160 5314156 5314161 +
tgaactgcaattacctttgcac

SEQ ID NO: 98938 - DNA, 22 bp, Artificial Sequence
  Synthetic oligonucleotide; CTG chr11 5314146 5314167 5314163 5314168 +
caattacctttgcacctaccta

SEQ ID NO: 98939 - DNA, 22 bp, Artificial Sequence
  Synthetic oligonucleotide; TTA chr11 5314152 5314173 5314169 5314174 +
cctttgcacctacctaataagt

SEQ ID NO: 98940 - DNA, 22 bp, Artificial Sequence
  Synthetic oligonucleotide; CTT chr11 5314156 5314177 5314173 5314178 +
tgcacctacctaataagttgaa

SEQ ID NO: 98941 - DNA, 22 bp, Artificial Sequence
  Synthetic oligonucleotide; TTT chr11 5314157 5314178 5314174 5314179 +
gcacctacctaataagttgaag

SEQ ID NO: 98942 - DNA, 22 bp, Artificial Sequence
  Synthetic oligonucleotide; TTG chr11 5314158 5314179 5314175 5314180 +
cacctacctaataagttgaagg

SEQ ID NO: 98943 - DNA, 22 bp, Artificial Sequence
  Synthetic oligonucleotide; CTA chr11 5314164 5314185 5314181 5314186 +
cctaataagttgaaggaaaata

SEQ ID NO: 98944 - DNA, 22 bp, Artificial Sequence
  Synthetic oligonucleotide; CTA chr11 5314168 5314189 5314185 5314190 +
ataagttgaaggaaaataaaat

SEQ ID NO: 98945 - DNA, 22 bp, Artificial Sequence
  Synthetic oligonucleotide; TTG chr11 5314176 5314197 5314193 5314198 +
aaggaaaataaaatctatttta

SEQ ID NO: 98946 - DNA, 22 bp, Artificial Sequence
  Synthetic oligonucleotide; CTA chr11 5314193 5314214 5314210 5314215 +
ttttaaaaaaaaaaaaaaaaaa

SEQ ID NO: 98947 - DNA, 22 bp, Artificial Sequence
  Synthetic oligonucleotide; TTT chr11 5314196 5314217 5314213 5314218 +
taaaaaaaaaaaaaaaaaagga

SEQ ID NO: 98948 - DNA, 22 bp, Artificial Sequence
  Synthetic oligonucleotide; TTT chr11 5314197 5314218 5314214 5314219 +
aaaaaaaaaaaaaaaaaaggaa

SEQ ID NO: 98949 - DNA, 22 bp, Artificial Sequence
  Synthetic oligonucleotide; TTA chr11 5314198 5314219 5314215 5314220 +
aaaaaaaaaaaaaaaaaggaaa

SEQ ID NO: 98950 - DNA, 22 bp, Artificial Sequence
  Synthetic oligonucleotide; CTA chr11 5314225 5314246 5314242 5314247 +
ccctgaaatagagtagttttga

SEQ ID NO: 98951 - DNA, 22 bp, Artificial Sequence
  Synthetic oligonucleotide; CTG chr11 5314230 5314251 5314247 5314252 +
aaatagagtagttttgagatta

SEQ ID NO: 98952 - DNA, 22 bp, Artificial Sequence
  Synthetic oligonucleotide; TTT chr11 5314244 5314265 5314261 5314266 +
tgagattatagtagagttccat

SEQ ID NO: 98953 - DNA, 22 bp, Artificial Sequence
  Synthetic oligonucleotide; TTT chr11 5314245 5314266 5314262 5314267 +
gagattatagtagagttccatg

SEQ ID NO: 98954 - DNA, 22 bp, Artificial Sequence
  Synthetic oligonucleotide; TTG chr11 5314246 5314267 5314263 5314268 +
agattatagtagagttccatga

SEQ ID NO: 98955 - DNA, 22 bp, Artificial Sequence
  Synthetic oligonucleotide; TTA chr11 5314252 5314273 5314269 5314274 +
tagtagagttccatgacctcaa

SEQ ID NO: 98956 - DNA, 22 bp, Artificial Sequence
  Synthetic oligonucleotide; TTC chr11 5314263 5314284 5314280 5314285 +
catgacctcaattcacatgcta

SEQ ID NO: 98957 - DNA, 22 bp, Artificial Sequence
  Synthetic oligonucleotide; CTC chr11 5314272 5314293 5314289 5314294 +
aattcacatgctataattcatc

SEQ ID NO: 98958 - DNA, 22 bp, Artificial Sequence
  Synthetic oligonucleotide; TTC chr11 5314277 5314298 5314294 5314299 +
acatgctataattcatctttat

SEQ ID NO: 98959 - DNA, 22 bp, Artificial Sequence
  Synthetic oligonucleotide; CTA chr11 5314285 5314306 5314302 5314307 +
taattcatctttatatggccaa

SEQ ID NO: 98960 - DNA, 22 bp, Artificial Sequence
  Synthetic oligonucleotide; TTC chr11 5314291 5314312 5314308 5314313 +
atctttatatggccaaaactag

SEQ ID NO: 98961 - DNA, 22 bp, Artificial Sequence
  Synthetic oligonucleotide; CTT chr11 5314296 5314317 5314313 5314318 +
tatatggccaaaactagatctg

SEQ ID NO: 98962 - DNA, 22 bp, Artificial Sequence
  Synthetic oligonucleotide; TTT chr11 5314297 5314318 5314314 5314319 +
atatggccaaaactagatctgc

SEQ ID NO: 98963 - DNA, 22 bp, Artificial Sequence
  Synthetic oligonucleotide; TTA chr11 5314298 5314319 5314315 5314320 +
tatggccaaaactagatctgca

SEQ ID NO: 98964 - DNA, 22 bp, Artificial Sequence
  Synthetic oligonucleotide; CTA chr11 5314312 5314333 5314329 5314334 +
gatctgcaattgcacatttttc

SEQ ID NO: 98965 - DNA, 22 bp, Artificial Sequence
  Synthetic oligonucleotide; CTG chr11 5314318 5314339 5314335 5314340 +
caattgcacatttttccttctg

SEQ ID NO: 98966 - DNA, 22 bp, Artificial Sequence
  Synthetic oligonucleotide; TTG chr11 5314324 5314345 5314341 5314346 +
cacatttttccttctgtaggct

SEQ ID NO: 98967 - DNA, 22 bp, Artificial Sequence
  Synthetic oligonucleotide; TTT chr11 5314331 5314352 5314348 5314353 +
ttccttctgtaggctttggttg

SEQ ID NO: 98968 - DNA, 22 bp, Artificial Sequence
  Synthetic oligonucleotide; TTT chr11 5314332 5314353 5314349 5314354 +
tccttctgtaggctttggttga

SEQ ID NO: 98969 - DNA, 22 bp, Artificial Sequence
  Synthetic oligonucleotide; TTT chr11 5314333 5314354 5314350 5314355 +
ccttctgtaggctttggttgaa

SEQ ID NO: 98970 - DNA, 22 bp, Artificial Sequence
  Synthetic oligonucleotide; TTC chr11 5314334 5314355 5314351 5314356 +
cttctgtaggctttggttgaac

SEQ ID NO: 98971 - DNA, 22 bp, Artificial Sequence
  Synthetic oligonucleotide; CTT chr11 5314337 5314358 5314354 5314359 +
ctgtaggctttggttgaactag

SEQ ID NO: 98972 - DNA, 22 bp, Artificial Sequence
  Synthetic oligonucleotide; TTC chr11 5314338 5314359 5314355 5314360 +
tgtaggctttggttgaactaga

SEQ ID NO: 98973 - DNA, 22 bp, Artificial Sequence
  Synthetic oligonucleotide; CTG chr11 5314340 5314361 5314357 5314362 +
taggctttggttgaactagact

SEQ ID NO: 98974 - DNA, 22 bp, Artificial Sequence
  Synthetic oligonucleotide; CTT chr11 5314347 5314368 5314364 5314369 +
tggttgaactagactggccact

SEQ ID NO: 98975 - DNA, 22 bp, Artificial Sequence
  Synthetic oligonucleotide; TTT chr11 5314348 5314369 5314365 5314370 +
ggttgaactagactggccactt

SEQ ID NO: 98976 - DNA, 22 bp, Artificial Sequence
  Synthetic oligonucleotide; TTG chr11 5314349 5314370 5314366 5314371 +
gttgaactagactggccacttg

SEQ ID NO: 98977 - DNA, 22 bp, Artificial Sequence
  Synthetic oligonucleotide; TTG chr11 5314353 5314374 5314370 5314375 +
aactagactggccacttgactc

SEQ ID NO: 98978 - DNA, 22 bp, Artificial Sequence
  Synthetic oligonucleotide; CTA chr11 5314358 5314379 5314375 5314380 +
gactggccacttgactcttcct

SEQ ID NO: 98979 - DNA, 22 bp, Artificial Sequence
  Synthetic oligonucleotide; CTG chr11 5314363 5314384 5314380 5314385 +
gccacttgactcttcctaaaat

SEQ ID NO: 98980 - DNA, 22 bp, Artificial Sequence
  Synthetic oligonucleotide; CTT chr11 5314370 5314391 5314387 5314392 +
gactcttcctaaaatggtactt

SEQ ID NO: 98981 - DNA, 22 bp, Artificial Sequence
  Synthetic oligonucleotide; TTG chr11 5314371 5314392 5314388 5314393 +
actcttcctaaaatggtacttt

SEQ ID NO: 98982 - DNA, 22 bp, Artificial Sequence
  Synthetic oligonucleotide; CTC chr11 5314375 5314396 5314392 5314397 +
ttcctaaaatggtactttcagt

SEQ ID NO: 98983 - DNA, 22 bp, Artificial Sequence
  Synthetic oligonucleotide; CTT chr11 5314377 5314398 5314394 5314399 +
cctaaaatggtactttcagttc

SEQ ID NO: 98984 - DNA, 22 bp, Artificial Sequence
  Synthetic oligonucleotide; TTC chr11 5314378 5314399 5314395 5314400 +
ctaaaatggtactttcagttct

SEQ ID NO: 98985 - DNA, 22 bp, Artificial Sequence
  Synthetic oligonucleotide; CTA chr11 5314381 5314402 5314398 5314403 +
aaatggtactttcagttcttat

SEQ ID NO: 98986 - DNA, 22 bp, Artificial Sequence
  Synthetic oligonucleotide; CTT chr11 5314392 5314413 5314409 5314414 +
tcagttcttatgaatacaggtt

SEQ ID NO: 98987 - DNA, 22 bp, Artificial Sequence
  Synthetic oligonucleotide; TTT chr11 5314393 5314414 5314410 5314415 +
cagttcttatgaatacaggtta

SEQ ID NO: 98988 - DNA, 22 bp, Artificial Sequence
  Synthetic oligonucleotide; TTC chr11 5314394 5314415 5314411 5314416 +
agttcttatgaatacaggttat

SEQ ID NO: 98989 - DNA, 22 bp, Artificial Sequence
  Synthetic oligonucleotide; TTC chr11 5314399 5314420 5314416 5314421 +
ttatgaatacaggttatgaata

SEQ ID NO: 98990 - DNA, 22 bp, Artificial Sequence
  Synthetic oligonucleotide; CTT chr11 5314401 5314422 5314418 5314423 +
atgaatacaggttatgaataac

SEQ ID NO: 98991 - DNA, 22 bp, Artificial Sequence
  Synthetic oligonucleotide; TTA chr11 5314402 5314423 5314419 5314424 +
tgaatacaggttatgaataacc

SEQ ID NO: 98992 - DNA, 22 bp, Artificial Sequence
  Synthetic oligonucleotide; TTA chr11 5314415 5314436 5314432 5314437 +
tgaataaccatattttccctga

SEQ ID NO: 98993 - DNA, 22 bp, Artificial Sequence
  Synthetic oligonucleotide; TTT chr11 5314430 5314451 5314447 5314452 +
tccctgattattagggtattta

SEQ ID NO: 98994 - DNA, 22 bp, Artificial Sequence
  Synthetic oligonucleotide; TTT chr11 5314431 5314452 5314448 5314453 +
ccctgattattagggtatttat

SEQ ID NO: 98995 - DNA, 22 bp, Artificial Sequence
  Synthetic oligonucleotide; TTC chr11 5314432 5314453 5314449 5314454 +
cctgattattagggtatttatc

SEQ ID NO: 98996 - DNA, 22 bp, Artificial Sequence
  Synthetic oligonucleotide; CTG chr11 5314436 5314457 5314453 5314458 +
attattagggtatttatctaca

SEQ ID NO: 98997 - DNA, 22 bp, Artificial Sequence
  Synthetic oligonucleotide; TTA chr11 5314440 5314461 5314457 5314462 +
ttagggtatttatctacatgtt

SEQ ID NO: 98998 - DNA, 22 bp, Artificial Sequence
  Synthetic oligonucleotide; TTA chr11 5314443 5314464 5314460 5314465 +
gggtatttatctacatgtttta

SEQ ID NO: 98999 - DNA, 22 bp, Artificial Sequence
  Synthetic oligonucleotide; TTT chr11 5314451 5314472 5314468 5314473 +
atctacatgttttatctccata

SEQ ID NO: 99000 - DNA, 22 bp, Artificial Sequence
  Synthetic oligonucleotide; TTA chr11 5314452 5314473 5314469 5314474 +
tctacatgttttatctccatat

SEQ ID NO: 99001 - DNA, 22 bp, Artificial Sequence
  Synthetic oligonucleotide; CTA chr11 5314456 5314477 5314473 5314478 +
catgttttatctccatattcaa

SEQ ID NO: 99002 - DNA, 22 bp, Artificial Sequence
  Synthetic oligonucleotide; TTT chr11 5314463 5314484 5314480 5314485 +
tatctccatattcaatagtatt

SEQ ID NO: 99003 - DNA, 22 bp, Artificial Sequence
  Synthetic oligonucleotide; TTT chr11 5314464 5314485 5314481 5314486 +
atctccatattcaatagtattc

SEQ ID NO: 99004 - DNA, 22 bp, Artificial Sequence
  Synthetic oligonucleotide; TTA chr11 5314465 5314486 5314482 5314487 +
tctccatattcaatagtattcc

SEQ ID NO: 99005 - DNA, 22 bp, Artificial Sequence
  Synthetic oligonucleotide; CTC chr11 5314469 5314490 5314486 5314491 +
catattcaatagtattccactt

SEQ ID NO: 99006 - DNA, 22 bp, Artificial Sequence
  Synthetic oligonucleotide; TTC chr11 5314476 5314497 5314493 5314498 +
aatagtattccactttcctagt

SEQ ID NO: 99007 - DNA, 22 bp, Artificial Sequence
  Synthetic oligonucleotide; TTC chr11 5314486 5314507 5314503 5314508 +
cactttcctagtatctctcaat

SEQ ID NO: 99008 - DNA, 22 bp, Artificial Sequence
  Synthetic oligonucleotide; CTT chr11 5314491 5314512 5314508 5314513 +
tcctagtatctctcaatagata

SEQ ID NO: 99009 - DNA, 22 bp, Artificial Sequence
  Synthetic oligonucleotide; TTT chr11 5314492 5314513 5314509 5314514 +
cctagtatctctcaatagatag

SEQ ID NO: 99010 - DNA, 22 bp, Artificial Sequence
  Synthetic oligonucleotide; TTC chr11 5314493 5314514 5314510 5314515 +
ctagtatctctcaatagatagg

SEQ ID NO: 99011 - DNA, 22 bp, Artificial Sequence
  Synthetic oligonucleotide; CTA chr11 5314496 5314517 5314513 5314518 +
gtatctctcaatagataggtaa

SEQ ID NO: 99012 - DNA, 22 bp, Artificial Sequence
  Synthetic oligonucleotide; CTC chr11 5314503 5314524 5314520 5314525 +
tcaatagataggtaaattatag

SEQ ID NO: 99013 - DNA, 22 bp, Artificial Sequence
  Synthetic oligonucleotide; CTC chr11 5314505 5314526 5314522 5314527 +
aatagataggtaaattatagat

SEQ ID NO: 99014 - DNA, 22 bp, Artificial Sequence
  Synthetic oligonucleotide; TTA chr11 5314522 5314543 5314539 5314544 +
tagatatatctccctcgataaa

SEQ ID NO: 99015 - DNA, 22 bp, Artificial Sequence
  Synthetic oligonucleotide; CTC chr11 5314534 5314555 5314551 5314556 +
cctcgataaagctttacatcta

SEQ ID NO: 99016 - DNA, 22 bp, Artificial Sequence
  Synthetic oligonucleotide; CTC chr11 5314538 5314559 5314555 5314560 +
gataaagctttacatctacata

SEQ ID NO: 99017 - DNA, 22 bp, Artificial Sequence
  Synthetic oligonucleotide; CTT chr11 5314548 5314569 5314565 5314570 +
tacatctacatatgaatacatt

SEQ ID NO: 99018 - DNA, 22 bp, Artificial Sequence
  Synthetic oligonucleotide; TTT chr11 5314549 5314570 5314566 5314571 +
acatctacatatgaatacattt

SEQ ID NO: 99019 - DNA, 22 bp, Artificial Sequence
  Synthetic oligonucleotide; TTA chr11 5314550 5314571 5314567 5314572 +
catctacatatgaatacattta

SEQ ID NO: 99020 - DNA, 22 bp, Artificial Sequence
  Synthetic oligonucleotide; CTA chr11 5314556 5314577 5314573 5314578 +
catatgaatacatttatacata

SEQ ID NO: 99021 - DNA, 22 bp, Artificial Sequence
  Synthetic oligonucleotide; TTT chr11 5314571 5314592 5314588 5314593 +
atacatatatttatgtatttat

SEQ ID NO: 99022 - DNA, 22 bp, Artificial Sequence
  Synthetic oligonucleotide; TTA chr11 5314572 5314593 5314589 5314594 +
tacatatatttatgtatttatc

SEQ ID NO: 99023 - DNA, 22 bp, Artificial Sequence
  Synthetic oligonucleotide; TTT chr11 5314583 5314604 5314600 5314605 +
atgtatttatcaattgatcaat

SEQ ID NO: 99024 - DNA, 22 bp, Artificial Sequence
  Synthetic oligonucleotide; TTA chr11 5314584 5314605 5314601 5314606 +
tgtatttatcaattgatcaatt

SEQ ID NO: 99025 - DNA, 22 bp, Artificial Sequence
  Synthetic oligonucleotide; TTT chr11 5314591 5314612 5314608 5314613 +
atcaattgatcaattgatggat

SEQ ID NO: 99026 - DNA, 22 bp, Artificial Sequence
  Synthetic oligonucleotide; TTA chr11 5314592 5314613 5314609 5314614 +
tcaattgatcaattgatggata

SEQ ID NO: 99027 - DNA, 22 bp, Artificial Sequence
  Synthetic oligonucleotide; TTG chr11 5314599 5314620 5314616 5314621 +
atcaattgatggatacattcat

SEQ ID NO: 99028 - DNA, 22 bp, Artificial Sequence
  Synthetic oligonucleotide; TTG chr11 5314607 5314628 5314624 5314629 +
atggatacattcattgtattat

SEQ ID NO: 99029 - DNA, 22 bp, Artificial Sequence
  Synthetic oligonucleotide; TTC chr11 5314619 5314640 5314636 5314641 +
attgtattattgttccatgtag

SEQ ID NO: 99030 - DNA, 22 bp, Artificial Sequence
  Synthetic oligonucleotide; TTG chr11 5314623 5314644 5314640 5314645 +
tattattgttccatgtagcttt

SEQ ID NO: 99031 - DNA, 22 bp, Artificial Sequence
  Synthetic oligonucleotide; TTA chr11 5314628 5314649 5314645 5314650 +
ttgttccatgtagcttttcact

SEQ ID NO: 99032 - DNA, 22 bp, Artificial Sequence
  Synthetic oligonucleotide; TTG chr11 5314631 5314652 5314648 5314653 +
ttccatgtagcttttcacttta

SEQ ID NO: 99033 - DNA, 22 bp, Artificial Sequence
  Synthetic oligonucleotide; TTC chr11 5314634 5314655 5314651 5314656 +
catgtagcttttcactttagat

SEQ ID NO: 99034 - DNA, 22 bp, Artificial Sequence
  Synthetic oligonucleotide; CTT chr11 5314644 5314665 5314661 5314666 +
ttcactttagataatagttaaa

SEQ ID NO: 99035 - DNA, 22 bp, Artificial Sequence
  Synthetic oligonucleotide; TTT chr11 5314645 5314666 5314662 5314667 +
tcactttagataatagttaaag

SEQ ID NO: 99036 - DNA, 22 bp, Artificial Sequence
  Synthetic oligonucleotide; TTT chr11 5314646 5314667 5314663 5314668 +
cactttagataatagttaaagc

SEQ ID NO: 99037 - DNA, 22 bp, Artificial Sequence
  Synthetic oligonucleotide; TTC chr11 5314647 5314668 5314664 5314669 +
actttagataatagttaaagcc

SEQ ID NO: 99038 - DNA, 22 bp, Artificial Sequence
  Synthetic oligonucleotide; CTT chr11 5314651 5314672 5314668 5314673 +
tagataatagttaaagcctatc

SEQ ID NO: 99039 - DNA, 22 bp, Artificial Sequence
  Synthetic oligonucleotide; TTT chr11 5314652 5314673 5314669 5314674 +
agataatagttaaagcctatct

SEQ ID NO: 99040 - DNA, 22 bp, Artificial Sequence
  Synthetic oligonucleotide; TTA chr11 5314653 5314674 5314670 5314675 +
gataatagttaaagcctatcta

SEQ ID NO: 99041 - DNA, 22 bp, Artificial Sequence
  Synthetic oligonucleotide; TTA chr11 5314664 5314685 5314681 5314686 +
aagcctatctaacactgataca

SEQ ID NO: 99042 - DNA, 22 bp, Artificial Sequence
  Synthetic oligonucleotide; CTA chr11 5314671 5314692 5314688 5314693 +
tctaacactgatacaagagata

SEQ ID NO: 99043 - DNA, 22 bp, Artificial Sequence
  Synthetic oligonucleotide; CTA chr11 5314675 5314696 5314692 5314697 +
acactgatacaagagatattgg

SEQ ID NO: 99044 - DNA, 22 bp, Artificial Sequence
  Synthetic oligonucleotide; CTG chr11 5314681 5314702 5314698 5314703 +
atacaagagatattgggtataa

SEQ ID NO: 99045 - DNA, 22 bp, Artificial Sequence
  Synthetic oligonucleotide; TTG chr11 5314696 5314717 5314713 5314718 +
ggtataaaataagctcctttcc

SEQ ID NO: 99046 - DNA, 22 bp, Artificial Sequence
  Synthetic oligonucleotide; CTC chr11 5314712 5314733 5314729 5314734 +
ctttccaattactcaaaaggcc

SEQ ID NO: 99047 - DNA, 22 bp, Artificial Sequence
  Synthetic oligonucleotide; CTT chr11 5314715 5314736 5314732 5314737 +
tccaattactcaaaaggcccag

SEQ ID NO: 99048 - DNA, 22 bp, Artificial Sequence
  Synthetic oligonucleotide; TTT chr11 5314716 5314737 5314733 5314738 +
ccaattactcaaaaggcccaga

SEQ ID NO: 99049 - DNA, 22 bp, Artificial Sequence
  Synthetic oligonucleotide; TTC chr11 5314717 5314738 5314734 5314739 +
caattactcaaaaggcccagaa

SEQ ID NO: 99050 - DNA, 22 bp, Artificial Sequence
  Synthetic oligonucleotide; TTA chr11 5314723 5314744 5314740 5314745 +
ctcaaaaggcccagaaatcatg

SEQ ID NO: 99051 - DNA, 22 bp, Artificial Sequence
  Synthetic oligonucleotide; CTC chr11 5314726 5314747 5314743 5314748 +
aaaaggcccagaaatcatgaag

SEQ ID NO: 99052 - DNA, 22 bp, Artificial Sequence
  Synthetic oligonucleotide; TTC chr11 5314760 5314781 5314777 5314782 +
tgaaaaaagggctcaagccatt

SEQ ID NO: 99053 - DNA, 22 bp, Artificial Sequence
  Synthetic oligonucleotide; CTG chr11 5314762 5314783 5314779 5314784 +
aaaaaagggctcaagccattct

SEQ ID NO: 99054 - DNA, 22 bp, Artificial Sequence
  Synthetic oligonucleotide; CTC chr11 5314774 5314795 5314791 5314796 +
aagccattctgtgcccagaaaa

SEQ ID NO: 99055 - DNA, 22 bp, Artificial Sequence
  Synthetic oligonucleotide; TTC chr11 5314783 5314804 5314800 5314805 +
tgtgcccagaaaataggcgaac

SEQ ID NO: 99056 - DNA, 22 bp, Artificial Sequence
  Synthetic oligonucleotide; CTG chr11 5314785 5314806 5314802 5314807 +
tgcccagaaaataggcgaacaa

SEQ ID NO: 99057 - DNA, 22 bp, Artificial Sequence
  Synthetic oligonucleotide; CTT chr11 5314812 5314833 5314829 5314834 +
ctttggatctgcttggtttgat

SEQ ID NO: 99058 - DNA, 22 bp, Artificial Sequence
  Synthetic oligonucleotide; TTC chr11 5314813 5314834 5314830 5314835 +
tttggatctgcttggtttgatg

SEQ ID NO: 99059 - DNA, 22 bp, Artificial Sequence
  Synthetic oligonucleotide; CTT chr11 5314815 5314836 5314832 5314837 +
tggatctgcttggtttgatgct

SEQ ID NO: 99060 - DNA, 22 bp, Artificial Sequence
  Synthetic oligonucleotide; TTT chr11 5314816 5314837 5314833 5314838 +
ggatctgcttggtttgatgctg

SEQ ID NO: 99061 - DNA, 22 bp, Artificial Sequence
  Synthetic oligonucleotide; TTG chr11 5314817 5314838 5314834 5314839 +
gatctgcttggtttgatgctgt

SEQ ID NO: 99062 - DNA, 22 bp, Artificial Sequence
  Synthetic oligonucleotide; CTG chr11 5314823 5314844 5314840 5314845 +
cttggtttgatgctgtatataa

SEQ ID NO: 99063 - DNA, 22 bp, Artificial Sequence
  Synthetic oligonucleotide; CTT chr11 5314826 5314847 5314843 5314848 +
ggtttgatgctgtatataatag

SEQ ID NO: 99064 - DNA, 22 bp, Artificial Sequence
  Synthetic oligonucleotide; TTG chr11 5314827 5314848 5314844 5314849 +
gtttgatgctgtatataatagg

SEQ ID NO: 99065 - DNA, 22 bp, Artificial Sequence
  Synthetic oligonucleotide; TTT chr11 5314831 5314852 5314848 5314853 +
gatgctgtatataatagggttc

SEQ ID NO: 99066 - DNA, 22 bp, Artificial Sequence
  Synthetic oligonucleotide; TTG chr11 5314832 5314853 5314849 5314854 +
atgctgtatataatagggttca

SEQ ID NO: 99067 - DNA, 22 bp, Artificial Sequence
  Synthetic oligonucleotide; CTG chr11 5314838 5314859 5314855 5314860 +
tatataatagggttcatgaatg

SEQ ID NO: 99068 - DNA, 22 bp, Artificial Sequence
  Synthetic oligonucleotide; TTC chr11 5314853 5314874 5314870 5314875 +
atgaatggaggaaaaagaaatg

SEQ ID NO: 99069 - DNA, 22 bp, Artificial Sequence
  Synthetic oligonucleotide; TTA chr11 5314883 5314904 5314900 5314905 +
gctcacggtaatgtgcaccaca

SEQ ID NO: 99070 - DNA, 22 bp, Artificial Sequence
  Synthetic oligonucleotide; CTC chr11 5314887 5314908 5314904 5314909 +
acggtaatgtgcaccacatgtg

SEQ ID NO: 99071 - DNA, 22 bp, Artificial Sequence
  Synthetic oligonucleotide; TTT chr11 5314919 5314940 5314936 5314941 +
cccaaacctgtgaatgaaagtc

SEQ ID NO: 99072 - DNA, 22 bp, Artificial Sequence
  Synthetic oligonucleotide; TTC chr11 5314920 5314941 5314937 5314942 +
ccaaacctgtgaatgaaagtct

SEQ ID NO: 99073 - DNA, 22 bp, Artificial Sequence
  Synthetic oligonucleotide; CTG chr11 5314929 5314950 5314946 5314951 +
tgaatgaaagtctcactgatca

SEQ ID NO: 99074 - DNA, 22 bp, Artificial Sequence
  Synthetic oligonucleotide; CTC chr11 5314943 5314964 5314960 5314965 +
actgatcacggtgatgtgaaat

SEQ ID NO: 99075 - DNA, 22 bp, Artificial Sequence
  Synthetic oligonucleotide; CTG chr11 5314947 5314968 5314964 5314969 +
atcacggtgatgtgaaatacca

SEQ ID NO: 99076 - DNA, 22 bp, Artificial Sequence
  Synthetic oligonucleotide; CTG chr11 5314980 5315001 5314997 5315002 +
atatgggagacacacatgttga

SEQ ID NO: 99077 - DNA, 22 bp, Artificial Sequence
  Synthetic oligonucleotide; TTG chr11 5315001 5315022 5315018 5315023 +
agagctttggcttgctcttttc

SEQ ID NO: 99078 - DNA, 22 bp, Artificial Sequence
  Synthetic oligonucleotide; CTT chr11 5315008 5315029 5315025 5315030 +
tggcttgctcttttctggaggc

SEQ ID NO: 99079 - DNA, 22 bp, Artificial Sequence
  Synthetic oligonucleotide; TTT chr11 5315009 5315030 5315026 5315031 +
ggcttgctcttttctggaggca

SEQ ID NO: 99080 - DNA, 22 bp, Artificial Sequence
  Synthetic oligonucleotide; TTG chr11 5315010 5315031 5315027 5315032 +
gcttgctcttttctggaggcaa

SEQ ID NO: 99081 - DNA, 22 bp, Artificial Sequence
  Synthetic oligonucleotide; CTT chr11 5315014 5315035 5315031 5315036 +
gctcttttctggaggcaatacc

SEQ ID NO: 99082 - DNA, 22 bp, Artificial Sequence
  Synthetic oligonucleotide; TTG chr11 5315015 5315036 5315032 5315037 +
ctcttttctggaggcaatacct

SEQ ID NO: 99083 - DNA, 22 bp, Artificial Sequence
  Synthetic oligonucleotide; CTC chr11 5315018 5315039 5315035 5315040 +
ttttctggaggcaataccttta

SEQ ID NO: 99084 - DNA, 22 bp, Artificial Sequence
  Synthetic oligonucleotide; CTT chr11 5315020 5315041 5315037 5315042 +
ttctggaggcaatacctttaac

SEQ ID NO: 99085 - DNA, 22 bp, Artificial Sequence
  Synthetic oligonucleotide; TTT chr11 5315021 5315042 5315038 5315043 +
tctggaggcaatacctttaact

SEQ ID NO: 99086 - DNA, 22 bp, Artificial Sequence
  Synthetic oligonucleotide; TTT chr11 5315022 5315043 5315039 5315044 +
ctggaggcaatacctttaactg

SEQ ID NO: 99087 - DNA, 22 bp, Artificial Sequence
  Synthetic oligonucleotide; TTC chr11 5315023 5315044 5315040 5315045 +
tggaggcaatacctttaactgt

SEQ ID NO: 99088 - DNA, 22 bp, Artificial Sequence
  Synthetic oligonucleotide; CTG chr11 5315025 5315046 5315042 5315047 +
gaggcaatacctttaactgttt

SEQ ID NO: 99089 - DNA, 22 bp, Artificial Sequence
  Synthetic oligonucleotide; CTT chr11 5315038 5315059 5315055 5315060 +
taactgttttaaggatcaggat

SEQ ID NO: 99090 - DNA, 22 bp, Artificial Sequence
  Synthetic oligonucleotide; TTT chr11 5315039 5315060 5315056 5315061 +
aactgttttaaggatcaggata

SEQ ID NO: 99091 - DNA, 22 bp, Artificial Sequence
  Synthetic oligonucleotide; TTA chr11 5315040 5315061 5315057 5315062 +
actgttttaaggatcaggatat

SEQ ID NO: 99092 - DNA, 22 bp, Artificial Sequence
  Synthetic oligonucleotide; CTG chr11 5315044 5315065 5315061 5315066 +
ttttaaggatcaggatataaga

SEQ ID NO: 99093 - DNA, 22 bp, Artificial Sequence
  Synthetic oligonucleotide; TTT chr11 5315047 5315068 5315064 5315069 +
taaggatcaggatataagaaaa

SEQ ID NO: 99094 - DNA, 22 bp, Artificial Sequence
  Synthetic oligonucleotide; TTT chr11 5315048 5315069 5315065 5315070 +
aaggatcaggatataagaaaag

SEQ ID NO: 99095 - DNA, 22 bp, Artificial Sequence
  Synthetic oligonucleotide; TTA chr11 5315049 5315070 5315066 5315071 +
aggatcaggatataagaaaaga

SEQ ID NO: 99096 - DNA, 22 bp, Artificial Sequence
  Synthetic oligonucleotide; CTA chr11 5315089 5315110 5315106 5315111 +
ggaagaaaatcaaagcaaccag

SEQ ID NO: 99097 - DNA, 22 bp, Artificial Sequence
  Synthetic oligonucleotide; CTG chr11 5315119 5315140 5315136 5315141 +
ggtataagtgattgaatgtaat

SEQ ID NO: 99098 - DNA, 22 bp, Artificial Sequence
  Synthetic oligonucleotide; TTG chr11 5315133 5315154 5315150 5315155 +
aatgtaatatcagcacaggcaa

SEQ ID NO: 99099 - DNA, 22 bp, Artificial Sequence
  Synthetic oligonucleotide; TTT chr11 5315159 5315180 5315176 5315181 +
caggacatcttgatggagaaaa

SEQ ID NO: 99100 - DNA, 22 bp, Artificial Sequence
  Synthetic oligonucleotide; TTC chr11 5315160 5315181 5315177 5315182 +
aggacatcttgatggagaaaaa

SEQ ID NO: 99101 - DNA, 22 bp, Artificial Sequence
  Synthetic oligonucleotide; CTT chr11 5315170 5315191 5315187 5315192 +
gatggagaaaaaaggtgtggaa

SEQ ID NO: 99102 - DNA, 22 bp, Artificial Sequence
  Synthetic oligonucleotide; TTG chr11 5315171 5315192 5315188 5315193 +
atggagaaaaaaggtgtggaag

SEQ ID NO: 99103 - DNA, 22 bp, Artificial Sequence
  Synthetic oligonucleotide; TTG chr11 5315239 5315260 5315256 5315261 +
gaggcacgagggataaaaagtc

SEQ ID NO: 99104 - DNA, 22 bp, Artificial Sequence
  Synthetic oligonucleotide; CTC chr11 5315265 5315286 5315282 5315287 +
ataaatagccacagttctatct

SEQ ID NO: 99105 - DNA, 22 bp, Artificial Sequence
  Synthetic oligonucleotide; TTC chr11 5315282 5315303 5315299 5315304 +
tatcttcacccaagatttagta

SEQ ID NO: 99106 - DNA, 22 bp, Artificial Sequence
  Synthetic oligonucleotide; CTA chr11 5315284 5315305 5315301 5315306 +
tcttcacccaagatttagtaga

SEQ ID NO: 99107 - DNA, 22 bp, Artificial Sequence
  Synthetic oligonucleotide; CTT chr11 5315288 5315309 5315305 5315310 +
cacccaagatttagtagaaata

SEQ ID NO: 99108 - DNA, 22 bp, Artificial Sequence
  Synthetic oligonucleotide; TTC chr11 5315289 5315310 5315306 5315311 +
acccaagatttagtagaaatag

SEQ ID NO: 99109 - DNA, 22 bp, Artificial Sequence
  Synthetic oligonucleotide; TTT chr11 5315300 5315321 5315317 5315322 +
agtagaaatagttatacctgag

SEQ ID NO: 99110 - DNA, 22 bp, Artificial Sequence
  Synthetic oligonucleotide; TTA chr11 5315301 5315322 5315318 5315323 +
gtagaaatagttatacctgaga

SEQ ID NO: 99111 - DNA, 22 bp, Artificial Sequence
  Synthetic oligonucleotide; TTA chr11 5315314 5315335 5315331 5315336 +
tacctgagaagcatgtggatga

SEQ ID NO: 99112 - DNA, 22 bp, Artificial Sequence
  Synthetic oligonucleotide; CTG chr11 5315320 5315341 5315337 5315342 +
agaagcatgtggatgataatga

SEQ ID NO: 99113 - DNA, 22 bp, Artificial Sequence
  Synthetic oligonucleotide; TTG chr11 5315360 5315381 5315377 5315382 +
acaggagaatacctgattctgc

SEQ ID NO: 99114 - DNA, 22 bp, Artificial Sequence
  Synthetic oligonucleotide; CTG chr11 5315375 5315396 5315392 5315397 +
attctgcaagtggataatggga

SEQ ID NO: 99115 - DNA, 22 bp, Artificial Sequence
  Synthetic oligonucleotide; TTC chr11 5315379 5315400 5315396 5315401 +
tgcaagtggataatgggagtgg

SEQ ID NO: 99116 - DNA, 22 bp, Artificial Sequence
  Synthetic oligonucleotide; CTG chr11 5315381 5315402 5315398 5315403 +
caagtggataatgggagtggat

SEQ ID NO: 99117 - DNA, 22 bp, Artificial Sequence
  Synthetic oligonucleotide; CTG chr11 5315415 5315436 5315432 5315437 +
caagaagcaggccccatggata

SEQ ID NO: 99118 - DNA, 22 bp, Artificial Sequence
  Synthetic oligonucleotide; CTC chr11 5315442 5315463 5315459 5315464 +
tttgtgattcatccacaagacg

SEQ ID NO: 99119 - DNA, 22 bp, Artificial Sequence
  Synthetic oligonucleotide; CTT chr11 5315444 5315465 5315461 5315466 +
tgtgattcatccacaagacgcc

SEQ ID NO: 99120 - DNA, 22 bp, Artificial Sequence
  Synthetic oligonucleotide; TTT chr11 5315445 5315466 5315462 5315467 +
gtgattcatccacaagacgccc

SEQ ID NO: 99121 - DNA, 22 bp, Artificial Sequence
  Synthetic oligonucleotide; TTG chr11 5315446 5315467 5315463 5315468 +
tgattcatccacaagacgccca

SEQ ID NO: 99122 - DNA, 22 bp, Artificial Sequence
  Synthetic oligonucleotide; TTC chr11 5315452 5315473 5315469 5315474 +
atccacaagacgcccattacag

SEQ ID NO: 99123 - DNA, 22 bp, Artificial Sequence
  Synthetic oligonucleotide; TTA chr11 5315471 5315492 5315488 5315493 +
cagtgggcatcatggtcaattt

SEQ ID NO: 99124 - DNA, 22 bp, Artificial Sequence
  Synthetic oligonucleotide; TTT chr11 5315493 5315514 5315510 5315515 +
caccatgaggtcttgcctcagt

SEQ ID NO: 99125 - DNA, 22 bp, Artificial Sequence
  Synthetic oligonucleotide; TTC chr11 5315494 5315515 5315511 5315516 +
accatgaggtcttgcctcagtg

SEQ ID NO: 99126 - DNA, 22 bp, Artificial Sequence
  Synthetic oligonucleotide; CTT chr11 5315507 5315528 5315524 5315529 +
gcctcagtgtggcaaggaaaca

SEQ ID NO: 99127 - DNA, 22 bp, Artificial Sequence
  Synthetic oligonucleotide; TTG chr11 5315508 5315529 5315525 5315530 +
cctcagtgtggcaaggaaacag

SEQ ID NO: 99128 - DNA, 22 bp, Artificial Sequence
  Synthetic oligonucleotide; CTC chr11 5315512 5315533 5315529 5315534 +
agtgtggcaaggaaacagtaca

SEQ ID NO: 99129 - DNA, 22 bp, Artificial Sequence
  Synthetic oligonucleotide; TTC chr11 5315541 5315562 5315558 5315563 +
gtgaagactgtggtcatgcttg

SEQ ID NO: 99130 - DNA, 22 bp, Artificial Sequence
  Synthetic oligonucleotide; CTG chr11 5315551 5315572 5315568 5315573 +
tggtcatgcttgatgaggtaga

SEQ ID NO: 99131 - DNA, 22 bp, Artificial Sequence
  Synthetic oligonucleotide; CTT chr11 5315562 5315583 5315579 5315584 +
gatgaggtagaggagcttgcca

SEQ ID NO: 99132 - DNA, 22 bp, Artificial Sequence
  Synthetic oligonucleotide; TTG chr11 5315563 5315584 5315580 5315585 +
atgaggtagaggagcttgccat

SEQ ID NO: 99133 - DNA, 22 bp, Artificial Sequence
  Synthetic oligonucleotide; CTT chr11 5315580 5315601 5315597 5315602 +
gccattgccaagaaggacgcac

SEQ ID NO: 99134 - DNA, 22 bp, Artificial Sequence
  Synthetic oligonucleotide; TTG chr11 5315581 5315602 5315598 5315603 +
ccattgccaagaaggacgcaca

SEQ ID NO: 99135 - DNA, 22 bp, Artificial Sequence
  Synthetic oligonucleotide; TTG chr11 5315587 5315608 5315604 5315609 +
ccaagaaggacgcacacataaa

SEQ ID NO: 99136 - DNA, 22 bp, Artificial Sequence
  Synthetic oligonucleotide; TTG chr11 5315645 5315666 5315662 5315667 +
cctccagtactgaaaagccagg

SEQ ID NO: 99137 - DNA, 22 bp, Artificial Sequence
  Synthetic oligonucleotide; CTC chr11 5315649 5315670 5315666 5315671 +
cagtactgaaaagccaggcagc

SEQ ID NO: 99138 - DNA, 22 bp, Artificial Sequence
  Synthetic oligonucleotide; CTG chr11 5315657 5315678 5315674 5315679 +
aaaagccaggcagcaaaaaagg

SEQ ID NO: 99139 - DNA, 22 bp, Artificial Sequence
  Synthetic oligonucleotide; TTG chr11 5315689 5315710 5315706 5315711 +
tgtgttcacaagtggcaagtag

SEQ ID NO: 99140 - DNA, 22 bp, Artificial Sequence
  Synthetic oligonucleotide; TTC chr11 5315696 5315717 5315713 5315718 +
acaagtggcaagtagctttata

SEQ ID NO: 99141 - DNA, 22 bp, Artificial Sequence
  Synthetic oligonucleotide; CTT chr11 5315714 5315735 5315731 5315736 +
tatagaaactattacactgaaa

SEQ ID NO: 99142 - DNA, 22 bp, Artificial Sequence
  Synthetic oligonucleotide; TTT chr11 5315715 5315736 5315732 5315737 +
atagaaactattacactgaaat

SEQ ID NO: 99143 - DNA, 22 bp, Artificial Sequence
  Synthetic oligonucleotide; TTA chr11 5315716 5315737 5315733 5315738 +
tagaaactattacactgaaatc

SEQ ID NO: 99144 - DNA, 22 bp, Artificial Sequence
  Synthetic oligonucleotide; CTA chr11 5315725 5315746 5315742 5315747 +
ttacactgaaatccctgcctta

SEQ ID NO: 99145 - DNA, 22 bp, Artificial Sequence
  Synthetic oligonucleotide; TTA chr11 5315728 5315749 5315745 5315750 +
cactgaaatccctgccttatca

SEQ ID NO: 99146 - DNA, 22 bp, Artificial Sequence
  Synthetic oligonucleotide; CTG chr11 5315733 5315754 5315750 5315755 +
aaatccctgccttatcagtttt

SEQ ID NO: 99147 - DNA, 22 bp, Artificial Sequence
  Synthetic oligonucleotide; CTG chr11 5315742 5315763 5315759 5315764 +
ccttatcagtttttactacctt

SEQ ID NO: 99148 - DNA, 22 bp, Artificial Sequence
  Synthetic oligonucleotide; CTT chr11 5315746 5315767 5315763 5315768 +
atcagtttttactaccttcttg

SEQ ID NO: 99149 - DNA, 22 bp, Artificial Sequence
  Synthetic oligonucleotide; TTA chr11 5315747 5315768 5315764 5315769 +
tcagtttttactaccttcttgt

SEQ ID NO: 99150 - DNA, 22 bp, Artificial Sequence
  Synthetic oligonucleotide; TTT chr11 5315754 5315775 5315771 5315776 +
ttactaccttcttgtgaaactg

SEQ ID NO: 99151 - DNA, 22 bp, Artificial Sequence
  Synthetic oligonucleotide; TTT chr11 5315755 5315776 5315772 5315777 +
tactaccttcttgtgaaactgt

SEQ ID NO: 99152 - DNA, 22 bp, Artificial Sequence
  Synthetic oligonucleotide; TTT chr11 5315756 5315777 5315773 5315778 +
actaccttcttgtgaaactgta

SEQ ID NO: 99153 - DNA, 22 bp, Artificial Sequence
  Synthetic oligonucleotide; TTA chr11 5315757 5315778 5315774 5315779 +
ctaccttcttgtgaaactgtat

SEQ ID NO: 99154 - DNA, 22 bp, Artificial Sequence
  Synthetic oligonucleotide; CTA chr11 5315760 5315781 5315777 5315782 +
ccttcttgtgaaactgtatttc

SEQ ID NO: 99155 - DNA, 22 bp, Artificial Sequence
  Synthetic oligonucleotide; CTT chr11 5315764 5315785 5315781 5315786 +
cttgtgaaactgtatttctgca

SEQ ID NO: 99156 - DNA, 22 bp, Artificial Sequence
  Synthetic oligonucleotide; TTC chr11 5315765 5315786 5315782 5315787 +
ttgtgaaactgtatttctgcag

SEQ ID NO: 99157 - DNA, 22 bp, Artificial Sequence
  Synthetic oligonucleotide; CTT chr11 5315767 5315788 5315784 5315789 +
gtgaaactgtatttctgcagcc

SEQ ID NO: 99158 - DNA, 22 bp, Artificial Sequence
  Synthetic oligonucleotide; TTG chr11 5315768 5315789 5315785 5315790 +
tgaaactgtatttctgcagcct

SEQ ID NO: 99159 - DNA, 22 bp, Artificial Sequence
  Synthetic oligonucleotide; CTG chr11 5315776 5315797 5315793 5315798 +
tatttctgcagcctcaatccta

SEQ ID NO: 99160 - DNA, 22 bp, Artificial Sequence
  Synthetic oligonucleotide; TTT chr11 5315781 5315802 5315798 5315803 +
ctgcagcctcaatcctaatatt

SEQ ID NO: 99161 - DNA, 22 bp, Artificial Sequence
  Synthetic oligonucleotide; TTC chr11 5315782 5315803 5315799 5315804 +
tgcagcctcaatcctaatattc

SEQ ID NO: 99162 - DNA, 22 bp, Artificial Sequence
  Synthetic oligonucleotide; CTG chr11 5315784 5315805 5315801 5315806 +
cagcctcaatcctaatattcat

SEQ ID NO: 99163 - DNA, 22 bp, Artificial Sequence
  Synthetic oligonucleotide; CTC chr11 5315791 5315812 5315808 5315813 +
aatcctaatattcatatttagc

SEQ ID NO: 99164 - DNA, 22 bp, Artificial Sequence
  Synthetic oligonucleotide; CTA chr11 5315798 5315819 5315815 5315820 +
atattcatatttagcaataatt

SEQ ID NO: 99165 - DNA, 22 bp, Artificial Sequence
  Synthetic oligonucleotide; TTC chr11 5315804 5315825 5315821 5315826 +
atatttagcaataatttattgg

SEQ ID NO: 99166 - DNA, 22 bp, Artificial Sequence
  Synthetic oligonucleotide; TTT chr11 5315810 5315831 5315827 5315832 +
agcaataatttattggtatatg

SEQ ID NO: 99167 - DNA, 22 bp, Artificial Sequence
  Synthetic oligonucleotide; TTA chr11 5315811 5315832 5315828 5315833 +
gcaataatttattggtatatgc

SEQ ID NO: 99168 - DNA, 22 bp, Artificial Sequence
  Synthetic oligonucleotide; TTT chr11 5315821 5315842 5315838 5315843 +
attggtatatgcatgaatgtgc

SEQ ID NO: 99169 - DNA, 22 bp, Artificial Sequence
  Synthetic oligonucleotide; TTA chr11 5315822 5315843 5315839 5315844 +
ttggtatatgcatgaatgtgca

SEQ ID NO: 99170 - DNA, 22 bp, Artificial Sequence
  Synthetic oligonucleotide; TTG chr11 5315825 5315846 5315842 5315847 +
gtatatgcatgaatgtgcaaca

SEQ ID NO: 99171 - DNA, 22 bp, Artificial Sequence
  Synthetic oligonucleotide; TTT chr11 5315851 5315872 5315868 5315873 +
tcttatagaagagcaatacatt

SEQ ID NO: 99172 - DNA, 22 bp, Artificial Sequence
  Synthetic oligonucleotide; TTT chr11 5315852 5315873 5315869 5315874 +
cttatagaagagcaatacattt

SEQ ID NO: 99173 - DNA, 22 bp, Artificial Sequence
  Synthetic oligonucleotide; TTC chr11 5315853 5315874 5315870 5315875 +
ttatagaagagcaatacattta

SEQ ID NO: 99174 - DNA, 22 bp, Artificial Sequence
  Synthetic oligonucleotide; CTT chr11 5315855 5315876 5315872 5315877 +
atagaagagcaatacatttata

SEQ ID NO: 99175 - DNA, 22 bp, Artificial Sequence
  Synthetic oligonucleotide; TTA chr11 5315856 5315877 5315873 5315878 +
tagaagagcaatacatttatag

SEQ ID NO: 99176 - DNA, 22 bp, Artificial Sequence
  Synthetic oligonucleotide; TTT chr11 5315874 5315895 5315891 5315896 +
atagactgtgctagagataagg

SEQ ID NO: 99177 - DNA, 22 bp, Artificial Sequence
  Synthetic oligonucleotide; TTA chr11 5315875 5315896 5315892 5315897 +
tagactgtgctagagataagga

SEQ ID NO: 99178 - DNA, 22 bp, Artificial Sequence
  Synthetic oligonucleotide; CTG chr11 5315882 5315903 5315899 5315904 +
tgctagagataaggaatgatga

SEQ ID NO: 99179 - DNA, 22 bp, Artificial Sequence
  Synthetic oligonucleotide; CTA chr11 5315887 5315908 5315904 5315909 +
gagataaggaatgatgatcatt

SEQ ID NO: 99180 - DNA, 22 bp, Artificial Sequence
  Synthetic oligonucleotide; TTT chr11 5315910 5315931 5315927 5315932 +
cttcagttatgaataattaagt

SEQ ID NO: 99181 - DNA, 22 bp, Artificial Sequence
  Synthetic oligonucleotide; TTC chr11 5315911 5315932 5315928 5315933 +
ttcagttatgaataattaagta

SEQ ID NO: 99182 - DNA, 22 bp, Artificial Sequence
  Synthetic oligonucleotide; CTT chr11 5315913 5315934 5315930 5315935 +
cagttatgaataattaagtagt

SEQ ID NO: 99183 - DNA, 22 bp, Artificial Sequence
  Synthetic oligonucleotide; TTC chr11 5315914 5315935 5315931 5315936 +
agttatgaataattaagtagtt

SEQ ID NO: 99184 - DNA, 22 bp, Artificial Sequence
  Synthetic oligonucleotide; TTA chr11 5315919 5315940 5315936 5315941 +
tgaataattaagtagttaagca

SEQ ID NO: 99185 - DNA, 22 bp, Artificial Sequence
  Synthetic oligonucleotide; TTA chr11 5315929 5315950 5315946 5315951 +
agtagttaagcattcttaatct

SEQ ID NO: 99186 - DNA, 22 bp, Artificial Sequence
  Synthetic oligonucleotide; TTA chr11 5315937 5315958 5315954 5315959 +
agcattcttaatctaaaaaaca

SEQ ID NO: 99187 - DNA, 22 bp, Artificial Sequence
  Synthetic oligonucleotide; TTC chr11 5315944 5315965 5315961 5315966 +
ttaatctaaaaaacacatttta

SEQ ID NO: 99188 - DNA, 22 bp, Artificial Sequence
  Synthetic oligonucleotide; CTT chr11 5315946 5315967 5315963 5315968 +
aatctaaaaaacacattttaaa

SEQ ID NO: 99189 - DNA, 22 bp, Artificial Sequence
  Synthetic oligonucleotide; TTA chr11 5315947 5315968 5315964 5315969 +
atctaaaaaacacattttaaaa

SEQ ID NO: 99190 - DNA, 22 bp, Artificial Sequence
  Synthetic oligonucleotide; CTA chr11 5315952 5315973 5315969 5315974 +
aaaaacacattttaaaaaatgc

SEQ ID NO: 99191 - DNA, 22 bp, Artificial Sequence
  Synthetic oligonucleotide; TTT chr11 5315964 5315985 5315981 5315986 +
taaaaaatgcatcatgcccctc

SEQ ID NO: 99192 - DNA, 22 bp, Artificial Sequence
  Synthetic oligonucleotide; TTT chr11 5315965 5315986 5315982 5315987 +
aaaaaatgcatcatgcccctct

SEQ ID NO: 99193 - DNA, 22 bp, Artificial Sequence
  Synthetic oligonucleotide; TTA chr11 5315966 5315987 5315983 5315988 +
aaaaatgcatcatgcccctctg

SEQ ID NO: 99194 - DNA, 22 bp, Artificial Sequence
  Synthetic oligonucleotide; CTC chr11 5315986 5316007 5316003 5316008 +
tgtggtgtgcttgctgcacaat

SEQ ID NO: 99195 - DNA, 22 bp, Artificial Sequence
  Synthetic oligonucleotide; CTG chr11 5315988 5316009 5316005 5316010 +
tggtgtgcttgctgcacaatgt

SEQ ID NO: 99196 - DNA, 22 bp, Artificial Sequence
  Synthetic oligonucleotide; CTT chr11 5315998 5316019 5316015 5316020 +
gctgcacaatgtttgaaccaat

SEQ ID NO: 99197 - DNA, 22 bp, Artificial Sequence
  Synthetic oligonucleotide; TTG chr11 5315999 5316020 5316016 5316021 +
ctgcacaatgtttgaaccaata

SEQ ID NO: 99198 - DNA, 22 bp, Artificial Sequence
  Synthetic oligonucleotide; CTG chr11 5316002 5316023 5316019 5316024 +
cacaatgtttgaaccaatagta

SEQ ID NO: 99199 - DNA, 22 bp, Artificial Sequence
  Synthetic oligonucleotide; TTT chr11 5316012 5316033 5316029 5316034 +
gaaccaatagtaacaaaaaaga

SEQ ID NO: 99200 - DNA, 22 bp, Artificial Sequence
  Synthetic oligonucleotide; TTG chr11 5316013 5316034 5316030 5316035 +
aaccaatagtaacaaaaaagaa

SEQ ID NO: 99201 - DNA, 22 bp, Artificial Sequence
  Synthetic oligonucleotide; TTA chr11 5316053 5316074 5316070 5316075 +
gataataattgtacatagttaa

SEQ ID NO: 99202 - DNA, 22 bp, Artificial Sequence
  Synthetic oligonucleotide; TTG chr11 5316064 5316085 5316081 5316086 +
tacatagttaacctgctgctta

SEQ ID NO: 99203 - DNA, 22 bp, Artificial Sequence
  Synthetic oligonucleotide; TTA chr11 5316074 5316095 5316091 5316096 +
acctgctgcttagcttaattgc

SEQ ID NO: 99204 - DNA, 22 bp, Artificial Sequence
  Synthetic oligonucleotide; CTG chr11 5316079 5316100 5316096 5316101 +
ctgcttagcttaattgcatatt

SEQ ID NO: 99205 - DNA, 22 bp, Artificial Sequence
  Synthetic oligonucleotide; CTG chr11 5316082 5316103 5316099 5316104 +
cttagcttaattgcatatttgg

SEQ ID NO: 99206 - DNA, 22 bp, Artificial Sequence
  Synthetic oligonucleotide; CTT chr11 5316085 5316106 5316102 5316107 +
agcttaattgcatatttggata

SEQ ID NO: 99207 - DNA, 22 bp, Artificial Sequence
  Synthetic oligonucleotide; TTA chr11 5316086 5316107 5316103 5316108 +
gcttaattgcatatttggatac

SEQ ID NO: 99208 - DNA, 22 bp, Artificial Sequence
  Synthetic oligonucleotide; CTT chr11 5316090 5316111 5316107 5316112 +
aattgcatatttggatacattt

SEQ ID NO: 99209 - DNA, 22 bp, Artificial Sequence
  Synthetic oligonucleotide; TTA chr11 5316091 5316112 5316108 5316113 +
attgcatatttggatacattta

SEQ ID NO: 99210 - DNA, 22 bp, Artificial Sequence
  Synthetic oligonucleotide; TTG chr11 5316095 5316116 5316112 5316117 +
catatttggatacatttaaact

SEQ ID NO: 99211 - DNA, 22 bp, Artificial Sequence
  Synthetic oligonucleotide; TTT chr11 5316102 5316123 5316119 5316124 +
ggatacatttaaacttgatttt

SEQ ID NO: 99212 - DNA, 22 bp, Artificial Sequence
  Synthetic oligonucleotide; TTG chr11 5316103 5316124 5316120 5316125 +
gatacatttaaacttgattttt

SEQ ID NO: 99213 - DNA, 22 bp, Artificial Sequence
  Synthetic oligonucleotide; TTT chr11 5316112 5316133 5316129 5316134 +
aaacttgatttttattttatgt

SEQ ID NO: 99214 - DNA, 22 bp, Artificial Sequence
  Synthetic oligonucleotide; TTA chr11 5316113 5316134 5316130 5316135 +
aacttgatttttattttatgtt

SEQ ID NO: 99215 - DNA, 22 bp, Artificial Sequence
  Synthetic oligonucleotide; CTT chr11 5316118 5316139 5316135 5316140 +
gatttttattttatgtttcaca

SEQ ID NO: 99216 - DNA, 22 bp, Artificial Sequence
  Synthetic oligonucleotide; TTG chr11 5316119 5316140 5316136 5316141 +
atttttattttatgtttcacaa

SEQ ID NO: 99217 - DNA, 22 bp, Artificial Sequence
  Synthetic oligonucleotide; TTT chr11 5316123 5316144 5316140 5316145 +
ttattttatgtttcacaatcat

SEQ ID NO: 99218 - DNA, 22 bp, Artificial Sequence
  Synthetic oligonucleotide; TTT chr11 5316124 5316145 5316141 5316146 +
tattttatgtttcacaatcatg

SEQ ID NO: 99219 - DNA, 22 bp, Artificial Sequence
  Synthetic oligonucleotide; TTT chr11 5316125 5316146 5316142 5316147 +
attttatgtttcacaatcatga

SEQ ID NO: 99220 - DNA, 22 bp, Artificial Sequence
  Synthetic oligonucleotide; TTA chr11 5316126 5316147 5316143 5316148 +
ttttatgtttcacaatcatgat

SEQ ID NO: 99221 - DNA, 22 bp, Artificial Sequence
  Synthetic oligonucleotide; TTT chr11 5316129 5316150 5316146 5316151 +
tatgtttcacaatcatgatata

SEQ ID NO: 99222 - DNA, 22 bp, Artificial Sequence
  Synthetic oligonucleotide; TTT chr11 5316130 5316151 5316147 5316152 +
atgtttcacaatcatgatatag

SEQ ID NO: 99223 - DNA, 22 bp, Artificial Sequence
  Synthetic oligonucleotide; TTA chr11 5316131 5316152 5316148 5316153 +
tgtttcacaatcatgatataga

SEQ ID NO: 99224 - DNA, 22 bp, Artificial Sequence
  Synthetic oligonucleotide; TTT chr11 5316136 5316157 5316153 5316158 +
cacaatcatgatatagacatag

SEQ ID NO: 99225 - DNA, 22 bp, Artificial Sequence
  Synthetic oligonucleotide; TTC chr11 5316137 5316158 5316154 5316159 +
acaatcatgatatagacatagt

SEQ ID NO: 99226 - DNA, 22 bp, Artificial Sequence
  Synthetic oligonucleotide; TTT chr11 5316163 5316184 5316180 5316185 +
tgttagaaaacttttctttgtt

SEQ ID NO: 99227 - DNA, 22 bp, Artificial Sequence
  Synthetic oligonucleotide; TTT chr11 5316164 5316185 5316181 5316186 +
gttagaaaacttttctttgttt

SEQ ID NO: 99228 - DNA, 22 bp, Artificial Sequence
  Synthetic oligonucleotide; TTG chr11 5316165 5316186 5316182 5316187 +
ttagaaaacttttctttgttta

SEQ ID NO: 99229 - DNA, 22 bp, Artificial Sequence
  Synthetic oligonucleotide; TTA chr11 5316168 5316189 5316185 5316190 +
gaaaacttttctttgtttagtt

SEQ ID NO: 99230 - DNA, 22 bp, Artificial Sequence
  Synthetic oligonucleotide; CTT chr11 5316176 5316197 5316193 5316198 +
ttctttgtttagttttgaaata

SEQ ID NO: 99231 - DNA, 22 bp, Artificial Sequence
  Synthetic oligonucleotide; TTT chr11 5316177 5316198 5316194 5316199 +
tctttgtttagttttgaaatag

SEQ ID NO: 99232 - DNA, 22 bp, Artificial Sequence
  Synthetic oligonucleotide; TTT chr11 5316178 5316199 5316195 5316200 +
ctttgtttagttttgaaataga

SEQ ID NO: 99233 - DNA, 22 bp, Artificial Sequence
  Synthetic oligonucleotide; TTC chr11 5316179 5316200 5316196 5316201 +
tttgtttagttttgaaatagaa

SEQ ID NO: 99234 - DNA, 22 bp, Artificial Sequence
  Synthetic oligonucleotide; CTT chr11 5316181 5316202 5316198 5316203 +
tgtttagttttgaaatagaatg

SEQ ID NO: 99235 - DNA, 22 bp, Artificial Sequence
  Synthetic oligonucleotide; TTT chr11 5316182 5316203 5316199 5316204 +
gtttagttttgaaatagaatgt

SEQ ID NO: 99236 - DNA, 22 bp, Artificial Sequence
  Synthetic oligonucleotide; TTG chr11 5316183 5316204 5316200 5316205 +
tttagttttgaaatagaatgtt

SEQ ID NO: 99237 - DNA, 22 bp, Artificial Sequence
  Synthetic oligonucleotide; TTT chr11 5316186 5316207 5316203 5316208 +
agttttgaaatagaatgttaat

SEQ ID NO: 99238 - DNA, 22 bp, Artificial Sequence
  Synthetic oligonucleotide; TTA chr11 5316187 5316208 5316204 5316209 +
gttttgaaatagaatgttaatg

SEQ ID NO: 99239 - DNA, 22 bp, Artificial Sequence
  Synthetic oligonucleotide; TTT chr11 5316191 5316212 5316208 5316213 +
tgaaatagaatgttaatgtttt

SEQ ID NO: 99240 - DNA, 22 bp, Artificial Sequence
  Synthetic oligonucleotide; TTT chr11 5316192 5316213 5316209 5316214 +
gaaatagaatgttaatgtttta

SEQ ID NO: 99241 - DNA, 22 bp, Artificial Sequence
  Synthetic oligonucleotide; TTG chr11 5316193 5316214 5316210 5316215 +
aaatagaatgttaatgttttat

SEQ ID NO: 99242 - DNA, 22 bp, Artificial Sequence
  Synthetic oligonucleotide; TTA chr11 5316206 5316227 5316223 5316228 +
atgttttatggaattctaacaa

SEQ ID NO: 99243 - DNA, 22 bp, Artificial Sequence
  Synthetic oligonucleotide; TTT chr11 5316212 5316233 5316229 5316234 +
tatggaattctaacaaaagcca

SEQ ID NO: 99244 - DNA, 22 bp, Artificial Sequence
  Synthetic oligonucleotide; TTT chr11 5316213 5316234 5316230 5316235 +
atggaattctaacaaaagccat

SEQ ID NO: 99245 - DNA, 22 bp, Artificial Sequence
  Synthetic oligonucleotide; TTA chr11 5316214 5316235 5316231 5316236 +
tggaattctaacaaaagccatg

SEQ ID NO: 99246 - DNA, 22 bp, Artificial Sequence
  Synthetic oligonucleotide; TTC chr11 5316222 5316243 5316239 5316244 +
taacaaaagccatgagccctct

SEQ ID NO: 99247 - DNA, 22 bp, Artificial Sequence
  Synthetic oligonucleotide; CTA chr11 5316224 5316245 5316241 5316246 +
acaaaagccatgagccctctgt

SEQ ID NO: 99248 - DNA, 22 bp, Artificial Sequence
  Synthetic oligonucleotide; CTC chr11 5316243 5316264 5316260 5316265 +
tgtggagaaaaatggacaaaag

SEQ ID NO: 99249 - DNA, 22 bp, Artificial Sequence
  Synthetic oligonucleotide; CTG chr11 5316245 5316266 5316262 5316267 +
tggagaaaaatggacaaaagca

SEQ ID NO: 99250 - DNA, 22 bp, Artificial Sequence
  Synthetic oligonucleotide; TTT chr11 5316282 5316303 5316299 5316304 +
agtctaaaaatattcacacgtt

SEQ ID NO: 99251 - DNA, 22 bp, Artificial Sequence
  Synthetic oligonucleotide; TTA chr11 5316283 5316304 5316300 5316305 +
gtctaaaaatattcacacgttt

SEQ ID NO: 99252 - DNA, 22 bp, Artificial Sequence
  Synthetic oligonucleotide; CTA chr11 5316288 5316309 5316305 5316310 +
aaaatattcacacgttttcctg

SEQ ID NO: 99253 - DNA, 22 bp, Artificial Sequence
  Synthetic oligonucleotide; TTC chr11 5316297 5316318 5316314 5316319 +
acacgttttcctgaagctaatc

SEQ ID NO: 99254 - DNA, 22 bp, Artificial Sequence
  Synthetic oligonucleotide; TTT chr11 5316305 5316326 5316322 5316327 +
tcctgaagctaatccatgagca

SEQ ID NO: 99255 - DNA, 22 bp, Artificial Sequence
  Synthetic oligonucleotide; TTT chr11 5316306 5316327 5316323 5316328 +
cctgaagctaatccatgagcac

SEQ ID NO: 99256 - DNA, 22 bp, Artificial Sequence
  Synthetic oligonucleotide; TTC chr11 5316307 5316328 5316324 5316329 +
ctgaagctaatccatgagcacc

SEQ ID NO: 99257 - DNA, 22 bp, Artificial Sequence
  Synthetic oligonucleotide; CTG chr11 5316310 5316331 5316327 5316332 +
aagctaatccatgagcaccaca

SEQ ID NO: 99258 - DNA, 22 bp, Artificial Sequence
  Synthetic oligonucleotide; CTA chr11 5316316 5316337 5316333 5316338 +
atccatgagcaccacatttgaa

SEQ ID NO: 99259 - DNA, 22 bp, Artificial Sequence
  Synthetic oligonucleotide; TTT chr11 5316335 5316356 5316352 5316357 +
gaaacttcaagcctgccttgaa

SEQ ID NO: 99260 - DNA, 22 bp, Artificial Sequence
  Synthetic oligonucleotide; TTG chr11 5316336 5316357 5316353 5316358 +
aaacttcaagcctgccttgaaa

SEQ ID NO: 99261 - DNA, 22 bp, Artificial Sequence
  Synthetic oligonucleotide; CTT chr11 5316342 5316363 5316359 5316364 +
caagcctgccttgaaacatgtg

SEQ ID NO: 99262 - DNA, 22 bp, Artificial Sequence
  Synthetic oligonucleotide; TTC chr11 5316343 5316364 5316360 5316365 +
aagcctgccttgaaacatgtgt

SEQ ID NO: 99263 - DNA, 22 bp, Artificial Sequence
  Synthetic oligonucleotide; CTG chr11 5316350 5316371 5316367 5316372 +
ccttgaaacatgtgttgagatg

SEQ ID NO: 99264 - DNA, 22 bp, Artificial Sequence
  Synthetic oligonucleotide; CTT chr11 5316354 5316375 5316371 5316376 +
gaaacatgtgttgagatgaaaa

SEQ ID NO: 99265 - DNA, 22 bp, Artificial Sequence
  Synthetic oligonucleotide; TTG chr11 5316355 5316376 5316372 5316377 +
aaacatgtgttgagatgaaaaa

SEQ ID NO: 99266 - DNA, 22 bp, Artificial Sequence
  Synthetic oligonucleotide; TTG chr11 5316367 5316388 5316384 5316389 +
agatgaaaaagtctgtgcttta

SEQ ID NO: 99267 - DNA, 22 bp, Artificial Sequence
  Synthetic oligonucleotide; CTG chr11 5316382 5316403 5316399 5316404 +
tgctttaggtgttggtcatccc

SEQ ID NO: 99268 - DNA, 22 bp, Artificial Sequence
  Synthetic oligonucleotide; CTT chr11 5316387 5316408 5316404 5316409 +
taggtgttggtcatcccagatg

SEQ ID NO: 99269 - DNA, 22 bp, Artificial Sequence
  Synthetic oligonucleotide; TTT chr11 5316388 5316409 5316405 5316410 +
aggtgttggtcatcccagatgg

SEQ ID NO: 99270 - DNA, 22 bp, Artificial Sequence
  Synthetic oligonucleotide; TTA chr11 5316389 5316410 5316406 5316411 +
ggtgttggtcatcccagatgga

SEQ ID NO: 99271 - DNA, 22 bp, Artificial Sequence
  Synthetic oligonucleotide; TTG chr11 5316396 5316417 5316413 5316418 +
gtcatcccagatggagtatgtt

SEQ ID NO: 99272 - DNA, 22 bp, Artificial Sequence
  Synthetic oligonucleotide; TTC chr11 5316419 5316440 5316436 5316441 +
tcctatgcagacctctgaaaat

SEQ ID NO: 99273 - DNA, 22 bp, Artificial Sequence
  Synthetic oligonucleotide; CTC chr11 5316421 5316442 5316438 5316443 +
ctatgcagacctctgaaaatct

SEQ ID NO: 99274 - DNA, 22 bp, Artificial Sequence
  Synthetic oligonucleotide; CTA chr11 5316424 5316445 5316441 5316446 +
tgcagacctctgaaaatcttcc

SEQ ID NO: 99275 - DNA, 22 bp, Artificial Sequence
  Synthetic oligonucleotide; CTC chr11 5316434 5316455 5316451 5316456 +
tgaaaatcttcctatcttctct

SEQ ID NO: 99276 - DNA, 22 bp, Artificial Sequence
  Synthetic oligonucleotide; CTG chr11 5316436 5316457 5316453 5316458 +
aaaatcttcctatcttctcttc

SEQ ID NO: 99277 - DNA, 22 bp, Artificial Sequence
  Synthetic oligonucleotide; CTT chr11 5316444 5316465 5316461 5316466 +
cctatcttctcttcgctgcatc

SEQ ID NO: 99278 - DNA, 22 bp, Artificial Sequence
  Synthetic oligonucleotide; TTC chr11 5316445 5316466 5316462 5316467 +
ctatcttctcttcgctgcatct

SEQ ID NO: 99279 - DNA, 22 bp, Artificial Sequence
  Synthetic oligonucleotide; CTA chr11 5316448 5316469 5316465 5316470 +
tcttctcttcgctgcatctaac

SEQ ID NO: 99280 - DNA, 22 bp, Artificial Sequence
  Synthetic oligonucleotide; CTT chr11 5316452 5316473 5316469 5316474 +
ctcttcgctgcatctaacataa

SEQ ID NO: 99281 - DNA, 22 bp, Artificial Sequence
  Synthetic oligonucleotide; TTC chr11 5316453 5316474 5316470 5316475 +
tcttcgctgcatctaacataag

SEQ ID NO: 99282 - DNA, 22 bp, Artificial Sequence
  Synthetic oligonucleotide; CTC chr11 5316455 5316476 5316472 5316477 +
ttcgctgcatctaacataagaa

SEQ ID NO: 99283 - DNA, 22 bp, Artificial Sequence
  Synthetic oligonucleotide; CTT chr11 5316457 5316478 5316474 5316479 +
cgctgcatctaacataagaagg

SEQ ID NO: 99284 - DNA, 22 bp, Artificial Sequence
  Synthetic oligonucleotide; TTC chr11 5316458 5316479 5316475 5316480 +
gctgcatctaacataagaagga

SEQ ID NO: 99285 - DNA, 22 bp, Artificial Sequence
  Synthetic oligonucleotide; CTG chr11 5316462 5316483 5316479 5316484 +
catctaacataagaaggaagag

SEQ ID NO: 99286 - DNA, 22 bp, Artificial Sequence
  Synthetic oligonucleotide; CTA chr11 5316468 5316489 5316485 5316490 +
acataagaaggaagaggaatca

SEQ ID NO: 99287 - DNA, 22 bp, Artificial Sequence
  Synthetic oligonucleotide; TTC chr11 5316493 5316514 5316510 5316515 +
cttattcctgttcctggcactc

SEQ ID NO: 99288 - DNA, 22 bp, Artificial Sequence
  Synthetic oligonucleotide; CTT chr11 5316496 5316517 5316513 5316518 +
attcctgttcctggcactcacc

SEQ ID NO: 99289 - DNA, 22 bp, Artificial Sequence
  Synthetic oligonucleotide; TTA chr11 5316497 5316518 5316514 5316519 +
ttcctgttcctggcactcacct

SEQ ID NO: 99290 - DNA, 22 bp, Artificial Sequence
  Synthetic oligonucleotide; TTC chr11 5316500 5316521 5316517 5316522 +
ctgttcctggcactcacctatg

SEQ ID NO: 99291 - DNA, 22 bp, Artificial Sequence
  Synthetic oligonucleotide; CTG chr11 5316503 5316524 5316520 5316525 +
ttcctggcactcacctatgctg

SEQ ID NO: 99292 - DNA, 22 bp, Artificial Sequence
  Synthetic oligonucleotide; TTC chr11 5316506 5316527 5316523 5316528 +
ctggcactcacctatgctgtca

SEQ ID NO: 99293 - DNA, 22 bp, Artificial Sequence
  Synthetic oligonucleotide; CTG chr11 5316509 5316530 5316526 5316531 +
gcactcacctatgctgtcattt

SEQ ID NO: 99294 - DNA, 22 bp, Artificial Sequence
  Synthetic oligonucleotide; CTC chr11 5316515 5316536 5316532 5316537 +
acctatgctgtcattttcttgc

SEQ ID NO: 99295 - DNA, 22 bp, Artificial Sequence
  Synthetic oligonucleotide; CTA chr11 5316520 5316541 5316537 5316542 +
tgctgtcattttcttgctggaa

SEQ ID NO: 99296 - DNA, 22 bp, Artificial Sequence
  Synthetic oligonucleotide; CTG chr11 5316525 5316546 5316542 5316547 +
tcattttcttgctggaataagg

SEQ ID NO: 99297 - DNA, 22 bp, Artificial Sequence
  Synthetic oligonucleotide; TTT chr11 5316531 5316552 5316548 5316553 +
tcttgctggaataaggacccat

SEQ ID NO: 99298 - DNA, 22 bp, Artificial Sequence
  Synthetic oligonucleotide; TTT chr11 5316532 5316553 5316549 5316554 +
cttgctggaataaggacccatt

SEQ ID NO: 99299 - DNA, 22 bp, Artificial Sequence
  Synthetic oligonucleotide; TTC chr11 5316533 5316554 5316550 5316555 +
ttgctggaataaggacccattc

SEQ ID NO: 99300 - DNA, 22 bp, Artificial Sequence
  Synthetic oligonucleotide; CTT chr11 5316535 5316556 5316552 5316557 +
gctggaataaggacccattcct

SEQ ID NO: 99301 - DNA, 22 bp, Artificial Sequence
  Synthetic oligonucleotide; TTG chr11 5316536 5316557 5316553 5316558 +
ctggaataaggacccattcctg

SEQ ID NO: 99302 - DNA, 22 bp, Artificial Sequence
  Synthetic oligonucleotide; CTG chr11 5316539 5316560 5316556 5316561 +
gaataaggacccattcctgctc

SEQ ID NO: 99303 - DNA, 22 bp, Artificial Sequence
  Synthetic oligonucleotide; TTC chr11 5316555 5316576 5316572 5316577 +
ctgctctatttgaagactcagt

SEQ ID NO: 99304 - DNA, 22 bp, Artificial Sequence
  Synthetic oligonucleotide; CTG chr11 5316558 5316579 5316575 5316580 +
ctctatttgaagactcagttca

SEQ ID NO: 99305 - DNA, 22 bp, Artificial Sequence
  Synthetic oligonucleotide; CTC chr11 5316561 5316582 5316578 5316583 +
tatttgaagactcagttcagac

SEQ ID NO: 99306 - DNA, 22 bp, Artificial Sequence
  Synthetic oligonucleotide; CTA chr11 5316563 5316584 5316580 5316585 +
tttgaagactcagttcagacac

SEQ ID NO: 99307 - DNA, 22 bp, Artificial Sequence
  Synthetic oligonucleotide; TTT chr11 5316566 5316587 5316583 5316588 +
gaagactcagttcagacactca

SEQ ID NO: 99308 - DNA, 22 bp, Artificial Sequence
  Synthetic oligonucleotide; TTG chr11 5316567 5316588 5316584 5316589 +
aagactcagttcagacactcac

SEQ ID NO: 99309 - DNA, 22 bp, Artificial Sequence
  Synthetic oligonucleotide; CTC chr11 5316574 5316595 5316591 5316596 +
agttcagacactcacttctcaa

SEQ ID NO: 99310 - DNA, 22 bp, Artificial Sequence
  Synthetic oligonucleotide; TTC chr11 5316579 5316600 5316596 5316601 +
agacactcacttctcaaagact

SEQ ID NO: 99311 - DNA, 22 bp, Artificial Sequence
  Synthetic oligonucleotide; CTC chr11 5316587 5316608 5316604 5316609 +
acttctcaaagactattcaaga

SEQ ID NO: 99312 - DNA, 22 bp, Artificial Sequence
  Synthetic oligonucleotide; CTT chr11 5316591 5316612 5316608 5316613 +
ctcaaagactattcaagaggcc

SEQ ID NO: 99313 - DNA, 22 bp, Artificial Sequence
  Synthetic oligonucleotide; TTC chr11 5316592 5316613 5316609 5316614 +
tcaaagactattcaagaggcca

SEQ ID NO: 99314 - DNA, 22 bp, Artificial Sequence
  Synthetic oligonucleotide; CTC chr11 5316594 5316615 5316611 5316616 +
aaagactattcaagaggccaaa

SEQ ID NO: 99315 - DNA, 22 bp, Artificial Sequence
  Synthetic oligonucleotide; CTA chr11 5316602 5316623 5316619 5316624 +
ttcaagaggccaaattagagag

SEQ ID NO: 99316 - DNA, 22 bp, Artificial Sequence
  Synthetic oligonucleotide; TTC chr11 5316605 5316626 5316622 5316627 +
aagaggccaaattagagagttt

SEQ ID NO: 99317 - DNA, 22 bp, Artificial Sequence
  Synthetic oligonucleotide; TTA chr11 5316619 5316640 5316636 5316641 +
gagagtttatgtatgtggaaat

SEQ ID NO: 99318 - DNA, 22 bp, Artificial Sequence
  Synthetic oligonucleotide; TTT chr11 5316627 5316648 5316644 5316649 +
atgtatgtggaaatcacttccc

SEQ ID NO: 99319 - DNA, 22 bp, Artificial Sequence
  Synthetic oligonucleotide; TTA chr11 5316628 5316649 5316645 5316650 +
tgtatgtggaaatcacttcccc

SEQ ID NO: 99320 - DNA, 22 bp, Artificial Sequence
  Synthetic oligonucleotide; CTT chr11 5316646 5316667 5316663 5316668 +
ccccagagtttcctctttccaa

SEQ ID NO: 99321 - DNA, 22 bp, Artificial Sequence
  Synthetic oligonucleotide; TTC chr11 5316647 5316668 5316664 5316669 +
cccagagtttcctctttccaaa

SEQ ID NO: 99322 - DNA, 22 bp, Artificial Sequence
  Synthetic oligonucleotide; TTT chr11 5316657 5316678 5316674 5316679 +
cctctttccaaatactcagaag

SEQ ID NO: 99323 - DNA, 22 bp, Artificial Sequence
  Synthetic oligonucleotide; TTC chr11 5316658 5316679 5316675 5316680 +
ctctttccaaatactcagaaga

SEQ ID NO: 99324 - DNA, 22 bp, Artificial Sequence
  Synthetic oligonucleotide; CTC chr11 5316661 5316682 5316678 5316683 +
tttccaaatactcagaagaacc

SEQ ID NO: 99325 - DNA, 22 bp, Artificial Sequence
  Synthetic oligonucleotide; CTT chr11 5316663 5316684 5316680 5316685 +
tccaaatactcagaagaaccct

SEQ ID NO: 99326 - DNA, 22 bp, Artificial Sequence
  Synthetic oligonucleotide; TTT chr11 5316664 5316685 5316681 5316686 +
ccaaatactcagaagaaccctt

SEQ ID NO: 99327 - DNA, 22 bp, Artificial Sequence
  Synthetic oligonucleotide; TTC chr11 5316665 5316686 5316682 5316687 +
caaatactcagaagaacccttg

SEQ ID NO: 99328 - DNA, 22 bp, Artificial Sequence
  Synthetic oligonucleotide; CTC chr11 5316674 5316695 5316691 5316696 +
agaagaacccttgatctcccct

SEQ ID NO: 99329 - DNA, 22 bp, Artificial Sequence
  Synthetic oligonucleotide; CTT chr11 5316686 5316707 5316703 5316708 +
gatctcccctccctcctctgtc

SEQ ID NO: 99330 - DNA, 22 bp, Artificial Sequence
  Synthetic oligonucleotide; TTG chr11 5316687 5316708 5316704 5316709 +
atctcccctccctcctctgtct

SEQ ID NO: 99331 - DNA, 22 bp, Artificial Sequence
  Synthetic oligonucleotide; CTC chr11 5316692 5316713 5316709 5316714 +
ccctccctcctctgtctgggag

SEQ ID NO: 99332 - DNA, 22 bp, Artificial Sequence
  Synthetic oligonucleotide; CTC chr11 5316697 5316718 5316714 5316719 +
cctcctctgtctgggagaagca

SEQ ID NO: 99333 - DNA, 22 bp, Artificial Sequence
  Synthetic oligonucleotide; CTC chr11 5316701 5316722 5316718 5316723 +
ctctgtctgggagaagcaggga

SEQ ID NO: 99334 - DNA, 22 bp, Artificial Sequence
  Synthetic oligonucleotide; CTC chr11 5316704 5316725 5316721 5316726 +
tgtctgggagaagcagggacgc

SEQ ID NO: 99335 - DNA, 22 bp, Artificial Sequence
  Synthetic oligonucleotide; CTG chr11 5316706 5316727 5316723 5316728 +
tctgggagaagcagggacgctc

SEQ ID NO: 99336 - DNA, 22 bp, Artificial Sequence
  Synthetic oligonucleotide; CTG chr11 5316710 5316731 5316727 5316732 +
ggagaagcagggacgctcaacc

SEQ ID NO: 99337 - DNA, 22 bp, Artificial Sequence
  Synthetic oligonucleotide; CTC chr11 5316728 5316749 5316745 5316750 +
aaccaatgtcctcggaactttc

SEQ ID NO: 99338 - DNA, 22 bp, Artificial Sequence
  Synthetic oligonucleotide; CTC chr11 5316741 5316762 5316758 5316763 +
ggaactttcaggtatttctcca

SEQ ID NO: 99339 - DNA, 22 bp, Artificial Sequence
  Synthetic oligonucleotide; CTT chr11 5316748 5316769 5316765 5316770 +
tcaggtatttctccaaggatgg

SEQ ID NO: 99340 - DNA, 22 bp, Artificial Sequence
  Synthetic oligonucleotide; TTT chr11 5316749 5316770 5316766 5316771 +
caggtatttctccaaggatgga

SEQ ID NO: 99341 - DNA, 22 bp, Artificial Sequence
  Synthetic oligonucleotide; TTC chr11 5316750 5316771 5316767 5316772 +
aggtatttctccaaggatggat

SEQ ID NO: 99342 - DNA, 22 bp, Artificial Sequence
  Synthetic oligonucleotide; TTT chr11 5316758 5316779 5316775 5316780 +
ctccaaggatggatgagaaaag

SEQ ID NO: 99343 - DNA, 22 bp, Artificial Sequence
  Synthetic oligonucleotide; TTC chr11 5316759 5316780 5316776 5316781 +
tccaaggatggatgagaaaagc

SEQ ID NO: 99344 - DNA, 22 bp, Artificial Sequence
  Synthetic oligonucleotide; CTC chr11 5316761 5316782 5316778 5316783 +
caaggatggatgagaaaagctg

SEQ ID NO: 99345 - DNA, 22 bp, Artificial Sequence
  Synthetic oligonucleotide; CTG chr11 5316783 5316804 5316800 5316805 +
catactccaatgccacctctac

SEQ ID NO: 99346 - DNA, 22 bp, Artificial Sequence
  Synthetic oligonucleotide; CTC chr11 5316790 5316811 5316807 5316812 +
caatgccacctctacattggga

SEQ ID NO: 99347 - DNA, 22 bp, Artificial Sequence
  Synthetic oligonucleotide; CTC chr11 5316802 5316823 5316819 5316824 +
tacattgggatgccaggactta

SEQ ID NO: 99348 - DNA, 22 bp, Artificial Sequence
  Synthetic oligonucleotide; CTA chr11 5316804 5316825 5316821 5316826 +
cattgggatgccaggacttaat

SEQ ID NO: 99349 - DNA, 22 bp, Artificial Sequence
  Synthetic oligonucleotide; TTG chr11 5316809 5316830 5316826 5316831 +
ggatgccaggacttaattatgt

SEQ ID NO: 99350 - DNA, 22 bp, Artificial Sequence
  Synthetic oligonucleotide; CTT chr11 5316823 5316844 5316840 5316845 +
aattatgtgacccttcaggacc

SEQ ID NO: 99351 - DNA, 22 bp, Artificial Sequence
  Synthetic oligonucleotide; TTA chr11 5316824 5316845 5316841 5316846 +
attatgtgacccttcaggaccc

SEQ ID NO: 99352 - DNA, 22 bp, Artificial Sequence
  Synthetic oligonucleotide; TTA chr11 5316828 5316849 5316845 5316850 +
tgtgacccttcaggaccctaag

SEQ ID NO: 99353 - DNA, 22 bp, Artificial Sequence
  Synthetic oligonucleotide; CTT chr11 5316838 5316859 5316855 5316860 +
caggaccctaagcatcagtaca

SEQ ID NO: 99354 - DNA, 22 bp, Artificial Sequence
  Synthetic oligonucleotide; TTC chr11 5316839 5316860 5316856 5316861 +
aggaccctaagcatcagtacac

SEQ ID NO: 99355 - DNA, 22 bp, Artificial Sequence
  Synthetic oligonucleotide; CTA chr11 5316848 5316869 5316865 5316870 +
agcatcagtacacagtatatcc

SEQ ID NO: 99356 - DNA, 22 bp, Artificial Sequence
  Synthetic oligonucleotide; CTT chr11 5316882 5316903 5316899 5316904 +
tgcattgtctgtctcaatacaa

SEQ ID NO: 99357 - DNA, 22 bp, Artificial Sequence
  Synthetic oligonucleotide; TTT chr11 5316883 5316904 5316900 5316905 +
gcattgtctgtctcaatacaat

SEQ ID NO: 99358 - DNA, 22 bp, Artificial Sequence
  Synthetic oligonucleotide; TTG chr11 5316884 5316905 5316901 5316906 +
cattgtctgtctcaatacaatg

SEQ ID NO: 99359 - DNA, 22 bp, Artificial Sequence
  Synthetic oligonucleotide; TTG chr11 5316889 5316910 5316906 5316911 +
tctgtctcaatacaatgcaaag

SEQ ID NO: 99360 - DNA, 22 bp, Artificial Sequence
  Synthetic oligonucleotide; CTG chr11 5316893 5316914 5316910 5316915 +
tctcaatacaatgcaaagtatt

SEQ ID NO: 99361 - DNA, 22 bp, Artificial Sequence
  Synthetic oligonucleotide; CTC chr11 5316897 5316918 5316914 5316919 +
aatacaatgcaaagtattgaga

SEQ ID NO: 99362 - DNA, 22 bp, Artificial Sequence
  Synthetic oligonucleotide; TTG chr11 5316916 5316937 5316933 5316938 +
agagatactagttgaatgcagg

SEQ ID NO: 99363 - DNA, 22 bp, Artificial Sequence
  Synthetic oligonucleotide; CTA chr11 5316926 5316947 5316943 5316948 +
gttgaatgcagggtcacatgtg

SEQ ID NO: 99364 - DNA, 22 bp, Artificial Sequence
  Synthetic oligonucleotide; TTG chr11 5316930 5316951 5316947 5316952 +
aatgcagggtcacatgtgtctt

SEQ ID NO: 99365 - DNA, 22 bp, Artificial Sequence
  Synthetic oligonucleotide; CTT chr11 5316952 5316973 5316969 5316974 +
tgtcctggagtttatgcatttc

SEQ ID NO: 99366 - DNA, 22 bp, Artificial Sequence
  Synthetic oligonucleotide; TTT chr11 5316953 5316974 5316970 5316975 +
gtcctggagtttatgcatttca

SEQ ID NO: 99367 - DNA, 22 bp, Artificial Sequence
  Synthetic oligonucleotide; TTG chr11 5316954 5316975 5316971 5316976 +
tcctggagtttatgcatttcaa

SEQ ID NO: 99368 - DNA, 22 bp, Artificial Sequence
  Synthetic oligonucleotide; CTG chr11 5316959 5316980 5316976 5316981 +
gagtttatgcatttcaattgca

SEQ ID NO: 99369 - DNA, 22 bp, Artificial Sequence
  Synthetic oligonucleotide; TTT chr11 5316965 5316986 5316982 5316987 +
atgcatttcaattgcattgttg

SEQ ID NO: 99370 - DNA, 22 bp, Artificial Sequence
  Synthetic oligonucleotide; TTA chr11 5316966 5316987 5316983 5316988 +
tgcatttcaattgcattgttgt

SEQ ID NO: 99371 - DNA, 22 bp, Artificial Sequence
  Synthetic oligonucleotide; TTT chr11 5316973 5316994 5316990 5316995 +
caattgcattgttgtcttttct

SEQ ID NO: 99372 - DNA, 22 bp, Artificial Sequence
  Synthetic oligonucleotide; TTC chr11 5316974 5316995 5316991 5316996 +
aattgcattgttgtcttttctg

SEQ ID NO: 99373 - DNA, 22 bp, Artificial Sequence
  Synthetic oligonucleotide; TTG chr11 5316979 5317000 5316996 5317001 +
cattgttgtcttttctgatact

SEQ ID NO: 99374 - DNA, 22 bp, Artificial Sequence
  Synthetic oligonucleotide; TTG chr11 5316984 5317005 5317001 5317006 +
ttgtcttttctgatactttggg

SEQ ID NO: 99375 - DNA, 22 bp, Artificial Sequence
  Synthetic oligonucleotide; TTG chr11 5316987 5317008 5317004 5317009 +
tcttttctgatactttgggaaa

SEQ ID NO: 99376 - DNA, 22 bp, Artificial Sequence
  Synthetic oligonucleotide; CTT chr11 5316991 5317012 5317008 5317013 +
ttctgatactttgggaaaatca

SEQ ID NO: 99377 - DNA, 22 bp, Artificial Sequence
  Synthetic oligonucleotide; TTT chr11 5316992 5317013 5317009 5317014 +
tctgatactttgggaaaatcag

SEQ ID NO: 99378 - DNA, 22 bp, Artificial Sequence
  Synthetic oligonucleotide; TTT chr11 5316993 5317014 5317010 5317015 +
ctgatactttgggaaaatcagt

SEQ ID NO: 99379 - DNA, 22 bp, Artificial Sequence
  Synthetic oligonucleotide; TTC chr11 5316994 5317015 5317011 5317016 +
tgatactttgggaaaatcagtt

SEQ ID NO: 99380 - DNA, 22 bp, Artificial Sequence
  Synthetic oligonucleotide; CTG chr11 5316996 5317017 5317013 5317018 +
atactttgggaaaatcagttct

SEQ ID NO: 99381 - DNA, 22 bp, Artificial Sequence
  Synthetic oligonucleotide; CTT chr11 5317002 5317023 5317019 5317024 +
tgggaaaatcagttctgatcca

SEQ ID NO: 99382 - DNA, 22 bp, Artificial Sequence
  Synthetic oligonucleotide; TTT chr11 5317003 5317024 5317020 5317025 +
gggaaaatcagttctgatccac

SEQ ID NO: 99383 - DNA, 22 bp, Artificial Sequence
  Synthetic oligonucleotide; TTG chr11 5317004 5317025 5317021 5317026 +
ggaaaatcagttctgatccaca

SEQ ID NO: 99384 - DNA, 22 bp, Artificial Sequence
  Synthetic oligonucleotide; TTC chr11 5317017 5317038 5317034 5317039 +
tgatccacaggaacctcaatgg

SEQ ID NO: 99385 - DNA, 22 bp, Artificial Sequence
  Synthetic oligonucleotide; CTG chr11 5317019 5317040 5317036 5317041 +
atccacaggaacctcaatggat

SEQ ID NO: 99386 - DNA, 22 bp, Artificial Sequence
  Synthetic oligonucleotide; CTC chr11 5317034 5317055 5317051 5317056 +
aatggatctattaatagccaag

SEQ ID NO: 99387 - DNA, 22 bp, Artificial Sequence
  Synthetic oligonucleotide; CTA chr11 5317044 5317065 5317061 5317066 +
ttaatagccaagtaaatgaagg

SEQ ID NO: 99388 - DNA, 22 bp, Artificial Sequence
  Synthetic oligonucleotide; TTA chr11 5317047 5317068 5317064 5317069 +
atagccaagtaaatgaagggcc

SEQ ID NO: 99389 - DNA, 22 bp, Artificial Sequence
  Synthetic oligonucleotide; CTA chr11 5317071 5317092 5317088 5317093 +
ttatattttgtcttaaaataac

SEQ ID NO: 99390 - DNA, 22 bp, Artificial Sequence
  Synthetic oligonucleotide; TTA chr11 5317074 5317095 5317091 5317096 +
tattttgtcttaaaataacttt

SEQ ID NO: 99391 - DNA, 22 bp, Artificial Sequence
  Synthetic oligonucleotide; TTT chr11 5317079 5317100 5317096 5317101 +
tgtcttaaaataactttgttta

SEQ ID NO: 99392 - DNA, 22 bp, Artificial Sequence
  Synthetic oligonucleotide; TTT chr11 5317080 5317101 5317097 5317102 +
gtcttaaaataactttgtttat

SEQ ID NO: 99393 - DNA, 22 bp, Artificial Sequence
  Synthetic oligonucleotide; TTG chr11 5317081 5317102 5317098 5317103 +
tcttaaaataactttgtttata

SEQ ID NO: 99394 - DNA, 22 bp, Artificial Sequence
  Synthetic oligonucleotide; CTT chr11 5317085 5317106 5317102 5317107 +
aaaataactttgtttatataaa

SEQ ID NO: 99395 - DNA, 22 bp, Artificial Sequence
  Synthetic oligonucleotide; TTA chr11 5317086 5317107 5317103 5317108 +
aaataactttgtttatataaaa

SEQ ID NO: 99396 - DNA, 22 bp, Artificial Sequence
  Synthetic oligonucleotide; CTT chr11 5317095 5317116 5317112 5317117 +
tgtttatataaaaatcactgcc

SEQ ID NO: 99397 - DNA, 22 bp, Artificial Sequence
  Synthetic oligonucleotide; TTT chr11 5317096 5317117 5317113 5317118 +
gtttatataaaaatcactgccc

SEQ ID NO: 99398 - DNA, 22 bp, Artificial Sequence
  Synthetic oligonucleotide; TTG chr11 5317097 5317118 5317114 5317119 +
tttatataaaaatcactgccca

SEQ ID NO: 99399 - DNA, 22 bp, Artificial Sequence
  Synthetic oligonucleotide; TTT chr11 5317100 5317121 5317117 5317122 +
atataaaaatcactgcccattt

SEQ ID NO: 99400 - DNA, 22 bp, Artificial Sequence
  Synthetic oligonucleotide; TTA chr11 5317101 5317122 5317118 5317123 +
tataaaaatcactgcccatttc

SEQ ID NO: 99401 - DNA, 22 bp, Artificial Sequence
  Synthetic oligonucleotide; CTG chr11 5317115 5317136 5317132 5317137 +
cccatttcataccaggttcagg

SEQ ID NO: 99402 - DNA, 22 bp, Artificial Sequence
  Synthetic oligonucleotide; TTT chr11 5317122 5317143 5317139 5317144 +
cataccaggttcaggatagact

SEQ ID NO: 99403 - DNA, 22 bp, Artificial Sequence
  Synthetic oligonucleotide; TTC chr11 5317123 5317144 5317140 5317145 +
ataccaggttcaggatagactt

SEQ ID NO: 99404 - DNA, 22 bp, Artificial Sequence
  Synthetic oligonucleotide; TTC chr11 5317134 5317155 5317151 5317156 +
aggatagacttgtttttattta

SEQ ID NO: 99405 - DNA, 22 bp, Artificial Sequence
  Synthetic oligonucleotide; CTT chr11 5317145 5317166 5317162 5317167 +
gtttttatttatttgttttttc

SEQ ID NO: 99406 - DNA, 22 bp, Artificial Sequence
  Synthetic oligonucleotide; TTG chr11 5317146 5317167 5317163 5317168 +
tttttatttatttgttttttct

SEQ ID NO: 99407 - DNA, 22 bp, Artificial Sequence
  Synthetic oligonucleotide; TTT chr11 5317149 5317170 5317166 5317171 +
ttatttatttgttttttctttt

SEQ ID NO: 99408 - DNA, 22 bp, Artificial Sequence
  Synthetic oligonucleotide; TTT chr11 5317150 5317171 5317167 5317172 +
tatttatttgttttttctttta

SEQ ID NO: 99409 - DNA, 22 bp, Artificial Sequence
  Synthetic oligonucleotide; TTT chr11 5317151 5317172 5317168 5317173 +
atttatttgttttttcttttaa

SEQ ID NO: 99410 - DNA, 22 bp, Artificial Sequence
  Synthetic oligonucleotide; TTA chr11 5317152 5317173 5317169 5317174 +
tttatttgttttttcttttaaa

SEQ ID NO: 99411 - DNA, 22 bp, Artificial Sequence
  Synthetic oligonucleotide; TTT chr11 5317155 5317176 5317172 5317177 +
atttgttttttcttttaaattt

SEQ ID NO: 99412 - DNA, 22 bp, Artificial Sequence
  Synthetic oligonucleotide; TTA chr11 5317156 5317177 5317173 5317178 +
tttgttttttcttttaaatttt

SEQ ID NO: 99413 - DNA, 22 bp, Artificial Sequence
  Synthetic oligonucleotide; TTT chr11 5317159 5317180 5317176 5317181 +
gttttttcttttaaattttcaa

SEQ ID NO: 99414 - DNA, 22 bp, Artificial Sequence
  Synthetic oligonucleotide; TTG chr11 5317160 5317181 5317177 5317182 +
ttttttcttttaaattttcaac

SEQ ID NO: 99415 - DNA, 22 bp, Artificial Sequence
  Synthetic oligonucleotide; TTT chr11 5317163 5317184 5317180 5317185 +
tttcttttaaattttcaacatt

SEQ ID NO: 99416 - DNA, 22 bp, Artificial Sequence
  Synthetic oligonucleotide; TTT chr11 5317164 5317185 5317181 5317186 +
ttcttttaaattttcaacattt

SEQ ID NO: 99417 - DNA, 22 bp, Artificial Sequence
  Synthetic oligonucleotide; TTT chr11 5317165 5317186 5317182 5317187 +
tcttttaaattttcaacattta

SEQ ID NO: 99418 - DNA, 22 bp, Artificial Sequence
  Synthetic oligonucleotide; TTT chr11 5317166 5317187 5317183 5317188 +
cttttaaattttcaacatttac

SEQ ID NO: 99419 - DNA, 22 bp, Artificial Sequence
  Synthetic oligonucleotide; TTC chr11 5317167 5317188 5317184 5317189 +
ttttaaattttcaacatttact

SEQ ID NO: 99420 - DNA, 22 bp, Artificial Sequence
  Synthetic oligonucleotide; CTT chr11 5317169 5317190 5317186 5317191 +
ttaaattttcaacatttacttt

SEQ ID NO: 99421 - DNA, 22 bp, Artificial Sequence
  Synthetic oligonucleotide; TTT chr11 5317170 5317191 5317187 5317192 +
taaattttcaacatttacttta

SEQ ID NO: 99422 - DNA, 22 bp, Artificial Sequence
  Synthetic oligonucleotide; TTT chr11 5317171 5317192 5317188 5317193 +
aaattttcaacatttactttag

SEQ ID NO: 99423 - DNA, 22 bp, Artificial Sequence
  Synthetic oligonucleotide; TTA chr11 5317172 5317193 5317189 5317194 +
aattttcaacatttactttaga

SEQ ID NO: 99424 - DNA, 22 bp, Artificial Sequence
  Synthetic oligonucleotide; TTT chr11 5317177 5317198 5317194 5317199 +
tcaacatttactttagatacag

SEQ ID NO: 99425 - DNA, 22 bp, Artificial Sequence
  Synthetic oligonucleotide; TTT chr11 5317178 5317199 5317195 5317200 +
caacatttactttagatacagt

SEQ ID NO: 99426 - DNA, 22 bp, Artificial Sequence
  Synthetic oligonucleotide; TTC chr11 5317179 5317200 5317196 5317201 +
aacatttactttagatacagtg

SEQ ID NO: 99427 - DNA, 22 bp, Artificial Sequence
  Synthetic oligonucleotide; TTT chr11 5317186 5317207 5317203 5317208 +
actttagatacagtgggtactt

SEQ ID NO: 99428 - DNA, 22 bp, Artificial Sequence
  Synthetic oligonucleotide; TTA chr11 5317187 5317208 5317204 5317209 +
ctttagatacagtgggtacttg

SEQ ID NO: 99429 - DNA, 22 bp, Artificial Sequence
  Synthetic oligonucleotide; CTT chr11 5317190 5317211 5317207 5317212 +
tagatacagtgggtacttgtgc

SEQ ID NO: 99430 - DNA, 22 bp, Artificial Sequence
  Synthetic oligonucleotide; TTT chr11 5317191 5317212 5317208 5317213 +
agatacagtgggtacttgtgca

SEQ ID NO: 99431 - DNA, 22 bp, Artificial Sequence
  Synthetic oligonucleotide; TTA chr11 5317192 5317213 5317209 5317214 +
gatacagtgggtacttgtgcag

SEQ ID NO: 99432 - DNA, 22 bp, Artificial Sequence
  Synthetic oligonucleotide; CTT chr11 5317208 5317229 5317225 5317230 +
gtgcaggttttttacatggata

SEQ ID NO: 99433 - DNA, 22 bp, Artificial Sequence
  Synthetic oligonucleotide; TTG chr11 5317209 5317230 5317226 5317231 +
tgcaggttttttacatggatat

SEQ ID NO: 99434 - DNA, 22 bp, Artificial Sequence
  Synthetic oligonucleotide; TTT chr11 5317218 5317239 5317235 5317240 +
tttacatggatatattgcatgc

SEQ ID NO: 99435 - DNA, 22 bp, Artificial Sequence
  Synthetic oligonucleotide; TTT chr11 5317219 5317240 5317236 5317241 +
ttacatggatatattgcatgca

SEQ ID NO: 99436 - DNA, 22 bp, Artificial Sequence
  Synthetic oligonucleotide; TTT chr11 5317220 5317241 5317237 5317242 +
tacatggatatattgcatgcag

SEQ ID NO: 99437 - DNA, 22 bp, Artificial Sequence
  Synthetic oligonucleotide; TTT chr11 5317221 5317242 5317238 5317243 +
acatggatatattgcatgcagt

SEQ ID NO: 99438 - DNA, 22 bp, Artificial Sequence
  Synthetic oligonucleotide; TTA chr11 5317222 5317243 5317239 5317244 +
catggatatattgcatgcagtg

SEQ ID NO: 99439 - DNA, 22 bp, Artificial Sequence
  Synthetic oligonucleotide; TTG chr11 5317235 5317256 5317252 5317257 +
catgcagtggtgagcatactat

SEQ ID NO: 99440 - DNA, 22 bp, Artificial Sequence
  Synthetic oligonucleotide; CTA chr11 5317256 5317277 5317273 5317278 +
tccaatagattttttaaccctc

SEQ ID NO: 99441 - DNA, 22 bp, Artificial Sequence
  Synthetic oligonucleotide; TTT chr11 5317268 5317289 5317285 5317290 +
tttaaccctctcccgcatctct

SEQ ID NO: 99442 - DNA, 22 bp, Artificial Sequence
  Synthetic oligonucleotide; TTT chr11 5317269 5317290 5317286 5317291 +
ttaaccctctcccgcatctctc

SEQ ID NO: 99443 - DNA, 22 bp, Artificial Sequence
  Synthetic oligonucleotide; TTT chr11 5317270 5317291 5317287 5317292 +
taaccctctcccgcatctctcc

SEQ ID NO: 99444 - DNA, 22 bp, Artificial Sequence
  Synthetic oligonucleotide; TTT chr11 5317271 5317292 5317288 5317293 +
aaccctctcccgcatctctccc

SEQ ID NO: 99445 - DNA, 22 bp, Artificial Sequence
  Synthetic oligonucleotide; TTA chr11 5317272 5317293 5317289 5317294 +
accctctcccgcatctctccct

SEQ ID NO: 99446 - DNA, 22 bp, Artificial Sequence
  Synthetic oligonucleotide; CTC chr11 5317278 5317299 5317295 5317300 +
tcccgcatctctccctgcccct

SEQ ID NO: 99447 - DNA, 22 bp, Artificial Sequence
  Synthetic oligonucleotide; CTC chr11 5317280 5317301 5317297 5317302 +
ccgcatctctccctgccccttg

SEQ ID NO: 99448 - DNA, 22 bp, Artificial Sequence
  Synthetic oligonucleotide; CTC chr11 5317289 5317310 5317306 5317311 +
tccctgccccttgtagtagttt

SEQ ID NO: 99449 - DNA, 22 bp, Artificial Sequence
  Synthetic oligonucleotide; CTC chr11 5317291 5317312 5317308 5317313 +
cctgccccttgtagtagtttca

SEQ ID NO: 99450 - DNA, 22 bp, Artificial Sequence
  Synthetic oligonucleotide; CTG chr11 5317295 5317316 5317312 5317317 +
ccccttgtagtagtttcaagtg

SEQ ID NO: 99451 - DNA, 22 bp, Artificial Sequence
  Synthetic oligonucleotide; CTT chr11 5317301 5317322 5317318 5317323 +
gtagtagtttcaagtggctatt

SEQ ID NO: 99452 - DNA, 22 bp, Artificial Sequence
  Synthetic oligonucleotide; TTG chr11 5317302 5317323 5317319 5317324 +
tagtagtttcaagtggctattg

SEQ ID NO: 99453 - DNA, 22 bp, Artificial Sequence
  Synthetic oligonucleotide; TTT chr11 5317311 5317332 5317328 5317333 +
caagtggctattgttcccatgt

SEQ ID NO: 99454 - DNA, 22 bp, Artificial Sequence
  Synthetic oligonucleotide; TTC chr11 5317312 5317333 5317329 5317334 +
aagtggctattgttcccatgtt

SEQ ID NO: 99455 - DNA, 22 bp, Artificial Sequence
  Synthetic oligonucleotide; CTA chr11 5317321 5317342 5317338 5317343 +
ttgttcccatgtttatatccac

SEQ ID NO: 99456 - DNA, 22 bp, Artificial Sequence
  Synthetic oligonucleotide; TTG chr11 5317324 5317345 5317341 5317346 +
ttcccatgtttatatccacgtg

SEQ ID NO: 99457 - DNA, 22 bp, Artificial Sequence
  Synthetic oligonucleotide; TTC chr11 5317327 5317348 5317344 5317349 +
ccatgtttatatccacgtgtac

SEQ ID NO: 99458 - DNA, 22 bp, Artificial Sequence
  Synthetic oligonucleotide; TTT chr11 5317335 5317356 5317352 5317357 +
atatccacgtgtactcaatgtt

SEQ ID NO: 99459 - DNA, 22 bp, Artificial Sequence
  Synthetic oligonucleotide; TTA chr11 5317336 5317357 5317353 5317358 +
tatccacgtgtactcaatgttt

SEQ ID NO: 99460 - DNA, 22 bp, Artificial Sequence
  Synthetic oligonucleotide; CTC chr11 5317351 5317372 5317368 5317373 +
aatgtttagcttccacttataa

SEQ ID NO: 99461 - DNA, 22 bp, Artificial Sequence
  Synthetic oligonucleotide; TTT chr11 5317358 5317379 5317375 5317380 +
agcttccacttataaatgagaa

SEQ ID NO: 99462 - DNA, 22 bp, Artificial Sequence
  Synthetic oligonucleotide; TTA chr11 5317359 5317380 5317376 5317381 +
gcttccacttataaatgagaat

SEQ ID NO: 99463 - DNA, 22 bp, Artificial Sequence
  Synthetic oligonucleotide; CTT chr11 5317363 5317384 5317380 5317385 +
ccacttataaatgagaatatat

SEQ ID NO: 99464 - DNA, 22 bp, Artificial Sequence
  Synthetic oligonucleotide; TTC chr11 5317364 5317385 5317381 5317386 +
cacttataaatgagaatatatg

SEQ ID NO: 99465 - DNA, 22 bp, Artificial Sequence
  Synthetic oligonucleotide; CTT chr11 5317369 5317390 5317386 5317391 +
ataaatgagaatatatggtatt

SEQ ID NO: 99466 - DNA, 22 bp, Artificial Sequence
  Synthetic oligonucleotide; TTA chr11 5317370 5317391 5317387 5317392 +
taaatgagaatatatggtattt

SEQ ID NO: 99467 - DNA, 22 bp, Artificial Sequence
  Synthetic oligonucleotide; TTT chr11 5317392 5317413 5317409 5317414 +
gcttttgtgttcttgcgttaat

SEQ ID NO: 99468 - DNA, 22 bp, Artificial Sequence
  Synthetic oligonucleotide; TTG chr11 5317393 5317414 5317410 5317415 +
cttttgtgttcttgcgttaatt

SEQ ID NO: 99469 - DNA, 22 bp, Artificial Sequence
  Synthetic oligonucleotide; CTT chr11 5317396 5317417 5317413 5317418 +
ttgtgttcttgcgttaatttgc

SEQ ID NO: 99470 - DNA, 22 bp, Artificial Sequence
  Synthetic oligonucleotide; TTT chr11 5317397 5317418 5317414 5317419 +
tgtgttcttgcgttaatttgct

SEQ ID NO: 99471 - DNA, 22 bp, Artificial Sequence
  Synthetic oligonucleotide; TTT chr11 5317398 5317419 5317415 5317420 +
gtgttcttgcgttaatttgctt

SEQ ID NO: 99472 - DNA, 22 bp, Artificial Sequence
  Synthetic oligonucleotide; TTG chr11 5317399 5317420 5317416 5317421 +
tgttcttgcgttaatttgctta

SEQ ID NO: 99473 - DNA, 22 bp, Artificial Sequence
  Synthetic oligonucleotide; TTC chr11 5317404 5317425 5317421 5317426 +
ttgcgttaatttgcttaggatt

SEQ ID NO: 99474 - DNA, 22 bp, Artificial Sequence
  Synthetic oligonucleotide; CTT chr11 5317406 5317427 5317423 5317428 +
gcgttaatttgcttaggattat

SEQ ID NO: 99475 - DNA, 22 bp, Artificial Sequence
  Synthetic oligonucleotide; TTG chr11 5317407 5317428 5317424 5317429 +
cgttaatttgcttaggattata

SEQ ID NO: 99476 - DNA, 22 bp, Artificial Sequence
  Synthetic oligonucleotide; TTA chr11 5317412 5317433 5317429 5317434 +
atttgcttaggattatagcctc

SEQ ID NO: 99477 - DNA, 22 bp, Artificial Sequence
  Synthetic oligonucleotide; TTT chr11 5317416 5317437 5317433 5317438 +
gcttaggattatagcctccagc

SEQ ID NO: 99478 - DNA, 22 bp, Artificial Sequence
  Synthetic oligonucleotide; TTG chr11 5317417 5317438 5317434 5317439 +
cttaggattatagcctccagct

SEQ ID NO: 99479 - DNA, 22 bp, Artificial Sequence
  Synthetic oligonucleotide; CTT chr11 5317420 5317441 5317437 5317442 +
aggattatagcctccagctcca

SEQ ID NO: 99480 - DNA, 22 bp, Artificial Sequence
  Synthetic oligonucleotide; TTA chr11 5317421 5317442 5317438 5317443 +
ggattatagcctccagctccac

SEQ ID NO: 99481 - DNA, 22 bp, Artificial Sequence
  Synthetic oligonucleotide; TTA chr11 5317427 5317448 5317444 5317449 +
tagcctccagctccacccatgt

SEQ ID NO: 99482 - DNA, 22 bp, Artificial Sequence
  Synthetic oligonucleotide; CTC chr11 5317434 5317455 5317451 5317456 +
cagctccacccatgttgctgaa

SEQ ID NO: 99483 - DNA, 22 bp, Artificial Sequence
  Synthetic oligonucleotide; CTC chr11 5317440 5317461 5317457 5317462 +
cacccatgttgctgaaaaggac

SEQ ID NO: 99484 - DNA, 22 bp, Artificial Sequence
  Synthetic oligonucleotide; TTG chr11 5317451 5317472 5317468 5317473 +
ctgaaaaggacatgatttcatt

SEQ ID NO: 99485 - DNA, 22 bp, Artificial Sequence
  Synthetic oligonucleotide; CTG chr11 5317454 5317475 5317471 5317476 +
aaaaggacatgatttcatttgt

SEQ ID NO: 99486 - DNA, 22 bp, Artificial Sequence
  Synthetic oligonucleotide; TTT chr11 5317469 5317490 5317486 5317491 +
catttgttcttattgccacata

SEQ ID NO: 99487 - DNA, 22 bp, Artificial Sequence
  Synthetic oligonucleotide; TTC chr11 5317470 5317491 5317487 5317492 +
atttgttcttattgccacatag

SEQ ID NO: 99488 - DNA, 22 bp, Artificial Sequence
  Synthetic oligonucleotide; TTT chr11 5317474 5317495 5317491 5317496 +
gttcttattgccacatagtggt

SEQ ID NO: 99489 - DNA, 22 bp, Artificial Sequence
  Synthetic oligonucleotide; TTG chr11 5317475 5317496 5317492 5317497 +
ttcttattgccacatagtggtg

SEQ ID NO: 99490 - DNA, 22 bp, Artificial Sequence
  Synthetic oligonucleotide; TTC chr11 5317478 5317499 5317495 5317500 +
ttattgccacatagtggtggtg

SEQ ID NO: 99491 - DNA, 22 bp, Artificial Sequence
  Synthetic oligonucleotide; CTT chr11 5317480 5317501 5317497 5317502 +
attgccacatagtggtggtgta

SEQ ID NO: 99492 - DNA, 22 bp, Artificial Sequence
  Synthetic oligonucleotide; TTA chr11 5317481 5317502 5317498 5317503 +
ttgccacatagtggtggtgtat

SEQ ID NO: 99493 - DNA, 22 bp, Artificial Sequence
  Synthetic oligonucleotide; TTG chr11 5317484 5317505 5317501 5317506 +
ccacatagtggtggtgtatatg

SEQ ID NO: 99494 - DNA, 22 bp, Artificial Sequence
  Synthetic oligonucleotide; TTT chr11 5317517 5317538 5317534 5317539 +
ctttatcccgtccgcctttgat

SEQ ID NO: 99495 - DNA, 22 bp, Artificial Sequence
  Synthetic oligonucleotide; TTC chr11 5317518 5317539 5317535 5317540 +
tttatcccgtccgcctttgata

SEQ ID NO: 99496 - DNA, 22 bp, Artificial Sequence
  Synthetic oligonucleotide; CTT chr11 5317520 5317541 5317537 5317542 +
tatcccgtccgcctttgataga

SEQ ID NO: 99497 - DNA, 22 bp, Artificial Sequence
  Synthetic oligonucleotide; TTT chr11 5317521 5317542 5317538 5317543 +
atcccgtccgcctttgatagac

SEQ ID NO: 99498 - DNA, 22 bp, Artificial Sequence
  Synthetic oligonucleotide; TTA chr11 5317522 5317543 5317539 5317544 +
tcccgtccgcctttgatagaca

SEQ ID NO: 99499 - DNA, 22 bp, Artificial Sequence
  Synthetic oligonucleotide; CTT chr11 5317535 5317556 5317552 5317557 +
tgatagacacctaggccagtta

SEQ ID NO: 99500 - DNA, 22 bp, Artificial Sequence
  Synthetic oligonucleotide; TTT chr11 5317536 5317557 5317553 5317558 +
gatagacacctaggccagttat

SEQ ID NO: 99501 - DNA, 22 bp, Artificial Sequence
  Synthetic oligonucleotide; TTG chr11 5317537 5317558 5317554 5317559 +
atagacacctaggccagttatt

SEQ ID NO: 99502 - DNA, 22 bp, Artificial Sequence
  Synthetic oligonucleotide; CTA chr11 5317548 5317569 5317565 5317570 +
ggccagttatttgtatttgcta

SEQ ID NO: 99503 - DNA, 22 bp, Artificial Sequence
  Synthetic oligonucleotide; TTA chr11 5317557 5317578 5317574 5317579 +
tttgtatttgctattctaaaca

SEQ ID NO: 99504 - DNA, 22 bp, Artificial Sequence
  Synthetic oligonucleotide; TTT chr11 5317560 5317581 5317577 5317582 +
gtatttgctattctaaacagca

SEQ ID NO: 99505 - DNA, 22 bp, Artificial Sequence
  Synthetic oligonucleotide; TTG chr11 5317561 5317582 5317578 5317583 +
tatttgctattctaaacagcat

SEQ ID NO: 99506 - DNA, 22 bp, Artificial Sequence
  Synthetic oligonucleotide; TTT chr11 5317566 5317587 5317583 5317588 +
gctattctaaacagcattacag

SEQ ID NO: 99507 - DNA, 22 bp, Artificial Sequence
  Synthetic oligonucleotide; TTG chr11 5317567 5317588 5317584 5317589 +
ctattctaaacagcattacagt

SEQ ID NO: 99508 - DNA, 22 bp, Artificial Sequence
  Synthetic oligonucleotide; CTA chr11 5317570 5317591 5317587 5317592 +
ttctaaacagcattacagtgaa

SEQ ID NO: 99509 - DNA, 22 bp, Artificial Sequence
  Synthetic oligonucleotide; TTC chr11 5317573 5317594 5317590 5317595 +
taaacagcattacagtgaacat

SEQ ID NO: 99510 - DNA, 22 bp, Artificial Sequence
  Synthetic oligonucleotide; CTA chr11 5317575 5317596 5317592 5317597 +
aacagcattacagtgaacatgc

SEQ ID NO: 99511 - DNA, 22 bp, Artificial Sequence
  Synthetic oligonucleotide; TTA chr11 5317585 5317606 5317602 5317607 +
cagtgaacatgcaagtgcatgt

SEQ ID NO: 99512 - DNA, 22 bp, Artificial Sequence
  Synthetic oligonucleotide; CTA chr11 5317612 5317633 5317629 5317634 +
gttggtctaatgctctgttttc

SEQ ID NO: 99513 - DNA, 22 bp, Artificial Sequence
  Synthetic oligonucleotide; TTG chr11 5317616 5317637 5317633 5317638 +
gtctaatgctctgttttcctat

SEQ ID NO: 99514 - DNA, 22 bp, Artificial Sequence
  Synthetic oligonucleotide; CTA chr11 5317621 5317642 5317638 5317643 +
atgctctgttttcctatggata

SEQ ID NO: 99515 - DNA, 22 bp, Artificial Sequence
  Synthetic oligonucleotide; CTC chr11 5317627 5317648 5317644 5317649 +
tgttttcctatggatatatacc

SEQ ID NO: 99516 - DNA, 22 bp, Artificial Sequence
  Synthetic oligonucleotide; CTG chr11 5317629 5317650 5317646 5317651 +
ttttcctatggatatataccca

SEQ ID NO: 99517 - DNA, 22 bp, Artificial Sequence
  Synthetic oligonucleotide; TTT chr11 5317632 5317653 5317649 5317654 +
tcctatggatatatacccagta

SEQ ID NO: 99518 - DNA, 22 bp, Artificial Sequence
  Synthetic oligonucleotide; TTT chr11 5317633 5317654 5317650 5317655 +
cctatggatatatacccagtag

SEQ ID NO: 99519 - DNA, 22 bp, Artificial Sequence
  Synthetic oligonucleotide; TTC chr11 5317634 5317655 5317651 5317656 +
ctatggatatatacccagtagc

SEQ ID NO: 99520 - DNA, 22 bp, Artificial Sequence
  Synthetic oligonucleotide; CTA chr11 5317637 5317658 5317654 5317659 +
tggatatatacccagtagcggg

SEQ ID NO: 99521 - DNA, 22 bp, Artificial Sequence
  Synthetic oligonucleotide; TTG chr11 5317663 5317684 5317680 5317685 +
ctgtgtcaaattgtagctctgc

SEQ ID NO: 99522 - DNA, 22 bp, Artificial Sequence
  Synthetic oligonucleotide; CTG chr11 5317666 5317687 5317683 5317688 +
tgtcaaattgtagctctgctta

SEQ ID NO: 99523 - DNA, 22 bp, Artificial Sequence
  Synthetic oligonucleotide; TTG chr11 5317676 5317697 5317693 5317698 +
tagctctgcttaaagttctttg

SEQ ID NO: 99524 - DNA, 22 bp, Artificial Sequence
  Synthetic oligonucleotide; CTC chr11 5317682 5317703 5317699 5317704 +
tgcttaaagttctttgaagact

SEQ ID NO: 99525 - DNA, 22 bp, Artificial Sequence
  Synthetic oligonucleotide; CTG chr11 5317684 5317705 5317701 5317706 +
cttaaagttctttgaagactct

SEQ ID NO: 99526 - DNA, 22 bp, Artificial Sequence
  Synthetic oligonucleotide; CTT chr11 5317687 5317708 5317704 5317709 +
aaagttctttgaagactctcca

SEQ ID NO: 99527 - DNA, 22 bp, Artificial Sequence
  Synthetic oligonucleotide; TTA chr11 5317688 5317709 5317705 5317710 +
aagttctttgaagactctccaa

SEQ ID NO: 99528 - DNA, 22 bp, Artificial Sequence
  Synthetic oligonucleotide; TTC chr11 5317694 5317715 5317711 5317716 +
tttgaagactctccaaactgtt

SEQ ID NO: 99529 - DNA, 22 bp, Artificial Sequence
  Synthetic oligonucleotide; CTT chr11 5317696 5317717 5317713 5317718 +
tgaagactctccaaactgtttt

SEQ ID NO: 99530 - DNA, 22 bp, Artificial Sequence
  Synthetic oligonucleotide; TTT chr11 5317697 5317718 5317714 5317719 +
gaagactctccaaactgttttc

SEQ ID NO: 99531 - DNA, 22 bp, Artificial Sequence
  Synthetic oligonucleotide; TTG chr11 5317698 5317719 5317715 5317720 +
aagactctccaaactgttttct

SEQ ID NO: 99532 - DNA, 22 bp, Artificial Sequence
  Synthetic oligonucleotide; CTC chr11 5317705 5317726 5317722 5317727 +
tccaaactgttttctgcagtgg

SEQ ID NO: 99533 - DNA, 22 bp, Artificial Sequence
  Synthetic oligonucleotide; CTC chr11 5317707 5317728 5317724 5317729 +
caaactgttttctgcagtggtt

SEQ ID NO: 99534 - DNA, 22 bp, Artificial Sequence
  Synthetic oligonucleotide; CTG chr11 5317714 5317735 5317731 5317736 +
ttttctgcagtggttgaactaa

SEQ ID NO: 99535 - DNA, 22 bp, Artificial Sequence
  Synthetic oligonucleotide; TTT chr11 5317717 5317738 5317734 5317739 +
tctgcagtggttgaactaattt

SEQ ID NO: 99536 - DNA, 22 bp, Artificial Sequence
  Synthetic oligonucleotide; TTT chr11 5317718 5317739 5317735 5317740 +
ctgcagtggttgaactaattta

SEQ ID NO: 99537 - DNA, 22 bp, Artificial Sequence
  Synthetic oligonucleotide; TTC chr11 5317719 5317740 5317736 5317741 +
tgcagtggttgaactaatttac

SEQ ID NO: 99538 - DNA, 22 bp, Artificial Sequence
  Synthetic oligonucleotide; CTG chr11 5317721 5317742 5317738 5317743 +
cagtggttgaactaatttacat

SEQ ID NO: 99539 - DNA, 22 bp, Artificial Sequence
  Synthetic oligonucleotide; TTG chr11 5317730 5317751 5317747 5317752 +
aactaatttacatccccatcat

SEQ ID NO: 99540 - DNA, 22 bp, Artificial Sequence
  Synthetic oligonucleotide; CTA chr11 5317735 5317756 5317752 5317757 +
atttacatccccatcatcattg

SEQ ID NO: 99541 - DNA, 22 bp, Artificial Sequence
  Synthetic oligonucleotide; TTT chr11 5317739 5317760 5317756 5317761 +
acatccccatcatcattgtata

SEQ ID NO: 99542 - DNA, 22 bp, Artificial Sequence
  Synthetic oligonucleotide; TTA chr11 5317740 5317761 5317757 5317762 +
catccccatcatcattgtataa

SEQ ID NO: 99543 - DNA, 22 bp, Artificial Sequence
  Synthetic oligonucleotide; TTG chr11 5317757 5317778 5317774 5317779 +
tataagtgttcccttttctcca

SEQ ID NO: 99544 - DNA, 22 bp, Artificial Sequence
  Synthetic oligonucleotide; TTC chr11 5317768 5317789 5317785 5317790 +
ccttttctccatagcctcatga

SEQ ID NO: 99545 - DNA, 22 bp, Artificial Sequence
  Synthetic oligonucleotide; CTT chr11 5317772 5317793 5317789 5317794 +
ttctccatagcctcatgagaat

SEQ ID NO: 99546 - DNA, 22 bp, Artificial Sequence
  Synthetic oligonucleotide; TTT chr11 5317773 5317794 5317790 5317795 +
tctccatagcctcatgagaatc

SEQ ID NO: 99547 - DNA, 22 bp, Artificial Sequence
  Synthetic oligonucleotide; TTT chr11 5317774 5317795 5317791 5317796 +
ctccatagcctcatgagaatct

SEQ ID NO: 99548 - DNA, 22 bp, Artificial Sequence
  Synthetic oligonucleotide; TTC chr11 5317775 5317796 5317792 5317797 +
tccatagcctcatgagaatctg

SEQ ID NO: 99549 - DNA, 22 bp, Artificial Sequence
  Synthetic oligonucleotide; CTC chr11 5317777 5317798 5317794 5317799 +
catagcctcatgagaatctgtt

SEQ ID NO: 99550 - DNA, 22 bp, Artificial Sequence
  Synthetic oligonucleotide; CTC chr11 5317786 5317807 5317803 5317808 +
atgagaatctgttttttggctt

SEQ ID NO: 99551 - DNA, 22 bp, Artificial Sequence
  Synthetic oligonucleotide; CTG chr11 5317797 5317818 5317814 5317819 +
ttttttggctttttaaaaatag

SEQ ID NO: 99552 - DNA, 22 bp, Artificial Sequence
  Synthetic oligonucleotide; TTT chr11 5317800 5317821 5317817 5317822 +
tttggctttttaaaaatagcta

SEQ ID NO: 99553 - DNA, 22 bp, Artificial Sequence
  Synthetic oligonucleotide; TTT chr11 5317801 5317822 5317818 5317823 +
ttggctttttaaaaatagctat

SEQ ID NO: 99554 - DNA, 22 bp, Artificial Sequence
  Synthetic oligonucleotide; TTT chr11 5317802 5317823 5317819 5317824 +
tggctttttaaaaatagctatt

SEQ ID NO: 99555 - DNA, 22 bp, Artificial Sequence
  Synthetic oligonucleotide; TTT chr11 5317803 5317824 5317820 5317825 +
ggctttttaaaaatagctattc

SEQ ID NO: 99556 - DNA, 22 bp, Artificial Sequence
  Synthetic oligonucleotide; TTG chr11 5317804 5317825 5317821 5317826 +
gctttttaaaaatagctattct

SEQ ID NO: 99557 - DNA, 22 bp, Artificial Sequence
  Synthetic oligonucleotide; CTT chr11 5317808 5317829 5317825 5317830 +
tttaaaaatagctattctgact

SEQ ID NO: 99558 - DNA, 22 bp, Artificial Sequence
  Synthetic oligonucleotide; TTT chr11 5317809 5317830 5317826 5317831 +
ttaaaaatagctattctgactg

SEQ ID NO: 99559 - DNA, 22 bp, Artificial Sequence
  Synthetic oligonucleotide; TTT chr11 5317810 5317831 5317827 5317832 +
taaaaatagctattctgactgg

SEQ ID NO: 99560 - DNA, 22 bp, Artificial Sequence
  Synthetic oligonucleotide; TTT chr11 5317811 5317832 5317828 5317833 +
aaaaatagctattctgactggt

SEQ ID NO: 99561 - DNA, 22 bp, Artificial Sequence
  Synthetic oligonucleotide; TTA chr11 5317812 5317833 5317829 5317834 +
aaaatagctattctgactggta

SEQ ID NO: 99562 - DNA, 22 bp, Artificial Sequence
  Synthetic oligonucleotide; CTA chr11 5317822 5317843 5317839 5317844 +
ttctgactggtatgagatagta

SEQ ID NO: 99563 - DNA, 22 bp, Artificial Sequence
  Synthetic oligonucleotide; TTC chr11 5317825 5317846 5317842 5317847 +
tgactggtatgagatagtatct

SEQ ID NO: 99564 - DNA, 22 bp, Artificial Sequence
  Synthetic oligonucleotide; CTG chr11 5317827 5317848 5317844 5317849 +
actggtatgagatagtatctct

SEQ ID NO: 99565 - DNA, 22 bp, Artificial Sequence
  Synthetic oligonucleotide; CTG chr11 5317831 5317852 5317848 5317853 +
gtatgagatagtatctcttgtg

SEQ ID NO: 99566 - DNA, 22 bp, Artificial Sequence
  Synthetic oligonucleotide; CTC chr11 5317848 5317869 5317865 5317870 +
ttgtggttttgatttgcatttc

SEQ ID NO: 99567 - DNA, 22 bp, Artificial Sequence
  Synthetic oligonucleotide; CTT chr11 5317850 5317871 5317867 5317872 +
gtggttttgatttgcatttctc

SEQ ID NO: 99568 - DNA, 22 bp, Artificial Sequence
  Synthetic oligonucleotide; TTG chr11 5317851 5317872 5317868 5317873 +
tggttttgatttgcatttctct

SEQ ID NO: 99569 - DNA, 22 bp, Artificial Sequence
  Synthetic oligonucleotide; TTT chr11 5317857 5317878 5317874 5317879 +
tgatttgcatttctctcattag

SEQ ID NO: 99570 - DNA, 22 bp, Artificial Sequence
  Synthetic oligonucleotide; TTT chr11 5317858 5317879 5317875 5317880 +
gatttgcatttctctcattagt

SEQ ID NO: 99571 - DNA, 22 bp, Artificial Sequence
  Synthetic oligonucleotide; TTG chr11 5317859 5317880 5317876 5317881 +
atttgcatttctctcattagtg

SEQ ID NO: 99572 - DNA, 22 bp, Artificial Sequence
  Synthetic oligonucleotide; TTT chr11 5317863 5317884 5317880 5317885 +
gcatttctctcattagtgatga

SEQ ID NO: 99573 - DNA, 22 bp, Artificial Sequence
  Synthetic oligonucleotide; TTG chr11 5317864 5317885 5317881 5317886 +
catttctctcattagtgatgat

SEQ ID NO: 99574 - DNA, 22 bp, Artificial Sequence
  Synthetic oligonucleotide; TTT chr11 5317869 5317890 5317886 5317891 +
ctctcattagtgatgatgatca

SEQ ID NO: 99575 - DNA, 22 bp, Artificial Sequence
  Synthetic oligonucleotide; TTC chr11 5317870 5317891 5317887 5317892 +
tctcattagtgatgatgatcat

SEQ ID NO: 99576 - DNA, 22 bp, Artificial Sequence
  Synthetic oligonucleotide; CTC chr11 5317872 5317893 5317889 5317894 +
tcattagtgatgatgatcattt

SEQ ID NO: 99577 - DNA, 22 bp, Artificial Sequence
  Synthetic oligonucleotide; CTC chr11 5317874 5317895 5317891 5317896 +
attagtgatgatgatcattttt

SEQ ID NO: 99578 - DNA, 22 bp, Artificial Sequence
  Synthetic oligonucleotide; TTA chr11 5317878 5317899 5317895 5317900 +
gtgatgatgatcatttttgtat

SEQ ID NO: 99579 - DNA, 22 bp, Artificial Sequence
  Synthetic oligonucleotide; TTT chr11 5317894 5317915 5317911 5317916 +
ttgtatatatttgttggctgcc

SEQ ID NO: 99580 - DNA, 22 bp, Artificial Sequence
  Synthetic oligonucleotide; TTT chr11 5317895 5317916 5317912 5317917 +
tgtatatatttgttggctgcct

SEQ ID NO: 99581 - DNA, 22 bp, Artificial Sequence
  Synthetic oligonucleotide; TTT chr11 5317896 5317917 5317913 5317918 +
gtatatatttgttggctgcctg

SEQ ID NO: 99582 - DNA, 22 bp, Artificial Sequence
  Synthetic oligonucleotide; TTG chr11 5317897 5317918 5317914 5317919 +
tatatatttgttggctgcctgt

SEQ ID NO: 99583 - DNA, 22 bp, Artificial Sequence
  Synthetic oligonucleotide; TTT chr11 5317906 5317927 5317923 5317928 +
gttggctgcctgtatgtcttct

SEQ ID NO: 99584 - DNA, 22 bp, Artificial Sequence
  Synthetic oligonucleotide; TTG chr11 5317907 5317928 5317924 5317929 +
ttggctgcctgtatgtcttctc

SEQ ID NO: 99585 - DNA, 22 bp, Artificial Sequence
  Synthetic oligonucleotide; TTG chr11 5317910 5317931 5317927 5317932 +
gctgcctgtatgtcttctcttg

SEQ ID NO: 99586 - DNA, 22 bp, Artificial Sequence
  Synthetic oligonucleotide; CTG chr11 5317914 5317935 5317931 5317936 +
cctgtatgtcttctcttgagaa

SEQ ID NO: 99587 - DNA, 22 bp, Artificial Sequence
  Synthetic oligonucleotide; CTG chr11 5317918 5317939 5317935 5317940 +
tatgtcttctcttgagaagagt

SEQ ID NO: 99588 - DNA, 22 bp, Artificial Sequence
  Synthetic oligonucleotide; CTT chr11 5317926 5317947 5317943 5317948 +
ctcttgagaagagtctgttcgt

SEQ ID NO: 99589 - DNA, 22 bp, Artificial Sequence
  Synthetic oligonucleotide; TTC chr11 5317927 5317948 5317944 5317949 +
tcttgagaagagtctgttcgtg

SEQ ID NO: 99590 - DNA, 22 bp, Artificial Sequence
  Synthetic oligonucleotide; CTC chr11 5317929 5317950 5317946 5317951 +
ttgagaagagtctgttcgtgga

SEQ ID NO: 99591 - DNA, 22 bp, Artificial Sequence
  Synthetic oligonucleotide; CTT chr11 5317931 5317952 5317948 5317953 +
gagaagagtctgttcgtggatt

SEQ ID NO: 99592 - DNA, 22 bp, Artificial Sequence
  Synthetic oligonucleotide; TTG chr11 5317932 5317953 5317949 5317954 +
agaagagtctgttcgtggattt

SEQ ID NO: 99593 - DNA, 22 bp, Artificial Sequence
  Synthetic oligonucleotide; CTG chr11 5317943 5317964 5317960 5317965 +
ttcgtggattttgcccattttt

SEQ ID NO: 99594 - DNA, 22 bp, Artificial Sequence
  Synthetic oligonucleotide; TTC chr11 5317946 5317967 5317963 5317968 +
gtggattttgcccatttttaaa

SEQ ID NO: 99595 - DNA, 22 bp, Artificial Sequence
  Synthetic oligonucleotide; TTT chr11 5317954 5317975 5317971 5317976 +
tgcccatttttaaatggaattg

SEQ ID NO: 99596 - DNA, 22 bp, Artificial Sequence
  Synthetic oligonucleotide; TTT chr11 5317955 5317976 5317972 5317977 +
gcccatttttaaatggaattgt

SEQ ID NO: 99597 - DNA, 22 bp, Artificial Sequence
  Synthetic oligonucleotide; TTG chr11 5317956 5317977 5317973 5317978 +
cccatttttaaatggaattgtt

SEQ ID NO: 99598 - DNA, 22 bp, Artificial Sequence
  Synthetic oligonucleotide; TTT chr11 5317963 5317984 5317980 5317985 +
ttaaatggaattgtttgctttt

SEQ ID NO: 99599 - DNA, 22 bp, Artificial Sequence
  Synthetic oligonucleotide; TTT chr11 5317964 5317985 5317981 5317986 +
taaatggaattgtttgcttttt

SEQ ID NO: 99600 - DNA, 22 bp, Artificial Sequence
  Synthetic oligonucleotide; TTT chr11 5317965 5317986 5317982 5317987 +
aaatggaattgtttgctttttg

SEQ ID NO: 99601 - DNA, 22 bp, Artificial Sequence
  Synthetic oligonucleotide; TTA chr11 5317966 5317987 5317983 5317988 +
aatggaattgtttgctttttgc

SEQ ID NO: 99602 - DNA, 22 bp, Artificial Sequence
  Synthetic oligonucleotide; TTG chr11 5317976 5317997 5317993 5317998 +
tttgctttttgcttgctgatat

SEQ ID NO: 99603 - DNA, 22 bp, Artificial Sequence
  Synthetic oligonucleotide; TTT chr11 5317979 5318000 5317996 5318001 +
gctttttgcttgctgatatgtt

SEQ ID NO: 99604 - DNA, 22 bp, Artificial Sequence
  Synthetic oligonucleotide; TTG chr11 5317980 5318001 5317997 5318002 +
ctttttgcttgctgatatgttc

SEQ ID NO: 99605 - DNA, 22 bp, Artificial Sequence
  Synthetic oligonucleotide; CTT chr11 5317983 5318004 5318000 5318005 +
tttgcttgctgatatgttcgaa

SEQ ID NO: 99606 - DNA, 22 bp, Artificial Sequence
  Synthetic oligonucleotide; TTT chr11 5317984 5318005 5318001 5318006 +
ttgcttgctgatatgttcgaat

SEQ ID NO: 99607 - DNA, 22 bp, Artificial Sequence
  Synthetic oligonucleotide; TTT chr11 5317985 5318006 5318002 5318007 +
tgcttgctgatatgttcgaatt

SEQ ID NO: 99608 - DNA, 22 bp, Artificial Sequence
  Synthetic oligonucleotide; TTT chr11 5317986 5318007 5318003 5318008 +
gcttgctgatatgttcgaattc

SEQ ID NO: 99609 - DNA, 22 bp, Artificial Sequence
  Synthetic oligonucleotide; TTG chr11 5317987 5318008 5318004 5318009 +
cttgctgatatgttcgaattcc

SEQ ID NO: 99610 - DNA, 22 bp, Artificial Sequence
  Synthetic oligonucleotide; CTT chr11 5317990 5318011 5318007 5318012 +
gctgatatgttcgaattcctta

SEQ ID NO: 99611 - DNA, 22 bp, Artificial Sequence
  Synthetic oligonucleotide; TTG chr11 5317991 5318012 5318008 5318013 +
ctgatatgttcgaattccttat

SEQ ID NO: 99612 - DNA, 22 bp, Artificial Sequence
  Synthetic oligonucleotide; CTG chr11 5317994 5318015 5318011 5318016 +
atatgttcgaattccttataga

SEQ ID NO: 99613 - DNA, 22 bp, Artificial Sequence
  Synthetic oligonucleotide; TTC chr11 5318002 5318023 5318019 5318024 +
gaattccttatagattctgaat

SEQ ID NO: 99614 - DNA, 22 bp, Artificial Sequence
  Synthetic oligonucleotide; TTC chr11 5318008 5318029 5318025 5318030 +
cttatagattctgaatattaga

SEQ ID NO: 99615 - DNA, 22 bp, Artificial Sequence
  Synthetic oligonucleotide; CTT chr11 5318011 5318032 5318028 5318033 +
atagattctgaatattagacct

SEQ ID NO: 99616 - DNA, 22 bp, Artificial Sequence
  Synthetic oligonucleotide; TTA chr11 5318012 5318033 5318029 5318034 +
tagattctgaatattagacctt

SEQ ID NO: 99617 - DNA, 22 bp, Artificial Sequence
  Synthetic oligonucleotide; TTC chr11 5318019 5318040 5318036 5318041 +
tgaatattagaccttttccaga

SEQ ID NO: 99618 - DNA, 22 bp, Artificial Sequence
  Synthetic oligonucleotide; CTG chr11 5318021 5318042 5318038 5318043 +
aatattagaccttttccagatg

SEQ ID NO: 99619 - DNA, 22 bp, Artificial Sequence
  Synthetic oligonucleotide; TTA chr11 5318028 5318049 5318045 5318050 +
gaccttttccagatgcacagtt

SEQ ID NO: 99620 - DNA, 22 bp, Artificial Sequence
  Synthetic oligonucleotide; CTT chr11 5318034 5318055 5318051 5318056 +
ttccagatgcacagtttgtgaa

SEQ ID NO: 99621 - DNA, 22 bp, Artificial Sequence
  Synthetic oligonucleotide; TTT chr11 5318035 5318056 5318052 5318057 +
tccagatgcacagtttgtgaat

SEQ ID NO: 99622 - DNA, 22 bp, Artificial Sequence
  Synthetic oligonucleotide; TTT chr11 5318036 5318057 5318053 5318058 +
ccagatgcacagtttgtgaata

SEQ ID NO: 99623 - DNA, 22 bp, Artificial Sequence
  Synthetic oligonucleotide; TTC chr11 5318037 5318058 5318054 5318059 +
cagatgcacagtttgtgaatag

SEQ ID NO: 99624 - DNA, 22 bp, Artificial Sequence
  Synthetic oligonucleotide; TTT chr11 5318051 5318072 5318068 5318073 +
gtgaatagtttctcctatcctg

SEQ ID NO: 99625 - DNA, 22 bp, Artificial Sequence
  Synthetic oligonucleotide; TTG chr11 5318052 5318073 5318069 5318074 +
tgaatagtttctcctatcctgt

SEQ ID NO: 99626 - DNA, 22 bp, Artificial Sequence
  Synthetic oligonucleotide; TTT chr11 5318062 5318083 5318079 5318084 +
ctcctatcctgtagattgtcag

SEQ ID NO: 99627 - DNA, 22 bp, Artificial Sequence
  Synthetic oligonucleotide; TTC chr11 5318063 5318084 5318080 5318085 +
tcctatcctgtagattgtcagt

SEQ ID NO: 99628 - DNA, 22 bp, Artificial Sequence
  Synthetic oligonucleotide; CTC chr11 5318065 5318086 5318082 5318087 +
ctatcctgtagattgtcagttt

SEQ ID NO: 99629 - DNA, 22 bp, Artificial Sequence
  Synthetic oligonucleotide; CTA chr11 5318068 5318089 5318085 5318090 +
tcctgtagattgtcagtttact

SEQ ID NO: 99630 - DNA, 22 bp, Artificial Sequence
  Synthetic oligonucleotide; CTG chr11 5318073 5318094 5318090 5318095 +
tagattgtcagtttactctgtt

SEQ ID NO: 99631 - DNA, 22 bp, Artificial Sequence
  Synthetic oligonucleotide; TTG chr11 5318080 5318101 5318097 5318102 +
tcagtttactctgttgatagtt

SEQ ID NO: 99632 - DNA, 22 bp, Artificial Sequence
  Synthetic oligonucleotide; TTT chr11 5318087 5318108 5318104 5318109 +
actctgttgatagtttcttctg

SEQ ID NO: 99633 - DNA, 22 bp, Artificial Sequence
  Synthetic oligonucleotide; TTA chr11 5318088 5318109 5318105 5318110 +
ctctgttgatagtttcttctgc

SEQ ID NO: 99634 - DNA, 22 bp, Artificial Sequence
  Synthetic oligonucleotide; CTC chr11 5318091 5318112 5318108 5318113 +
tgttgatagtttcttctgctgc

SEQ ID NO: 99635 - DNA, 22 bp, Artificial Sequence
  Synthetic oligonucleotide; CTG chr11 5318093 5318114 5318110 5318115 +
ttgatagtttcttctgctgcac

SEQ ID NO: 99636 - DNA, 22 bp, Artificial Sequence
  Synthetic oligonucleotide; TTG chr11 5318096 5318117 5318113 5318118 +
atagtttcttctgctgcacaga

SEQ ID NO: 99637 - DNA, 22 bp, Artificial Sequence
  Synthetic oligonucleotide; TTT chr11 5318103 5318124 5318120 5318125 +
cttctgctgcacagaagctctt

SEQ ID NO: 99638 - DNA, 22 bp, Artificial Sequence
  Synthetic oligonucleotide; TTC chr11 5318104 5318125 5318121 5318126 +
ttctgctgcacagaagctcttt

SEQ ID NO: 99639 - DNA, 22 bp, Artificial Sequence
  Synthetic oligonucleotide; CTT chr11 5318106 5318127 5318123 5318128 +
ctgctgcacagaagctcttttt

SEQ ID NO: 99640 - DNA, 22 bp, Artificial Sequence
  Synthetic oligonucleotide; TTC chr11 5318107 5318128 5318124 5318129 +
tgctgcacagaagctcttttta

SEQ ID NO: 99641 - DNA, 22 bp, Artificial Sequence
  Synthetic oligonucleotide; CTG chr11 5318109 5318130 5318126 5318131 +
ctgcacagaagctctttttatt

SEQ ID NO: 99642 - DNA, 22 bp, Artificial Sequence
  Synthetic oligonucleotide; CTG chr11 5318112 5318133 5318129 5318134 +
cacagaagctctttttattatt

SEQ ID NO: 99643 - DNA, 22 bp, Artificial Sequence
  Synthetic oligonucleotide; CTC chr11 5318123 5318144 5318140 5318145 +
tttttattattattattatact

SEQ ID NO: 99644 - DNA, 22 bp, Artificial Sequence
  Synthetic oligonucleotide; CTT chr11 5318125 5318146 5318142 5318147 +
tttattattattattatacttt

SEQ ID NO: 99645 - DNA, 22 bp, Artificial Sequence
  Synthetic oligonucleotide; TTT chr11 5318126 5318147 5318143 5318148 +
ttattattattattatacttta

SEQ ID NO: 99646 - DNA, 22 bp, Artificial Sequence
  Synthetic oligonucleotide; TTT chr11 5318127 5318148 5318144 5318149 +
tattattattattatactttaa

SEQ ID NO: 99647 - DNA, 22 bp, Artificial Sequence
  Synthetic oligonucleotide; TTT chr11 5318128 5318149 5318145 5318150 +
attattattattatactttaag

SEQ ID NO: 99648 - DNA, 22 bp, Artificial Sequence
  Synthetic oligonucleotide; TTA chr11 5318129 5318150 5318146 5318151 +
ttattattattatactttaagt

SEQ ID NO: 99649 - DNA, 22 bp, Artificial Sequence
  Synthetic oligonucleotide; TTA chr11 5318132 5318153 5318149 5318154 +
ttattattatactttaagttct

SEQ ID NO: 99650 - DNA, 22 bp, Artificial Sequence
  Synthetic oligonucleotide; TTA chr11 5318135 5318156 5318152 5318157 +
ttattatactttaagttctagg

SEQ ID NO: 99651 - DNA, 22 bp, Artificial Sequence
  Synthetic oligonucleotide; TTA chr11 5318138 5318159 5318155 5318160 +
ttatactttaagttctagggta

SEQ ID NO: 99652 - DNA, 22 bp, Artificial Sequence
  Synthetic oligonucleotide; TTA chr11 5318141 5318162 5318158 5318163 +
tactttaagttctagggtacat

SEQ ID NO: 99653 - DNA, 22 bp, Artificial Sequence
  Synthetic oligonucleotide; CTT chr11 5318146 5318167 5318163 5318168 +
taagttctagggtacatgtgcg

SEQ ID NO: 99654 - DNA, 22 bp, Artificial Sequence
  Synthetic oligonucleotide; TTT chr11 5318147 5318168 5318164 5318169 +
aagttctagggtacatgtgcgc

SEQ ID NO: 99655 - DNA, 22 bp, Artificial Sequence
  Synthetic oligonucleotide; TTA chr11 5318148 5318169 5318165 5318170 +
agttctagggtacatgtgcgca

SEQ ID NO: 99656 - DNA, 22 bp, Artificial Sequence
  Synthetic oligonucleotide; TTC chr11 5318153 5318174 5318170 5318175 +
tagggtacatgtgcgcaacgtg

SEQ ID NO: 99657 - DNA, 22 bp, Artificial Sequence
  Synthetic oligonucleotide; CTA chr11 5318155 5318176 5318172 5318177 +
gggtacatgtgcgcaacgtgca

SEQ ID NO: 99658 - DNA, 22 bp, Artificial Sequence
  Synthetic oligonucleotide; TTT chr11 5318182 5318203 5318199 5318204 +
gttacatatgtatacatgtgcc

SEQ ID NO: 99659 - DNA, 22 bp, Artificial Sequence
  Synthetic oligonucleotide; TTG chr11 5318183 5318204 5318200 5318205 +
ttacatatgtatacatgtgcca

SEQ ID NO: 99660 - DNA, 22 bp, Artificial Sequence
  Synthetic oligonucleotide; TTA chr11 5318186 5318207 5318203 5318208 +
catatgtatacatgtgccatgt

SEQ ID NO: 99661 - DNA, 22 bp, Artificial Sequence
  Synthetic oligonucleotide; TTG chr11 5318210 5318231 5318227 5318232 +
gtgtgctgcacccattaactca

SEQ ID NO: 99662 - DNA, 22 bp, Artificial Sequence
  Synthetic oligonucleotide; CTG chr11 5318218 5318239 5318235 5318240 +
cacccattaactcatcatttac

SEQ ID NO: 99663 - DNA, 22 bp, Artificial Sequence
  Synthetic oligonucleotide; TTA chr11 5318227 5318248 5318244 5318249 +
actcatcatttacattaggtat

SEQ ID NO: 99664 - DNA, 22 bp, Artificial Sequence
  Synthetic oligonucleotide; CTC chr11 5318231 5318252 5318248 5318253 +
atcatttacattaggtatatct

SEQ ID NO: 99665 - DNA, 22 bp, Artificial Sequence
  Synthetic oligonucleotide; TTT chr11 5318238 5318259 5318255 5318260 +
acattaggtatatctcctaatg

SEQ ID NO: 99666 - DNA, 22 bp, Artificial Sequence
  Synthetic oligonucleotide; TTA chr11 5318239 5318260 5318256 5318261 +
cattaggtatatctcctaatgc

SEQ ID NO: 99667 - DNA, 22 bp, Artificial Sequence
  Synthetic oligonucleotide; TTA chr11 5318244 5318265 5318261 5318266 +
ggtatatctcctaatgctatcc

SEQ ID NO: 99668 - DNA, 22 bp, Artificial Sequence
  Synthetic oligonucleotide; CTC chr11 5318254 5318275 5318271 5318276 +
ctaatgctatccctctccaccc

SEQ ID NO: 99669 - DNA, 22 bp, Artificial Sequence
  Synthetic oligonucleotide; CTA chr11 5318257 5318278 5318274 5318279 +
atgctatccctctccacccccc

SEQ ID NO: 99670 - DNA, 22 bp, Artificial Sequence
  Synthetic oligonucleotide; CTA chr11 5318263 5318284 5318280 5318285 +
tccctctccaccccccaccccc

SEQ ID NO: 99671 - DNA, 22 bp, Artificial Sequence
  Synthetic oligonucleotide; CTC chr11 5318269 5318290 5318286 5318291 +
tccaccccccacccccacccca

SEQ ID NO: 99672 - DNA, 22 bp, Artificial Sequence
  Synthetic oligonucleotide; CTC chr11 5318271 5318292 5318288 5318293 +
caccccccacccccaccccaca

SEQ ID NO: 99673 - DNA, 22 bp, Artificial Sequence
  Synthetic oligonucleotide; CTG chr11 5318303 5318324 5318320 5318325 +
gtgtgtgatgttccccttcctc

SEQ ID NO: 99674 - DNA, 22 bp, Artificial Sequence
  Synthetic oligonucleotide; TTC chr11 5318316 5318337 5318333 5318338 +
cccttcctctgtccaagtgttc

SEQ ID NO: 99675 - DNA, 22 bp, Artificial Sequence
  Synthetic oligonucleotide; CTT chr11 5318321 5318342 5318338 5318343 +
cctctgtccaagtgttctcatt

SEQ ID NO: 99676 - DNA, 22 bp, Artificial Sequence
  Synthetic oligonucleotide; TTC chr11 5318322 5318343 5318339 5318344 +
ctctgtccaagtgttctcattg

SEQ ID NO: 99677 - DNA, 22 bp, Artificial Sequence
  Synthetic oligonucleotide; CTC chr11 5318325 5318346 5318342 5318347 +
tgtccaagtgttctcattgttc

SEQ ID NO: 99678 - DNA, 22 bp, Artificial Sequence
  Synthetic oligonucleotide; CTG chr11 5318327 5318348 5318344 5318349 +
tccaagtgttctcattgttcaa

SEQ ID NO: 99679 - DNA, 22 bp, Artificial Sequence
  Synthetic oligonucleotide; TTC chr11 5318338 5318359 5318355 5318360 +
tcattgttcaattcccacctat

SEQ ID NO: 99680 - DNA, 22 bp, Artificial Sequence
  Synthetic oligonucleotide; CTC chr11 5318340 5318361 5318357 5318362 +
attgttcaattcccacctataa

SEQ ID NO: 99681 - DNA, 22 bp, Artificial Sequence
  Synthetic oligonucleotide; TTG chr11 5318344 5318365 5318361 5318366 +
ttcaattcccacctataagtga

SEQ ID NO: 99682 - DNA, 22 bp, Artificial Sequence
  Synthetic oligonucleotide; TTC chr11 5318347 5318368 5318364 5318369 +
aattcccacctataagtgagaa

SEQ ID NO: 99683 - DNA, 22 bp, Artificial Sequence
  Synthetic oligonucleotide; TTC chr11 5318352 5318373 5318369 5318374 +
ccacctataagtgagaacatgt

SEQ ID NO: 99684 - DNA, 22 bp, Artificial Sequence
  Synthetic oligonucleotide; CTA chr11 5318359 5318380 5318376 5318381 +
taagtgagaacatgtggtattt

SEQ ID NO: 99685 - DNA, 22 bp, Artificial Sequence
  Synthetic oligonucleotide; TTT chr11 5318381 5318402 5318398 5318403 +
ggttttttgtccttgtgatagt

SEQ ID NO: 99686 - DNA, 22 bp, Artificial Sequence
  Synthetic oligonucleotide; TTG chr11 5318382 5318403 5318399 5318404 +
gttttttgtccttgtgatagtt

SEQ ID NO: 99687 - DNA, 22 bp, Artificial Sequence
  Synthetic oligonucleotide; TTT chr11 5318386 5318407 5318403 5318408 +
tttgtccttgtgatagtttgct

SEQ ID NO: 99688 - DNA, 22 bp, Artificial Sequence
  Synthetic oligonucleotide; TTT chr11 5318387 5318408 5318404 5318409 +
ttgtccttgtgatagtttgctg

SEQ ID NO: 99689 - DNA, 22 bp, Artificial Sequence
  Synthetic oligonucleotide; TTT chr11 5318388 5318409 5318405 5318410 +
tgtccttgtgatagtttgctga

SEQ ID NO: 99690 - DNA, 22 bp, Artificial Sequence
  Synthetic oligonucleotide; TTT chr11 5318389 5318410 5318406 5318411 +
gtccttgtgatagtttgctgag

SEQ ID NO: 99691 - DNA, 22 bp, Artificial Sequence
  Synthetic oligonucleotide; TTG chr11 5318390 5318411 5318407 5318412 +
tccttgtgatagtttgctgaga

SEQ ID NO: 99692 - DNA, 22 bp, Artificial Sequence
  Synthetic oligonucleotide; CTT chr11 5318395 5318416 5318412 5318417 +
gtgatagtttgctgagaatgat

SEQ ID NO: 99693 - DNA, 22 bp, Artificial Sequence
  Synthetic oligonucleotide; TTG chr11 5318396 5318417 5318413 5318418 +
tgatagtttgctgagaatgatg

SEQ ID NO: 99694 - DNA, 22 bp, Artificial Sequence
  Synthetic oligonucleotide; TTT chr11 5318405 5318426 5318422 5318427 +
gctgagaatgatggtttccagc

SEQ ID NO: 99695 - DNA, 22 bp, Artificial Sequence
  Synthetic oligonucleotide; TTG chr11 5318406 5318427 5318423 5318428 +
ctgagaatgatggtttccagct

SEQ ID NO: 99696 - DNA, 22 bp, Artificial Sequence
  Synthetic oligonucleotide; CTG chr11 5318409 5318430 5318426 5318431 +
agaatgatggtttccagcttca

SEQ ID NO: 99697 - DNA, 22 bp, Artificial Sequence
  Synthetic oligonucleotide; TTT chr11 5318422 5318443 5318439 5318444 +
ccagcttcatccatgtccctac

SEQ ID NO: 99698 - DNA, 22 bp, Artificial Sequence
  Synthetic oligonucleotide; TTC chr11 5318423 5318444 5318440 5318445 +
cagcttcatccatgtccctaca

SEQ ID NO: 99699 - DNA, 22 bp, Artificial Sequence
  Synthetic oligonucleotide; CTT chr11 5318429 5318450 5318446 5318451 +
catccatgtccctacaaaggac

SEQ ID NO: 99700 - DNA, 22 bp, Artificial Sequence
  Synthetic oligonucleotide; TTC chr11 5318430 5318451 5318447 5318452 +
atccatgtccctacaaaggaca

SEQ ID NO: 99701 - DNA, 22 bp, Artificial Sequence
  Synthetic oligonucleotide; CTA chr11 5318443 5318464 5318460 5318465 +
caaaggacatgaactcatcatt

SEQ ID NO: 99702 - DNA, 22 bp, Artificial Sequence
  Synthetic oligonucleotide; CTC chr11 5318459 5318480 5318476 5318481 +
atcattttttatggctgcatag

SEQ ID NO: 99703 - DNA, 22 bp, Artificial Sequence
  Synthetic oligonucleotide; TTT chr11 5318466 5318487 5318483 5318488 +
tttatggctgcatagtattcca

SEQ ID NO: 99704 - DNA, 22 bp, Artificial Sequence
  Synthetic oligonucleotide; TTT chr11 5318467 5318488 5318484 5318489 +
ttatggctgcatagtattccat

SEQ ID NO: 99705 - DNA, 22 bp, Artificial Sequence
  Synthetic oligonucleotide; TTT chr11 5318468 5318489 5318485 5318490 +
tatggctgcatagtattccatg

SEQ ID NO: 99706 - DNA, 22 bp, Artificial Sequence
  Synthetic oligonucleotide; TTT chr11 5318469 5318490 5318486 5318491 +
atggctgcatagtattccatgg

SEQ ID NO: 99707 - DNA, 22 bp, Artificial Sequence
  Synthetic oligonucleotide; TTA chr11 5318470 5318491 5318487 5318492 +
tggctgcatagtattccatggt

SEQ ID NO: 99708 - DNA, 22 bp, Artificial Sequence
  Synthetic oligonucleotide; CTG chr11 5318476 5318497 5318493 5318498 +
catagtattccatggtgtatat

SEQ ID NO: 99709 - DNA, 22 bp, Artificial Sequence
  Synthetic oligonucleotide; TTC chr11 5318486 5318507 5318503 5318508 +
catggtgtatatgtgccacatt

SEQ ID NO: 99710 - DNA, 22 bp, Artificial Sequence
  Synthetic oligonucleotide; TTT chr11 5318509 5318530 5318526 5318531 +
tcttaatccattctatcattgt

SEQ ID NO: 99711 - DNA, 22 bp, Artificial Sequence
  Synthetic oligonucleotide; TTT chr11 5318510 5318531 5318527 5318532 +
cttaatccattctatcattgtt

SEQ ID NO: 99712 - DNA, 22 bp, Artificial Sequence
  Synthetic oligonucleotide; TTC chr11 5318511 5318532 5318528 5318533 +
ttaatccattctatcattgttg

SEQ ID NO: 99713 - DNA, 22 bp, Artificial Sequence
  Synthetic oligonucleotide; CTT chr11 5318513 5318534 5318530 5318535 +
aatccattctatcattgttgga

SEQ ID NO: 99714 - DNA, 22 bp, Artificial Sequence
  Synthetic oligonucleotide; TTA chr11 5318514 5318535 5318531 5318536 +
atccattctatcattgttggac

SEQ ID NO: 99715 - DNA, 22 bp, Artificial Sequence
  Synthetic oligonucleotide; TTC chr11 5318522 5318543 5318539 5318544 +
tatcattgttggacatttgggt

SEQ ID NO: 99716 - DNA, 22 bp, Artificial Sequence
  Synthetic oligonucleotide; CTA chr11 5318524 5318545 5318541 5318546 +
tcattgttggacatttgggttg

SEQ ID NO: 99717 - DNA, 22 bp, Artificial Sequence
  Synthetic oligonucleotide; TTG chr11 5318530 5318551 5318547 5318552 +
ttggacatttgggttggttcca

SEQ ID NO: 99718 - DNA, 22 bp, Artificial Sequence
  Synthetic oligonucleotide; TTG chr11 5318533 5318554 5318550 5318555 +
gacatttgggttggttccaagt

SEQ ID NO: 99719 - DNA, 22 bp, Artificial Sequence
  Synthetic oligonucleotide; TTT chr11 5318540 5318561 5318557 5318562 +
gggttggttccaagtctttgtt

SEQ ID NO: 99720 - DNA, 22 bp, Artificial Sequence
  Synthetic oligonucleotide; TTG chr11 5318541 5318562 5318558 5318563 +
ggttggttccaagtctttgtta

SEQ ID NO: 99721 - DNA, 22 bp, Artificial Sequence
  Synthetic oligonucleotide; TTG chr11 5318546 5318567 5318563 5318568 +
gttccaagtctttgttattgtg

SEQ ID NO: 99722 - DNA, 22 bp, Artificial Sequence
  Synthetic oligonucleotide; TTC chr11 5318550 5318571 5318567 5318572 +
caagtctttgttattgtgaata

SEQ ID NO: 99723 - DNA, 22 bp, Artificial Sequence
  Synthetic oligonucleotide; CTT chr11 5318558 5318579 5318575 5318580 +
tgttattgtgaatagtgaagct

SEQ ID NO: 99724 - DNA, 22 bp, Artificial Sequence
  Synthetic oligonucleotide; TTT chr11 5318559 5318580 5318576 5318581 +
gttattgtgaatagtgaagctc

SEQ ID NO: 99725 - DNA, 22 bp, Artificial Sequence
  Synthetic oligonucleotide; TTG chr11 5318560 5318581 5318577 5318582 +
ttattgtgaatagtgaagctct

SEQ ID NO: 99726 - DNA, 22 bp, Artificial Sequence
  Synthetic oligonucleotide; TTA chr11 5318563 5318584 5318580 5318585 +
ttgtgaatagtgaagctcttta

SEQ ID NO: 99727 - DNA, 22 bp, Artificial Sequence
  Synthetic oligonucleotide; TTG chr11 5318566 5318587 5318583 5318588 +
tgaatagtgaagctctttagtt

SEQ ID NO: 99728 - DNA, 22 bp, Artificial Sequence
  Synthetic oligonucleotide; CTC chr11 5318581 5318602 5318598 5318603 +
tttagtttaattaggttccact

SEQ ID NO: 99729 - DNA, 22 bp, Artificial Sequence
  Synthetic oligonucleotide; CTT chr11 5318583 5318604 5318600 5318605 +
tagtttaattaggttccacttg

SEQ ID NO: 99730 - DNA, 22 bp, Artificial Sequence
  Synthetic oligonucleotide; TTT chr11 5318584 5318605 5318601 5318606 +
agtttaattaggttccacttgt

SEQ ID NO: 99731 - DNA, 22 bp, Artificial Sequence
  Synthetic oligonucleotide; TTA chr11 5318585 5318606 5318602 5318607 +
gtttaattaggttccacttgtg

SEQ ID NO: 99732 - DNA, 22 bp, Artificial Sequence
  Synthetic oligonucleotide; TTT chr11 5318589 5318610 5318606 5318611 +
aattaggttccacttgtgaatt

SEQ ID NO: 99733 - DNA, 22 bp, Artificial Sequence
  Synthetic oligonucleotide; TTA chr11 5318590 5318611 5318607 5318612 +
attaggttccacttgtgaattt

SEQ ID NO: 99734 - DNA, 22 bp, Artificial Sequence
  Synthetic oligonucleotide; TTA chr11 5318594 5318615 5318611 5318616 +
ggttccacttgtgaatttttct

SEQ ID NO: 99735 - DNA, 22 bp, Artificial Sequence
  Synthetic oligonucleotide; TTC chr11 5318599 5318620 5318616 5318621 +
cacttgtgaatttttctttgca

SEQ ID NO: 99736 - DNA, 22 bp, Artificial Sequence
  Synthetic oligonucleotide; CTT chr11 5318604 5318625 5318621 5318626 +
gtgaatttttctttgcattgca

SEQ ID NO: 99737 - DNA, 22 bp, Artificial Sequence
  Synthetic oligonucleotide; TTG chr11 5318605 5318626 5318622 5318627 +
tgaatttttctttgcattgcaa

SEQ ID NO: 99738 - DNA, 22 bp, Artificial Sequence
  Synthetic oligonucleotide; TTT chr11 5318612 5318633 5318629 5318634 +
ttctttgcattgcaattgcttt

SEQ ID NO: 99739 - DNA, 22 bp, Artificial Sequence
  Synthetic oligonucleotide; TTT chr11 5318613 5318634 5318630 5318635 +
tctttgcattgcaattgctttt

SEQ ID NO: 99740 - DNA, 22 bp, Artificial Sequence
  Synthetic oligonucleotide; TTT chr11 5318614 5318635 5318631 5318636 +
ctttgcattgcaattgcttttg

SEQ ID NO: 99741 - DNA, 22 bp, Artificial Sequence
  Synthetic oligonucleotide; TTC chr11 5318615 5318636 5318632 5318637 +
tttgcattgcaattgcttttgg

SEQ ID NO: 99742 - DNA, 22 bp, Artificial Sequence
  Synthetic oligonucleotide; CTT chr11 5318617 5318638 5318634 5318639 +
tgcattgcaattgcttttgggg

SEQ ID NO: 99743 - DNA, 22 bp, Artificial Sequence
  Synthetic oligonucleotide; TTT chr11 5318618 5318639 5318635 5318640 +
gcattgcaattgcttttggggg

SEQ ID NO: 99744 - DNA, 22 bp, Artificial Sequence
  Synthetic oligonucleotide; TTG chr11 5318619 5318640 5318636 5318641 +
cattgcaattgcttttgggggc

SEQ ID NO: 99745 - DNA, 22 bp, Artificial Sequence
  Synthetic oligonucleotide; TTG chr11 5318624 5318645 5318641 5318646 +
caattgcttttgggggcttagc

SEQ ID NO: 99746 - DNA, 22 bp, Artificial Sequence
  Synthetic oligonucleotide; TTG chr11 5318630 5318651 5318647 5318652 +
cttttgggggcttagccaaaaa

SEQ ID NO: 99747 - DNA, 22 bp, Artificial Sequence
  Synthetic oligonucleotide; CTT chr11 5318633 5318654 5318650 5318655 +
ttgggggcttagccaaaaatgc

SEQ ID NO: 99748 - DNA, 22 bp, Artificial Sequence
  Synthetic oligonucleotide; TTT chr11 5318634 5318655 5318651 5318656 +
tgggggcttagccaaaaatgca

SEQ ID NO: 99749 - DNA, 22 bp, Artificial Sequence
  Synthetic oligonucleotide; TTT chr11 5318635 5318656 5318652 5318657 +
gggggcttagccaaaaatgcac

SEQ ID NO: 99750 - DNA, 22 bp, Artificial Sequence
  Synthetic oligonucleotide; TTG chr11 5318636 5318657 5318653 5318658 +
ggggcttagccaaaaatgcact

SEQ ID NO: 99751 - DNA, 22 bp, Artificial Sequence
  Synthetic oligonucleotide; CTT chr11 5318643 5318664 5318660 5318665 +
agccaaaaatgcactgccagtg

SEQ ID NO: 99752 - DNA, 22 bp, Artificial Sequence
  Synthetic oligonucleotide; TTA chr11 5318644 5318665 5318661 5318666 +
gccaaaaatgcactgccagtgc

SEQ ID NO: 99753 - DNA, 22 bp, Artificial Sequence
  Synthetic oligonucleotide; CTG chr11 5318659 5318680 5318676 5318681 +
ccagtgcaggtaagatttgaga

SEQ ID NO: 99754 - DNA, 22 bp, Artificial Sequence
  Synthetic oligonucleotide; TTT chr11 5318677 5318698 5318694 5318699 +
gagatcttacatttaagttttg

SEQ ID NO: 99755 - DNA, 22 bp, Artificial Sequence
  Synthetic oligonucleotide; TTG chr11 5318678 5318699 5318695 5318700 +
agatcttacatttaagttttga

SEQ ID NO: 99756 - DNA, 22 bp, Artificial Sequence
  Synthetic oligonucleotide; CTT chr11 5318685 5318706 5318702 5318707 +
acatttaagttttgaattcatt

SEQ ID NO: 99757 - DNA, 22 bp, Artificial Sequence
  Synthetic oligonucleotide; TTA chr11 5318686 5318707 5318703 5318708 +
catttaagttttgaattcattt

SEQ ID NO: 99758 - DNA, 22 bp, Artificial Sequence
  Synthetic oligonucleotide; TTT chr11 5318691 5318712 5318708 5318713 +
aagttttgaattcattttcagt

SEQ ID NO: 99759 - DNA, 22 bp, Artificial Sequence
  Synthetic oligonucleotide; TTA chr11 5318692 5318713 5318709 5318714 +
agttttgaattcattttcagtt

SEQ ID NO: 99760 - DNA, 22 bp, Artificial Sequence
  Synthetic oligonucleotide; TTT chr11 5318697 5318718 5318714 5318719 +
tgaattcattttcagttgattt

SEQ ID NO: 99761 - DNA, 22 bp, Artificial Sequence
  Synthetic oligonucleotide; TTT chr11 5318698 5318719 5318715 5318720 +
gaattcattttcagttgatttc

SEQ ID NO: 99762 - DNA, 22 bp, Artificial Sequence
  Synthetic oligonucleotide; TTG chr11 5318699 5318720 5318716 5318721 +
aattcattttcagttgatttct

SEQ ID NO: 99763 - DNA, 22 bp, Artificial Sequence
  Synthetic oligonucleotide; TTC chr11 5318704 5318725 5318721 5318726 +
attttcagttgatttctctaaa

SEQ ID NO: 99764 - DNA, 22 bp, Artificial Sequence
  Synthetic oligonucleotide; TTT chr11 5318708 5318729 5318725 5318730 +
tcagttgatttctctaaatggt

SEQ ID NO: 99765 - DNA, 22 bp, Artificial Sequence
  Synthetic oligonucleotide; TTT chr11 5318709 5318730 5318726 5318731 +
cagttgatttctctaaatggtg

SEQ ID NO: 99766 - DNA, 22 bp, Artificial Sequence
  Synthetic oligonucleotide; TTC chr11 5318710 5318731 5318727 5318732 +
agttgatttctctaaatggtgt

SEQ ID NO: 99767 - DNA, 22 bp, Artificial Sequence
  Synthetic oligonucleotide; TTG chr11 5318715 5318736 5318732 5318737 +
atttctctaaatggtgtaaggt

SEQ ID NO: 99768 - DNA, 22 bp, Artificial Sequence
  Synthetic oligonucleotide; TTT chr11 5318719 5318740 5318736 5318741 +
ctctaaatggtgtaaggtaagg

SEQ ID NO: 99769 - DNA, 22 bp, Artificial Sequence
  Synthetic oligonucleotide; TTC chr11 5318720 5318741 5318737 5318742 +
tctaaatggtgtaaggtaaggg

SEQ ID NO: 99770 - DNA, 22 bp, Artificial Sequence
  Synthetic oligonucleotide; CTC chr11 5318722 5318743 5318739 5318744 +
taaatggtgtaaggtaagggtc

SEQ ID NO: 99771 - DNA, 22 bp, Artificial Sequence
  Synthetic oligonucleotide; CTA chr11 5318724 5318745 5318741 5318746 +
aatggtgtaaggtaagggtcta

SEQ ID NO: 99772 - DNA, 22 bp, Artificial Sequence
  Synthetic oligonucleotide; CTA chr11 5318746 5318767 5318763 5318768 +
gtttcattcttctgcatatggc

SEQ ID NO: 99773 - DNA, 22 bp, Artificial Sequence
  Synthetic oligonucleotide; TTT chr11 5318750 5318771 5318767 5318772 +
cattcttctgcatatggctagc

SEQ ID NO: 99774 - DNA, 22 bp, Artificial Sequence
  Synthetic oligonucleotide; TTC chr11 5318751 5318772 5318768 5318773 +
attcttctgcatatggctagcc

SEQ ID NO: 99775 - DNA, 22 bp, Artificial Sequence
  Synthetic oligonucleotide; TTC chr11 5318755 5318776 5318772 5318777 +
ttctgcatatggctagccacgt

SEQ ID NO: 99776 - DNA, 22 bp, Artificial Sequence
  Synthetic oligonucleotide; CTT chr11 5318757 5318778 5318774 5318779 +
ctgcatatggctagccacgtat

SEQ ID NO: 99777 - DNA, 22 bp, Artificial Sequence
  Synthetic oligonucleotide; TTC chr11 5318758 5318779 5318775 5318780 +
tgcatatggctagccacgtatt

SEQ ID NO: 99778 - DNA, 22 bp, Artificial Sequence
  Synthetic oligonucleotide; CTG chr11 5318760 5318781 5318777 5318782 +
catatggctagccacgtattcc

SEQ ID NO: 99779 - DNA, 22 bp, Artificial Sequence
  Synthetic oligonucleotide; CTA chr11 5318770 5318791 5318787 5318792 +
gccacgtattccagcacagttt

SEQ ID NO: 99780 - DNA, 22 bp, Artificial Sequence
  Synthetic oligonucleotide; TTC chr11 5318781 5318802 5318798 5318803 +
cagcacagtttattggataggt

SEQ ID NO: 99781 - DNA, 22 bp, Artificial Sequence
  Synthetic oligonucleotide; TTT chr11 5318792 5318813 5318809 5318814 +
attggataggtagtccttttcc

SEQ ID NO: 99782 - DNA, 22 bp, Artificial Sequence
  Synthetic oligonucleotide; TTA chr11 5318793 5318814 5318810 5318815 +
ttggataggtagtccttttccc

SEQ ID NO: 99783 - DNA, 22 bp, Artificial Sequence
  Synthetic oligonucleotide; TTG chr11 5318796 5318817 5318813 5318818 +
gataggtagtccttttcccgct

SEQ ID NO: 99784 - DNA, 22 bp, Artificial Sequence
  Synthetic oligonucleotide; CTT chr11 5318810 5318831 5318827 5318832 +
ttcccgctgcttgtttttgtca

SEQ ID NO: 99785 - DNA, 22 bp, Artificial Sequence
  Synthetic oligonucleotide; TTT chr11 5318811 5318832 5318828 5318833 +
tcccgctgcttgtttttgtcag

SEQ ID NO: 99786 - DNA, 22 bp, Artificial Sequence
  Synthetic oligonucleotide; TTT chr11 5318812 5318833 5318829 5318834 +
cccgctgcttgtttttgtcagt

SEQ ID NO: 99787 - DNA, 22 bp, Artificial Sequence
  Synthetic oligonucleotide; TTC chr11 5318813 5318834 5318830 5318835 +
ccgctgcttgtttttgtcagtg

SEQ ID NO: 99788 - DNA, 22 bp, Artificial Sequence
  Synthetic oligonucleotide; CTG chr11 5318819 5318840 5318836 5318841 +
cttgtttttgtcagtgttgttg

SEQ ID NO: 99789 - DNA, 22 bp, Artificial Sequence
  Synthetic oligonucleotide; CTT chr11 5318822 5318843 5318839 5318844 +
gtttttgtcagtgttgttgaag

SEQ ID NO: 99790 - DNA, 22 bp, Artificial Sequence
  Synthetic oligonucleotide; TTG chr11 5318823 5318844 5318840 5318845 +
tttttgtcagtgttgttgaaga

SEQ ID NO: 99791 - DNA, 22 bp, Artificial Sequence
  Synthetic oligonucleotide; TTT chr11 5318826 5318847 5318843 5318848 +
ttgtcagtgttgttgaagatca

SEQ ID NO: 99792 - DNA, 22 bp, Artificial Sequence
  Synthetic oligonucleotide; TTT chr11 5318827 5318848 5318844 5318849 +
tgtcagtgttgttgaagatcag

SEQ ID NO: 99793 - DNA, 22 bp, Artificial Sequence
  Synthetic oligonucleotide; TTT chr11 5318828 5318849 5318845 5318850 +
gtcagtgttgttgaagatcaga

SEQ ID NO: 99794 - DNA, 22 bp, Artificial Sequence
  Synthetic oligonucleotide; TTG chr11 5318829 5318850 5318846 5318851 +
tcagtgttgttgaagatcagat

SEQ ID NO: 99795 - DNA, 22 bp, Artificial Sequence
  Synthetic oligonucleotide; TTG chr11 5318838 5318859 5318855 5318860 +
ttgaagatcagatggttgtaac

SEQ ID NO: 99796 - DNA, 22 bp, Artificial Sequence
  Synthetic oligonucleotide; TTG chr11 5318841 5318862 5318858 5318863 +
aagatcagatggttgtaactat

SEQ ID NO: 99797 - DNA, 22 bp, Artificial Sequence
  Synthetic oligonucleotide; TTG chr11 5318856 5318877 5318873 5318878 +
taactatgtagctttatttttg

SEQ ID NO: 99798 - DNA, 22 bp, Artificial Sequence
  Synthetic oligonucleotide; CTA chr11 5318862 5318883 5318879 5318884 +
tgtagctttatttttgagtttt

SEQ ID NO: 99799 - DNA, 22 bp, Artificial Sequence
  Synthetic oligonucleotide; CTT chr11 5318870 5318891 5318887 5318892 +
tatttttgagttttctattgtg

SEQ ID NO: 99800 - DNA, 22 bp, Artificial Sequence
  Synthetic oligonucleotide; TTT chr11 5318871 5318892 5318888 5318893 +
atttttgagttttctattgtgt

SEQ ID NO: 99801 - DNA, 22 bp, Artificial Sequence
  Synthetic oligonucleotide; TTA chr11 5318872 5318893 5318889 5318894 +
tttttgagttttctattgtgtt

SEQ ID NO: 99802 - DNA, 22 bp, Artificial Sequence
  Synthetic oligonucleotide; TTT chr11 5318875 5318896 5318892 5318897 +
ttgagttttctattgtgtttcc

SEQ ID NO: 99803 - DNA, 22 bp, Artificial Sequence
  Synthetic oligonucleotide; TTT chr11 5318876 5318897 5318893 5318898 +
tgagttttctattgtgtttcct

SEQ ID NO: 99804 - DNA, 22 bp, Artificial Sequence
  Synthetic oligonucleotide; TTT chr11 5318877 5318898 5318894 5318899 +
gagttttctattgtgtttcctt

SEQ ID NO: 99805 - DNA, 22 bp, Artificial Sequence
  Synthetic oligonucleotide; TTG chr11 5318878 5318899 5318895 5318900 +
agttttctattgtgtttcctta

SEQ ID NO: 99806 - DNA, 22 bp, Artificial Sequence
  Synthetic oligonucleotide; TTT chr11 5318883 5318904 5318900 5318905 +
tctattgtgtttccttagtcaa

SEQ ID NO: 99807 - DNA, 22 bp, Artificial Sequence
  Synthetic oligonucleotide; TTT chr11 5318884 5318905 5318901 5318906 +
ctattgtgtttccttagtcaat

SEQ ID NO: 99808 - DNA, 22 bp, Artificial Sequence
  Synthetic oligonucleotide; TTC chr11 5318885 5318906 5318902 5318907 +
tattgtgtttccttagtcaatg

SEQ ID NO: 99809 - DNA, 22 bp, Artificial Sequence
  Synthetic oligonucleotide; CTA chr11 5318887 5318908 5318904 5318909 +
ttgtgtttccttagtcaatgtg

SEQ ID NO: 99810 - DNA, 22 bp, Artificial Sequence
  Synthetic oligonucleotide; TTG chr11 5318890 5318911 5318907 5318912 +
tgtttccttagtcaatgtgtct

SEQ ID NO: 99811 - DNA, 22 bp, Artificial Sequence
  Synthetic oligonucleotide; TTT chr11 5318895 5318916 5318912 5318917 +
ccttagtcaatgtgtctatttt

SEQ ID NO: 99812 - DNA, 22 bp, Artificial Sequence
  Synthetic oligonucleotide; TTC chr11 5318896 5318917 5318913 5318918 +
cttagtcaatgtgtctattttt

SEQ ID NO: 99813 - DNA, 22 bp, Artificial Sequence
  Synthetic oligonucleotide; CTT chr11 5318899 5318920 5318916 5318921 +
agtcaatgtgtctatttttgta

SEQ ID NO: 99814 - DNA, 22 bp, Artificial Sequence
  Synthetic oligonucleotide; TTA chr11 5318900 5318921 5318917 5318922 +
gtcaatgtgtctatttttgtaa

SEQ ID NO: 99815 - DNA, 22 bp, Artificial Sequence
  Synthetic oligonucleotide; CTA chr11 5318913 5318934 5318930 5318935 +
tttttgtaacaatatcatgctg

SEQ ID NO: 99816 - DNA, 22 bp, Artificial Sequence
  Synthetic oligonucleotide; TTT chr11 5318916 5318937 5318933 5318938 +
ttgtaacaatatcatgctgttt

SEQ ID NO: 99817 - DNA, 22 bp, Artificial Sequence
  Synthetic oligonucleotide; TTT chr11 5318917 5318938 5318934 5318939 +
tgtaacaatatcatgctgtttg

SEQ ID NO: 99818 - DNA, 22 bp, Artificial Sequence
  Synthetic oligonucleotide; TTT chr11 5318918 5318939 5318935 5318940 +
gtaacaatatcatgctgtttgg

SEQ ID NO: 99819 - DNA, 22 bp, Artificial Sequence
  Synthetic oligonucleotide; TTG chr11 5318919 5318940 5318936 5318941 +
taacaatatcatgctgtttggg

SEQ ID NO: 99820 - DNA, 22 bp, Artificial Sequence
  Synthetic oligonucleotide; CTG chr11 5318935 5318956 5318952 5318957 +
tttggggtactgtggccttata

SEQ ID NO: 99821 - DNA, 22 bp, Artificial Sequence
  Synthetic oligonucleotide; TTT chr11 5318938 5318959 5318955 5318960 +
ggggtactgtggccttataatg

SEQ ID NO: 99822 - DNA, 22 bp, Artificial Sequence
  Synthetic oligonucleotide; TTG chr11 5318939 5318960 5318956 5318961 +
gggtactgtggccttataatgt

SEQ ID NO: 99823 - DNA, 22 bp, Artificial Sequence
  Synthetic oligonucleotide; CTG chr11 5318947 5318968 5318964 5318969 +
tggccttataatgtagtttctt

SEQ ID NO: 99824 - DNA, 22 bp, Artificial Sequence
  Synthetic oligonucleotide; CTT chr11 5318954 5318975 5318971 5318976 +
ataatgtagtttctttcctttc

SEQ ID NO: 99825 - DNA, 22 bp, Artificial Sequence
  Synthetic oligonucleotide; TTA chr11 5318955 5318976 5318972 5318977 +
taatgtagtttctttcctttct

SEQ ID NO: 99826 - DNA, 22 bp, Artificial Sequence
  Synthetic oligonucleotide; TTT chr11 5318966 5318987 5318983 5318988 +
ctttcctttcttccctctcttt

SEQ ID NO: 99827 - DNA, 22 bp, Artificial Sequence
  Synthetic oligonucleotide; TTC chr11 5318967 5318988 5318984 5318989 +
tttcctttcttccctctctttc

SEQ ID NO: 99828 - DNA, 22 bp, Artificial Sequence
  Synthetic oligonucleotide; CTT chr11 5318969 5318990 5318986 5318991 +
tcctttcttccctctctttctt

SEQ ID NO: 99829 - DNA, 22 bp, Artificial Sequence
  Synthetic oligonucleotide; TTT chr11 5318970 5318991 5318987 5318992 +
cctttcttccctctctttcttt

SEQ ID NO: 99830 - DNA, 22 bp, Artificial Sequence
  Synthetic oligonucleotide; TTC chr11 5318971 5318992 5318988 5318993 +
ctttcttccctctctttctttc

SEQ ID NO: 99831 - DNA, 22 bp, Artificial Sequence
  Synthetic oligonucleotide; CTT chr11 5318974 5318995 5318991 5318996 +
tcttccctctctttctttcttt

SEQ ID NO: 99832 - DNA, 22 bp, Artificial Sequence
  Synthetic oligonucleotide; TTT chr11 5318975 5318996 5318992 5318997 +
cttccctctctttctttctttt

SEQ ID NO: 99833 - DNA, 22 bp, Artificial Sequence
  Synthetic oligonucleotide; TTC chr11 5318976 5318997 5318993 5318998 +
ttccctctctttctttcttttc

SEQ ID NO: 99834 - DNA, 22 bp, Artificial Sequence
  Synthetic oligonucleotide; CTT chr11 5318978 5318999 5318995 5319000 +
ccctctctttctttcttttctt

SEQ ID NO: 99835 - DNA, 22 bp, Artificial Sequence
  Synthetic oligonucleotide; TTC chr11 5318979 5319000 5318996 5319001 +
cctctctttctttcttttcttt

SEQ ID NO: 99836 - DNA, 22 bp, Artificial Sequence
  Synthetic oligonucleotide; CTC chr11 5318983 5319004 5319000 5319005 +
tctttctttcttttctttcttt

SEQ ID NO: 99837 - DNA, 22 bp, Artificial Sequence
  Synthetic oligonucleotide; CTC chr11 5318985 5319006 5319002 5319007 +
tttctttcttttctttcttttt

SEQ ID NO: 99838 - DNA, 22 bp, Artificial Sequence
  Synthetic oligonucleotide; CTT chr11 5318987 5319008 5319004 5319009 +
tctttcttttctttcttttttt

SEQ ID NO: 99839 - DNA, 22 bp, Artificial Sequence
  Synthetic oligonucleotide; TTT chr11 5318988 5319009 5319005 5319010 +
ctttcttttctttcttttttta

SEQ ID NO: 99840 - DNA, 22 bp, Artificial Sequence
  Synthetic oligonucleotide; TTC chr11 5318989 5319010 5319006 5319011 +
tttcttttctttctttttttat

SEQ ID NO: 99841 - DNA, 22 bp, Artificial Sequence
  Synthetic oligonucleotide; CTT chr11 5318991 5319012 5319008 5319013 +
tcttttctttctttttttattt

SEQ ID NO: 99842 - DNA, 22 bp, Artificial Sequence
  Synthetic oligonucleotide; TTT chr11 5318992 5319013 5319009 5319014 +
cttttctttctttttttatttt

SEQ ID NO: 99843 - DNA, 22 bp, Artificial Sequence
  Synthetic oligonucleotide; TTC chr11 5318993 5319014 5319010 5319015 +
ttttctttctttttttattttt

SEQ ID NO: 99844 - DNA, 22 bp, Artificial Sequence
  Synthetic oligonucleotide; CTT chr11 5318995 5319016 5319012 5319017 +
ttctttctttttttattttttc

SEQ ID NO: 99845 - DNA, 22 bp, Artificial Sequence
  Synthetic oligonucleotide; TTT chr11 5318996 5319017 5319013 5319018 +
tctttctttttttattttttca

SEQ ID NO: 99846 - DNA, 22 bp, Artificial Sequence
  Synthetic oligonucleotide; TTT chr11 5318997 5319018 5319014 5319019 +
ctttctttttttattttttcag

SEQ ID NO: 99847 - DNA, 22 bp, Artificial Sequence
  Synthetic oligonucleotide; TTC chr11 5318998 5319019 5319015 5319020 +
tttctttttttattttttcaga

SEQ ID NO: 99848 - DNA, 22 bp, Artificial Sequence
  Synthetic oligonucleotide; CTT chr11 5319000 5319021 5319017 5319022 +
tctttttttattttttcagagt

SEQ ID NO: 99849 - DNA, 22 bp, Artificial Sequence
  Synthetic oligonucleotide; TTT chr11 5319001 5319022 5319018 5319023 +
ctttttttattttttcagagtt

SEQ ID NO: 99850 - DNA, 22 bp, Artificial Sequence
  Synthetic oligonucleotide; TTC chr11 5319002 5319023 5319019 5319024 +
tttttttattttttcagagttt

SEQ ID NO: 99851 - DNA, 22 bp, Artificial Sequence
  Synthetic oligonucleotide; CTT chr11 5319004 5319025 5319021 5319026 +
tttttattttttcagagtttca

SEQ ID NO: 99852 - DNA, 22 bp, Artificial Sequence
  Synthetic oligonucleotide; TTT chr11 5319005 5319026 5319022 5319027 +
ttttattttttcagagtttcac

SEQ ID NO: 99853 - DNA, 22 bp, Artificial Sequence
  Synthetic oligonucleotide; TTT chr11 5319006 5319027 5319023 5319028 +
tttattttttcagagtttcact

SEQ ID NO: 99854 - DNA, 22 bp, Artificial Sequence
  Synthetic oligonucleotide; TTT chr11 5319007 5319028 5319024 5319029 +
ttattttttcagagtttcactc

SEQ ID NO: 99855 - DNA, 22 bp, Artificial Sequence
  Synthetic oligonucleotide; TTT chr11 5319008 5319029 5319025 5319030 +
tattttttcagagtttcactct

SEQ ID NO: 99856 - DNA, 22 bp, Artificial Sequence
  Synthetic oligonucleotide; TTT chr11 5319009 5319030 5319026 5319031 +
attttttcagagtttcactctg

SEQ ID NO: 99857 - DNA, 22 bp, Artificial Sequence
  Synthetic oligonucleotide; TTA chr11 5319010 5319031 5319027 5319032 +
ttttttcagagtttcactctgt

SEQ ID NO: 99858 - DNA, 22 bp, Artificial Sequence
  Synthetic oligonucleotide; TTT chr11 5319013 5319034 5319030 5319035 +
tttcagagtttcactctgtcac

SEQ ID NO: 99859 - DNA, 22 bp, Artificial Sequence
  Synthetic oligonucleotide; TTT chr11 5319014 5319035 5319031 5319036 +
ttcagagtttcactctgtcacc

SEQ ID NO: 99860 - DNA, 22 bp, Artificial Sequence
  Synthetic oligonucleotide; TTT chr11 5319015 5319036 5319032 5319037 +
tcagagtttcactctgtcaccc

SEQ ID NO: 99861 - DNA, 22 bp, Artificial Sequence
  Synthetic oligonucleotide; TTT chr11 5319016 5319037 5319033 5319038 +
cagagtttcactctgtcaccca

SEQ ID NO: 99862 - DNA, 22 bp, Artificial Sequence
  Synthetic oligonucleotide; TTC chr11 5319017 5319038 5319034 5319039 +
agagtttcactctgtcacccag

SEQ ID NO: 99863 - DNA, 22 bp, Artificial Sequence
  Synthetic oligonucleotide; TTT chr11 5319024 5319045 5319041 5319046 +
cactctgtcacccaggctggag

SEQ ID NO: 99864 - DNA, 22 bp, Artificial Sequence
  Synthetic oligonucleotide; TTC chr11 5319025 5319046 5319042 5319047 +
actctgtcacccaggctggagt

SEQ ID NO: 99865 - DNA, 22 bp, Artificial Sequence
  Synthetic oligonucleotide; CTC chr11 5319029 5319050 5319046 5319051 +
tgtcacccaggctggagtgcag

SEQ ID NO: 99866 - DNA, 22 bp, Artificial Sequence
  Synthetic oligonucleotide; CTG chr11 5319031 5319052 5319048 5319053 +
tcacccaggctggagtgcagtg

SEQ ID NO: 99867 - DNA, 22 bp, Artificial Sequence
  Synthetic oligonucleotide; CTG chr11 5319043 5319064 5319060 5319065 +
gagtgcagtggtgcgatcttgg

SEQ ID NO: 99868 - DNA, 22 bp, Artificial Sequence
  Synthetic oligonucleotide; CTT chr11 5319063 5319084 5319080 5319085 +
ggctcactgcaccgtctgcctc

SEQ ID NO: 99869 - DNA, 22 bp, Artificial Sequence
  Synthetic oligonucleotide; TTG chr11 5319064 5319085 5319081 5319086 +
gctcactgcaccgtctgcctcc

SEQ ID NO: 99870 - DNA, 22 bp, Artificial Sequence
  Synthetic oligonucleotide; CTC chr11 5319068 5319089 5319085 5319090 +
actgcaccgtctgcctccagag

SEQ ID NO: 99871 - DNA, 22 bp, Artificial Sequence
  Synthetic oligonucleotide; CTG chr11 5319072 5319093 5319089 5319094 +
caccgtctgcctccagagttca

SEQ ID NO: 99872 - DNA, 22 bp, Artificial Sequence
  Synthetic oligonucleotide; CTG chr11 5319081 5319102 5319098 5319103 +
cctccagagttcaagcaattct

SEQ ID NO: 99873 - DNA, 22 bp, Artificial Sequence
  Synthetic oligonucleotide; CTC chr11 5319085 5319106 5319102 5319107 +
cagagttcaagcaattctcctg

SEQ ID NO: 99874 - DNA, 22 bp, Artificial Sequence
  Synthetic oligonucleotide; TTC chr11 5319093 5319114 5319110 5319115 +
aagcaattctcctgcctcagcc

SEQ ID NO: 99875 - DNA, 22 bp, Artificial Sequence
  Synthetic oligonucleotide; TTC chr11 5319102 5319123 5319119 5319124 +
tcctgcctcagccttccgagta

SEQ ID NO: 99876 - DNA, 22 bp, Artificial Sequence
  Synthetic oligonucleotide; CTC chr11 5319104 5319125 5319121 5319126 +
ctgcctcagccttccgagtagc

SEQ ID NO: 99877 - DNA, 22 bp, Artificial Sequence
  Synthetic oligonucleotide; CTG chr11 5319107 5319128 5319124 5319129 +
cctcagccttccgagtagctgg

SEQ ID NO: 99878 - DNA, 22 bp, Artificial Sequence
  Synthetic oligonucleotide; CTC chr11 5319111 5319132 5319128 5319133 +
agccttccgagtagctgggatt

SEQ ID NO: 99879 - DNA, 22 bp, Artificial Sequence
  Synthetic oligonucleotide; CTT chr11 5319117 5319138 5319134 5319139 +
ccgagtagctgggattacagcc

SEQ ID NO: 99880 - DNA, 22 bp, Artificial Sequence
  Synthetic oligonucleotide; TTC chr11 5319118 5319139 5319135 5319140 +
cgagtagctgggattacagccc

SEQ ID NO: 99881 - DNA, 22 bp, Artificial Sequence
  Synthetic oligonucleotide; CTG chr11 5319128 5319149 5319145 5319150 +
ggattacagcccccaccaccac

SEQ ID NO: 99882 - DNA, 22 bp, Artificial Sequence
  Synthetic oligonucleotide; TTA chr11 5319134 5319155 5319151 5319156 +
cagcccccaccaccacagccgg

SEQ ID NO: 99883 - DNA, 22 bp, Artificial Sequence
  Synthetic oligonucleotide; CTA chr11 5319159 5319180 5319176 5319181 +
attttgtatttttagtagagac

SEQ ID NO: 99884 - DNA, 22 bp, Artificial Sequence
  Synthetic oligonucleotide; TTT chr11 5319163 5319184 5319180 5319185 +
tgtatttttagtagagacagtg

SEQ ID NO: 99885 - DNA, 22 bp, Artificial Sequence
  Synthetic oligonucleotide; TTT chr11 5319164 5319185 5319181 5319186 +
gtatttttagtagagacagtgt

SEQ ID NO: 99886 - DNA, 22 bp, Artificial Sequence
  Synthetic oligonucleotide; TTG chr11 5319165 5319186 5319182 5319187 +
tatttttagtagagacagtgtt

SEQ ID NO: 99887 - DNA, 22 bp, Artificial Sequence
  Synthetic oligonucleotide; TTT chr11 5319170 5319191 5319187 5319192 +
ttagtagagacagtgtttcacc

SEQ ID NO: 99888 - DNA, 22 bp, Artificial Sequence
  Synthetic oligonucleotide; TTT chr11 5319171 5319192 5319188 5319193 +
tagtagagacagtgtttcacca

SEQ ID NO: 99889 - DNA, 22 bp, Artificial Sequence
  Synthetic oligonucleotide; TTT chr11 5319172 5319193 5319189 5319194 +
agtagagacagtgtttcaccat

SEQ ID NO: 99890 - DNA, 22 bp, Artificial Sequence
  Synthetic oligonucleotide; TTA chr11 5319173 5319194 5319190 5319195 +
gtagagacagtgtttcaccatg

SEQ ID NO: 99891 - DNA, 22 bp, Artificial Sequence
  Synthetic oligonucleotide; TTT chr11 5319188 5319209 5319205 5319210 +
caccatgttgaccaggctggtc

SEQ ID NO: 99892 - DNA, 22 bp, Artificial Sequence
  Synthetic oligonucleotide; TTC chr11 5319189 5319210 5319206 5319211 +
accatgttgaccaggctggtct

SEQ ID NO: 99893 - DNA, 22 bp, Artificial Sequence
  Synthetic oligonucleotide; TTG chr11 5319198 5319219 5319215 5319220 +
accaggctggtcttgaactcct

SEQ ID NO: 99894 - DNA, 22 bp, Artificial Sequence
  Synthetic oligonucleotide; CTG chr11 5319207 5319228 5319224 5319229 +
gtcttgaactcctgacctcagg

SEQ ID NO: 99895 - DNA, 22 bp, Artificial Sequence
  Synthetic oligonucleotide; CTT chr11 5319212 5319233 5319229 5319234 +
gaactcctgacctcaggtgata

SEQ ID NO: 99896 - DNA, 22 bp, Artificial Sequence
  Synthetic oligonucleotide; TTG chr11 5319213 5319234 5319230 5319235 +
aactcctgacctcaggtgatac

SEQ ID NO: 99897 - DNA, 22 bp, Artificial Sequence
  Synthetic oligonucleotide; CTC chr11 5319218 5319239 5319235 5319240 +
ctgacctcaggtgatacaccca

SEQ ID NO: 99898 - DNA, 22 bp, Artificial Sequence
  Synthetic oligonucleotide; CTG chr11 5319221 5319242 5319238 5319243 +
acctcaggtgatacacccacct

SEQ ID NO: 99899 - DNA, 22 bp, Artificial Sequence
  Synthetic oligonucleotide; CTC chr11 5319226 5319247 5319243 5319248 +
aggtgatacacccacctcagcc

SEQ ID NO: 99900 - DNA, 22 bp, Artificial Sequence
  Synthetic oligonucleotide; CTC chr11 5319244 5319265 5319261 5319266 +
agccccctaaagtgctagagtt

SEQ ID NO: 99901 - DNA, 22 bp, Artificial Sequence
  Synthetic oligonucleotide; CTA chr11 5319253 5319274 5319270 5319275 +
aagtgctagagttacaggcgtg

SEQ ID NO: 99902 - DNA, 22 bp, Artificial Sequence
  Synthetic oligonucleotide; CTA chr11 5319261 5319282 5319278 5319283 +
gagttacaggcgtgagccaccg

SEQ ID NO: 99903 - DNA, 22 bp, Artificial Sequence
  Synthetic oligonucleotide; TTA chr11 5319267 5319288 5319284 5319289 +
caggcgtgagccaccgtgcctg

SEQ ID NO: 99904 - DNA, 22 bp, Artificial Sequence
  Synthetic oligonucleotide; CTG chr11 5319289 5319310 5319306 5319311 +
gcctgtagtttcaagtcaggtg

SEQ ID NO: 99905 - DNA, 22 bp, Artificial Sequence
  Synthetic oligonucleotide; CTG chr11 5319294 5319315 5319311 5319316 +
tagtttcaagtcaggtggtgtg

SEQ ID NO: 99906 - DNA, 22 bp, Artificial Sequence
  Synthetic oligonucleotide; TTT chr11 5319300 5319321 5319317 5319322 +
caagtcaggtggtgtggtgctt

SEQ ID NO: 99907 - DNA, 22 bp, Artificial Sequence
  Synthetic oligonucleotide; TTC chr11 5319301 5319322 5319318 5319323 +
aagtcaggtggtgtggtgcttc

SEQ ID NO: 99908 - DNA, 22 bp, Artificial Sequence
  Synthetic oligonucleotide; CTT chr11 5319322 5319343 5319339 5319344 +
ccaattttgttctttctgctta

SEQ ID NO: 99909 - DNA, 22 bp, Artificial Sequence
  Synthetic oligonucleotide; TTC chr11 5319323 5319344 5319340 5319345 +
caattttgttctttctgcttaa

SEQ ID NO: 99910 - DNA, 22 bp, Artificial Sequence
  Synthetic oligonucleotide; TTT chr11 5319329 5319350 5319346 5319351 +
tgttctttctgcttaagattgc

SEQ ID NO: 99911 - DNA, 22 bp, Artificial Sequence
  Synthetic oligonucleotide; TTT chr11 5319330 5319351 5319347 5319352 +
gttctttctgcttaagattgct

SEQ ID NO: 99912 - DNA, 22 bp, Artificial Sequence
  Synthetic oligonucleotide; TTG chr11 5319331 5319352 5319348 5319353 +
ttctttctgcttaagattgctt

SEQ ID NO: 99913 - DNA, 22 bp, Artificial Sequence
  Synthetic oligonucleotide; TTC chr11 5319334 5319355 5319351 5319356 +
tttctgcttaagattgctttgc

SEQ ID NO: 99914 - DNA, 22 bp, Artificial Sequence
  Synthetic oligonucleotide; CTT chr11 5319336 5319357 5319353 5319358 +
tctgcttaagattgctttgcct

SEQ ID NO: 99915 - DNA, 22 bp, Artificial Sequence
  Synthetic oligonucleotide; TTT chr11 5319337 5319358 5319354 5319359 +
ctgcttaagattgctttgcctg

SEQ ID NO: 99916 - DNA, 22 bp, Artificial Sequence
  Synthetic oligonucleotide; TTC chr11 5319338 5319359 5319355 5319360 +
tgcttaagattgctttgcctgt

SEQ ID NO: 99917 - DNA, 22 bp, Artificial Sequence
  Synthetic oligonucleotide; CTG chr11 5319340 5319361 5319357 5319362 +
cttaagattgctttgcctgttc

SEQ ID NO: 99918 - DNA, 22 bp, Artificial Sequence
  Synthetic oligonucleotide; CTT chr11 5319343 5319364 5319360 5319365 +
aagattgctttgcctgttcagg

SEQ ID NO: 99919 - DNA, 22 bp, Artificial Sequence
  Synthetic oligonucleotide; TTA chr11 5319344 5319365 5319361 5319366 +
agattgctttgcctgttcaggc

SEQ ID NO: 99920 - DNA, 22 bp, Artificial Sequence
  Synthetic oligonucleotide; TTG chr11 5319350 5319371 5319367 5319372 +
ctttgcctgttcaggctctttt

SEQ ID NO: 99921 - DNA, 22 bp, Artificial Sequence
  Synthetic oligonucleotide; CTT chr11 5319353 5319374 5319370 5319375 +
tgcctgttcaggctctttttgg

SEQ ID NO: 99922 - DNA, 22 bp, Artificial Sequence
  Synthetic oligonucleotide; TTT chr11 5319354 5319375 5319371 5319376 +
gcctgttcaggctctttttggt

SEQ ID NO: 99923 - DNA, 22 bp, Artificial Sequence
  Synthetic oligonucleotide; TTG chr11 5319355 5319376 5319372 5319377 +
cctgttcaggctctttttggtt

SEQ ID NO: 99924 - DNA, 22 bp, Artificial Sequence
  Synthetic oligonucleotide; CTG chr11 5319359 5319380 5319376 5319381 +
ttcaggctctttttggttccat

SEQ ID NO: 99925 - DNA, 22 bp, Artificial Sequence
  Synthetic oligonucleotide; TTC chr11 5319362 5319383 5319379 5319384 +
aggctctttttggttccatatg

SEQ ID NO: 99926 - DNA, 22 bp, Artificial Sequence
  Synthetic oligonucleotide; CTC chr11 5319368 5319389 5319385 5319390 +
tttttggttccatatgaatttt

SEQ ID NO: 99927 - DNA, 22 bp, Artificial Sequence
  Synthetic oligonucleotide; CTT chr11 5319370 5319391 5319387 5319392 +
tttggttccatatgaattttaa

SEQ ID NO: 99928 - DNA, 22 bp, Artificial Sequence
  Synthetic oligonucleotide; TTT chr11 5319371 5319392 5319388 5319393 +
ttggttccatatgaattttaaa

SEQ ID NO: 99929 - DNA, 22 bp, Artificial Sequence
  Synthetic oligonucleotide; TTT chr11 5319372 5319393 5319389 5319394 +
tggttccatatgaattttaaac

SEQ ID NO: 99930 - DNA, 22 bp, Artificial Sequence
  Synthetic oligonucleotide; TTT chr11 5319373 5319394 5319390 5319395 +
ggttccatatgaattttaaact

SEQ ID NO: 99931 - DNA, 22 bp, Artificial Sequence
  Synthetic oligonucleotide; TTG chr11 5319374 5319395 5319391 5319396 +
gttccatatgaattttaaacta

SEQ ID NO: 99932 - DNA, 22 bp, Artificial Sequence
  Synthetic oligonucleotide; TTC chr11 5319378 5319399 5319395 5319400 +
catatgaattttaaactagttt

SEQ ID NO: 99933 - DNA, 22 bp, Artificial Sequence
  Synthetic oligonucleotide; TTT chr11 5319389 5319410 5319406 5319411 +
taaactagtttttctaatactg

SEQ ID NO: 99934 - DNA, 22 bp, Artificial Sequence
  Synthetic oligonucleotide; TTT chr11 5319390 5319411 5319407 5319412 +
aaactagtttttctaatactgt

SEQ ID NO: 99935 - DNA, 22 bp, Artificial Sequence
  Synthetic oligonucleotide; TTA chr11 5319391 5319412 5319408 5319413 +
aactagtttttctaatactgtg

SEQ ID NO: 99936 - DNA, 22 bp, Artificial Sequence
  Synthetic oligonucleotide; CTA chr11 5319396 5319417 5319413 5319418 +
gtttttctaatactgtgaagaa

SEQ ID NO: 99937 - DNA, 22 bp, Artificial Sequence
  Synthetic oligonucleotide; TTT chr11 5319400 5319421 5319417 5319422 +
ttctaatactgtgaagaatgac

SEQ ID NO: 99938 - DNA, 22 bp, Artificial Sequence
  Synthetic oligonucleotide; TTT chr11 5319401 5319422 5319418 5319423 +
tctaatactgtgaagaatgaca

SEQ ID NO: 99939 - DNA, 22 bp, Artificial Sequence
  Synthetic oligonucleotide; TTT chr11 5319402 5319423 5319419 5319424 +
ctaatactgtgaagaatgacat

SEQ ID NO: 99940 - DNA, 22 bp, Artificial Sequence
  Synthetic oligonucleotide; TTC chr11 5319403 5319424 5319420 5319425 +
taatactgtgaagaatgacatt

SEQ ID NO: 99941 - DNA, 22 bp, Artificial Sequence
  Synthetic oligonucleotide; CTA chr11 5319405 5319426 5319422 5319427 +
atactgtgaagaatgacattgg

SEQ ID NO: 99942 - DNA, 22 bp, Artificial Sequence
  Synthetic oligonucleotide; CTG chr11 5319411 5319432 5319428 5319433 +
tgaagaatgacattggtaattg

SEQ ID NO: 99943 - DNA, 22 bp, Artificial Sequence
  Synthetic oligonucleotide; TTG chr11 5319426 5319447 5319443 5319448 +
gtaattggatagaaattgcaat

SEQ ID NO: 99944 - DNA, 22 bp, Artificial Sequence
  Synthetic oligonucleotide; TTG chr11 5319433 5319454 5319450 5319455 +
gatagaaattgcaatgaatgtc

SEQ ID NO: 99945 - DNA, 22 bp, Artificial Sequence
  Synthetic oligonucleotide; TTG chr11 5319444 5319465 5319461 5319466 +
caatgaatgtctaaattgcttt

SEQ ID NO: 99946 - DNA, 22 bp, Artificial Sequence
  Synthetic oligonucleotide; CTA chr11 5319457 5319478 5319474 5319479 +
aattgctttgagcagtatggcc

SEQ ID NO: 99947 - DNA, 22 bp, Artificial Sequence
  Synthetic oligonucleotide; TTG chr11 5319462 5319483 5319479 5319484 +
ctttgagcagtatggccattta

SEQ ID NO: 99948 - DNA, 22 bp, Artificial Sequence
  Synthetic oligonucleotide; CTT chr11 5319465 5319486 5319482 5319487 +
tgagcagtatggccatttaaat

SEQ ID NO: 99949 - DNA, 22 bp, Artificial Sequence
  Synthetic oligonucleotide; TTT chr11 5319466 5319487 5319483 5319488 +
gagcagtatggccatttaaatt

SEQ ID NO: 99950 - DNA, 22 bp, Artificial Sequence
  Synthetic oligonucleotide; TTG chr11 5319467 5319488 5319484 5319489 +
agcagtatggccatttaaattc

SEQ ID NO: 99951 - DNA, 22 bp, Artificial Sequence
  Synthetic oligonucleotide; TTT chr11 5319483 5319504 5319500 5319505 +
aaattcatattgattcttccaa

SEQ ID NO: 99952 - DNA, 22 bp, Artificial Sequence
  Synthetic oligonucleotide; TTA chr11 5319484 5319505 5319501 5319506 +
aattcatattgattcttccaat

SEQ ID NO: 99953 - DNA, 22 bp, Artificial Sequence
  Synthetic oligonucleotide; TTC chr11 5319489 5319510 5319506 5319511 +
atattgattcttccaatccatg

SEQ ID NO: 99954 - DNA, 22 bp, Artificial Sequence
  Synthetic oligonucleotide; TTG chr11 5319495 5319516 5319512 5319517 +
attcttccaatccatgagcctg

SEQ ID NO: 99955 - DNA, 22 bp, Artificial Sequence
  Synthetic oligonucleotide; TTC chr11 5319499 5319520 5319516 5319521 +
ttccaatccatgagcctggaaa

SEQ ID NO: 99956 - DNA, 22 bp, Artificial Sequence
  Synthetic oligonucleotide; CTT chr11 5319501 5319522 5319518 5319523 +
ccaatccatgagcctggaaagc

SEQ ID NO: 99957 - DNA, 22 bp, Artificial Sequence
  Synthetic oligonucleotide; TTC chr11 5319502 5319523 5319519 5319524 +
caatccatgagcctggaaagct

SEQ ID NO: 99958 - DNA, 22 bp, Artificial Sequence
  Synthetic oligonucleotide; CTG chr11 5319517 5319538 5319534 5319539 +
gaaagcttttatttatttattt

SEQ ID NO: 99959 - DNA, 22 bp, Artificial Sequence
  Synthetic oligonucleotide; CTT chr11 5319525 5319546 5319542 5319547 +
ttatttatttatttgtgttgtt

SEQ ID NO: 99960 - DNA, 22 bp, Artificial Sequence
  Synthetic oligonucleotide; TTT chr11 5319526 5319547 5319543 5319548 +
tatttatttatttgtgttgttt

SEQ ID NO: 99961 - DNA, 22 bp, Artificial Sequence
  Synthetic oligonucleotide; TTT chr11 5319527 5319548 5319544 5319549 +
atttatttatttgtgttgtttc

SEQ ID NO: 99962 - DNA, 22 bp, Artificial Sequence
  Synthetic oligonucleotide; TTA chr11 5319528 5319549 5319545 5319550 +
tttatttatttgtgttgtttct

SEQ ID NO: 99963 - DNA, 22 bp, Artificial Sequence
  Synthetic oligonucleotide; TTT chr11 5319531 5319552 5319548 5319553 +
atttatttgtgttgtttctgat

SEQ ID NO: 99964 - DNA, 22 bp, Artificial Sequence
  Synthetic oligonucleotide; TTA chr11 5319532 5319553 5319549 5319554 +
tttatttgtgttgtttctgatt

SEQ ID NO: 99965 - DNA, 22 bp, Artificial Sequence
  Synthetic oligonucleotide; TTT chr11 5319535 5319556 5319552 5319557 +
atttgtgttgtttctgatttct

SEQ ID NO: 99966 - DNA, 22 bp, Artificial Sequence
  Synthetic oligonucleotide; TTA chr11 5319536 5319557 5319553 5319558 +
tttgtgttgtttctgatttctt

SEQ ID NO: 99967 - DNA, 22 bp, Artificial Sequence
  Synthetic oligonucleotide; TTT chr11 5319539 5319560 5319556 5319561 +
gtgttgtttctgatttctttca

SEQ ID NO: 99968 - DNA, 22 bp, Artificial Sequence
  Synthetic oligonucleotide; TTG chr11 5319540 5319561 5319557 5319562 +
tgttgtttctgatttctttcag

SEQ ID NO: 99969 - DNA, 22 bp, Artificial Sequence
  Synthetic oligonucleotide; TTG chr11 5319545 5319566 5319562 5319567 +
tttctgatttctttcagcagtg

SEQ ID NO: 99970 - DNA, 22 bp, Artificial Sequence
  Synthetic oligonucleotide; TTT chr11 5319548 5319569 5319565 5319570 +
ctgatttctttcagcagtgttt

SEQ ID NO: 99971 - DNA, 22 bp, Artificial Sequence
  Synthetic oligonucleotide; TTC chr11 5319549 5319570 5319566 5319571 +
tgatttctttcagcagtgtttt

SEQ ID NO: 99972 - DNA, 22 bp, Artificial Sequence
  Synthetic oligonucleotide; CTG chr11 5319551 5319572 5319568 5319573 +
atttctttcagcagtgttttgt

SEQ ID NO: 99973 - DNA, 22 bp, Artificial Sequence
  Synthetic oligonucleotide; TTT chr11 5319555 5319576 5319572 5319577 +
ctttcagcagtgttttgtagtt

SEQ ID NO: 99974 - DNA, 22 bp, Artificial Sequence
  Synthetic oligonucleotide; TTC chr11 5319556 5319577 5319573 5319578 +
tttcagcagtgttttgtagttc

SEQ ID NO: 99975 - DNA, 22 bp, Artificial Sequence
  Synthetic oligonucleotide; CTT chr11 5319558 5319579 5319575 5319580 +
tcagcagtgttttgtagttctc

SEQ ID NO: 99976 - DNA, 22 bp, Artificial Sequence
  Synthetic oligonucleotide; TTT chr11 5319559 5319580 5319576 5319581 +
cagcagtgttttgtagttctcc

SEQ ID NO: 99977 - DNA, 22 bp, Artificial Sequence
  Synthetic oligonucleotide; TTC chr11 5319560 5319581 5319577 5319582 +
agcagtgttttgtagttctcct

SEQ ID NO: 99978 - DNA, 22 bp, Artificial Sequence
  Synthetic oligonucleotide; TTT chr11 5319570 5319591 5319587 5319592 +
tgtagttctccttgtagagatc

SEQ ID NO: 99979 - DNA, 22 bp, Artificial Sequence
  Synthetic oligonucleotide; TTT chr11 5319571 5319592 5319588 5319593 +
gtagttctccttgtagagatct

SEQ ID NO: 99980 - DNA, 22 bp, Artificial Sequence
  Synthetic oligonucleotide; TTG chr11 5319572 5319593 5319589 5319594 +
tagttctccttgtagagatctt

SEQ ID NO: 99981 - DNA, 22 bp, Artificial Sequence
  Synthetic oligonucleotide; TTC chr11 5319578 5319599 5319595 5319600 +
tccttgtagagatctttcacct

SEQ ID NO: 99982 - DNA, 22 bp, Artificial Sequence
  Synthetic oligonucleotide; CTC chr11 5319580 5319601 5319597 5319602 +
cttgtagagatctttcacctcc

SEQ ID NO: 99983 - DNA, 22 bp, Artificial Sequence
  Synthetic oligonucleotide; CTT chr11 5319583 5319604 5319600 5319605 +
gtagagatctttcacctcccac

SEQ ID NO: 99984 - DNA, 22 bp, Artificial Sequence
  Synthetic oligonucleotide; TTG chr11 5319584 5319605 5319601 5319606 +
tagagatctttcacctcccaca

SEQ ID NO: 99985 - DNA, 22 bp, Artificial Sequence
  Synthetic oligonucleotide; CTT chr11 5319594 5319615 5319611 5319616 +
tcacctcccacaaaccatatga

SEQ ID NO: 99986 - DNA, 22 bp, Artificial Sequence
  Synthetic oligonucleotide; TTT chr11 5319595 5319616 5319612 5319617 +
cacctcccacaaaccatatgat

SEQ ID NO: 99987 - DNA, 22 bp, Artificial Sequence
  Synthetic oligonucleotide; TTC chr11 5319596 5319617 5319613 5319618 +
acctcccacaaaccatatgatc

SEQ ID NO: 99988 - DNA, 22 bp, Artificial Sequence
  Synthetic oligonucleotide; CTC chr11 5319601 5319622 5319618 5319623 +
ccacaaaccatatgatcatctc

SEQ ID NO: 99989 - DNA, 22 bp, Artificial Sequence
  Synthetic oligonucleotide; CTC chr11 5319623 5319644 5319640 5319645 +
aatagactgagaaaaacctttc

SEQ ID NO: 99990 - DNA, 22 bp, Artificial Sequence
  Synthetic oligonucleotide; CTG chr11 5319632 5319653 5319649 5319654 +
agaaaaacctttcaataaaatt

SEQ ID NO: 99991 - DNA, 22 bp, Artificial Sequence
  Synthetic oligonucleotide; CTT chr11 5319643 5319664 5319660 5319665 +
tcaataaaattcaacatccctt

SEQ ID NO: 99992 - DNA, 22 bp, Artificial Sequence
  Synthetic oligonucleotide; TTT chr11 5319644 5319665 5319661 5319666 +
caataaaattcaacatcccttc

SEQ ID NO: 99993 - DNA, 22 bp, Artificial Sequence
  Synthetic oligonucleotide; TTC chr11 5319645 5319666 5319662 5319667 +
aataaaattcaacatcccttca

SEQ ID NO: 99994 - DNA, 22 bp, Artificial Sequence
  Synthetic oligonucleotide; TTC chr11 5319655 5319676 5319672 5319677 +
aacatcccttcatgataaaaac

SEQ ID NO: 99995 - DNA, 22 bp, Artificial Sequence
  Synthetic oligonucleotide; CTT chr11 5319665 5319686 5319682 5319687 +
catgataaaaacctccaacaga

SEQ ID NO: 99996 - DNA, 22 bp, Artificial Sequence
  Synthetic oligonucleotide; TTC chr11 5319666 5319687 5319683 5319688 +
atgataaaaacctccaacagac

SEQ ID NO: 99997 - DNA, 22 bp, Artificial Sequence
  Synthetic oligonucleotide; CTC chr11 5319680 5319701 5319697 5319702 +
caacagactaggcatcaaagga

SEQ ID NO: 99998 - DNA, 22 bp, Artificial Sequence
  Synthetic oligonucleotide; CTA chr11 5319690 5319711 5319707 5319712 +
ggcatcaaaggaacatacctca

SEQ ID NO: 99999 - DNA, 22 bp, Artificial Sequence
  Synthetic oligonucleotide; CTC chr11 5319711 5319732 5319728 5319733 +
aaaagaataaaagccacgtatg

SEQ ID NO: 100000 - DNA, 22 bp, Artificial Sequence
  Synthetic oligonucleotide; CTG chr11 5319759 5319780 5319776 5319781 +
aatgggcaaaagctggaactat

SEQ ID NO: 100001 - DNA, 22 bp, Artificial Sequence
  Synthetic oligonucleotide; CTG chr11 5319774 5319795 5319791 5319796 +
gaactattctcctcgaaaactg

SEQ ID NO: 100002 - DNA, 22 bp, Artificial Sequence
  Synthetic oligonucleotide; CTA chr11 5319780 5319801 5319797 5319802 +
ttctcctcgaaaactgcaacaa

SEQ ID NO: 100003 - DNA, 22 bp, Artificial Sequence
  Synthetic oligonucleotide; TTC chr11 5319783 5319804 5319800 5319805 +
tcctcgaaaactgcaacaagac

SEQ ID NO: 100004 - DNA, 22 bp, Artificial Sequence
  Synthetic oligonucleotide; CTC chr11 5319785 5319806 5319802 5319807 +
ctcgaaaactgcaacaagacaa

SEQ ID NO: 100005 - DNA, 22 bp, Artificial Sequence
  Synthetic oligonucleotide; CTC chr11 5319788 5319809 5319805 5319810 +
gaaaactgcaacaagacaagga

SEQ ID NO: 100006 - DNA, 22 bp, Artificial Sequence
  Synthetic oligonucleotide; CTG chr11 5319796 5319817 5319813 5319818 +
caacaagacaaggattcccatt

SEQ ID NO: 100007 - DNA, 22 bp, Artificial Sequence
  Synthetic oligonucleotide; TTC chr11 5319813 5319834 5319830 5319835 +
ccattctcaccactcctagtga

SEQ ID NO: 100008 - DNA, 22 bp, Artificial Sequence
  Synthetic oligonucleotide; TTC chr11 5319819 5319840 5319836 5319841 +
tcaccactcctagtgaacataa

SEQ ID NO: 100009 - DNA, 22 bp, Artificial Sequence
  Synthetic oligonucleotide; CTC chr11 5319821 5319842 5319838 5319843 +
accactcctagtgaacataaaa

SEQ ID NO: 100010 - DNA, 22 bp, Artificial Sequence
  Synthetic oligonucleotide; CTC chr11 5319828 5319849 5319845 5319850 +
ctagtgaacataaaattggaag

SEQ ID NO: 100011 - DNA, 22 bp, Artificial Sequence
  Synthetic oligonucleotide; CTA chr11 5319831 5319852 5319848 5319853 +
gtgaacataaaattggaagtcc

SEQ ID NO: 100012 - DNA, 22 bp, Artificial Sequence
  Synthetic oligonucleotide; TTG chr11 5319846 5319867 5319863 5319868 +
gaagtcctaaccagggcaatca

SEQ ID NO: 100013 - DNA, 22 bp, Artificial Sequence
  Synthetic oligonucleotide; CTA chr11 5319855 5319876 5319872 5319877 +
accagggcaatcaggcgagaga

SEQ ID NO: 100014 - DNA, 22 bp, Artificial Sequence
  Synthetic oligonucleotide; CTA chr11 5319918 5319939 5319935 5319940 +
tctctctttgctgatgatatga

SEQ ID NO: 100015 - DNA, 22 bp, Artificial Sequence
  Synthetic oligonucleotide; CTC chr11 5319922 5319943 5319939 5319944 +
tctttgctgatgatatgactct

SEQ ID NO: 100016 - DNA, 22 bp, Artificial Sequence
  Synthetic oligonucleotide; CTC chr11 5319924 5319945 5319941 5319946 +
tttgctgatgatatgactctat

SEQ ID NO: 100017 - DNA, 22 bp, Artificial Sequence
  Synthetic oligonucleotide; CTT chr11 5319926 5319947 5319943 5319948 +
tgctgatgatatgactctatac

SEQ ID NO: 100018 - DNA, 22 bp, Artificial Sequence
  Synthetic oligonucleotide; TTT chr11 5319927 5319948 5319944 5319949 +
gctgatgatatgactctatact

SEQ ID NO: 100019 - DNA, 22 bp, Artificial Sequence
  Synthetic oligonucleotide; TTG chr11 5319928 5319949 5319945 5319950 +
ctgatgatatgactctatactt

SEQ ID NO: 100020 - DNA, 22 bp, Artificial Sequence
  Synthetic oligonucleotide; CTG chr11 5319931 5319952 5319948 5319953 +
atgatatgactctatacttaga

SEQ ID NO: 100021 - DNA, 22 bp, Artificial Sequence
  Synthetic oligonucleotide; CTC chr11 5319943 5319964 5319960 5319965 +
tatacttagaaaatcctacaga

SEQ ID NO: 100022 - DNA, 22 bp, Artificial Sequence
  Synthetic oligonucleotide; CTA chr11 5319945 5319966 5319962 5319967 +
tacttagaaaatcctacagatt

SEQ ID NO: 100023 - DNA, 22 bp, Artificial Sequence
  Synthetic oligonucleotide; CTT chr11 5319950 5319971 5319967 5319972 +
agaaaatcctacagattcttcc

SEQ ID NO: 100024 - DNA, 22 bp, Artificial Sequence
  Synthetic oligonucleotide; TTA chr11 5319951 5319972 5319968 5319973 +
gaaaatcctacagattcttcca

SEQ ID NO: 100025 - DNA, 22 bp, Artificial Sequence
  Synthetic oligonucleotide; CTA chr11 5319961 5319982 5319978 5319983 +
cagattcttccaaaaggctgct

SEQ ID NO: 100026 - DNA, 22 bp, Artificial Sequence
  Synthetic oligonucleotide; TTC chr11 5319968 5319989 5319985 5319990 +
ttccaaaaggctgctagaactg

SEQ ID NO: 100027 - DNA, 22 bp, Artificial Sequence
  Synthetic oligonucleotide; CTT chr11 5319970 5319991 5319987 5319992 +
ccaaaaggctgctagaactgat

SEQ ID NO: 100028 - DNA, 22 bp, Artificial Sequence
  Synthetic oligonucleotide; TTC chr11 5319971 5319992 5319988 5319993 +
caaaaggctgctagaactgata

SEQ ID NO: 100029 - DNA, 22 bp, Artificial Sequence
  Synthetic oligonucleotide; CTG chr11 5319981 5320002 5319998 5320003 +
ctagaactgataaacaatttta

SEQ ID NO: 100030 - DNA, 22 bp, Artificial Sequence
  Synthetic oligonucleotide; CTA chr11 5319984 5320005 5320001 5320006 +
gaactgataaacaattttagca

SEQ ID NO: 100031 - DNA, 22 bp, Artificial Sequence
  Synthetic oligonucleotide; CTG chr11 5319990 5320011 5320007 5320012 +
ataaacaattttagcaaggttt

SEQ ID NO: 100032 - DNA, 22 bp, Artificial Sequence
  Synthetic oligonucleotide; TTT chr11 5320001 5320022 5320018 5320023 +
tagcaaggtttcaggatacaaa

SEQ ID NO: 100033 - DNA, 22 bp, Artificial Sequence
  Synthetic oligonucleotide; TTT chr11 5320002 5320023 5320019 5320024 +
agcaaggtttcaggatacaaaa

SEQ ID NO: 100034 - DNA, 22 bp, Artificial Sequence
  Synthetic oligonucleotide; TTA chr11 5320003 5320024 5320020 5320025 +
gcaaggtttcaggatacaaaat

SEQ ID NO: 100035 - DNA, 22 bp, Artificial Sequence
  Synthetic oligonucleotide; TTT chr11 5320012 5320033 5320029 5320034 +
caggatacaaaatcacatacaa

SEQ ID NO: 100036 - DNA, 22 bp, Artificial Sequence
  Synthetic oligonucleotide; TTC chr11 5320013 5320034 5320030 5320035 +
aggatacaaaatcacatacaaa

SEQ ID NO: 100037 - DNA, 22 bp, Artificial Sequence
  Synthetic oligonucleotide; TTT chr11 5320049 5320070 5320066 5320071 +
ccatacaccaataaggcccagg

SEQ ID NO: 100038 - DNA, 22 bp, Artificial Sequence
  Synthetic oligonucleotide; TTC chr11 5320050 5320071 5320067 5320072 +
catacaccaataaggcccaggc

SEQ ID NO: 100039 - DNA, 22 bp, Artificial Sequence
  Synthetic oligonucleotide; CTG chr11 5320074 5320095 5320091 5320096 +
agagtcaaatcgagaacacaat

SEQ ID NO: 100040 - DNA, 22 bp, Artificial Sequence
  Synthetic oligonucleotide; TTA chr11 5320103 5320124 5320120 5320125 +
agaacagccacaaagaaaatga

SEQ ID NO: 100041 - DNA, 22 bp, Artificial Sequence
  Synthetic oligonucleotide; CTA chr11 5320133 5320154 5320150 5320155 +
ggacttgttctttttattgaaa

SEQ ID NO: 100042 - DNA, 22 bp, Artificial Sequence
  Synthetic oligonucleotide; CTT chr11 5320139 5320160 5320156 5320161 +
gttctttttattgaaatttaaa

SEQ ID NO: 100043 - DNA, 22 bp, Artificial Sequence
  Synthetic oligonucleotide; TTG chr11 5320140 5320161 5320157 5320162 +
ttctttttattgaaatttaaaa

SEQ ID NO: 100044 - DNA, 22 bp, Artificial Sequence
  Synthetic oligonucleotide; TTC chr11 5320143 5320164 5320160 5320165 +
tttttattgaaatttaaaaccc

SEQ ID NO: 100045 - DNA, 22 bp, Artificial Sequence
  Synthetic oligonucleotide; CTT chr11 5320145 5320166 5320162 5320167 +
tttattgaaatttaaaacccaa

SEQ ID NO: 100046 - DNA, 22 bp, Artificial Sequence
  Synthetic oligonucleotide; TTT chr11 5320146 5320167 5320163 5320168 +
ttattgaaatttaaaacccaag

SEQ ID NO: 100047 - DNA, 22 bp, Artificial Sequence
  Synthetic oligonucleotide; TTT chr11 5320147 5320168 5320164 5320169 +
tattgaaatttaaaacccaagc

SEQ ID NO: 100048 - DNA, 22 bp, Artificial Sequence
  Synthetic oligonucleotide; TTT chr11 5320148 5320169 5320165 5320170 +
attgaaatttaaaacccaagca

SEQ ID NO: 100049 - DNA, 22 bp, Artificial Sequence
  Synthetic oligonucleotide; TTA chr11 5320149 5320170 5320166 5320171 +
ttgaaatttaaaacccaagcag

SEQ ID NO: 100050 - DNA, 22 bp, Artificial Sequence
  Synthetic oligonucleotide; TTG chr11 5320152 5320173 5320169 5320174 +
aaatttaaaacccaagcaggca

SEQ ID NO: 100051 - DNA, 22 bp, Artificial Sequence
  Synthetic oligonucleotide; TTT chr11 5320158 5320179 5320175 5320180 +
aaaacccaagcaggcactagaa

SEQ ID NO: 100052 - DNA, 22 bp, Artificial Sequence
  Synthetic oligonucleotide; TTA chr11 5320159 5320180 5320176 5320181 +
aaacccaagcaggcactagaaa

SEQ ID NO: 100053 - DNA, 22 bp, Artificial Sequence
  Synthetic oligonucleotide; CTA chr11 5320177 5320198 5320194 5320199 +
gaaagaaaatatttaccatgaa

SEQ ID NO: 100054 - DNA, 22 bp, Artificial Sequence
  Synthetic oligonucleotide; TTT chr11 5320191 5320212 5320208 5320213 +
accatgaattcatacaacacta

SEQ ID NO: 100055 - DNA, 22 bp, Artificial Sequence
  Synthetic oligonucleotide; TTA chr11 5320192 5320213 5320209 5320214 +
ccatgaattcatacaacactat

SEQ ID NO: 100056 - DNA, 22 bp, Artificial Sequence
  Synthetic oligonucleotide; TTC chr11 5320202 5320223 5320219 5320224 +
atacaacactatcattactacg

SEQ ID NO: 100057 - DNA, 22 bp, Artificial Sequence
  Synthetic oligonucleotide; CTA chr11 5320213 5320234 5320230 5320235 +
tcattactacgtgaatattagt

SEQ ID NO: 100058 - DNA, 22 bp, Artificial Sequence
  Synthetic oligonucleotide; TTA chr11 5320219 5320240 5320236 5320241 +
ctacgtgaatattagtgtgcta

SEQ ID NO: 100059 - DNA, 22 bp, Artificial Sequence
  Synthetic oligonucleotide; CTA chr11 5320222 5320243 5320239 5320244 +
cgtgaatattagtgtgctatga

SEQ ID NO: 100060 - DNA, 22 bp, Artificial Sequence
  Synthetic oligonucleotide; TTA chr11 5320233 5320254 5320250 5320255 +
gtgtgctatgagagacacatca

SEQ ID NO: 100061 - DNA, 22 bp, Artificial Sequence
  Synthetic oligonucleotide; CTA chr11 5320241 5320262 5320258 5320263 +
tgagagacacatcaaataaatt

SEQ ID NO: 100062 - DNA, 22 bp, Artificial Sequence
  Synthetic oligonucleotide; TTT chr11 5320264 5320285 5320281 5320286 +
ctgggatcagggaacattttcc

SEQ ID NO: 100063 - DNA, 22 bp, Artificial Sequence
  Synthetic oligonucleotide; TTC chr11 5320265 5320286 5320282 5320287 +
tgggatcagggaacattttcca

SEQ ID NO: 100064 - DNA, 22 bp, Artificial Sequence
  Synthetic oligonucleotide; CTG chr11 5320267 5320288 5320284 5320289 +
ggatcagggaacattttccaga

SEQ ID NO: 100065 - DNA, 22 bp, Artificial Sequence
  Synthetic oligonucleotide; TTT chr11 5320283 5320304 5320300 5320305 +
tccagaagaaatgctacttaag

SEQ ID NO: 100066 - DNA, 22 bp, Artificial Sequence
  Synthetic oligonucleotide; TTT chr11 5320284 5320305 5320301 5320306 +
ccagaagaaatgctacttaagc

SEQ ID NO: 100067 - DNA, 22 bp, Artificial Sequence
  Synthetic oligonucleotide; TTC chr11 5320285 5320306 5320302 5320307 +
cagaagaaatgctacttaagct

SEQ ID NO: 100068 - DNA, 22 bp, Artificial Sequence
  Synthetic oligonucleotide; CTA chr11 5320299 5320320 5320316 5320321 +
cttaagctgagaattaaatgct

SEQ ID NO: 100069 - DNA, 22 bp, Artificial Sequence
  Synthetic oligonucleotide; CTT chr11 5320302 5320323 5320319 5320324 +
aagctgagaattaaatgctact

SEQ ID NO: 100070 - DNA, 22 bp, Artificial Sequence
  Synthetic oligonucleotide; TTA chr11 5320303 5320324 5320320 5320325 +
agctgagaattaaatgctacta

SEQ ID NO: 100071 - DNA, 22 bp, Artificial Sequence
  Synthetic oligonucleotide; CTG chr11 5320308 5320329 5320325 5320330 +
agaattaaatgctactatatta

SEQ ID NO: 100072 - DNA, 22 bp, Artificial Sequence
  Synthetic oligonucleotide; TTA chr11 5320315 5320336 5320332 5320337 +
aatgctactatattagtagtgt

SEQ ID NO: 100073 - DNA, 22 bp, Artificial Sequence
  Synthetic oligonucleotide; CTA chr11 5320322 5320343 5320339 5320344 +
ctatattagtagtgtagtagta

SEQ ID NO: 100074 - DNA, 22 bp, Artificial Sequence
  Synthetic oligonucleotide; CTA chr11 5320325 5320346 5320342 5320347 +
tattagtagtgtagtagtattt

SEQ ID NO: 100075 - DNA, 22 bp, Artificial Sequence
  Synthetic oligonucleotide; TTA chr11 5320330 5320351 5320347 5320352 +
gtagtgtagtagtatttggtgg

SEQ ID NO: 100076 - DNA, 22 bp, Artificial Sequence
  Synthetic oligonucleotide; TTT chr11 5320347 5320368 5320364 5320369 +
ggtggggtagtgcaatcattgc

SEQ ID NO: 100077 - DNA, 22 bp, Artificial Sequence
  Synthetic oligonucleotide; TTG chr11 5320348 5320369 5320365 5320370 +
gtggggtagtgcaatcattgcg

SEQ ID NO: 100078 - DNA, 22 bp, Artificial Sequence
  Synthetic oligonucleotide; TTG chr11 5320368 5320389 5320385 5320390 +
cgtacaggtgaaaagaacaaac

SEQ ID NO: 100079 - DNA, 22 bp, Artificial Sequence
  Synthetic oligonucleotide; TTA chr11 5320416 5320437 5320433 5320438 +
aagtttgtaaaatgtacattgg

SEQ ID NO: 100080 - DNA, 22 bp, Artificial Sequence
  Synthetic oligonucleotide; TTT chr11 5320422 5320443 5320439 5320444 +
gtaaaatgtacattggtaatgg

SEQ ID NO: 100081 - DNA, 22 bp, Artificial Sequence
  Synthetic oligonucleotide; TTG chr11 5320423 5320444 5320440 5320445 +
taaaatgtacattggtaatggg

SEQ ID NO: 100082 - DNA, 22 bp, Artificial Sequence
  Synthetic oligonucleotide; TTG chr11 5320437 5320458 5320454 5320459 +
gtaatggggcaagattaaatac

SEQ ID NO: 100083 - DNA, 22 bp, Artificial Sequence
  Synthetic oligonucleotide; TTA chr11 5320454 5320475 5320471 5320476 +
aatactataaattcaaataaaa

SEQ ID NO: 100084 - DNA, 22 bp, Artificial Sequence
  Synthetic oligonucleotide; CTA chr11 5320461 5320482 5320478 5320483 +
taaattcaaataaaaataattt

SEQ ID NO: 100085 - DNA, 22 bp, Artificial Sequence
  Synthetic oligonucleotide; TTC chr11 5320468 5320489 5320485 5320490 +
aaataaaaataattttattcaa

SEQ ID NO: 100086 - DNA, 22 bp, Artificial Sequence
  Synthetic oligonucleotide; TTT chr11 5320483 5320504 5320500 5320505 +
tattcaaaatatacattaagga

SEQ ID NO: 100087 - DNA, 22 bp, Artificial Sequence
  Synthetic oligonucleotide; TTT chr11 5320484 5320505 5320501 5320506 +
attcaaaatatacattaaggaa

SEQ ID NO: 100088 - DNA, 22 bp, Artificial Sequence
  Synthetic oligonucleotide; TTA chr11 5320485 5320506 5320502 5320507 +
ttcaaaatatacattaaggaag

SEQ ID NO: 100089 - DNA, 22 bp, Artificial Sequence
  Synthetic oligonucleotide; TTC chr11 5320488 5320509 5320505 5320510 +
aaaatatacattaaggaagtat

SEQ ID NO: 100090 - DNA, 22 bp, Artificial Sequence
  Synthetic oligonucleotide; TTA chr11 5320501 5320522 5320518 5320523 +
aggaagtataatatctcttgaa

SEQ ID NO: 100091 - DNA, 22 bp, Artificial Sequence
  Synthetic oligonucleotide; CTC chr11 5320518 5320539 5320535 5320540 +
ttgaacaacaatacatgaaaaa

SEQ ID NO: 100092 - DNA, 22 bp, Artificial Sequence
  Synthetic oligonucleotide; CTT chr11 5320520 5320541 5320537 5320542 +
gaacaacaatacatgaaaaaaa

SEQ ID NO: 100093 - DNA, 22 bp, Artificial Sequence
  Synthetic oligonucleotide; TTG chr11 5320521 5320542 5320538 5320543 +
aacaacaatacatgaaaaaaag

SEQ ID NO: 100094 - DNA, 22 bp, Artificial Sequence
  Synthetic oligonucleotide; CTT chr11 5320546 5320567 5320563 5320568 +
gagagaaaatgaatctgtagta

SEQ ID NO: 100095 - DNA, 22 bp, Artificial Sequence
  Synthetic oligonucleotide; TTG chr11 5320547 5320568 5320564 5320569 +
agagaaaatgaatctgtagtag

SEQ ID NO: 100096 - DNA, 22 bp, Artificial Sequence
  Synthetic oligonucleotide; CTG chr11 5320563 5320584 5320580 5320585 +
tagtagtagcaggttctgatca

SEQ ID NO: 100097 - DNA, 22 bp, Artificial Sequence
  Synthetic oligonucleotide; TTC chr11 5320579 5320600 5320596 5320601 +
tgatcacaatatatcttgcaaa

SEQ ID NO: 100098 - DNA, 22 bp, Artificial Sequence
  Synthetic oligonucleotide; CTG chr11 5320581 5320602 5320598 5320603 +
atcacaatatatcttgcaaatc

SEQ ID NO: 100099 - DNA, 22 bp, Artificial Sequence
  Synthetic oligonucleotide; CTT chr11 5320596 5320617 5320613 5320618 +
gcaaatcatgtaaaacattttg

SEQ ID NO: 100100 - DNA, 22 bp, Artificial Sequence
  Synthetic oligonucleotide; TTG chr11 5320597 5320618 5320614 5320619 +
caaatcatgtaaaacattttga

SEQ ID NO: 100101 - DNA, 22 bp, Artificial Sequence
  Synthetic oligonucleotide; TTT chr11 5320616 5320637 5320633 5320638 +
tgacattaccataagggaatga

SEQ ID NO: 100102 - DNA, 22 bp, Artificial Sequence
  Synthetic oligonucleotide; TTT chr11 5320617 5320638 5320634 5320639 +
gacattaccataagggaatgaa

SEQ ID NO: 100103 - DNA, 22 bp, Artificial Sequence
  Synthetic oligonucleotide; TTG chr11 5320618 5320639 5320635 5320640 +
acattaccataagggaatgaat

SEQ ID NO: 100104 - DNA, 22 bp, Artificial Sequence
  Synthetic oligonucleotide; TTA chr11 5320624 5320645 5320641 5320646 +
ccataagggaatgaatataaaa

SEQ ID NO: 100105 - DNA, 22 bp, Artificial Sequence
  Synthetic oligonucleotide; CTT chr11 5320667 5320688 5320684 5320689 +
ataatcaagtagttattgttta

SEQ ID NO: 100106 - DNA, 22 bp, Artificial Sequence
  Synthetic oligonucleotide; TTA chr11 5320668 5320689 5320685 5320690 +
taatcaagtagttattgtttaa

SEQ ID NO: 100107 - DNA, 22 bp, Artificial Sequence
  Synthetic oligonucleotide; TTA chr11 5320682 5320703 5320699 5320704 +
ttgtttaaagttactatggcta

SEQ ID NO: 100108 - DNA, 22 bp, Artificial Sequence
  Synthetic oligonucleotide; TTG chr11 5320685 5320706 5320702 5320707 +
tttaaagttactatggctacag

SEQ ID NO: 100109 - DNA, 22 bp, Artificial Sequence
  Synthetic oligonucleotide; TTT chr11 5320688 5320709 5320705 5320710 +
aaagttactatggctacagtat

SEQ ID NO: 100110 - DNA, 22 bp, Artificial Sequence
  Synthetic oligonucleotide; TTA chr11 5320689 5320710 5320706 5320711 +
aagttactatggctacagtatg

SEQ ID NO: 100111 - DNA, 22 bp, Artificial Sequence
  Synthetic oligonucleotide; TTA chr11 5320695 5320716 5320712 5320717 +
ctatggctacagtatgagaaac

SEQ ID NO: 100112 - DNA, 22 bp, Artificial Sequence
  Synthetic oligonucleotide; CTA chr11 5320698 5320719 5320715 5320720 +
tggctacagtatgagaaacatg

SEQ ID NO: 100113 - DNA, 22 bp, Artificial Sequence
  Synthetic oligonucleotide; CTA chr11 5320704 5320725 5320721 5320726 +
cagtatgagaaacatgttggaa

SEQ ID NO: 100114 - DNA, 22 bp, Artificial Sequence
  Synthetic oligonucleotide; TTG chr11 5320723 5320744 5320740 5320745 +
gaaaagggggagaacaggtaaa

SEQ ID NO: 100115 - DNA, 22 bp, Artificial Sequence
  Synthetic oligonucleotide; TTG chr11 5320782 5320803 5320799 5320804 +
tgttggtgtggttttgactagt

SEQ ID NO: 100116 - DNA, 22 bp, Artificial Sequence
  Synthetic oligonucleotide; TTG chr11 5320787 5320808 5320804 5320809 +
gtgtggttttgactagttgtta

SEQ ID NO: 100117 - DNA, 22 bp, Artificial Sequence
  Synthetic oligonucleotide; TTT chr11 5320796 5320817 5320813 5320818 +
tgactagttgttatcagtagca

SEQ ID NO: 100118 - DNA, 22 bp, Artificial Sequence
  Synthetic oligonucleotide; TTT chr11 5320797 5320818 5320814 5320819 +
gactagttgttatcagtagcat

SEQ ID NO: 100119 - DNA, 22 bp, Artificial Sequence
  Synthetic oligonucleotide; TTG chr11 5320798 5320819 5320815 5320820 +
actagttgttatcagtagcatt

SEQ ID NO: 100120 - DNA, 22 bp, Artificial Sequence
  Synthetic oligonucleotide; CTA chr11 5320802 5320823 5320819 5320824 +
gttgttatcagtagcattagaa

SEQ ID NO: 100121 - DNA, 22 bp, Artificial Sequence
  Synthetic oligonucleotide; TTG chr11 5320806 5320827 5320823 5320828 +
ttatcagtagcattagaaaggc

SEQ ID NO: 100122 - DNA, 22 bp, Artificial Sequence
  Synthetic oligonucleotide; TTA chr11 5320809 5320830 5320826 5320831 +
tcagtagcattagaaaggcttg

SEQ ID NO: 100123 - DNA, 22 bp, Artificial Sequence
  Synthetic oligonucleotide; TTA chr11 5320821 5320842 5320838 5320843 +
gaaaggcttgaatagaagagag

SEQ ID NO: 100124 - DNA, 22 bp, Artificial Sequence
  Synthetic oligonucleotide; CTT chr11 5320830 5320851 5320847 5320852 +
gaatagaagagagattctatga

SEQ ID NO: 100125 - DNA, 22 bp, Artificial Sequence
  Synthetic oligonucleotide; TTG chr11 5320831 5320852 5320848 5320853 +
aatagaagagagattctatgac

SEQ ID NO: 100126 - DNA, 22 bp, Artificial Sequence
  Synthetic oligonucleotide; TTC chr11 5320847 5320868 5320864 5320869 +
tatgacttagaatagaactgag

SEQ ID NO: 100127 - DNA, 22 bp, Artificial Sequence
  Synthetic oligonucleotide; CTA chr11 5320849 5320870 5320866 5320871 +
tgacttagaatagaactgagtg

SEQ ID NO: 100128 - DNA, 22 bp, Artificial Sequence
  Synthetic oligonucleotide; CTT chr11 5320855 5320876 5320872 5320877 +
agaatagaactgagtgattgaa

SEQ ID NO: 100129 - DNA, 22 bp, Artificial Sequence
  Synthetic oligonucleotide; TTA chr11 5320856 5320877 5320873 5320878 +
gaatagaactgagtgattgaag

SEQ ID NO: 100130 - DNA, 22 bp, Artificial Sequence
  Synthetic oligonucleotide; CTG chr11 5320867 5320888 5320884 5320889 +
agtgattgaaggtagtagatta

SEQ ID NO: 100131 - DNA, 22 bp, Artificial Sequence
  Synthetic oligonucleotide; TTG chr11 5320875 5320896 5320892 5320897 +
aaggtagtagattaaagagaaa

SEQ ID NO: 100132 - DNA, 22 bp, Artificial Sequence
  Synthetic oligonucleotide; TTA chr11 5320889 5320910 5320906 5320911 +
aagagaaagaagcgtaagtaat

SEQ ID NO: 100133 - DNA, 22 bp, Artificial Sequence
  Synthetic oligonucleotide; CTG chr11 5320919 5320940 5320936 5320941 +
aatttctgagttttgctgaatg

SEQ ID NO: 100134 - DNA, 22 bp, Artificial Sequence
  Synthetic oligonucleotide; TTT chr11 5320924 5320945 5320941 5320946 +
ctgagttttgctgaatggagag

SEQ ID NO: 100135 - DNA, 22 bp, Artificial Sequence
  Synthetic oligonucleotide; TTC chr11 5320925 5320946 5320942 5320947 +
tgagttttgctgaatggagagt

SEQ ID NO: 100136 - DNA, 22 bp, Artificial Sequence
  Synthetic oligonucleotide; CTG chr11 5320927 5320948 5320944 5320949 +
agttttgctgaatggagagtag

SEQ ID NO: 100137 - DNA, 22 bp, Artificial Sequence
  Synthetic oligonucleotide; TTT chr11 5320932 5320953 5320949 5320954 +
tgctgaatggagagtagttcca

SEQ ID NO: 100138 - DNA, 22 bp, Artificial Sequence
  Synthetic oligonucleotide; TTT chr11 5320933 5320954 5320950 5320955 +
gctgaatggagagtagttccat

SEQ ID NO: 100139 - DNA, 22 bp, Artificial Sequence
  Synthetic oligonucleotide; TTG chr11 5320934 5320955 5320951 5320956 +
ctgaatggagagtagttccatt

SEQ ID NO: 100140 - DNA, 22 bp, Artificial Sequence
  Synthetic oligonucleotide; CTG chr11 5320937 5320958 5320954 5320959 +
aatggagagtagttccattgac

SEQ ID NO: 100141 - DNA, 22 bp, Artificial Sequence
  Synthetic oligonucleotide; TTC chr11 5320952 5320973 5320969 5320974 +
cattgacttccatagttatcac

SEQ ID NO: 100142 - DNA, 22 bp, Artificial Sequence
  Synthetic oligonucleotide; TTG chr11 5320957 5320978 5320974 5320979 +
acttccatagttatcacaagaa

SEQ ID NO: 100143 - DNA, 22 bp, Artificial Sequence
  Synthetic oligonucleotide; CTT chr11 5320961 5320982 5320978 5320983 +
ccatagttatcacaagaagata

SEQ ID NO: 100144 - DNA, 22 bp, Artificial Sequence
  Synthetic oligonucleotide; TTC chr11 5320962 5320983 5320979 5320984 +
catagttatcacaagaagataa

SEQ ID NO: 100145 - DNA, 22 bp, Artificial Sequence
  Synthetic oligonucleotide; TTA chr11 5320970 5320991 5320987 5320992 +
tcacaagaagataatgacttta

SEQ ID NO: 100146 - DNA, 22 bp, Artificial Sequence
  Synthetic oligonucleotide; CTT chr11 5320990 5321011 5321007 5321012 +
tattcactaatcaacagttatt

SEQ ID NO: 100147 - DNA, 22 bp, Artificial Sequence
  Synthetic oligonucleotide; TTT chr11 5320991 5321012 5321008 5321013 +
attcactaatcaacagttattt

SEQ ID NO: 100148 - DNA, 22 bp, Artificial Sequence
  Synthetic oligonucleotide; TTA chr11 5320992 5321013 5321009 5321014 +
ttcactaatcaacagttattta

SEQ ID NO: 100149 - DNA, 22 bp, Artificial Sequence
  Synthetic oligonucleotide; TTC chr11 5320995 5321016 5321012 5321017 +
actaatcaacagttatttattg

SEQ ID NO: 100150 - DNA, 22 bp, Artificial Sequence
  Synthetic oligonucleotide; CTA chr11 5320999 5321020 5321016 5321021 +
atcaacagttatttattgattg

SEQ ID NO: 100151 - DNA, 22 bp, Artificial Sequence
  Synthetic oligonucleotide; TTA chr11 5321010 5321031 5321027 5321032 +
tttattgattggtcattgtaca

SEQ ID NO: 100152 - DNA, 22 bp, Artificial Sequence
  Synthetic oligonucleotide; TTT chr11 5321013 5321034 5321030 5321035 +
attgattggtcattgtacatta

SEQ ID NO: 100153 - DNA, 22 bp, Artificial Sequence
  Synthetic oligonucleotide; TTA chr11 5321014 5321035 5321031 5321036 +
ttgattggtcattgtacattaa

SEQ ID NO: 100154 - DNA, 22 bp, Artificial Sequence
  Synthetic oligonucleotide; TTG chr11 5321017 5321038 5321034 5321039 +
attggtcattgtacattaatga

SEQ ID NO: 100155 - DNA, 22 bp, Artificial Sequence
  Synthetic oligonucleotide; TTG chr11 5321021 5321042 5321038 5321043 +
gtcattgtacattaatgagtgt

SEQ ID NO: 100156 - DNA, 22 bp, Artificial Sequence
  Synthetic oligonucleotide; TTG chr11 5321028 5321049 5321045 5321050 +
tacattaatgagtgttttacat

SEQ ID NO: 100157 - DNA, 22 bp, Artificial Sequence
  Synthetic oligonucleotide; TTA chr11 5321035 5321056 5321052 5321057 +
atgagtgttttacatgctgact

SEQ ID NO: 100158 - DNA, 22 bp, Artificial Sequence
  Synthetic oligonucleotide; TTT chr11 5321045 5321066 5321062 5321067 +
tacatgctgactttgtagaaaa

SEQ ID NO: 100159 - DNA, 22 bp, Artificial Sequence
  Synthetic oligonucleotide; TTT chr11 5321046 5321067 5321063 5321068 +
acatgctgactttgtagaaaag

SEQ ID NO: 100160 - DNA, 22 bp, Artificial Sequence
  Synthetic oligonucleotide; TTA chr11 5321047 5321068 5321064 5321069 +
catgctgactttgtagaaaaga

SEQ ID NO: 100161 - DNA, 22 bp, Artificial Sequence
  Synthetic oligonucleotide; CTG chr11 5321054 5321075 5321071 5321076 +
actttgtagaaaagatgaagag

SEQ ID NO: 100162 - DNA, 22 bp, Artificial Sequence
  Synthetic oligonucleotide; CTT chr11 5321058 5321079 5321075 5321080 +
tgtagaaaagatgaagagaatc

SEQ ID NO: 100163 - DNA, 22 bp, Artificial Sequence
  Synthetic oligonucleotide; TTT chr11 5321059 5321080 5321076 5321081 +
gtagaaaagatgaagagaatca

SEQ ID NO: 100164 - DNA, 22 bp, Artificial Sequence
  Synthetic oligonucleotide; TTG chr11 5321060 5321081 5321077 5321082 +
tagaaaagatgaagagaatcag

SEQ ID NO: 100165 - DNA, 22 bp, Artificial Sequence
  Synthetic oligonucleotide; TTT chr11 5321085 5321106 5321102 5321107 +
caatgaagtgctttgcacaaag

SEQ ID NO: 100166 - DNA, 22 bp, Artificial Sequence
  Synthetic oligonucleotide; TTC chr11 5321086 5321107 5321103 5321108 +
aatgaagtgctttgcacaaagg

SEQ ID NO: 100167 - DNA, 22 bp, Artificial Sequence
  Synthetic oligonucleotide; CTT chr11 5321098 5321119 5321115 5321120 +
tgcacaaaggataccctggaga

SEQ ID NO: 100168 - DNA, 22 bp, Artificial Sequence
  Synthetic oligonucleotide; TTT chr11 5321099 5321120 5321116 5321121 +
gcacaaaggataccctggagaa

SEQ ID NO: 100169 - DNA, 22 bp, Artificial Sequence
  Synthetic oligonucleotide; TTG chr11 5321100 5321121 5321117 5321122 +
cacaaaggataccctggagaaa

SEQ ID NO: 100170 - DNA, 22 bp, Artificial Sequence
  Synthetic oligonucleotide; CTG chr11 5321116 5321137 5321133 5321138 +
gagaaaattactcatatcattt

SEQ ID NO: 100171 - DNA, 22 bp, Artificial Sequence
  Synthetic oligonucleotide; TTA chr11 5321126 5321147 5321143 5321148 +
ctcatatcattttcttttctaa

SEQ ID NO: 100172 - DNA, 22 bp, Artificial Sequence
  Synthetic oligonucleotide; CTC chr11 5321129 5321150 5321146 5321151 +
atatcattttcttttctaacag

SEQ ID NO: 100173 - DNA, 22 bp, Artificial Sequence
  Synthetic oligonucleotide; TTT chr11 5321138 5321159 5321155 5321160 +
tcttttctaacagtttcattaa

SEQ ID NO: 100174 - DNA, 22 bp, Artificial Sequence
  Synthetic oligonucleotide; TTT chr11 5321139 5321160 5321156 5321161 +
cttttctaacagtttcattaac

SEQ ID NO: 100175 - DNA, 22 bp, Artificial Sequence
  Synthetic oligonucleotide; TTC chr11 5321140 5321161 5321157 5321162 +
ttttctaacagtttcattaaca

SEQ ID NO: 100176 - DNA, 22 bp, Artificial Sequence
  Synthetic oligonucleotide; CTT chr11 5321142 5321163 5321159 5321164 +
ttctaacagtttcattaacata

SEQ ID NO: 100177 - DNA, 22 bp, Artificial Sequence
  Synthetic oligonucleotide; TTT chr11 5321143 5321164 5321160 5321165 +
tctaacagtttcattaacatat

SEQ ID NO: 100178 - DNA, 22 bp, Artificial Sequence
  Synthetic oligonucleotide; TTT chr11 5321144 5321165 5321161 5321166 +
ctaacagtttcattaacatata

SEQ ID NO: 100179 - DNA, 22 bp, Artificial Sequence
  Synthetic oligonucleotide; TTC chr11 5321145 5321166 5321162 5321167 +
taacagtttcattaacatatag

SEQ ID NO: 100180 - DNA, 22 bp, Artificial Sequence
  Synthetic oligonucleotide; CTA chr11 5321147 5321168 5321164 5321169 +
acagtttcattaacatataggt

SEQ ID NO: 100181 - DNA, 22 bp, Artificial Sequence
  Synthetic oligonucleotide; TTT chr11 5321154 5321175 5321171 5321176 +
cattaacatataggtaaagaca

SEQ ID NO: 100182 - DNA, 22 bp, Artificial Sequence
  Synthetic oligonucleotide; TTC chr11 5321155 5321176 5321172 5321177 +
attaacatataggtaaagacag

SEQ ID NO: 100183 - DNA, 22 bp, Artificial Sequence
  Synthetic oligonucleotide; TTA chr11 5321159 5321180 5321176 5321181 +
acatataggtaaagacaggata

SEQ ID NO: 100184 - DNA, 22 bp, Artificial Sequence
  Synthetic oligonucleotide; TTG chr11 5321190 5321211 5321207 5321212 +
acatagtacagtgtcattaata

SEQ ID NO: 100185 - DNA, 22 bp, Artificial Sequence
  Synthetic oligonucleotide; TTA chr11 5321209 5321230 5321226 5321231 +
ataggttaatcaggtcatgtgg

SEQ ID NO: 100186 - DNA, 22 bp, Artificial Sequence
  Synthetic oligonucleotide; TTA chr11 5321217 5321238 5321234 5321239 +
atcaggtcatgtggtaaagtgg

SEQ ID NO: 100187 - DNA, 22 bp, Artificial Sequence
  Synthetic oligonucleotide; CTG chr11 5321247 5321268 5321264 5321269 +
aataaggatattattttgtttt

SEQ ID NO: 100188 - DNA, 22 bp, Artificial Sequence
  Synthetic oligonucleotide; TTA chr11 5321260 5321281 5321277 5321282 +
ttttgtttttagagaatttaaa

SEQ ID NO: 100189 - DNA, 22 bp, Artificial Sequence
  Synthetic oligonucleotide; TTT chr11 5321263 5321284 5321280 5321285 +
tgtttttagagaatttaaagga

SEQ ID NO: 100190 - DNA, 22 bp, Artificial Sequence
  Synthetic oligonucleotide; TTT chr11 5321264 5321285 5321281 5321286 +
gtttttagagaatttaaaggaa

SEQ ID NO: 100191 - DNA, 22 bp, Artificial Sequence
  Synthetic oligonucleotide; TTG chr11 5321265 5321286 5321282 5321287 +
tttttagagaatttaaaggaag

SEQ ID NO: 100192 - DNA, 22 bp, Artificial Sequence
  Synthetic oligonucleotide; TTT chr11 5321268 5321289 5321285 5321290 +
ttagagaatttaaaggaagctg

SEQ ID NO: 100193 - DNA, 22 bp, Artificial Sequence
  Synthetic oligonucleotide; TTT chr11 5321269 5321290 5321286 5321291 +
tagagaatttaaaggaagctgt

SEQ ID NO: 100194 - DNA, 22 bp, Artificial Sequence
  Synthetic oligonucleotide; TTT chr11 5321270 5321291 5321287 5321292 +
agagaatttaaaggaagctgtc

SEQ ID NO: 100195 - DNA, 22 bp, Artificial Sequence
  Synthetic oligonucleotide; TTA chr11 5321271 5321292 5321288 5321293 +
gagaatttaaaggaagctgtcc

SEQ ID NO: 100196 - DNA, 22 bp, Artificial Sequence
  Synthetic oligonucleotide; TTT chr11 5321279 5321300 5321296 5321301 +
aaaggaagctgtcctccttatt

SEQ ID NO: 100197 - DNA, 22 bp, Artificial Sequence
  Synthetic oligonucleotide; TTA chr11 5321280 5321301 5321297 5321302 +
aaggaagctgtcctccttatta

SEQ ID NO: 100198 - DNA, 22 bp, Artificial Sequence
  Synthetic oligonucleotide; CTG chr11 5321290 5321311 5321307 5321312 +
tcctccttattaaaaatatgac

SEQ ID NO: 100199 - DNA, 22 bp, Artificial Sequence
  Synthetic oligonucleotide; CTC chr11 5321295 5321316 5321312 5321317 +
cttattaaaaatatgacagaag

SEQ ID NO: 100200 - DNA, 22 bp, Artificial Sequence
  Synthetic oligonucleotide; CTT chr11 5321298 5321319 5321315 5321320 +
attaaaaatatgacagaagagt

SEQ ID NO: 100201 - DNA, 22 bp, Artificial Sequence
  Synthetic oligonucleotide; TTA chr11 5321299 5321320 5321316 5321321 +
ttaaaaatatgacagaagagtg

SEQ ID NO: 100202 - DNA, 22 bp, Artificial Sequence
  Synthetic oligonucleotide; TTA chr11 5321302 5321323 5321319 5321324 +
aaaatatgacagaagagtgata

SEQ ID NO: 100203 - DNA, 22 bp, Artificial Sequence
  Synthetic oligonucleotide; CTG chr11 5321328 5321349 5321345 5321350 +
gtttggtttaatgaagtattgg

SEQ ID NO: 100204 - DNA, 22 bp, Artificial Sequence
  Synthetic oligonucleotide; TTT chr11 5321332 5321353 5321349 5321354 +
ggtttaatgaagtattggcttg

SEQ ID NO: 100205 - DNA, 22 bp, Artificial Sequence
  Synthetic oligonucleotide; TTG chr11 5321333 5321354 5321350 5321355 +
gtttaatgaagtattggcttgt

SEQ ID NO: 100206 - DNA, 22 bp, Artificial Sequence
  Synthetic oligonucleotide; TTT chr11 5321337 5321358 5321354 5321359 +
aatgaagtattggcttgtgccc

SEQ ID NO: 100207 - DNA, 22 bp, Artificial Sequence
  Synthetic oligonucleotide; TTA chr11 5321338 5321359 5321355 5321360 +
atgaagtattggcttgtgccct

SEQ ID NO: 100208 - DNA, 22 bp, Artificial Sequence
  Synthetic oligonucleotide; TTG chr11 5321349 5321370 5321366 5321371 +
gcttgtgccctcagaagggact

SEQ ID NO: 100209 - DNA, 22 bp, Artificial Sequence
  Synthetic oligonucleotide; CTT chr11 5321353 5321374 5321370 5321375 +
gtgccctcagaagggactgtgt

SEQ ID NO: 100210 - DNA, 22 bp, Artificial Sequence
  Synthetic oligonucleotide; TTG chr11 5321354 5321375 5321371 5321376 +
tgccctcagaagggactgtgta

SEQ ID NO: 100211 - DNA, 22 bp, Artificial Sequence
  Synthetic oligonucleotide; CTC chr11 5321361 5321382 5321378 5321383 +
agaagggactgtgtatctttta

SEQ ID NO: 100212 - DNA, 22 bp, Artificial Sequence
  Synthetic oligonucleotide; CTG chr11 5321372 5321393 5321389 5321394 +
tgtatcttttatcatgaaagtt

SEQ ID NO: 100213 - DNA, 22 bp, Artificial Sequence
  Synthetic oligonucleotide; CTT chr11 5321380 5321401 5321397 5321402 +
ttatcatgaaagttgatatttc

SEQ ID NO: 100214 - DNA, 22 bp, Artificial Sequence
  Synthetic oligonucleotide; TTT chr11 5321381 5321402 5321398 5321403 +
tatcatgaaagttgatatttca

SEQ ID NO: 100215 - DNA, 22 bp, Artificial Sequence
  Synthetic oligonucleotide; TTT chr11 5321382 5321403 5321399 5321404 +
atcatgaaagttgatatttcag

SEQ ID NO: 100216 - DNA, 22 bp, Artificial Sequence
  Synthetic oligonucleotide; TTA chr11 5321383 5321404 5321400 5321405 +
tcatgaaagttgatatttcaga

SEQ ID NO: 100217 - DNA, 22 bp, Artificial Sequence
  Synthetic oligonucleotide; TTG chr11 5321395 5321416 5321412 5321417 +
atatttcagagcactaataact

SEQ ID NO: 100218 - DNA, 22 bp, Artificial Sequence
  Synthetic oligonucleotide; TTT chr11 5321401 5321422 5321418 5321423 +
cagagcactaataacttagttt

SEQ ID NO: 100219 - DNA, 22 bp, Artificial Sequence
  Synthetic oligonucleotide; TTC chr11 5321402 5321423 5321419 5321424 +
agagcactaataacttagtttc

SEQ ID NO: 100220 - DNA, 22 bp, Artificial Sequence
  Synthetic oligonucleotide; CTA chr11 5321411 5321432 5321428 5321433 +
ataacttagtttccttctatgt

SEQ ID NO: 100221 - DNA, 22 bp, Artificial Sequence
  Synthetic oligonucleotide; CTT chr11 5321418 5321439 5321435 5321440 +
agtttccttctatgtaaaagat

SEQ ID NO: 100222 - DNA, 22 bp, Artificial Sequence
  Synthetic oligonucleotide; TTA chr11 5321419 5321440 5321436 5321441 +
gtttccttctatgtaaaagatg

SEQ ID NO: 100223 - DNA, 22 bp, Artificial Sequence
  Synthetic oligonucleotide; TTT chr11 5321423 5321444 5321440 5321445 +
ccttctatgtaaaagatgaaaa

SEQ ID NO: 100224 - DNA, 22 bp, Artificial Sequence
  Synthetic oligonucleotide; TTC chr11 5321424 5321445 5321441 5321446 +
cttctatgtaaaagatgaaaag

SEQ ID NO: 100225 - DNA, 22 bp, Artificial Sequence
  Synthetic oligonucleotide; CTT chr11 5321427 5321448 5321444 5321449 +
ctatgtaaaagatgaaaagtct

SEQ ID NO: 100226 - DNA, 22 bp, Artificial Sequence
  Synthetic oligonucleotide; TTC chr11 5321428 5321449 5321445 5321450 +
tatgtaaaagatgaaaagtctc

SEQ ID NO: 100227 - DNA, 22 bp, Artificial Sequence
  Synthetic oligonucleotide; CTA chr11 5321430 5321451 5321447 5321452 +
tgtaaaagatgaaaagtctcaa

SEQ ID NO: 100228 - DNA, 22 bp, Artificial Sequence
  Synthetic oligonucleotide; CTC chr11 5321450 5321471 5321467 5321472 +
aatgaaataaaatgctagtgga

SEQ ID NO: 100229 - DNA, 22 bp, Artificial Sequence
  Synthetic oligonucleotide; CTA chr11 5321467 5321488 5321484 5321489 +
gtggattcagatcaccctctta

SEQ ID NO: 100230 - DNA, 22 bp, Artificial Sequence
  Synthetic oligonucleotide; TTC chr11 5321475 5321496 5321492 5321497 +
agatcaccctcttagaatcaat

SEQ ID NO: 100231 - DNA, 22 bp, Artificial Sequence
  Synthetic oligonucleotide; CTC chr11 5321486 5321507 5321503 5321508 +
ttagaatcaatttgaaaaatat

SEQ ID NO: 100232 - DNA, 22 bp, Artificial Sequence
  Synthetic oligonucleotide; CTT chr11 5321488 5321509 5321505 5321510 +
agaatcaatttgaaaaatattt

SEQ ID NO: 100233 - DNA, 22 bp, Artificial Sequence
  Synthetic oligonucleotide; TTA chr11 5321489 5321510 5321506 5321511 +
gaatcaatttgaaaaatatttt

SEQ ID NO: 100234 - DNA, 22 bp, Artificial Sequence
  Synthetic oligonucleotide; TTT chr11 5321499 5321520 5321516 5321521 +
gaaaaatattttctttaaacaa

SEQ ID NO: 100235 - DNA, 22 bp, Artificial Sequence
  Synthetic oligonucleotide; TTG chr11 5321500 5321521 5321517 5321522 +
aaaaatattttctttaaacaac

SEQ ID NO: 100236 - DNA, 22 bp, Artificial Sequence
  Synthetic oligonucleotide; TTT chr11 5321510 5321531 5321527 5321532 +
tctttaaacaaccatgaaggca

SEQ ID NO: 100237 - DNA, 22 bp, Artificial Sequence
  Synthetic oligonucleotide; TTT chr11 5321511 5321532 5321528 5321533 +
ctttaaacaaccatgaaggcac

SEQ ID NO: 100238 - DNA, 22 bp, Artificial Sequence
  Synthetic oligonucleotide; TTC chr11 5321512 5321533 5321529 5321534 +
tttaaacaaccatgaaggcacc

SEQ ID NO: 100239 - DNA, 22 bp, Artificial Sequence
  Synthetic oligonucleotide; CTT chr11 5321514 5321535 5321531 5321536 +
taaacaaccatgaaggcaccaa

SEQ ID NO: 100240 - DNA, 22 bp, Artificial Sequence
  Synthetic oligonucleotide; TTT chr11 5321515 5321536 5321532 5321537 +
aaacaaccatgaaggcaccaag

SEQ ID NO: 100241 - DNA, 22 bp, Artificial Sequence
  Synthetic oligonucleotide; TTA chr11 5321516 5321537 5321533 5321538 +
aacaaccatgaaggcaccaaga

SEQ ID NO: 100242 - DNA, 22 bp, Artificial Sequence
  Synthetic oligonucleotide; TTC chr11 5321549 5321570 5321566 5321571 +
aacgtctaaaccagtttaagga

SEQ ID NO: 100243 - DNA, 22 bp, Artificial Sequence
  Synthetic oligonucleotide; CTA chr11 5321557 5321578 5321574 5321579 +
aaccagtttaaggacaacgtca

SEQ ID NO: 100244 - DNA, 22 bp, Artificial Sequence
  Synthetic oligonucleotide; TTT chr11 5321566 5321587 5321583 5321588 +
aaggacaacgtcattaataata

SEQ ID NO: 100245 - DNA, 22 bp, Artificial Sequence
  Synthetic oligonucleotide; TTA chr11 5321567 5321588 5321584 5321589 +
aggacaacgtcattaataataa

SEQ ID NO: 100246 - DNA, 22 bp, Artificial Sequence
  Synthetic oligonucleotide; TTA chr11 5321582 5321603 5321599 5321604 +
ataataaacatatttcccaata

SEQ ID NO: 100247 - DNA, 22 bp, Artificial Sequence
  Synthetic oligonucleotide; TTT chr11 5321597 5321618 5321614 5321619 +
cccaataatttgggcttctttc

SEQ ID NO: 100248 - DNA, 22 bp, Artificial Sequence
  Synthetic oligonucleotide; TTC chr11 5321598 5321619 5321615 5321620 +
ccaataatttgggcttctttca

SEQ ID NO: 100249 - DNA, 22 bp, Artificial Sequence
  Synthetic oligonucleotide; TTT chr11 5321608 5321629 5321625 5321630 +
gggcttctttcatcttggaaac

SEQ ID NO: 100250 - DNA, 22 bp, Artificial Sequence
  Synthetic oligonucleotide; TTG chr11 5321609 5321630 5321626 5321631 +
ggcttctttcatcttggaaaca

SEQ ID NO: 100251 - DNA, 22 bp, Artificial Sequence
  Synthetic oligonucleotide; CTT chr11 5321614 5321635 5321631 5321636 +
ctttcatcttggaaacaacact

SEQ ID NO: 100252 - DNA, 22 bp, Artificial Sequence
  Synthetic oligonucleotide; TTC chr11 5321615 5321636 5321632 5321637 +
tttcatcttggaaacaacactg

SEQ ID NO: 100253 - DNA, 22 bp, Artificial Sequence
  Synthetic oligonucleotide; CTT chr11 5321617 5321638 5321634 5321639 +
tcatcttggaaacaacactgct

SEQ ID NO: 100254 - DNA, 22 bp, Artificial Sequence
  Synthetic oligonucleotide; TTT chr11 5321618 5321639 5321635 5321640 +
catcttggaaacaacactgctt

SEQ ID NO: 100255 - DNA, 22 bp, Artificial Sequence
  Synthetic oligonucleotide; TTC chr11 5321619 5321640 5321636 5321641 +
atcttggaaacaacactgctta

SEQ ID NO: 100256 - DNA, 22 bp, Artificial Sequence
  Synthetic oligonucleotide; CTT chr11 5321624 5321645 5321641 5321646 +
ggaaacaacactgcttatccaa

SEQ ID NO: 100257 - DNA, 22 bp, Artificial Sequence
  Synthetic oligonucleotide; TTG chr11 5321625 5321646 5321642 5321647 +
gaaacaacactgcttatccaaa

SEQ ID NO: 100258 - DNA, 22 bp, Artificial Sequence
  Synthetic oligonucleotide; CTG chr11 5321637 5321658 5321654 5321659 +
cttatccaaagtaagcacctcc

SEQ ID NO: 100259 - DNA, 22 bp, Artificial Sequence
  Synthetic oligonucleotide; CTT chr11 5321640 5321661 5321657 5321662 +
atccaaagtaagcacctcctta

SEQ ID NO: 100260 - DNA, 22 bp, Artificial Sequence
  Synthetic oligonucleotide; TTA chr11 5321641 5321662 5321658 5321663 +
tccaaagtaagcacctccttat

SEQ ID NO: 100261 - DNA, 22 bp, Artificial Sequence
  Synthetic oligonucleotide; CTC chr11 5321658 5321679 5321675 5321680 +
cttatacctattcagtgaggct

SEQ ID NO: 100262 - DNA, 22 bp, Artificial Sequence
  Synthetic oligonucleotide; CTT chr11 5321661 5321682 5321678 5321683 +
atacctattcagtgaggctgca

SEQ ID NO: 100263 - DNA, 22 bp, Artificial Sequence
  Synthetic oligonucleotide; TTA chr11 5321662 5321683 5321679 5321684 +
tacctattcagtgaggctgcaa

SEQ ID NO: 100264 - DNA, 22 bp, Artificial Sequence
  Synthetic oligonucleotide; CTA chr11 5321668 5321689 5321685 5321690 +
ttcagtgaggctgcaatattgc

SEQ ID NO: 100265 - DNA, 22 bp, Artificial Sequence
  Synthetic oligonucleotide; TTC chr11 5321671 5321692 5321688 5321693 +
agtgaggctgcaatattgccat

SEQ ID NO: 100266 - DNA, 22 bp, Artificial Sequence
  Synthetic oligonucleotide; CTG chr11 5321681 5321702 5321698 5321703 +
caatattgccatatcctcaacc

SEQ ID NO: 100267 - DNA, 22 bp, Artificial Sequence
  Synthetic oligonucleotide; TTG chr11 5321689 5321710 5321706 5321711 +
ccatatcctcaacccaccatat

SEQ ID NO: 100268 - DNA, 22 bp, Artificial Sequence
  Synthetic oligonucleotide; CTC chr11 5321699 5321720 5321716 5321721 +
aacccaccatatacacaaaagg

SEQ ID NO: 100269 - DNA, 22 bp, Artificial Sequence
  Synthetic oligonucleotide; CTG chr11 5321737 5321758 5321754 5321759 +
ctccatcatggtttgaaacttc

SEQ ID NO: 100270 - DNA, 22 bp, Artificial Sequence
  Synthetic oligonucleotide; CTC chr11 5321740 5321761 5321757 5321762 +
catcatggtttgaaacttcctt

SEQ ID NO: 100271 - DNA, 22 bp, Artificial Sequence
  Synthetic oligonucleotide; TTT chr11 5321751 5321772 5321768 5321773 +
gaaacttccttatttctcacac

SEQ ID NO: 100272 - DNA, 22 bp, Artificial Sequence
  Synthetic oligonucleotide; TTG chr11 5321752 5321773 5321769 5321774 +
aaacttccttatttctcacaca

SEQ ID NO: 100273 - DNA, 22 bp, Artificial Sequence
  Synthetic oligonucleotide; CTT chr11 5321758 5321779 5321775 5321780 +
ccttatttctcacacatgtggc

SEQ ID NO: 100274 - DNA, 22 bp, Artificial Sequence
  Synthetic oligonucleotide; TTC chr11 5321759 5321780 5321776 5321781 +
cttatttctcacacatgtggca

SEQ ID NO: 100275 - DNA, 22 bp, Artificial Sequence
  Synthetic oligonucleotide; CTT chr11 5321762 5321783 5321779 5321784 +
atttctcacacatgtggcaggt

SEQ ID NO: 100276 - DNA, 22 bp, Artificial Sequence
  Synthetic oligonucleotide; TTA chr11 5321763 5321784 5321780 5321785 +
tttctcacacatgtggcaggta

SEQ ID NO: 100277 - DNA, 22 bp, Artificial Sequence
  Synthetic oligonucleotide; TTT chr11 5321766 5321787 5321783 5321788 +
ctcacacatgtggcaggtaatt

SEQ ID NO: 100278 - DNA, 22 bp, Artificial Sequence
  Synthetic oligonucleotide; TTC chr11 5321767 5321788 5321784 5321789 +
tcacacatgtggcaggtaatta

SEQ ID NO: 100279 - DNA, 22 bp, Artificial Sequence
  Synthetic oligonucleotide; CTC chr11 5321769 5321790 5321786 5321791 +
acacatgtggcaggtaattaaa

SEQ ID NO: 100280 - DNA, 22 bp, Artificial Sequence
  Synthetic oligonucleotide; TTA chr11 5321789 5321810 5321806 5321811 +
aactatggcttgaagtcctggc

SEQ ID NO: 100281 - DNA, 22 bp, Artificial Sequence
  Synthetic oligonucleotide; CTA chr11 5321794 5321815 5321811 5321816 +
tggcttgaagtcctggccttgg

SEQ ID NO: 100282 - DNA, 22 bp, Artificial Sequence
  Synthetic oligonucleotide; CTT chr11 5321800 5321821 5321817 5321822 +
gaagtcctggccttggccagtt

SEQ ID NO: 100283 - DNA, 22 bp, Artificial Sequence
  Synthetic oligonucleotide; TTG chr11 5321801 5321822 5321818 5321823 +
aagtcctggccttggccagtta

SEQ ID NO: 100284 - DNA, 22 bp, Artificial Sequence
  Synthetic oligonucleotide; CTG chr11 5321809 5321830 5321826 5321831 +
gccttggccagttaaactaaga

SEQ ID NO: 100285 - DNA, 22 bp, Artificial Sequence
  Synthetic oligonucleotide; CTT chr11 5321814 5321835 5321831 5321836 +
ggccagttaaactaagagtcct

SEQ ID NO: 100286 - DNA, 22 bp, Artificial Sequence
  Synthetic oligonucleotide; TTG chr11 5321815 5321836 5321832 5321837 +
gccagttaaactaagagtcctt

SEQ ID NO: 100287 - DNA, 22 bp, Artificial Sequence
  Synthetic oligonucleotide; TTA chr11 5321823 5321844 5321840 5321845 +
aactaagagtccttccatcaaa

SEQ ID NO: 100288 - DNA, 22 bp, Artificial Sequence
  Synthetic oligonucleotide; CTA chr11 5321828 5321849 5321845 5321850 +
agagtccttccatcaaatgtat

SEQ ID NO: 100289 - DNA, 22 bp, Artificial Sequence
  Synthetic oligonucleotide; CTT chr11 5321837 5321858 5321854 5321859 +
ccatcaaatgtatcactgtaaa

SEQ ID NO: 100290 - DNA, 22 bp, Artificial Sequence
  Synthetic oligonucleotide; TTC chr11 5321838 5321859 5321855 5321860 +
catcaaatgtatcactgtaaaa

SEQ ID NO: 100291 - DNA, 22 bp, Artificial Sequence
  Synthetic oligonucleotide; CTG chr11 5321855 5321876 5321872 5321877 +
taaaacagatagcctatcctca

SEQ ID NO: 100292 - DNA, 22 bp, Artificial Sequence
  Synthetic oligonucleotide; CTA chr11 5321871 5321892 5321888 5321893 +
tcctcaaaatttagatatcaga

SEQ ID NO: 100293 - DNA, 22 bp, Artificial Sequence
  Synthetic oligonucleotide; CTC chr11 5321876 5321897 5321893 5321898 +
aaaatttagatatcagatgggg

SEQ ID NO: 100294 - DNA, 22 bp, Artificial Sequence
  Synthetic oligonucleotide; TTT chr11 5321883 5321904 5321900 5321905 +
agatatcagatggggatataat

SEQ ID NO: 100295 - DNA, 22 bp, Artificial Sequence
  Synthetic oligonucleotide; TTA chr11 5321884 5321905 5321901 5321906 +
gatatcagatggggatataata

SEQ ID NO: 100296 - DNA, 22 bp, Artificial Sequence
  Synthetic oligonucleotide; CTT chr11 5321918 5321939 5321935 5321940 +
gtgattaccacagcaacttgtg

SEQ ID NO: 100297 - DNA, 22 bp, Artificial Sequence
  Synthetic oligonucleotide; TTG chr11 5321919 5321940 5321936 5321941 +
tgattaccacagcaacttgtga

SEQ ID NO: 100298 - DNA, 22 bp, Artificial Sequence
  Synthetic oligonucleotide; TTA chr11 5321925 5321946 5321942 5321947 +
ccacagcaacttgtgatgtccc

SEQ ID NO: 100299 - DNA, 22 bp, Artificial Sequence
  Synthetic oligonucleotide; CTT chr11 5321937 5321958 5321954 5321959 +
gtgatgtcccacagcttctgtt

SEQ ID NO: 100300 - DNA, 22 bp, Artificial Sequence
  Synthetic oligonucleotide; TTG chr11 5321938 5321959 5321955 5321960 +
tgatgtcccacagcttctgttc

SEQ ID NO: 100301 - DNA, 22 bp, Artificial Sequence
  Synthetic oligonucleotide; CTT chr11 5321954 5321975 5321971 5321976 +
ctgttctacaaagatgggaaac

SEQ ID NO: 100302 - DNA, 22 bp, Artificial Sequence
  Synthetic oligonucleotide; TTC chr11 5321955 5321976 5321972 5321977 +
tgttctacaaagatgggaaaca

SEQ ID NO: 100303 - DNA, 22 bp, Artificial Sequence
  Synthetic oligonucleotide; CTG chr11 5321957 5321978 5321974 5321979 +
ttctacaaagatgggaaacaaa

SEQ ID NO: 100304 - DNA, 22 bp, Artificial Sequence
  Synthetic oligonucleotide; TTC chr11 5321960 5321981 5321977 5321982 +
tacaaagatgggaaacaaaggc

SEQ ID NO: 100305 - DNA, 22 bp, Artificial Sequence
  Synthetic oligonucleotide; CTA chr11 5321962 5321983 5321979 5321984 +
caaagatgggaaacaaaggcag

SEQ ID NO: 100306 - DNA, 22 bp, Artificial Sequence
  Synthetic oligonucleotide; CTT chr11 5321988 5322009 5322005 5322010 +
tcctcagctacaagaggttctg

SEQ ID NO: 100307 - DNA, 22 bp, Artificial Sequence
  Synthetic oligonucleotide; TTT chr11 5321989 5322010 5322006 5322011 +
cctcagctacaagaggttctgc

SEQ ID NO: 100308 - DNA, 22 bp, Artificial Sequence
  Synthetic oligonucleotide; TTC chr11 5321990 5322011 5322007 5322012 +
ctcagctacaagaggttctgca

SEQ ID NO: 100309 - DNA, 22 bp, Artificial Sequence
  Synthetic oligonucleotide; CTC chr11 5321993 5322014 5322010 5322015 +
agctacaagaggttctgcatca

SEQ ID NO: 100310 - DNA, 22 bp, Artificial Sequence
  Synthetic oligonucleotide; CTA chr11 5321998 5322019 5322015 5322020 +
caagaggttctgcatcaagata

SEQ ID NO: 100311 - DNA, 22 bp, Artificial Sequence
  Synthetic oligonucleotide; TTC chr11 5322008 5322029 5322025 5322030 +
tgcatcaagatagcaaatcaag

SEQ ID NO: 100312 - DNA, 22 bp, Artificial Sequence
  Synthetic oligonucleotide; CTG chr11 5322010 5322031 5322027 5322032 +
catcaagatagcaaatcaagat

SEQ ID NO: 100313 - DNA, 22 bp, Artificial Sequence
  Synthetic oligonucleotide; TTA chr11 5322040 5322061 5322057 5322062 +
tccgaaatgagatttttccatt

SEQ ID NO: 100314 - DNA, 22 bp, Artificial Sequence
  Synthetic oligonucleotide; TTT chr11 5322055 5322076 5322072 5322077 +
ttccattaagatgcctagatgt

SEQ ID NO: 100315 - DNA, 22 bp, Artificial Sequence
  Synthetic oligonucleotide; TTT chr11 5322056 5322077 5322073 5322078 +
tccattaagatgcctagatgta

SEQ ID NO: 100316 - DNA, 22 bp, Artificial Sequence
  Synthetic oligonucleotide; TTT chr11 5322057 5322078 5322074 5322079 +
ccattaagatgcctagatgtat

SEQ ID NO: 100317 - DNA, 22 bp, Artificial Sequence
  Synthetic oligonucleotide; TTC chr11 5322058 5322079 5322075 5322080 +
cattaagatgcctagatgtatt

SEQ ID NO: 100318 - DNA, 22 bp, Artificial Sequence
  Synthetic oligonucleotide; TTA chr11 5322063 5322084 5322080 5322085 +
agatgcctagatgtattataga

SEQ ID NO: 100319 - DNA, 22 bp, Artificial Sequence
  Synthetic oligonucleotide; CTA chr11 5322072 5322093 5322089 5322094 +
gatgtattatagacctcatggt

SEQ ID NO: 100320 - DNA, 22 bp, Artificial Sequence
  Synthetic oligonucleotide; TTA chr11 5322081 5322102 5322098 5322103 +
tagacctcatggtcacatataa

SEQ ID NO: 100321 - DNA, 22 bp, Artificial Sequence
  Synthetic oligonucleotide; CTC chr11 5322089 5322110 5322106 5322111 +
atggtcacatataaggaacaga

SEQ ID NO: 100322 - DNA, 22 bp, Artificial Sequence
  Synthetic oligonucleotide; CTT chr11 5322120 5322141 5322137 5322142 +
tggtagataactgacttttagg

SEQ ID NO: 100323 - DNA, 22 bp, Artificial Sequence
  Synthetic oligonucleotide; TTT chr11 5322121 5322142 5322138 5322143 +
ggtagataactgacttttagga

SEQ ID NO: 100324 - DNA, 22 bp, Artificial Sequence
  Synthetic oligonucleotide; TTG chr11 5322122 5322143 5322139 5322144 +
gtagataactgacttttaggat

SEQ ID NO: 100325 - DNA, 22 bp, Artificial Sequence
  Synthetic oligonucleotide; CTG chr11 5322133 5322154 5322150 5322155 +
acttttaggatttgagtttata

SEQ ID NO: 100326 - DNA, 22 bp, Artificial Sequence
  Synthetic oligonucleotide; CTT chr11 5322137 5322158 5322154 5322159 +
ttaggatttgagtttatattca

SEQ ID NO: 100327 - DNA, 22 bp, Artificial Sequence
  Synthetic oligonucleotide; TTT chr11 5322138 5322159 5322155 5322160 +
taggatttgagtttatattcag

SEQ ID NO: 100328 - DNA, 22 bp, Artificial Sequence
  Synthetic oligonucleotide; TTT chr11 5322139 5322160 5322156 5322161 +
aggatttgagtttatattcagc

SEQ ID NO: 100329 - DNA, 22 bp, Artificial Sequence
  Synthetic oligonucleotide; TTA chr11 5322140 5322161 5322157 5322162 +
ggatttgagtttatattcagca

SEQ ID NO: 100330 - DNA, 22 bp, Artificial Sequence
  Synthetic oligonucleotide; TTT chr11 5322146 5322167 5322163 5322168 +
gagtttatattcagcatcaata

SEQ ID NO: 100331 - DNA, 22 bp, Artificial Sequence
  Synthetic oligonucleotide; TTG chr11 5322147 5322168 5322164 5322169 +
agtttatattcagcatcaataa

SEQ ID NO: 100332 - DNA, 22 bp, Artificial Sequence
  Synthetic oligonucleotide; TTT chr11 5322152 5322173 5322169 5322174 +
atattcagcatcaataacttga

SEQ ID NO: 100333 - DNA, 22 bp, Artificial Sequence
  Synthetic oligonucleotide; TTA chr11 5322153 5322174 5322170 5322175 +
tattcagcatcaataacttgaa

SEQ ID NO: 100334 - DNA, 22 bp, Artificial Sequence
  Synthetic oligonucleotide; TTC chr11 5322158 5322179 5322175 5322180 +
agcatcaataacttgaacatta

SEQ ID NO: 100335 - DNA, 22 bp, Artificial Sequence
  Synthetic oligonucleotide; CTT chr11 5322172 5322193 5322189 5322194 +
gaacattatactctgagatagg

SEQ ID NO: 100336 - DNA, 22 bp, Artificial Sequence
  Synthetic oligonucleotide; TTG chr11 5322173 5322194 5322190 5322195 +
aacattatactctgagataggt

SEQ ID NO: 100337 - DNA, 22 bp, Artificial Sequence
  Synthetic oligonucleotide; TTA chr11 5322180 5322201 5322197 5322202 +
tactctgagataggttttcccc

SEQ ID NO: 100338 - DNA, 22 bp, Artificial Sequence
  Synthetic oligonucleotide; CTC chr11 5322185 5322206 5322202 5322207 +
tgagataggttttccccttttg

SEQ ID NO: 100339 - DNA, 22 bp, Artificial Sequence
  Synthetic oligonucleotide; CTG chr11 5322187 5322208 5322204 5322209 +
agataggttttccccttttgaa

SEQ ID NO: 100340 - DNA, 22 bp, Artificial Sequence
  Synthetic oligonucleotide; TTT chr11 5322197 5322218 5322214 5322219 +
tccccttttgaaatttgtggat

SEQ ID NO: 100341 - DNA, 22 bp, Artificial Sequence
  Synthetic oligonucleotide; TTT chr11 5322198 5322219 5322215 5322220 +
ccccttttgaaatttgtggatg

SEQ ID NO: 100342 - DNA, 22 bp, Artificial Sequence
  Synthetic oligonucleotide; TTC chr11 5322199 5322220 5322216 5322221 +
cccttttgaaatttgtggatga

SEQ ID NO: 100343 - DNA, 22 bp, Artificial Sequence
  Synthetic oligonucleotide; CTT chr11 5322204 5322225 5322221 5322226 +
ttgaaatttgtggatgaaaatc

SEQ ID NO: 100344 - DNA, 22 bp, Artificial Sequence
  Synthetic oligonucleotide; TTT chr11 5322205 5322226 5322222 5322227 +
tgaaatttgtggatgaaaatcc

SEQ ID NO: 100345 - DNA, 22 bp, Artificial Sequence
  Synthetic oligonucleotide; TTT chr11 5322206 5322227 5322223 5322228 +
gaaatttgtggatgaaaatcct

SEQ ID NO: 100346 - DNA, 22 bp, Artificial Sequence
  Synthetic oligonucleotide; TTG chr11 5322207 5322228 5322224 5322229 +
aaatttgtggatgaaaatcctg

SEQ ID NO: 100347 - DNA, 22 bp, Artificial Sequence
  Synthetic oligonucleotide; TTT chr11 5322213 5322234 5322230 5322235 +
gtggatgaaaatcctgtttcac

SEQ ID NO: 100348 - DNA, 22 bp, Artificial Sequence
  Synthetic oligonucleotide; TTG chr11 5322214 5322235 5322231 5322236 +
tggatgaaaatcctgtttcaca

SEQ ID NO: 100349 - DNA, 22 bp, Artificial Sequence
  Synthetic oligonucleotide; CTG chr11 5322229 5322250 5322246 5322251 +
tttcacaattaaatcagtctaa

SEQ ID NO: 100350 - DNA, 22 bp, Artificial Sequence
  Synthetic oligonucleotide; TTT chr11 5322232 5322253 5322249 5322254 +
cacaattaaatcagtctaaaag

SEQ ID NO: 100351 - DNA, 22 bp, Artificial Sequence
  Synthetic oligonucleotide; TTC chr11 5322233 5322254 5322250 5322255 +
acaattaaatcagtctaaaaga

SEQ ID NO: 100352 - DNA, 22 bp, Artificial Sequence
  Synthetic oligonucleotide; TTA chr11 5322240 5322261 5322257 5322262 +
aatcagtctaaaagaagctttt

SEQ ID NO: 100353 - DNA, 22 bp, Artificial Sequence
  Synthetic oligonucleotide; CTA chr11 5322250 5322271 5322267 5322272 +
aaagaagcttttagtacacagt

SEQ ID NO: 100354 - DNA, 22 bp, Artificial Sequence
  Synthetic oligonucleotide; CTT chr11 5322260 5322281 5322277 5322282 +
ttagtacacagtcacacaaaaa

SEQ ID NO: 100355 - DNA, 22 bp, Artificial Sequence
  Synthetic oligonucleotide; TTT chr11 5322261 5322282 5322278 5322283 +
tagtacacagtcacacaaaaac

SEQ ID NO: 100356 - DNA, 22 bp, Artificial Sequence
  Synthetic oligonucleotide; TTT chr11 5322262 5322283 5322279 5322284 +
agtacacagtcacacaaaaact

SEQ ID NO: 100357 - DNA, 22 bp, Artificial Sequence
  Synthetic oligonucleotide; TTA chr11 5322263 5322284 5322280 5322285 +
gtacacagtcacacaaaaactc

SEQ ID NO: 100358 - DNA, 22 bp, Artificial Sequence
  Synthetic oligonucleotide; CTC chr11 5322285 5322306 5322302 5322307 +
ctcccaccacaattttttagtc

SEQ ID NO: 100359 - DNA, 22 bp, Artificial Sequence
  Synthetic oligonucleotide; CTC chr11 5322288 5322309 5322305 5322310 +
ccaccacaattttttagtcatt

SEQ ID NO: 100360 - DNA, 22 bp, Artificial Sequence
  Synthetic oligonucleotide; TTT chr11 5322300 5322321 5322317 5322322 +
tttagtcattggatgaattgaa

SEQ ID NO: 100361 - DNA, 22 bp, Artificial Sequence
  Synthetic oligonucleotide; TTT chr11 5322301 5322322 5322318 5322323 +
ttagtcattggatgaattgaaa

SEQ ID NO: 100362 - DNA, 22 bp, Artificial Sequence
  Synthetic oligonucleotide; TTT chr11 5322302 5322323 5322319 5322324 +
tagtcattggatgaattgaaat

SEQ ID NO: 100363 - DNA, 22 bp, Artificial Sequence
  Synthetic oligonucleotide; TTT chr11 5322303 5322324 5322320 5322325 +
agtcattggatgaattgaaatc

SEQ ID NO: 100364 - DNA, 22 bp, Artificial Sequence
  Synthetic oligonucleotide; TTA chr11 5322304 5322325 5322321 5322326 +
gtcattggatgaattgaaatcc

SEQ ID NO: 100365 - DNA, 22 bp, Artificial Sequence
  Synthetic oligonucleotide; TTG chr11 5322311 5322332 5322328 5322333 +
gatgaattgaaatccatttctc

SEQ ID NO: 100366 - DNA, 22 bp, Artificial Sequence
  Synthetic oligonucleotide; TTG chr11 5322320 5322341 5322337 5322342 +
aaatccatttctctcaacattg

SEQ ID NO: 100367 - DNA, 22 bp, Artificial Sequence
  Synthetic oligonucleotide; TTT chr11 5322330 5322351 5322347 5322352 +
ctctcaacattgttggtcttcc

SEQ ID NO: 100368 - DNA, 22 bp, Artificial Sequence
  Synthetic oligonucleotide; TTC chr11 5322331 5322352 5322348 5322353 +
tctcaacattgttggtcttcct

SEQ ID NO: 100369 - DNA, 22 bp, Artificial Sequence
  Synthetic oligonucleotide; CTC chr11 5322333 5322354 5322350 5322355 +
tcaacattgttggtcttcctaa

SEQ ID NO: 100370 - DNA, 22 bp, Artificial Sequence
  Synthetic oligonucleotide; CTC chr11 5322335 5322356 5322352 5322357 +
aacattgttggtcttcctaata

SEQ ID NO: 100371 - DNA, 22 bp, Artificial Sequence
  Synthetic oligonucleotide; TTG chr11 5322342 5322363 5322359 5322364 +
ttggtcttcctaatatagagag

SEQ ID NO: 100372 - DNA, 22 bp, Artificial Sequence
  Synthetic oligonucleotide; TTG chr11 5322345 5322366 5322362 5322367 +
gtcttcctaatatagagagttt

SEQ ID NO: 100373 - DNA, 22 bp, Artificial Sequence
  Synthetic oligonucleotide; CTT chr11 5322350 5322371 5322367 5322372 +
cctaatatagagagtttacagt

SEQ ID NO: 100374 - DNA, 22 bp, Artificial Sequence
  Synthetic oligonucleotide; TTC chr11 5322351 5322372 5322368 5322373 +
ctaatatagagagtttacagta

SEQ ID NO: 100375 - DNA, 22 bp, Artificial Sequence
  Synthetic oligonucleotide; CTA chr11 5322354 5322375 5322371 5322376 +
atatagagagtttacagtagat

SEQ ID NO: 100376 - DNA, 22 bp, Artificial Sequence
  Synthetic oligonucleotide; TTT chr11 5322367 5322388 5322384 5322389 +
acagtagatgtcagagaaagta

SEQ ID NO: 100377 - DNA, 22 bp, Artificial Sequence
  Synthetic oligonucleotide; TTA chr11 5322368 5322389 5322385 5322390 +
cagtagatgtcagagaaagtat

SEQ ID NO: 100378 - DNA, 22 bp, Artificial Sequence
  Synthetic oligonucleotide; TTT chr11 5322392 5322413 5322409 5322414 +
atggcaaaagaatcaccatttc

SEQ ID NO: 100379 - DNA, 22 bp, Artificial Sequence
  Synthetic oligonucleotide; TTA chr11 5322393 5322414 5322410 5322415 +
tggcaaaagaatcaccatttct

SEQ ID NO: 100380 - DNA, 22 bp, Artificial Sequence
  Synthetic oligonucleotide; TTT chr11 5322413 5322434 5322430 5322435 +
ctaatttttccctctgaacata

SEQ ID NO: 100381 - DNA, 22 bp, Artificial Sequence
  Synthetic oligonucleotide; TTC chr11 5322414 5322435 5322431 5322436 +
taatttttccctctgaacatat

SEQ ID NO: 100382 - DNA, 22 bp, Artificial Sequence
  Synthetic oligonucleotide; CTA chr11 5322416 5322437 5322433 5322438 +
atttttccctctgaacatatat

SEQ ID NO: 100383 - DNA, 22 bp, Artificial Sequence
  Synthetic oligonucleotide; TTT chr11 5322420 5322441 5322437 5322442 +
ttccctctgaacatatataaag

SEQ ID NO: 100384 - DNA, 22 bp, Artificial Sequence
  Synthetic oligonucleotide; TTT chr11 5322421 5322442 5322438 5322443 +
tccctctgaacatatataaagt

SEQ ID NO: 100385 - DNA, 22 bp, Artificial Sequence
  Synthetic oligonucleotide; TTT chr11 5322422 5322443 5322439 5322444 +
ccctctgaacatatataaagta

SEQ ID NO: 100386 - DNA, 22 bp, Artificial Sequence
  Synthetic oligonucleotide; TTC chr11 5322423 5322444 5322440 5322445 +
cctctgaacatatataaagtat

SEQ ID NO: 100387 - DNA, 22 bp, Artificial Sequence
  Synthetic oligonucleotide; CTC chr11 5322427 5322448 5322444 5322449 +
tgaacatatataaagtatatat

SEQ ID NO: 100388 - DNA, 22 bp, Artificial Sequence
  Synthetic oligonucleotide; CTG chr11 5322429 5322450 5322446 5322451 +
aacatatataaagtatatataa

SEQ ID NO: 100389 - DNA, 22 bp, Artificial Sequence
  Synthetic oligonucleotide; CTT chr11 5322454 5322475 5322471 5322476 +
gtgaagtaatgatgtctcatat

SEQ ID NO: 100390 - DNA, 22 bp, Artificial Sequence
  Synthetic oligonucleotide; TTG chr11 5322455 5322476 5322472 5322477 +
tgaagtaatgatgtctcatatt

SEQ ID NO: 100391 - DNA, 22 bp, Artificial Sequence
  Synthetic oligonucleotide; CTC chr11 5322472 5322493 5322489 5322494 +
atatttttcattctagaatggc

SEQ ID NO: 100392 - DNA, 22 bp, Artificial Sequence
  Synthetic oligonucleotide; TTT chr11 5322478 5322499 5322495 5322500 +
ttcattctagaatggctatatt

SEQ ID NO: 100393 - DNA, 22 bp, Artificial Sequence
  Synthetic oligonucleotide; TTT chr11 5322479 5322500 5322496 5322501 +
tcattctagaatggctatattt

SEQ ID NO: 100394 - DNA, 22 bp, Artificial Sequence
  Synthetic oligonucleotide; TTT chr11 5322480 5322501 5322497 5322502 +
cattctagaatggctatatttt

SEQ ID NO: 100395 - DNA, 22 bp, Artificial Sequence
  Synthetic oligonucleotide; TTC chr11 5322481 5322502 5322498 5322503 +
attctagaatggctatattttc

SEQ ID NO: 100396 - DNA, 22 bp, Artificial Sequence
  Synthetic oligonucleotide; TTC chr11 5322485 5322506 5322502 5322507 +
tagaatggctatattttctatt

SEQ ID NO: 100397 - DNA, 22 bp, Artificial Sequence
  Synthetic oligonucleotide; CTA chr11 5322487 5322508 5322504 5322509 +
gaatggctatattttctatttt

SEQ ID NO: 100398 - DNA, 22 bp, Artificial Sequence
  Synthetic oligonucleotide; CTA chr11 5322496 5322517 5322513 5322518 +
tattttctatttttgaatagag

SEQ ID NO: 100399 - DNA, 22 bp, Artificial Sequence
  Synthetic oligonucleotide; TTT chr11 5322501 5322522 5322518 5322523 +
tctatttttgaatagagccttg

SEQ ID NO: 100400 - DNA, 22 bp, Artificial Sequence
  Synthetic oligonucleotide; TTT chr11 5322502 5322523 5322519 5322524 +
ctatttttgaatagagccttga

SEQ ID NO: 100401 - DNA, 22 bp, Artificial Sequence
  Synthetic oligonucleotide; TTC chr11 5322503 5322524 5322520 5322525 +
tatttttgaatagagccttgac

SEQ ID NO: 100402 - DNA, 22 bp, Artificial Sequence
  Synthetic oligonucleotide; CTA chr11 5322505 5322526 5322522 5322527 +
tttttgaatagagccttgaccc

SEQ ID NO: 100403 - DNA, 22 bp, Artificial Sequence
  Synthetic oligonucleotide; TTT chr11 5322508 5322529 5322525 5322530 +
ttgaatagagccttgacccttc

SEQ ID NO: 100404 - DNA, 22 bp, Artificial Sequence
  Synthetic oligonucleotide; TTT chr11 5322509 5322530 5322526 5322531 +
tgaatagagccttgacccttcc

SEQ ID NO: 100405 - DNA, 22 bp, Artificial Sequence
  Synthetic oligonucleotide; TTT chr11 5322510 5322531 5322527 5322532 +
gaatagagccttgacccttcct

SEQ ID NO: 100406 - DNA, 22 bp, Artificial Sequence
  Synthetic oligonucleotide; TTG chr11 5322511 5322532 5322528 5322533 +
aatagagccttgacccttccta

SEQ ID NO: 100407 - DNA, 22 bp, Artificial Sequence
  Synthetic oligonucleotide; CTT chr11 5322522 5322543 5322539 5322544 +
gacccttcctattattaggcca

SEQ ID NO: 100408 - DNA, 22 bp, Artificial Sequence
  Synthetic oligonucleotide; TTG chr11 5322523 5322544 5322540 5322545 +
acccttcctattattaggccaa

SEQ ID NO: 100409 - DNA, 22 bp, Artificial Sequence
  Synthetic oligonucleotide; CTT chr11 5322529 5322550 5322546 5322551 +
cctattattaggccaagggaaa

SEQ ID NO: 100410 - DNA, 22 bp, Artificial Sequence
  Synthetic oligonucleotide; TTC chr11 5322530 5322551 5322547 5322552 +
ctattattaggccaagggaaaa

SEQ ID NO: 100411 - DNA, 22 bp, Artificial Sequence
  Synthetic oligonucleotide; CTA chr11 5322533 5322554 5322550 5322555 +
ttattaggccaagggaaaagta

SEQ ID NO: 100412 - DNA, 22 bp, Artificial Sequence
  Synthetic oligonucleotide; TTA chr11 5322536 5322557 5322553 5322558 +
ttaggccaagggaaaagtatgt

SEQ ID NO: 100413 - DNA, 22 bp, Artificial Sequence
  Synthetic oligonucleotide; TTA chr11 5322539 5322560 5322556 5322561 +
ggccaagggaaaagtatgttaa

SEQ ID NO: 100414 - DNA, 22 bp, Artificial Sequence
  Synthetic oligonucleotide; TTA chr11 5322560 5322581 5322577 5322582 +
aaatcatctgaagagcaaacat

SEQ ID NO: 100415 - DNA, 22 bp, Artificial Sequence
  Synthetic oligonucleotide; CTG chr11 5322570 5322591 5322587 5322592 +
aagagcaaacatactcttaaaa

SEQ ID NO: 100416 - DNA, 22 bp, Artificial Sequence
  Synthetic oligonucleotide; CTC chr11 5322586 5322607 5322603 5322608 +
ttaaaaactcactttttacttt

SEQ ID NO: 100417 - DNA, 22 bp, Artificial Sequence
  Synthetic oligonucleotide; CTT chr11 5322588 5322609 5322605 5322610 +
aaaaactcactttttacttttt

SEQ ID NO: 100418 - DNA, 22 bp, Artificial Sequence
  Synthetic oligonucleotide; TTA chr11 5322589 5322610 5322606 5322611 +
aaaactcactttttactttttt

SEQ ID NO: 100419 - DNA, 22 bp, Artificial Sequence
  Synthetic oligonucleotide; CTC chr11 5322596 5322617 5322613 5322618 +
actttttacttttttacgagct

SEQ ID NO: 100420 - DNA, 22 bp, Artificial Sequence
  Synthetic oligonucleotide; CTT chr11 5322600 5322621 5322617 5322622 +
tttacttttttacgagctgaca

SEQ ID NO: 100421 - DNA, 22 bp, Artificial Sequence
  Synthetic oligonucleotide; TTT chr11 5322601 5322622 5322618 5322623 +
ttacttttttacgagctgacaa

SEQ ID NO: 100422 - DNA, 22 bp, Artificial Sequence
  Synthetic oligonucleotide; TTT chr11 5322602 5322623 5322619 5322624 +
tacttttttacgagctgacaag

SEQ ID NO: 100423 - DNA, 22 bp, Artificial Sequence
  Synthetic oligonucleotide; TTT chr11 5322603 5322624 5322620 5322625 +
acttttttacgagctgacaaga

SEQ ID NO: 100424 - DNA, 22 bp, Artificial Sequence
  Synthetic oligonucleotide; TTA chr11 5322604 5322625 5322621 5322626 +
cttttttacgagctgacaagaa

SEQ ID NO: 100425 - DNA, 22 bp, Artificial Sequence
  Synthetic oligonucleotide; CTT chr11 5322607 5322628 5322624 5322629 +
ttttacgagctgacaagaagct

SEQ ID NO: 100426 - DNA, 22 bp, Artificial Sequence
  Synthetic oligonucleotide; TTT chr11 5322608 5322629 5322625 5322630 +
tttacgagctgacaagaagctt

SEQ ID NO: 100427 - DNA, 22 bp, Artificial Sequence
  Synthetic oligonucleotide; TTT chr11 5322609 5322630 5322626 5322631 +
ttacgagctgacaagaagcttg

SEQ ID NO: 100428 - DNA, 22 bp, Artificial Sequence
  Synthetic oligonucleotide; TTT chr11 5322610 5322631 5322627 5322632 +
tacgagctgacaagaagcttgt

SEQ ID NO: 100429 - DNA, 22 bp, Artificial Sequence
  Synthetic oligonucleotide; TTT chr11 5322611 5322632 5322628 5322633 +
acgagctgacaagaagcttgtc

SEQ ID NO: 100430 - DNA, 22 bp, Artificial Sequence
  Synthetic oligonucleotide; TTA chr11 5322612 5322633 5322629 5322634 +
cgagctgacaagaagcttgtct

SEQ ID NO: 100431 - DNA, 22 bp, Artificial Sequence
  Synthetic oligonucleotide; CTG chr11 5322619 5322640 5322636 5322641 +
acaagaagcttgtctaggtttt

SEQ ID NO: 100432 - DNA, 22 bp, Artificial Sequence
  Synthetic oligonucleotide; CTT chr11 5322630 5322651 5322647 5322652 +
gtctaggtttttccttctaaga

SEQ ID NO: 100433 - DNA, 22 bp, Artificial Sequence
  Synthetic oligonucleotide; TTG chr11 5322631 5322652 5322648 5322653 +
tctaggtttttccttctaagat

SEQ ID NO: 100434 - DNA, 22 bp, Artificial Sequence
  Synthetic oligonucleotide; CTA chr11 5322635 5322656 5322652 5322657 +
ggtttttccttctaagattttt

SEQ ID NO: 100435 - DNA, 22 bp, Artificial Sequence
  Synthetic oligonucleotide; TTT chr11 5322640 5322661 5322657 5322662 +
ttccttctaagatttttttggg

SEQ ID NO: 100436 - DNA, 22 bp, Artificial Sequence
  Synthetic oligonucleotide; TTT chr11 5322641 5322662 5322658 5322663 +
tccttctaagatttttttgggc

SEQ ID NO: 100437 - DNA, 22 bp, Artificial Sequence
  Synthetic oligonucleotide; TTT chr11 5322642 5322663 5322659 5322664 +
ccttctaagatttttttgggca

SEQ ID NO: 100438 - DNA, 22 bp, Artificial Sequence
  Synthetic oligonucleotide; TTC chr11 5322643 5322664 5322660 5322665 +
cttctaagatttttttgggcaa

SEQ ID NO: 100439 - DNA, 22 bp, Artificial Sequence
  Synthetic oligonucleotide; CTT chr11 5322646 5322667 5322663 5322668 +
ctaagatttttttgggcaaaag

SEQ ID NO: 100440 - DNA, 22 bp, Artificial Sequence
  Synthetic oligonucleotide; TTC chr11 5322647 5322668 5322664 5322669 +
taagatttttttgggcaaaaga

SEQ ID NO: 100441 - DNA, 22 bp, Artificial Sequence
  Synthetic oligonucleotide; CTA chr11 5322649 5322670 5322666 5322671 +
agatttttttgggcaaaagaat

SEQ ID NO: 100442 - DNA, 22 bp, Artificial Sequence
  Synthetic oligonucleotide; TTT chr11 5322655 5322676 5322672 5322677 +
ttttgggcaaaagaatatttat

SEQ ID NO: 100443 - DNA, 22 bp, Artificial Sequence
  Synthetic oligonucleotide; TTT chr11 5322656 5322677 5322673 5322678 +
tttgggcaaaagaatatttata

SEQ ID NO: 100444 - DNA, 22 bp, Artificial Sequence
  Synthetic oligonucleotide; TTT chr11 5322657 5322678 5322674 5322679 +
ttgggcaaaagaatatttatag

SEQ ID NO: 100445 - DNA, 22 bp, Artificial Sequence
  Synthetic oligonucleotide; TTT chr11 5322658 5322679 5322675 5322680 +
tgggcaaaagaatatttataga

SEQ ID NO: 100446 - DNA, 22 bp, Artificial Sequence
  Synthetic oligonucleotide; TTT chr11 5322659 5322680 5322676 5322681 +
gggcaaaagaatatttatagaa

SEQ ID NO: 100447 - DNA, 22 bp, Artificial Sequence
  Synthetic oligonucleotide; TTG chr11 5322660 5322681 5322677 5322682 +
ggcaaaagaatatttatagaag

SEQ ID NO: 100448 - DNA, 22 bp, Artificial Sequence
  Synthetic oligonucleotide; TTT chr11 5322675 5322696 5322692 5322697 +
atagaagaatgaggtaaagaaa

SEQ ID NO: 100449 - DNA, 22 bp, Artificial Sequence
  Synthetic oligonucleotide; TTA chr11 5322676 5322697 5322693 5322698 +
tagaagaatgaggtaaagaaat

SEQ ID NO: 100450 - DNA, 22 bp, Artificial Sequence
  Synthetic oligonucleotide; CTT chr11 5322704 5322725 5322721 5322726 +
ttataaaatccagacatcctgc

SEQ ID NO: 100451 - DNA, 22 bp, Artificial Sequence
  Synthetic oligonucleotide; TTT chr11 5322705 5322726 5322722 5322727 +
tataaaatccagacatcctgca

SEQ ID NO: 100452 - DNA, 22 bp, Artificial Sequence
  Synthetic oligonucleotide; TTT chr11 5322706 5322727 5322723 5322728 +
ataaaatccagacatcctgcaa

SEQ ID NO: 100453 - DNA, 22 bp, Artificial Sequence
  Synthetic oligonucleotide; TTA chr11 5322707 5322728 5322724 5322729 +
taaaatccagacatcctgcaag

SEQ ID NO: 100454 - DNA, 22 bp, Artificial Sequence
  Synthetic oligonucleotide; CTG chr11 5322725 5322746 5322742 5322747 +
caaggaatgtattgaaaattaa

SEQ ID NO: 100455 - DNA, 22 bp, Artificial Sequence
  Synthetic oligonucleotide; TTG chr11 5322739 5322760 5322756 5322761 +
aaaattaaaaagctcttattga

SEQ ID NO: 100456 - DNA, 22 bp, Artificial Sequence
  Synthetic oligonucleotide; TTA chr11 5322746 5322767 5322763 5322768 +
aaaagctcttattgaaatactc

SEQ ID NO: 100457 - DNA, 22 bp, Artificial Sequence
  Synthetic oligonucleotide; CTC chr11 5322754 5322775 5322771 5322776 +
ttattgaaatactctgtaagtg

SEQ ID NO: 100458 - DNA, 22 bp, Artificial Sequence
  Synthetic oligonucleotide; CTT chr11 5322756 5322777 5322773 5322778 +
attgaaatactctgtaagtgac

SEQ ID NO: 100459 - DNA, 22 bp, Artificial Sequence
  Synthetic oligonucleotide; TTA chr11 5322757 5322778 5322774 5322779 +
ttgaaatactctgtaagtgact

SEQ ID NO: 100460 - DNA, 22 bp, Artificial Sequence
  Synthetic oligonucleotide; TTG chr11 5322760 5322781 5322777 5322782 +
aaatactctgtaagtgacttac

SEQ ID NO: 100461 - DNA, 22 bp, Artificial Sequence
  Synthetic oligonucleotide; CTC chr11 5322768 5322789 5322785 5322790 +
tgtaagtgacttacgactgtat

SEQ ID NO: 100462 - DNA, 22 bp, Artificial Sequence
  Synthetic oligonucleotide; CTG chr11 5322770 5322791 5322787 5322792 +
taagtgacttacgactgtattt

SEQ ID NO: 100463 - DNA, 22 bp, Artificial Sequence
  Synthetic oligonucleotide; CTT chr11 5322780 5322801 5322797 5322802 +
acgactgtatttagaaaatatt

SEQ ID NO: 100464 - DNA, 22 bp, Artificial Sequence
  Synthetic oligonucleotide; TTA chr11 5322781 5322802 5322798 5322803 +
cgactgtatttagaaaatatta

SEQ ID NO: 100465 - DNA, 22 bp, Artificial Sequence
  Synthetic oligonucleotide; CTG chr11 5322787 5322808 5322804 5322809 +
tatttagaaaatattaaatgca

SEQ ID NO: 100466 - DNA, 22 bp, Artificial Sequence
  Synthetic oligonucleotide; TTT chr11 5322792 5322813 5322809 5322814 +
agaaaatattaaatgcaaatca

SEQ ID NO: 100467 - DNA, 22 bp, Artificial Sequence
  Synthetic oligonucleotide; TTA chr11 5322793 5322814 5322810 5322815 +
gaaaatattaaatgcaaatcat

SEQ ID NO: 100468 - DNA, 22 bp, Artificial Sequence
  Synthetic oligonucleotide; TTA chr11 5322803 5322824 5322820 5322825 +
aatgcaaatcatggccctagag

SEQ ID NO: 100469 - DNA, 22 bp, Artificial Sequence
  Synthetic oligonucleotide; CTA chr11 5322822 5322843 5322839 5322844 +
gagagtaccctaactcagggta

SEQ ID NO: 100470 - DNA, 22 bp, Artificial Sequence
  Synthetic oligonucleotide; CTA chr11 5322834 5322855 5322851 5322856 +
actcagggtagaggacagttaa

SEQ ID NO: 100471 - DNA, 22 bp, Artificial Sequence
  Synthetic oligonucleotide; CTC chr11 5322838 5322859 5322855 5322860 +
agggtagaggacagttaaaaga

SEQ ID NO: 100472 - DNA, 22 bp, Artificial Sequence
  Synthetic oligonucleotide; TTA chr11 5322855 5322876 5322872 5322877 +
aaagataaccaacacttactta

SEQ ID NO: 100473 - DNA, 22 bp, Artificial Sequence
  Synthetic oligonucleotide; CTT chr11 5322872 5322893 5322889 5322894 +
acttatttaaaagtaaatttaa

SEQ ID NO: 100474 - DNA, 22 bp, Artificial Sequence
  Synthetic oligonucleotide; TTA chr11 5322873 5322894 5322890 5322895 +
cttatttaaaagtaaatttaaa

SEQ ID NO: 100475 - DNA, 22 bp, Artificial Sequence
  Synthetic oligonucleotide; CTT chr11 5322876 5322897 5322893 5322898 +
atttaaaagtaaatttaaaatg

SEQ ID NO: 100476 - DNA, 22 bp, Artificial Sequence
  Synthetic oligonucleotide; TTA chr11 5322877 5322898 5322894 5322899 +
tttaaaagtaaatttaaaatgt

SEQ ID NO: 100477 - DNA, 22 bp, Artificial Sequence
  Synthetic oligonucleotide; TTT chr11 5322880 5322901 5322897 5322902 +
aaaagtaaatttaaaatgttag

SEQ ID NO: 100478 - DNA, 22 bp, Artificial Sequence
  Synthetic oligonucleotide; TTA chr11 5322881 5322902 5322898 5322903 +
aaagtaaatttaaaatgttagt

SEQ ID NO: 100479 - DNA, 22 bp, Artificial Sequence
  Synthetic oligonucleotide; TTT chr11 5322892 5322913 5322909 5322914 +
aaaatgttagtttcttatcact

SEQ ID NO: 100480 - DNA, 22 bp, Artificial Sequence
  Synthetic oligonucleotide; TTA chr11 5322893 5322914 5322910 5322915 +
aaatgttagtttcttatcacta

SEQ ID NO: 100481 - DNA, 22 bp, Artificial Sequence
  Synthetic oligonucleotide; TTA chr11 5322901 5322922 5322918 5322923 +
gtttcttatcactatatttgcc

SEQ ID NO: 100482 - DNA, 22 bp, Artificial Sequence
  Synthetic oligonucleotide; TTT chr11 5322905 5322926 5322922 5322927 +
cttatcactatatttgccatga

SEQ ID NO: 100483 - DNA, 22 bp, Artificial Sequence
  Synthetic oligonucleotide; TTC chr11 5322906 5322927 5322923 5322928 +
ttatcactatatttgccatgag

SEQ ID NO: 100484 - DNA, 22 bp, Artificial Sequence
  Synthetic oligonucleotide; CTT chr11 5322908 5322929 5322925 5322930 +
atcactatatttgccatgagaa

SEQ ID NO: 100485 - DNA, 22 bp, Artificial Sequence
  Synthetic oligonucleotide; TTA chr11 5322909 5322930 5322926 5322931 +
tcactatatttgccatgagaat

SEQ ID NO: 100486 - DNA, 22 bp, Artificial Sequence
  Synthetic oligonucleotide; CTA chr11 5322915 5322936 5322932 5322937 +
tatttgccatgagaataatgaa

SEQ ID NO: 100487 - DNA, 22 bp, Artificial Sequence
  Synthetic oligonucleotide; TTT chr11 5322920 5322941 5322937 5322942 +
gccatgagaataatgaaaattt

SEQ ID NO: 100488 - DNA, 22 bp, Artificial Sequence
  Synthetic oligonucleotide; TTG chr11 5322921 5322942 5322938 5322943 +
ccatgagaataatgaaaatttt

SEQ ID NO: 100489 - DNA, 22 bp, Artificial Sequence
  Synthetic oligonucleotide; TTT chr11 5322942 5322963 5322959 5322964 +
taaataagaatttatttctaga

SEQ ID NO: 100490 - DNA, 22 bp, Artificial Sequence
  Synthetic oligonucleotide; TTT chr11 5322943 5322964 5322960 5322965 +
aaataagaatttatttctagag

SEQ ID NO: 100491 - DNA, 22 bp, Artificial Sequence
  Synthetic oligonucleotide; TTA chr11 5322944 5322965 5322961 5322966 +
aataagaatttatttctagaga

SEQ ID NO: 100492 - DNA, 22 bp, Artificial Sequence
  Synthetic oligonucleotide; TTT chr11 5322955 5322976 5322972 5322977 +
atttctagagaatgatgatcaa

SEQ ID NO: 100493 - DNA, 22 bp, Artificial Sequence
  Synthetic oligonucleotide; TTA chr11 5322956 5322977 5322973 5322978 +
tttctagagaatgatgatcaac

SEQ ID NO: 100494 - DNA, 22 bp, Artificial Sequence
  Synthetic oligonucleotide; TTT chr11 5322959 5322980 5322976 5322981 +
ctagagaatgatgatcaacttt

SEQ ID NO: 100495 - DNA, 22 bp, Artificial Sequence
  Synthetic oligonucleotide; TTC chr11 5322960 5322981 5322977 5322982 +
tagagaatgatgatcaactttt

SEQ ID NO: 100496 - DNA, 22 bp, Artificial Sequence
  Synthetic oligonucleotide; CTA chr11 5322962 5322983 5322979 5322984 +
gagaatgatgatcaactttttt

SEQ ID NO: 100497 - DNA, 22 bp, Artificial Sequence
  Synthetic oligonucleotide; CTT chr11 5322980 5323001 5322997 5323002 +
ttttttttacacttgtgtgcat

SEQ ID NO: 100498 - DNA, 22 bp, Artificial Sequence
  Synthetic oligonucleotide; TTT chr11 5322981 5323002 5322998 5323003 +
tttttttacacttgtgtgcatt

SEQ ID NO: 100499 - DNA, 22 bp, Artificial Sequence
  Synthetic oligonucleotide; TTT chr11 5322982 5323003 5322999 5323004 +
ttttttacacttgtgtgcatta

SEQ ID NO: 100500 - DNA, 22 bp, Artificial Sequence
  Synthetic oligonucleotide; TTT chr11 5322983 5323004 5323000 5323005 +
tttttacacttgtgtgcattag

SEQ ID NO: 100501 - DNA, 22 bp, Artificial Sequence
  Synthetic oligonucleotide; TTT chr11 5322984 5323005 5323001 5323006 +
ttttacacttgtgtgcattagc

SEQ ID NO: 100502 - DNA, 22 bp, Artificial Sequence
  Synthetic oligonucleotide; TTT chr11 5322985 5323006 5323002 5323007 +
tttacacttgtgtgcattagcc

SEQ ID NO: 100503 - DNA, 22 bp, Artificial Sequence
  Synthetic oligonucleotide; TTT chr11 5322986 5323007 5323003 5323008 +
ttacacttgtgtgcattagcct

SEQ ID NO: 100504 - DNA, 22 bp, Artificial Sequence
  Synthetic oligonucleotide; TTT chr11 5322987 5323008 5323004 5323009 +
tacacttgtgtgcattagccta

SEQ ID NO: 100505 - DNA, 22 bp, Artificial Sequence
  Synthetic oligonucleotide; TTT chr11 5322988 5323009 5323005 5323010 +
acacttgtgtgcattagcctat

SEQ ID NO: 100506 - DNA, 22 bp, Artificial Sequence
  Synthetic oligonucleotide; TTA chr11 5322989 5323010 5323006 5323011 +
cacttgtgtgcattagcctatg

SEQ ID NO: 100507 - DNA, 22 bp, Artificial Sequence
  Synthetic oligonucleotide; CTT chr11 5322994 5323015 5323011 5323016 +
gtgtgcattagcctatgcaaac

SEQ ID NO: 100508 - DNA, 22 bp, Artificial Sequence
  Synthetic oligonucleotide; TTG chr11 5322995 5323016 5323012 5323017 +
tgtgcattagcctatgcaaaca

SEQ ID NO: 100509 - DNA, 22 bp, Artificial Sequence
  Synthetic oligonucleotide; TTA chr11 5323004 5323025 5323021 5323026 +
gcctatgcaaacacataaacat

SEQ ID NO: 100510 - DNA, 22 bp, Artificial Sequence
  Synthetic oligonucleotide; CTA chr11 5323009 5323030 5323026 5323031 +
tgcaaacacataaacatgtatg

SEQ ID NO: 100511 - DNA, 22 bp, Artificial Sequence
  Synthetic oligonucleotide; CTG chr11 5323048 5323069 5323065 5323070 +
aggcaaaagtttttcatagaga

SEQ ID NO: 100512 - DNA, 22 bp, Artificial Sequence
  Synthetic oligonucleotide; TTT chr11 5323060 5323081 5323077 5323082 +
ttcatagagattatatgttctg

SEQ ID NO: 100513 - DNA, 22 bp, Artificial Sequence
  Synthetic oligonucleotide; TTT chr11 5323061 5323082 5323078 5323083 +
tcatagagattatatgttctgc

SEQ ID NO: 100514 - DNA, 22 bp, Artificial Sequence
  Synthetic oligonucleotide; TTT chr11 5323062 5323083 5323079 5323084 +
catagagattatatgttctgcc

SEQ ID NO: 100515 - DNA, 22 bp, Artificial Sequence
  Synthetic oligonucleotide; TTC chr11 5323063 5323084 5323080 5323085 +
atagagattatatgttctgcct

SEQ ID NO: 100516 - DNA, 22 bp, Artificial Sequence
  Synthetic oligonucleotide; TTA chr11 5323073 5323094 5323090 5323095 +
tatgttctgccttttcctcaaa

SEQ ID NO: 100517 - DNA, 22 bp, Artificial Sequence
  Synthetic oligonucleotide; TTC chr11 5323080 5323101 5323097 5323102 +
tgccttttcctcaaatttcact

SEQ ID NO: 100518 - DNA, 22 bp, Artificial Sequence
  Synthetic oligonucleotide; CTG chr11 5323082 5323103 5323099 5323104 +
ccttttcctcaaatttcactga

SEQ ID NO: 100519 - DNA, 22 bp, Artificial Sequence
  Synthetic oligonucleotide; CTT chr11 5323086 5323107 5323103 5323108 +
ttcctcaaatttcactgaggtg

SEQ ID NO: 100520 - DNA, 22 bp, Artificial Sequence
  Synthetic oligonucleotide; TTT chr11 5323087 5323108 5323104 5323109 +
tcctcaaatttcactgaggtgg

SEQ ID NO: 100521 - DNA, 22 bp, Artificial Sequence
  Synthetic oligonucleotide; TTT chr11 5323088 5323109 5323105 5323110 +
cctcaaatttcactgaggtggc

SEQ ID NO: 100522 - DNA, 22 bp, Artificial Sequence
  Synthetic oligonucleotide; TTC chr11 5323089 5323110 5323106 5323111 +
ctcaaatttcactgaggtggct

SEQ ID NO: 100523 - DNA, 22 bp, Artificial Sequence
  Synthetic oligonucleotide; CTC chr11 5323092 5323113 5323109 5323114 +
aaatttcactgaggtggctaat

SEQ ID NO: 100524 - DNA, 22 bp, Artificial Sequence
  Synthetic oligonucleotide; TTT chr11 5323098 5323119 5323115 5323120 +
cactgaggtggctaatttcagg

SEQ ID NO: 100525 - DNA, 22 bp, Artificial Sequence
  Synthetic oligonucleotide; TTC chr11 5323099 5323120 5323116 5323121 +
actgaggtggctaatttcaggt

SEQ ID NO: 100526 - DNA, 22 bp, Artificial Sequence
  Synthetic oligonucleotide; CTG chr11 5323103 5323124 5323120 5323125 +
aggtggctaatttcaggtgcat

SEQ ID NO: 100527 - DNA, 22 bp, Artificial Sequence
  Synthetic oligonucleotide; CTA chr11 5323112 5323133 5323129 5323134 +
atttcaggtgcatttgaaagaa

SEQ ID NO: 100528 - DNA, 22 bp, Artificial Sequence
  Synthetic oligonucleotide; TTT chr11 5323116 5323137 5323133 5323138 +
caggtgcatttgaaagaagaat

SEQ ID NO: 100529 - DNA, 22 bp, Artificial Sequence
  Synthetic oligonucleotide; TTC chr11 5323117 5323138 5323134 5323139 +
aggtgcatttgaaagaagaatt

SEQ ID NO: 100530 - DNA, 22 bp, Artificial Sequence
  Synthetic oligonucleotide; TTT chr11 5323127 5323148 5323144 5323149 +
gaaagaagaatttaaatataga

SEQ ID NO: 100531 - DNA, 22 bp, Artificial Sequence
  Synthetic oligonucleotide; TTG chr11 5323128 5323149 5323145 5323150 +
aaagaagaatttaaatatagac

SEQ ID NO: 100532 - DNA, 22 bp, Artificial Sequence
  Synthetic oligonucleotide; TTT chr11 5323140 5323161 5323157 5323162 +
aaatatagactttttcagttcc

SEQ ID NO: 100533 - DNA, 22 bp, Artificial Sequence
  Synthetic oligonucleotide; TTA chr11 5323141 5323162 5323158 5323163 +
aatatagactttttcagttcca

SEQ ID NO: 100534 - DNA, 22 bp, Artificial Sequence
  Synthetic oligonucleotide; CTT chr11 5323152 5323173 5323169 5323174 +
tttcagttccatatggtctatt

SEQ ID NO: 100535 - DNA, 22 bp, Artificial Sequence
  Synthetic oligonucleotide; TTT chr11 5323153 5323174 5323170 5323175 +
ttcagttccatatggtctattc

SEQ ID NO: 100536 - DNA, 22 bp, Artificial Sequence
  Synthetic oligonucleotide; TTT chr11 5323154 5323175 5323171 5323176 +
tcagttccatatggtctattca

SEQ ID NO: 100537 - DNA, 22 bp, Artificial Sequence
  Synthetic oligonucleotide; TTT chr11 5323155 5323176 5323172 5323177 +
cagttccatatggtctattcag

SEQ ID NO: 100538 - DNA, 22 bp, Artificial Sequence
  Synthetic oligonucleotide; TTC chr11 5323156 5323177 5323173 5323178 +
agttccatatggtctattcagt

SEQ ID NO: 100539 - DNA, 22 bp, Artificial Sequence
  Synthetic oligonucleotide; TTC chr11 5323161 5323182 5323178 5323183 +
catatggtctattcagtgttct

SEQ ID NO: 100540 - DNA, 22 bp, Artificial Sequence
  Synthetic oligonucleotide; CTA chr11 5323172 5323193 5323189 5323194 +
ttcagtgttctgtcaccagact

SEQ ID NO: 100541 - DNA, 22 bp, Artificial Sequence
  Synthetic oligonucleotide; TTC chr11 5323175 5323196 5323192 5323197 +
agtgttctgtcaccagacttct

SEQ ID NO: 100542 - DNA, 22 bp, Artificial Sequence
  Synthetic oligonucleotide; TTC chr11 5323182 5323203 5323199 5323204 +
tgtcaccagacttctcctaaga

SEQ ID NO: 100543 - DNA, 22 bp, Artificial Sequence
  Synthetic oligonucleotide; CTG chr11 5323184 5323205 5323201 5323206 +
tcaccagacttctcctaagata

SEQ ID NO: 100544 - DNA, 22 bp, Artificial Sequence
  Synthetic oligonucleotide; CTT chr11 5323195 5323216 5323212 5323217 +
ctcctaagatatgcccccaacc

SEQ ID NO: 100545 - DNA, 22 bp, Artificial Sequence
  Synthetic oligonucleotide; TTC chr11 5323196 5323217 5323213 5323218 +
tcctaagatatgcccccaaccc

SEQ ID NO: 100546 - DNA, 22 bp, Artificial Sequence
  Synthetic oligonucleotide; CTC chr11 5323198 5323219 5323215 5323220 +
ctaagatatgcccccaacccta

SEQ ID NO: 100547 - DNA, 22 bp, Artificial Sequence
  Synthetic oligonucleotide; CTA chr11 5323201 5323222 5323218 5323223 +
agatatgcccccaaccctatgg

SEQ ID NO: 100548 - DNA, 22 bp, Artificial Sequence
  Synthetic oligonucleotide; CTA chr11 5323220 5323241 5323237 5323242 +
tggtaaagtacttaagtccttg

SEQ ID NO: 100549 - DNA, 22 bp, Artificial Sequence
  Synthetic oligonucleotide; CTT chr11 5323233 5323254 5323250 5323255 +
aagtccttgtgagtgacaacat

SEQ ID NO: 100550 - DNA, 22 bp, Artificial Sequence
  Synthetic oligonucleotide; TTA chr11 5323234 5323255 5323251 5323256 +
agtccttgtgagtgacaacatt

SEQ ID NO: 100551 - DNA, 22 bp, Artificial Sequence
  Synthetic oligonucleotide; CTT chr11 5323241 5323262 5323258 5323263 +
gtgagtgacaacattgtcttcc

SEQ ID NO: 100552 - DNA, 22 bp, Artificial Sequence
  Synthetic oligonucleotide; TTG chr11 5323242 5323263 5323259 5323264 +
tgagtgacaacattgtcttcca

SEQ ID NO: 100553 - DNA, 22 bp, Artificial Sequence
  Synthetic oligonucleotide; TTG chr11 5323257 5323278 5323274 5323279 +
tcttccagtatacccttgctct

SEQ ID NO: 100554 - DNA, 22 bp, Artificial Sequence
  Synthetic oligonucleotide; CTT chr11 5323261 5323282 5323278 5323283 +
ccagtatacccttgctctttgc

SEQ ID NO: 100555 - DNA, 22 bp, Artificial Sequence
  Synthetic oligonucleotide; TTC chr11 5323262 5323283 5323279 5323284 +
cagtatacccttgctctttgct

SEQ ID NO: 100556 - DNA, 22 bp, Artificial Sequence
  Synthetic oligonucleotide; CTT chr11 5323274 5323295 5323291 5323296 +
gctctttgctaagaaagaactc

SEQ ID NO: 100557 - DNA, 22 bp, Artificial Sequence
  Synthetic oligonucleotide; TTG chr11 5323275 5323296 5323292 5323297 +
ctctttgctaagaaagaactcc

SEQ ID NO: 100558 - DNA, 22 bp, Artificial Sequence
  Synthetic oligonucleotide; CTC chr11 5323278 5323299 5323295 5323300 +
tttgctaagaaagaactccagg

SEQ ID NO: 100559 - DNA, 22 bp, Artificial Sequence
  Synthetic oligonucleotide; CTT chr11 5323280 5323301 5323297 5323302 +
tgctaagaaagaactccaggct

SEQ ID NO: 100560 - DNA, 22 bp, Artificial Sequence
  Synthetic oligonucleotide; TTT chr11 5323281 5323302 5323298 5323303 +
gctaagaaagaactccaggctt

SEQ ID NO: 100561 - DNA, 22 bp, Artificial Sequence
  Synthetic oligonucleotide; TTG chr11 5323282 5323303 5323299 5323304 +
ctaagaaagaactccaggcttt

SEQ ID NO: 100562 - DNA, 22 bp, Artificial Sequence
  Synthetic oligonucleotide; CTA chr11 5323285 5323306 5323302 5323307 +
agaaagaactccaggctttcat

SEQ ID NO: 100563 - DNA, 22 bp, Artificial Sequence
  Synthetic oligonucleotide; CTC chr11 5323296 5323317 5323313 5323318 +
caggctttcatttttcattctg

SEQ ID NO: 100564 - DNA, 22 bp, Artificial Sequence
  Synthetic oligonucleotide; CTT chr11 5323303 5323324 5323320 5323325 +
tcatttttcattctggcttcat

SEQ ID NO: 100565 - DNA, 22 bp, Artificial Sequence
  Synthetic oligonucleotide; TTT chr11 5323304 5323325 5323321 5323326 +
catttttcattctggcttcatt

SEQ ID NO: 100566 - DNA, 22 bp, Artificial Sequence
  Synthetic oligonucleotide; TTC chr11 5323305 5323326 5323322 5323327 +
atttttcattctggcttcattt

SEQ ID NO: 100567 - DNA, 22 bp, Artificial Sequence
  Synthetic oligonucleotide; TTT chr11 5323309 5323330 5323326 5323331 +
ttcattctggcttcatttttat

SEQ ID NO: 100568 - DNA, 22 bp, Artificial Sequence
  Synthetic oligonucleotide; TTT chr11 5323310 5323331 5323327 5323332 +
tcattctggcttcatttttatg

SEQ ID NO: 100569 - DNA, 22 bp, Artificial Sequence
  Synthetic oligonucleotide; TTT chr11 5323311 5323332 5323328 5323333 +
cattctggcttcatttttatgt

SEQ ID NO: 100570 - DNA, 22 bp, Artificial Sequence
  Synthetic oligonucleotide; TTC chr11 5323312 5323333 5323329 5323334 +
attctggcttcatttttatgtc

SEQ ID NO: 100571 - DNA, 22 bp, Artificial Sequence
  Synthetic oligonucleotide; TTC chr11 5323316 5323337 5323333 5323338 +
tggcttcatttttatgtctgtg

SEQ ID NO: 100572 - DNA, 22 bp, Artificial Sequence
  Synthetic oligonucleotide; CTG chr11 5323318 5323339 5323335 5323340 +
gcttcatttttatgtctgtgtc

SEQ ID NO: 100573 - DNA, 22 bp, Artificial Sequence
  Synthetic oligonucleotide; CTT chr11 5323322 5323343 5323339 5323344 +
catttttatgtctgtgtctgat

SEQ ID NO: 100574 - DNA, 22 bp, Artificial Sequence
  Synthetic oligonucleotide; TTC chr11 5323323 5323344 5323340 5323345 +
atttttatgtctgtgtctgatt

SEQ ID NO: 100575 - DNA, 22 bp, Artificial Sequence
  Synthetic oligonucleotide; TTT chr11 5323327 5323348 5323344 5323349 +
ttatgtctgtgtctgattctcc

SEQ ID NO: 100576 - DNA, 22 bp, Artificial Sequence
  Synthetic oligonucleotide; TTT chr11 5323328 5323349 5323345 5323350 +
tatgtctgtgtctgattctcca

SEQ ID NO: 100577 - DNA, 22 bp, Artificial Sequence
  Synthetic oligonucleotide; TTT chr11 5323329 5323350 5323346 5323351 +
atgtctgtgtctgattctccag

SEQ ID NO: 100578 - DNA, 22 bp, Artificial Sequence
  Synthetic oligonucleotide; TTA chr11 5323330 5323351 5323347 5323352 +
tgtctgtgtctgattctccaga

SEQ ID NO: 100579 - DNA, 22 bp, Artificial Sequence
  Synthetic oligonucleotide; CTG chr11 5323336 5323357 5323353 5323358 +
tgtctgattctccagatccgag

SEQ ID NO: 100580 - DNA, 22 bp, Artificial Sequence
  Synthetic oligonucleotide; CTG chr11 5323342 5323363 5323359 5323364 +
attctccagatccgagtttaac

SEQ ID NO: 100581 - DNA, 22 bp, Artificial Sequence
  Synthetic oligonucleotide; TTC chr11 5323346 5323367 5323363 5323368 +
tccagatccgagtttaactact

SEQ ID NO: 100582 - DNA, 22 bp, Artificial Sequence
  Synthetic oligonucleotide; CTC chr11 5323348 5323369 5323365 5323370 +
cagatccgagtttaactactaa

SEQ ID NO: 100583 - DNA, 22 bp, Artificial Sequence
  Synthetic oligonucleotide; TTT chr11 5323361 5323382 5323378 5323383 +
aactactaaacctatgtttaga

SEQ ID NO: 100584 - DNA, 22 bp, Artificial Sequence
  Synthetic oligonucleotide; TTA chr11 5323362 5323383 5323379 5323384 +
actactaaacctatgtttagat

SEQ ID NO: 100585 - DNA, 22 bp, Artificial Sequence
  Synthetic oligonucleotide; CTA chr11 5323366 5323387 5323383 5323388 +
ctaaacctatgtttagataaaa

SEQ ID NO: 100586 - DNA, 22 bp, Artificial Sequence
  Synthetic oligonucleotide; CTA chr11 5323369 5323390 5323386 5323391 +
aacctatgtttagataaaaggc

SEQ ID NO: 100587 - DNA, 22 bp, Artificial Sequence
  Synthetic oligonucleotide; CTA chr11 5323375 5323396 5323392 5323397 +
tgtttagataaaaggcggataa

SEQ ID NO: 100588 - DNA, 22 bp, Artificial Sequence
  Synthetic oligonucleotide; TTT chr11 5323380 5323401 5323397 5323402 +
agataaaaggcggataatgcca

SEQ ID NO: 100589 - DNA, 22 bp, Artificial Sequence
  Synthetic oligonucleotide; TTA chr11 5323381 5323402 5323398 5323403 +
gataaaaggcggataatgccat

SEQ ID NO: 100590 - DNA, 22 bp, Artificial Sequence
  Synthetic oligonucleotide; TTG chr11 5323407 5323428 5323424 5323429 +
tatttgcttggttttgatgctg

SEQ ID NO: 100591 - DNA, 22 bp, Artificial Sequence
  Synthetic oligonucleotide; TTT chr11 5323412 5323433 5323429 5323434 +
gcttggttttgatgctgtagat

SEQ ID NO: 100592 - DNA, 22 bp, Artificial Sequence
  Synthetic oligonucleotide; TTG chr11 5323413 5323434 5323430 5323435 +
cttggttttgatgctgtagatg

SEQ ID NO: 100593 - DNA, 22 bp, Artificial Sequence
  Synthetic oligonucleotide; CTT chr11 5323416 5323437 5323433 5323438 +
ggttttgatgctgtagatgaca

SEQ ID NO: 100594 - DNA, 22 bp, Artificial Sequence
  Synthetic oligonucleotide; TTG chr11 5323417 5323438 5323434 5323439 +
gttttgatgctgtagatgacag

SEQ ID NO: 100595 - DNA, 22 bp, Artificial Sequence
  Synthetic oligonucleotide; TTT chr11 5323421 5323442 5323438 5323443 +
tgatgctgtagatgacagggtt

SEQ ID NO: 100596 - DNA, 22 bp, Artificial Sequence
  Synthetic oligonucleotide; TTT chr11 5323422 5323443 5323439 5323444 +
gatgctgtagatgacagggttc

SEQ ID NO: 100597 - DNA, 22 bp, Artificial Sequence
  Synthetic oligonucleotide; TTG chr11 5323423 5323444 5323440 5323445 +
atgctgtagatgacagggttca

SEQ ID NO: 100598 - DNA, 22 bp, Artificial Sequence
  Synthetic oligonucleotide; CTG chr11 5323429 5323450 5323446 5323451 +
tagatgacagggttcattaaag

SEQ ID NO: 100599 - DNA, 22 bp, Artificial Sequence
  Synthetic oligonucleotide; TTC chr11 5323444 5323465 5323461 5323466 +
attaaaggaggaaagaggaagt

SEQ ID NO: 100600 - DNA, 22 bp, Artificial Sequence
  Synthetic oligonucleotide; TTA chr11 5323448 5323469 5323465 5323470 +
aaggaggaaagaggaagtagat

SEQ ID NO: 100601 - DNA, 22 bp, Artificial Sequence
  Synthetic oligonucleotide; CTC chr11 5323477 5323498 5323494 5323499 +
atgataatgtggacaacctctg

SEQ ID NO: 100602 - DNA, 22 bp, Artificial Sequence
  Synthetic oligonucleotide; CTC chr11 5323497 5323518 5323514 5323519 +
tggcacattcttcccaaatctg

SEQ ID NO: 100603 - DNA, 22 bp, Artificial Sequence
  Synthetic oligonucleotide; CTG chr11 5323499 5323520 5323516 5323521 +
gcacattcttcccaaatctgta

SEQ ID NO: 100604 - DNA, 22 bp, Artificial Sequence
  Synthetic oligonucleotide; TTC chr11 5323507 5323528 5323524 5323529 +
ttcccaaatctgtaaatgaatg

SEQ ID NO: 100605 - DNA, 22 bp, Artificial Sequence
  Synthetic oligonucleotide; CTT chr11 5323509 5323530 5323526 5323531 +
cccaaatctgtaaatgaatgtc

SEQ ID NO: 100606 - DNA, 22 bp, Artificial Sequence
  Synthetic oligonucleotide; TTC chr11 5323510 5323531 5323527 5323532 +
ccaaatctgtaaatgaatgtca

SEQ ID NO: 100607 - DNA, 22 bp, Artificial Sequence
  Synthetic oligonucleotide; CTG chr11 5323519 5323540 5323536 5323541 +
taaatgaatgtcaaacccatca

SEQ ID NO: 100608 - DNA, 22 bp, Artificial Sequence
  Synthetic oligonucleotide; CTG chr11 5323544 5323565 5323561 5323566 +
taacatagaagataagaacaca

SEQ ID NO: 100609 - DNA, 22 bp, Artificial Sequence
  Synthetic oligonucleotide; CTA chr11 5323570 5323591 5323587 5323592 +
atgtgggagatacaggtattga

SEQ ID NO: 100610 - DNA, 22 bp, Artificial Sequence
  Synthetic oligonucleotide; TTG chr11 5323591 5323612 5323608 5323613 +
agggctttggctctctcttcac

SEQ ID NO: 100611 - DNA, 22 bp, Artificial Sequence
  Synthetic oligonucleotide; CTT chr11 5323598 5323619 5323615 5323620 +
tggctctctcttcaccagaagc

SEQ ID NO: 100612 - DNA, 22 bp, Artificial Sequence
  Synthetic oligonucleotide; TTT chr11 5323599 5323620 5323616 5323621 +
ggctctctcttcaccagaagca

SEQ ID NO: 100613 - DNA, 22 bp, Artificial Sequence
  Synthetic oligonucleotide; TTG chr11 5323600 5323621 5323617 5323622 +
gctctctcttcaccagaagcaa

SEQ ID NO: 100614 - DNA, 22 bp, Artificial Sequence
  Synthetic oligonucleotide; CTC chr11 5323604 5323625 5323621 5323626 +
tctcttcaccagaagcaatgcc

SEQ ID NO: 100615 - DNA, 22 bp, Artificial Sequence
  Synthetic oligonucleotide; CTC chr11 5323606 5323627 5323623 5323628 +
tcttcaccagaagcaatgccta

SEQ ID NO: 100616 - DNA, 22 bp, Artificial Sequence
  Synthetic oligonucleotide; CTC chr11 5323608 5323629 5323625 5323630 +
ttcaccagaagcaatgcctatg

SEQ ID NO: 100617 - DNA, 22 bp, Artificial Sequence
  Synthetic oligonucleotide; CTT chr11 5323610 5323631 5323627 5323632 +
caccagaagcaatgcctatgac

SEQ ID NO: 100618 - DNA, 22 bp, Artificial Sequence
  Synthetic oligonucleotide; TTC chr11 5323611 5323632 5323628 5323633 +
accagaagcaatgcctatgaca

SEQ ID NO: 100619 - DNA, 22 bp, Artificial Sequence
  Synthetic oligonucleotide; CTA chr11 5323628 5323649 5323645 5323650 +
tgacagtattaagaattagaat

SEQ ID NO: 100620 - DNA, 22 bp, Artificial Sequence
  Synthetic oligonucleotide; TTA chr11 5323639 5323660 5323656 5323661 +
agaattagaatataggagaaga

SEQ ID NO: 100621 - DNA, 22 bp, Artificial Sequence
  Synthetic oligonucleotide; TTA chr11 5323646 5323667 5323663 5323668 +
gaatataggagaagaggatgat

SEQ ID NO: 100622 - DNA, 22 bp, Artificial Sequence
  Synthetic oligonucleotide; CTA chr11 5323679 5323700 5323696 5323701 +
ggaagattgttaaagagatcaa

SEQ ID NO: 100623 - DNA, 22 bp, Artificial Sequence
  Synthetic oligonucleotide; TTG chr11 5323688 5323709 5323705 5323710 +
ttaaagagatcaaaattacagg

SEQ ID NO: 100624 - DNA, 22 bp, Artificial Sequence
  Synthetic oligonucleotide; TTA chr11 5323691 5323712 5323708 5323713 +
aagagatcaaaattacagggta

SEQ ID NO: 100625 - DNA, 22 bp, Artificial Sequence
  Synthetic oligonucleotide; TTA chr11 5323706 5323727 5323723 5323728 +
cagggtaaagtctattgaaagt

SEQ ID NO: 100626 - DNA, 22 bp, Artificial Sequence
  Synthetic oligonucleotide; CTA chr11 5323720 5323741 5323737 5323742 +
ttgaaagttatgtcagcacaag

SEQ ID NO: 100627 - DNA, 22 bp, Artificial Sequence
  Synthetic oligonucleotide; TTG chr11 5323723 5323744 5323740 5323745 +
aaagttatgtcagcacaagcca

SEQ ID NO: 100628 - DNA, 22 bp, Artificial Sequence
  Synthetic oligonucleotide; TTA chr11 5323730 5323751 5323747 5323752 +
tgtcagcacaagccagtctcat

SEQ ID NO: 100629 - DNA, 22 bp, Artificial Sequence
  Synthetic oligonucleotide; CTC chr11 5323750 5323771 5323767 5323772 +
atgatttcttggtggaggcaga

SEQ ID NO: 100630 - DNA, 22 bp, Artificial Sequence
  Synthetic oligonucleotide; TTT chr11 5323757 5323778 5323774 5323779 +
cttggtggaggcagaaagcacg

SEQ ID NO: 100631 - DNA, 22 bp, Artificial Sequence
  Synthetic oligonucleotide; TTC chr11 5323758 5323779 5323775 5323780 +
ttggtggaggcagaaagcacgt

SEQ ID NO: 100632 - DNA, 22 bp, Artificial Sequence
  Synthetic oligonucleotide; CTT chr11 5323760 5323781 5323777 5323782 +
ggtggaggcagaaagcacgtgt

SEQ ID NO: 100633 - DNA, 22 bp, Artificial Sequence
  Synthetic oligonucleotide; TTG chr11 5323761 5323782 5323778 5323783 +
gtggaggcagaaagcacgtgtg

SEQ ID NO: 100634 - DNA, 22 bp, Artificial Sequence
  Synthetic oligonucleotide; TTT chr11 5323797 5323818 5323814 5323819 +
gcaatatgaaaatgaaaaaaga

SEQ ID NO: 100635 - DNA, 22 bp, Artificial Sequence
  Synthetic oligonucleotide; TTG chr11 5323798 5323819 5323815 5323820 +
caatatgaaaatgaaaaaagac

SEQ ID NO: 100636 - DNA, 22 bp, Artificial Sequence
  Synthetic oligonucleotide; TTA chr11 5323829 5323850 5323846 5323851 +
caggcaggatggatacaaaacc

SEQ ID NO: 100637 - DNA, 22 bp, Artificial Sequence
  Synthetic oligonucleotide; CTT chr11 5323855 5323876 5323872 5323877 +
agaaacactcccactcctaacg

SEQ ID NO: 100638 - DNA, 22 bp, Artificial Sequence
  Synthetic oligonucleotide; TTA chr11 5323856 5323877 5323873 5323878 +
gaaacactcccactcctaacgc

SEQ ID NO: 100639 - DNA, 22 bp, Artificial Sequence
  Synthetic oligonucleotide; CTC chr11 5323865 5323886 5323882 5323887 +
ccactcctaacgctatgactct

SEQ ID NO: 100640 - DNA, 22 bp, Artificial Sequence
  Synthetic oligonucleotide; CTC chr11 5323871 5323892 5323888 5323893 +
ctaacgctatgactctagtatt

SEQ ID NO: 100641 - DNA, 22 bp, Artificial Sequence
  Synthetic oligonucleotide; CTA chr11 5323874 5323895 5323891 5323896 +
acgctatgactctagtattggt

SEQ ID NO: 100642 - DNA, 22 bp, Artificial Sequence
  Synthetic oligonucleotide; CTA chr11 5323880 5323901 5323897 5323902 +
tgactctagtattggtgagaat

SEQ ID NO: 100643 - DNA, 22 bp, Artificial Sequence
  Synthetic oligonucleotide; CTC chr11 5323886 5323907 5323903 5323908 +
tagtattggtgagaatggaagc

SEQ ID NO: 100644 - DNA, 22 bp, Artificial Sequence
  Synthetic oligonucleotide; CTA chr11 5323888 5323909 5323905 5323910 +
gtattggtgagaatggaagcat

SEQ ID NO: 100645 - DNA, 22 bp, Artificial Sequence
  Synthetic oligonucleotide; TTG chr11 5323894 5323915 5323911 5323916 +
gtgagaatggaagcatatctca

SEQ ID NO: 100646 - DNA, 22 bp, Artificial Sequence
  Synthetic oligonucleotide; CTC chr11 5323915 5323936 5323932 5323937 +
aaaggattgcggatggcaatga

SEQ ID NO: 100647 - DNA, 22 bp, Artificial Sequence
  Synthetic oligonucleotide; TTG chr11 5323924 5323945 5323941 5323946 +
cggatggcaatgaaacaatcat

SEQ ID NO: 100648 - DNA, 22 bp, Artificial Sequence
  Synthetic oligonucleotide; TTG chr11 5323955 5323976 5323972 5323977 +
ccaggagggaacctgattccac

SEQ ID NO: 100649 - DNA, 22 bp, Artificial Sequence
  Synthetic oligonucleotide; CTG chr11 5323970 5323991 5323987 5323992 +
attccacaacagaaagggagtg

SEQ ID NO: 100650 - DNA, 22 bp, Artificial Sequence
  Synthetic oligonucleotide; TTC chr11 5323974 5323995 5323991 5323996 +
cacaacagaaagggagtgaata

SEQ ID NO: 100651 - DNA, 22 bp, Artificial Sequence
  Synthetic oligonucleotide; CTG chr11 5324007 5324028 5324024 5324029 +
taggaagcagcccacactgcta

SEQ ID NO: 100652 - DNA, 22 bp, Artificial Sequence
  Synthetic oligonucleotide; CTG chr11 5324026 5324047 5324043 5324048 +
ctaatctccctgtgattcaccc

SEQ ID NO: 100653 - DNA, 22 bp, Artificial Sequence
  Synthetic oligonucleotide; CTA chr11 5324029 5324050 5324046 5324051 +
atctccctgtgattcacccata

SEQ ID NO: 100654 - DNA, 22 bp, Artificial Sequence
  Synthetic oligonucleotide; CTC chr11 5324034 5324055 5324051 5324056 +
cctgtgattcacccataggatg

SEQ ID NO: 100655 - DNA, 22 bp, Artificial Sequence
  Synthetic oligonucleotide; CTG chr11 5324038 5324059 5324055 5324060 +
tgattcacccataggatgccca

SEQ ID NO: 100656 - DNA, 22 bp, Artificial Sequence
  Synthetic oligonucleotide; TTC chr11 5324044 5324065 5324061 5324066 +
acccataggatgcccattacag

SEQ ID NO: 100657 - DNA, 22 bp, Artificial Sequence
  Synthetic oligonucleotide; TTA chr11 5324063 5324084 5324080 5324085 +
cagtaggcatcgtggtcaatgt

SEQ ID NO: 100658 - DNA, 22 bp, Artificial Sequence
  Synthetic oligonucleotide; CTG chr11 5324099 5324120 5324116 5324121 +
tgcctgccagcatggtgaggaa

SEQ ID NO: 100659 - DNA, 22 bp, Artificial Sequence
  Synthetic oligonucleotide; CTG chr11 5324105 5324126 5324122 5324127 +
ccagcatggtgaggaagtagta

SEQ ID NO: 100660 - DNA, 22 bp, Artificial Sequence
  Synthetic oligonucleotide; CTC chr11 5324136 5324157 5324153 5324158 +
atgaagactgtggtcatgcttg

SEQ ID NO: 100661 - DNA, 22 bp, Artificial Sequence
  Synthetic oligonucleotide; CTG chr11 5324146 5324167 5324163 5324168 +
tggtcatgcttgatgaggtaga

SEQ ID NO: 100662 - DNA, 22 bp, Artificial Sequence
  Synthetic oligonucleotide; CTT chr11 5324157 5324178 5324174 5324179 +
gatgaggtagaggagcatgcca

SEQ ID NO: 100663 - DNA, 22 bp, Artificial Sequence
  Synthetic oligonucleotide; TTG chr11 5324158 5324179 5324175 5324180 +
atgaggtagaggagcatgccat

SEQ ID NO: 100664 - DNA, 22 bp, Artificial Sequence
  Synthetic oligonucleotide; TTG chr11 5324182 5324203 5324199 5324204 +
cccagaaggatgcacacataaa

SEQ ID NO: 100665 - DNA, 22 bp, Artificial Sequence
  Synthetic oligonucleotide; CTG chr11 5324240 5324261 5324257 5324262 +
cctccagccctggaaagccagt

SEQ ID NO: 100666 - DNA, 22 bp, Artificial Sequence
  Synthetic oligonucleotide; CTC chr11 5324244 5324265 5324261 5324266 +
cagccctggaaagccagtcagc

SEQ ID NO: 100667 - DNA, 22 bp, Artificial Sequence
  Synthetic oligonucleotide; CTG chr11 5324252 5324273 5324269 5324274 +
gaaagccagtcagcaaaaaagg

SEQ ID NO: 100668 - DNA, 22 bp, Artificial Sequence
  Synthetic oligonucleotide; CTG chr11 5324279 5324300 5324296 5324301 +
cagtaatattgggccacatagt

SEQ ID NO: 100669 - DNA, 22 bp, Artificial Sequence
  Synthetic oligonucleotide; TTG chr11 5324290 5324311 5324307 5324312 +
ggccacatagtgtatccaccgg

SEQ ID NO: 100670 - DNA, 22 bp, Artificial Sequence
  Synthetic oligonucleotide; TTT chr11 5324326 5324347 5324343 5324348 +
cttgaaaccttgaaaccaggag

SEQ ID NO: 100671 - DNA, 22 bp, Artificial Sequence
  Synthetic oligonucleotide; TTC chr11 5324327 5324348 5324344 5324349 +
ttgaaaccttgaaaccaggagc

SEQ ID NO: 100672 - DNA, 22 bp, Artificial Sequence
  Synthetic oligonucleotide; CTT chr11 5324329 5324350 5324346 5324351 +
gaaaccttgaaaccaggagcct

SEQ ID NO: 100673 - DNA, 22 bp, Artificial Sequence
  Synthetic oligonucleotide; TTG chr11 5324330 5324351 5324347 5324352 +
aaaccttgaaaccaggagcctc

SEQ ID NO: 100674 - DNA, 22 bp, Artificial Sequence
  Synthetic oligonucleotide; CTT chr11 5324337 5324358 5324354 5324359 +
gaaaccaggagcctccaatctt

SEQ ID NO: 100675 - DNA, 22 bp, Artificial Sequence
  Synthetic oligonucleotide; TTG chr11 5324338 5324359 5324355 5324360 +
aaaccaggagcctccaatcttc

SEQ ID NO: 100676 - DNA, 22 bp, Artificial Sequence
  Synthetic oligonucleotide; CTC chr11 5324352 5324373 5324369 5324374 +
caatcttcctgcttggagatga

SEQ ID NO: 100677 - DNA, 22 bp, Artificial Sequence
  Synthetic oligonucleotide; CTT chr11 5324359 5324380 5324376 5324381 +
cctgcttggagatgattaactg

SEQ ID NO: 100678 - DNA, 22 bp, Artificial Sequence
  Synthetic oligonucleotide; TTC chr11 5324360 5324381 5324377 5324382 +
ctgcttggagatgattaactgg

SEQ ID NO: 100679 - DNA, 22 bp, Artificial Sequence
  Synthetic oligonucleotide; CTG chr11 5324363 5324384 5324380 5324385 +
cttggagatgattaactggtgt

SEQ ID NO: 100680 - DNA, 22 bp, Artificial Sequence
  Synthetic oligonucleotide; CTT chr11 5324366 5324387 5324383 5324388 +
ggagatgattaactggtgtgat

SEQ ID NO: 100681 - DNA, 22 bp, Artificial Sequence
  Synthetic oligonucleotide; TTG chr11 5324367 5324388 5324384 5324389 +
gagatgattaactggtgtgata

SEQ ID NO: 100682 - DNA, 22 bp, Artificial Sequence
  Synthetic oligonucleotide; TTA chr11 5324377 5324398 5324394 5324399 +
actggtgtgataaatttgactc

SEQ ID NO: 100683 - DNA, 22 bp, Artificial Sequence
  Synthetic oligonucleotide; CTG chr11 5324381 5324402 5324398 5324403 +
gtgtgataaatttgactctgca

SEQ ID NO: 100684 - DNA, 22 bp, Artificial Sequence
  Synthetic oligonucleotide; TTT chr11 5324394 5324415 5324411 5324416 +
gactctgcaactattttcctga

SEQ ID NO: 100685 - DNA, 22 bp, Artificial Sequence
  Synthetic oligonucleotide; TTG chr11 5324395 5324416 5324412 5324417 +
actctgcaactattttcctgaa

SEQ ID NO: 100686 - DNA, 22 bp, Artificial Sequence
  Synthetic oligonucleotide; CTC chr11 5324399 5324420 5324416 5324421 +
tgcaactattttcctgaagaag

SEQ ID NO: 100687 - DNA, 22 bp, Artificial Sequence
  Synthetic oligonucleotide; CTG chr11 5324401 5324422 5324418 5324423 +
caactattttcctgaagaagaa

SEQ ID NO: 100688 - DNA, 22 bp, Artificial Sequence
  Synthetic oligonucleotide; CTA chr11 5324407 5324428 5324424 5324429 +
ttttcctgaagaagaatagcat

SEQ ID NO: 100689 - DNA, 22 bp, Artificial Sequence
  Synthetic oligonucleotide; TTT chr11 5324410 5324431 5324427 5324432 +
tcctgaagaagaatagcatgta

SEQ ID NO: 100690 - DNA, 22 bp, Artificial Sequence
  Synthetic oligonucleotide; TTT chr11 5324411 5324432 5324428 5324433 +
cctgaagaagaatagcatgtac

SEQ ID NO: 100691 - DNA, 22 bp, Artificial Sequence
  Synthetic oligonucleotide; TTC chr11 5324412 5324433 5324429 5324434 +
ctgaagaagaatagcatgtaca

SEQ ID NO: 100692 - DNA, 22 bp, Artificial Sequence
  Synthetic oligonucleotide; CTG chr11 5324415 5324436 5324432 5324437 +
aagaagaatagcatgtacagac

SEQ ID NO: 100693 - DNA, 22 bp, Artificial Sequence
  Synthetic oligonucleotide; CTA chr11 5324439 5324460 5324456 5324461 +
tggttttttccctaattagaaa

SEQ ID NO: 100694 - DNA, 22 bp, Artificial Sequence
  Synthetic oligonucleotide; TTT chr11 5324445 5324466 5324462 5324467 +
tttccctaattagaaaaaatac

SEQ ID NO: 100695 - DNA, 22 bp, Artificial Sequence
  Synthetic oligonucleotide; TTT chr11 5324446 5324467 5324463 5324468 +
ttccctaattagaaaaaatact

SEQ ID NO: 100696 - DNA, 22 bp, Artificial Sequence
  Synthetic oligonucleotide; TTT chr11 5324447 5324468 5324464 5324469 +
tccctaattagaaaaaatactg

SEQ ID NO: 100697 - DNA, 22 bp, Artificial Sequence
  Synthetic oligonucleotide; TTT chr11 5324448 5324469 5324465 5324470 +
ccctaattagaaaaaatactga

SEQ ID NO: 100698 - DNA, 22 bp, Artificial Sequence
  Synthetic oligonucleotide; TTC chr11 5324449 5324470 5324466 5324471 +
cctaattagaaaaaatactgag

SEQ ID NO: 100699 - DNA, 22 bp, Artificial Sequence
  Synthetic oligonucleotide; CTA chr11 5324453 5324474 5324470 5324475 +
attagaaaaaatactgagttaa

SEQ ID NO: 100700 - DNA, 22 bp, Artificial Sequence
  Synthetic oligonucleotide; TTA chr11 5324457 5324478 5324474 5324479 +
gaaaaaatactgagttaatggt

SEQ ID NO: 100701 - DNA, 22 bp, Artificial Sequence
  Synthetic oligonucleotide; CTG chr11 5324469 5324490 5324486 5324491 +
agttaatggttcgatttttctc

SEQ ID NO: 100702 - DNA, 22 bp, Artificial Sequence
  Synthetic oligonucleotide; TTA chr11 5324474 5324495 5324491 5324496 +
atggttcgatttttctcaaatt

SEQ ID NO: 100703 - DNA, 22 bp, Artificial Sequence
  Synthetic oligonucleotide; TTC chr11 5324481 5324502 5324498 5324503 +
gatttttctcaaattcaaaaat

SEQ ID NO: 100704 - DNA, 22 bp, Artificial Sequence
  Synthetic oligonucleotide; TTT chr11 5324486 5324507 5324503 5324508 +
ttctcaaattcaaaaatttttc

SEQ ID NO: 100705 - DNA, 22 bp, Artificial Sequence
  Synthetic oligonucleotide; TTT chr11 5324487 5324508 5324504 5324509 +
tctcaaattcaaaaatttttca

SEQ ID NO: 100706 - DNA, 22 bp, Artificial Sequence
  Synthetic oligonucleotide; TTT chr11 5324488 5324509 5324505 5324510 +
ctcaaattcaaaaatttttcat

SEQ ID NO: 100707 - DNA, 22 bp, Artificial Sequence
  Synthetic oligonucleotide; TTC chr11 5324489 5324510 5324506 5324511 +
tcaaattcaaaaatttttcatt

SEQ ID NO: 100708 - DNA, 22 bp, Artificial Sequence
  Synthetic oligonucleotide; CTC chr11 5324491 5324512 5324508 5324513 +
aaattcaaaaatttttcattaa

SEQ ID NO: 100709 - DNA, 22 bp, Artificial Sequence
  Synthetic oligonucleotide; TTC chr11 5324497 5324518 5324514 5324519 +
aaaaatttttcattaattttaa

SEQ ID NO: 100710 - DNA, 22 bp, Artificial Sequence
  Synthetic oligonucleotide; TTT chr11 5324505 5324526 5324522 5324527 +
ttcattaattttaaatatatta

SEQ ID NO: 100711 - DNA, 22 bp, Artificial Sequence
  Synthetic oligonucleotide; TTT chr11 5324506 5324527 5324523 5324528 +
tcattaattttaaatatattat

SEQ ID NO: 100712 - DNA, 22 bp, Artificial Sequence
  Synthetic oligonucleotide; TTT chr11 5324507 5324528 5324524 5324529 +
cattaattttaaatatattatc

SEQ ID NO: 100713 - DNA, 22 bp, Artificial Sequence
  Synthetic oligonucleotide; TTC chr11 5324508 5324529 5324525 5324530 +
attaattttaaatatattatcc

SEQ ID NO: 100714 - DNA, 22 bp, Artificial Sequence
  Synthetic oligonucleotide; TTA chr11 5324512 5324533 5324529 5324534 +
attttaaatatattatccgcaa

SEQ ID NO: 100715 - DNA, 22 bp, Artificial Sequence
  Synthetic oligonucleotide; TTT chr11 5324516 5324537 5324533 5324538 +
taaatatattatccgcaactat

SEQ ID NO: 100716 - DNA, 22 bp, Artificial Sequence
  Synthetic oligonucleotide; TTT chr11 5324517 5324538 5324534 5324539 +
aaatatattatccgcaactatt

SEQ ID NO: 100717 - DNA, 22 bp, Artificial Sequence
  Synthetic oligonucleotide; TTA chr11 5324518 5324539 5324535 5324540 +
aatatattatccgcaactattt

SEQ ID NO: 100718 - DNA, 22 bp, Artificial Sequence
  Synthetic oligonucleotide; TTA chr11 5324527 5324548 5324544 5324549 +
tccgcaactattttgagggtac

SEQ ID NO: 100719 - DNA, 22 bp, Artificial Sequence
  Synthetic oligonucleotide; CTA chr11 5324537 5324558 5324554 5324559 +
ttttgagggtacttataaatat

SEQ ID NO: 100720 - DNA, 22 bp, Artificial Sequence
  Synthetic oligonucleotide; TTT chr11 5324540 5324561 5324557 5324562 +
tgagggtacttataaatatttg

SEQ ID NO: 100721 - DNA, 22 bp, Artificial Sequence
  Synthetic oligonucleotide; TTT chr11 5324541 5324562 5324558 5324563 +
gagggtacttataaatatttgc

SEQ ID NO: 100722 - DNA, 22 bp, Artificial Sequence
  Synthetic oligonucleotide; TTG chr11 5324542 5324563 5324559 5324564 +
agggtacttataaatatttgca

SEQ ID NO: 100723 - DNA, 22 bp, Artificial Sequence
  Synthetic oligonucleotide; CTT chr11 5324551 5324572 5324568 5324573 +
ataaatatttgcaacaacagtg

SEQ ID NO: 100724 - DNA, 22 bp, Artificial Sequence
  Synthetic oligonucleotide; TTA chr11 5324552 5324573 5324569 5324574 +
taaatatttgcaacaacagtga

SEQ ID NO: 100725 - DNA, 22 bp, Artificial Sequence
  Synthetic oligonucleotide; TTT chr11 5324561 5324582 5324578 5324583 +
gcaacaacagtgataacaaaaa

SEQ ID NO: 100726 - DNA, 22 bp, Artificial Sequence
  Synthetic oligonucleotide; TTG chr11 5324562 5324583 5324579 5324584 +
caacaacagtgataacaaaaac

SEQ ID NO: 100727 - DNA, 22 bp, Artificial Sequence
  Synthetic oligonucleotide; CTG chr11 5324620 5324641 5324637 5324642 +
gcttagttgtcttcttgctgtg

SEQ ID NO: 100728 - DNA, 22 bp, Artificial Sequence
  Synthetic oligonucleotide; CTT chr11 5324624 5324645 5324641 5324646 +
agttgtcttcttgctgtgatta

SEQ ID NO: 100729 - DNA, 22 bp, Artificial Sequence
  Synthetic oligonucleotide; TTA chr11 5324625 5324646 5324642 5324647 +
gttgtcttcttgctgtgattac

SEQ ID NO: 100730 - DNA, 22 bp, Artificial Sequence
  Synthetic oligonucleotide; TTG chr11 5324629 5324650 5324646 5324651 +
tcttcttgctgtgattactgac

SEQ ID NO: 100731 - DNA, 22 bp, Artificial Sequence
  Synthetic oligonucleotide; CTT chr11 5324633 5324654 5324650 5324655 +
cttgctgtgattactgaccatt

SEQ ID NO: 100732 - DNA, 22 bp, Artificial Sequence
  Synthetic oligonucleotide; TTC chr11 5324634 5324655 5324651 5324656 +
ttgctgtgattactgaccattt

SEQ ID NO: 100733 - DNA, 22 bp, Artificial Sequence
  Synthetic oligonucleotide; CTT chr11 5324636 5324657 5324653 5324658 +
gctgtgattactgaccatttgg

SEQ ID NO: 100734 - DNA, 22 bp, Artificial Sequence
  Synthetic oligonucleotide; TTG chr11 5324637 5324658 5324654 5324659 +
ctgtgattactgaccatttgga

SEQ ID NO: 100735 - DNA, 22 bp, Artificial Sequence
  Synthetic oligonucleotide; CTG chr11 5324640 5324661 5324657 5324662 +
tgattactgaccatttggaaat

SEQ ID NO: 100736 - DNA, 22 bp, Artificial Sequence
  Synthetic oligonucleotide; TTA chr11 5324646 5324667 5324663 5324668 +
ctgaccatttggaaatgattgt

SEQ ID NO: 100737 - DNA, 22 bp, Artificial Sequence
  Synthetic oligonucleotide; CTG chr11 5324649 5324670 5324666 5324671 +
accatttggaaatgattgttgt

SEQ ID NO: 100738 - DNA, 22 bp, Artificial Sequence
  Synthetic oligonucleotide; TTT chr11 5324656 5324677 5324673 5324678 +
ggaaatgattgttgtaatttta

SEQ ID NO: 100739 - DNA, 22 bp, Artificial Sequence
  Synthetic oligonucleotide; TTG chr11 5324657 5324678 5324674 5324679 +
gaaatgattgttgtaattttac

SEQ ID NO: 100740 - DNA, 22 bp, Artificial Sequence
  Synthetic oligonucleotide; TTG chr11 5324667 5324688 5324684 5324689 +
ttgtaattttacatttcacgat

SEQ ID NO: 100741 - DNA, 22 bp, Artificial Sequence
  Synthetic oligonucleotide; TTG chr11 5324670 5324691 5324687 5324692 +
taattttacatttcacgattat

SEQ ID NO: 100742 - DNA, 22 bp, Artificial Sequence
  Synthetic oligonucleotide; TTT chr11 5324676 5324697 5324693 5324698 +
tacatttcacgattatgatgaa

SEQ ID NO: 100743 - DNA, 22 bp, Artificial Sequence
  Synthetic oligonucleotide; TTT chr11 5324677 5324698 5324694 5324699 +
acatttcacgattatgatgaag

SEQ ID NO: 100744 - DNA, 22 bp, Artificial Sequence
  Synthetic oligonucleotide; TTA chr11 5324678 5324699 5324695 5324700 +
catttcacgattatgatgaaga

SEQ ID NO: 100745 - DNA, 22 bp, Artificial Sequence
  Synthetic oligonucleotide; TTT chr11 5324683 5324704 5324700 5324705 +
cacgattatgatgaagacagtt

SEQ ID NO: 100746 - DNA, 22 bp, Artificial Sequence
  Synthetic oligonucleotide; TTC chr11 5324684 5324705 5324701 5324706 +
acgattatgatgaagacagttt

SEQ ID NO: 100747 - DNA, 22 bp, Artificial Sequence
  Synthetic oligonucleotide; TTA chr11 5324691 5324712 5324708 5324713 +
tgatgaagacagttttttcagt

SEQ ID NO: 100748 - DNA, 22 bp, Artificial Sequence
  Synthetic oligonucleotide; TTT chr11 5324706 5324727 5324723 5324728 +
tttcagttaatgcagtttttct

SEQ ID NO: 100749 - DNA, 22 bp, Artificial Sequence
  Synthetic oligonucleotide; TTT chr11 5324707 5324728 5324724 5324729 +
ttcagttaatgcagtttttctc

SEQ ID NO: 100750 - DNA, 22 bp, Artificial Sequence
  Synthetic oligonucleotide; TTT chr11 5324708 5324729 5324725 5324730 +
tcagttaatgcagtttttctca

SEQ ID NO: 100751 - DNA, 22 bp, Artificial Sequence
  Synthetic oligonucleotide; TTT chr11 5324709 5324730 5324726 5324731 +
cagttaatgcagtttttctcat

SEQ ID NO: 100752 - DNA, 22 bp, Artificial Sequence
  Synthetic oligonucleotide; TTC chr11 5324710 5324731 5324727 5324732 +
agttaatgcagtttttctcatt

SEQ ID NO: 100753 - DNA, 22 bp, Artificial Sequence
  Synthetic oligonucleotide; TTA chr11 5324715 5324736 5324732 5324737 +
atgcagtttttctcattttttt

SEQ ID NO: 100754 - DNA, 22 bp, Artificial Sequence
  Synthetic oligonucleotide; TTT chr11 5324724 5324745 5324741 5324746 +
ttctcattttttttggaaattg

SEQ ID NO: 100755 - DNA, 22 bp, Artificial Sequence
  Synthetic oligonucleotide; TTT chr11 5324725 5324746 5324742 5324747 +
tctcattttttttggaaattga

SEQ ID NO: 100756 - DNA, 22 bp, Artificial Sequence
  Synthetic oligonucleotide; TTT chr11 5324726 5324747 5324743 5324748 +
ctcattttttttggaaattgaa

SEQ ID NO: 100757 - DNA, 22 bp, Artificial Sequence
  Synthetic oligonucleotide; TTC chr11 5324727 5324748 5324744 5324749 +
tcattttttttggaaattgaat

SEQ ID NO: 100758 - DNA, 22 bp, Artificial Sequence
  Synthetic oligonucleotide; CTC chr11 5324729 5324750 5324746 5324751 +
attttttttggaaattgaatgt

SEQ ID NO: 100759 - DNA, 22 bp, Artificial Sequence
  Synthetic oligonucleotide; TTT chr11 5324733 5324754 5324750 5324755 +
tttttggaaattgaatgtcagt

SEQ ID NO: 100760 - DNA, 22 bp, Artificial Sequence
  Synthetic oligonucleotide; TTT chr11 5324734 5324755 5324751 5324756 +
ttttggaaattgaatgtcagtg

SEQ ID NO: 100761 - DNA, 22 bp, Artificial Sequence
  Synthetic oligonucleotide; TTT chr11 5324735 5324756 5324752 5324757 +
tttggaaattgaatgtcagtgt

SEQ ID NO: 100762 - DNA, 22 bp, Artificial Sequence
  Synthetic oligonucleotide; TTT chr11 5324736 5324757 5324753 5324758 +
ttggaaattgaatgtcagtgtt

SEQ ID NO: 100763 - DNA, 22 bp, Artificial Sequence
  Synthetic oligonucleotide; TTT chr11 5324737 5324758 5324754 5324759 +
tggaaattgaatgtcagtgttt

SEQ ID NO: 100764 - DNA, 22 bp, Artificial Sequence
  Synthetic oligonucleotide; TTT chr11 5324738 5324759 5324755 5324760 +
ggaaattgaatgtcagtgtttt

SEQ ID NO: 100765 - DNA, 22 bp, Artificial Sequence
  Synthetic oligonucleotide; TTG chr11 5324739 5324760 5324756 5324761 +
gaaattgaatgtcagtgtttta

SEQ ID NO: 100766 - DNA, 22 bp, Artificial Sequence
  Synthetic oligonucleotide; TTG chr11 5324746 5324767 5324763 5324768 +
aatgtcagtgttttatgcacta

SEQ ID NO: 100767 - DNA, 22 bp, Artificial Sequence
  Synthetic oligonucleotide; TTT chr11 5324759 5324780 5324776 5324781 +
tatgcactatagcgtgcatcac

SEQ ID NO: 100768 - DNA, 22 bp, Artificial Sequence
  Synthetic oligonucleotide; TTT chr11 5324760 5324781 5324777 5324782 +
atgcactatagcgtgcatcacc

SEQ ID NO: 100769 - DNA, 22 bp, Artificial Sequence
  Synthetic oligonucleotide; TTA chr11 5324761 5324782 5324778 5324783 +
tgcactatagcgtgcatcacca

SEQ ID NO: 100770 - DNA, 22 bp, Artificial Sequence
  Synthetic oligonucleotide; CTA chr11 5324768 5324789 5324785 5324790 +
tagcgtgcatcaccatcactac

SEQ ID NO: 100771 - DNA, 22 bp, Artificial Sequence
  Synthetic oligonucleotide; CTA chr11 5324789 5324810 5324806 5324811 +
ccaatgaacggctttgtcactc

SEQ ID NO: 100772 - DNA, 22 bp, Artificial Sequence
  Synthetic oligonucleotide; CTT chr11 5324803 5324824 5324820 5324825 +
tgtcactctaacagttacttga

SEQ ID NO: 100773 - DNA, 22 bp, Artificial Sequence
  Synthetic oligonucleotide; TTT chr11 5324804 5324825 5324821 5324826 +
gtcactctaacagttacttgag

SEQ ID NO: 100774 - DNA, 22 bp, Artificial Sequence
  Synthetic oligonucleotide; TTG chr11 5324805 5324826 5324822 5324827 +
tcactctaacagttacttgagc

SEQ ID NO: 100775 - DNA, 22 bp, Artificial Sequence
  Synthetic oligonucleotide; CTC chr11 5324811 5324832 5324828 5324833 +
taacagttacttgagcttggcc

SEQ ID NO: 100776 - DNA, 22 bp, Artificial Sequence
  Synthetic oligonucleotide; CTA chr11 5324813 5324834 5324830 5324835 +
acagttacttgagcttggccac

SEQ ID NO: 100777 - DNA, 22 bp, Artificial Sequence
  Synthetic oligonucleotide; TTA chr11 5324820 5324841 5324837 5324842 +
cttgagcttggccaccagagtt

SEQ ID NO: 100778 - DNA, 22 bp, Artificial Sequence
  Synthetic oligonucleotide; CTT chr11 5324823 5324844 5324840 5324845 +
gagcttggccaccagagttgtg

SEQ ID NO: 100779 - DNA, 22 bp, Artificial Sequence
  Synthetic oligonucleotide; TTG chr11 5324824 5324845 5324841 5324846 +
agcttggccaccagagttgtgg

SEQ ID NO: 100780 - DNA, 22 bp, Artificial Sequence
  Synthetic oligonucleotide; CTT chr11 5324829 5324850 5324846 5324851 +
ggccaccagagttgtggatcac

SEQ ID NO: 100781 - DNA, 22 bp, Artificial Sequence
  Synthetic oligonucleotide; TTG chr11 5324830 5324851 5324847 5324852 +
gccaccagagttgtggatcaca

SEQ ID NO: 100782 - DNA, 22 bp, Artificial Sequence
  Synthetic oligonucleotide; TTG chr11 5324843 5324864 5324860 5324865 +
tggatcacagactagacgcagc

SEQ ID NO: 100783 - DNA, 22 bp, Artificial Sequence
  Synthetic oligonucleotide; CTA chr11 5324857 5324878 5324874 5324879 +
gacgcagctaacaagcagcggg

SEQ ID NO: 100784 - DNA, 22 bp, Artificial Sequence
  Synthetic oligonucleotide; CTA chr11 5324867 5324888 5324884 5324889 +
acaagcagcgggcttgttaggc

SEQ ID NO: 100785 - DNA, 22 bp, Artificial Sequence
  Synthetic oligonucleotide; CTT chr11 5324882 5324903 5324899 5324904 +
gttaggcatgcagcctcagatt

SEQ ID NO: 100786 - DNA, 22 bp, Artificial Sequence
  Synthetic oligonucleotide; TTG chr11 5324883 5324904 5324900 5324905 +
ttaggcatgcagcctcagattc

SEQ ID NO: 100787 - DNA, 22 bp, Artificial Sequence
  Synthetic oligonucleotide; TTA chr11 5324886 5324907 5324903 5324908 +
ggcatgcagcctcagattctgc

SEQ ID NO: 100788 - DNA, 22 bp, Artificial Sequence
  Synthetic oligonucleotide; CTC chr11 5324899 5324920 5324916 5324921 +
agattctgccccttccaacatt

SEQ ID NO: 100789 - DNA, 22 bp, Artificial Sequence
  Synthetic oligonucleotide; TTC chr11 5324905 5324926 5324922 5324927 +
tgccccttccaacattctgaat

SEQ ID NO: 100790 - DNA, 22 bp, Artificial Sequence
  Synthetic oligonucleotide; CTG chr11 5324907 5324928 5324924 5324929 +
ccccttccaacattctgaatca

SEQ ID NO: 100791 - DNA, 22 bp, Artificial Sequence
  Synthetic oligonucleotide; CTT chr11 5324913 5324934 5324930 5324935 +
ccaacattctgaatcaaattcg

SEQ ID NO: 100792 - DNA, 22 bp, Artificial Sequence
  Synthetic oligonucleotide; TTC chr11 5324914 5324935 5324931 5324936 +
caacattctgaatcaaattcgc

SEQ ID NO: 100793 - DNA, 22 bp, Artificial Sequence
  Synthetic oligonucleotide; TTC chr11 5324922 5324943 5324939 5324944 +
tgaatcaaattcgcttttttca

SEQ ID NO: 100794 - DNA, 22 bp, Artificial Sequence
  Synthetic oligonucleotide; CTG chr11 5324924 5324945 5324941 5324946 +
aatcaaattcgcttttttcagg

SEQ ID NO: 100795 - DNA, 22 bp, Artificial Sequence
  Synthetic oligonucleotide; TTC chr11 5324934 5324955 5324951 5324956 +
gcttttttcaggtcctcaggtg

SEQ ID NO: 100796 - DNA, 22 bp, Artificial Sequence
  Synthetic oligonucleotide; CTT chr11 5324938 5324959 5324955 5324960 +
ttttcaggtcctcaggtgattc

SEQ ID NO: 100797 - DNA, 22 bp, Artificial Sequence
  Synthetic oligonucleotide; TTT chr11 5324939 5324960 5324956 5324961 +
tttcaggtcctcaggtgattcc

SEQ ID NO: 100798 - DNA, 22 bp, Artificial Sequence
  Synthetic oligonucleotide; TTT chr11 5324940 5324961 5324957 5324962 +
ttcaggtcctcaggtgattcca

SEQ ID NO: 100799 - DNA, 22 bp, Artificial Sequence
  Synthetic oligonucleotide; TTT chr11 5324941 5324962 5324958 5324963 +
tcaggtcctcaggtgattccag

SEQ ID NO: 100800 - DNA, 22 bp, Artificial Sequence
  Synthetic oligonucleotide; TTT chr11 5324942 5324963 5324959 5324964 +
caggtcctcaggtgattccagt

SEQ ID NO: 100801 - DNA, 22 bp, Artificial Sequence
  Synthetic oligonucleotide; TTC chr11 5324943 5324964 5324960 5324965 +
aggtcctcaggtgattccagtg

SEQ ID NO: 100802 - DNA, 22 bp, Artificial Sequence
  Synthetic oligonucleotide; CTC chr11 5324951 5324972 5324968 5324973 +
aggtgattccagtgcaaaacaa

SEQ ID NO: 100803 - DNA, 22 bp, Artificial Sequence
  Synthetic oligonucleotide; TTC chr11 5324960 5324981 5324977 5324982 +
cagtgcaaaacaatgtctgggc

SEQ ID NO: 100804 - DNA, 22 bp, Artificial Sequence
  Synthetic oligonucleotide; CTG chr11 5324979 5325000 5324996 5325001 +
ggcatcactgctataagcattt

SEQ ID NO: 100805 - DNA, 22 bp, Artificial Sequence
  Synthetic oligonucleotide; CTG chr11 5324989 5325010 5325006 5325011 +
ctataagcatttcatacctaat

SEQ ID NO: 100806 - DNA, 22 bp, Artificial Sequence
  Synthetic oligonucleotide; CTA chr11 5324992 5325013 5325009 5325014 +
taagcatttcatacctaatcca

SEQ ID NO: 100807 - DNA, 22 bp, Artificial Sequence
  Synthetic oligonucleotide; TTT chr11 5325001 5325022 5325018 5325023 +
catacctaatccatctttcgag

SEQ ID NO: 100808 - DNA, 22 bp, Artificial Sequence
  Synthetic oligonucleotide; TTC chr11 5325002 5325023 5325019 5325024 +
atacctaatccatctttcgaga

SEQ ID NO: 100809 - DNA, 22 bp, Artificial Sequence
  Synthetic oligonucleotide; CTA chr11 5325009 5325030 5325026 5325031 +
atccatctttcgagatagaaac

SEQ ID NO: 100810 - DNA, 22 bp, Artificial Sequence
  Synthetic oligonucleotide; CTT chr11 5325018 5325039 5325035 5325040 +
tcgagatagaaaccttttaatg

SEQ ID NO: 100811 - DNA, 22 bp, Artificial Sequence
  Synthetic oligonucleotide; TTT chr11 5325019 5325040 5325036 5325041 +
cgagatagaaaccttttaatgc

SEQ ID NO: 100812 - DNA, 22 bp, Artificial Sequence
  Synthetic oligonucleotide; TTC chr11 5325020 5325041 5325037 5325042 +
gagatagaaaccttttaatgct

SEQ ID NO: 100813 - DNA, 22 bp, Artificial Sequence
  Synthetic oligonucleotide; CTT chr11 5325034 5325055 5325051 5325056 +
ttaatgcttccatccagttgat

SEQ ID NO: 100814 - DNA, 22 bp, Artificial Sequence
  Synthetic oligonucleotide; TTT chr11 5325035 5325056 5325052 5325057 +
taatgcttccatccagttgatt

SEQ ID NO: 100815 - DNA, 22 bp, Artificial Sequence
  Synthetic oligonucleotide; TTT chr11 5325036 5325057 5325053 5325058 +
aatgcttccatccagttgattt

SEQ ID NO: 100816 - DNA, 22 bp, Artificial Sequence
  Synthetic oligonucleotide; TTA chr11 5325037 5325058 5325054 5325059 +
atgcttccatccagttgatttt

SEQ ID NO: 100817 - DNA, 22 bp, Artificial Sequence
  Synthetic oligonucleotide; CTT chr11 5325043 5325064 5325060 5325065 +
ccatccagttgattttctcatt

SEQ ID NO: 100818 - DNA, 22 bp, Artificial Sequence
  Synthetic oligonucleotide; TTC chr11 5325044 5325065 5325061 5325066 +
catccagttgattttctcattt

SEQ ID NO: 100819 - DNA, 22 bp, Artificial Sequence
  Synthetic oligonucleotide; TTG chr11 5325054 5325075 5325071 5325076 +
attttctcattttctccaaata

SEQ ID NO: 100820 - DNA, 22 bp, Artificial Sequence
  Synthetic oligonucleotide; TTT chr11 5325058 5325079 5325075 5325080 +
tctcattttctccaaatatctt

SEQ ID NO: 100821 - DNA, 22 bp, Artificial Sequence
  Synthetic oligonucleotide; TTT chr11 5325059 5325080 5325076 5325081 +
ctcattttctccaaatatcttc

SEQ ID NO: 100822 - DNA, 22 bp, Artificial Sequence
  Synthetic oligonucleotide; TTC chr11 5325060 5325081 5325077 5325082 +
tcattttctccaaatatcttca

SEQ ID NO: 100823 - DNA, 22 bp, Artificial Sequence
  Synthetic oligonucleotide; CTC chr11 5325062 5325083 5325079 5325084 +
attttctccaaatatcttcata

SEQ ID NO: 100824 - DNA, 22 bp, Artificial Sequence
  Synthetic oligonucleotide; TTT chr11 5325066 5325087 5325083 5325088 +
tctccaaatatcttcatacaat

SEQ ID NO: 100825 - DNA, 22 bp, Artificial Sequence
  Synthetic oligonucleotide; TTT chr11 5325067 5325088 5325084 5325089 +
ctccaaatatcttcatacaatt

SEQ ID NO: 100826 - DNA, 22 bp, Artificial Sequence
  Synthetic oligonucleotide; TTC chr11 5325068 5325089 5325085 5325090 +
tccaaatatcttcatacaatta

SEQ ID NO: 100827 - DNA, 22 bp, Artificial Sequence
  Synthetic oligonucleotide; CTC chr11 5325070 5325091 5325087 5325092 +
caaatatcttcatacaattatc

SEQ ID NO: 100828 - DNA, 22 bp, Artificial Sequence
  Synthetic oligonucleotide; CTT chr11 5325080 5325101 5325097 5325102 +
catacaattatcttttttatgt

SEQ ID NO: 100829 - DNA, 22 bp, Artificial Sequence
  Synthetic oligonucleotide; TTC chr11 5325081 5325102 5325098 5325103 +
atacaattatcttttttatgtt

SEQ ID NO: 100830 - DNA, 22 bp, Artificial Sequence
  Synthetic oligonucleotide; TTA chr11 5325090 5325111 5325107 5325112 +
tcttttttatgtttctttcacc

SEQ ID NO: 100831 - DNA, 22 bp, Artificial Sequence
  Synthetic oligonucleotide; CTT chr11 5325094 5325115 5325111 5325116 +
ttttatgtttctttcaccattt

SEQ ID NO: 100832 - DNA, 22 bp, Artificial Sequence
  Synthetic oligonucleotide; TTT chr11 5325095 5325116 5325112 5325117 +
tttatgtttctttcaccattta

SEQ ID NO: 100833 - DNA, 22 bp, Artificial Sequence
  Synthetic oligonucleotide; TTT chr11 5325096 5325117 5325113 5325118 +
ttatgtttctttcaccatttac

SEQ ID NO: 100834 - DNA, 22 bp, Artificial Sequence
  Synthetic oligonucleotide; TTT chr11 5325097 5325118 5325114 5325119 +
tatgtttctttcaccatttact

SEQ ID NO: 100835 - DNA, 22 bp, Artificial Sequence
  Synthetic oligonucleotide; TTT chr11 5325098 5325119 5325115 5325120 +
atgtttctttcaccatttactg

SEQ ID NO: 100836 - DNA, 22 bp, Artificial Sequence
  Synthetic oligonucleotide; TTA chr11 5325099 5325120 5325116 5325121 +
tgtttctttcaccatttactgg

SEQ ID NO: 100837 - DNA, 22 bp, Artificial Sequence
  Synthetic oligonucleotide; TTT chr11 5325104 5325125 5325121 5325126 +
ctttcaccatttactggctttc

SEQ ID NO: 100838 - DNA, 22 bp, Artificial Sequence
  Synthetic oligonucleotide; TTC chr11 5325105 5325126 5325122 5325127 +
tttcaccatttactggctttct

SEQ ID NO: 100839 - DNA, 22 bp, Artificial Sequence
  Synthetic oligonucleotide; CTT chr11 5325107 5325128 5325124 5325129 +
tcaccatttactggctttcttt

SEQ ID NO: 100840 - DNA, 22 bp, Artificial Sequence
  Synthetic oligonucleotide; TTT chr11 5325108 5325129 5325125 5325130 +
caccatttactggctttctttc

SEQ ID NO: 100841 - DNA, 22 bp, Artificial Sequence
  Synthetic oligonucleotide; TTC chr11 5325109 5325130 5325126 5325131 +
accatttactggctttctttct

SEQ ID NO: 100842 - DNA, 22 bp, Artificial Sequence
  Synthetic oligonucleotide; TTT chr11 5325116 5325137 5325133 5325138 +
actggctttctttctgccactt

SEQ ID NO: 100843 - DNA, 22 bp, Artificial Sequence
  Synthetic oligonucleotide; TTA chr11 5325117 5325138 5325134 5325139 +
ctggctttctttctgccacttg

SEQ ID NO: 100844 - DNA, 22 bp, Artificial Sequence
  Synthetic oligonucleotide; CTG chr11 5325120 5325141 5325137 5325142 +
gctttctttctgccacttgccc

SEQ ID NO: 100845 - DNA, 22 bp, Artificial Sequence
  Synthetic oligonucleotide; CTT chr11 5325124 5325145 5325141 5325146 +
tctttctgccacttgccctttc

SEQ ID NO: 100846 - DNA, 22 bp, Artificial Sequence
  Synthetic oligonucleotide; TTT chr11 5325125 5325146 5325142 5325147 +
ctttctgccacttgccctttcc

SEQ ID NO: 100847 - DNA, 22 bp, Artificial Sequence
  Synthetic oligonucleotide; TTC chr11 5325126 5325147 5325143 5325148 +
tttctgccacttgccctttcca

SEQ ID NO: 100848 - DNA, 22 bp, Artificial Sequence
  Synthetic oligonucleotide; CTT chr11 5325128 5325149 5325145 5325150 +
tctgccacttgccctttccaac

SEQ ID NO: 100849 - DNA, 22 bp, Artificial Sequence
  Synthetic oligonucleotide; TTT chr11 5325129 5325150 5325146 5325151 +
ctgccacttgccctttccaaca

SEQ ID NO: 100850 - DNA, 22 bp, Artificial Sequence
  Synthetic oligonucleotide; TTC chr11 5325130 5325151 5325147 5325152 +
tgccacttgccctttccaacat

SEQ ID NO: 100851 - DNA, 22 bp, Artificial Sequence
  Synthetic oligonucleotide; CTG chr11 5325132 5325153 5325149 5325154 +
ccacttgccctttccaacatta

SEQ ID NO: 100852 - DNA, 22 bp, Artificial Sequence
  Synthetic oligonucleotide; CTT chr11 5325138 5325159 5325155 5325160 +
gccctttccaacattatttccc

SEQ ID NO: 100853 - DNA, 22 bp, Artificial Sequence
  Synthetic oligonucleotide; TTG chr11 5325139 5325160 5325156 5325161 +
ccctttccaacattatttccca

SEQ ID NO: 100854 - DNA, 22 bp, Artificial Sequence
  Synthetic oligonucleotide; CTT chr11 5325144 5325165 5325161 5325166 +
tccaacattatttcccataatt

SEQ ID NO: 100855 - DNA, 22 bp, Artificial Sequence
  Synthetic oligonucleotide; TTT chr11 5325145 5325166 5325162 5325167 +
ccaacattatttcccataatta

SEQ ID NO: 100856 - DNA, 22 bp, Artificial Sequence
  Synthetic oligonucleotide; TTC chr11 5325146 5325167 5325163 5325168 +
caacattatttcccataattaa

SEQ ID NO: 100857 - DNA, 22 bp, Artificial Sequence
  Synthetic oligonucleotide; TTA chr11 5325154 5325175 5325171 5325176 +
tttcccataattaaatacttag

SEQ ID NO: 100858 - DNA, 22 bp, Artificial Sequence
  Synthetic oligonucleotide; TTT chr11 5325157 5325178 5325174 5325179 +
cccataattaaatacttagctg

SEQ ID NO: 100859 - DNA, 22 bp, Artificial Sequence
  Synthetic oligonucleotide; TTC chr11 5325158 5325179 5325175 5325180 +
ccataattaaatacttagctgg

SEQ ID NO: 100860 - DNA, 22 bp, Artificial Sequence
  Synthetic oligonucleotide; TTA chr11 5325167 5325188 5325184 5325189 +
aatacttagctggttttctgtc

SEQ ID NO: 100861 - DNA, 22 bp, Artificial Sequence
  Synthetic oligonucleotide; CTT chr11 5325174 5325195 5325191 5325196 +
agctggttttctgtccttctta

SEQ ID NO: 100862 - DNA, 22 bp, Artificial Sequence
  Synthetic oligonucleotide; TTA chr11 5325175 5325196 5325192 5325197 +
gctggttttctgtccttcttac

SEQ ID NO: 100863 - DNA, 22 bp, Artificial Sequence
  Synthetic oligonucleotide; CTG chr11 5325179 5325200 5325196 5325201 +
gttttctgtccttcttacctct

SEQ ID NO: 100864 - DNA, 22 bp, Artificial Sequence
  Synthetic oligonucleotide; TTT chr11 5325183 5325204 5325200 5325205 +
tctgtccttcttacctctctct

SEQ ID NO: 100865 - DNA, 22 bp, Artificial Sequence
  Synthetic oligonucleotide; TTT chr11 5325184 5325205 5325201 5325206 +
ctgtccttcttacctctctctg

SEQ ID NO: 100866 - DNA, 22 bp, Artificial Sequence
  Synthetic oligonucleotide; TTC chr11 5325185 5325206 5325202 5325207 +
tgtccttcttacctctctctgc

SEQ ID NO: 100867 - DNA, 22 bp, Artificial Sequence
  Synthetic oligonucleotide; CTG chr11 5325187 5325208 5325204 5325209 +
tccttcttacctctctctgctt

SEQ ID NO: 100868 - DNA, 22 bp, Artificial Sequence
  Synthetic oligonucleotide; CTT chr11 5325192 5325213 5325209 5325214 +
cttacctctctctgcttttcca

SEQ ID NO: 100869 - DNA, 22 bp, Artificial Sequence
  Synthetic oligonucleotide; TTC chr11 5325193 5325214 5325210 5325215 +
ttacctctctctgcttttccat

SEQ ID NO: 100870 - DNA, 22 bp, Artificial Sequence
  Synthetic oligonucleotide; CTT chr11 5325195 5325216 5325212 5325217 +
acctctctctgcttttccatca

SEQ ID NO: 100871 - DNA, 22 bp, Artificial Sequence
  Synthetic oligonucleotide; TTA chr11 5325196 5325217 5325213 5325218 +
cctctctctgcttttccatcaa

SEQ ID NO: 100872 - DNA, 22 bp, Artificial Sequence
  Synthetic oligonucleotide; CTC chr11 5325200 5325221 5325217 5325222 +
tctctgcttttccatcaactcc

SEQ ID NO: 100873 - DNA, 22 bp, Artificial Sequence
  Synthetic oligonucleotide; CTC chr11 5325202 5325223 5325219 5325224 +
tctgcttttccatcaactccaa

SEQ ID NO: 100874 - DNA, 22 bp, Artificial Sequence
  Synthetic oligonucleotide; CTC chr11 5325204 5325225 5325221 5325226 +
tgcttttccatcaactccaaac

SEQ ID NO: 100875 - DNA, 22 bp, Artificial Sequence
  Synthetic oligonucleotide; CTG chr11 5325206 5325227 5325223 5325228 +
cttttccatcaactccaaactc

SEQ ID NO: 100876 - DNA, 22 bp, Artificial Sequence
  Synthetic oligonucleotide; CTT chr11 5325209 5325230 5325226 5325231 +
ttccatcaactccaaactcctg

SEQ ID NO: 100877 - DNA, 22 bp, Artificial Sequence
  Synthetic oligonucleotide; TTT chr11 5325210 5325231 5325227 5325232 +
tccatcaactccaaactcctga

SEQ ID NO: 100878 - DNA, 22 bp, Artificial Sequence
  Synthetic oligonucleotide; TTT chr11 5325211 5325232 5325228 5325233 +
ccatcaactccaaactcctgag

SEQ ID NO: 100879 - DNA, 22 bp, Artificial Sequence
  Synthetic oligonucleotide; TTC chr11 5325212 5325233 5325229 5325234 +
catcaactccaaactcctgagg

SEQ ID NO: 100880 - DNA, 22 bp, Artificial Sequence
  Synthetic oligonucleotide; CTC chr11 5325221 5325242 5325238 5325243 +
caaactcctgaggaactgttgc

SEQ ID NO: 100881 - DNA, 22 bp, Artificial Sequence
  Synthetic oligonucleotide; CTC chr11 5325228 5325249 5325245 5325250 +
ctgaggaactgttgcagttctg

SEQ ID NO: 100882 - DNA, 22 bp, Artificial Sequence
  Synthetic oligonucleotide; CTG chr11 5325231 5325252 5325248 5325253 +
aggaactgttgcagttctgtaa

SEQ ID NO: 100883 - DNA, 22 bp, Artificial Sequence
  Synthetic oligonucleotide; CTG chr11 5325239 5325260 5325256 5325261 +
ttgcagttctgtaacaggtaaa

SEQ ID NO: 100884 - DNA, 22 bp, Artificial Sequence
  Synthetic oligonucleotide; TTG chr11 5325242 5325263 5325259 5325264 +
cagttctgtaacaggtaaaatt

SEQ ID NO: 100885 - DNA, 22 bp, Artificial Sequence
  Synthetic oligonucleotide; TTC chr11 5325248 5325269 5325265 5325270 +
tgtaacaggtaaaattataatg

SEQ ID NO: 100886 - DNA, 22 bp, Artificial Sequence
  Synthetic oligonucleotide; CTG chr11 5325250 5325271 5325267 5325272 +
taacaggtaaaattataatgtt

SEQ ID NO: 100887 - DNA, 22 bp, Artificial Sequence
  Synthetic oligonucleotide; TTA chr11 5325265 5325286 5325282 5325287 +
taatgtttccacagcctaagga

SEQ ID NO: 100888 - DNA, 22 bp, Artificial Sequence
  Synthetic oligonucleotide; TTT chr11 5325273 5325294 5325290 5325295 +
ccacagcctaaggatgccagcc

SEQ ID NO: 100889 - DNA, 22 bp, Artificial Sequence
  Synthetic oligonucleotide; TTC chr11 5325274 5325295 5325291 5325296 +
cacagcctaaggatgccagcca

SEQ ID NO: 100890 - DNA, 22 bp, Artificial Sequence
  Synthetic oligonucleotide; CTA chr11 5325283 5325304 5325300 5325305 +
aggatgccagccatcactactg

SEQ ID NO: 100891 - DNA, 22 bp, Artificial Sequence
  Synthetic oligonucleotide; CTA chr11 5325302 5325323 5325319 5325324 +
ctgtttctgttttcttggttgc

SEQ ID NO: 100892 - DNA, 22 bp, Artificial Sequence
  Synthetic oligonucleotide; CTG chr11 5325305 5325326 5325322 5325327 +
tttctgttttcttggttgccac

SEQ ID NO: 100893 - DNA, 22 bp, Artificial Sequence
  Synthetic oligonucleotide; TTT chr11 5325308 5325329 5325325 5325330 +
ctgttttcttggttgccacgat

SEQ ID NO: 100894 - DNA, 22 bp, Artificial Sequence
  Synthetic oligonucleotide; TTC chr11 5325309 5325330 5325326 5325331 +
tgttttcttggttgccacgatc

SEQ ID NO: 100895 - DNA, 22 bp, Artificial Sequence
  Synthetic oligonucleotide; CTG chr11 5325311 5325332 5325328 5325333 +
ttttcttggttgccacgatcca

SEQ ID NO: 100896 - DNA, 22 bp, Artificial Sequence
  Synthetic oligonucleotide; TTT chr11 5325314 5325335 5325331 5325336 +
tcttggttgccacgatccaaga

SEQ ID NO: 100897 - DNA, 22 bp, Artificial Sequence
  Synthetic oligonucleotide; TTT chr11 5325315 5325336 5325332 5325337 +
cttggttgccacgatccaagag

SEQ ID NO: 100898 - DNA, 22 bp, Artificial Sequence
  Synthetic oligonucleotide; TTC chr11 5325316 5325337 5325333 5325338 +
ttggttgccacgatccaagagg

SEQ ID NO: 100899 - DNA, 22 bp, Artificial Sequence
  Synthetic oligonucleotide; CTT chr11 5325318 5325339 5325335 5325340 +
ggttgccacgatccaagagggg

SEQ ID NO: 100900 - DNA, 22 bp, Artificial Sequence
  Synthetic oligonucleotide; TTG chr11 5325319 5325340 5325336 5325341 +
gttgccacgatccaagaggggt

SEQ ID NO: 100901 - DNA, 22 bp, Artificial Sequence
  Synthetic oligonucleotide; TTG chr11 5325323 5325344 5325340 5325345 +
ccacgatccaagaggggtatgg

SEQ ID NO: 100902 - DNA, 22 bp, Artificial Sequence
  Synthetic oligonucleotide; CTT chr11 5325361 5325382 5325378 5325383 +
attaccagctctgctgcagtct

SEQ ID NO: 100903 - DNA, 22 bp, Artificial Sequence
  Synthetic oligonucleotide; TTA chr11 5325362 5325383 5325379 5325384 +
ttaccagctctgctgcagtctt

SEQ ID NO: 100904 - DNA, 22 bp, Artificial Sequence
  Synthetic oligonucleotide; TTA chr11 5325365 5325386 5325382 5325387 +
ccagctctgctgcagtcttatt

SEQ ID NO: 100905 - DNA, 22 bp, Artificial Sequence
  Synthetic oligonucleotide; CTC chr11 5325372 5325393 5325389 5325394 +
tgctgcagtcttatttaacgag

SEQ ID NO: 100906 - DNA, 22 bp, Artificial Sequence
  Synthetic oligonucleotide; CTG chr11 5325374 5325395 5325391 5325396 +
ctgcagtcttatttaacgagaa

SEQ ID NO: 100907 - DNA, 22 bp, Artificial Sequence
  Synthetic oligonucleotide; CTG chr11 5325377 5325398 5325394 5325399 +
cagtcttatttaacgagaaatt

SEQ ID NO: 100908 - DNA, 22 bp, Artificial Sequence
  Synthetic oligonucleotide; CTT chr11 5325384 5325405 5325401 5325406 +
atttaacgagaaattcagaatc

SEQ ID NO: 100909 - DNA, 22 bp, Artificial Sequence
  Synthetic oligonucleotide; TTA chr11 5325385 5325406 5325402 5325407 +
tttaacgagaaattcagaatcc

SEQ ID NO: 100910 - DNA, 22 bp, Artificial Sequence
  Synthetic oligonucleotide; TTT chr11 5325388 5325409 5325405 5325410 +
aacgagaaattcagaatcctgg

SEQ ID NO: 100911 - DNA, 22 bp, Artificial Sequence
  Synthetic oligonucleotide; TTA chr11 5325389 5325410 5325406 5325411 +
acgagaaattcagaatcctgga

SEQ ID NO: 100912 - DNA, 22 bp, Artificial Sequence
  Synthetic oligonucleotide; TTC chr11 5325400 5325421 5325417 5325422 +
agaatcctggaggcaagtcttt

SEQ ID NO: 100913 - DNA, 22 bp, Artificial Sequence
  Synthetic oligonucleotide; CTG chr11 5325409 5325430 5325426 5325431 +
gaggcaagtctttagcacctag

SEQ ID NO: 100914 - DNA, 22 bp, Artificial Sequence
  Synthetic oligonucleotide; CTT chr11 5325421 5325442 5325438 5325443 +
tagcacctagcagttttcttca

SEQ ID NO: 100915 - DNA, 22 bp, Artificial Sequence
  Synthetic oligonucleotide; TTT chr11 5325422 5325443 5325439 5325444 +
agcacctagcagttttcttcat

SEQ ID NO: 100916 - DNA, 22 bp, Artificial Sequence
  Synthetic oligonucleotide; TTA chr11 5325423 5325444 5325440 5325445 +
gcacctagcagttttcttcata

SEQ ID NO: 100917 - DNA, 22 bp, Artificial Sequence
  Synthetic oligonucleotide; CTA chr11 5325430 5325451 5325447 5325452 +
gcagttttcttcataaaatggc

SEQ ID NO: 100918 - DNA, 22 bp, Artificial Sequence
  Synthetic oligonucleotide; TTT chr11 5325437 5325458 5325454 5325459 +
tcttcataaaatggcctcagta

SEQ ID NO: 100919 - DNA, 22 bp, Artificial Sequence
  Synthetic oligonucleotide; TTT chr11 5325438 5325459 5325455 5325460 +
cttcataaaatggcctcagtat

SEQ ID NO: 100920 - DNA, 22 bp, Artificial Sequence
  Synthetic oligonucleotide; TTC chr11 5325439 5325460 5325456 5325461 +
ttcataaaatggcctcagtatc

SEQ ID NO: 100921 - DNA, 22 bp, Artificial Sequence
  Synthetic oligonucleotide; CTT chr11 5325441 5325462 5325458 5325463 +
cataaaatggcctcagtatcaa

SEQ ID NO: 100922 - DNA, 22 bp, Artificial Sequence
  Synthetic oligonucleotide; TTC chr11 5325442 5325463 5325459 5325464 +
ataaaatggcctcagtatcaaa

SEQ ID NO: 100923 - DNA, 22 bp, Artificial Sequence
  Synthetic oligonucleotide; CTC chr11 5325455 5325476 5325472 5325477 +
agtatcaaaaataaatcagaat

SEQ ID NO: 100924 - DNA, 22 bp, Artificial Sequence
  Synthetic oligonucleotide; TTT chr11 5325499 5325520 5325516 5325521 +
catattgtataaggaaatgttc

SEQ ID NO: 100925 - DNA, 22 bp, Artificial Sequence
  Synthetic oligonucleotide; TTC chr11 5325500 5325521 5325517 5325522 +
atattgtataaggaaatgttct

SEQ ID NO: 100926 - DNA, 22 bp, Artificial Sequence
  Synthetic oligonucleotide; TTG chr11 5325506 5325527 5325523 5325528 +
tataaggaaatgttctgatgct

SEQ ID NO: 100927 - DNA, 22 bp, Artificial Sequence
  Synthetic oligonucleotide; TTC chr11 5325521 5325542 5325538 5325543 +
tgatgctacctctgtatcagct

SEQ ID NO: 100928 - DNA, 22 bp, Artificial Sequence
  Synthetic oligonucleotide; CTG chr11 5325523 5325544 5325540 5325545 +
atgctacctctgtatcagctcc

SEQ ID NO: 100929 - DNA, 22 bp, Artificial Sequence
  Synthetic oligonucleotide; CTA chr11 5325529 5325550 5325546 5325551 +
cctctgtatcagctcctgtgag

SEQ ID NO: 100930 - DNA, 22 bp, Artificial Sequence
  Synthetic oligonucleotide; CTC chr11 5325533 5325554 5325550 5325555 +
tgtatcagctcctgtgagtcag

SEQ ID NO: 100931 - DNA, 22 bp, Artificial Sequence
  Synthetic oligonucleotide; CTG chr11 5325535 5325556 5325552 5325557 +
tatcagctcctgtgagtcagga

SEQ ID NO: 100932 - DNA, 22 bp, Artificial Sequence
  Synthetic oligonucleotide; CTC chr11 5325544 5325565 5325561 5325566 +
ctgtgagtcaggattactaact

SEQ ID NO: 100933 - DNA, 22 bp, Artificial Sequence
  Synthetic oligonucleotide; CTG chr11 5325547 5325568 5325564 5325569 +
tgagtcaggattactaacttac

SEQ ID NO: 100934 - DNA, 22 bp, Artificial Sequence
  Synthetic oligonucleotide; TTA chr11 5325560 5325581 5325577 5325582 +
ctaacttactgagattgaaatc

SEQ ID NO: 100935 - DNA, 22 bp, Artificial Sequence
  Synthetic oligonucleotide; CTA chr11 5325563 5325584 5325580 5325585 +
acttactgagattgaaatcacc

SEQ ID NO: 100936 - DNA, 22 bp, Artificial Sequence
  Synthetic oligonucleotide; CTT chr11 5325567 5325588 5325584 5325589 +
actgagattgaaatcaccaaca

SEQ ID NO: 100937 - DNA, 22 bp, Artificial Sequence
  Synthetic oligonucleotide; TTA chr11 5325568 5325589 5325585 5325590 +
ctgagattgaaatcaccaacac

SEQ ID NO: 100938 - DNA, 22 bp, Artificial Sequence
  Synthetic oligonucleotide; CTG chr11 5325571 5325592 5325588 5325593 +
agattgaaatcaccaacactag

SEQ ID NO: 100939 - DNA, 22 bp, Artificial Sequence
  Synthetic oligonucleotide; TTG chr11 5325577 5325598 5325594 5325599 +
aaatcaccaacactagggaatc

SEQ ID NO: 100940 - DNA, 22 bp, Artificial Sequence
  Synthetic oligonucleotide; CTA chr11 5325592 5325613 5325609 5325614 +
gggaatccctaaaattaaatca

SEQ ID NO: 100941 - DNA, 22 bp, Artificial Sequence
  Synthetic oligonucleotide; CTA chr11 5325603 5325624 5325620 5325625 +
aaattaaatcacattgaattca

SEQ ID NO: 100942 - DNA, 22 bp, Artificial Sequence
  Synthetic oligonucleotide; TTA chr11 5325609 5325630 5325626 5325631 +
aatcacattgaattcatataga

SEQ ID NO: 100943 - DNA, 22 bp, Artificial Sequence
  Synthetic oligonucleotide; TTG chr11 5325619 5325640 5325636 5325641 +
aattcatatagaagactgaatt

SEQ ID NO: 100944 - DNA, 22 bp, Artificial Sequence
  Synthetic oligonucleotide; TTC chr11 5325624 5325645 5325641 5325646 +
atatagaagactgaattataat

SEQ ID NO: 100945 - DNA, 22 bp, Artificial Sequence
  Synthetic oligonucleotide; CTG chr11 5325637 5325658 5325654 5325659 +
aattataattattacacaaatg

SEQ ID NO: 100946 - DNA, 22 bp, Artificial Sequence
  Synthetic oligonucleotide; TTA chr11 5325642 5325663 5325659 5325664 +
taattattacacaaatgttgtt

SEQ ID NO: 100947 - DNA, 22 bp, Artificial Sequence
  Synthetic oligonucleotide; TTA chr11 5325648 5325669 5325665 5325670 +
ttacacaaatgttgttctacct

SEQ ID NO: 100948 - DNA, 22 bp, Artificial Sequence
  Synthetic oligonucleotide; TTA chr11 5325651 5325672 5325668 5325673 +
cacaaatgttgttctaccttcg

SEQ ID NO: 100949 - DNA, 22 bp, Artificial Sequence
  Synthetic oligonucleotide; TTG chr11 5325662 5325683 5325679 5325684 +
ttctaccttcgaaagatccttc

SEQ ID NO: 100950 - DNA, 22 bp, Artificial Sequence
  Synthetic oligonucleotide; TTC chr11 5325665 5325686 5325682 5325687 +
taccttcgaaagatccttcatg

SEQ ID NO: 100951 - DNA, 22 bp, Artificial Sequence
  Synthetic oligonucleotide; CTA chr11 5325667 5325688 5325684 5325689 +
ccttcgaaagatccttcatgct

SEQ ID NO: 100952 - DNA, 22 bp, Artificial Sequence
  Synthetic oligonucleotide; CTT chr11 5325671 5325692 5325688 5325693 +
cgaaagatccttcatgcttaaa

SEQ ID NO: 100953 - DNA, 22 bp, Artificial Sequence
  Synthetic oligonucleotide; TTC chr11 5325672 5325693 5325689 5325694 +
gaaagatccttcatgcttaaaa

SEQ ID NO: 100954 - DNA, 22 bp, Artificial Sequence
  Synthetic oligonucleotide; CTT chr11 5325683 5325704 5325700 5325705 +
catgcttaaaaacacagattga

SEQ ID NO: 100955 - DNA, 22 bp, Artificial Sequence
  Synthetic oligonucleotide; TTC chr11 5325684 5325705 5325701 5325706 +
atgcttaaaaacacagattgag

SEQ ID NO: 100956 - DNA, 22 bp, Artificial Sequence
  Synthetic oligonucleotide; CTT chr11 5325690 5325711 5325707 5325712 +
aaaaacacagattgaggaataa

SEQ ID NO: 100957 - DNA, 22 bp, Artificial Sequence
  Synthetic oligonucleotide; TTA chr11 5325691 5325712 5325708 5325713 +
aaaacacagattgaggaataag

SEQ ID NO: 100958 - DNA, 22 bp, Artificial Sequence
  Synthetic oligonucleotide; TTG chr11 5325704 5325725 5325721 5325726 +
aggaataagaggatgtacggaa

SEQ ID NO: 100959 - DNA, 22 bp, Artificial Sequence
  Synthetic oligonucleotide; TTA chr11 5325757 5325778 5325774 5325779 +
gagaaaggacaaattggtgaca

SEQ ID NO: 100960 - DNA, 22 bp, Artificial Sequence
  Synthetic oligonucleotide; TTG chr11 5325773 5325794 5325790 5325795 +
gtgacacatattctgaagggta

SEQ ID NO: 100961 - DNA, 22 bp, Artificial Sequence
  Synthetic oligonucleotide; TTC chr11 5325786 5325807 5325803 5325808 +
tgaagggtaaacatagaagaaa

SEQ ID NO: 100962 - DNA, 22 bp, Artificial Sequence
  Synthetic oligonucleotide; CTG chr11 5325788 5325809 5325805 5325810 +
aagggtaaacatagaagaaagt

SEQ ID NO: 100963 - DNA, 22 bp, Artificial Sequence
  Synthetic oligonucleotide; TTA chr11 5325817 5325838 5325834 5325839 +
aaattttttttaattaaagttt

SEQ ID NO: 100964 - DNA, 22 bp, Artificial Sequence
  Synthetic oligonucleotide; TTT chr11 5325823 5325844 5325840 5325845 +
tttttaattaaagttttaaaaa

SEQ ID NO: 100965 - DNA, 22 bp, Artificial Sequence
  Synthetic oligonucleotide; TTT chr11 5325824 5325845 5325841 5325846 +
ttttaattaaagttttaaaaaa

SEQ ID NO: 100966 - DNA, 22 bp, Artificial Sequence
  Synthetic oligonucleotide; TTT chr11 5325825 5325846 5325842 5325847 +
tttaattaaagttttaaaaaat

SEQ ID NO: 100967 - DNA, 22 bp, Artificial Sequence
  Synthetic oligonucleotide; TTT chr11 5325826 5325847 5325843 5325848 +
ttaattaaagttttaaaaaatt

SEQ ID NO: 100968 - DNA, 22 bp, Artificial Sequence
  Synthetic oligonucleotide; TTT chr11 5325827 5325848 5325844 5325849 +
taattaaagttttaaaaaattt

SEQ ID NO: 100969 - DNA, 22 bp, Artificial Sequence
  Synthetic oligonucleotide; TTT chr11 5325828 5325849 5325845 5325850 +
aattaaagttttaaaaaatttt

SEQ ID NO: 100970 - DNA, 22 bp, Artificial Sequence
  Synthetic oligonucleotide; TTA chr11 5325829 5325850 5325846 5325851 +
attaaagttttaaaaaatttta

SEQ ID NO: 100971 - DNA, 22 bp, Artificial Sequence
  Synthetic oligonucleotide; TTA chr11 5325833 5325854 5325850 5325855 +
aagttttaaaaaattttaaaaa

SEQ ID NO: 100972 - DNA, 22 bp, Artificial Sequence
  Synthetic oligonucleotide; TTT chr11 5325839 5325860 5325856 5325861 +
taaaaaattttaaaaataaaaa

SEQ ID NO: 100973 - DNA, 22 bp, Artificial Sequence
  Synthetic oligonucleotide; TTT chr11 5325840 5325861 5325857 5325862 +
aaaaaattttaaaaataaaaaa

SEQ ID NO: 100974 - DNA, 22 bp, Artificial Sequence
  Synthetic oligonucleotide; TTA chr11 5325841 5325862 5325858 5325863 +
aaaaattttaaaaataaaaaat

SEQ ID NO: 100975 - DNA, 22 bp, Artificial Sequence
  Synthetic oligonucleotide; TTT chr11 5325849 5325870 5325866 5325871 +
taaaaataaaaaatttttaaaa

SEQ ID NO: 100976 - DNA, 22 bp, Artificial Sequence
  Synthetic oligonucleotide; TTT chr11 5325850 5325871 5325867 5325872 +
aaaaataaaaaatttttaaaaa

SEQ ID NO: 100977 - DNA, 22 bp, Artificial Sequence
  Synthetic oligonucleotide; TTA chr11 5325851 5325872 5325868 5325873 +
aaaataaaaaatttttaaaaag

SEQ ID NO: 100978 - DNA, 22 bp, Artificial Sequence
  Synthetic oligonucleotide; TTT chr11 5325865 5325886 5325882 5325887 +
ttaaaaagaaagccataaaatc

SEQ ID NO: 100979 - DNA, 22 bp, Artificial Sequence
  Synthetic oligonucleotide; TTT chr11 5325866 5325887 5325883 5325888 +
taaaaagaaagccataaaatct

SEQ ID NO: 100980 - DNA, 22 bp, Artificial Sequence
  Synthetic oligonucleotide; TTT chr11 5325867 5325888 5325884 5325889 +
aaaaagaaagccataaaatctg

SEQ ID NO: 100981 - DNA, 22 bp, Artificial Sequence
  Synthetic oligonucleotide; TTA chr11 5325868 5325889 5325885 5325890 +
aaaagaaagccataaaatctgg

SEQ ID NO: 100982 - DNA, 22 bp, Artificial Sequence
  Synthetic oligonucleotide; CTG chr11 5325889 5325910 5325906 5325911 +
ggattcctttaaaaaaaattgt

SEQ ID NO: 100983 - DNA, 22 bp, Artificial Sequence
  Synthetic oligonucleotide; TTC chr11 5325895 5325916 5325912 5325917 +
ctttaaaaaaaattgtgtaagg

SEQ ID NO: 100984 - DNA, 22 bp, Artificial Sequence
  Synthetic oligonucleotide; CTT chr11 5325898 5325919 5325915 5325920 +
taaaaaaaattgtgtaaggatc

SEQ ID NO: 100985 - DNA, 22 bp, Artificial Sequence
  Synthetic oligonucleotide; TTT chr11 5325899 5325920 5325916 5325921 +
aaaaaaaattgtgtaaggatca

SEQ ID NO: 100986 - DNA, 22 bp, Artificial Sequence
  Synthetic oligonucleotide; TTA chr11 5325900 5325921 5325917 5325922 +
aaaaaaattgtgtaaggatcaa

SEQ ID NO: 100987 - DNA, 22 bp, Artificial Sequence
  Synthetic oligonucleotide; TTG chr11 5325910 5325931 5325927 5325932 +
tgtaaggatcaaactagatttc

SEQ ID NO: 100988 - DNA, 22 bp, Artificial Sequence
  Synthetic oligonucleotide; CTA chr11 5325926 5325947 5325943 5325948 +
gatttccagagcacaagtactt

SEQ ID NO: 100989 - DNA, 22 bp, Artificial Sequence
  Synthetic oligonucleotide; TTT chr11 5325931 5325952 5325948 5325953 +
ccagagcacaagtactttttaa

SEQ ID NO: 100990 - DNA, 22 bp, Artificial Sequence
  Synthetic oligonucleotide; TTC chr11 5325932 5325953 5325949 5325954 +
cagagcacaagtactttttaaa

SEQ ID NO: 100991 - DNA, 22 bp, Artificial Sequence
  Synthetic oligonucleotide; CTT chr11 5325948 5325969 5325965 5325970 +
tttaaaatgtttgtgagctttt

SEQ ID NO: 100992 - DNA, 22 bp, Artificial Sequence
  Synthetic oligonucleotide; TTT chr11 5325949 5325970 5325966 5325971 +
ttaaaatgtttgtgagcttttc

SEQ ID NO: 100993 - DNA, 22 bp, Artificial Sequence
  Synthetic oligonucleotide; TTT chr11 5325950 5325971 5325967 5325972 +
taaaatgtttgtgagcttttcc

SEQ ID NO: 100994 - DNA, 22 bp, Artificial Sequence
  Synthetic oligonucleotide; TTT chr11 5325951 5325972 5325968 5325973 +
aaaatgtttgtgagcttttcct

SEQ ID NO: 100995 - DNA, 22 bp, Artificial Sequence
  Synthetic oligonucleotide; TTA chr11 5325952 5325973 5325969 5325974 +
aaatgtttgtgagcttttcctt

SEQ ID NO: 100996 - DNA, 22 bp, Artificial Sequence
  Synthetic oligonucleotide; TTT chr11 5325960 5325981 5325977 5325982 +
gtgagcttttccttaaaaaaca

SEQ ID NO: 100997 - DNA, 22 bp, Artificial Sequence
  Synthetic oligonucleotide; TTG chr11 5325961 5325982 5325978 5325983 +
tgagcttttccttaaaaaacaa

SEQ ID NO: 100998 - DNA, 22 bp, Artificial Sequence
  Synthetic oligonucleotide; CTT chr11 5325968 5325989 5325985 5325990 +
ttccttaaaaaacaataacgtc

SEQ ID NO: 100999 - DNA, 22 bp, Artificial Sequence
  Synthetic oligonucleotide; TTT chr11 5325969 5325990 5325986 5325991 +
tccttaaaaaacaataacgtct

SEQ ID NO: 101000 - DNA, 22 bp, Artificial Sequence
  Synthetic oligonucleotide; TTT chr11 5325970 5325991 5325987 5325992 +
ccttaaaaaacaataacgtctt

SEQ ID NO: 101001 - DNA, 22 bp, Artificial Sequence
  Synthetic oligonucleotide; TTC chr11 5325971 5325992 5325988 5325993 +
cttaaaaaacaataacgtcttt

SEQ ID NO: 101002 - DNA, 22 bp, Artificial Sequence
  Synthetic oligonucleotide; CTT chr11 5325974 5325995 5325991 5325996 +
aaaaaacaataacgtctttaga

SEQ ID NO: 101003 - DNA, 22 bp, Artificial Sequence
  Synthetic oligonucleotide; TTA chr11 5325975 5325996 5325992 5325997 +
aaaaacaataacgtctttagag

SEQ ID NO: 101004 - DNA, 22 bp, Artificial Sequence
  Synthetic oligonucleotide; CTT chr11 5325992 5326013 5326009 5326014 +
tagagaaattggccataaaaca

SEQ ID NO: 101005 - DNA, 22 bp, Artificial Sequence
  Synthetic oligonucleotide; TTT chr11 5325993 5326014 5326010 5326015 +
agagaaattggccataaaacac

SEQ ID NO: 101006 - DNA, 22 bp, Artificial Sequence
  Synthetic oligonucleotide; TTA chr11 5325994 5326015 5326011 5326016 +
gagaaattggccataaaacact

SEQ ID NO: 101007 - DNA, 22 bp, Artificial Sequence
  Synthetic oligonucleotide; TTG chr11 5326003 5326024 5326020 5326025 +
gccataaaacacttgaaaccaa

SEQ ID NO: 101008 - DNA, 22 bp, Artificial Sequence
  Synthetic oligonucleotide; CTT chr11 5326017 5326038 5326034 5326039 +
gaaaccaaaaaagaaagttttt

SEQ ID NO: 101009 - DNA, 22 bp, Artificial Sequence
  Synthetic oligonucleotide; TTG chr11 5326018 5326039 5326035 5326040 +
aaaccaaaaaagaaagtttttt

SEQ ID NO: 101010 - DNA, 22 bp, Artificial Sequence
  Synthetic oligonucleotide; TTT chr11 5326037 5326058 5326054 5326059 +
tttattatatttatgagcagaa

SEQ ID NO: 101011 - DNA, 22 bp, Artificial Sequence
  Synthetic oligonucleotide; TTT chr11 5326038 5326059 5326055 5326060 +
ttattatatttatgagcagaaa

SEQ ID NO: 101012 - DNA, 22 bp, Artificial Sequence
  Synthetic oligonucleotide; TTT chr11 5326039 5326060 5326056 5326061 +
tattatatttatgagcagaaaa

SEQ ID NO: 101013 - DNA, 22 bp, Artificial Sequence
  Synthetic oligonucleotide; TTT chr11 5326040 5326061 5326057 5326062 +
attatatttatgagcagaaaaa

SEQ ID NO: 101014 - DNA, 22 bp, Artificial Sequence
  Synthetic oligonucleotide; TTA chr11 5326041 5326062 5326058 5326063 +
ttatatttatgagcagaaaaaa

SEQ ID NO: 101015 - DNA, 22 bp, Artificial Sequence
  Synthetic oligonucleotide; TTA chr11 5326044 5326065 5326061 5326066 +
tatttatgagcagaaaaaaatg

SEQ ID NO: 101016 - DNA, 22 bp, Artificial Sequence
  Synthetic oligonucleotide; TTT chr11 5326049 5326070 5326066 5326071 +
atgagcagaaaaaaatgtttac

SEQ ID NO: 101017 - DNA, 22 bp, Artificial Sequence
  Synthetic oligonucleotide; TTA chr11 5326050 5326071 5326067 5326072 +
tgagcagaaaaaaatgtttaca

SEQ ID NO: 101018 - DNA, 22 bp, Artificial Sequence
  Synthetic oligonucleotide; TTT chr11 5326069 5326090 5326086 5326091 +
acagtcatatctccctccatct

SEQ ID NO: 101019 - DNA, 22 bp, Artificial Sequence
  Synthetic oligonucleotide; TTA chr11 5326070 5326091 5326087 5326092 +
cagtcatatctccctccatctc

SEQ ID NO: 101020 - DNA, 22 bp, Artificial Sequence
  Synthetic oligonucleotide; CTC chr11 5326082 5326103 5326099 5326104 +
cctccatctctaagcttgggtc

SEQ ID NO: 101021 - DNA, 22 bp, Artificial Sequence
  Synthetic oligonucleotide; CTC chr11 5326086 5326107 5326103 5326108 +
catctctaagcttgggtcatta

SEQ ID NO: 101022 - DNA, 22 bp, Artificial Sequence
  Synthetic oligonucleotide; CTC chr11 5326092 5326113 5326109 5326114 +
taagcttgggtcattaaaagta

SEQ ID NO: 101023 - DNA, 22 bp, Artificial Sequence
  Synthetic oligonucleotide; CTA chr11 5326094 5326115 5326111 5326116 +
agcttgggtcattaaaagtaag

SEQ ID NO: 101024 - DNA, 22 bp, Artificial Sequence
  Synthetic oligonucleotide; CTT chr11 5326099 5326120 5326116 5326121 +
gggtcattaaaagtaagacagg

SEQ ID NO: 101025 - DNA, 22 bp, Artificial Sequence
  Synthetic oligonucleotide; TTG chr11 5326100 5326121 5326117 5326122 +
ggtcattaaaagtaagacaggg

SEQ ID NO: 101026 - DNA, 22 bp, Artificial Sequence
  Synthetic oligonucleotide; TTA chr11 5326108 5326129 5326125 5326130 +
aaagtaagacagggaaggttat

SEQ ID NO: 101027 - DNA, 22 bp, Artificial Sequence
  Synthetic oligonucleotide; TTA chr11 5326129 5326150 5326146 5326151 +
tggtacctcaaagaaaatgaaa

SEQ ID NO: 101028 - DNA, 22 bp, Artificial Sequence
  Synthetic oligonucleotide; CTC chr11 5326138 5326159 5326155 5326160 +
aaagaaaatgaaaggtaaatca

SEQ ID NO: 101029 - DNA, 22 bp, Artificial Sequence
  Synthetic oligonucleotide; CTG chr11 5326166 5326187 5326183 5326188 +
agattttgggaataaaaagaaa

SEQ ID NO: 101030 - DNA, 22 bp, Artificial Sequence
  Synthetic oligonucleotide; TTT chr11 5326172 5326193 5326189 5326194 +
tgggaataaaaagaaacacaaa

SEQ ID NO: 101031 - DNA, 22 bp, Artificial Sequence
  Synthetic oligonucleotide; TTT chr11 5326173 5326194 5326190 5326195 +
gggaataaaaagaaacacaaaa

SEQ ID NO: 101032 - DNA, 22 bp, Artificial Sequence
  Synthetic oligonucleotide; TTG chr11 5326174 5326195 5326191 5326196 +
ggaataaaaagaaacacaaaag

SEQ ID NO: 101033 - DNA, 22 bp, Artificial Sequence
  Synthetic oligonucleotide; CTG chr11 5326203 5326224 5326220 5326225 +
cccaacactgggaagccgttga

SEQ ID NO: 101034 - DNA, 22 bp, Artificial Sequence
  Synthetic oligonucleotide; CTG chr11 5326213 5326234 5326230 5326235 +
ggaagccgttgatatttaccca

SEQ ID NO: 101035 - DNA, 22 bp, Artificial Sequence
  Synthetic oligonucleotide; TTG chr11 5326224 5326245 5326241 5326246 +
atatttacccagaggcaggcgt

SEQ ID NO: 101036 - DNA, 22 bp, Artificial Sequence
  Synthetic oligonucleotide; TTT chr11 5326230 5326251 5326247 5326252 +
acccagaggcaggcgtgtgggg

SEQ ID NO: 101037 - DNA, 22 bp, Artificial Sequence
  Synthetic oligonucleotide; TTA chr11 5326231 5326252 5326248 5326253 +
cccagaggcaggcgtgtgggga

SEQ ID NO: 101038 - DNA, 22 bp, Artificial Sequence
  Synthetic oligonucleotide; TTC chr11 5326256 5326277 5326273 5326278 +
taggagagctagatactgtcat

SEQ ID NO: 101039 - DNA, 22 bp, Artificial Sequence
  Synthetic oligonucleotide; CTA chr11 5326258 5326279 5326275 5326280 +
ggagagctagatactgtcatca

SEQ ID NO: 101040 - DNA, 22 bp, Artificial Sequence
  Synthetic oligonucleotide; CTA chr11 5326267 5326288 5326284 5326289 +
gatactgtcatcaaactgaggc

SEQ ID NO: 101041 - DNA, 22 bp, Artificial Sequence
  Synthetic oligonucleotide; CTG chr11 5326274 5326295 5326291 5326296 +
tcatcaaactgaggcccactat

SEQ ID NO: 101042 - DNA, 22 bp, Artificial Sequence
  Synthetic oligonucleotide; CTG chr11 5326285 5326306 5326302 5326307 +
aggcccactataagcagtgtca

SEQ ID NO: 101043 - DNA, 22 bp, Artificial Sequence
  Synthetic oligonucleotide; CTA chr11 5326295 5326316 5326312 5326317 +
taagcagtgtcaccagagatga

SEQ ID NO: 101044 - DNA, 22 bp, Artificial Sequence
  Synthetic oligonucleotide; CTG chr11 5326327 5326348 5326344 5326349 +
tatgcatgctcccaaggctgca

SEQ ID NO: 101045 - DNA, 22 bp, Artificial Sequence
  Synthetic oligonucleotide; CTC chr11 5326338 5326359 5326355 5326360 +
ccaaggctgcactatgtggcaa

SEQ ID NO: 101046 - DNA, 22 bp, Artificial Sequence
  Synthetic oligonucleotide; CTG chr11 5326347 5326368 5326364 5326369 +
cactatgtggcaaaattccatt

SEQ ID NO: 101047 - DNA, 22 bp, Artificial Sequence
  Synthetic oligonucleotide; CTA chr11 5326352 5326373 5326369 5326374 +
tgtggcaaaattccattcagat

SEQ ID NO: 101048 - DNA, 22 bp, Artificial Sequence
  Synthetic oligonucleotide; TTC chr11 5326365 5326386 5326382 5326387 +
cattcagatggcttagctatta

SEQ ID NO: 101049 - DNA, 22 bp, Artificial Sequence
  Synthetic oligonucleotide; TTC chr11 5326370 5326391 5326387 5326392 +
agatggcttagctattaacaag

SEQ ID NO: 101050 - DNA, 22 bp, Artificial Sequence
  Synthetic oligonucleotide; CTT chr11 5326379 5326400 5326396 5326401 +
agctattaacaagtgttaagaa

SEQ ID NO: 101051 - DNA, 22 bp, Artificial Sequence
  Synthetic oligonucleotide; TTA chr11 5326380 5326401 5326397 5326402 +
gctattaacaagtgttaagaaa

SEQ ID NO: 101052 - DNA, 22 bp, Artificial Sequence
  Synthetic oligonucleotide; CTA chr11 5326384 5326405 5326401 5326406 +
ttaacaagtgttaagaaaatta

SEQ ID NO: 101053 - DNA, 22 bp, Artificial Sequence
  Synthetic oligonucleotide; TTA chr11 5326387 5326408 5326404 5326409 +
acaagtgttaagaaaattatac

SEQ ID NO: 101054 - DNA, 22 bp, Artificial Sequence
  Synthetic oligonucleotide; TTA chr11 5326397 5326418 5326414 5326419 +
agaaaattatactagaagcaca

SEQ ID NO: 101055 - DNA, 22 bp, Artificial Sequence
  Synthetic oligonucleotide; TTA chr11 5326406 5326427 5326423 5326428 +
tactagaagcacaagaactagt

SEQ ID NO: 101056 - DNA, 22 bp, Artificial Sequence
  Synthetic oligonucleotide; CTA chr11 5326411 5326432 5326428 5326433 +
gaagcacaagaactagtttttc

SEQ ID NO: 101057 - DNA, 22 bp, Artificial Sequence
  Synthetic oligonucleotide; CTA chr11 5326426 5326447 5326443 5326448 +
gtttttctggataaaggtggag

SEQ ID NO: 101058 - DNA, 22 bp, Artificial Sequence
  Synthetic oligonucleotide; TTT chr11 5326430 5326451 5326447 5326452 +
ttctggataaaggtggagcagc

SEQ ID NO: 101059 - DNA, 22 bp, Artificial Sequence
  Synthetic oligonucleotide; TTT chr11 5326431 5326452 5326448 5326453 +
tctggataaaggtggagcagct

SEQ ID NO: 101060 - DNA, 22 bp, Artificial Sequence
  Synthetic oligonucleotide; TTT chr11 5326432 5326453 5326449 5326454 +
ctggataaaggtggagcagcta

SEQ ID NO: 101061 - DNA, 22 bp, Artificial Sequence
  Synthetic oligonucleotide; TTC chr11 5326433 5326454 5326450 5326455 +
tggataaaggtggagcagctat

SEQ ID NO: 101062 - DNA, 22 bp, Artificial Sequence
  Synthetic oligonucleotide; CTG chr11 5326435 5326456 5326452 5326457 +
gataaaggtggagcagctatgg

SEQ ID NO: 101063 - DNA, 22 bp, Artificial Sequence
  Synthetic oligonucleotide; CTA chr11 5326454 5326475 5326471 5326476 +
tggctgtgaaattgataggcag

SEQ ID NO: 101064 - DNA, 22 bp, Artificial Sequence
  Synthetic oligonucleotide; CTG chr11 5326460 5326481 5326477 5326482 +
tgaaattgataggcagctctca

SEQ ID NO: 101065 - DNA, 22 bp, Artificial Sequence
  Synthetic oligonucleotide; TTG chr11 5326468 5326489 5326485 5326490 +
ataggcagctctcaactcagaa

SEQ ID NO: 101066 - DNA, 22 bp, Artificial Sequence
  Synthetic oligonucleotide; CTC chr11 5326479 5326500 5326496 5326501 +
tcaactcagaacataaatgttt

SEQ ID NO: 101067 - DNA, 22 bp, Artificial Sequence
  Synthetic oligonucleotide; CTC chr11 5326481 5326502 5326498 5326503 +
aactcagaacataaatgtttag

SEQ ID NO: 101068 - DNA, 22 bp, Artificial Sequence
  Synthetic oligonucleotide; CTC chr11 5326486 5326507 5326503 5326508 +
agaacataaatgtttagtgatt

SEQ ID NO: 101069 - DNA, 22 bp, Artificial Sequence
  Synthetic oligonucleotide; TTT chr11 5326501 5326522 5326518 5326523 +
agtgatttcctaaggatctggg

SEQ ID NO: 101070 - DNA, 22 bp, Artificial Sequence
  Synthetic oligonucleotide; TTA chr11 5326502 5326523 5326519 5326524 +
gtgatttcctaaggatctgggg

SEQ ID NO: 101071 - DNA, 22 bp, Artificial Sequence
  Synthetic oligonucleotide; TTT chr11 5326509 5326530 5326526 5326531 +
cctaaggatctggggtcctgac

SEQ ID NO: 101072 - DNA, 22 bp, Artificial Sequence
  Synthetic oligonucleotide; TTC chr11 5326510 5326531 5326527 5326532 +
ctaaggatctggggtcctgact

SEQ ID NO: 101073 - DNA, 22 bp, Artificial Sequence
  Synthetic oligonucleotide; CTA chr11 5326513 5326534 5326530 5326535 +
aggatctggggtcctgacttga

SEQ ID NO: 101074 - DNA, 22 bp, Artificial Sequence
  Synthetic oligonucleotide; CTG chr11 5326521 5326542 5326538 5326543 +
gggtcctgacttgatgtgtgat

SEQ ID NO: 101075 - DNA, 22 bp, Artificial Sequence
  Synthetic oligonucleotide; CTG chr11 5326529 5326550 5326546 5326551 +
acttgatgtgtgatgatttttc

SEQ ID NO: 101076 - DNA, 22 bp, Artificial Sequence
  Synthetic oligonucleotide; CTT chr11 5326533 5326554 5326550 5326555 +
gatgtgtgatgatttttccttg

SEQ ID NO: 101077 - DNA, 22 bp, Artificial Sequence
  Synthetic oligonucleotide; TTG chr11 5326534 5326555 5326551 5326556 +
atgtgtgatgatttttccttga

SEQ ID NO: 101078 - DNA, 22 bp, Artificial Sequence
  Synthetic oligonucleotide; TTT chr11 5326548 5326569 5326565 5326570 +
ttccttgaactgatatatcata

SEQ ID NO: 101079 - DNA, 22 bp, Artificial Sequence
  Synthetic oligonucleotide; TTT chr11 5326549 5326570 5326566 5326571 +
tccttgaactgatatatcatat

SEQ ID NO: 101080 - DNA, 22 bp, Artificial Sequence
  Synthetic oligonucleotide; TTT chr11 5326550 5326571 5326567 5326572 +
ccttgaactgatatatcatata

SEQ ID NO: 101081 - DNA, 22 bp, Artificial Sequence
  Synthetic oligonucleotide; TTC chr11 5326551 5326572 5326568 5326573 +
cttgaactgatatatcatatat

SEQ ID NO: 101082 - DNA, 22 bp, Artificial Sequence
  Synthetic oligonucleotide; CTT chr11 5326554 5326575 5326571 5326576 +
gaactgatatatcatatatgaa

SEQ ID NO: 101083 - DNA, 22 bp, Artificial Sequence
  Synthetic oligonucleotide; TTG chr11 5326555 5326576 5326572 5326577 +
aactgatatatcatatatgaag

SEQ ID NO: 101084 - DNA, 22 bp, Artificial Sequence
  Synthetic oligonucleotide; CTG chr11 5326560 5326581 5326577 5326582 +
atatatcatatatgaagatata

SEQ ID NO: 101085 - DNA, 22 bp, Artificial Sequence
  Synthetic oligonucleotide; CTG chr11 5326591 5326612 5326608 5326613 +
taggagctccattcaccaatac

SEQ ID NO: 101086 - DNA, 22 bp, Artificial Sequence
  Synthetic oligonucleotide; CTC chr11 5326600 5326621 5326617 5326622 +
cattcaccaataccatctggga

SEQ ID NO: 101087 - DNA, 22 bp, Artificial Sequence
  Synthetic oligonucleotide; TTC chr11 5326605 5326626 5326622 5326627 +
accaataccatctgggacaagt

SEQ ID NO: 101088 - DNA, 22 bp, Artificial Sequence
  Synthetic oligonucleotide; CTG chr11 5326619 5326640 5326636 5326641 +
ggacaagttggaaaatgactat

SEQ ID NO: 101089 - DNA, 22 bp, Artificial Sequence
  Synthetic oligonucleotide; TTG chr11 5326629 5326650 5326646 5326651 +
gaaaatgactattttgagtcag

SEQ ID NO: 101090 - DNA, 22 bp, Artificial Sequence
  Synthetic oligonucleotide; CTA chr11 5326640 5326661 5326657 5326662 +
ttttgagtcagcacagaattgg

SEQ ID NO: 101091 - DNA, 22 bp, Artificial Sequence
  Synthetic oligonucleotide; TTT chr11 5326643 5326664 5326660 5326665 +
tgagtcagcacagaattggtga

SEQ ID NO: 101092 - DNA, 22 bp, Artificial Sequence
  Synthetic oligonucleotide; TTT chr11 5326644 5326665 5326661 5326666 +
gagtcagcacagaattggtgag

SEQ ID NO: 101093 - DNA, 22 bp, Artificial Sequence
  Synthetic oligonucleotide; TTG chr11 5326645 5326666 5326662 5326667 +
agtcagcacagaattggtgagc

SEQ ID NO: 101094 - DNA, 22 bp, Artificial Sequence
  Synthetic oligonucleotide; TTG chr11 5326661 5326682 5326678 5326683 +
gtgagcacatgccacacaactg

SEQ ID NO: 101095 - DNA, 22 bp, Artificial Sequence
  Synthetic oligonucleotide; CTG chr11 5326683 5326704 5326700 5326705 +
cactgtgtttagttctaaataa

SEQ ID NO: 101096 - DNA, 22 bp, Artificial Sequence
  Synthetic oligonucleotide; CTG chr11 5326688 5326709 5326705 5326710 +
tgtttagttctaaataaccatg

SEQ ID NO: 101097 - DNA, 22 bp, Artificial Sequence
  Synthetic oligonucleotide; TTT chr11 5326693 5326714 5326710 5326715 +
agttctaaataaccatgtaata

SEQ ID NO: 101098 - DNA, 22 bp, Artificial Sequence
  Synthetic oligonucleotide; TTA chr11 5326694 5326715 5326711 5326716 +
gttctaaataaccatgtaataa

SEQ ID NO: 101099 - DNA, 22 bp, Artificial Sequence
  Synthetic oligonucleotide; TTC chr11 5326698 5326719 5326715 5326720 +
taaataaccatgtaataagcac

SEQ ID NO: 101100 - DNA, 22 bp, Artificial Sequence
  Synthetic oligonucleotide; CTA chr11 5326700 5326721 5326717 5326722 +
aataaccatgtaataagcacag

SEQ ID NO: 101101 - DNA, 22 bp, Artificial Sequence
  Synthetic oligonucleotide; CTG chr11 5326726 5326747 5326743 5326748 +
ctcttaagaagctctcaatatg

SEQ ID NO: 101102 - DNA, 22 bp, Artificial Sequence
  Synthetic oligonucleotide; CTC chr11 5326729 5326750 5326746 5326751 +
ttaagaagctctcaatatggcc

SEQ ID NO: 101103 - DNA, 22 bp, Artificial Sequence
  Synthetic oligonucleotide; CTT chr11 5326731 5326752 5326748 5326753 +
aagaagctctcaatatggccta

SEQ ID NO: 101104 - DNA, 22 bp, Artificial Sequence
  Synthetic oligonucleotide; TTA chr11 5326732 5326753 5326749 5326754 +
agaagctctcaatatggcctat

SEQ ID NO: 101105 - DNA, 22 bp, Artificial Sequence
  Synthetic oligonucleotide; CTC chr11 5326740 5326761 5326757 5326762 +
tcaatatggcctatgagtttat

SEQ ID NO: 101106 - DNA, 22 bp, Artificial Sequence
  Synthetic oligonucleotide; CTC chr11 5326742 5326763 5326759 5326764 +
aatatggcctatgagtttataa

SEQ ID NO: 101107 - DNA, 22 bp, Artificial Sequence
  Synthetic oligonucleotide; CTA chr11 5326753 5326774 5326770 5326775 +
tgagtttataatagtgcttaat

SEQ ID NO: 101108 - DNA, 22 bp, Artificial Sequence
  Synthetic oligonucleotide; TTT chr11 5326760 5326781 5326777 5326782 +
ataatagtgcttaatattctcc

SEQ ID NO: 101109 - DNA, 22 bp, Artificial Sequence
  Synthetic oligonucleotide; TTA chr11 5326761 5326782 5326778 5326783 +
taatagtgcttaatattctccc

SEQ ID NO: 101110 - DNA, 22 bp, Artificial Sequence
  Synthetic oligonucleotide; CTT chr11 5326772 5326793 5326789 5326794 +
aatattctcccttcaattttat

SEQ ID NO: 101111 - DNA, 22 bp, Artificial Sequence
  Synthetic oligonucleotide; TTA chr11 5326773 5326794 5326790 5326795 +
atattctcccttcaattttatg

SEQ ID NO: 101112 - DNA, 22 bp, Artificial Sequence
  Synthetic oligonucleotide; TTC chr11 5326779 5326800 5326796 5326801 +
tcccttcaattttatgcagaat

SEQ ID NO: 101113 - DNA, 22 bp, Artificial Sequence
  Synthetic oligonucleotide; CTC chr11 5326781 5326802 5326798 5326803 +
ccttcaattttatgcagaatat

SEQ ID NO: 101114 - DNA, 22 bp, Artificial Sequence
  Synthetic oligonucleotide; CTT chr11 5326785 5326806 5326802 5326807 +
caattttatgcagaatattgcc

SEQ ID NO: 101115 - DNA, 22 bp, Artificial Sequence
  Synthetic oligonucleotide; TTC chr11 5326786 5326807 5326803 5326808 +
aattttatgcagaatattgccc

SEQ ID NO: 101116 - DNA, 22 bp, Artificial Sequence
  Synthetic oligonucleotide; TTT chr11 5326791 5326812 5326808 5326813 +
tatgcagaatattgcccttgaa

SEQ ID NO: 101117 - DNA, 22 bp, Artificial Sequence
  Synthetic oligonucleotide; TTT chr11 5326792 5326813 5326809 5326814 +
atgcagaatattgcccttgaat

SEQ ID NO: 101118 - DNA, 22 bp, Artificial Sequence
  Synthetic oligonucleotide; TTA chr11 5326793 5326814 5326810 5326815 +
tgcagaatattgcccttgaatg

SEQ ID NO: 101119 - DNA, 22 bp, Artificial Sequence
  Synthetic oligonucleotide; TTG chr11 5326805 5326826 5326822 5326827 +
cccttgaatgtctcaacaggat

SEQ ID NO: 101120 - DNA, 22 bp, Artificial Sequence
  Synthetic oligonucleotide; CTT chr11 5326810 5326831 5326827 5326832 +
gaatgtctcaacaggatccata

SEQ ID NO: 101121 - DNA, 22 bp, Artificial Sequence
  Synthetic oligonucleotide; TTG chr11 5326811 5326832 5326828 5326833 +
aatgtctcaacaggatccataa

SEQ ID NO: 101122 - DNA, 22 bp, Artificial Sequence
  Synthetic oligonucleotide; CTC chr11 5326819 5326840 5326836 5326841 +
aacaggatccataatgctgaaa

SEQ ID NO: 101123 - DNA, 22 bp, Artificial Sequence
  Synthetic oligonucleotide; CTG chr11 5326838 5326859 5326855 5326860 +
aaaacttgagaaaaatcataga

SEQ ID NO: 101124 - DNA, 22 bp, Artificial Sequence
  Synthetic oligonucleotide; CTT chr11 5326845 5326866 5326862 5326867 +
gagaaaaatcatagatctaagc

SEQ ID NO: 101125 - DNA, 22 bp, Artificial Sequence
  Synthetic oligonucleotide; TTG chr11 5326846 5326867 5326863 5326868 +
agaaaaatcatagatctaagcc

SEQ ID NO: 101126 - DNA, 22 bp, Artificial Sequence
  Synthetic oligonucleotide; CTA chr11 5326864 5326885 5326881 5326886 +
agccctgcttcattctagcttc

SEQ ID NO: 101127 - DNA, 22 bp, Artificial Sequence
  Synthetic oligonucleotide; CTG chr11 5326871 5326892 5326888 5326893 +
cttcattctagcttcattctag

SEQ ID NO: 101128 - DNA, 22 bp, Artificial Sequence
  Synthetic oligonucleotide; CTT chr11 5326874 5326895 5326891 5326896 +
cattctagcttcattctagatg

SEQ ID NO: 101129 - DNA, 22 bp, Artificial Sequence
  Synthetic oligonucleotide; TTC chr11 5326875 5326896 5326892 5326897 +
attctagcttcattctagatgt

SEQ ID NO: 101130 - DNA, 22 bp, Artificial Sequence
  Synthetic oligonucleotide; TTC chr11 5326879 5326900 5326896 5326901 +
tagcttcattctagatgttcta

SEQ ID NO: 101131 - DNA, 22 bp, Artificial Sequence
  Synthetic oligonucleotide; CTA chr11 5326881 5326902 5326898 5326903 +
gcttcattctagatgttctatt

SEQ ID NO: 101132 - DNA, 22 bp, Artificial Sequence
  Synthetic oligonucleotide; CTT chr11 5326885 5326906 5326902 5326907 +
cattctagatgttctattgacc

SEQ ID NO: 101133 - DNA, 22 bp, Artificial Sequence
  Synthetic oligonucleotide; TTC chr11 5326886 5326907 5326903 5326908 +
attctagatgttctattgacct

SEQ ID NO: 101134 - DNA, 22 bp, Artificial Sequence
  Synthetic oligonucleotide; TTC chr11 5326890 5326911 5326907 5326912 +
tagatgttctattgacctgaat

SEQ ID NO: 101135 - DNA, 22 bp, Artificial Sequence
  Synthetic oligonucleotide; CTA chr11 5326892 5326913 5326909 5326914 +
gatgttctattgacctgaattt

SEQ ID NO: 101136 - DNA, 22 bp, Artificial Sequence
  Synthetic oligonucleotide; TTC chr11 5326899 5326920 5326916 5326921 +
tattgacctgaatttcacatga

SEQ ID NO: 101137 - DNA, 22 bp, Artificial Sequence
  Synthetic oligonucleotide; CTA chr11 5326901 5326922 5326918 5326923 +
ttgacctgaatttcacatgatg

SEQ ID NO: 101138 - DNA, 22 bp, Artificial Sequence
  Synthetic oligonucleotide; TTG chr11 5326904 5326925 5326921 5326926 +
acctgaatttcacatgatgata

SEQ ID NO: 101139 - DNA, 22 bp, Artificial Sequence
  Synthetic oligonucleotide; CTG chr11 5326909 5326930 5326926 5326931 +
aatttcacatgatgatatattt

SEQ ID NO: 101140 - DNA, 22 bp, Artificial Sequence
  Synthetic oligonucleotide; TTT chr11 5326914 5326935 5326931 5326936 +
cacatgatgatatatttctaga

SEQ ID NO: 101141 - DNA, 22 bp, Artificial Sequence
  Synthetic oligonucleotide; TTC chr11 5326915 5326936 5326932 5326937 +
acatgatgatatatttctagat

SEQ ID NO: 101142 - DNA, 22 bp, Artificial Sequence
  Synthetic oligonucleotide; TTT chr11 5326931 5326952 5326948 5326953 +
ctagatgaataagattcctata

SEQ ID NO: 101143 - DNA, 22 bp, Artificial Sequence
  Synthetic oligonucleotide; TTC chr11 5326932 5326953 5326949 5326954 +
tagatgaataagattcctatac

SEQ ID NO: 101144 - DNA, 22 bp, Artificial Sequence
  Synthetic oligonucleotide; CTA chr11 5326934 5326955 5326951 5326956 +
gatgaataagattcctatactt

SEQ ID NO: 101145 - DNA, 22 bp, Artificial Sequence
  Synthetic oligonucleotide; TTC chr11 5326948 5326969 5326965 5326970 +
ctatacttgtagcaacactctc

SEQ ID NO: 101146 - DNA, 22 bp, Artificial Sequence
  Synthetic oligonucleotide; CTA chr11 5326951 5326972 5326968 5326973 +
tacttgtagcaacactctcacc

SEQ ID NO: 101147 - DNA, 22 bp, Artificial Sequence
  Synthetic oligonucleotide; CTT chr11 5326956 5326977 5326973 5326978 +
gtagcaacactctcaccaagat

SEQ ID NO: 101148 - DNA, 22 bp, Artificial Sequence
  Synthetic oligonucleotide; TTG chr11 5326957 5326978 5326974 5326979 +
tagcaacactctcaccaagatg

SEQ ID NO: 101149 - DNA, 22 bp, Artificial Sequence
  Synthetic oligonucleotide; CTC chr11 5326968 5326989 5326985 5326990 +
tcaccaagatgcataaatacat

SEQ ID NO: 101150 - DNA, 22 bp, Artificial Sequence
  Synthetic oligonucleotide; CTC chr11 5326970 5326991 5326987 5326992 +
accaagatgcataaatacatac

SEQ ID NO: 101151 - DNA, 22 bp, Artificial Sequence
  Synthetic oligonucleotide; TTG chr11 5327012 5327033 5327029 5327034 +
tcatgctcactttgagaacata

SEQ ID NO: 101152 - DNA, 22 bp, Artificial Sequence
  Synthetic oligonucleotide; CTC chr11 5327020 5327041 5327037 5327042 +
actttgagaacataatttgaat

SEQ ID NO: 101153 - DNA, 22 bp, Artificial Sequence
  Synthetic oligonucleotide; CTT chr11 5327024 5327045 5327041 5327046 +
tgagaacataatttgaatgtta

SEQ ID NO: 101154 - DNA, 22 bp, Artificial Sequence
  Synthetic oligonucleotide; TTT chr11 5327025 5327046 5327042 5327047 +
gagaacataatttgaatgttac

SEQ ID NO: 101155 - DNA, 22 bp, Artificial Sequence
  Synthetic oligonucleotide; TTG chr11 5327026 5327047 5327043 5327048 +
agaacataatttgaatgttacc

SEQ ID NO: 101156 - DNA, 22 bp, Artificial Sequence
  Synthetic oligonucleotide; TTT chr11 5327038 5327059 5327055 5327060 +
gaatgttaccagatacaaggga

SEQ ID NO: 101157 - DNA, 22 bp, Artificial Sequence
  Synthetic oligonucleotide; TTG chr11 5327039 5327060 5327056 5327061 +
aatgttaccagatacaagggag

SEQ ID NO: 101158 - DNA, 22 bp, Artificial Sequence
  Synthetic oligonucleotide; TTA chr11 5327046 5327067 5327063 5327068 +
ccagatacaagggagtaaagga

SEQ ID NO: 101159 - DNA, 22 bp, Artificial Sequence
  Synthetic oligonucleotide; CTT chr11 5327082 5327103 5327099 5327104 +
tgtagtatgaagaaggaacaga

SEQ ID NO: 101160 - DNA, 22 bp, Artificial Sequence
  Synthetic oligonucleotide; TTT chr11 5327083 5327104 5327100 5327105 +
gtagtatgaagaaggaacagac

SEQ ID NO: 101161 - DNA, 22 bp, Artificial Sequence
  Synthetic oligonucleotide; TTG chr11 5327084 5327105 5327101 5327106 +
tagtatgaagaaggaacagaca

SEQ ID NO: 101162 - DNA, 22 bp, Artificial Sequence
  Synthetic oligonucleotide; CTG chr11 5327117 5327138 5327134 5327139 +
ttagcctcaagaaaatgtagta

SEQ ID NO: 101163 - DNA, 22 bp, Artificial Sequence
  Synthetic oligonucleotide; TTA chr11 5327120 5327141 5327137 5327142 +
gcctcaagaaaatgtagtaaat

SEQ ID NO: 101164 - DNA, 22 bp, Artificial Sequence
  Synthetic oligonucleotide; CTC chr11 5327125 5327146 5327142 5327147 +
aagaaaatgtagtaaatagtga

SEQ ID NO: 101165 - DNA, 22 bp, Artificial Sequence
  Synthetic oligonucleotide; CTA chr11 5327152 5327173 5327169 5327174 +
ttatacagtctacataaacaag

SEQ ID NO: 101166 - DNA, 22 bp, Artificial Sequence
  Synthetic oligonucleotide; TTA chr11 5327155 5327176 5327172 5327177 +
tacagtctacataaacaagtga

SEQ ID NO: 101167 - DNA, 22 bp, Artificial Sequence
  Synthetic oligonucleotide; CTA chr11 5327164 5327185 5327181 5327186 +
cataaacaagtgaaagaggaaa

SEQ ID NO: 101168 - DNA, 22 bp, Artificial Sequence
  Synthetic oligonucleotide; TTC chr11 5327197 5327218 5327214 5327219 +
ctcctttccctcatcttctcat

SEQ ID NO: 101169 - DNA, 22 bp, Artificial Sequence
  Synthetic oligonucleotide; CTC chr11 5327200 5327221 5327217 5327222 +
ctttccctcatcttctcatttc

SEQ ID NO: 101170 - DNA, 22 bp, Artificial Sequence
  Synthetic oligonucleotide; CTT chr11 5327203 5327224 5327220 5327225 +
tccctcatcttctcatttccta

SEQ ID NO: 101171 - DNA, 22 bp, Artificial Sequence
  Synthetic oligonucleotide; TTT chr11 5327204 5327225 5327221 5327226 +
ccctcatcttctcatttcctac

SEQ ID NO: 101172 - DNA, 22 bp, Artificial Sequence
  Synthetic oligonucleotide; TTC chr11 5327205 5327226 5327222 5327227 +
cctcatcttctcatttcctact

SEQ ID NO: 101173 - DNA, 22 bp, Artificial Sequence
  Synthetic oligonucleotide; CTC chr11 5327209 5327230 5327226 5327231 +
atcttctcatttcctactctgc

SEQ ID NO: 101174 - DNA, 22 bp, Artificial Sequence
  Synthetic oligonucleotide; CTT chr11 5327214 5327235 5327231 5327236 +
ctcatttcctactctgccctcc

SEQ ID NO: 101175 - DNA, 22 bp, Artificial Sequence
  Synthetic oligonucleotide; TTC chr11 5327215 5327236 5327232 5327237 +
tcatttcctactctgccctcct

SEQ ID NO: 101176 - DNA, 22 bp, Artificial Sequence
  Synthetic oligonucleotide; CTC chr11 5327217 5327238 5327234 5327239 +
atttcctactctgccctccttc

SEQ ID NO: 101177 - DNA, 22 bp, Artificial Sequence
  Synthetic oligonucleotide; TTT chr11 5327221 5327242 5327238 5327243 +
cctactctgccctccttctgag

SEQ ID NO: 101178 - DNA, 22 bp, Artificial Sequence
  Synthetic oligonucleotide; TTC chr11 5327222 5327243 5327239 5327244 +
ctactctgccctccttctgagt

SEQ ID NO: 101179 - DNA, 22 bp, Artificial Sequence
  Synthetic oligonucleotide; CTA chr11 5327225 5327246 5327242 5327247 +
ctctgccctccttctgagttgg

SEQ ID NO: 101180 - DNA, 22 bp, Artificial Sequence
  Synthetic oligonucleotide; CTC chr11 5327228 5327249 5327245 5327250 +
tgccctccttctgagttggatg

SEQ ID NO: 101181 - DNA, 22 bp, Artificial Sequence
  Synthetic oligonucleotide; CTG chr11 5327230 5327251 5327247 5327252 +
ccctccttctgagttggatgga

SEQ ID NO: 101182 - DNA, 22 bp, Artificial Sequence
  Synthetic oligonucleotide; CTC chr11 5327235 5327256 5327252 5327257 +
cttctgagttggatggaagatg

SEQ ID NO: 101183 - DNA, 22 bp, Artificial Sequence
  Synthetic oligonucleotide; CTT chr11 5327238 5327259 5327255 5327260 +
ctgagttggatggaagatgtgt

SEQ ID NO: 101184 - DNA, 22 bp, Artificial Sequence
  Synthetic oligonucleotide; TTC chr11 5327239 5327260 5327256 5327261 +
tgagttggatggaagatgtgtc

SEQ ID NO: 101185 - DNA, 22 bp, Artificial Sequence
  Synthetic oligonucleotide; CTG chr11 5327241 5327262 5327258 5327263 +
agttggatggaagatgtgtccc

SEQ ID NO: 101186 - DNA, 22 bp, Artificial Sequence
  Synthetic oligonucleotide; TTG chr11 5327246 5327267 5327263 5327268 +
gatggaagatgtgtccccgcac

SEQ ID NO: 101187 - DNA, 22 bp, Artificial Sequence
  Synthetic oligonucleotide; CTT chr11 5327271 5327292 5327288 5327293 +
cctaaggagatgggccctgtct

SEQ ID NO: 101188 - DNA, 22 bp, Artificial Sequence
  Synthetic oligonucleotide; TTC chr11 5327272 5327293 5327289 5327294 +
ctaaggagatgggccctgtctc

SEQ ID NO: 101189 - DNA, 22 bp, Artificial Sequence
  Synthetic oligonucleotide; CTA chr11 5327275 5327296 5327292 5327297 +
aggagatgggccctgtctctag

SEQ ID NO: 101190 - DNA, 22 bp, Artificial Sequence
  Synthetic oligonucleotide; CTG chr11 5327290 5327311 5327307 5327312 +
tctctagaatttttctagtgag

SEQ ID NO: 101191 - DNA, 22 bp, Artificial Sequence
  Synthetic oligonucleotide; CTC chr11 5327294 5327315 5327311 5327316 +
tagaatttttctagtgagtccc

SEQ ID NO: 101192 - DNA, 22 bp, Artificial Sequence
  Synthetic oligonucleotide; CTA chr11 5327296 5327317 5327313 5327318 +
gaatttttctagtgagtcccac

SEQ ID NO: 101193 - DNA, 22 bp, Artificial Sequence
  Synthetic oligonucleotide; TTT chr11 5327302 5327323 5327319 5327324 +
ttctagtgagtcccactgacta

SEQ ID NO: 101194 - DNA, 22 bp, Artificial Sequence
  Synthetic oligonucleotide; TTT chr11 5327303 5327324 5327320 5327325 +
tctagtgagtcccactgactac

SEQ ID NO: 101195 - DNA, 22 bp, Artificial Sequence
  Synthetic oligonucleotide; TTT chr11 5327304 5327325 5327321 5327326 +
ctagtgagtcccactgactact

SEQ ID NO: 101196 - DNA, 22 bp, Artificial Sequence
  Synthetic oligonucleotide; TTC chr11 5327305 5327326 5327322 5327327 +
tagtgagtcccactgactactc

SEQ ID NO: 101197 - DNA, 22 bp, Artificial Sequence
  Synthetic oligonucleotide; CTA chr11 5327307 5327328 5327324 5327329 +
gtgagtcccactgactactcat

SEQ ID NO: 101198 - DNA, 22 bp, Artificial Sequence
  Synthetic oligonucleotide; CTG chr11 5327320 5327341 5327337 5327342 +
actactcatgccatctcttaga

SEQ ID NO: 101199 - DNA, 22 bp, Artificial Sequence
  Synthetic oligonucleotide; CTA chr11 5327324 5327345 5327341 5327346 +
ctcatgccatctcttagagcag

SEQ ID NO: 101200 - DNA, 22 bp, Artificial Sequence
  Synthetic oligonucleotide; CTC chr11 5327327 5327348 5327344 5327349 +
atgccatctcttagagcagttc

SEQ ID NO: 101201 - DNA, 22 bp, Artificial Sequence
  Synthetic oligonucleotide; CTC chr11 5327337 5327358 5327354 5327359 +
ttagagcagttcttcaaacaaa

SEQ ID NO: 101202 - DNA, 22 bp, Artificial Sequence
  Synthetic oligonucleotide; CTT chr11 5327339 5327360 5327356 5327361 +
agagcagttcttcaaacaaaca

SEQ ID NO: 101203 - DNA, 22 bp, Artificial Sequence
  Synthetic oligonucleotide; TTA chr11 5327340 5327361 5327357 5327362 +
gagcagttcttcaaacaaacac

SEQ ID NO: 101204 - DNA, 22 bp, Artificial Sequence
  Synthetic oligonucleotide; TTC chr11 5327349 5327370 5327366 5327371 +
ttcaaacaaacacacagacaca

SEQ ID NO: 101205 - DNA, 22 bp, Artificial Sequence
  Synthetic oligonucleotide; CTT chr11 5327351 5327372 5327368 5327373 +
caaacaaacacacagacacaca

SEQ ID NO: 101206 - DNA, 22 bp, Artificial Sequence
  Synthetic oligonucleotide; TTC chr11 5327352 5327373 5327369 5327374 +
aaacaaacacacagacacacat

SEQ ID NO: 101207 - DNA, 22 bp, Artificial Sequence
  Synthetic oligonucleotide; TTT chr11 5327388 5327409 5327405 5327410 +
caaggggtgttgtttggatctt

SEQ ID NO: 101208 - DNA, 22 bp, Artificial Sequence
  Synthetic oligonucleotide; TTC chr11 5327389 5327410 5327406 5327411 +
aaggggtgttgtttggatctta

SEQ ID NO: 101209 - DNA, 22 bp, Artificial Sequence
  Synthetic oligonucleotide; TTG chr11 5327400 5327421 5327417 5327422 +
tttggatcttataaattaaatt

SEQ ID NO: 101210 - DNA, 22 bp, Artificial Sequence
  Synthetic oligonucleotide; TTT chr11 5327403 5327424 5327420 5327425 +
ggatcttataaattaaattgtt

SEQ ID NO: 101211 - DNA, 22 bp, Artificial Sequence
  Synthetic oligonucleotide; TTG chr11 5327404 5327425 5327421 5327426 +
gatcttataaattaaattgtta

SEQ ID NO: 101212 - DNA, 22 bp, Artificial Sequence
  Synthetic oligonucleotide; CTT chr11 5327410 5327431 5327427 5327432 +
ataaattaaattgttatatgtt

SEQ ID NO: 101213 - DNA, 22 bp, Artificial Sequence
  Synthetic oligonucleotide; TTA chr11 5327411 5327432 5327428 5327433 +
taaattaaattgttatatgtta

SEQ ID NO: 101214 - DNA, 22 bp, Artificial Sequence
  Synthetic oligonucleotide; TTA chr11 5327418 5327439 5327435 5327440 +
aattgttatatgttaaaatggt

SEQ ID NO: 101215 - DNA, 22 bp, Artificial Sequence
  Synthetic oligonucleotide; TTG chr11 5327423 5327444 5327440 5327445 +
ttatatgttaaaatggtgactt

SEQ ID NO: 101216 - DNA, 22 bp, Artificial Sequence
  Synthetic oligonucleotide; TTA chr11 5327426 5327447 5327443 5327448 +
tatgttaaaatggtgacttttc

SEQ ID NO: 101217 - DNA, 22 bp, Artificial Sequence
  Synthetic oligonucleotide; TTA chr11 5327433 5327454 5327450 5327455 +
aaatggtgacttttctttctat

SEQ ID NO: 101218 - DNA, 22 bp, Artificial Sequence
  Synthetic oligonucleotide; CTT chr11 5327445 5327466 5327462 5327467 +
ttctttctataaatttcaggat

SEQ ID NO: 101219 - DNA, 22 bp, Artificial Sequence
  Synthetic oligonucleotide; TTT chr11 5327446 5327467 5327463 5327468 +
tctttctataaatttcaggatc

SEQ ID NO: 101220 - DNA, 22 bp, Artificial Sequence
  Synthetic oligonucleotide; TTT chr11 5327447 5327468 5327464 5327469 +
ctttctataaatttcaggatct

SEQ ID NO: 101221 - DNA, 22 bp, Artificial Sequence
  Synthetic oligonucleotide; TTC chr11 5327448 5327469 5327465 5327470 +
tttctataaatttcaggatctt

SEQ ID NO: 101222 - DNA, 22 bp, Artificial Sequence
  Synthetic oligonucleotide; CTT chr11 5327450 5327471 5327467 5327472 +
tctataaatttcaggatcttag

SEQ ID NO: 101223 - DNA, 22 bp, Artificial Sequence
  Synthetic oligonucleotide; TTT chr11 5327451 5327472 5327468 5327473 +
ctataaatttcaggatcttagc

SEQ ID NO: 101224 - DNA, 22 bp, Artificial Sequence
  Synthetic oligonucleotide; TTC chr11 5327452 5327473 5327469 5327474 +
tataaatttcaggatcttagca

SEQ ID NO: 101225 - DNA, 22 bp, Artificial Sequence
  Synthetic oligonucleotide; CTA chr11 5327454 5327475 5327471 5327476 +
taaatttcaggatcttagcaga

SEQ ID NO: 101226 - DNA, 22 bp, Artificial Sequence
  Synthetic oligonucleotide; TTT chr11 5327461 5327482 5327478 5327483 +
caggatcttagcagagtgcaga

SEQ ID NO: 101227 - DNA, 22 bp, Artificial Sequence
  Synthetic oligonucleotide; TTC chr11 5327462 5327483 5327479 5327484 +
aggatcttagcagagtgcagaa

SEQ ID NO: 101228 - DNA, 22 bp, Artificial Sequence
  Synthetic oligonucleotide; CTT chr11 5327470 5327491 5327487 5327492 +
agcagagtgcagaagctcagcc

SEQ ID NO: 101229 - DNA, 22 bp, Artificial Sequence
  Synthetic oligonucleotide; TTA chr11 5327471 5327492 5327488 5327493 +
gcagagtgcagaagctcagcct

SEQ ID NO: 101230 - DNA, 22 bp, Artificial Sequence
  Synthetic oligonucleotide; CTC chr11 5327488 5327509 5327505 5327510 +
agcctgtttaggttcagaactc

SEQ ID NO: 101231 - DNA, 22 bp, Artificial Sequence
  Synthetic oligonucleotide; CTG chr11 5327494 5327515 5327511 5327516 +
tttaggttcagaactccgtgct

SEQ ID NO: 101232 - DNA, 22 bp, Artificial Sequence
  Synthetic oligonucleotide; TTT chr11 5327497 5327518 5327514 5327519 +
aggttcagaactccgtgctctc

SEQ ID NO: 101233 - DNA, 22 bp, Artificial Sequence
  Synthetic oligonucleotide; TTA chr11 5327498 5327519 5327515 5327520 +
ggttcagaactccgtgctctca

SEQ ID NO: 101234 - DNA, 22 bp, Artificial Sequence
  Synthetic oligonucleotide; TTC chr11 5327503 5327524 5327520 5327525 +
agaactccgtgctctcacgcat

SEQ ID NO: 101235 - DNA, 22 bp, Artificial Sequence
  Synthetic oligonucleotide; CTC chr11 5327510 5327531 5327527 5327532 +
cgtgctctcacgcattgtcttt

SEQ ID NO: 101236 - DNA, 22 bp, Artificial Sequence
  Synthetic oligonucleotide; CTC chr11 5327517 5327538 5327534 5327539 +
tcacgcattgtctttaatcttc

SEQ ID NO: 101237 - DNA, 22 bp, Artificial Sequence
  Synthetic oligonucleotide; CTC chr11 5327519 5327540 5327536 5327541 +
acgcattgtctttaatcttcaa

SEQ ID NO: 101238 - DNA, 22 bp, Artificial Sequence
  Synthetic oligonucleotide; TTG chr11 5327527 5327548 5327544 5327549 +
tctttaatcttcaaaaaagtga

SEQ ID NO: 101239 - DNA, 22 bp, Artificial Sequence
  Synthetic oligonucleotide; CTT chr11 5327531 5327552 5327548 5327553 +
taatcttcaaaaaagtgagtcc

SEQ ID NO: 101240 - DNA, 22 bp, Artificial Sequence
  Synthetic oligonucleotide; TTT chr11 5327532 5327553 5327549 5327554 +
aatcttcaaaaaagtgagtcct

SEQ ID NO: 101241 - DNA, 22 bp, Artificial Sequence
  Synthetic oligonucleotide; TTA chr11 5327533 5327554 5327550 5327555 +
atcttcaaaaaagtgagtcctc

SEQ ID NO: 101242 - DNA, 22 bp, Artificial Sequence
  Synthetic oligonucleotide; CTT chr11 5327538 5327559 5327555 5327560 +
caaaaaagtgagtcctccattt

SEQ ID NO: 101243 - DNA, 22 bp, Artificial Sequence
  Synthetic oligonucleotide; TTC chr11 5327539 5327560 5327556 5327561 +
aaaaaagtgagtcctccatttg

SEQ ID NO: 101244 - DNA, 22 bp, Artificial Sequence
  Synthetic oligonucleotide; CTC chr11 5327555 5327576 5327572 5327577 +
catttggccccagtcctgaggg

SEQ ID NO: 101245 - DNA, 22 bp, Artificial Sequence
  Synthetic oligonucleotide; TTT chr11 5327560 5327581 5327577 5327582 +
ggccccagtcctgagggcctga

SEQ ID NO: 101246 - DNA, 22 bp, Artificial Sequence
  Synthetic oligonucleotide; TTG chr11 5327561 5327582 5327578 5327583 +
gccccagtcctgagggcctgac

SEQ ID NO: 101247 - DNA, 22 bp, Artificial Sequence
  Synthetic oligonucleotide; CTG chr11 5327573 5327594 5327590 5327595 +
agggcctgacagttgggactac

SEQ ID NO: 101248 - DNA, 22 bp, Artificial Sequence
  Synthetic oligonucleotide; CTG chr11 5327581 5327602 5327598 5327603 +
acagttgggactacccaactct

SEQ ID NO: 101249 - DNA, 22 bp, Artificial Sequence
  Synthetic oligonucleotide; TTG chr11 5327588 5327609 5327605 5327610 +
ggactacccaactctcagattt

SEQ ID NO: 101250 - DNA, 22 bp, Artificial Sequence
  Synthetic oligonucleotide; CTA chr11 5327594 5327615 5327611 5327616 +
cccaactctcagatttctattg

SEQ ID NO: 101251 - DNA, 22 bp, Artificial Sequence
  Synthetic oligonucleotide; CTC chr11 5327602 5327623 5327619 5327624 +
tcagatttctattgtccacaag

SEQ ID NO: 101252 - DNA, 22 bp, Artificial Sequence
  Synthetic oligonucleotide; CTC chr11 5327604 5327625 5327621 5327626 +
agatttctattgtccacaagtt

SEQ ID NO: 101253 - DNA, 22 bp, Artificial Sequence
  Synthetic oligonucleotide; TTT chr11 5327610 5327631 5327627 5327632 +
ctattgtccacaagttaaattc

SEQ ID NO: 101254 - DNA, 22 bp, Artificial Sequence
  Synthetic oligonucleotide; TTC chr11 5327611 5327632 5327628 5327633 +
tattgtccacaagttaaattcc

SEQ ID NO: 101255 - DNA, 22 bp, Artificial Sequence
  Synthetic oligonucleotide; CTA chr11 5327613 5327634 5327630 5327635 +
ttgtccacaagttaaattcctc

SEQ ID NO: 101256 - DNA, 22 bp, Artificial Sequence
  Synthetic oligonucleotide; TTG chr11 5327616 5327637 5327633 5327638 +
tccacaagttaaattcctcctg

SEQ ID NO: 101257 - DNA, 22 bp, Artificial Sequence
  Synthetic oligonucleotide; TTA chr11 5327627 5327648 5327644 5327649 +
aattcctcctgccttctccaac

SEQ ID NO: 101258 - DNA, 22 bp, Artificial Sequence
  Synthetic oligonucleotide; TTC chr11 5327632 5327653 5327649 5327654 +
ctcctgccttctccaacccagt

SEQ ID NO: 101259 - DNA, 22 bp, Artificial Sequence
  Synthetic oligonucleotide; CTC chr11 5327635 5327656 5327652 5327657 +
ctgccttctccaacccagtcca

SEQ ID NO: 101260 - DNA, 22 bp, Artificial Sequence
  Synthetic oligonucleotide; CTG chr11 5327638 5327659 5327655 5327660 +
ccttctccaacccagtccaata

SEQ ID NO: 101261 - DNA, 22 bp, Artificial Sequence
  Synthetic oligonucleotide; CTT chr11 5327642 5327663 5327659 5327664 +
ctccaacccagtccaatatatt

SEQ ID NO: 101262 - DNA, 22 bp, Artificial Sequence
  Synthetic oligonucleotide; TTC chr11 5327643 5327664 5327660 5327665 +
tccaacccagtccaatatatta

SEQ ID NO: 101263 - DNA, 22 bp, Artificial Sequence
  Synthetic oligonucleotide; CTC chr11 5327645 5327666 5327662 5327667 +
caacccagtccaatatattatc

SEQ ID NO: 101264 - DNA, 22 bp, Artificial Sequence
  Synthetic oligonucleotide; TTA chr11 5327665 5327686 5327682 5327687 +
tcatctgccatcaatatgattt

SEQ ID NO: 101265 - DNA, 22 bp, Artificial Sequence
  Synthetic oligonucleotide; CTG chr11 5327672 5327693 5327689 5327694 +
ccatcaatatgatttcattttc

SEQ ID NO: 101266 - DNA, 22 bp, Artificial Sequence
  Synthetic oligonucleotide; TTT chr11 5327687 5327708 5327704 5327709 +
cattttcaatccaatttgcttt

SEQ ID NO: 101267 - DNA, 22 bp, Artificial Sequence
  Synthetic oligonucleotide; TTC chr11 5327688 5327709 5327705 5327710 +
attttcaatccaatttgctttc

SEQ ID NO: 101268 - DNA, 22 bp, Artificial Sequence
  Synthetic oligonucleotide; TTT chr11 5327692 5327713 5327709 5327714 +
tcaatccaatttgctttcttag

SEQ ID NO: 101269 - DNA, 22 bp, Artificial Sequence
  Synthetic oligonucleotide; TTT chr11 5327693 5327714 5327710 5327715 +
caatccaatttgctttcttaga

SEQ ID NO: 101270 - DNA, 22 bp, Artificial Sequence
  Synthetic oligonucleotide; TTC chr11 5327694 5327715 5327711 5327716 +
aatccaatttgctttcttagat

SEQ ID NO: 101271 - DNA, 22 bp, Artificial Sequence
  Synthetic oligonucleotide; TTT chr11 5327704 5327725 5327721 5327726 +
gctttcttagatcttaatttgg

SEQ ID NO: 101272 - DNA, 22 bp, Artificial Sequence
  Synthetic oligonucleotide; TTG chr11 5327705 5327726 5327722 5327727 +
ctttcttagatcttaatttggc

SEQ ID NO: 101273 - DNA, 22 bp, Artificial Sequence
  Synthetic oligonucleotide; CTT chr11 5327708 5327729 5327725 5327730 +
tcttagatcttaatttggctgc

SEQ ID NO: 101274 - DNA, 22 bp, Artificial Sequence
  Synthetic oligonucleotide; TTT chr11 5327709 5327730 5327726 5327731 +
cttagatcttaatttggctgcc

SEQ ID NO: 101275 - DNA, 22 bp, Artificial Sequence
  Synthetic oligonucleotide; TTC chr11 5327710 5327731 5327727 5327732 +
ttagatcttaatttggctgccc

SEQ ID NO: 101276 - DNA, 22 bp, Artificial Sequence
  Synthetic oligonucleotide; CTT chr11 5327712 5327733 5327729 5327734 +
agatcttaatttggctgccctt

SEQ ID NO: 101277 - DNA, 22 bp, Artificial Sequence
  Synthetic oligonucleotide; TTA chr11 5327713 5327734 5327730 5327735 +
gatcttaatttggctgcccttt

SEQ ID NO: 101278 - DNA, 22 bp, Artificial Sequence
  Synthetic oligonucleotide; CTT chr11 5327719 5327740 5327736 5327741 +
aatttggctgcccttttctaag

SEQ ID NO: 101279 - DNA, 22 bp, Artificial Sequence
  Synthetic oligonucleotide; TTA chr11 5327720 5327741 5327737 5327742 +
atttggctgcccttttctaagc

SEQ ID NO: 101280 - DNA, 22 bp, Artificial Sequence
  Synthetic oligonucleotide; TTT chr11 5327724 5327745 5327741 5327746 +
ggctgcccttttctaagccttt

SEQ ID NO: 101281 - DNA, 22 bp, Artificial Sequence
  Synthetic oligonucleotide; TTG chr11 5327725 5327746 5327742 5327747 +
gctgcccttttctaagcctttc

SEQ ID NO: 101282 - DNA, 22 bp, Artificial Sequence
  Synthetic oligonucleotide; CTG chr11 5327729 5327750 5327746 5327751 +
cccttttctaagcctttcaact

SEQ ID NO: 101283 - DNA, 22 bp, Artificial Sequence
  Synthetic oligonucleotide; CTT chr11 5327734 5327755 5327751 5327756 +
ttctaagcctttcaactcgatt

SEQ ID NO: 101284 - DNA, 22 bp, Artificial Sequence
  Synthetic oligonucleotide; TTT chr11 5327735 5327756 5327752 5327757 +
tctaagcctttcaactcgattc

SEQ ID NO: 101285 - DNA, 22 bp, Artificial Sequence
  Synthetic oligonucleotide; TTT chr11 5327736 5327757 5327753 5327758 +
ctaagcctttcaactcgattca

SEQ ID NO: 101286 - DNA, 22 bp, Artificial Sequence
  Synthetic oligonucleotide; TTC chr11 5327737 5327758 5327754 5327759 +
taagcctttcaactcgattcag

SEQ ID NO: 101287 - DNA, 22 bp, Artificial Sequence
  Synthetic oligonucleotide; CTA chr11 5327739 5327760 5327756 5327761 +
agcctttcaactcgattcagaa

SEQ ID NO: 101288 - DNA, 22 bp, Artificial Sequence
  Synthetic oligonucleotide; CTT chr11 5327745 5327766 5327762 5327767 +
tcaactcgattcagaatttttt

SEQ ID NO: 101289 - DNA, 22 bp, Artificial Sequence
  Synthetic oligonucleotide; TTT chr11 5327746 5327767 5327763 5327768 +
caactcgattcagaattttttg

SEQ ID NO: 101290 - DNA, 22 bp, Artificial Sequence
  Synthetic oligonucleotide; TTC chr11 5327747 5327768 5327764 5327769 +
aactcgattcagaattttttgt

SEQ ID NO: 101291 - DNA, 22 bp, Artificial Sequence
  Synthetic oligonucleotide; CTC chr11 5327752 5327773 5327769 5327774 +
gattcagaattttttgtctact

SEQ ID NO: 101292 - DNA, 22 bp, Artificial Sequence
  Synthetic oligonucleotide; TTC chr11 5327757 5327778 5327774 5327779 +
agaattttttgtctactcttca

SEQ ID NO: 101293 - DNA, 22 bp, Artificial Sequence
  Synthetic oligonucleotide; TTT chr11 5327764 5327785 5327781 5327786 +
tttgtctactcttcagagaaaa

SEQ ID NO: 101294 - DNA, 22 bp, Artificial Sequence
  Synthetic oligonucleotide; TTT chr11 5327765 5327786 5327782 5327787 +
ttgtctactcttcagagaaaaa

SEQ ID NO: 101295 - DNA, 22 bp, Artificial Sequence
  Synthetic oligonucleotide; TTT chr11 5327766 5327787 5327783 5327788 +
tgtctactcttcagagaaaaac

SEQ ID NO: 101296 - DNA, 22 bp, Artificial Sequence
  Synthetic oligonucleotide; TTT chr11 5327767 5327788 5327784 5327789 +
gtctactcttcagagaaaaact

SEQ ID NO: 101297 - DNA, 22 bp, Artificial Sequence
  Synthetic oligonucleotide; TTG chr11 5327768 5327789 5327785 5327790 +
tctactcttcagagaaaaacta

SEQ ID NO: 101298 - DNA, 22 bp, Artificial Sequence
  Synthetic oligonucleotide; CTA chr11 5327772 5327793 5327789 5327794 +
ctcttcagagaaaaactatcaa

SEQ ID NO: 101299 - DNA, 22 bp, Artificial Sequence
  Synthetic oligonucleotide; CTC chr11 5327775 5327796 5327792 5327797 +
ttcagagaaaaactatcaacaa

SEQ ID NO: 101300 - DNA, 22 bp, Artificial Sequence
  Synthetic oligonucleotide; CTT chr11 5327777 5327798 5327794 5327799 +
cagagaaaaactatcaacaaaa

SEQ ID NO: 101301 - DNA, 22 bp, Artificial Sequence
  Synthetic oligonucleotide; TTC chr11 5327778 5327799 5327795 5327800 +
agagaaaaactatcaacaaaaa

SEQ ID NO: 101302 - DNA, 22 bp, Artificial Sequence
  Synthetic oligonucleotide; CTA chr11 5327790 5327811 5327807 5327812 +
tcaacaaaaaatcctctgaaca

SEQ ID NO: 101303 - DNA, 22 bp, Artificial Sequence
  Synthetic oligonucleotide; CTC chr11 5327806 5327827 5327823 5327828 +
tgaacaggaaagttatcaataa

SEQ ID NO: 101304 - DNA, 22 bp, Artificial Sequence
  Synthetic oligonucleotide; CTG chr11 5327808 5327829 5327825 5327830 +
aacaggaaagttatcaataaaa

SEQ ID NO: 101305 - DNA, 22 bp, Artificial Sequence
  Synthetic oligonucleotide; TTA chr11 5327821 5327842 5327838 5327843 +
tcaataaaaaataaacgtaaaa

SEQ ID NO: 101306 - DNA, 22 bp, Artificial Sequence
  Synthetic oligonucleotide; CTT chr11 5327852 5327873 5327869 5327874 +
tctggataaacaaaaactgagt

SEQ ID NO: 101307 - DNA, 22 bp, Artificial Sequence
  Synthetic oligonucleotide; TTT chr11 5327853 5327874 5327870 5327875 +
ctggataaacaaaaactgagtt

SEQ ID NO: 101308 - DNA, 22 bp, Artificial Sequence
  Synthetic oligonucleotide; TTC chr11 5327854 5327875 5327871 5327876 +
tggataaacaaaaactgagttg

SEQ ID NO: 101309 - DNA, 22 bp, Artificial Sequence
  Synthetic oligonucleotide; CTG chr11 5327856 5327877 5327873 5327878 +
gataaacaaaaactgagttgat

SEQ ID NO: 101310 - DNA, 22 bp, Artificial Sequence
  Synthetic oligonucleotide; CTG chr11 5327871 5327892 5327888 5327893 +
agttgatttcaactaagttgaa

SEQ ID NO: 101311 - DNA, 22 bp, Artificial Sequence
  Synthetic oligonucleotide; TTG chr11 5327876 5327897 5327893 5327898 +
atttcaactaagttgaaaccaa

SEQ ID NO: 101312 - DNA, 22 bp, Artificial Sequence
  Synthetic oligonucleotide; TTT chr11 5327880 5327901 5327897 5327902 +
caactaagttgaaaccaaatga

SEQ ID NO: 101313 - DNA, 22 bp, Artificial Sequence
  Synthetic oligonucleotide; TTC chr11 5327881 5327902 5327898 5327903 +
aactaagttgaaaccaaatgac

SEQ ID NO: 101314 - DNA, 22 bp, Artificial Sequence
  Synthetic oligonucleotide; CTA chr11 5327886 5327907 5327903 5327908 +
agttgaaaccaaatgaccaaag

SEQ ID NO: 101315 - DNA, 22 bp, Artificial Sequence
  Synthetic oligonucleotide; TTG chr11 5327891 5327912 5327908 5327913 +
aaaccaaatgaccaaagatgat

SEQ ID NO: 101316 - DNA, 22 bp, Artificial Sequence
  Synthetic oligonucleotide; TTT chr11 5327918 5327939 5327935 5327940 +
gaatctacataaaatgacaaaa

SEQ ID NO: 101317 - DNA, 22 bp, Artificial Sequence
  Synthetic oligonucleotide; TTG chr11 5327919 5327940 5327936 5327941 +
aatctacataaaatgacaaaag

SEQ ID NO: 101318 - DNA, 22 bp, Artificial Sequence
  Synthetic oligonucleotide; CTA chr11 5327925 5327946 5327942 5327947 +
cataaaatgacaaaagcaccag

SEQ ID NO: 101319 - DNA, 22 bp, Artificial Sequence
  Synthetic oligonucleotide; TTA chr11 5327967 5327988 5327984 5327989 +
tagaagacattatgcatacata

SEQ ID NO: 101320 - DNA, 22 bp, Artificial Sequence
  Synthetic oligonucleotide; TTA chr11 5327979 5328000 5327996 5328001 +
tgcatacatattcctttctgct

SEQ ID NO: 101321 - DNA, 22 bp, Artificial Sequence
  Synthetic oligonucleotide; TTC chr11 5327992 5328013 5328009 5328014 +
ctttctgcttcttattttcaaa

SEQ ID NO: 101322 - DNA, 22 bp, Artificial Sequence
  Synthetic oligonucleotide; CTT chr11 5327995 5328016 5328012 5328017 +
tctgcttcttattttcaaaaat

SEQ ID NO: 101323 - DNA, 22 bp, Artificial Sequence
  Synthetic oligonucleotide; TTT chr11 5327996 5328017 5328013 5328018 +
ctgcttcttattttcaaaaatg

SEQ ID NO: 101324 - DNA, 22 bp, Artificial Sequence
  Synthetic oligonucleotide; TTC chr11 5327997 5328018 5328014 5328019 +
tgcttcttattttcaaaaatga

SEQ ID NO: 101325 - DNA, 22 bp, Artificial Sequence
  Synthetic oligonucleotide; CTG chr11 5327999 5328020 5328016 5328021 +
cttcttattttcaaaaatgaat

SEQ ID NO: 101326 - DNA, 22 bp, Artificial Sequence
  Synthetic oligonucleotide; CTT chr11 5328002 5328023 5328019 5328024 +
cttattttcaaaaatgaatgta

SEQ ID NO: 101327 - DNA, 22 bp, Artificial Sequence
  Synthetic oligonucleotide; TTC chr11 5328003 5328024 5328020 5328025 +
ttattttcaaaaatgaatgtat

SEQ ID NO: 101328 - DNA, 22 bp, Artificial Sequence
  Synthetic oligonucleotide; CTT chr11 5328005 5328026 5328022 5328027 +
attttcaaaaatgaatgtatta

SEQ ID NO: 101329 - DNA, 22 bp, Artificial Sequence
  Synthetic oligonucleotide; TTA chr11 5328006 5328027 5328023 5328028 +
ttttcaaaaatgaatgtattac

SEQ ID NO: 101330 - DNA, 22 bp, Artificial Sequence
  Synthetic oligonucleotide; TTT chr11 5328009 5328030 5328026 5328031 +
tcaaaaatgaatgtattacaat

SEQ ID NO: 101331 - DNA, 22 bp, Artificial Sequence
  Synthetic oligonucleotide; TTT chr11 5328010 5328031 5328027 5328032 +
caaaaatgaatgtattacaata

SEQ ID NO: 101332 - DNA, 22 bp, Artificial Sequence
  Synthetic oligonucleotide; TTC chr11 5328011 5328032 5328028 5328033 +
aaaaatgaatgtattacaataa

SEQ ID NO: 101333 - DNA, 22 bp, Artificial Sequence
  Synthetic oligonucleotide; TTA chr11 5328027 5328048 5328044 5328049 +
caataaaaaatagaattgcatt

SEQ ID NO: 101334 - DNA, 22 bp, Artificial Sequence
  Synthetic oligonucleotide; TTG chr11 5328045 5328066 5328062 5328067 +
cattgctggaactattacaaat

SEQ ID NO: 101335 - DNA, 22 bp, Artificial Sequence
  Synthetic oligonucleotide; TTG chr11 5328050 5328071 5328067 5328072 +
ctggaactattacaaatataaa

SEQ ID NO: 101336 - DNA, 22 bp, Artificial Sequence
  Synthetic oligonucleotide; CTG chr11 5328053 5328074 5328070 5328075 +
gaactattacaaatataaatgt

SEQ ID NO: 101337 - DNA, 22 bp, Artificial Sequence
  Synthetic oligonucleotide; CTA chr11 5328059 5328080 5328076 5328081 +
ttacaaatataaatgtaatata

SEQ ID NO: 101338 - DNA, 22 bp, Artificial Sequence
  Synthetic oligonucleotide; TTA chr11 5328062 5328083 5328079 5328084 +
caaatataaatgtaatatattt

SEQ ID NO: 101339 - DNA, 22 bp, Artificial Sequence
  Synthetic oligonucleotide; TTT chr11 5328084 5328105 5328101 5328106 +
accaataactgaacaaaggagg

SEQ ID NO: 101340 - DNA, 22 bp, Artificial Sequence
  Synthetic oligonucleotide; TTA chr11 5328085 5328106 5328102 5328107 +
ccaataactgaacaaaggaggt

SEQ ID NO: 101341 - DNA, 22 bp, Artificial Sequence
  Synthetic oligonucleotide; CTG chr11 5328095 5328116 5328112 5328117 +
aacaaaggaggtgagtgataac

SEQ ID NO: 101342 - DNA, 22 bp, Artificial Sequence
  Synthetic oligonucleotide; CTG chr11 5328124 5328145 5328141 5328146 +
ttttggaatgaagaaatattct

SEQ ID NO: 101343 - DNA, 22 bp, Artificial Sequence
  Synthetic oligonucleotide; TTT chr11 5328127 5328148 5328144 5328149 +
tggaatgaagaaatattctctg

SEQ ID NO: 101344 - DNA, 22 bp, Artificial Sequence
  Synthetic oligonucleotide; TTT chr11 5328128 5328149 5328145 5328150 +
ggaatgaagaaatattctctga

SEQ ID NO: 101345 - DNA, 22 bp, Artificial Sequence
  Synthetic oligonucleotide; TTG chr11 5328129 5328150 5328146 5328151 +
gaatgaagaaatattctctgaa

SEQ ID NO: 101346 - DNA, 22 bp, Artificial Sequence
  Synthetic oligonucleotide; TTC chr11 5328145 5328166 5328162 5328167 +
tctgaaaaaaaagctataaaca

SEQ ID NO: 101347 - DNA, 22 bp, Artificial Sequence
  Synthetic oligonucleotide; CTC chr11 5328147 5328168 5328164 5328169 +
tgaaaaaaaagctataaacatc

SEQ ID NO: 101348 - DNA, 22 bp, Artificial Sequence
  Synthetic oligonucleotide; CTG chr11 5328149 5328170 5328166 5328171 +
aaaaaaaagctataaacatcta

SEQ ID NO: 101349 - DNA, 22 bp, Artificial Sequence
  Synthetic oligonucleotide; CTA chr11 5328161 5328182 5328178 5328183 +
taaacatctacatagaaaaatg

SEQ ID NO: 101350 - DNA, 22 bp, Artificial Sequence
  Synthetic oligonucleotide; CTA chr11 5328171 5328192 5328188 5328193 +
catagaaaaatgagtaagaatg

SEQ ID NO: 101351 - DNA, 22 bp, Artificial Sequence
  Synthetic oligonucleotide; TTC chr11 5328213 5328234 5328230 5328235 +
tgagcattaacaattatactta

SEQ ID NO: 101352 - DNA, 22 bp, Artificial Sequence
  Synthetic oligonucleotide; CTG chr11 5328215 5328236 5328232 5328237 +
agcattaacaattatacttatg

SEQ ID NO: 101353 - DNA, 22 bp, Artificial Sequence
  Synthetic oligonucleotide; TTA chr11 5328222 5328243 5328239 5328244 +
acaattatacttatgccaatcc

SEQ ID NO: 101354 - DNA, 22 bp, Artificial Sequence
  Synthetic oligonucleotide; TTA chr11 5328229 5328250 5328246 5328251 +
tacttatgccaatccaagggtc

SEQ ID NO: 101355 - DNA, 22 bp, Artificial Sequence
  Synthetic oligonucleotide; CTT chr11 5328234 5328255 5328251 5328256 +
atgccaatccaagggtcccaga

SEQ ID NO: 101356 - DNA, 22 bp, Artificial Sequence
  Synthetic oligonucleotide; TTA chr11 5328235 5328256 5328252 5328257 +
tgccaatccaagggtcccagat

SEQ ID NO: 101357 - DNA, 22 bp, Artificial Sequence
  Synthetic oligonucleotide; TTA chr11 5328259 5328280 5328276 5328281 +
gaaaacctaaatctatcacagt

SEQ ID NO: 101358 - DNA, 22 bp, Artificial Sequence
  Synthetic oligonucleotide; CTA chr11 5328268 5328289 5328285 5328290 +
aatctatcacagttccttaaat

SEQ ID NO: 101359 - DNA, 22 bp, Artificial Sequence
  Synthetic oligonucleotide; CTA chr11 5328274 5328295 5328291 5328296 +
tcacagttccttaaatactctt

SEQ ID NO: 101360 - DNA, 22 bp, Artificial Sequence
  Synthetic oligonucleotide; TTC chr11 5328283 5328304 5328300 5328305 +
cttaaatactctttcaaaaaag

SEQ ID NO: 101361 - DNA, 22 bp, Artificial Sequence
  Synthetic oligonucleotide; CTT chr11 5328286 5328307 5328303 5328308 +
aaatactctttcaaaaaagaaa

SEQ ID NO: 101362 - DNA, 22 bp, Artificial Sequence
  Synthetic oligonucleotide; TTA chr11 5328287 5328308 5328304 5328309 +
aatactctttcaaaaaagaaaa

SEQ ID NO: 101363 - DNA, 22 bp, Artificial Sequence
  Synthetic oligonucleotide; CTC chr11 5328294 5328315 5328311 5328316 +
tttcaaaaaagaaaaaaaaaaa

SEQ ID NO: 101364 - DNA, 22 bp, Artificial Sequence
  Synthetic oligonucleotide; CTT chr11 5328296 5328317 5328313 5328318 +
tcaaaaaagaaaaaaaaaaatc

SEQ ID NO: 101365 - DNA, 22 bp, Artificial Sequence
  Synthetic oligonucleotide; TTT chr11 5328297 5328318 5328314 5328319 +
caaaaaagaaaaaaaaaaatct

SEQ ID NO: 101366 - DNA, 22 bp, Artificial Sequence
  Synthetic oligonucleotide; TTC chr11 5328298 5328319 5328315 5328320 +
aaaaaagaaaaaaaaaaatctg

SEQ ID NO: 101367 - DNA, 22 bp, Artificial Sequence
  Synthetic oligonucleotide; CTG chr11 5328320 5328341 5328337 5328342 +
tgctgtaggatatcccacctca

SEQ ID NO: 101368 - DNA, 22 bp, Artificial Sequence
  Synthetic oligonucleotide; CTG chr11 5328325 5328346 5328342 5328347 +
taggatatcccacctcagctgt

SEQ ID NO: 101369 - DNA, 22 bp, Artificial Sequence
  Synthetic oligonucleotide; CTC chr11 5328341 5328362 5328358 5328363 +
agctgtgatctttacctctagg

SEQ ID NO: 101370 - DNA, 22 bp, Artificial Sequence
  Synthetic oligonucleotide; CTG chr11 5328346 5328367 5328363 5328368 +
tgatctttacctctaggcagac

SEQ ID NO: 101371 - DNA, 22 bp, Artificial Sequence
  Synthetic oligonucleotide; CTT chr11 5328353 5328374 5328370 5328375 +
tacctctaggcagacctctgga

SEQ ID NO: 101372 - DNA, 22 bp, Artificial Sequence
  Synthetic oligonucleotide; TTT chr11 5328354 5328375 5328371 5328376 +
acctctaggcagacctctggaa

SEQ ID NO: 101373 - DNA, 22 bp, Artificial Sequence
  Synthetic oligonucleotide; TTA chr11 5328355 5328376 5328372 5328377 +
cctctaggcagacctctggaaa

SEQ ID NO: 101374 - DNA, 22 bp, Artificial Sequence
  Synthetic oligonucleotide; CTC chr11 5328359 5328380 5328376 5328381 +
taggcagacctctggaaaacct

SEQ ID NO: 101375 - DNA, 22 bp, Artificial Sequence
  Synthetic oligonucleotide; CTA chr11 5328361 5328382 5328378 5328383 +
ggcagacctctggaaaaccttc

SEQ ID NO: 101376 - DNA, 22 bp, Artificial Sequence
  Synthetic oligonucleotide; CTC chr11 5328371 5328392 5328388 5328393 +
tggaaaaccttcttatatgctt

SEQ ID NO: 101377 - DNA, 22 bp, Artificial Sequence
  Synthetic oligonucleotide; CTG chr11 5328373 5328394 5328390 5328395 +
gaaaaccttcttatatgctttc

SEQ ID NO: 101378 - DNA, 22 bp, Artificial Sequence
  Synthetic oligonucleotide; CTT chr11 5328382 5328403 5328399 5328404 +
cttatatgctttccttgagtgc

SEQ ID NO: 101379 - DNA, 22 bp, Artificial Sequence
  Synthetic oligonucleotide; TTC chr11 5328383 5328404 5328400 5328405 +
ttatatgctttccttgagtgca

SEQ ID NO: 101380 - DNA, 22 bp, Artificial Sequence
  Synthetic oligonucleotide; CTT chr11 5328385 5328406 5328402 5328407 +
atatgctttccttgagtgcatc

SEQ ID NO: 101381 - DNA, 22 bp, Artificial Sequence
  Synthetic oligonucleotide; TTA chr11 5328386 5328407 5328403 5328408 +
tatgctttccttgagtgcatct

SEQ ID NO: 101382 - DNA, 22 bp, Artificial Sequence
  Synthetic oligonucleotide; CTT chr11 5328393 5328414 5328410 5328415 +
tccttgagtgcatctcacatca

SEQ ID NO: 101383 - DNA, 22 bp, Artificial Sequence
  Synthetic oligonucleotide; TTT chr11 5328394 5328415 5328411 5328416 +
ccttgagtgcatctcacatcag

SEQ ID NO: 101384 - DNA, 22 bp, Artificial Sequence
  Synthetic oligonucleotide; TTC chr11 5328395 5328416 5328412 5328417 +
cttgagtgcatctcacatcaga

SEQ ID NO: 101385 - DNA, 22 bp, Artificial Sequence
  Synthetic oligonucleotide; CTT chr11 5328398 5328419 5328415 5328420 +
gagtgcatctcacatcagaaga

SEQ ID NO: 101386 - DNA, 22 bp, Artificial Sequence
  Synthetic oligonucleotide; TTG chr11 5328399 5328420 5328416 5328421 +
agtgcatctcacatcagaagag

SEQ ID NO: 101387 - DNA, 22 bp, Artificial Sequence
  Synthetic oligonucleotide; CTC chr11 5328409 5328430 5328426 5328431 +
acatcagaagagagaggaatca

SEQ ID NO: 101388 - DNA, 22 bp, Artificial Sequence
  Synthetic oligonucleotide; TTC chr11 5328434 5328455 5328451 5328456 +
catattcaagttcctggcactc

SEQ ID NO: 101389 - DNA, 22 bp, Artificial Sequence
  Synthetic oligonucleotide; TTC chr11 5328441 5328462 5328458 5328463 +
aagttcctggcactcacccact

SEQ ID NO: 101390 - DNA, 22 bp, Artificial Sequence
  Synthetic oligonucleotide; TTC chr11 5328447 5328468 5328464 5328469 +
ctggcactcacccactcacagt

SEQ ID NO: 101391 - DNA, 22 bp, Artificial Sequence
  Synthetic oligonucleotide; CTG chr11 5328450 5328471 5328467 5328472 +
gcactcacccactcacagtatt

SEQ ID NO: 101392 - DNA, 22 bp, Artificial Sequence
  Synthetic oligonucleotide; CTC chr11 5328456 5328477 5328473 5328478 +
acccactcacagtattgtggct

SEQ ID NO: 101393 - DNA, 22 bp, Artificial Sequence
  Synthetic oligonucleotide; CTC chr11 5328464 5328485 5328481 5328486 +
acagtattgtggctaaaatagg

SEQ ID NO: 101394 - DNA, 22 bp, Artificial Sequence
  Synthetic oligonucleotide; TTG chr11 5328473 5328494 5328490 5328495 +
tggctaaaataggaacctattc

SEQ ID NO: 101395 - DNA, 22 bp, Artificial Sequence
  Synthetic oligonucleotide; CTA chr11 5328479 5328500 5328496 5328501 +
aaataggaacctattcctgtcc

SEQ ID NO: 101396 - DNA, 22 bp, Artificial Sequence
  Synthetic oligonucleotide; CTA chr11 5328492 5328513 5328509 5328514 +
ttcctgtcctctttgaggactc

SEQ ID NO: 101397 - DNA, 22 bp, Artificial Sequence
  Synthetic oligonucleotide; TTC chr11 5328495 5328516 5328512 5328517 +
ctgtcctctttgaggactcagt

SEQ ID NO: 101398 - DNA, 22 bp, Artificial Sequence
  Synthetic oligonucleotide; CTG chr11 5328498 5328519 5328515 5328520 +
tcctctttgaggactcagttca

SEQ ID NO: 101399 - DNA, 22 bp, Artificial Sequence
  Synthetic oligonucleotide; CTC chr11 5328503 5328524 5328520 5328525 +
tttgaggactcagttcagatca

SEQ ID NO: 101400 - DNA, 22 bp, Artificial Sequence
  Synthetic oligonucleotide; CTT chr11 5328505 5328526 5328522 5328527 +
tgaggactcagttcagatcatt

SEQ ID NO: 101401 - DNA, 22 bp, Artificial Sequence
  Synthetic oligonucleotide; TTT chr11 5328506 5328527 5328523 5328528 +
gaggactcagttcagatcattc

SEQ ID NO: 101402 - DNA, 22 bp, Artificial Sequence
  Synthetic oligonucleotide; TTG chr11 5328507 5328528 5328524 5328529 +
aggactcagttcagatcattca

SEQ ID NO: 101403 - DNA, 22 bp, Artificial Sequence
  Synthetic oligonucleotide; CTC chr11 5328514 5328535 5328531 5328536 +
agttcagatcattcactcacag

SEQ ID NO: 101404 - DNA, 22 bp, Artificial Sequence
  Synthetic oligonucleotide; TTC chr11 5328519 5328540 5328536 5328541 +
agatcattcactcacagacctc

SEQ ID NO: 101405 - DNA, 22 bp, Artificial Sequence
  Synthetic oligonucleotide; TTC chr11 5328528 5328549 5328545 5328550 +
actcacagacctctcatgaggc

SEQ ID NO: 101406 - DNA, 22 bp, Artificial Sequence
  Synthetic oligonucleotide; CTC chr11 5328532 5328553 5328549 5328554 +
acagacctctcatgaggcctca

SEQ ID NO: 101407 - DNA, 22 bp, Artificial Sequence
  Synthetic oligonucleotide; CTC chr11 5328541 5328562 5328558 5328563 +
tcatgaggcctcattttaaagc

SEQ ID NO: 101408 - DNA, 22 bp, Artificial Sequence
  Synthetic oligonucleotide; CTC chr11 5328543 5328564 5328560 5328565 +
atgaggcctcattttaaagctt

SEQ ID NO: 101409 - DNA, 22 bp, Artificial Sequence
  Synthetic oligonucleotide; CTC chr11 5328553 5328574 5328570 5328575 +
attttaaagcttatgcatgtgg

SEQ ID NO: 101410 - DNA, 22 bp, Artificial Sequence
  Synthetic oligonucleotide; TTT chr11 5328557 5328578 5328574 5328579 +
taaagcttatgcatgtggaaat

SEQ ID NO: 101411 - DNA, 22 bp, Artificial Sequence
  Synthetic oligonucleotide; TTT chr11 5328558 5328579 5328575 5328580 +
aaagcttatgcatgtggaaatc

SEQ ID NO: 101412 - DNA, 22 bp, Artificial Sequence
  Synthetic oligonucleotide; TTA chr11 5328559 5328580 5328576 5328581 +
aagcttatgcatgtggaaatca

SEQ ID NO: 101413 - DNA, 22 bp, Artificial Sequence
  Synthetic oligonucleotide; CTT chr11 5328565 5328586 5328582 5328587 +
atgcatgtggaaatcacctccc

SEQ ID NO: 101414 - DNA, 22 bp, Artificial Sequence
  Synthetic oligonucleotide; TTA chr11 5328566 5328587 5328583 5328588 +
tgcatgtggaaatcacctcccc

SEQ ID NO: 101415 - DNA, 22 bp, Artificial Sequence
  Synthetic oligonucleotide; CTC chr11 5328585 5328606 5328602 5328607 +
ccctgagtttcatctttctagc

SEQ ID NO: 101416 - DNA, 22 bp, Artificial Sequence
  Synthetic oligonucleotide; CTG chr11 5328590 5328611 5328607 5328612 +
agtttcatctttctagcatctc

SEQ ID NO: 101417 - DNA, 22 bp, Artificial Sequence
  Synthetic oligonucleotide; TTT chr11 5328595 5328616 5328612 5328617 +
catctttctagcatctcaggag

SEQ ID NO: 101418 - DNA, 22 bp, Artificial Sequence
  Synthetic oligonucleotide; TTC chr11 5328596 5328617 5328613 5328618 +
atctttctagcatctcaggaga

SEQ ID NO: 101419 - DNA, 22 bp, Artificial Sequence
  Synthetic oligonucleotide; CTT chr11 5328601 5328622 5328618 5328623 +
tctagcatctcaggagacccct

SEQ ID NO: 101420 - DNA, 22 bp, Artificial Sequence
  Synthetic oligonucleotide; TTT chr11 5328602 5328623 5328619 5328624 +
ctagcatctcaggagacccctt

SEQ ID NO: 101421 - DNA, 22 bp, Artificial Sequence
  Synthetic oligonucleotide; TTC chr11 5328603 5328624 5328620 5328625 +
tagcatctcaggagaccccttg

SEQ ID NO: 101422 - DNA, 22 bp, Artificial Sequence
  Synthetic oligonucleotide; CTA chr11 5328605 5328626 5328622 5328627 +
gcatctcaggagaccccttgat

SEQ ID NO: 101423 - DNA, 22 bp, Artificial Sequence
  Synthetic oligonucleotide; CTC chr11 5328612 5328633 5328629 5328634 +
aggagaccccttgatctccctt

SEQ ID NO: 101424 - DNA, 22 bp, Artificial Sequence
  Synthetic oligonucleotide; CTT chr11 5328624 5328645 5328641 5328646 +
gatctcccttccctctcttctc

SEQ ID NO: 101425 - DNA, 22 bp, Artificial Sequence
  Synthetic oligonucleotide; TTG chr11 5328625 5328646 5328642 5328647 +
atctcccttccctctcttctct

SEQ ID NO: 101426 - DNA, 22 bp, Artificial Sequence
  Synthetic oligonucleotide; CTC chr11 5328630 5328651 5328647 5328652 +
ccttccctctcttctctgttcg

SEQ ID NO: 101427 - DNA, 22 bp, Artificial Sequence
  Synthetic oligonucleotide; CTT chr11 5328634 5328655 5328651 5328656 +
ccctctcttctctgttcgggag

SEQ ID NO: 101428 - DNA, 22 bp, Artificial Sequence
  Synthetic oligonucleotide; TTC chr11 5328635 5328656 5328652 5328657 +
cctctcttctctgttcgggagg

SEQ ID NO: 101429 - DNA, 22 bp, Artificial Sequence
  Synthetic oligonucleotide; CTC chr11 5328639 5328660 5328656 5328661 +
tcttctctgttcgggaggaaca

SEQ ID NO: 101430 - DNA, 22 bp, Artificial Sequence
  Synthetic oligonucleotide; CTC chr11 5328641 5328662 5328658 5328663 +
ttctctgttcgggaggaacagg

SEQ ID NO: 101431 - DNA, 22 bp, Artificial Sequence
  Synthetic oligonucleotide; CTT chr11 5328643 5328664 5328660 5328665 +
ctctgttcgggaggaacagggc

SEQ ID NO: 101432 - DNA, 22 bp, Artificial Sequence
  Synthetic oligonucleotide; TTC chr11 5328644 5328665 5328661 5328666 +
tctgttcgggaggaacagggcc

SEQ ID NO: 101433 - DNA, 22 bp, Artificial Sequence
  Synthetic oligonucleotide; CTC chr11 5328646 5328667 5328663 5328668 +
tgttcgggaggaacagggcccc

SEQ ID NO: 101434 - DNA, 22 bp, Artificial Sequence
  Synthetic oligonucleotide; CTG chr11 5328648 5328669 5328665 5328670 +
ttcgggaggaacagggccccac

SEQ ID NO: 101435 - DNA, 22 bp, Artificial Sequence
  Synthetic oligonucleotide; TTC chr11 5328651 5328672 5328668 5328673 +
gggaggaacagggccccacaac

SEQ ID NO: 101436 - DNA, 22 bp, Artificial Sequence
  Synthetic oligonucleotide; CTG chr11 5328675 5328696 5328692 5328697 +
atgtcctcgggattttcaggtg

SEQ ID NO: 101437 - DNA, 22 bp, Artificial Sequence
  Synthetic oligonucleotide; CTC chr11 5328683 5328704 5328700 5328705 +
gggattttcaggtgtttcctga

SEQ ID NO: 101438 - DNA, 22 bp, Artificial Sequence
  Synthetic oligonucleotide; TTT chr11 5328690 5328711 5328707 5328712 +
tcaggtgtttcctgaagaatgg

SEQ ID NO: 101439 - DNA, 22 bp, Artificial Sequence
  Synthetic oligonucleotide; TTT chr11 5328691 5328712 5328708 5328713 +
caggtgtttcctgaagaatggg

SEQ ID NO: 101440 - DNA, 22 bp, Artificial Sequence
  Synthetic oligonucleotide; TTC chr11 5328692 5328713 5328709 5328714 +
aggtgtttcctgaagaatgggg

SEQ ID NO: 101441 - DNA, 22 bp, Artificial Sequence
  Synthetic oligonucleotide; TTT chr11 5328700 5328721 5328717 5328722 +
cctgaagaatggggtgaggaaa

SEQ ID NO: 101442 - DNA, 22 bp, Artificial Sequence
  Synthetic oligonucleotide; TTC chr11 5328701 5328722 5328718 5328723 +
ctgaagaatggggtgaggaaaa

SEQ ID NO: 101443 - DNA, 22 bp, Artificial Sequence
  Synthetic oligonucleotide; CTG chr11 5328704 5328725 5328721 5328726 +
aagaatggggtgaggaaaattt

SEQ ID NO: 101444 - DNA, 22 bp, Artificial Sequence
  Synthetic oligonucleotide; TTT chr11 5328726 5328747 5328743 5328748 +
gaaattcaaaaaccagctgatg

SEQ ID NO: 101445 - DNA, 22 bp, Artificial Sequence
  Synthetic oligonucleotide; TTG chr11 5328727 5328748 5328744 5328749 +
aaattcaaaaaccagctgatgt

SEQ ID NO: 101446 - DNA, 22 bp, Artificial Sequence
  Synthetic oligonucleotide; TTC chr11 5328733 5328754 5328750 5328755 +
aaaaaccagctgatgtaagata

SEQ ID NO: 101447 - DNA, 22 bp, Artificial Sequence
  Synthetic oligonucleotide; CTG chr11 5328745 5328766 5328762 5328767 +
atgtaagatagggataccaggg

SEQ ID NO: 101448 - DNA, 22 bp, Artificial Sequence
  Synthetic oligonucleotide; CTT chr11 5328770 5328791 5328787 5328792 +
ggttatgtgacccaaggaggct

SEQ ID NO: 101449 - DNA, 22 bp, Artificial Sequence
  Synthetic oligonucleotide; TTG chr11 5328771 5328792 5328788 5328793 +
gttatgtgacccaaggaggctc

SEQ ID NO: 101450 - DNA, 22 bp, Artificial Sequence
  Synthetic oligonucleotide; TTA chr11 5328775 5328796 5328792 5328797 +
tgtgacccaaggaggctcagca

SEQ ID NO: 101451 - DNA, 22 bp, Artificial Sequence
  Synthetic oligonucleotide; CTC chr11 5328793 5328814 5328810 5328815 +
agcatcataacttagtttattt

SEQ ID NO: 101452 - DNA, 22 bp, Artificial Sequence
  Synthetic oligonucleotide; CTT chr11 5328806 5328827 5328823 5328828 +
agtttatttgaaagggttaggg

SEQ ID NO: 101453 - DNA, 22 bp, Artificial Sequence
  Synthetic oligonucleotide; TTA chr11 5328807 5328828 5328824 5328829 +
gtttatttgaaagggttagggg

SEQ ID NO: 101454 - DNA, 22 bp, Artificial Sequence
  Synthetic oligonucleotide; TTT chr11 5328811 5328832 5328828 5328833 +
atttgaaagggttaggggatat

SEQ ID NO: 101455 - DNA, 22 bp, Artificial Sequence
  Synthetic oligonucleotide; TTA chr11 5328812 5328833 5328829 5328834 +
tttgaaagggttaggggatatc

SEQ ID NO: 101456 - DNA, 22 bp, Artificial Sequence
  Synthetic oligonucleotide; TTT chr11 5328815 5328836 5328832 5328837 +
gaaagggttaggggatatcggt

SEQ ID NO: 101457 - DNA, 22 bp, Artificial Sequence
  Synthetic oligonucleotide; TTG chr11 5328816 5328837 5328833 5328838 +
aaagggttaggggatatcggtt

SEQ ID NO: 101458 - DNA, 22 bp, Artificial Sequence
  Synthetic oligonucleotide; TTA chr11 5328825 5328846 5328842 5328847 +
ggggatatcggttgtcttcagg

SEQ ID NO: 101459 - DNA, 22 bp, Artificial Sequence
  Synthetic oligonucleotide; TTG chr11 5328839 5328860 5328856 5328861 +
tcttcagggatcatatgtacct

SEQ ID NO: 101460 - DNA, 22 bp, Artificial Sequence
  Synthetic oligonucleotide; CTT chr11 5328843 5328864 5328860 5328865 +
cagggatcatatgtacctctac

SEQ ID NO: 101461 - DNA, 22 bp, Artificial Sequence
  Synthetic oligonucleotide; TTC chr11 5328844 5328865 5328861 5328866 +
agggatcatatgtacctctacg

SEQ ID NO: 101462 - DNA, 22 bp, Artificial Sequence
  Synthetic oligonucleotide; CTC chr11 5328862 5328883 5328879 5328884 +
tacgggtcctagagcttatgaa

SEQ ID NO: 101463 - DNA, 22 bp, Artificial Sequence
  Synthetic oligonucleotide; CTA chr11 5328864 5328885 5328881 5328886 +
cgggtcctagagcttatgaatt

SEQ ID NO: 101464 - DNA, 22 bp, Artificial Sequence
  Synthetic oligonucleotide; CTA chr11 5328873 5328894 5328890 5328895 +
gagcttatgaattccaattgcg

SEQ ID NO: 101465 - DNA, 22 bp, Artificial Sequence
  Synthetic oligonucleotide; CTT chr11 5328879 5328900 5328896 5328901 +
atgaattccaattgcgtttttg

SEQ ID NO: 101466 - DNA, 22 bp, Artificial Sequence
  Synthetic oligonucleotide; TTA chr11 5328880 5328901 5328897 5328902 +
tgaattccaattgcgtttttgt

SEQ ID NO: 101467 - DNA, 22 bp, Artificial Sequence
  Synthetic oligonucleotide; TTC chr11 5328887 5328908 5328904 5328909 +
caattgcgtttttgtctttcct

SEQ ID NO: 101468 - DNA, 22 bp, Artificial Sequence
  Synthetic oligonucleotide; TTG chr11 5328893 5328914 5328910 5328915 +
cgtttttgtctttcctgttact

SEQ ID NO: 101469 - DNA, 22 bp, Artificial Sequence
  Synthetic oligonucleotide; TTT chr11 5328898 5328919 5328915 5328920 +
ttgtctttcctgttactttggt

SEQ ID NO: 101470 - DNA, 22 bp, Artificial Sequence
  Synthetic oligonucleotide; TTT chr11 5328899 5328920 5328916 5328921 +
tgtctttcctgttactttggta

SEQ ID NO: 101471 - DNA, 22 bp, Artificial Sequence
  Synthetic oligonucleotide; TTT chr11 5328900 5328921 5328917 5328922 +
gtctttcctgttactttggtaa

SEQ ID NO: 101472 - DNA, 22 bp, Artificial Sequence
  Synthetic oligonucleotide; TTG chr11 5328901 5328922 5328918 5328923 +
tctttcctgttactttggtaaa

SEQ ID NO: 101473 - DNA, 22 bp, Artificial Sequence
  Synthetic oligonucleotide; CTT chr11 5328905 5328926 5328922 5328927 +
tcctgttactttggtaaaattt

SEQ ID NO: 101474 - DNA, 22 bp, Artificial Sequence
  Synthetic oligonucleotide; TTT chr11 5328906 5328927 5328923 5328928 +
cctgttactttggtaaaatttg

SEQ ID NO: 101475 - DNA, 22 bp, Artificial Sequence
  Synthetic oligonucleotide; TTC chr11 5328907 5328928 5328924 5328929 +
ctgttactttggtaaaatttgt

SEQ ID NO: 101476 - DNA, 22 bp, Artificial Sequence
  Synthetic oligonucleotide; CTG chr11 5328910 5328931 5328927 5328932 +
ttactttggtaaaatttgttct

SEQ ID NO: 101477 - DNA, 22 bp, Artificial Sequence
  Synthetic oligonucleotide; TTA chr11 5328913 5328934 5328930 5328935 +
ctttggtaaaatttgttcttat

SEQ ID NO: 101478 - DNA, 22 bp, Artificial Sequence
  Synthetic oligonucleotide; CTT chr11 5328916 5328937 5328933 5328938 +
tggtaaaatttgttcttatcta

SEQ ID NO: 101479 - DNA, 22 bp, Artificial Sequence
  Synthetic oligonucleotide; TTT chr11 5328917 5328938 5328934 5328939 +
ggtaaaatttgttcttatctac

SEQ ID NO: 101480 - DNA, 22 bp, Artificial Sequence
  Synthetic oligonucleotide; TTG chr11 5328918 5328939 5328935 5328940 +
gtaaaatttgttcttatctact

SEQ ID NO: 101481 - DNA, 22 bp, Artificial Sequence
  Synthetic oligonucleotide; TTT chr11 5328927 5328948 5328944 5328949 +
gttcttatctactggaacttca

SEQ ID NO: 101482 - DNA, 22 bp, Artificial Sequence
  Synthetic oligonucleotide; TTG chr11 5328928 5328949 5328945 5328950 +
ttcttatctactggaacttcaa

SEQ ID NO: 101483 - DNA, 22 bp, Artificial Sequence
  Synthetic oligonucleotide; TTC chr11 5328931 5328952 5328948 5328953 +
ttatctactggaacttcaatgg

SEQ ID NO: 101484 - DNA, 22 bp, Artificial Sequence
  Synthetic oligonucleotide; CTT chr11 5328933 5328954 5328950 5328955 +
atctactggaacttcaatggat

SEQ ID NO: 101485 - DNA, 22 bp, Artificial Sequence
  Synthetic oligonucleotide; TTA chr11 5328934 5328955 5328951 5328956 +
tctactggaacttcaatggatc

SEQ ID NO: 101486 - DNA, 22 bp, Artificial Sequence
  Synthetic oligonucleotide; CTA chr11 5328938 5328959 5328955 5328960 +
ctggaacttcaatggatctgtt

SEQ ID NO: 101487 - DNA, 22 bp, Artificial Sequence
  Synthetic oligonucleotide; CTG chr11 5328941 5328962 5328958 5328963 +
gaacttcaatggatctgttaat

SEQ ID NO: 101488 - DNA, 22 bp, Artificial Sequence
  Synthetic oligonucleotide; CTT chr11 5328947 5328968 5328964 5328969 +
caatggatctgttaatagtcat

SEQ ID NO: 101489 - DNA, 22 bp, Artificial Sequence
  Synthetic oligonucleotide; TTC chr11 5328948 5328969 5328965 5328970 +
aatggatctgttaatagtcatg

SEQ ID NO: 101490 - DNA, 22 bp, Artificial Sequence
  Synthetic oligonucleotide; CTG chr11 5328958 5328979 5328975 5328980 +
ttaatagtcatgcagattcatg

SEQ ID NO: 101491 - DNA, 22 bp, Artificial Sequence
  Synthetic oligonucleotide; TTA chr11 5328961 5328982 5328978 5328983 +
atagtcatgcagattcatgaca

SEQ ID NO: 101492 - DNA, 22 bp, Artificial Sequence
  Synthetic oligonucleotide; TTC chr11 5328977 5328998 5328994 5328999 +
atgacattcagctttttttttt

SEQ ID NO: 101493 - DNA, 22 bp, Artificial Sequence
  Synthetic oligonucleotide; TTC chr11 5328986 5329007 5329003 5329008 +
agcttttttttttttttttttt

SEQ ID NO: 101494 - DNA, 22 bp, Artificial Sequence
  Synthetic oligonucleotide; CTT chr11 5328991 5329012 5329008 5329013 +
tttttttttttttttttttttt

SEQ ID NO: 101495 - DNA, 22 bp, Artificial Sequence
  Synthetic oligonucleotide; TTT chr11 5328992 5329013 5329009 5329014 +
tttttttttttttttttttttt

SEQ ID NO: 101496 - DNA, 22 bp, Artificial Sequence
  Synthetic oligonucleotide; TTT chr11 5328993 5329014 5329010 5329015 +
tttttttttttttttttttttt

SEQ ID NO: 101497 - DNA, 22 bp, Artificial Sequence
  Synthetic oligonucleotide; TTT chr11 5328994 5329015 5329011 5329016 +
tttttttttttttttttttttt

SEQ ID NO: 101498 - DNA, 22 bp, Artificial Sequence
  Synthetic oligonucleotide; TTT chr11 5328995 5329016 5329012 5329017 +
tttttttttttttttttttttt

SEQ ID NO: 101499 - DNA, 22 bp, Artificial Sequence
  Synthetic oligonucleotide; TTT chr11 5328996 5329017 5329013 5329018 +
ttttttttttttttttttttta

SEQ ID NO: 101500 - DNA, 22 bp, Artificial Sequence
  Synthetic oligonucleotide; TTT chr11 5328997 5329018 5329014 5329019 +
ttttttttttttttttttttag

SEQ ID NO: 101501 - DNA, 22 bp, Artificial Sequence
  Synthetic oligonucleotide; TTT chr11 5328998 5329019 5329015 5329020 +
tttttttttttttttttttaga

SEQ ID NO: 101502 - DNA, 22 bp, Artificial Sequence
  Synthetic oligonucleotide; TTT chr11 5328999 5329020 5329016 5329021 +
ttttttttttttttttttagat

SEQ ID NO: 101503 - DNA, 22 bp, Artificial Sequence
  Synthetic oligonucleotide; TTT chr11 5329000 5329021 5329017 5329022 +
tttttttttttttttttagata

SEQ ID NO: 101504 - DNA, 22 bp, Artificial Sequence
  Synthetic oligonucleotide; TTT chr11 5329001 5329022 5329018 5329023 +
ttttttttttttttttagatag

SEQ ID NO: 101505 - DNA, 22 bp, Artificial Sequence
  Synthetic oligonucleotide; TTT chr11 5329002 5329023 5329019 5329024 +
tttttttttttttttagataga

SEQ ID NO: 101506 - DNA, 22 bp, Artificial Sequence
  Synthetic oligonucleotide; TTT chr11 5329003 5329024 5329020 5329025 +
ttttttttttttttagatagag

SEQ ID NO: 101507 - DNA, 22 bp, Artificial Sequence
  Synthetic oligonucleotide; TTT chr11 5329004 5329025 5329021 5329026 +
tttttttttttttagatagagt

SEQ ID NO: 101508 - DNA, 22 bp, Artificial Sequence
  Synthetic oligonucleotide; TTT chr11 5329005 5329026 5329022 5329027 +
ttttttttttttagatagagtc

SEQ ID NO: 101509 - DNA, 22 bp, Artificial Sequence
  Synthetic oligonucleotide; TTT chr11 5329006 5329027 5329023 5329028 +
tttttttttttagatagagtct

SEQ ID NO: 101510 - DNA, 22 bp, Artificial Sequence
  Synthetic oligonucleotide; TTT chr11 5329007 5329028 5329024 5329029 +
ttttttttttagatagagtctc

SEQ ID NO: 101511 - DNA, 22 bp, Artificial Sequence
  Synthetic oligonucleotide; TTT chr11 5329008 5329029 5329025 5329030 +
tttttttttagatagagtctca

SEQ ID NO: 101512 - DNA, 22 bp, Artificial Sequence
  Synthetic oligonucleotide; TTT chr11 5329009 5329030 5329026 5329031 +
ttttttttagatagagtctcac

SEQ ID NO: 101513 - DNA, 22 bp, Artificial Sequence
  Synthetic oligonucleotide; TTT chr11 5329010 5329031 5329027 5329032 +
tttttttagatagagtctcact

SEQ ID NO: 101514 - DNA, 22 bp, Artificial Sequence
  Synthetic oligonucleotide; TTT chr11 5329011 5329032 5329028 5329033 +
ttttttagatagagtctcactc

SEQ ID NO: 101515 - DNA, 22 bp, Artificial Sequence
  Synthetic oligonucleotide; TTT chr11 5329012 5329033 5329029 5329034 +
tttttagatagagtctcactct

SEQ ID NO: 101516 - DNA, 22 bp, Artificial Sequence
  Synthetic oligonucleotide; TTT chr11 5329013 5329034 5329030 5329035 +
ttttagatagagtctcactctg

SEQ ID NO: 101517 - DNA, 22 bp, Artificial Sequence
  Synthetic oligonucleotide; TTT chr11 5329014 5329035 5329031 5329036 +
tttagatagagtctcactctgt

SEQ ID NO: 101518 - DNA, 22 bp, Artificial Sequence
  Synthetic oligonucleotide; TTT chr11 5329015 5329036 5329032 5329037 +
ttagatagagtctcactctgtc

SEQ ID NO: 101519 - DNA, 22 bp, Artificial Sequence
  Synthetic oligonucleotide; TTT chr11 5329016 5329037 5329033 5329038 +
tagatagagtctcactctgtcg

SEQ ID NO: 101520 - DNA, 22 bp, Artificial Sequence
  Synthetic oligonucleotide; TTT chr11 5329017 5329038 5329034 5329039 +
agatagagtctcactctgtcgc

SEQ ID NO: 101521 - DNA, 22 bp, Artificial Sequence
  Synthetic oligonucleotide; TTA chr11 5329018 5329039 5329035 5329040 +
gatagagtctcactctgtcgcc

SEQ ID NO: 101522 - DNA, 22 bp, Artificial Sequence
  Synthetic oligonucleotide; CTC chr11 5329029 5329050 5329046 5329051 +
actctgtcgccaggctggagtg

SEQ ID NO: 101523 - DNA, 22 bp, Artificial Sequence
  Synthetic oligonucleotide; CTC chr11 5329033 5329054 5329050 5329055 +
tgtcgccaggctggagtgcagt

SEQ ID NO: 101524 - DNA, 22 bp, Artificial Sequence
  Synthetic oligonucleotide; CTG chr11 5329035 5329056 5329052 5329057 +
tcgccaggctggagtgcagtag

SEQ ID NO: 101525 - DNA, 22 bp, Artificial Sequence
  Synthetic oligonucleotide; CTG chr11 5329046 5329067 5329063 5329068 +
gagtgcagtagcacaatctcag

SEQ ID NO: 101526 - DNA, 22 bp, Artificial Sequence
  Synthetic oligonucleotide; CTC chr11 5329066 5329087 5329083 5329088 +
agctcactgcaaactccacctc

SEQ ID NO: 101527 - DNA, 22 bp, Artificial Sequence
  Synthetic oligonucleotide; CTC chr11 5329071 5329092 5329088 5329093 +
actgcaaactccacctcccagg

SEQ ID NO: 101528 - DNA, 22 bp, Artificial Sequence
  Synthetic oligonucleotide; CTG chr11 5329075 5329096 5329092 5329097 +
caaactccacctcccaggttca

SEQ ID NO: 101529 - DNA, 22 bp, Artificial Sequence
  Synthetic oligonucleotide; CTC chr11 5329082 5329103 5329099 5329104 +
cacctcccaggttcaagtgatt

SEQ ID NO: 101530 - DNA, 22 bp, Artificial Sequence
  Synthetic oligonucleotide; CTC chr11 5329088 5329109 5329105 5329110 +
ccaggttcaagtgattctcctg

SEQ ID NO: 101531 - DNA, 22 bp, Artificial Sequence
  Synthetic oligonucleotide; TTC chr11 5329096 5329117 5329113 5329118 +
aagtgattctcctgccacagcc

SEQ ID NO: 101532 - DNA, 22 bp, Artificial Sequence
  Synthetic oligonucleotide; TTC chr11 5329105 5329126 5329122 5329127 +
tcctgccacagcctcctgagaa

SEQ ID NO: 101533 - DNA, 22 bp, Artificial Sequence
  Synthetic oligonucleotide; CTC chr11 5329107 5329128 5329124 5329129 +
ctgccacagcctcctgagaagc

SEQ ID NO: 101534 - DNA, 22 bp, Artificial Sequence
  Synthetic oligonucleotide; CTG chr11 5329110 5329131 5329127 5329132 +
ccacagcctcctgagaagctgg

SEQ ID NO: 101535 - DNA, 22 bp, Artificial Sequence
  Synthetic oligonucleotide; CTC chr11 5329120 5329141 5329137 5329142 +
ctgagaagctgggactacagta

SEQ ID NO: 101536 - DNA, 22 bp, Artificial Sequence
  Synthetic oligonucleotide; CTG chr11 5329123 5329144 5329140 5329145 +
agaagctgggactacagtagcg

SEQ ID NO: 101537 - DNA, 22 bp, Artificial Sequence
  Synthetic oligonucleotide; CTG chr11 5329131 5329152 5329148 5329153 +
ggactacagtagcgcgtcacca

SEQ ID NO: 101538 - DNA, 22 bp, Artificial Sequence
  Synthetic oligonucleotide; CTA chr11 5329137 5329158 5329154 5329159 +
cagtagcgcgtcaccacaccca

SEQ ID NO: 101539 - DNA, 22 bp, Artificial Sequence
  Synthetic oligonucleotide; CTA chr11 5329163 5329184 5329180 5329185 +
atttttgtatttttagtagaca

SEQ ID NO: 101540 - DNA, 22 bp, Artificial Sequence
  Synthetic oligonucleotide; TTT chr11 5329167 5329188 5329184 5329189 +
ttgtatttttagtagacacggg

SEQ ID NO: 101541 - DNA, 22 bp, Artificial Sequence
  Synthetic oligonucleotide; TTT chr11 5329168 5329189 5329185 5329190 +
tgtatttttagtagacacgggg

SEQ ID NO: 101542 - DNA, 22 bp, Artificial Sequence
  Synthetic oligonucleotide; TTT chr11 5329169 5329190 5329186 5329191 +
gtatttttagtagacacggggt

SEQ ID NO: 101543 - DNA, 22 bp, Artificial Sequence
  Synthetic oligonucleotide; TTG chr11 5329170 5329191 5329187 5329192 +
tatttttagtagacacggggtt

SEQ ID NO: 101544 - DNA, 22 bp, Artificial Sequence
  Synthetic oligonucleotide; TTT chr11 5329175 5329196 5329192 5329197 +
ttagtagacacggggtttcacc

SEQ ID NO: 101545 - DNA, 22 bp, Artificial Sequence
  Synthetic oligonucleotide; TTT chr11 5329176 5329197 5329193 5329198 +
tagtagacacggggtttcacca

SEQ ID NO: 101546 - DNA, 22 bp, Artificial Sequence
  Synthetic oligonucleotide; TTT chr11 5329177 5329198 5329194 5329199 +
agtagacacggggtttcaccat

SEQ ID NO: 101547 - DNA, 22 bp, Artificial Sequence
  Synthetic oligonucleotide; TTA chr11 5329178 5329199 5329195 5329200 +
gtagacacggggtttcaccata

SEQ ID NO: 101548 - DNA, 22 bp, Artificial Sequence
  Synthetic oligonucleotide; TTT chr11 5329193 5329214 5329210 5329215 +
caccatattggccaggatggtc

SEQ ID NO: 101549 - DNA, 22 bp, Artificial Sequence
  Synthetic oligonucleotide; TTC chr11 5329194 5329215 5329211 5329216 +
accatattggccaggatggtct

SEQ ID NO: 101550 - DNA, 22 bp, Artificial Sequence
  Synthetic oligonucleotide; TTG chr11 5329203 5329224 5329220 5329225 +
gccaggatggtctcgatctctt

SEQ ID NO: 101551 - DNA, 22 bp, Artificial Sequence
  Synthetic oligonucleotide; CTC chr11 5329217 5329238 5329234 5329239 +
gatctcttgacctcgtgatcca

SEQ ID NO: 101552 - DNA, 22 bp, Artificial Sequence
  Synthetic oligonucleotide; CTC chr11 5329223 5329244 5329240 5329245 +
ttgacctcgtgatccaccctcc

SEQ ID NO: 101553 - DNA, 22 bp, Artificial Sequence
  Synthetic oligonucleotide; CTT chr11 5329225 5329246 5329242 5329247 +
gacctcgtgatccaccctcctt

SEQ ID NO: 101554 - DNA, 22 bp, Artificial Sequence
  Synthetic oligonucleotide; TTG chr11 5329226 5329247 5329243 5329248 +
acctcgtgatccaccctccttg

SEQ ID NO: 101555 - DNA, 22 bp, Artificial Sequence
  Synthetic oligonucleotide; CTC chr11 5329231 5329252 5329248 5329253 +
gtgatccaccctccttggcctc

SEQ ID NO: 101556 - DNA, 22 bp, Artificial Sequence
  Synthetic oligonucleotide; CTC chr11 5329244 5329265 5329261 5329266 +
cttggcctcccaaagtgctggg

SEQ ID NO: 101557 - DNA, 22 bp, Artificial Sequence
  Synthetic oligonucleotide; CTT chr11 5329247 5329268 5329264 5329269 +
ggcctcccaaagtgctgggatt

SEQ ID NO: 101558 - DNA, 22 bp, Artificial Sequence
  Synthetic oligonucleotide; TTG chr11 5329248 5329269 5329265 5329270 +
gcctcccaaagtgctgggattg

SEQ ID NO: 101559 - DNA, 22 bp, Artificial Sequence
  Synthetic oligonucleotide; CTC chr11 5329253 5329274 5329270 5329275 +
ccaaagtgctgggattgcaggt

SEQ ID NO: 101560 - DNA, 22 bp, Artificial Sequence
  Synthetic oligonucleotide; CTG chr11 5329264 5329285 5329281 5329286 +
ggattgcaggtgtgagtcactg

SEQ ID NO: 101561 - DNA, 22 bp, Artificial Sequence
  Synthetic oligonucleotide; TTG chr11 5329270 5329291 5329287 5329292 +
caggtgtgagtcactgcgcccg

SEQ ID NO: 101562 - DNA, 22 bp, Artificial Sequence
  Synthetic oligonucleotide; CTG chr11 5329286 5329307 5329303 5329308 +
cgcccggctgacattcagcttt

SEQ ID NO: 101563 - DNA, 22 bp, Artificial Sequence
  Synthetic oligonucleotide; CTG chr11 5329296 5329317 5329313 5329318 +
acattcagctttttatcttaaa

SEQ ID NO: 101564 - DNA, 22 bp, Artificial Sequence
  Synthetic oligonucleotide; TTC chr11 5329302 5329323 5329319 5329324 +
agctttttatcttaaaattata

SEQ ID NO: 101565 - DNA, 22 bp, Artificial Sequence
  Synthetic oligonucleotide; CTT chr11 5329307 5329328 5329324 5329329 +
tttatcttaaaattatattact

SEQ ID NO: 101566 - DNA, 22 bp, Artificial Sequence
  Synthetic oligonucleotide; TTT chr11 5329308 5329329 5329325 5329330 +
ttatcttaaaattatattactt

SEQ ID NO: 101567 - DNA, 22 bp, Artificial Sequence
  Synthetic oligonucleotide; TTT chr11 5329309 5329330 5329326 5329331 +
tatcttaaaattatattacttg

SEQ ID NO: 101568 - DNA, 22 bp, Artificial Sequence
  Synthetic oligonucleotide; TTT chr11 5329310 5329331 5329327 5329332 +
atcttaaaattatattacttgt

SEQ ID NO: 101569 - DNA, 22 bp, Artificial Sequence
  Synthetic oligonucleotide; TTA chr11 5329311 5329332 5329328 5329333 +
tcttaaaattatattacttgta

SEQ ID NO: 101570 - DNA, 22 bp, Artificial Sequence
  Synthetic oligonucleotide; CTT chr11 5329315 5329336 5329332 5329337 +
aaaattatattacttgtagctc

SEQ ID NO: 101571 - DNA, 22 bp, Artificial Sequence
  Synthetic oligonucleotide; TTA chr11 5329316 5329337 5329333 5329338 +
aaattatattacttgtagctca

SEQ ID NO: 101572 - DNA, 22 bp, Artificial Sequence
  Synthetic oligonucleotide; TTA chr11 5329322 5329343 5329339 5329344 +
tattacttgtagctcattgccc

SEQ ID NO: 101573 - DNA, 22 bp, Artificial Sequence
  Synthetic oligonucleotide; TTA chr11 5329327 5329348 5329344 5329349 +
cttgtagctcattgcccttttt

SEQ ID NO: 101574 - DNA, 22 bp, Artificial Sequence
  Synthetic oligonucleotide; CTT chr11 5329330 5329351 5329347 5329352 +
gtagctcattgccctttttttt

SEQ ID NO: 101575 - DNA, 22 bp, Artificial Sequence
  Synthetic oligonucleotide; TTG chr11 5329331 5329352 5329348 5329353 +
tagctcattgcccttttttttt

SEQ ID NO: 101576 - DNA, 22 bp, Artificial Sequence
  Synthetic oligonucleotide; CTC chr11 5329337 5329358 5329354 5329359 +
attgcccttttttttttttttt

SEQ ID NO: 101577 - DNA, 22 bp, Artificial Sequence
  Synthetic oligonucleotide; TTG chr11 5329341 5329362 5329358 5329363 +
ccctttttttttttttttgcca

SEQ ID NO: 101578 - DNA, 22 bp, Artificial Sequence
  Synthetic oligonucleotide; CTT chr11 5329346 5329367 5329363 5329368 +
tttttttttttttgccagatac

SEQ ID NO: 101579 - DNA, 22 bp, Artificial Sequence
  Synthetic oligonucleotide; TTT chr11 5329347 5329368 5329364 5329369 +
ttttttttttttgccagataca

SEQ ID NO: 101580 - DNA, 22 bp, Artificial Sequence
  Synthetic oligonucleotide; TTT chr11 5329348 5329369 5329365 5329370 +
tttttttttttgccagatacac

SEQ ID NO: 101581 - DNA, 22 bp, Artificial Sequence
  Synthetic oligonucleotide; TTT chr11 5329349 5329370 5329366 5329371 +
ttttttttttgccagatacaca

SEQ ID NO: 101582 - DNA, 22 bp, Artificial Sequence
  Synthetic oligonucleotide; TTT chr11 5329350 5329371 5329367 5329372 +
tttttttttgccagatacacaa

SEQ ID NO: 101583 - DNA, 22 bp, Artificial Sequence
  Synthetic oligonucleotide; TTT chr11 5329351 5329372 5329368 5329373 +
ttttttttgccagatacacaat

SEQ ID NO: 101584 - DNA, 22 bp, Artificial Sequence
  Synthetic oligonucleotide; TTT chr11 5329352 5329373 5329369 5329374 +
tttttttgccagatacacaatg

SEQ ID NO: 101585 - DNA, 22 bp, Artificial Sequence
  Synthetic oligonucleotide; TTT chr11 5329353 5329374 5329370 5329375 +
ttttttgccagatacacaatga

SEQ ID NO: 101586 - DNA, 22 bp, Artificial Sequence
  Synthetic oligonucleotide; TTT chr11 5329354 5329375 5329371 5329376 +
tttttgccagatacacaatgag

SEQ ID NO: 101587 - DNA, 22 bp, Artificial Sequence
  Synthetic oligonucleotide; TTT chr11 5329355 5329376 5329372 5329377 +
ttttgccagatacacaatgagg

SEQ ID NO: 101588 - DNA, 22 bp, Artificial Sequence
  Synthetic oligonucleotide; TTT chr11 5329356 5329377 5329373 5329378 +
tttgccagatacacaatgagga

SEQ ID NO: 101589 - DNA, 22 bp, Artificial Sequence
  Synthetic oligonucleotide; TTT chr11 5329357 5329378 5329374 5329379 +
ttgccagatacacaatgaggag

SEQ ID NO: 101590 - DNA, 22 bp, Artificial Sequence
  Synthetic oligonucleotide; TTT chr11 5329358 5329379 5329375 5329380 +
tgccagatacacaatgaggagc

SEQ ID NO: 101591 - DNA, 22 bp, Artificial Sequence
  Synthetic oligonucleotide; TTT chr11 5329359 5329380 5329376 5329381 +
gccagatacacaatgaggagca

SEQ ID NO: 101592 - DNA, 22 bp, Artificial Sequence
  Synthetic oligonucleotide; TTG chr11 5329360 5329381 5329377 5329382 +
ccagatacacaatgaggagcat

SEQ ID NO: 101593 - DNA, 22 bp, Artificial Sequence
  Synthetic oligonucleotide; CTT chr11 5329388 5329409 5329405 5329410 +
tattcacagaatgtaaatagtg

SEQ ID NO: 101594 - DNA, 22 bp, Artificial Sequence
  Synthetic oligonucleotide; TTT chr11 5329389 5329410 5329406 5329411 +
attcacagaatgtaaatagtgt

SEQ ID NO: 101595 - DNA, 22 bp, Artificial Sequence
  Synthetic oligonucleotide; TTA chr11 5329390 5329411 5329407 5329412 +
ttcacagaatgtaaatagtgtg

SEQ ID NO: 101596 - DNA, 22 bp, Artificial Sequence
  Synthetic oligonucleotide; TTC chr11 5329393 5329414 5329410 5329415 +
acagaatgtaaatagtgtgtaa

SEQ ID NO: 101597 - DNA, 22 bp, Artificial Sequence
  Synthetic oligonucleotide; TTA chr11 5329432 5329453 5329449 5329454 +
ccacaaattttcatagcactat

SEQ ID NO: 101598 - DNA, 22 bp, Artificial Sequence
  Synthetic oligonucleotide; TTT chr11 5329442 5329463 5329459 5329464 +
tcatagcactatcattactgca

SEQ ID NO: 101599 - DNA, 22 bp, Artificial Sequence
  Synthetic oligonucleotide; TTT chr11 5329443 5329464 5329460 5329465 +
catagcactatcattactgcat

SEQ ID NO: 101600 - DNA, 22 bp, Artificial Sequence
  Synthetic oligonucleotide; TTC chr11 5329444 5329465 5329461 5329466 +
atagcactatcattactgcata

SEQ ID NO: 101601 - DNA, 22 bp, Artificial Sequence
  Synthetic oligonucleotide; CTA chr11 5329453 5329474 5329470 5329475 +
tcattactgcatagatggtagc

SEQ ID NO: 101602 - DNA, 22 bp, Artificial Sequence
  Synthetic oligonucleotide; TTA chr11 5329459 5329480 5329476 5329481 +
ctgcatagatggtagcatgcta

SEQ ID NO: 101603 - DNA, 22 bp, Artificial Sequence
  Synthetic oligonucleotide; CTG chr11 5329462 5329483 5329479 5329484 +
catagatggtagcatgctaaag

SEQ ID NO: 101604 - DNA, 22 bp, Artificial Sequence
  Synthetic oligonucleotide; CTA chr11 5329481 5329502 5329498 5329503 +
aagggagcccacagaaagcatc

SEQ ID NO: 101605 - DNA, 22 bp, Artificial Sequence
  Synthetic oligonucleotide; CTT chr11 5329505 5329526 5329522 5329527 +
tggggcaggggaaaatttctca

SEQ ID NO: 101606 - DNA, 22 bp, Artificial Sequence
  Synthetic oligonucleotide; TTT chr11 5329506 5329527 5329523 5329528 +
ggggcaggggaaaatttctcaa

SEQ ID NO: 101607 - DNA, 22 bp, Artificial Sequence
  Synthetic oligonucleotide; TTG chr11 5329507 5329528 5329524 5329529 +
gggcaggggaaaatttctcaaa

SEQ ID NO: 101608 - DNA, 22 bp, Artificial Sequence
  Synthetic oligonucleotide; TTT chr11 5329523 5329544 5329540 5329545 +
ctcaaaagaaatattatttaag

SEQ ID NO: 101609 - DNA, 22 bp, Artificial Sequence
  Synthetic oligonucleotide; TTC chr11 5329524 5329545 5329541 5329546 +
tcaaaagaaatattatttaagc

SEQ ID NO: 101610 - DNA, 22 bp, Artificial Sequence
  Synthetic oligonucleotide; CTC chr11 5329526 5329547 5329543 5329548 +
aaaagaaatattatttaagcta

SEQ ID NO: 101611 - DNA, 22 bp, Artificial Sequence
  Synthetic oligonucleotide; TTA chr11 5329539 5329560 5329556 5329561 +
tttaagctaataattgaaaaac

SEQ ID NO: 101612 - DNA, 22 bp, Artificial Sequence
  Synthetic oligonucleotide; TTT chr11 5329542 5329563 5329559 5329564 +
aagctaataattgaaaaacaag

SEQ ID NO: 101613 - DNA, 22 bp, Artificial Sequence
  Synthetic oligonucleotide; TTA chr11 5329543 5329564 5329560 5329565 +
agctaataattgaaaaacaagg

SEQ ID NO: 101614 - DNA, 22 bp, Artificial Sequence
  Synthetic oligonucleotide; CTA chr11 5329548 5329569 5329565 5329570 +
ataattgaaaaacaaggaaggt

SEQ ID NO: 101615 - DNA, 22 bp, Artificial Sequence
  Synthetic oligonucleotide; TTG chr11 5329555 5329576 5329572 5329577 +
aaaaacaaggaaggtaacaaat

SEQ ID NO: 101616 - DNA, 22 bp, Artificial Sequence
  Synthetic oligonucleotide; TTT chr11 5329586 5329607 5329603 5329608 +
gtataagtggggtacagtttat

SEQ ID NO: 101617 - DNA, 22 bp, Artificial Sequence
  Synthetic oligonucleotide; TTG chr11 5329587 5329608 5329604 5329609 +
tataagtggggtacagtttata

SEQ ID NO: 101618 - DNA, 22 bp, Artificial Sequence
  Synthetic oligonucleotide; TTT chr11 5329606 5329627 5329623 5329628 +
ataaaggaagaaaaaatacaca

SEQ ID NO: 101619 - DNA, 22 bp, Artificial Sequence
  Synthetic oligonucleotide; TTA chr11 5329607 5329628 5329624 5329629 +
taaaggaagaaaaaatacacag

SEQ ID NO: 101620 - DNA, 22 bp, Artificial Sequence
  Synthetic oligonucleotide; CTA chr11 5329633 5329654 5329650 5329655 +
tggggaaagagaaaatatgaca

SEQ ID NO: 101621 - DNA, 22 bp, Artificial Sequence
  Synthetic oligonucleotide; CTC chr11 5329660 5329681 5329677 5329682 +
aaatcaagagaattctagcaga

SEQ ID NO: 101622 - DNA, 22 bp, Artificial Sequence
  Synthetic oligonucleotide; TTC chr11 5329675 5329696 5329692 5329697 +
tagcagagccagaataacaaaa

SEQ ID NO: 101623 - DNA, 22 bp, Artificial Sequence
  Synthetic oligonucleotide; CTA chr11 5329677 5329698 5329694 5329699 +
gcagagccagaataacaaaaca

SEQ ID NO: 101624 - DNA, 22 bp, Artificial Sequence
  Synthetic oligonucleotide; TTG chr11 5329712 5329733 5329729 5329734 +
aacacaaagagaatctgtggta

SEQ ID NO: 101625 - DNA, 22 bp, Artificial Sequence
  Synthetic oligonucleotide; CTG chr11 5329729 5329750 5329746 5329751 +
tggtagcctgttggtttttgtt

SEQ ID NO: 101626 - DNA, 22 bp, Artificial Sequence
  Synthetic oligonucleotide; CTG chr11 5329739 5329760 5329756 5329761 +
ttggtttttgttaatccaaaat

SEQ ID NO: 101627 - DNA, 22 bp, Artificial Sequence
  Synthetic oligonucleotide; TTG chr11 5329742 5329763 5329759 5329764 +
gtttttgttaatccaaaataat

SEQ ID NO: 101628 - DNA, 22 bp, Artificial Sequence
  Synthetic oligonucleotide; TTT chr11 5329746 5329767 5329763 5329768 +
ttgttaatccaaaataatgtat

SEQ ID NO: 101629 - DNA, 22 bp, Artificial Sequence
  Synthetic oligonucleotide; TTT chr11 5329747 5329768 5329764 5329769 +
tgttaatccaaaataatgtatt

SEQ ID NO: 101630 - DNA, 22 bp, Artificial Sequence
  Synthetic oligonucleotide; TTT chr11 5329748 5329769 5329765 5329770 +
gttaatccaaaataatgtattt

SEQ ID NO: 101631 - DNA, 22 bp, Artificial Sequence
  Synthetic oligonucleotide; TTG chr11 5329749 5329770 5329766 5329771 +
ttaatccaaaataatgtatttt

SEQ ID NO: 101632 - DNA, 22 bp, Artificial Sequence
  Synthetic oligonucleotide; TTA chr11 5329752 5329773 5329769 5329774 +
atccaaaataatgtatttttat

SEQ ID NO: 101633 - DNA, 22 bp, Artificial Sequence
  Synthetic oligonucleotide; TTT chr11 5329770 5329791 5329787 5329792 +
ttattattattattattatact

SEQ ID NO: 101634 - DNA, 22 bp, Artificial Sequence
  Synthetic oligonucleotide; TTT chr11 5329771 5329792 5329788 5329793 +
tattattattattattatactt

SEQ ID NO: 101635 - DNA, 22 bp, Artificial Sequence
  Synthetic oligonucleotide; TTT chr11 5329772 5329793 5329789 5329794 +
attattattattattatacttt

SEQ ID NO: 101636 - DNA, 22 bp, Artificial Sequence
  Synthetic oligonucleotide; TTA chr11 5329773 5329794 5329790 5329795 +
ttattattattattatacttta

SEQ ID NO: 101637 - DNA, 22 bp, Artificial Sequence
  Synthetic oligonucleotide; TTA chr11 5329776 5329797 5329793 5329798 +
ttattattattatactttaagt

SEQ ID NO: 101638 - DNA, 22 bp, Artificial Sequence
  Synthetic oligonucleotide; TTA chr11 5329779 5329800 5329796 5329801 +
ttattattatactttaagtttt

SEQ ID NO: 101639 - DNA, 22 bp, Artificial Sequence
  Synthetic oligonucleotide; TTA chr11 5329782 5329803 5329799 5329804 +
ttattatactttaagttttagg

SEQ ID NO: 101640 - DNA, 22 bp, Artificial Sequence
  Synthetic oligonucleotide; TTA chr11 5329785 5329806 5329802 5329807 +
ttatactttaagttttagggta

SEQ ID NO: 101641 - DNA, 22 bp, Artificial Sequence
  Synthetic oligonucleotide; TTA chr11 5329788 5329809 5329805 5329810 +
tactttaagttttagggtacat

SEQ ID NO: 101642 - DNA, 22 bp, Artificial Sequence
  Synthetic oligonucleotide; CTT chr11 5329793 5329814 5329810 5329815 +
taagttttagggtacatgtgca

SEQ ID NO: 101643 - DNA, 22 bp, Artificial Sequence
  Synthetic oligonucleotide; TTT chr11 5329794 5329815 5329811 5329816 +
aagttttagggtacatgtgcac

SEQ ID NO: 101644 - DNA, 22 bp, Artificial Sequence
  Synthetic oligonucleotide; TTA chr11 5329795 5329816 5329812 5329817 +
agttttagggtacatgtgcaca

SEQ ID NO: 101645 - DNA, 22 bp, Artificial Sequence
  Synthetic oligonucleotide; TTT chr11 5329800 5329821 5329817 5329822 +
tagggtacatgtgcacaatgtg

SEQ ID NO: 101646 - DNA, 22 bp, Artificial Sequence
  Synthetic oligonucleotide; TTT chr11 5329801 5329822 5329818 5329823 +
agggtacatgtgcacaatgtgc

SEQ ID NO: 101647 - DNA, 22 bp, Artificial Sequence
  Synthetic oligonucleotide; TTA chr11 5329802 5329823 5329819 5329824 +
gggtacatgtgcacaatgtgca

SEQ ID NO: 101648 - DNA, 22 bp, Artificial Sequence
  Synthetic oligonucleotide; TTT chr11 5329829 5329850 5329846 5329851 +
gttacatatgtatacatgtgcc

SEQ ID NO: 101649 - DNA, 22 bp, Artificial Sequence
  Synthetic oligonucleotide; TTG chr11 5329830 5329851 5329847 5329852 +
ttacatatgtatacatgtgcca

SEQ ID NO: 101650 - DNA, 22 bp, Artificial Sequence
  Synthetic oligonucleotide; TTA chr11 5329833 5329854 5329850 5329855 +
catatgtatacatgtgccatgt

SEQ ID NO: 101651 - DNA, 22 bp, Artificial Sequence
  Synthetic oligonucleotide; TTG chr11 5329857 5329878 5329874 5329879 +
gtgtgctgcacccattaacttg

SEQ ID NO: 101652 - DNA, 22 bp, Artificial Sequence
  Synthetic oligonucleotide; CTG chr11 5329865 5329886 5329882 5329887 +
cacccattaacttgtcacttag

SEQ ID NO: 101653 - DNA, 22 bp, Artificial Sequence
  Synthetic oligonucleotide; TTA chr11 5329874 5329895 5329891 5329896 +
acttgtcacttagcattaggta

SEQ ID NO: 101654 - DNA, 22 bp, Artificial Sequence
  Synthetic oligonucleotide; CTT chr11 5329878 5329899 5329895 5329900 +
gtcacttagcattaggtatatc

SEQ ID NO: 101655 - DNA, 22 bp, Artificial Sequence
  Synthetic oligonucleotide; TTG chr11 5329879 5329900 5329896 5329901 +
tcacttagcattaggtatatct

SEQ ID NO: 101656 - DNA, 22 bp, Artificial Sequence
  Synthetic oligonucleotide; CTT chr11 5329885 5329906 5329902 5329907 +
agcattaggtatatctcctaat

SEQ ID NO: 101657 - DNA, 22 bp, Artificial Sequence
  Synthetic oligonucleotide; TTA chr11 5329886 5329907 5329903 5329908 +
gcattaggtatatctcctaatg

SEQ ID NO: 101658 - DNA, 22 bp, Artificial Sequence
  Synthetic oligonucleotide; TTA chr11 5329892 5329913 5329909 5329914 +
ggtatatctcctaatgctctct

SEQ ID NO: 101659 - DNA, 22 bp, Artificial Sequence
  Synthetic oligonucleotide; CTC chr11 5329902 5329923 5329919 5329924 +
ctaatgctctctctcccccttc

SEQ ID NO: 101660 - DNA, 22 bp, Artificial Sequence
  Synthetic oligonucleotide; CTA chr11 5329905 5329926 5329922 5329927 +
atgctctctctcccccttcccc

SEQ ID NO: 101661 - DNA, 22 bp, Artificial Sequence
  Synthetic oligonucleotide; CTC chr11 5329911 5329932 5329928 5329933 +
tctctcccccttccccccacct

SEQ ID NO: 101662 - DNA, 22 bp, Artificial Sequence
  Synthetic oligonucleotide; CTC chr11 5329913 5329934 5329930 5329935 +
tctcccccttccccccacctca

SEQ ID NO: 101663 - DNA, 22 bp, Artificial Sequence
  Synthetic oligonucleotide; CTC chr11 5329915 5329936 5329932 5329937 +
tcccccttccccccacctcaca

SEQ ID NO: 101664 - DNA, 22 bp, Artificial Sequence
  Synthetic oligonucleotide; CTC chr11 5329917 5329938 5329934 5329939 +
ccccttccccccacctcacaac

SEQ ID NO: 101665 - DNA, 22 bp, Artificial Sequence
  Synthetic oligonucleotide; CTT chr11 5329923 5329944 5329940 5329945 +
ccccccacctcacaacagtccc

SEQ ID NO: 101666 - DNA, 22 bp, Artificial Sequence
  Synthetic oligonucleotide; TTC chr11 5329924 5329945 5329941 5329946 +
cccccacctcacaacagtcccc

SEQ ID NO: 101667 - DNA, 22 bp, Artificial Sequence
  Synthetic oligonucleotide; CTC chr11 5329934 5329955 5329951 5329956 +
acaacagtccccggagtgtgtt

SEQ ID NO: 101668 - DNA, 22 bp, Artificial Sequence
  Synthetic oligonucleotide; TTG chr11 5329957 5329978 5329974 5329979 +
ttccccttcctgtgtccatgtg

SEQ ID NO: 101669 - DNA, 22 bp, Artificial Sequence
  Synthetic oligonucleotide; TTC chr11 5329960 5329981 5329977 5329982 +
cccttcctgtgtccatgtgttc

SEQ ID NO: 101670 - DNA, 22 bp, Artificial Sequence
  Synthetic oligonucleotide; CTT chr11 5329965 5329986 5329982 5329987 +
cctgtgtccatgtgttctcatt

SEQ ID NO: 101671 - DNA, 22 bp, Artificial Sequence
  Synthetic oligonucleotide; TTC chr11 5329966 5329987 5329983 5329988 +
ctgtgtccatgtgttctcattg

SEQ ID NO: 101672 - DNA, 22 bp, Artificial Sequence
  Synthetic oligonucleotide; CTG chr11 5329969 5329990 5329986 5329991 +
tgtccatgtgttctcattgttc

SEQ ID NO: 101673 - DNA, 22 bp, Artificial Sequence
  Synthetic oligonucleotide; TTC chr11 5329982 5330003 5329999 5330004 +
tcattgttcaattcccacctat

SEQ ID NO: 101674 - DNA, 22 bp, Artificial Sequence
  Synthetic oligonucleotide; CTC chr11 5329984 5330005 5330001 5330006 +
attgttcaattcccacctatga

SEQ ID NO: 101675 - DNA, 22 bp, Artificial Sequence
  Synthetic oligonucleotide; TTG chr11 5329988 5330009 5330005 5330010 +
ttcaattcccacctatgagtga

SEQ ID NO: 101676 - DNA, 22 bp, Artificial Sequence
  Synthetic oligonucleotide; TTC chr11 5329991 5330012 5330008 5330013 +
aattcccacctatgagtgagaa

SEQ ID NO: 101677 - DNA, 22 bp, Artificial Sequence
  Synthetic oligonucleotide; TTC chr11 5329996 5330017 5330013 5330018 +
ccacctatgagtgagaacatgc

SEQ ID NO: 101678 - DNA, 22 bp, Artificial Sequence
  Synthetic oligonucleotide; CTA chr11 5330003 5330024 5330020 5330025 +
tgagtgagaacatgcagtgctt

SEQ ID NO: 101679 - DNA, 22 bp, Artificial Sequence
  Synthetic oligonucleotide; CTT chr11 5330025 5330046 5330042 5330047 +
ggttttttgtccttgcgatagt

SEQ ID NO: 101680 - DNA, 22 bp, Artificial Sequence
  Synthetic oligonucleotide; TTG chr11 5330026 5330047 5330043 5330048 +
gttttttgtccttgcgatagtt

SEQ ID NO: 101681 - DNA, 22 bp, Artificial Sequence
  Synthetic oligonucleotide; TTT chr11 5330030 5330051 5330047 5330052 +
tttgtccttgcgatagtttgct

SEQ ID NO: 101682 - DNA, 22 bp, Artificial Sequence
  Synthetic oligonucleotide; TTT chr11 5330031 5330052 5330048 5330053 +
ttgtccttgcgatagtttgctg

SEQ ID NO: 101683 - DNA, 22 bp, Artificial Sequence
  Synthetic oligonucleotide; TTT chr11 5330032 5330053 5330049 5330054 +
tgtccttgcgatagtttgctga

SEQ ID NO: 101684 - DNA, 22 bp, Artificial Sequence
  Synthetic oligonucleotide; TTT chr11 5330033 5330054 5330050 5330055 +
gtccttgcgatagtttgctgag

SEQ ID NO: 101685 - DNA, 22 bp, Artificial Sequence
  Synthetic oligonucleotide; TTG chr11 5330034 5330055 5330051 5330056 +
tccttgcgatagtttgctgaga

SEQ ID NO: 101686 - DNA, 22 bp, Artificial Sequence
  Synthetic oligonucleotide; CTT chr11 5330039 5330060 5330056 5330061 +
gcgatagtttgctgagaatgat

SEQ ID NO: 101687 - DNA, 22 bp, Artificial Sequence
  Synthetic oligonucleotide; TTG chr11 5330040 5330061 5330057 5330062 +
cgatagtttgctgagaatgatg

SEQ ID NO: 101688 - DNA, 22 bp, Artificial Sequence
  Synthetic oligonucleotide; TTT chr11 5330049 5330070 5330066 5330071 +
gctgagaatgatggtttccagt

SEQ ID NO: 101689 - DNA, 22 bp, Artificial Sequence
  Synthetic oligonucleotide; TTG chr11 5330050 5330071 5330067 5330072 +
ctgagaatgatggtttccagtt

SEQ ID NO: 101690 - DNA, 22 bp, Artificial Sequence
  Synthetic oligonucleotide; CTG chr11 5330053 5330074 5330070 5330075 +
agaatgatggtttccagtttca

SEQ ID NO: 101691 - DNA, 22 bp, Artificial Sequence
  Synthetic oligonucleotide; TTT chr11 5330066 5330087 5330083 5330088 +
ccagtttcatccatgtccctac

SEQ ID NO: 101692 - DNA, 22 bp, Artificial Sequence
  Synthetic oligonucleotide; TTC chr11 5330067 5330088 5330084 5330089 +
cagtttcatccatgtccctaca

SEQ ID NO: 101693 - DNA, 22 bp, Artificial Sequence
  Synthetic oligonucleotide; TTT chr11 5330073 5330094 5330090 5330095 +
catccatgtccctacaaatgac

SEQ ID NO: 101694 - DNA, 22 bp, Artificial Sequence
  Synthetic oligonucleotide; TTC chr11 5330074 5330095 5330091 5330096 +
atccatgtccctacaaatgaca

SEQ ID NO: 101695 - DNA, 22 bp, Artificial Sequence
  Synthetic oligonucleotide; CTA chr11 5330087 5330108 5330104 5330109 +
caaatgacatgaactcttcatt

SEQ ID NO: 101696 - DNA, 22 bp, Artificial Sequence
  Synthetic oligonucleotide; CTC chr11 5330103 5330124 5330120 5330125 +
ttcattttttatggctgcatag

SEQ ID NO: 101697 - DNA, 22 bp, Artificial Sequence
  Synthetic oligonucleotide; CTT chr11 5330105 5330126 5330122 5330127 +
cattttttatggctgcatagta

SEQ ID NO: 101698 - DNA, 22 bp, Artificial Sequence
  Synthetic oligonucleotide; TTC chr11 5330106 5330127 5330123 5330128 +
attttttatggctgcatagtat

SEQ ID NO: 101699 - DNA, 22 bp, Artificial Sequence
  Synthetic oligonucleotide; TTT chr11 5330110 5330131 5330127 5330132 +
tttatggctgcatagtattcca

SEQ ID NO: 101700 - DNA, 22 bp, Artificial Sequence
  Synthetic oligonucleotide; TTT chr11 5330111 5330132 5330128 5330133 +
ttatggctgcatagtattccat

SEQ ID NO: 101701 - DNA, 22 bp, Artificial Sequence
  Synthetic oligonucleotide; TTT chr11 5330112 5330133 5330129 5330134 +
tatggctgcatagtattccatg

SEQ ID NO: 101702 - DNA, 22 bp, Artificial Sequence
  Synthetic oligonucleotide; TTT chr11 5330113 5330134 5330130 5330135 +
atggctgcatagtattccatgg

SEQ ID NO: 101703 - DNA, 22 bp, Artificial Sequence
  Synthetic oligonucleotide; TTA chr11 5330114 5330135 5330131 5330136 +
tggctgcatagtattccatggt

SEQ ID NO: 101704 - DNA, 22 bp, Artificial Sequence
  Synthetic oligonucleotide; CTG chr11 5330120 5330141 5330137 5330142 +
catagtattccatggtgtatat

SEQ ID NO: 101705 - DNA, 22 bp, Artificial Sequence
  Synthetic oligonucleotide; TTC chr11 5330130 5330151 5330147 5330152 +
catggtgtatatgtgccacatt

SEQ ID NO: 101706 - DNA, 22 bp, Artificial Sequence
  Synthetic oligonucleotide; TTT chr11 5330153 5330174 5330170 5330175 +
tcttaattcagtctatcattgt

SEQ ID NO: 101707 - DNA, 22 bp, Artificial Sequence
  Synthetic oligonucleotide; TTT chr11 5330154 5330175 5330171 5330176 +
cttaattcagtctatcattgtt

SEQ ID NO: 101708 - DNA, 22 bp, Artificial Sequence
  Synthetic oligonucleotide; TTC chr11 5330155 5330176 5330172 5330177 +
ttaattcagtctatcattgttg

SEQ ID NO: 101709 - DNA, 22 bp, Artificial Sequence
  Synthetic oligonucleotide; CTT chr11 5330157 5330178 5330174 5330179 +
aattcagtctatcattgttgga

SEQ ID NO: 101710 - DNA, 22 bp, Artificial Sequence
  Synthetic oligonucleotide; TTA chr11 5330158 5330179 5330175 5330180 +
attcagtctatcattgttggac

SEQ ID NO: 101711 - DNA, 22 bp, Artificial Sequence
  Synthetic oligonucleotide; TTC chr11 5330162 5330183 5330179 5330184 +
agtctatcattgttggacattt

SEQ ID NO: 101712 - DNA, 22 bp, Artificial Sequence
  Synthetic oligonucleotide; CTA chr11 5330168 5330189 5330185 5330190 +
tcattgttggacatttgggttg

SEQ ID NO: 101713 - DNA, 22 bp, Artificial Sequence
  Synthetic oligonucleotide; TTG chr11 5330174 5330195 5330191 5330196 +
ttggacatttgggttggttcca

SEQ ID NO: 101714 - DNA, 22 bp, Artificial Sequence
  Synthetic oligonucleotide; TTG chr11 5330177 5330198 5330194 5330199 +
gacatttgggttggttccaagt

SEQ ID NO: 101715 - DNA, 22 bp, Artificial Sequence
  Synthetic oligonucleotide; TTT chr11 5330184 5330205 5330201 5330206 +
gggttggttccaagtctttgct

SEQ ID NO: 101716 - DNA, 22 bp, Artificial Sequence
  Synthetic oligonucleotide; TTG chr11 5330185 5330206 5330202 5330207 +
ggttggttccaagtctttgcta

SEQ ID NO: 101717 - DNA, 22 bp, Artificial Sequence
  Synthetic oligonucleotide; TTG chr11 5330190 5330211 5330207 5330212 +
gttccaagtctttgctattgtg

SEQ ID NO: 101718 - DNA, 22 bp, Artificial Sequence
  Synthetic oligonucleotide; TTC chr11 5330194 5330215 5330211 5330216 +
caagtctttgctattgtgaata

SEQ ID NO: 101719 - DNA, 22 bp, Artificial Sequence
  Synthetic oligonucleotide; CTT chr11 5330202 5330223 5330219 5330224 +
tgctattgtgaatagtgccaca

SEQ ID NO: 101720 - DNA, 22 bp, Artificial Sequence
  Synthetic oligonucleotide; TTT chr11 5330203 5330224 5330220 5330225 +
gctattgtgaatagtgccacag

SEQ ID NO: 101721 - DNA, 22 bp, Artificial Sequence
  Synthetic oligonucleotide; TTG chr11 5330204 5330225 5330221 5330226 +
ctattgtgaatagtgccacagt

SEQ ID NO: 101722 - DNA, 22 bp, Artificial Sequence
  Synthetic oligonucleotide; CTA chr11 5330207 5330228 5330224 5330229 +
ttgtgaatagtgccacagtaaa

SEQ ID NO: 101723 - DNA, 22 bp, Artificial Sequence
  Synthetic oligonucleotide; TTG chr11 5330210 5330231 5330227 5330232 +
tgaatagtgccacagtaaacat

SEQ ID NO: 101724 - DNA, 22 bp, Artificial Sequence
  Synthetic oligonucleotide; CTT chr11 5330249 5330270 5330266 5330271 +
tatagcagcatgatttataatc

SEQ ID NO: 101725 - DNA, 22 bp, Artificial Sequence
  Synthetic oligonucleotide; TTT chr11 5330250 5330271 5330267 5330272 +
atagcagcatgatttataatcc

SEQ ID NO: 101726 - DNA, 22 bp, Artificial Sequence
  Synthetic oligonucleotide; TTA chr11 5330251 5330272 5330268 5330273 +
tagcagcatgatttataatccg

SEQ ID NO: 101727 - DNA, 22 bp, Artificial Sequence
  Synthetic oligonucleotide; TTT chr11 5330265 5330286 5330282 5330287 +
ataatccgttgggtatataccc

SEQ ID NO: 101728 - DNA, 22 bp, Artificial Sequence
  Synthetic oligonucleotide; TTA chr11 5330266 5330287 5330283 5330288 +
taatccgttgggtatataccca

SEQ ID NO: 101729 - DNA, 22 bp, Artificial Sequence
  Synthetic oligonucleotide; TTG chr11 5330276 5330297 5330293 5330298 +
ggtatatacccagtaatgggat

SEQ ID NO: 101730 - DNA, 22 bp, Artificial Sequence
  Synthetic oligonucleotide; CTG chr11 5330303 5330324 5330320 5330325 +
ggtcaaatggtatttctagttc

SEQ ID NO: 101731 - DNA, 22 bp, Artificial Sequence
  Synthetic oligonucleotide; TTT chr11 5330318 5330339 5330335 5330340 +
ctagttctagatccctgaggaa

SEQ ID NO: 101732 - DNA, 22 bp, Artificial Sequence
  Synthetic oligonucleotide; TTC chr11 5330319 5330340 5330336 5330341 +
tagttctagatccctgaggaat

SEQ ID NO: 101733 - DNA, 22 bp, Artificial Sequence
  Synthetic oligonucleotide; CTA chr11 5330321 5330342 5330338 5330343 +
gttctagatccctgaggaatcg

SEQ ID NO: 101734 - DNA, 22 bp, Artificial Sequence
  Synthetic oligonucleotide; TTC chr11 5330325 5330346 5330342 5330347 +
tagatccctgaggaatcgccac

SEQ ID NO: 101735 - DNA, 22 bp, Artificial Sequence
  Synthetic oligonucleotide; CTA chr11 5330327 5330348 5330344 5330349 +
gatccctgaggaatcgccacac

SEQ ID NO: 101736 - DNA, 22 bp, Artificial Sequence
  Synthetic oligonucleotide; CTG chr11 5330335 5330356 5330352 5330357 +
aggaatcgccacactgacttcc

SEQ ID NO: 101737 - DNA, 22 bp, Artificial Sequence
  Synthetic oligonucleotide; CTG chr11 5330351 5330372 5330368 5330373 +
acttccacaatggttgaactag

SEQ ID NO: 101738 - DNA, 22 bp, Artificial Sequence
  Synthetic oligonucleotide; CTT chr11 5330355 5330376 5330372 5330377 +
ccacaatggttgaactagttta

SEQ ID NO: 101739 - DNA, 22 bp, Artificial Sequence
  Synthetic oligonucleotide; TTC chr11 5330356 5330377 5330373 5330378 +
cacaatggttgaactagtttac

SEQ ID NO: 101740 - DNA, 22 bp, Artificial Sequence
  Synthetic oligonucleotide; TTG chr11 5330367 5330388 5330384 5330389 +
aactagtttacagtcccaccaa

SEQ ID NO: 101741 - DNA, 22 bp, Artificial Sequence
  Synthetic oligonucleotide; CTA chr11 5330372 5330393 5330389 5330394 +
gtttacagtcccaccaagagtg

SEQ ID NO: 101742 - DNA, 22 bp, Artificial Sequence
  Synthetic oligonucleotide; TTT chr11 5330376 5330397 5330393 5330398 +
acagtcccaccaagagtgtaaa

SEQ ID NO: 101743 - DNA, 22 bp, Artificial Sequence
  Synthetic oligonucleotide; TTA chr11 5330377 5330398 5330394 5330399 +
cagtcccaccaagagtgtaaaa

SEQ ID NO: 101744 - DNA, 22 bp, Artificial Sequence
  Synthetic oligonucleotide; TTC chr11 5330405 5330426 5330422 5330427 +
ctatttctccacatcctctcca

SEQ ID NO: 101745 - DNA, 22 bp, Artificial Sequence
  Synthetic oligonucleotide; CTA chr11 5330408 5330429 5330425 5330430 +
tttctccacatcctctccagca

SEQ ID NO: 101746 - DNA, 22 bp, Artificial Sequence
  Synthetic oligonucleotide; TTT chr11 5330411 5330432 5330428 5330433 +
ctccacatcctctccagcacct

SEQ ID NO: 101747 - DNA, 22 bp, Artificial Sequence
  Synthetic oligonucleotide; TTC chr11 5330412 5330433 5330429 5330434 +
tccacatcctctccagcacctg

SEQ ID NO: 101748 - DNA, 22 bp, Artificial Sequence
  Synthetic oligonucleotide; CTC chr11 5330414 5330435 5330431 5330436 +
cacatcctctccagcacctgtt

SEQ ID NO: 101749 - DNA, 22 bp, Artificial Sequence
  Synthetic oligonucleotide; CTC chr11 5330423 5330444 5330440 5330445 +
tccagcacctgttgttccctga

SEQ ID NO: 101750 - DNA, 22 bp, Artificial Sequence
  Synthetic oligonucleotide; CTC chr11 5330425 5330446 5330442 5330447 +
cagcacctgttgttccctgact

SEQ ID NO: 101751 - DNA, 22 bp, Artificial Sequence
  Synthetic oligonucleotide; CTG chr11 5330434 5330455 5330451 5330456 +
ttgttccctgactttttaatga

SEQ ID NO: 101752 - DNA, 22 bp, Artificial Sequence
  Synthetic oligonucleotide; TTG chr11 5330437 5330458 5330454 5330459 +
ttccctgactttttaatgattg

SEQ ID NO: 101753 - DNA, 22 bp, Artificial Sequence
  Synthetic oligonucleotide; TTC chr11 5330440 5330461 5330457 5330462 +
cctgactttttaatgattgcca

SEQ ID NO: 101754 - DNA, 22 bp, Artificial Sequence
  Synthetic oligonucleotide; CTG chr11 5330444 5330465 5330461 5330466 +
actttttaatgattgccattct

SEQ ID NO: 101755 - DNA, 22 bp, Artificial Sequence
  Synthetic oligonucleotide; CTT chr11 5330448 5330469 5330465 5330470 +
tttaatgattgccattctaact

SEQ ID NO: 101756 - DNA, 22 bp, Artificial Sequence
  Synthetic oligonucleotide; TTT chr11 5330449 5330470 5330466 5330471 +
ttaatgattgccattctaactg

SEQ ID NO: 101757 - DNA, 22 bp, Artificial Sequence
  Synthetic oligonucleotide; TTT chr11 5330450 5330471 5330467 5330472 +
taatgattgccattctaactgg

SEQ ID NO: 101758 - DNA, 22 bp, Artificial Sequence
  Synthetic oligonucleotide; TTT chr11 5330451 5330472 5330468 5330473 +
aatgattgccattctaactggt

SEQ ID NO: 101759 - DNA, 22 bp, Artificial Sequence
  Synthetic oligonucleotide; TTA chr11 5330452 5330473 5330469 5330474 +
atgattgccattctaactggtg

SEQ ID NO: 101760 - DNA, 22 bp, Artificial Sequence
  Synthetic oligonucleotide; TTG chr11 5330459 5330480 5330476 5330481 +
ccattctaactggtgtgagatg

SEQ ID NO: 101761 - DNA, 22 bp, Artificial Sequence
  Synthetic oligonucleotide; TTC chr11 5330465 5330486 5330482 5330487 +
taactggtgtgagatggtatct

SEQ ID NO: 101762 - DNA, 22 bp, Artificial Sequence
  Synthetic oligonucleotide; CTA chr11 5330467 5330488 5330484 5330489 +
actggtgtgagatggtatctct

SEQ ID NO: 101763 - DNA, 22 bp, Artificial Sequence
  Synthetic oligonucleotide; CTG chr11 5330471 5330492 5330488 5330493 +
gtgtgagatggtatctctttgt

SEQ ID NO: 101764 - DNA, 22 bp, Artificial Sequence
  Synthetic oligonucleotide; CTC chr11 5330488 5330509 5330505 5330510 +
tttgtggttttgatttgcattg

SEQ ID NO: 101765 - DNA, 22 bp, Artificial Sequence
  Synthetic oligonucleotide; CTT chr11 5330490 5330511 5330507 5330512 +
tgtggttttgatttgcattgtg

SEQ ID NO: 101766 - DNA, 22 bp, Artificial Sequence
  Synthetic oligonucleotide; TTT chr11 5330491 5330512 5330508 5330513 +
gtggttttgatttgcattgtga

SEQ ID NO: 101767 - DNA, 22 bp, Artificial Sequence
  Synthetic oligonucleotide; TTG chr11 5330492 5330513 5330509 5330514 +
tggttttgatttgcattgtgac

SEQ ID NO: 101768 - DNA, 22 bp, Artificial Sequence
  Synthetic oligonucleotide; TTT chr11 5330498 5330519 5330515 5330520 +
tgatttgcattgtgacgtgtta

SEQ ID NO: 101769 - DNA, 22 bp, Artificial Sequence
  Synthetic oligonucleotide; TTT chr11 5330499 5330520 5330516 5330521 +
gatttgcattgtgacgtgttag

SEQ ID NO: 101770 - DNA, 22 bp, Artificial Sequence
  Synthetic oligonucleotide; TTG chr11 5330500 5330521 5330517 5330522 +
atttgcattgtgacgtgttagt

SEQ ID NO: 101771 - DNA, 22 bp, Artificial Sequence
  Synthetic oligonucleotide; TTT chr11 5330504 5330525 5330521 5330526 +
gcattgtgacgtgttagtttta

SEQ ID NO: 101772 - DNA, 22 bp, Artificial Sequence
  Synthetic oligonucleotide; TTG chr11 5330505 5330526 5330522 5330527 +
cattgtgacgtgttagttttaa

SEQ ID NO: 101773 - DNA, 22 bp, Artificial Sequence
  Synthetic oligonucleotide; TTG chr11 5330510 5330531 5330527 5330532 +
tgacgtgttagttttaaagtat

SEQ ID NO: 101774 - DNA, 22 bp, Artificial Sequence
  Synthetic oligonucleotide; TTA chr11 5330520 5330541 5330537 5330542 +
gttttaaagtatgtgtgaaata

SEQ ID NO: 101775 - DNA, 22 bp, Artificial Sequence
  Synthetic oligonucleotide; TTT chr11 5330524 5330545 5330541 5330546 +
taaagtatgtgtgaaataattt

SEQ ID NO: 101776 - DNA, 22 bp, Artificial Sequence
  Synthetic oligonucleotide; TTT chr11 5330525 5330546 5330542 5330547 +
aaagtatgtgtgaaataatttt

SEQ ID NO: 101777 - DNA, 22 bp, Artificial Sequence
  Synthetic oligonucleotide; TTA chr11 5330526 5330547 5330543 5330548 +
aagtatgtgtgaaataattttt

SEQ ID NO: 101778 - DNA, 22 bp, Artificial Sequence
  Synthetic oligonucleotide; TTT chr11 5330546 5330567 5330563 5330568 +
ttattcttaacatttttttgat

SEQ ID NO: 101779 - DNA, 22 bp, Artificial Sequence
  Synthetic oligonucleotide; TTT chr11 5330547 5330568 5330564 5330569 +
tattcttaacatttttttgatg

SEQ ID NO: 101780 - DNA, 22 bp, Artificial Sequence
  Synthetic oligonucleotide; TTT chr11 5330548 5330569 5330565 5330570 +
attcttaacatttttttgatga

SEQ ID NO: 101781 - DNA, 22 bp, Artificial Sequence
  Synthetic oligonucleotide; TTA chr11 5330549 5330570 5330566 5330571 +
ttcttaacatttttttgatgaa

SEQ ID NO: 101782 - DNA, 22 bp, Artificial Sequence
  Synthetic oligonucleotide; TTC chr11 5330552 5330573 5330569 5330574 +
ttaacatttttttgatgaagca

SEQ ID NO: 101783 - DNA, 22 bp, Artificial Sequence
  Synthetic oligonucleotide; CTT chr11 5330554 5330575 5330571 5330576 +
aacatttttttgatgaagcaca

SEQ ID NO: 101784 - DNA, 22 bp, Artificial Sequence
  Synthetic oligonucleotide; TTA chr11 5330555 5330576 5330572 5330577 +
acatttttttgatgaagcacag

SEQ ID NO: 101785 - DNA, 22 bp, Artificial Sequence
  Synthetic oligonucleotide; TTT chr11 5330561 5330582 5330578 5330583 +
ttttgatgaagcacagtgtctg

SEQ ID NO: 101786 - DNA, 22 bp, Artificial Sequence
  Synthetic oligonucleotide; TTT chr11 5330562 5330583 5330579 5330584 +
tttgatgaagcacagtgtctga

SEQ ID NO: 101787 - DNA, 22 bp, Artificial Sequence
  Synthetic oligonucleotide; TTT chr11 5330563 5330584 5330580 5330585 +
ttgatgaagcacagtgtctgaa

SEQ ID NO: 101788 - DNA, 22 bp, Artificial Sequence
  Synthetic oligonucleotide; TTT chr11 5330564 5330585 5330581 5330586 +
tgatgaagcacagtgtctgaaa

SEQ ID NO: 101789 - DNA, 22 bp, Artificial Sequence
  Synthetic oligonucleotide; TTT chr11 5330565 5330586 5330582 5330587 +
gatgaagcacagtgtctgaaag

SEQ ID NO: 101790 - DNA, 22 bp, Artificial Sequence
  Synthetic oligonucleotide; TTG chr11 5330566 5330587 5330583 5330588 +
atgaagcacagtgtctgaaagg

SEQ ID NO: 101791 - DNA, 22 bp, Artificial Sequence
  Synthetic oligonucleotide; CTG chr11 5330583 5330604 5330600 5330605 +
aaagggtggtagcccaatcaag

SEQ ID NO: 101792 - DNA, 22 bp, Artificial Sequence
  Synthetic oligonucleotide; TTA chr11 5330613 5330634 5330630 5330635 +
aaaaccagaacacagctaatgt

SEQ ID NO: 101793 - DNA, 22 bp, Artificial Sequence
  Synthetic oligonucleotide; CTA chr11 5330631 5330652 5330648 5330653 +
atgtgagaaatacaagtattta

SEQ ID NO: 101794 - DNA, 22 bp, Artificial Sequence
  Synthetic oligonucleotide; TTT chr11 5330652 5330673 5330669 5330674 +
agggccttagtctgctccttgt

SEQ ID NO: 101795 - DNA, 22 bp, Artificial Sequence
  Synthetic oligonucleotide; TTA chr11 5330653 5330674 5330670 5330675 +
gggccttagtctgctccttgtc

SEQ ID NO: 101796 - DNA, 22 bp, Artificial Sequence
  Synthetic oligonucleotide; CTT chr11 5330660 5330681 5330677 5330682 +
agtctgctccttgtctgaggca

SEQ ID NO: 101797 - DNA, 22 bp, Artificial Sequence
  Synthetic oligonucleotide; TTA chr11 5330661 5330682 5330678 5330683 +
gtctgctccttgtctgaggcaa

SEQ ID NO: 101798 - DNA, 22 bp, Artificial Sequence
  Synthetic oligonucleotide; CTG chr11 5330666 5330687 5330683 5330688 +
ctccttgtctgaggcaattccc

SEQ ID NO: 101799 - DNA, 22 bp, Artificial Sequence
  Synthetic oligonucleotide; CTC chr11 5330669 5330690 5330686 5330691 +
cttgtctgaggcaattcccatg

SEQ ID NO: 101800 - DNA, 22 bp, Artificial Sequence
  Synthetic oligonucleotide; CTT chr11 5330672 5330693 5330689 5330694 +
gtctgaggcaattcccatgacc

SEQ ID NO: 101801 - DNA, 22 bp, Artificial Sequence
  Synthetic oligonucleotide; TTG chr11 5330673 5330694 5330690 5330695 +
tctgaggcaattcccatgacct

SEQ ID NO: 101802 - DNA, 22 bp, Artificial Sequence
  Synthetic oligonucleotide; CTG chr11 5330677 5330698 5330694 5330699 +
aggcaattcccatgaccttctt

SEQ ID NO: 101803 - DNA, 22 bp, Artificial Sequence
  Synthetic oligonucleotide; TTC chr11 5330686 5330707 5330703 5330708 +
ccatgaccttcttaaggatcag

SEQ ID NO: 101804 - DNA, 22 bp, Artificial Sequence
  Synthetic oligonucleotide; CTT chr11 5330696 5330717 5330713 5330718 +
cttaaggatcagaatgtaagag

SEQ ID NO: 101805 - DNA, 22 bp, Artificial Sequence
  Synthetic oligonucleotide; TTC chr11 5330697 5330718 5330714 5330719 +
ttaaggatcagaatgtaagaga

SEQ ID NO: 101806 - DNA, 22 bp, Artificial Sequence
  Synthetic oligonucleotide; CTT chr11 5330699 5330720 5330716 5330721 +
aaggatcagaatgtaagagata

SEQ ID NO: 101807 - DNA, 22 bp, Artificial Sequence
  Synthetic oligonucleotide; TTA chr11 5330700 5330721 5330717 5330722 +
aggatcagaatgtaagagataa

SEQ ID NO: 101808 - DNA, 22 bp, Artificial Sequence
  Synthetic oligonucleotide; TTG chr11 5330752 5330773 5330769 5330774 +
atgagaccaggactataggata

SEQ ID NO: 101809 - DNA, 22 bp, Artificial Sequence
  Synthetic oligonucleotide; CTA chr11 5330767 5330788 5330784 5330789 +
taggataaagtctattaaaggt

SEQ ID NO: 101810 - DNA, 22 bp, Artificial Sequence
  Synthetic oligonucleotide; CTA chr11 5330781 5330802 5330798 5330803 +
ttaaaggtgatgtctgcacagg

SEQ ID NO: 101811 - DNA, 22 bp, Artificial Sequence
  Synthetic oligonucleotide; TTA chr11 5330784 5330805 5330801 5330806 +
aaggtgatgtctgcacaggcca

SEQ ID NO: 101812 - DNA, 22 bp, Artificial Sequence
  Synthetic oligonucleotide; CTG chr11 5330797 5330818 5330814 5330819 +
cacaggccagtttgatcacatc

SEQ ID NO: 101813 - DNA, 22 bp, Artificial Sequence
  Synthetic oligonucleotide; TTT chr11 5330810 5330831 5330827 5330832 +
gatcacatctggtgcaggcaga

SEQ ID NO: 101814 - DNA, 22 bp, Artificial Sequence
  Synthetic oligonucleotide; TTG chr11 5330811 5330832 5330828 5330833 +
atcacatctggtgcaggcagaa

SEQ ID NO: 101815 - DNA, 22 bp, Artificial Sequence
  Synthetic oligonucleotide; CTG chr11 5330821 5330842 5330838 5330843 +
gtgcaggcagaaagcatgggag

SEQ ID NO: 101816 - DNA, 22 bp, Artificial Sequence
  Synthetic oligonucleotide; TTG chr11 5330857 5330878 5330874 5330879 +
acagtaggggaatccagagagg

SEQ ID NO: 101817 - DNA, 22 bp, Artificial Sequence
  Synthetic oligonucleotide; TTA chr11 5330889 5330910 5330906 5330911 +
tgggcacaattagcataacaaa

SEQ ID NO: 101818 - DNA, 22 bp, Artificial Sequence
  Synthetic oligonucleotide; TTA chr11 5330901 5330922 5330918 5330923 +
gcataacaaatcccctcatttg

SEQ ID NO: 101819 - DNA, 22 bp, Artificial Sequence
  Synthetic oligonucleotide; CTC chr11 5330918 5330939 5330935 5330940 +
atttgaacccccagatctatct

SEQ ID NO: 101820 - DNA, 22 bp, Artificial Sequence
  Synthetic oligonucleotide; TTT chr11 5330922 5330943 5330939 5330944 +
gaacccccagatctatcttcac

SEQ ID NO: 101821 - DNA, 22 bp, Artificial Sequence
  Synthetic oligonucleotide; TTG chr11 5330923 5330944 5330940 5330945 +
aacccccagatctatcttcacc

SEQ ID NO: 101822 - DNA, 22 bp, Artificial Sequence
  Synthetic oligonucleotide; CTA chr11 5330937 5330958 5330954 5330959 +
tcttcaccaccttagcattggt

SEQ ID NO: 101823 - DNA, 22 bp, Artificial Sequence
  Synthetic oligonucleotide; CTT chr11 5330941 5330962 5330958 5330963 +
caccaccttagcattggtgaga

SEQ ID NO: 101824 - DNA, 22 bp, Artificial Sequence
  Synthetic oligonucleotide; TTC chr11 5330942 5330963 5330959 5330964 +
accaccttagcattggtgagaa

SEQ ID NO: 101825 - DNA, 22 bp, Artificial Sequence
  Synthetic oligonucleotide; CTT chr11 5330950 5330971 5330967 5330972 +
agcattggtgagaatggaggtg

SEQ ID NO: 101826 - DNA, 22 bp, Artificial Sequence
  Synthetic oligonucleotide; TTA chr11 5330951 5330972 5330968 5330973 +
gcattggtgagaatggaggtgt

SEQ ID NO: 101827 - DNA, 22 bp, Artificial Sequence
  Synthetic oligonucleotide; TTG chr11 5330957 5330978 5330974 5330979 +
gtgagaatggaggtgtatctca

SEQ ID NO: 101828 - DNA, 22 bp, Artificial Sequence
  Synthetic oligonucleotide; CTC chr11 5330978 5330999 5330995 5331000 +
aggggattatggatgccaataa

SEQ ID NO: 101829 - DNA, 22 bp, Artificial Sequence
  Synthetic oligonucleotide; TTA chr11 5330987 5331008 5331004 5331009 +
tggatgccaataaaacagtcat

SEQ ID NO: 101830 - DNA, 22 bp, Artificial Sequence
  Synthetic oligonucleotide; CTC chr11 5331030 5331051 5331047 5331052 +
tggactccacgatagagaggga

SEQ ID NO: 101831 - DNA, 22 bp, Artificial Sequence
  Synthetic oligonucleotide; CTG chr11 5331032 5331053 5331049 5331054 +
gactccacgatagagagggagt

SEQ ID NO: 101832 - DNA, 22 bp, Artificial Sequence
  Synthetic oligonucleotide; CTC chr11 5331037 5331058 5331054 5331059 +
cacgatagagagggagtggatt

SEQ ID NO: 101833 - DNA, 22 bp, Artificial Sequence
  Synthetic oligonucleotide; TTA chr11 5331060 5331081 5331077 5331082 +
gataggcctggaggaagcaggc

SEQ ID NO: 101834 - DNA, 22 bp, Artificial Sequence
  Synthetic oligonucleotide; CTG chr11 5331070 5331091 5331087 5331092 +
gaggaagcaggctccatggctc

SEQ ID NO: 101835 - DNA, 22 bp, Artificial Sequence
  Synthetic oligonucleotide; CTC chr11 5331084 5331105 5331101 5331106 +
catggctcattttcctgtgatc

SEQ ID NO: 101836 - DNA, 22 bp, Artificial Sequence
  Synthetic oligonucleotide; CTC chr11 5331092 5331113 5331109 5331114 +
attttcctgtgatctagccaga

SEQ ID NO: 101837 - DNA, 22 bp, Artificial Sequence
  Synthetic oligonucleotide; TTT chr11 5331096 5331117 5331113 5331118 +
tcctgtgatctagccagagaac

SEQ ID NO: 101838 - DNA, 22 bp, Artificial Sequence
  Synthetic oligonucleotide; TTT chr11 5331097 5331118 5331114 5331119 +
cctgtgatctagccagagaaca

SEQ ID NO: 101839 - DNA, 22 bp, Artificial Sequence
  Synthetic oligonucleotide; TTC chr11 5331098 5331119 5331115 5331120 +
ctgtgatctagccagagaacac

SEQ ID NO: 101840 - DNA, 22 bp, Artificial Sequence
  Synthetic oligonucleotide; CTG chr11 5331101 5331122 5331118 5331123 +
tgatctagccagagaacaccaa

SEQ ID NO: 101841 - DNA, 22 bp, Artificial Sequence
  Synthetic oligonucleotide; CTA chr11 5331108 5331129 5331125 5331130 +
gccagagaacaccaaggacagt

SEQ ID NO: 101842 - DNA, 22 bp, Artificial Sequence
  Synthetic oligonucleotide; TTG chr11 5331138 5331159 5331155 5331160 +
ttgtcaaagttacaccaaggtc

SEQ ID NO: 101843 - DNA, 22 bp, Artificial Sequence
  Synthetic oligonucleotide; TTG chr11 5331141 5331162 5331158 5331163 +
tcaaagttacaccaaggtctat

SEQ ID NO: 101844 - DNA, 22 bp, Artificial Sequence
  Synthetic oligonucleotide; TTA chr11 5331150 5331171 5331167 5331172 +
caccaaggtctatggctgccag

SEQ ID NO: 101845 - DNA, 22 bp, Artificial Sequence
  Synthetic oligonucleotide; CTA chr11 5331162 5331183 5331179 5331184 +
tggctgccagtatagtcagaga

SEQ ID NO: 101846 - DNA, 22 bp, Artificial Sequence
  Synthetic oligonucleotide; CTG chr11 5331168 5331189 5331185 5331190 +
ccagtatagtcagagagtagta

SEQ ID NO: 101847 - DNA, 22 bp, Artificial Sequence
  Synthetic oligonucleotide; CTC chr11 5331199 5331220 5331216 5331221 +
atgaagagtgcagtcttctctg

SEQ ID NO: 101848 - DNA, 22 bp, Artificial Sequence
  Synthetic oligonucleotide; CTT chr11 5331216 5331237 5331233 5331238 +
ctctgataaagaggaggaggct

SEQ ID NO: 101849 - DNA, 22 bp, Artificial Sequence
  Synthetic oligonucleotide; TTC chr11 5331217 5331238 5331234 5331239 +
tctgataaagaggaggaggctg

SEQ ID NO: 101850 - DNA, 22 bp, Artificial Sequence
  Synthetic oligonucleotide; CTC chr11 5331219 5331240 5331236 5331241 +
tgataaagaggaggaggctgcc

SEQ ID NO: 101851 - DNA, 22 bp, Artificial Sequence
  Synthetic oligonucleotide; CTG chr11 5331221 5331242 5331238 5331243 +
ataaagaggaggaggctgccat

SEQ ID NO: 101852 - DNA, 22 bp, Artificial Sequence
  Synthetic oligonucleotide; CTG chr11 5331239 5331260 5331256 5331261 +
ccattgccaaggactgtagaga

SEQ ID NO: 101853 - DNA, 22 bp, Artificial Sequence
  Synthetic oligonucleotide; TTG chr11 5331245 5331266 5331262 5331267 +
ccaaggactgtagagacataga

SEQ ID NO: 101854 - DNA, 22 bp, Artificial Sequence
  Synthetic oligonucleotide; CTG chr11 5331255 5331276 5331272 5331277 +
tagagacatagatgataaagaa

SEQ ID NO: 101855 - DNA, 22 bp, Artificial Sequence
  Synthetic oligonucleotide; CTC chr11 5331290 5331311 5331307 5331312 +
caaggatgaaatctctccagac

SEQ ID NO: 101856 - DNA, 22 bp, Artificial Sequence
  Synthetic oligonucleotide; CTC chr11 5331305 5331326 5331322 5331327 +
tccagacctggaaagccagtga

SEQ ID NO: 101857 - DNA, 22 bp, Artificial Sequence
  Synthetic oligonucleotide; CTC chr11 5331307 5331328 5331324 5331329 +
cagacctggaaagccagtgagg

SEQ ID NO: 101858 - DNA, 22 bp, Artificial Sequence
  Synthetic oligonucleotide; CTG chr11 5331315 5331336 5331332 5331337 +
gaaagccagtgaggagaaaagg

SEQ ID NO: 101859 - DNA, 22 bp, Artificial Sequence
  Synthetic oligonucleotide; CTG chr11 5331373 5331394 5331390 5331395 +
aggagaaacaaacaaacaaaac

SEQ ID NO: 101860 - DNA, 22 bp, Artificial Sequence
  Synthetic oligonucleotide; CTC chr11 5331400 5331421 5331417 5331422 +
tctagaccagcactatgtggtg

SEQ ID NO: 101861 - DNA, 22 bp, Artificial Sequence
  Synthetic oligonucleotide; CTC chr11 5331402 5331423 5331419 5331424 +
tagaccagcactatgtggtgga

SEQ ID NO: 101862 - DNA, 22 bp, Artificial Sequence
  Synthetic oligonucleotide; CTA chr11 5331404 5331425 5331421 5331426 +
gaccagcactatgtggtggaaa

SEQ ID NO: 101863 - DNA, 22 bp, Artificial Sequence
  Synthetic oligonucleotide; CTA chr11 5331415 5331436 5331432 5331437 +
tgtggtggaaatataattagag

SEQ ID NO: 101864 - DNA, 22 bp, Artificial Sequence
  Synthetic oligonucleotide; TTA chr11 5331434 5331455 5331451 5331456 +
gagctaaatatgtgatgttaaa

SEQ ID NO: 101865 - DNA, 22 bp, Artificial Sequence
  Synthetic oligonucleotide; CTA chr11 5331440 5331461 5331457 5331462 +
aatatgtgatgttaaatgttct

SEQ ID NO: 101866 - DNA, 22 bp, Artificial Sequence
  Synthetic oligonucleotide; TTA chr11 5331454 5331475 5331471 5331476 +
aatgttctggtagtcacattaa

SEQ ID NO: 101867 - DNA, 22 bp, Artificial Sequence
  Synthetic oligonucleotide; TTC chr11 5331461 5331482 5331478 5331483 +
tggtagtcacattaaaaggagt

SEQ ID NO: 101868 - DNA, 22 bp, Artificial Sequence
  Synthetic oligonucleotide; CTG chr11 5331463 5331484 5331480 5331485 +
gtagtcacattaaaaggagtaa

SEQ ID NO: 101869 - DNA, 22 bp, Artificial Sequence
  Synthetic oligonucleotide; TTA chr11 5331475 5331496 5331492 5331497 +
aaaggagtaaaaagaaaagtgg

SEQ ID NO: 101870 - DNA, 22 bp, Artificial Sequence
  Synthetic oligonucleotide; TTA chr11 5331505 5331526 5331522 5331527 +
atattagtatgtcttatttaag

SEQ ID NO: 101871 - DNA, 22 bp, Artificial Sequence
  Synthetic oligonucleotide; TTA chr11 5331511 5331532 5331528 5331533 +
gtatgtcttatttaagctacta

SEQ ID NO: 101872 - DNA, 22 bp, Artificial Sequence
  Synthetic oligonucleotide; CTT chr11 5331520 5331541 5331537 5331542 +
atttaagctactatatcaaaaa

SEQ ID NO: 101873 - DNA, 22 bp, Artificial Sequence
  Synthetic oligonucleotide; TTA chr11 5331521 5331542 5331538 5331543 +
tttaagctactatatcaaaaat

SEQ ID NO: 101874 - DNA, 22 bp, Artificial Sequence
  Synthetic oligonucleotide; TTT chr11 5331524 5331545 5331541 5331546 +
aagctactatatcaaaaatatt

SEQ ID NO: 101875 - DNA, 22 bp, Artificial Sequence
  Synthetic oligonucleotide; TTA chr11 5331525 5331546 5331542 5331547 +
agctactatatcaaaaatatta

SEQ ID NO: 101876 - DNA, 22 bp, Artificial Sequence
  Synthetic oligonucleotide; CTA chr11 5331530 5331551 5331547 5331552 +
ctatatcaaaaatattatcatt

SEQ ID NO: 101877 - DNA, 22 bp, Artificial Sequence
  Synthetic oligonucleotide; CTA chr11 5331533 5331554 5331550 5331555 +
tatcaaaaatattatcatttta

SEQ ID NO: 101878 - DNA, 22 bp, Artificial Sequence
  Synthetic oligonucleotide; TTA chr11 5331547 5331568 5331564 5331569 +
tcattttaatagataatcagca

SEQ ID NO: 101879 - DNA, 22 bp, Artificial Sequence
  Synthetic oligonucleotide; TTT chr11 5331553 5331574 5331570 5331575 +
taatagataatcagcataaaaa

SEQ ID NO: 101880 - DNA, 22 bp, Artificial Sequence
  Synthetic oligonucleotide; TTT chr11 5331554 5331575 5331571 5331576 +
aatagataatcagcataaaaat

SEQ ID NO: 101881 - DNA, 22 bp, Artificial Sequence
  Synthetic oligonucleotide; TTA chr11 5331555 5331576 5331572 5331577 +
atagataatcagcataaaaatc

SEQ ID NO: 101882 - DNA, 22 bp, Artificial Sequence
  Synthetic oligonucleotide; TTC chr11 5331593 5331614 5331610 5331615 +
ccacgatttttttttggtacaa

SEQ ID NO: 101883 - DNA, 22 bp, Artificial Sequence
  Synthetic oligonucleotide; TTT chr11 5331602 5331623 5331619 5331624 +
ttttttggtacaaattcttcaa

SEQ ID NO: 101884 - DNA, 22 bp, Artificial Sequence
  Synthetic oligonucleotide; TTT chr11 5331603 5331624 5331620 5331625 +
tttttggtacaaattcttcaaa

SEQ ID NO: 101885 - DNA, 22 bp, Artificial Sequence
  Synthetic oligonucleotide; TTT chr11 5331604 5331625 5331621 5331626 +
ttttggtacaaattcttcaaaa

SEQ ID NO: 101886 - DNA, 22 bp, Artificial Sequence
  Synthetic oligonucleotide; TTT chr11 5331605 5331626 5331622 5331627 +
tttggtacaaattcttcaaaat

SEQ ID NO: 101887 - DNA, 22 bp, Artificial Sequence
  Synthetic oligonucleotide; TTT chr11 5331606 5331627 5331623 5331628 +
ttggtacaaattcttcaaaatc

SEQ ID NO: 101888 - DNA, 22 bp, Artificial Sequence
  Synthetic oligonucleotide; TTT chr11 5331607 5331628 5331624 5331629 +
tggtacaaattcttcaaaatcg

SEQ ID NO: 101889 - DNA, 22 bp, Artificial Sequence
  Synthetic oligonucleotide; TTT chr11 5331608 5331629 5331625 5331630 +
ggtacaaattcttcaaaatcga

SEQ ID NO: 101890 - DNA, 22 bp, Artificial Sequence
  Synthetic oligonucleotide; TTG chr11 5331609 5331630 5331626 5331631 +
gtacaaattcttcaaaatcgag

SEQ ID NO: 101891 - DNA, 22 bp, Artificial Sequence
  Synthetic oligonucleotide; TTC chr11 5331619 5331640 5331636 5331641 +
ttcaaaatcgagtgtttacact

SEQ ID NO: 101892 - DNA, 22 bp, Artificial Sequence
  Synthetic oligonucleotide; CTT chr11 5331621 5331642 5331638 5331643 +
caaaatcgagtgtttacactta

SEQ ID NO: 101893 - DNA, 22 bp, Artificial Sequence
  Synthetic oligonucleotide; TTC chr11 5331622 5331643 5331639 5331644 +
aaaatcgagtgtttacacttac

SEQ ID NO: 101894 - DNA, 22 bp, Artificial Sequence
  Synthetic oligonucleotide; TTT chr11 5331636 5331657 5331653 5331658 +
acacttacagaaaattctgact

SEQ ID NO: 101895 - DNA, 22 bp, Artificial Sequence
  Synthetic oligonucleotide; TTA chr11 5331637 5331658 5331654 5331659 +
cacttacagaaaattctgactc

SEQ ID NO: 101896 - DNA, 22 bp, Artificial Sequence
  Synthetic oligonucleotide; CTT chr11 5331642 5331663 5331659 5331664 +
acagaaaattctgactcaagct

SEQ ID NO: 101897 - DNA, 22 bp, Artificial Sequence
  Synthetic oligonucleotide; TTA chr11 5331643 5331664 5331660 5331665 +
cagaaaattctgactcaagcta

SEQ ID NO: 101898 - DNA, 22 bp, Artificial Sequence
  Synthetic oligonucleotide; TTC chr11 5331653 5331674 5331670 5331675 +
tgactcaagctaaccagatgct

SEQ ID NO: 101899 - DNA, 22 bp, Artificial Sequence
  Synthetic oligonucleotide; CTG chr11 5331655 5331676 5331672 5331677 +
actcaagctaaccagatgctac

SEQ ID NO: 101900 - DNA, 22 bp, Artificial Sequence
  Synthetic oligonucleotide; CTC chr11 5331659 5331680 5331676 5331681 +
aagctaaccagatgctactgtt

SEQ ID NO: 101901 - DNA, 22 bp, Artificial Sequence
  Synthetic oligonucleotide; CTA chr11 5331665 5331686 5331682 5331687 +
accagatgctactgttttggac

SEQ ID NO: 101902 - DNA, 22 bp, Artificial Sequence
  Synthetic oligonucleotide; CTA chr11 5331676 5331697 5331693 5331698 +
ctgttttggacagcacagctct

SEQ ID NO: 101903 - DNA, 22 bp, Artificial Sequence
  Synthetic oligonucleotide; CTG chr11 5331679 5331700 5331696 5331701 +
ttttggacagcacagctctaga

SEQ ID NO: 101904 - DNA, 22 bp, Artificial Sequence
  Synthetic oligonucleotide; TTT chr11 5331682 5331703 5331699 5331704 +
tggacagcacagctctagacta

SEQ ID NO: 101905 - DNA, 22 bp, Artificial Sequence
  Synthetic oligonucleotide; TTT chr11 5331683 5331704 5331700 5331705 +
ggacagcacagctctagactat

SEQ ID NO: 101906 - DNA, 22 bp, Artificial Sequence
  Synthetic oligonucleotide; TTG chr11 5331684 5331705 5331701 5331706 +
gacagcacagctctagactata

SEQ ID NO: 101907 - DNA, 22 bp, Artificial Sequence
  Synthetic oligonucleotide; CTC chr11 5331697 5331718 5331714 5331719 +
tagactatacgacttcatcctc

SEQ ID NO: 101908 - DNA, 22 bp, Artificial Sequence
  Synthetic oligonucleotide; CTA chr11 5331699 5331720 5331716 5331721 +
gactatacgacttcatcctcag

SEQ ID NO: 101909 - DNA, 22 bp, Artificial Sequence
  Synthetic oligonucleotide; CTA chr11 5331704 5331725 5331721 5331726 +
tacgacttcatcctcagtttcg

SEQ ID NO: 101910 - DNA, 22 bp, Artificial Sequence
  Synthetic oligonucleotide; CTT chr11 5331712 5331733 5331729 5331734 +
catcctcagtttcgactccagc

SEQ ID NO: 101911 - DNA, 22 bp, Artificial Sequence
  Synthetic oligonucleotide; TTC chr11 5331713 5331734 5331730 5331735 +
atcctcagtttcgactccagct

SEQ ID NO: 101912 - DNA, 22 bp, Artificial Sequence
  Synthetic oligonucleotide; CTC chr11 5331719 5331740 5331736 5331741 +
agtttcgactccagctgctttc

SEQ ID NO: 101913 - DNA, 22 bp, Artificial Sequence
  Synthetic oligonucleotide; TTT chr11 5331724 5331745 5331741 5331746 +
cgactccagctgctttctacca

SEQ ID NO: 101914 - DNA, 22 bp, Artificial Sequence
  Synthetic oligonucleotide; TTC chr11 5331725 5331746 5331742 5331747 +
gactccagctgctttctaccac

SEQ ID NO: 101915 - DNA, 22 bp, Artificial Sequence
  Synthetic oligonucleotide; CTC chr11 5331730 5331751 5331747 5331752 +
cagctgctttctaccacccttt

SEQ ID NO: 101916 - DNA, 22 bp, Artificial Sequence
  Synthetic oligonucleotide; CTG chr11 5331736 5331757 5331753 5331758 +
ctttctaccaccctttcagaca

SEQ ID NO: 101917 - DNA, 22 bp, Artificial Sequence
  Synthetic oligonucleotide; CTT chr11 5331739 5331760 5331756 5331761 +
tctaccaccctttcagacattg

SEQ ID NO: 101918 - DNA, 22 bp, Artificial Sequence
  Synthetic oligonucleotide; TTT chr11 5331740 5331761 5331757 5331762 +
ctaccaccctttcagacattgt

SEQ ID NO: 101919 - DNA, 22 bp, Artificial Sequence
  Synthetic oligonucleotide; TTC chr11 5331741 5331762 5331758 5331763 +
taccaccctttcagacattgtg

SEQ ID NO: 101920 - DNA, 22 bp, Artificial Sequence
  Synthetic oligonucleotide; CTA chr11 5331743 5331764 5331760 5331765 +
ccaccctttcagacattgtgct

SEQ ID NO: 101921 - DNA, 22 bp, Artificial Sequence
  Synthetic oligonucleotide; CTT chr11 5331751 5331772 5331768 5331773 +
tcagacattgtgcttcatcaaa

SEQ ID NO: 101922 - DNA, 22 bp, Artificial Sequence
  Synthetic oligonucleotide; TTT chr11 5331752 5331773 5331769 5331774 +
cagacattgtgcttcatcaaaa

SEQ ID NO: 101923 - DNA, 22 bp, Artificial Sequence
  Synthetic oligonucleotide; TTC chr11 5331753 5331774 5331770 5331775 +
agacattgtgcttcatcaaaaa

SEQ ID NO: 101924 - DNA, 22 bp, Artificial Sequence
  Synthetic oligonucleotide; TTG chr11 5331761 5331782 5331778 5331783 +
tgcttcatcaaaaaaatgttaa

SEQ ID NO: 101925 - DNA, 22 bp, Artificial Sequence
  Synthetic oligonucleotide; CTT chr11 5331766 5331787 5331783 5331788 +
catcaaaaaaatgttaagaata

SEQ ID NO: 101926 - DNA, 22 bp, Artificial Sequence
  Synthetic oligonucleotide; TTC chr11 5331767 5331788 5331784 5331789 +
atcaaaaaaatgttaagaataa

SEQ ID NO: 101927 - DNA, 22 bp, Artificial Sequence
  Synthetic oligonucleotide; TTA chr11 5331782 5331803 5331799 5331804 +
agaataaaaattatttcacaca

SEQ ID NO: 101928 - DNA, 22 bp, Artificial Sequence
  Synthetic oligonucleotide; TTA chr11 5331795 5331816 5331812 5331817 +
tttcacacatactttaaaacta

SEQ ID NO: 101929 - DNA, 22 bp, Artificial Sequence
  Synthetic oligonucleotide; TTT chr11 5331798 5331819 5331815 5331820 +
cacacatactttaaaactaaca

SEQ ID NO: 101930 - DNA, 22 bp, Artificial Sequence
  Synthetic oligonucleotide; TTC chr11 5331799 5331820 5331816 5331821 +
acacatactttaaaactaacac

SEQ ID NO: 101931 - DNA, 22 bp, Artificial Sequence
  Synthetic oligonucleotide; CTT chr11 5331809 5331830 5331826 5331831 +
taaaactaacacatatattgga

SEQ ID NO: 101932 - DNA, 22 bp, Artificial Sequence
  Synthetic oligonucleotide; TTT chr11 5331810 5331831 5331827 5331832 +
aaaactaacacatatattggaa

SEQ ID NO: 101933 - DNA, 22 bp, Artificial Sequence
  Synthetic oligonucleotide; TTA chr11 5331811 5331832 5331828 5331833 +
aaactaacacatatattggaaa

SEQ ID NO: 101934 - DNA, 22 bp, Artificial Sequence
  Synthetic oligonucleotide; CTA chr11 5331817 5331838 5331834 5331839 +
acacatatattggaaaagaaag

SEQ ID NO: 101935 - DNA, 22 bp, Artificial Sequence
  Synthetic oligonucleotide; TTG chr11 5331829 5331850 5331846 5331851 +
gaaaagaaagtctcctctctca

SEQ ID NO: 101936 - DNA, 22 bp, Artificial Sequence
  Synthetic oligonucleotide; CTC chr11 5331843 5331864 5331860 5331865 +
ctctctcactagctatttttta

SEQ ID NO: 101937 - DNA, 22 bp, Artificial Sequence
  Synthetic oligonucleotide; CTC chr11 5331846 5331867 5331863 5331868 +
tctcactagctattttttaaat

SEQ ID NO: 101938 - DNA, 22 bp, Artificial Sequence
  Synthetic oligonucleotide; CTC chr11 5331848 5331869 5331865 5331870 +
tcactagctattttttaaatgg

SEQ ID NO: 101939 - DNA, 22 bp, Artificial Sequence
  Synthetic oligonucleotide; CTC chr11 5331850 5331871 5331867 5331872 +
actagctattttttaaatggtg

SEQ ID NO: 101940 - DNA, 22 bp, Artificial Sequence
  Synthetic oligonucleotide; CTA chr11 5331854 5331875 5331871 5331876 +
gctattttttaaatggtgtgat

SEQ ID NO: 101941 - DNA, 22 bp, Artificial Sequence
  Synthetic oligonucleotide; CTA chr11 5331858 5331879 5331875 5331880 +
ttttttaaatggtgtgataggc

SEQ ID NO: 101942 - DNA, 22 bp, Artificial Sequence
  Synthetic oligonucleotide; TTT chr11 5331861 5331882 5331878 5331883 +
tttaaatggtgtgataggcata

SEQ ID NO: 101943 - DNA, 22 bp, Artificial Sequence
  Synthetic oligonucleotide; TTT chr11 5331862 5331883 5331879 5331884 +
ttaaatggtgtgataggcataa

SEQ ID NO: 101944 - DNA, 22 bp, Artificial Sequence
  Synthetic oligonucleotide; TTT chr11 5331863 5331884 5331880 5331885 +
taaatggtgtgataggcataat

SEQ ID NO: 101945 - DNA, 22 bp, Artificial Sequence
  Synthetic oligonucleotide; TTT chr11 5331864 5331885 5331881 5331886 +
aaatggtgtgataggcataatt

SEQ ID NO: 101946 - DNA, 22 bp, Artificial Sequence
  Synthetic oligonucleotide; TTA chr11 5331865 5331886 5331882 5331887 +
aatggtgtgataggcataattt

SEQ ID NO: 101947 - DNA, 22 bp, Artificial Sequence
  Synthetic oligonucleotide; TTT chr11 5331887 5331908 5331904 5331909 +
taaaaacctttctaccacaaga

SEQ ID NO: 101948 - DNA, 22 bp, Artificial Sequence
  Synthetic oligonucleotide; TTT chr11 5331888 5331909 5331905 5331910 +
aaaaacctttctaccacaagat

SEQ ID NO: 101949 - DNA, 22 bp, Artificial Sequence
  Synthetic oligonucleotide; TTA chr11 5331889 5331910 5331906 5331911 +
aaaacctttctaccacaagatt

SEQ ID NO: 101950 - DNA, 22 bp, Artificial Sequence
  Synthetic oligonucleotide; CTT chr11 5331897 5331918 5331914 5331919 +
tctaccacaagatttcctatcc

SEQ ID NO: 101951 - DNA, 22 bp, Artificial Sequence
  Synthetic oligonucleotide; TTT chr11 5331898 5331919 5331915 5331920 +
ctaccacaagatttcctatcct

SEQ ID NO: 101952 - DNA, 22 bp, Artificial Sequence
  Synthetic oligonucleotide; TTC chr11 5331899 5331920 5331916 5331921 +
taccacaagatttcctatccta

SEQ ID NO: 101953 - DNA, 22 bp, Artificial Sequence
  Synthetic oligonucleotide; CTA chr11 5331901 5331922 5331918 5331923 +
ccacaagatttcctatcctaat

SEQ ID NO: 101954 - DNA, 22 bp, Artificial Sequence
  Synthetic oligonucleotide; TTT chr11 5331912 5331933 5331929 5331934 +
cctatcctaatttctaggactg

SEQ ID NO: 101955 - DNA, 22 bp, Artificial Sequence
  Synthetic oligonucleotide; TTC chr11 5331913 5331934 5331930 5331935 +
ctatcctaatttctaggactgt

SEQ ID NO: 101956 - DNA, 22 bp, Artificial Sequence
  Synthetic oligonucleotide; CTA chr11 5331916 5331937 5331933 5331938 +
tcctaatttctaggactgtgaa

SEQ ID NO: 101957 - DNA, 22 bp, Artificial Sequence
  Synthetic oligonucleotide; CTA chr11 5331921 5331942 5331938 5331943 +
atttctaggactgtgaatatga

SEQ ID NO: 101958 - DNA, 22 bp, Artificial Sequence
  Synthetic oligonucleotide; TTT chr11 5331925 5331946 5331942 5331947 +
ctaggactgtgaatatgataca

SEQ ID NO: 101959 - DNA, 22 bp, Artificial Sequence
  Synthetic oligonucleotide; TTC chr11 5331926 5331947 5331943 5331948 +
taggactgtgaatatgatacaa

SEQ ID NO: 101960 - DNA, 22 bp, Artificial Sequence
  Synthetic oligonucleotide; CTA chr11 5331928 5331949 5331945 5331950 +
ggactgtgaatatgatacaata

SEQ ID NO: 101961 - DNA, 22 bp, Artificial Sequence
  Synthetic oligonucleotide; CTG chr11 5331934 5331955 5331951 5331956 +
tgaatatgatacaatatcatgc

SEQ ID NO: 101962 - DNA, 22 bp, Artificial Sequence
  Synthetic oligonucleotide; CTT chr11 5331958 5331979 5331975 5331980 +
ggggttatacagatgtaattaa

SEQ ID NO: 101963 - DNA, 22 bp, Artificial Sequence
  Synthetic oligonucleotide; TTG chr11 5331959 5331980 5331976 5331981 +
gggttatacagatgtaattaaa

SEQ ID NO: 101964 - DNA, 22 bp, Artificial Sequence
  Synthetic oligonucleotide; TTA chr11 5331965 5331986 5331982 5331987 +
tacagatgtaattaaagttgct

SEQ ID NO: 101965 - DNA, 22 bp, Artificial Sequence
  Synthetic oligonucleotide; TTA chr11 5331979 5332000 5331996 5332001 +
aagttgctgatctattgacttt

SEQ ID NO: 101966 - DNA, 22 bp, Artificial Sequence
  Synthetic oligonucleotide; TTG chr11 5331985 5332006 5332002 5332007 +
ctgatctattgactttgagtta

SEQ ID NO: 101967 - DNA, 22 bp, Artificial Sequence
  Synthetic oligonucleotide; CTG chr11 5331988 5332009 5332005 5332010 +
atctattgactttgagttaatt

SEQ ID NO: 101968 - DNA, 22 bp, Artificial Sequence
  Synthetic oligonucleotide; CTA chr11 5331993 5332014 5332010 5332015 +
ttgactttgagttaattgaaaa

SEQ ID NO: 101969 - DNA, 22 bp, Artificial Sequence
  Synthetic oligonucleotide; TTG chr11 5331996 5332017 5332013 5332018 +
actttgagttaattgaaaagga

SEQ ID NO: 101970 - DNA, 22 bp, Artificial Sequence
  Synthetic oligonucleotide; CTT chr11 5332000 5332021 5332017 5332022 +
tgagttaattgaaaaggaaatt

SEQ ID NO: 101971 - DNA, 22 bp, Artificial Sequence
  Synthetic oligonucleotide; TTT chr11 5332001 5332022 5332018 5332023 +
gagttaattgaaaaggaaatta

SEQ ID NO: 101972 - DNA, 22 bp, Artificial Sequence
  Synthetic oligonucleotide; TTG chr11 5332002 5332023 5332019 5332024 +
agttaattgaaaaggaaattac

SEQ ID NO: 101973 - DNA, 22 bp, Artificial Sequence
  Synthetic oligonucleotide; TTA chr11 5332007 5332028 5332024 5332029 +
attgaaaaggaaattactcagg

SEQ ID NO: 101974 - DNA, 22 bp, Artificial Sequence
  Synthetic oligonucleotide; TTG chr11 5332011 5332032 5332028 5332033 +
aaaaggaaattactcaggggaa

SEQ ID NO: 101975 - DNA, 22 bp, Artificial Sequence
  Synthetic oligonucleotide; TTA chr11 5332023 5332044 5332040 5332045 +
ctcaggggaacctagtctaatt

SEQ ID NO: 101976 - DNA, 22 bp, Artificial Sequence
  Synthetic oligonucleotide; CTC chr11 5332026 5332047 5332043 5332048 +
aggggaacctagtctaattcca

SEQ ID NO: 101977 - DNA, 22 bp, Artificial Sequence
  Synthetic oligonucleotide; CTA chr11 5332037 5332058 5332054 5332059 +
gtctaattccatgagcccctaa

SEQ ID NO: 101978 - DNA, 22 bp, Artificial Sequence
  Synthetic oligonucleotide; CTA chr11 5332042 5332063 5332059 5332064 +
attccatgagcccctaaaagca

SEQ ID NO: 101979 - DNA, 22 bp, Artificial Sequence
  Synthetic oligonucleotide; TTC chr11 5332046 5332067 5332063 5332068 +
catgagcccctaaaagcagagt

SEQ ID NO: 101980 - DNA, 22 bp, Artificial Sequence
  Synthetic oligonucleotide; CTA chr11 5332058 5332079 5332075 5332080 +
aaagcagagttttcaccaagta

SEQ ID NO: 101981 - DNA, 22 bp, Artificial Sequence
  Synthetic oligonucleotide; TTT chr11 5332070 5332091 5332087 5332092 +
tcaccaagtagtaggagaatag

SEQ ID NO: 101982 - DNA, 22 bp, Artificial Sequence
  Synthetic oligonucleotide; TTT chr11 5332071 5332092 5332088 5332093 +
caccaagtagtaggagaatagg

SEQ ID NO: 101983 - DNA, 22 bp, Artificial Sequence
  Synthetic oligonucleotide; TTC chr11 5332072 5332093 5332089 5332094 +
accaagtagtaggagaatagga

SEQ ID NO: 101984 - DNA, 22 bp, Artificial Sequence
  Synthetic oligonucleotide; TTC chr11 5332108 5332129 5332125 5332130 +
aaaatttgagaaaggttcatgg

SEQ ID NO: 101985 - DNA, 22 bp, Artificial Sequence
  Synthetic oligonucleotide; TTT chr11 5332115 5332136 5332132 5332137 +
gagaaaggttcatgggtcagtt

SEQ ID NO: 101986 - DNA, 22 bp, Artificial Sequence
  Synthetic oligonucleotide; TTG chr11 5332116 5332137 5332133 5332138 +
agaaaggttcatgggtcagttg

SEQ ID NO: 101987 - DNA, 22 bp, Artificial Sequence
  Synthetic oligonucleotide; TTC chr11 5332126 5332147 5332143 5332148 +
atgggtcagttgctggtttgaa

SEQ ID NO: 101988 - DNA, 22 bp, Artificial Sequence
  Synthetic oligonucleotide; TTG chr11 5332138 5332159 5332155 5332160 +
ctggtttgaaatataaggaggt

SEQ ID NO: 101989 - DNA, 22 bp, Artificial Sequence
  Synthetic oligonucleotide; CTG chr11 5332141 5332162 5332158 5332163 +
gtttgaaatataaggaggtcac

SEQ ID NO: 101990 - DNA, 22 bp, Artificial Sequence
  Synthetic oligonucleotide; TTT chr11 5332145 5332166 5332162 5332167 +
gaaatataaggaggtcacaaaa

SEQ ID NO: 101991 - DNA, 22 bp, Artificial Sequence
  Synthetic oligonucleotide; TTG chr11 5332146 5332167 5332163 5332168 +
aaatataaggaggtcacaaaag

SEQ ID NO: 101992 - DNA, 22 bp, Artificial Sequence
  Synthetic oligonucleotide; CTA chr11 5332189 5332210 5332206 5332211 +
ggtacagaacgggcatcctagc

SEQ ID NO: 101993 - DNA, 22 bp, Artificial Sequence
  Synthetic oligonucleotide; CTA chr11 5332209 5332230 5332226 5332231 +
gctaacagcctgcaaacaaaca

SEQ ID NO: 101994 - DNA, 22 bp, Artificial Sequence
  Synthetic oligonucleotide; CTA chr11 5332213 5332234 5332230 5332235 +
acagcctgcaaacaaacaaaca

SEQ ID NO: 101995 - DNA, 22 bp, Artificial Sequence
  Synthetic oligonucleotide; CTG chr11 5332221 5332242 5332238 5332243 +
caaacaaacaaacaaaaaacaa

SEQ ID NO: 101996 - DNA, 22 bp, Artificial Sequence
  Synthetic oligonucleotide; CTT chr11 5332265 5332286 5332282 5332287 +
cagagttcagcagtaggaaact

SEQ ID NO: 101997 - DNA, 22 bp, Artificial Sequence
  Synthetic oligonucleotide; TTC chr11 5332266 5332287 5332283 5332288 +
agagttcagcagtaggaaactg

SEQ ID NO: 101998 - DNA, 22 bp, Artificial Sequence
  Synthetic oligonucleotide; TTC chr11 5332273 5332294 5332290 5332295 +
agcagtaggaaactgaactctg

SEQ ID NO: 101999 - DNA, 22 bp, Artificial Sequence
  Synthetic oligonucleotide; CTG chr11 5332288 5332309 5332305 5332310 +
aactctgacagccgggtgcaat

SEQ ID NO: 102000 - DNA, 22 bp, Artificial Sequence
  Synthetic oligonucleotide; CTC chr11 5332293 5332314 5332310 5332315 +
tgacagccgggtgcaatggctc

SEQ ID NO: 102001 - DNA, 22 bp, Artificial Sequence
  Synthetic oligonucleotide; CTG chr11 5332295 5332316 5332312 5332317 +
acagccgggtgcaatggctcat

SEQ ID NO: 102002 - DNA, 22 bp, Artificial Sequence
  Synthetic oligonucleotide; CTC chr11 5332315 5332336 5332332 5332337 +
attcaagcctgtaatcccagca

SEQ ID NO: 102003 - DNA, 22 bp, Artificial Sequence
  Synthetic oligonucleotide; TTC chr11 5332319 5332340 5332336 5332341 +
aagcctgtaatcccagcacttt

SEQ ID NO: 102004 - DNA, 22 bp, Artificial Sequence
  Synthetic oligonucleotide; CTG chr11 5332326 5332347 5332343 5332348 +
taatcccagcactttgggaggc

SEQ ID NO: 102005 - DNA, 22 bp, Artificial Sequence
  Synthetic oligonucleotide; CTT chr11 5332340 5332361 5332357 5332362 +
tgggaggccaaggcgggcggat

SEQ ID NO: 102006 - DNA, 22 bp, Artificial Sequence
  Synthetic oligonucleotide; TTT chr11 5332341 5332362 5332358 5332363 +
gggaggccaaggcgggcggatc

SEQ ID NO: 102007 - DNA, 22 bp, Artificial Sequence
  Synthetic oligonucleotide; TTG chr11 5332342 5332363 5332359 5332364 +
ggaggccaaggcgggcggatca

SEQ ID NO: 102008 - DNA, 22 bp, Artificial Sequence
  Synthetic oligonucleotide; CTG chr11 5332368 5332389 5332385 5332390 +
aggtcaggagttccagaccagc

SEQ ID NO: 102009 - DNA, 22 bp, Artificial Sequence
  Synthetic oligonucleotide; TTC chr11 5332381 5332402 5332398 5332403 +
cagaccagcctggccaacatgg

SEQ ID NO: 102010 - DNA, 22 bp, Artificial Sequence
  Synthetic oligonucleotide; CTG chr11 5332393 5332414 5332410 5332415 +
gccaacatggtgaaattccatc

SEQ ID NO: 102011 - DNA, 22 bp, Artificial Sequence
  Synthetic oligonucleotide; TTC chr11 5332411 5332432 5332428 5332433 +
catccctaccaaaaaatataaa

SEQ ID NO: 102012 - DNA, 22 bp, Artificial Sequence
  Synthetic oligonucleotide; CTA chr11 5332419 5332440 5332436 5332441 +
ccaaaaaatataaaaattagcc

SEQ ID NO: 102013 - DNA, 22 bp, Artificial Sequence
  Synthetic oligonucleotide; TTA chr11 5332438 5332459 5332455 5332460 +
gccaggtgtggttgcagttgcc

SEQ ID NO: 102014 - DNA, 22 bp, Artificial Sequence
  Synthetic oligonucleotide; TTG chr11 5332452 5332473 5332469 5332474 +
cagttgcctgtagttccagcta

SEQ ID NO: 102015 - DNA, 22 bp, Artificial Sequence
  Synthetic oligonucleotide; TTG chr11 5332458 5332479 5332475 5332480 +
cctgtagttccagctacttggg

SEQ ID NO: 102016 - DNA, 22 bp, Artificial Sequence
  Synthetic oligonucleotide; CTG chr11 5332462 5332483 5332479 5332484 +
tagttccagctacttgggaaac

SEQ ID NO: 102017 - DNA, 22 bp, Artificial Sequence
  Synthetic oligonucleotide; TTC chr11 5332468 5332489 5332485 5332490 +
cagctacttgggaaactgaggc

SEQ ID NO: 102018 - DNA, 22 bp, Artificial Sequence
  Synthetic oligonucleotide; CTA chr11 5332474 5332495 5332491 5332496 +
cttgggaaactgaggcaggaga

SEQ ID NO: 102019 - DNA, 22 bp, Artificial Sequence
  Synthetic oligonucleotide; CTT chr11 5332477 5332498 5332494 5332499 +
gggaaactgaggcaggagaatt

SEQ ID NO: 102020 - DNA, 22 bp, Artificial Sequence
  Synthetic oligonucleotide; TTG chr11 5332478 5332499 5332495 5332500 +
ggaaactgaggcaggagaattg

SEQ ID NO: 102021 - DNA, 22 bp, Artificial Sequence
  Synthetic oligonucleotide; CTG chr11 5332486 5332507 5332503 5332508 +
aggcaggagaattgcttgaacc

SEQ ID NO: 102022 - DNA, 22 bp, Artificial Sequence
  Synthetic oligonucleotide; TTG chr11 5332500 5332521 5332517 5332522 +
cttgaacccgggaggcacaggt

SEQ ID NO: 102023 - DNA, 22 bp, Artificial Sequence
  Synthetic oligonucleotide; CTT chr11 5332503 5332524 5332520 5332525 +
gaacccgggaggcacaggttgc

SEQ ID NO: 102024 - DNA, 22 bp, Artificial Sequence
  Synthetic oligonucleotide; TTG chr11 5332504 5332525 5332521 5332526 +
aacccgggaggcacaggttgca

SEQ ID NO: 102025 - DNA, 22 bp, Artificial Sequence
  Synthetic oligonucleotide; TTG chr11 5332524 5332545 5332541 5332546 +
cagggagcaagagattgtgcca

SEQ ID NO: 102026 - DNA, 22 bp, Artificial Sequence
  Synthetic oligonucleotide; TTG chr11 5332541 5332562 5332558 5332563 +
tgccactgcactccaggctggg

SEQ ID NO: 102027 - DNA, 22 bp, Artificial Sequence
  Synthetic oligonucleotide; CTG chr11 5332549 5332570 5332566 5332571 +
cactccaggctgggtgacagag

SEQ ID NO: 102028 - DNA, 22 bp, Artificial Sequence
  Synthetic oligonucleotide; CTC chr11 5332554 5332575 5332571 5332576 +
caggctgggtgacagagcgaga

SEQ ID NO: 102029 - DNA, 22 bp, Artificial Sequence
  Synthetic oligonucleotide; CTG chr11 5332561 5332582 5332578 5332583 +
ggtgacagagcgagactccatc

SEQ ID NO: 102030 - DNA, 22 bp, Artificial Sequence
  Synthetic oligonucleotide; CTC chr11 5332579 5332600 5332596 5332601 +
catctcaaaaaaaaaaaaaaaa

SEQ ID NO: 102031 - DNA, 22 bp, Artificial Sequence
  Synthetic oligonucleotide; CTC chr11 5332585 5332606 5332602 5332607 +
aaaaaaaaaaaaaaaaaaaaga

SEQ ID NO: 102032 - DNA, 22 bp, Artificial Sequence
  Synthetic oligonucleotide; CTG chr11 5332622 5332643 5332639 5332644 +
agctctgactacaatctgaatg

SEQ ID NO: 102033 - DNA, 22 bp, Artificial Sequence
  Synthetic oligonucleotide; CTC chr11 5332627 5332648 5332644 5332649 +
tgactacaatctgaatgaacgt

SEQ ID NO: 102034 - DNA, 22 bp, Artificial Sequence
  Synthetic oligonucleotide; CTG chr11 5332629 5332650 5332646 5332651 +
actacaatctgaatgaacgtgg

SEQ ID NO: 102035 - DNA, 22 bp, Artificial Sequence
  Synthetic oligonucleotide; CTA chr11 5332633 5332654 5332650 5332655 +
caatctgaatgaacgtggaagc

SEQ ID NO: 102036 - DNA, 22 bp, Artificial Sequence
  Synthetic oligonucleotide; CTG chr11 5332640 5332661 5332657 5332662 +
aatgaacgtggaagcgaattct

SEQ ID NO: 102037 - DNA, 22 bp, Artificial Sequence
  Synthetic oligonucleotide; TTC chr11 5332661 5332682 5332678 5332683 +
ttccccagagcctttggataag

SEQ ID NO: 102038 - DNA, 22 bp, Artificial Sequence
  Synthetic oligonucleotide; CTT chr11 5332663 5332684 5332680 5332685 +
ccccagagcctttggataagag

SEQ ID NO: 102039 - DNA, 22 bp, Artificial Sequence
  Synthetic oligonucleotide; TTC chr11 5332664 5332685 5332681 5332686 +
cccagagcctttggataagagc

SEQ ID NO: 102040 - DNA, 22 bp, Artificial Sequence
  Synthetic oligonucleotide; CTT chr11 5332675 5332696 5332692 5332697 +
tggataagagcccagccctccc

SEQ ID NO: 102041 - DNA, 22 bp, Artificial Sequence
  Synthetic oligonucleotide; TTT chr11 5332676 5332697 5332693 5332698 +
ggataagagcccagccctcccg

SEQ ID NO: 102042 - DNA, 22 bp, Artificial Sequence
  Synthetic oligonucleotide; TTG chr11 5332677 5332698 5332694 5332699 +
gataagagcccagccctcccga

SEQ ID NO: 102043 - DNA, 22 bp, Artificial Sequence
  Synthetic oligonucleotide; CTC chr11 5332695 5332716 5332712 5332717 +
ccgatattttgaatttgacctt

SEQ ID NO: 102044 - DNA, 22 bp, Artificial Sequence
  Synthetic oligonucleotide; TTT chr11 5332704 5332725 5332721 5332726 +
tgaatttgaccttatgataccc

SEQ ID NO: 102045 - DNA, 22 bp, Artificial Sequence
  Synthetic oligonucleotide; TTT chr11 5332705 5332726 5332722 5332727 +
gaatttgaccttatgataccct

SEQ ID NO: 102046 - DNA, 22 bp, Artificial Sequence
  Synthetic oligonucleotide; TTG chr11 5332706 5332727 5332723 5332728 +
aatttgaccttatgatacccta

SEQ ID NO: 102047 - DNA, 22 bp, Artificial Sequence
  Synthetic oligonucleotide; TTT chr11 5332711 5332732 5332728 5332733 +
gaccttatgataccctaagcag

SEQ ID NO: 102048 - DNA, 22 bp, Artificial Sequence
  Synthetic oligonucleotide; TTG chr11 5332712 5332733 5332729 5332734 +
accttatgataccctaagcaga

SEQ ID NO: 102049 - DNA, 22 bp, Artificial Sequence
  Synthetic oligonucleotide; CTT chr11 5332717 5332738 5332734 5332739 +
atgataccctaagcagagaact

SEQ ID NO: 102050 - DNA, 22 bp, Artificial Sequence
  Synthetic oligonucleotide; TTA chr11 5332718 5332739 5332735 5332740 +
tgataccctaagcagagaactc

SEQ ID NO: 102051 - DNA, 22 bp, Artificial Sequence
  Synthetic oligonucleotide; CTA chr11 5332728 5332749 5332745 5332750 +
agcagagaactcagttaagcct

SEQ ID NO: 102052 - DNA, 22 bp, Artificial Sequence
  Synthetic oligonucleotide; CTC chr11 5332740 5332761 5332757 5332762 +
agttaagcctatgagagtgcag

SEQ ID NO: 102053 - DNA, 22 bp, Artificial Sequence
  Synthetic oligonucleotide; TTA chr11 5332745 5332766 5332762 5332767 +
agcctatgagagtgcagaccta

SEQ ID NO: 102054 - DNA, 22 bp, Artificial Sequence
  Synthetic oligonucleotide; CTA chr11 5332751 5332772 5332768 5332773 +
tgagagtgcagacctatagaaa

SEQ ID NO: 102055 - DNA, 22 bp, Artificial Sequence
  Synthetic oligonucleotide; CTA chr11 5332767 5332788 5332784 5332789 +
tagaaatgtgatataataaact

SEQ ID NO: 102056 - DNA, 22 bp, Artificial Sequence
  Synthetic oligonucleotide; CTA chr11 5332790 5332811 5332807 5332812 +
ataatgtttgaagcagctcaag

SEQ ID NO: 102057 - DNA, 22 bp, Artificial Sequence
  Synthetic oligonucleotide; TTT chr11 5332799 5332820 5332816 5332821 +
gaagcagctcaagttgcagtaa

SEQ ID NO: 102058 - DNA, 22 bp, Artificial Sequence
  Synthetic oligonucleotide; TTG chr11 5332800 5332821 5332817 5332822 +
aagcagctcaagttgcagtaat

SEQ ID NO: 102059 - DNA, 22 bp, Artificial Sequence
  Synthetic oligonucleotide; CTC chr11 5332809 5332830 5332826 5332831 +
aagttgcagtaatttatgtata

SEQ ID NO: 102060 - DNA, 22 bp, Artificial Sequence
  Synthetic oligonucleotide; TTG chr11 5332815 5332836 5332832 5332837 +
cagtaatttatgtataacaata

SEQ ID NO: 102061 - DNA, 22 bp, Artificial Sequence
  Synthetic oligonucleotide; TTT chr11 5332824 5332845 5332841 5332846 +
atgtataacaatagaaaactaa

SEQ ID NO: 102062 - DNA, 22 bp, Artificial Sequence
  Synthetic oligonucleotide; TTA chr11 5332825 5332846 5332842 5332847 +
tgtataacaatagaaaactaat

SEQ ID NO: 102063 - DNA, 22 bp, Artificial Sequence
  Synthetic oligonucleotide; CTA chr11 5332845 5332866 5332862 5332867 +
atgcaaagtattactattatcc

SEQ ID NO: 102064 - DNA, 22 bp, Artificial Sequence
  Synthetic oligonucleotide; TTA chr11 5332858 5332879 5332875 5332880 +
ctattatccatattttattaag

SEQ ID NO: 102065 - DNA, 22 bp, Artificial Sequence
  Synthetic oligonucleotide; CTA chr11 5332861 5332882 5332878 5332883 +
ttatccatattttattaagagt

SEQ ID NO: 102066 - DNA, 22 bp, Artificial Sequence
  Synthetic oligonucleotide; TTA chr11 5332864 5332885 5332881 5332886 +
tccatattttattaagagttta

SEQ ID NO: 102067 - DNA, 22 bp, Artificial Sequence
  Synthetic oligonucleotide; TTT chr11 5332873 5332894 5332890 5332895 +
tattaagagtttatagagttct

SEQ ID NO: 102068 - DNA, 22 bp, Artificial Sequence
  Synthetic oligonucleotide; TTT chr11 5332874 5332895 5332891 5332896 +
attaagagtttatagagttcta

SEQ ID NO: 102069 - DNA, 22 bp, Artificial Sequence
  Synthetic oligonucleotide; TTA chr11 5332875 5332896 5332892 5332897 +
ttaagagtttatagagttctat

SEQ ID NO: 102070 - DNA, 22 bp, Artificial Sequence
  Synthetic oligonucleotide; TTA chr11 5332878 5332899 5332895 5332900 +
agagtttatagagttctataat

SEQ ID NO: 102071 - DNA, 22 bp, Artificial Sequence
  Synthetic oligonucleotide; TTT chr11 5332885 5332906 5332902 5332907 +
atagagttctataataaactaa

SEQ ID NO: 102072 - DNA, 22 bp, Artificial Sequence
  Synthetic oligonucleotide; TTA chr11 5332886 5332907 5332903 5332908 +
tagagttctataataaactaat

SEQ ID NO: 102073 - DNA, 22 bp, Artificial Sequence
  Synthetic oligonucleotide; TTC chr11 5332894 5332915 5332911 5332916 +
tataataaactaatatttacag

SEQ ID NO: 102074 - DNA, 22 bp, Artificial Sequence
  Synthetic oligonucleotide; CTA chr11 5332896 5332917 5332913 5332918 +
taataaactaatatttacaggg

SEQ ID NO: 102075 - DNA, 22 bp, Artificial Sequence
  Synthetic oligonucleotide; CTA chr11 5332906 5332927 5332923 5332928 +
atatttacagggtttatgtaaa

SEQ ID NO: 102076 - DNA, 22 bp, Artificial Sequence
  Synthetic oligonucleotide; TTT chr11 5332912 5332933 5332929 5332934 +
acagggtttatgtaaattattg

SEQ ID NO: 102077 - DNA, 22 bp, Artificial Sequence
  Synthetic oligonucleotide; TTA chr11 5332913 5332934 5332930 5332935 +
cagggtttatgtaaattattgt

SEQ ID NO: 102078 - DNA, 22 bp, Artificial Sequence
  Synthetic oligonucleotide; TTT chr11 5332921 5332942 5332938 5332943 +
atgtaaattattgtatcattta

SEQ ID NO: 102079 - DNA, 22 bp, Artificial Sequence
  Synthetic oligonucleotide; TTA chr11 5332922 5332943 5332939 5332944 +
tgtaaattattgtatcatttat

SEQ ID NO: 102080 - DNA, 22 bp, Artificial Sequence
  Synthetic oligonucleotide; TTA chr11 5332931 5332952 5332948 5332953 +
ttgtatcatttatctattatca

SEQ ID NO: 102081 - DNA, 22 bp, Artificial Sequence
  Synthetic oligonucleotide; TTG chr11 5332934 5332955 5332951 5332956 +
tatcatttatctattatcacag

SEQ ID NO: 102082 - DNA, 22 bp, Artificial Sequence
  Synthetic oligonucleotide; TTT chr11 5332942 5332963 5332959 5332964 +
atctattatcacagaattgtca

SEQ ID NO: 102083 - DNA, 22 bp, Artificial Sequence
  Synthetic oligonucleotide; TTA chr11 5332943 5332964 5332960 5332965 +
tctattatcacagaattgtcac

SEQ ID NO: 102084 - DNA, 22 bp, Artificial Sequence
  Synthetic oligonucleotide; CTA chr11 5332947 5332968 5332964 5332969 +
ttatcacagaattgtcacatca

SEQ ID NO: 102085 - DNA, 22 bp, Artificial Sequence
  Synthetic oligonucleotide; TTA chr11 5332950 5332971 5332967 5332972 +
tcacagaattgtcacatcacaa

SEQ ID NO: 102086 - DNA, 22 bp, Artificial Sequence
  Synthetic oligonucleotide; TTG chr11 5332961 5332982 5332978 5332983 +
tcacatcacaaagccctgtata

SEQ ID NO: 102087 - DNA, 22 bp, Artificial Sequence
  Synthetic oligonucleotide; CTG chr11 5332979 5333000 5332996 5333001 +
tatagcatcagtggctgacaac

SEQ ID NO: 102088 - DNA, 22 bp, Artificial Sequence
  Synthetic oligonucleotide; CTG chr11 5332996 5333017 5333013 5333018 +
acaacattaaacatttattttt

SEQ ID NO: 102089 - DNA, 22 bp, Artificial Sequence
  Synthetic oligonucleotide; TTA chr11 5333005 5333026 5333022 5333027 +
aacatttatttttcactctaat

SEQ ID NO: 102090 - DNA, 22 bp, Artificial Sequence
  Synthetic oligonucleotide; TTT chr11 5333012 5333033 5333029 5333034 +
atttttcactctaatgcatggt

SEQ ID NO: 102091 - DNA, 22 bp, Artificial Sequence
  Synthetic oligonucleotide; TTA chr11 5333013 5333034 5333030 5333035 +
tttttcactctaatgcatggtt

SEQ ID NO: 102092 - DNA, 22 bp, Artificial Sequence
  Synthetic oligonucleotide; TTT chr11 5333016 5333037 5333033 5333038 +
ttcactctaatgcatggttcaa

SEQ ID NO: 102093 - DNA, 22 bp, Artificial Sequence
  Synthetic oligonucleotide; TTT chr11 5333017 5333038 5333034 5333039 +
tcactctaatgcatggttcaac

SEQ ID NO: 102094 - DNA, 22 bp, Artificial Sequence
  Synthetic oligonucleotide; TTT chr11 5333018 5333039 5333035 5333040 +
cactctaatgcatggttcaact

SEQ ID NO: 102095 - DNA, 22 bp, Artificial Sequence
  Synthetic oligonucleotide; TTC chr11 5333019 5333040 5333036 5333041 +
actctaatgcatggttcaactt

SEQ ID NO: 102096 - DNA, 22 bp, Artificial Sequence
  Synthetic oligonucleotide; CTC chr11 5333023 5333044 5333040 5333045 +
taatgcatggttcaacttattt

SEQ ID NO: 102097 - DNA, 22 bp, Artificial Sequence
  Synthetic oligonucleotide; CTA chr11 5333025 5333046 5333042 5333047 +
atgcatggttcaacttatttag

SEQ ID NO: 102098 - DNA, 22 bp, Artificial Sequence
  Synthetic oligonucleotide; TTC chr11 5333036 5333057 5333053 5333058 +
aacttatttaggctgggcttgg

SEQ ID NO: 102099 - DNA, 22 bp, Artificial Sequence
  Synthetic oligonucleotide; CTT chr11 5333041 5333062 5333058 5333063 +
atttaggctgggcttggctggg

SEQ ID NO: 102100 - DNA, 22 bp, Artificial Sequence
  Synthetic oligonucleotide; TTA chr11 5333042 5333063 5333059 5333064 +
tttaggctgggcttggctgggc

SEQ ID NO: 102101 - DNA, 22 bp, Artificial Sequence
  Synthetic oligonucleotide; TTT chr11 5333045 5333066 5333062 5333067 +
aggctgggcttggctgggcagc

SEQ ID NO: 102102 - DNA, 22 bp, Artificial Sequence
  Synthetic oligonucleotide; TTA chr11 5333046 5333067 5333063 5333068 +
ggctgggcttggctgggcagca

SEQ ID NO: 102103 - DNA, 22 bp, Artificial Sequence
  Synthetic oligonucleotide; CTG chr11 5333051 5333072 5333068 5333073 +
ggcttggctgggcagcactgat

SEQ ID NO: 102104 - DNA, 22 bp, Artificial Sequence
  Synthetic oligonucleotide; CTT chr11 5333056 5333077 5333073 5333078 +
ggctgggcagcactgatcattt

SEQ ID NO: 102105 - DNA, 22 bp, Artificial Sequence
  Synthetic oligonucleotide; TTG chr11 5333057 5333078 5333074 5333079 +
gctgggcagcactgatcatttc

SEQ ID NO: 102106 - DNA, 22 bp, Artificial Sequence
  Synthetic oligonucleotide; CTG chr11 5333061 5333082 5333078 5333083 +
ggcagcactgatcatttctgca

SEQ ID NO: 102107 - DNA, 22 bp, Artificial Sequence
  Synthetic oligonucleotide; CTG chr11 5333071 5333092 5333088 5333093 +
atcatttctgcaccatctgctc

SEQ ID NO: 102108 - DNA, 22 bp, Artificial Sequence
  Synthetic oligonucleotide; TTT chr11 5333078 5333099 5333095 5333100 +
ctgcaccatctgctcaggtaca

SEQ ID NO: 102109 - DNA, 22 bp, Artificial Sequence
  Synthetic oligonucleotide; TTC chr11 5333079 5333100 5333096 5333101 +
tgcaccatctgctcaggtacat

SEQ ID NO: 102110 - DNA, 22 bp, Artificial Sequence
  Synthetic oligonucleotide; CTG chr11 5333081 5333102 5333098 5333103 +
caccatctgctcaggtacatag

SEQ ID NO: 102111 - DNA, 22 bp, Artificial Sequence
  Synthetic oligonucleotide; CTG chr11 5333090 5333111 5333107 5333112 +
ctcaggtacatagggtgcagct

SEQ ID NO: 102112 - DNA, 22 bp, Artificial Sequence
  Synthetic oligonucleotide; CTC chr11 5333093 5333114 5333110 5333115 +
aggtacatagggtgcagctgta

SEQ ID NO: 102113 - DNA, 22 bp, Artificial Sequence
  Synthetic oligonucleotide; CTG chr11 5333113 5333134 5333130 5333135 +
tacgtcatccctatcctattgt

SEQ ID NO: 102114 - DNA, 22 bp, Artificial Sequence
  Synthetic oligonucleotide; CTA chr11 5333126 5333147 5333143 5333148 +
tcctattgttttcctgtgtcgt

SEQ ID NO: 102115 - DNA, 22 bp, Artificial Sequence
  Synthetic oligonucleotide; CTA chr11 5333131 5333152 5333148 5333153 +
ttgttttcctgtgtcgttcttc

SEQ ID NO: 102116 - DNA, 22 bp, Artificial Sequence
  Synthetic oligonucleotide; TTG chr11 5333134 5333155 5333151 5333156 +
ttttcctgtgtcgttcttccta

SEQ ID NO: 102117 - DNA, 22 bp, Artificial Sequence
  Synthetic oligonucleotide; TTT chr11 5333137 5333158 5333154 5333159 +
tcctgtgtcgttcttcctatat

SEQ ID NO: 102118 - DNA, 22 bp, Artificial Sequence
  Synthetic oligonucleotide; TTT chr11 5333138 5333159 5333155 5333160 +
cctgtgtcgttcttcctatatc

SEQ ID NO: 102119 - DNA, 22 bp, Artificial Sequence
  Synthetic oligonucleotide; TTC chr11 5333139 5333160 5333156 5333161 +
ctgtgtcgttcttcctatatcc

SEQ ID NO: 102120 - DNA, 22 bp, Artificial Sequence
  Synthetic oligonucleotide; CTG chr11 5333142 5333163 5333159 5333164 +
tgtcgttcttcctatatccatc

SEQ ID NO: 102121 - DNA, 22 bp, Artificial Sequence
  Synthetic oligonucleotide; TTC chr11 5333150 5333171 5333167 5333172 +
ttcctatatccatcaccctttt

SEQ ID NO: 102122 - DNA, 22 bp, Artificial Sequence
  Synthetic oligonucleotide; CTT chr11 5333152 5333173 5333169 5333174 +
cctatatccatcacccttttgt

SEQ ID NO: 102123 - DNA, 22 bp, Artificial Sequence
  Synthetic oligonucleotide; TTC chr11 5333153 5333174 5333170 5333175 +
ctatatccatcacccttttgtt

SEQ ID NO: 102124 - DNA, 22 bp, Artificial Sequence
  Synthetic oligonucleotide; CTA chr11 5333156 5333177 5333173 5333178 +
tatccatcacccttttgttgta

SEQ ID NO: 102125 - DNA, 22 bp, Artificial Sequence
  Synthetic oligonucleotide; CTT chr11 5333170 5333191 5333187 5333192 +
ttgttgtatctatttctatatt

SEQ ID NO: 102126 - DNA, 22 bp, Artificial Sequence
  Synthetic oligonucleotide; TTT chr11 5333171 5333192 5333188 5333193 +
tgttgtatctatttctatattg

SEQ ID NO: 102127 - DNA, 22 bp, Artificial Sequence
  Synthetic oligonucleotide; TTT chr11 5333172 5333193 5333189 5333194 +
gttgtatctatttctatattgt

SEQ ID NO: 102128 - DNA, 22 bp, Artificial Sequence
  Synthetic oligonucleotide; TTG chr11 5333173 5333194 5333190 5333195 +
ttgtatctatttctatattgtc

SEQ ID NO: 102129 - DNA, 22 bp, Artificial Sequence
  Synthetic oligonucleotide; TTG chr11 5333176 5333197 5333193 5333198 +
tatctatttctatattgtctct

SEQ ID NO: 102130 - DNA, 22 bp, Artificial Sequence
  Synthetic oligonucleotide; CTA chr11 5333182 5333203 5333199 5333204 +
tttctatattgtctcttatttt

SEQ ID NO: 102131 - DNA, 22 bp, Artificial Sequence
  Synthetic oligonucleotide; TTT chr11 5333185 5333206 5333202 5333207 +
ctatattgtctcttattttgcc

SEQ ID NO: 102132 - DNA, 22 bp, Artificial Sequence
  Synthetic oligonucleotide; TTC chr11 5333186 5333207 5333203 5333208 +
tatattgtctcttattttgccc

SEQ ID NO: 102133 - DNA, 22 bp, Artificial Sequence
  Synthetic oligonucleotide; CTA chr11 5333188 5333209 5333205 5333210 +
tattgtctcttattttgccctc

SEQ ID NO: 102134 - DNA, 22 bp, Artificial Sequence
  Synthetic oligonucleotide; TTG chr11 5333193 5333214 5333210 5333215 +
tctcttattttgccctctctaa

SEQ ID NO: 102135 - DNA, 22 bp, Artificial Sequence
  Synthetic oligonucleotide; CTC chr11 5333197 5333218 5333214 5333219 +
ttattttgccctctctaactaa

SEQ ID NO: 102136 - DNA, 22 bp, Artificial Sequence
  Synthetic oligonucleotide; CTT chr11 5333199 5333220 5333216 5333221 +
attttgccctctctaactaaac

SEQ ID NO: 102137 - DNA, 22 bp, Artificial Sequence
  Synthetic oligonucleotide; TTA chr11 5333200 5333221 5333217 5333222 +
ttttgccctctctaactaaacc

SEQ ID NO: 102138 - DNA, 22 bp, Artificial Sequence
  Synthetic oligonucleotide; TTT chr11 5333203 5333224 5333220 5333225 +
tgccctctctaactaaacccca

SEQ ID NO: 102139 - DNA, 22 bp, Artificial Sequence
  Synthetic oligonucleotide; TTT chr11 5333204 5333225 5333221 5333226 +
gccctctctaactaaaccccag

SEQ ID NO: 102140 - DNA, 22 bp, Artificial Sequence
  Synthetic oligonucleotide; TTG chr11 5333205 5333226 5333222 5333227 +
ccctctctaactaaaccccaga

SEQ ID NO: 102141 - DNA, 22 bp, Artificial Sequence
  Synthetic oligonucleotide; CTC chr11 5333210 5333231 5333227 5333232 +
tctaactaaaccccagatgtct

SEQ ID NO: 102142 - DNA, 22 bp, Artificial Sequence
  Synthetic oligonucleotide; CTC chr11 5333212 5333233 5333229 5333234 +
taactaaaccccagatgtctct

SEQ ID NO: 102143 - DNA, 22 bp, Artificial Sequence
  Synthetic oligonucleotide; CTA chr11 5333214 5333235 5333231 5333236 +
actaaaccccagatgtctcttt

SEQ ID NO: 102144 - DNA, 22 bp, Artificial Sequence
  Synthetic oligonucleotide; CTA chr11 5333218 5333239 5333235 5333240 +
aaccccagatgtctcttttgca

SEQ ID NO: 102145 - DNA, 22 bp, Artificial Sequence
  Synthetic oligonucleotide; CTC chr11 5333233 5333254 5333250 5333255 +
ttttgcatcacccagactttag

SEQ ID NO: 102146 - DNA, 22 bp, Artificial Sequence
  Synthetic oligonucleotide; CTT chr11 5333235 5333256 5333252 5333257 +
ttgcatcacccagactttagca

SEQ ID NO: 102147 - DNA, 22 bp, Artificial Sequence
  Synthetic oligonucleotide; TTT chr11 5333236 5333257 5333253 5333258 +
tgcatcacccagactttagcat

SEQ ID NO: 102148 - DNA, 22 bp, Artificial Sequence
  Synthetic oligonucleotide; TTT chr11 5333237 5333258 5333254 5333259 +
gcatcacccagactttagcata

SEQ ID NO: 102149 - DNA, 22 bp, Artificial Sequence
  Synthetic oligonucleotide; TTG chr11 5333238 5333259 5333255 5333260 +
catcacccagactttagcataa

SEQ ID NO: 102150 - DNA, 22 bp, Artificial Sequence
  Synthetic oligonucleotide; CTT chr11 5333252 5333273 5333269 5333274 +
tagcataaaacttagcacaaaa

SEQ ID NO: 102151 - DNA, 22 bp, Artificial Sequence
  Synthetic oligonucleotide; TTT chr11 5333253 5333274 5333270 5333275 +
agcataaaacttagcacaaaat

SEQ ID NO: 102152 - DNA, 22 bp, Artificial Sequence
  Synthetic oligonucleotide; TTA chr11 5333254 5333275 5333271 5333276 +
gcataaaacttagcacaaaatt

SEQ ID NO: 102153 - DNA, 22 bp, Artificial Sequence
  Synthetic oligonucleotide; CTT chr11 5333265 5333286 5333282 5333287 +
agcacaaaatttttactgttta

SEQ ID NO: 102154 - DNA, 22 bp, Artificial Sequence
  Synthetic oligonucleotide; TTA chr11 5333266 5333287 5333283 5333288 +
gcacaaaatttttactgtttac

SEQ ID NO: 102155 - DNA, 22 bp, Artificial Sequence
  Synthetic oligonucleotide; TTT chr11 5333277 5333298 5333294 5333299 +
ttactgtttacattcttttact

SEQ ID NO: 102156 - DNA, 22 bp, Artificial Sequence
  Synthetic oligonucleotide; TTT chr11 5333278 5333299 5333295 5333300 +
tactgtttacattcttttacta

SEQ ID NO: 102157 - DNA, 22 bp, Artificial Sequence
  Synthetic oligonucleotide; TTT chr11 5333279 5333300 5333296 5333301 +
actgtttacattcttttactag

SEQ ID NO: 102158 - DNA, 22 bp, Artificial Sequence
  Synthetic oligonucleotide; TTA chr11 5333280 5333301 5333297 5333302 +
ctgtttacattcttttactagt

SEQ ID NO: 102159 - DNA, 22 bp, Artificial Sequence
  Synthetic oligonucleotide; CTG chr11 5333283 5333304 5333300 5333305 +
tttacattcttttactagtctc

SEQ ID NO: 102160 - DNA, 22 bp, Artificial Sequence
  Synthetic oligonucleotide; TTT chr11 5333286 5333307 5333303 5333308 +
acattcttttactagtctctca

SEQ ID NO: 102161 - DNA, 22 bp, Artificial Sequence
  Synthetic oligonucleotide; TTA chr11 5333287 5333308 5333304 5333309 +
cattcttttactagtctctcag

SEQ ID NO: 102162 - DNA, 22 bp, Artificial Sequence
  Synthetic oligonucleotide; TTC chr11 5333292 5333313 5333309 5333314 +
ttttactagtctctcagaccta

SEQ ID NO: 102163 - DNA, 22 bp, Artificial Sequence
  Synthetic oligonucleotide; CTT chr11 5333294 5333315 5333311 5333316 +
ttactagtctctcagacctagt

SEQ ID NO: 102164 - DNA, 22 bp, Artificial Sequence
  Synthetic oligonucleotide; TTT chr11 5333295 5333316 5333312 5333317 +
tactagtctctcagacctagtg

SEQ ID NO: 102165 - DNA, 22 bp, Artificial Sequence
  Synthetic oligonucleotide; TTT chr11 5333296 5333317 5333313 5333318 +
actagtctctcagacctagtgg

SEQ ID NO: 102166 - DNA, 22 bp, Artificial Sequence
  Synthetic oligonucleotide; TTA chr11 5333297 5333318 5333314 5333319 +
ctagtctctcagacctagtggc

SEQ ID NO: 102167 - DNA, 22 bp, Artificial Sequence
  Synthetic oligonucleotide; CTA chr11 5333300 5333321 5333317 5333322 +
gtctctcagacctagtggctct

SEQ ID NO: 102168 - DNA, 22 bp, Artificial Sequence
  Synthetic oligonucleotide; CTC chr11 5333305 5333326 5333322 5333327 +
tcagacctagtggctctaactc

SEQ ID NO: 102169 - DNA, 22 bp, Artificial Sequence
  Synthetic oligonucleotide; CTC chr11 5333307 5333328 5333324 5333329 +
agacctagtggctctaactcat

SEQ ID NO: 102170 - DNA, 22 bp, Artificial Sequence
  Synthetic oligonucleotide; CTA chr11 5333314 5333335 5333331 5333336 +
gtggctctaactcattgtagta

SEQ ID NO: 102171 - DNA, 22 bp, Artificial Sequence
  Synthetic oligonucleotide; CTC chr11 5333321 5333342 5333338 5333343 +
taactcattgtagtaaaaaaca

SEQ ID NO: 102172 - DNA, 22 bp, Artificial Sequence
  Synthetic oligonucleotide; CTA chr11 5333323 5333344 5333340 5333345 +
actcattgtagtaaaaaacacg

SEQ ID NO: 102173 - DNA, 22 bp, Artificial Sequence
  Synthetic oligonucleotide; CTC chr11 5333327 5333348 5333344 5333349 +
attgtagtaaaaaacacggttc

SEQ ID NO: 102174 - DNA, 22 bp, Artificial Sequence
  Synthetic oligonucleotide; TTG chr11 5333331 5333352 5333348 5333353 +
tagtaaaaaacacggttctact

SEQ ID NO: 102175 - DNA, 22 bp, Artificial Sequence
  Synthetic oligonucleotide; TTC chr11 5333349 5333370 5333366 5333371 +
tactcccactccaacactaaca

SEQ ID NO: 102176 - DNA, 22 bp, Artificial Sequence
  Synthetic oligonucleotide; CTA chr11 5333351 5333372 5333368 5333373 +
ctcccactccaacactaacatt

SEQ ID NO: 102177 - DNA, 22 bp, Artificial Sequence
  Synthetic oligonucleotide; CTC chr11 5333354 5333375 5333371 5333376 +
ccactccaacactaacattgct

SEQ ID NO: 102178 - DNA, 22 bp, Artificial Sequence
  Synthetic oligonucleotide; CTC chr11 5333360 5333381 5333377 5333382 +
caacactaacattgcttacttt

SEQ ID NO: 102179 - DNA, 22 bp, Artificial Sequence
  Synthetic oligonucleotide; CTA chr11 5333368 5333389 5333385 5333390 +
acattgcttactttactaagtg

SEQ ID NO: 102180 - DNA, 22 bp, Artificial Sequence
  Synthetic oligonucleotide; TTG chr11 5333374 5333395 5333391 5333396 +
cttactttactaagtgttgtat

SEQ ID NO: 102181 - DNA, 22 bp, Artificial Sequence
  Synthetic oligonucleotide; CTT chr11 5333377 5333398 5333394 5333399 +
actttactaagtgttgtattaa

SEQ ID NO: 102182 - DNA, 22 bp, Artificial Sequence
  Synthetic oligonucleotide; TTA chr11 5333378 5333399 5333395 5333400 +
ctttactaagtgttgtattaac

SEQ ID NO: 102183 - DNA, 22 bp, Artificial Sequence
  Synthetic oligonucleotide; CTT chr11 5333381 5333402 5333398 5333403 +
tactaagtgttgtattaacaca

SEQ ID NO: 102184 - DNA, 22 bp, Artificial Sequence
  Synthetic oligonucleotide; TTT chr11 5333382 5333403 5333399 5333404 +
actaagtgttgtattaacacac

SEQ ID NO: 102185 - DNA, 22 bp, Artificial Sequence
  Synthetic oligonucleotide; TTA chr11 5333383 5333404 5333400 5333405 +
ctaagtgttgtattaacacacc

SEQ ID NO: 102186 - DNA, 22 bp, Artificial Sequence
  Synthetic oligonucleotide; CTA chr11 5333386 5333407 5333403 5333408 +
agtgttgtattaacacaccaat

SEQ ID NO: 102187 - DNA, 22 bp, Artificial Sequence
  Synthetic oligonucleotide; TTG chr11 5333393 5333414 5333410 5333415 +
tattaacacaccaatggccctg

SEQ ID NO: 102188 - DNA, 22 bp, Artificial Sequence
  Synthetic oligonucleotide; TTA chr11 5333398 5333419 5333415 5333420 +
acacaccaatggccctggaagc

SEQ ID NO: 102189 - DNA, 22 bp, Artificial Sequence
  Synthetic oligonucleotide; CTG chr11 5333415 5333436 5333432 5333437 +
gaagcaatgacagagtttgaca

SEQ ID NO: 102190 - DNA, 22 bp, Artificial Sequence
  Synthetic oligonucleotide; TTT chr11 5333433 5333454 5333450 5333455 +
gacatattgattgtaaggttat

SEQ ID NO: 102191 - DNA, 22 bp, Artificial Sequence
  Synthetic oligonucleotide; TTG chr11 5333434 5333455 5333451 5333456 +
acatattgattgtaaggttatt

SEQ ID NO: 102192 - DNA, 22 bp, Artificial Sequence
  Synthetic oligonucleotide; TTG chr11 5333442 5333463 5333459 5333464 +
attgtaaggttatttataaaat

SEQ ID NO: 102193 - DNA, 22 bp, Artificial Sequence
  Synthetic oligonucleotide; TTG chr11 5333446 5333467 5333463 5333468 +
taaggttatttataaaatttta

SEQ ID NO: 102194 - DNA, 22 bp, Artificial Sequence
  Synthetic oligonucleotide; TTA chr11 5333454 5333475 5333471 5333476 +
tttataaaattttaattacttt

SEQ ID NO: 102195 - DNA, 22 bp, Artificial Sequence
  Synthetic oligonucleotide; TTT chr11 5333457 5333478 5333474 5333479 +
ataaaattttaattactttatg

SEQ ID NO: 102196 - DNA, 22 bp, Artificial Sequence
  Synthetic oligonucleotide; TTA chr11 5333458 5333479 5333475 5333480 +
taaaattttaattactttatga

SEQ ID NO: 102197 - DNA, 22 bp, Artificial Sequence
  Synthetic oligonucleotide; TTT chr11 5333466 5333487 5333483 5333488 +
taattactttatgattaacaca

SEQ ID NO: 102198 - DNA, 22 bp, Artificial Sequence
  Synthetic oligonucleotide; TTT chr11 5333467 5333488 5333484 5333489 +
aattactttatgattaacacat

SEQ ID NO: 102199 - DNA, 22 bp, Artificial Sequence
  Synthetic oligonucleotide; TTA chr11 5333468 5333489 5333485 5333490 +
attactttatgattaacacatt

SEQ ID NO: 102200 - DNA, 22 bp, Artificial Sequence
  Synthetic oligonucleotide; TTA chr11 5333472 5333493 5333489 5333494 +
ctttatgattaacacattgatc

SEQ ID NO: 102201 - DNA, 22 bp, Artificial Sequence
  Synthetic oligonucleotide; CTT chr11 5333475 5333496 5333492 5333497 +
tatgattaacacattgatcact

SEQ ID NO: 102202 - DNA, 22 bp, Artificial Sequence
  Synthetic oligonucleotide; TTT chr11 5333476 5333497 5333493 5333498 +
atgattaacacattgatcacta

SEQ ID NO: 102203 - DNA, 22 bp, Artificial Sequence
  Synthetic oligonucleotide; TTA chr11 5333477 5333498 5333494 5333499 +
tgattaacacattgatcactaa

SEQ ID NO: 102204 - DNA, 22 bp, Artificial Sequence
  Synthetic oligonucleotide; TTA chr11 5333483 5333504 5333500 5333505 +
acacattgatcactaactgact

SEQ ID NO: 102205 - DNA, 22 bp, Artificial Sequence
  Synthetic oligonucleotide; TTG chr11 5333491 5333512 5333508 5333513 +
atcactaactgactggtatgct

SEQ ID NO: 102206 - DNA, 22 bp, Artificial Sequence
  Synthetic oligonucleotide; CTA chr11 5333498 5333519 5333515 5333520 +
actgactggtatgctgattgtt

SEQ ID NO: 102207 - DNA, 22 bp, Artificial Sequence
  Synthetic oligonucleotide; CTG chr11 5333502 5333523 5333519 5333524 +
actggtatgctgattgttaaac

SEQ ID NO: 102208 - DNA, 22 bp, Artificial Sequence
  Synthetic oligonucleotide; CTG chr11 5333506 5333527 5333523 5333528 +
gtatgctgattgttaaactgac

SEQ ID NO: 102209 - DNA, 22 bp, Artificial Sequence
  Synthetic oligonucleotide; CTG chr11 5333514 5333535 5333531 5333536 +
attgttaaactgacttaggtaa

SEQ ID NO: 102210 - DNA, 22 bp, Artificial Sequence
  Synthetic oligonucleotide; TTG chr11 5333518 5333539 5333535 5333540 +
ttaaactgacttaggtaagaac

SEQ ID NO: 102211 - DNA, 22 bp, Artificial Sequence
  Synthetic oligonucleotide; TTA chr11 5333521 5333542 5333538 5333543 +
aactgacttaggtaagaacagt

SEQ ID NO: 102212 - DNA, 22 bp, Artificial Sequence
  Synthetic oligonucleotide; CTG chr11 5333526 5333547 5333543 5333548 +
acttaggtaagaacagtgactt

SEQ ID NO: 102213 - DNA, 22 bp, Artificial Sequence
  Synthetic oligonucleotide; CTT chr11 5333530 5333551 5333547 5333552 +
aggtaagaacagtgacttcaaa

SEQ ID NO: 102214 - DNA, 22 bp, Artificial Sequence
  Synthetic oligonucleotide; TTA chr11 5333531 5333552 5333548 5333553 +
ggtaagaacagtgacttcaaaa

SEQ ID NO: 102215 - DNA, 22 bp, Artificial Sequence
  Synthetic oligonucleotide; CTT chr11 5333548 5333569 5333565 5333570 +
caaaatattactaatatactaa

SEQ ID NO: 102216 - DNA, 22 bp, Artificial Sequence
  Synthetic oligonucleotide; TTC chr11 5333549 5333570 5333566 5333571 +
aaaatattactaatatactaat

SEQ ID NO: 102217 - DNA, 22 bp, Artificial Sequence
  Synthetic oligonucleotide; TTA chr11 5333558 5333579 5333575 5333580 +
ctaatatactaattggctaata

SEQ ID NO: 102218 - DNA, 22 bp, Artificial Sequence
  Synthetic oligonucleotide; CTA chr11 5333561 5333582 5333578 5333583 +
atatactaattggctaatatat

SEQ ID NO: 102219 - DNA, 22 bp, Artificial Sequence
  Synthetic oligonucleotide; CTA chr11 5333569 5333590 5333586 5333591 +
attggctaatatataagctgaa

SEQ ID NO: 102220 - DNA, 22 bp, Artificial Sequence
  Synthetic oligonucleotide; TTG chr11 5333573 5333594 5333590 5333595 +
gctaatatataagctgaaaatg

SEQ ID NO: 102221 - DNA, 22 bp, Artificial Sequence
  Synthetic oligonucleotide; CTA chr11 5333577 5333598 5333594 5333599 +
atatataagctgaaaatgtggg

SEQ ID NO: 102222 - DNA, 22 bp, Artificial Sequence
  Synthetic oligonucleotide; CTG chr11 5333589 5333610 5333606 5333611 +
aaaatgtgggagctacaaagta

SEQ ID NO: 102223 - DNA, 22 bp, Artificial Sequence
  Synthetic oligonucleotide; CTA chr11 5333604 5333625 5333621 5333626 +
caaagtagaggaggaagaaggc

SEQ ID NO: 102224 - DNA, 22 bp, Artificial Sequence
  Synthetic oligonucleotide; CTG chr11 5333665 5333686 5333682 5333687 +
agcctagagaactgcatcaaga

SEQ ID NO: 102225 - DNA, 22 bp, Artificial Sequence
  Synthetic oligonucleotide; CTA chr11 5333671 5333692 5333688 5333693 +
gagaactgcatcaagaggagga

SEQ ID NO: 102226 - DNA, 22 bp, Artificial Sequence
  Synthetic oligonucleotide; CTG chr11 5333679 5333700 5333696 5333701 +
catcaagaggaggaggagaggt

SEQ ID NO: 102227 - DNA, 22 bp, Artificial Sequence
  Synthetic oligonucleotide; CTA chr11 5333715 5333736 5333732 5333737 +
caggtgtcatggtgaccccacc

SEQ ID NO: 102228 - DNA, 22 bp, Artificial Sequence
  Synthetic oligonucleotide; CTG chr11 5333740 5333761 5333757 5333762 +
cacattcactcccagagtcagt

SEQ ID NO: 102229 - DNA, 22 bp, Artificial Sequence
  Synthetic oligonucleotide; TTC chr11 5333747 5333768 5333764 5333769 +
actcccagagtcagtctctttc

SEQ ID NO: 102230 - DNA, 22 bp, Artificial Sequence
  Synthetic oligonucleotide; CTC chr11 5333751 5333772 5333768 5333773 +
ccagagtcagtctctttcctct

SEQ ID NO: 102231 - DNA, 22 bp, Artificial Sequence
  Synthetic oligonucleotide; CTC chr11 5333765 5333786 5333782 5333787 +
tttcctctcctgcctcttccaa

SEQ ID NO: 102232 - DNA, 22 bp, Artificial Sequence
  Synthetic oligonucleotide; CTT chr11 5333767 5333788 5333784 5333789 +
tcctctcctgcctcttccaaag

SEQ ID NO: 102233 - DNA, 22 bp, Artificial Sequence
  Synthetic oligonucleotide; TTT chr11 5333768 5333789 5333785 5333790 +
cctctcctgcctcttccaaaga

SEQ ID NO: 102234 - DNA, 22 bp, Artificial Sequence
  Synthetic oligonucleotide; TTC chr11 5333769 5333790 5333786 5333791 +
ctctcctgcctcttccaaagaa

SEQ ID NO: 102235 - DNA, 22 bp, Artificial Sequence
  Synthetic oligonucleotide; CTC chr11 5333772 5333793 5333789 5333794 +
tcctgcctcttccaaagaaaat

SEQ ID NO: 102236 - DNA, 22 bp, Artificial Sequence
  Synthetic oligonucleotide; CTC chr11 5333774 5333795 5333791 5333796 +
ctgcctcttccaaagaaaattt

SEQ ID NO: 102237 - DNA, 22 bp, Artificial Sequence
  Synthetic oligonucleotide; CTG chr11 5333777 5333798 5333794 5333799 +
cctcttccaaagaaaatttcta

SEQ ID NO: 102238 - DNA, 22 bp, Artificial Sequence
  Synthetic oligonucleotide; CTC chr11 5333781 5333802 5333798 5333803 +
ttccaaagaaaatttctattgt

SEQ ID NO: 102239 - DNA, 22 bp, Artificial Sequence
  Synthetic oligonucleotide; CTT chr11 5333783 5333804 5333800 5333805 +
ccaaagaaaatttctattgtag

SEQ ID NO: 102240 - DNA, 22 bp, Artificial Sequence
  Synthetic oligonucleotide; TTC chr11 5333784 5333805 5333801 5333806 +
caaagaaaatttctattgtagg

SEQ ID NO: 102241 - DNA, 22 bp, Artificial Sequence
  Synthetic oligonucleotide; TTT chr11 5333796 5333817 5333813 5333818 +
ctattgtaggaaaagtgttctt

SEQ ID NO: 102242 - DNA, 22 bp, Artificial Sequence
  Synthetic oligonucleotide; TTC chr11 5333797 5333818 5333814 5333819 +
tattgtaggaaaagtgttctta

SEQ ID NO: 102243 - DNA, 22 bp, Artificial Sequence
  Synthetic oligonucleotide; CTA chr11 5333799 5333820 5333816 5333821 +
ttgtaggaaaagtgttcttaat

SEQ ID NO: 102244 - DNA, 22 bp, Artificial Sequence
  Synthetic oligonucleotide; TTG chr11 5333802 5333823 5333819 5333824 +
taggaaaagtgttcttaatagc

SEQ ID NO: 102245 - DNA, 22 bp, Artificial Sequence
  Synthetic oligonucleotide; TTC chr11 5333816 5333837 5333833 5333838 +
ttaatagcgctgagctaacaag

SEQ ID NO: 102246 - DNA, 22 bp, Artificial Sequence
  Synthetic oligonucleotide; CTT chr11 5333818 5333839 5333835 5333840 +
aatagcgctgagctaacaagaa

SEQ ID NO: 102247 - DNA, 22 bp, Artificial Sequence
  Synthetic oligonucleotide; TTA chr11 5333819 5333840 5333836 5333841 +
atagcgctgagctaacaagaac

SEQ ID NO: 102248 - DNA, 22 bp, Artificial Sequence
  Synthetic oligonucleotide; CTG chr11 5333828 5333849 5333845 5333850 +
agctaacaagaacttctagata

SEQ ID NO: 102249 - DNA, 22 bp, Artificial Sequence
  Synthetic oligonucleotide; CTA chr11 5333833 5333854 5333850 5333855 +
acaagaacttctagatatcaac

SEQ ID NO: 102250 - DNA, 22 bp, Artificial Sequence
  Synthetic oligonucleotide; CTT chr11 5333843 5333864 5333860 5333865 +
ctagatatcaactcagaactct

SEQ ID NO: 102251 - DNA, 22 bp, Artificial Sequence
  Synthetic oligonucleotide; TTC chr11 5333844 5333865 5333861 5333866 +
tagatatcaactcagaactctt

SEQ ID NO: 102252 - DNA, 22 bp, Artificial Sequence
  Synthetic oligonucleotide; CTA chr11 5333846 5333867 5333863 5333868 +
gatatcaactcagaactcttaa

SEQ ID NO: 102253 - DNA, 22 bp, Artificial Sequence
  Synthetic oligonucleotide; CTC chr11 5333857 5333878 5333874 5333879 +
agaactcttaattattcatgta

SEQ ID NO: 102254 - DNA, 22 bp, Artificial Sequence
  Synthetic oligonucleotide; CTC chr11 5333864 5333885 5333881 5333886 +
ttaattattcatgtaagcaccc

SEQ ID NO: 102255 - DNA, 22 bp, Artificial Sequence
  Synthetic oligonucleotide; CTT chr11 5333866 5333887 5333883 5333888 +
aattattcatgtaagcacccat

SEQ ID NO: 102256 - DNA, 22 bp, Artificial Sequence
  Synthetic oligonucleotide; TTA chr11 5333867 5333888 5333884 5333889 +
attattcatgtaagcacccatc

SEQ ID NO: 102257 - DNA, 22 bp, Artificial Sequence
  Synthetic oligonucleotide; TTA chr11 5333871 5333892 5333888 5333893 +
ttcatgtaagcacccatcacat

SEQ ID NO: 102258 - DNA, 22 bp, Artificial Sequence
  Synthetic oligonucleotide; TTC chr11 5333874 5333895 5333891 5333896 +
atgtaagcacccatcacataaa

SEQ ID NO: 102259 - DNA, 22 bp, Artificial Sequence
  Synthetic oligonucleotide; CTA chr11 5333900 5333921 5333917 5333922 +
ctgtttttatttcagagttaac

SEQ ID NO: 102260 - DNA, 22 bp, Artificial Sequence
  Synthetic oligonucleotide; CTG chr11 5333903 5333924 5333920 5333925 +
tttttatttcagagttaacatt

SEQ ID NO: 102261 - DNA, 22 bp, Artificial Sequence
  Synthetic oligonucleotide; TTT chr11 5333906 5333927 5333923 5333928 +
ttatttcagagttaacatttgc

SEQ ID NO: 102262 - DNA, 22 bp, Artificial Sequence
  Synthetic oligonucleotide; TTT chr11 5333907 5333928 5333924 5333929 +
tatttcagagttaacatttgct

SEQ ID NO: 102263 - DNA, 22 bp, Artificial Sequence
  Synthetic oligonucleotide; TTT chr11 5333908 5333929 5333925 5333930 +
atttcagagttaacatttgcta

SEQ ID NO: 102264 - DNA, 22 bp, Artificial Sequence
  Synthetic oligonucleotide; TTA chr11 5333909 5333930 5333926 5333931 +
tttcagagttaacatttgctag

SEQ ID NO: 102265 - DNA, 22 bp, Artificial Sequence
  Synthetic oligonucleotide; TTT chr11 5333912 5333933 5333929 5333934 +
cagagttaacatttgctaggaa

SEQ ID NO: 102266 - DNA, 22 bp, Artificial Sequence
  Synthetic oligonucleotide; TTC chr11 5333913 5333934 5333930 5333935 +
agagttaacatttgctaggaag

SEQ ID NO: 102267 - DNA, 22 bp, Artificial Sequence
  Synthetic oligonucleotide; TTA chr11 5333920 5333941 5333937 5333942 +
acatttgctaggaagttgaact

SEQ ID NO: 102268 - DNA, 22 bp, Artificial Sequence
  Synthetic oligonucleotide; TTT chr11 5333926 5333947 5333943 5333948 +
gctaggaagttgaacttttatg

SEQ ID NO: 102269 - DNA, 22 bp, Artificial Sequence
  Synthetic oligonucleotide; TTG chr11 5333927 5333948 5333944 5333949 +
ctaggaagttgaacttttatgt

SEQ ID NO: 102270 - DNA, 22 bp, Artificial Sequence
  Synthetic oligonucleotide; CTA chr11 5333930 5333951 5333947 5333952 +
ggaagttgaacttttatgttgg

SEQ ID NO: 102271 - DNA, 22 bp, Artificial Sequence
  Synthetic oligonucleotide; TTG chr11 5333938 5333959 5333955 5333960 +
aacttttatgttggaggttgat

SEQ ID NO: 102272 - DNA, 22 bp, Artificial Sequence
  Synthetic oligonucleotide; CTT chr11 5333943 5333964 5333960 5333965 +
ttatgttggaggttgatacacc

SEQ ID NO: 102273 - DNA, 22 bp, Artificial Sequence
  Synthetic oligonucleotide; TTT chr11 5333944 5333965 5333961 5333966 +
tatgttggaggttgatacaccc

SEQ ID NO: 102274 - DNA, 22 bp, Artificial Sequence
  Synthetic oligonucleotide; TTT chr11 5333945 5333966 5333962 5333967 +
atgttggaggttgatacacccg

SEQ ID NO: 102275 - DNA, 22 bp, Artificial Sequence
  Synthetic oligonucleotide; TTA chr11 5333946 5333967 5333963 5333968 +
tgttggaggttgatacacccgg

SEQ ID NO: 102276 - DNA, 22 bp, Artificial Sequence
  Synthetic oligonucleotide; TTG chr11 5333951 5333972 5333968 5333973 +
gaggttgatacacccggcagaa

SEQ ID NO: 102277 - DNA, 22 bp, Artificial Sequence
  Synthetic oligonucleotide; TTG chr11 5333958 5333979 5333975 5333980 +
atacacccggcagaatctgtag

SEQ ID NO: 102278 - DNA, 22 bp, Artificial Sequence
  Synthetic oligonucleotide; CTG chr11 5333977 5333998 5333994 5333999 +
tagatacagatatcttgcctct

SEQ ID NO: 102279 - DNA, 22 bp, Artificial Sequence
  Synthetic oligonucleotide; CTT chr11 5333993 5334014 5334010 5334015 +
gcctcttttctctatttaccct

SEQ ID NO: 102280 - DNA, 22 bp, Artificial Sequence
  Synthetic oligonucleotide; TTG chr11 5333994 5334015 5334011 5334016 +
cctcttttctctatttaccctc

SEQ ID NO: 102281 - DNA, 22 bp, Artificial Sequence
  Synthetic oligonucleotide; CTC chr11 5333998 5334019 5334015 5334020 +
ttttctctatttaccctcttgc

SEQ ID NO: 102282 - DNA, 22 bp, Artificial Sequence
  Synthetic oligonucleotide; CTT chr11 5334000 5334021 5334017 5334022 +
ttctctatttaccctcttgcaa

SEQ ID NO: 102283 - DNA, 22 bp, Artificial Sequence
  Synthetic oligonucleotide; TTT chr11 5334001 5334022 5334018 5334023 +
tctctatttaccctcttgcaac

SEQ ID NO: 102284 - DNA, 22 bp, Artificial Sequence
  Synthetic oligonucleotide; TTT chr11 5334002 5334023 5334019 5334024 +
ctctatttaccctcttgcaaca

SEQ ID NO: 102285 - DNA, 22 bp, Artificial Sequence
  Synthetic oligonucleotide; TTC chr11 5334003 5334024 5334020 5334025 +
tctatttaccctcttgcaacaa

SEQ ID NO: 102286 - DNA, 22 bp, Artificial Sequence
  Synthetic oligonucleotide; CTC chr11 5334005 5334026 5334022 5334027 +
tatttaccctcttgcaacaact

SEQ ID NO: 102287 - DNA, 22 bp, Artificial Sequence
  Synthetic oligonucleotide; CTA chr11 5334007 5334028 5334024 5334029 +
tttaccctcttgcaacaactat

SEQ ID NO: 102288 - DNA, 22 bp, Artificial Sequence
  Synthetic oligonucleotide; TTT chr11 5334010 5334031 5334027 5334032 +
accctcttgcaacaactatgtg

SEQ ID NO: 102289 - DNA, 22 bp, Artificial Sequence
  Synthetic oligonucleotide; TTA chr11 5334011 5334032 5334028 5334033 +
ccctcttgcaacaactatgtgg

SEQ ID NO: 102290 - DNA, 22 bp, Artificial Sequence
  Synthetic oligonucleotide; CTC chr11 5334016 5334037 5334033 5334038 +
ttgcaacaactatgtggtggaa

SEQ ID NO: 102291 - DNA, 22 bp, Artificial Sequence
  Synthetic oligonucleotide; CTT chr11 5334018 5334039 5334035 5334040 +
gcaacaactatgtggtggaaga

SEQ ID NO: 102292 - DNA, 22 bp, Artificial Sequence
  Synthetic oligonucleotide; TTG chr11 5334019 5334040 5334036 5334041 +
caacaactatgtggtggaagag

SEQ ID NO: 102293 - DNA, 22 bp, Artificial Sequence
  Synthetic oligonucleotide; CTA chr11 5334028 5334049 5334045 5334050 +
tgtggtggaagagaatccaaga

SEQ ID NO: 102294 - DNA, 22 bp, Artificial Sequence
  Synthetic oligonucleotide; TTA chr11 5334056 5334077 5334073 5334078 +
gtctttattttcctctcaatta

SEQ ID NO: 102295 - DNA, 22 bp, Artificial Sequence
  Synthetic oligonucleotide; CTT chr11 5334061 5334082 5334078 5334083 +
tattttcctctcaattaccttc

SEQ ID NO: 102296 - DNA, 22 bp, Artificial Sequence
  Synthetic oligonucleotide; TTT chr11 5334062 5334083 5334079 5334084 +
attttcctctcaattaccttca

SEQ ID NO: 102297 - DNA, 22 bp, Artificial Sequence
  Synthetic oligonucleotide; TTA chr11 5334063 5334084 5334080 5334085 +
ttttcctctcaattaccttcat

SEQ ID NO: 102298 - DNA, 22 bp, Artificial Sequence
  Synthetic oligonucleotide; TTT chr11 5334066 5334087 5334083 5334088 +
tcctctcaattaccttcattcc

SEQ ID NO: 102299 - DNA, 22 bp, Artificial Sequence
  Synthetic oligonucleotide; TTT chr11 5334067 5334088 5334084 5334089 +
cctctcaattaccttcattcca

SEQ ID NO: 102300 - DNA, 22 bp, Artificial Sequence
  Synthetic oligonucleotide; TTC chr11 5334068 5334089 5334085 5334090 +
ctctcaattaccttcattccat

SEQ ID NO: 102301 - DNA, 22 bp, Artificial Sequence
  Synthetic oligonucleotide; CTC chr11 5334071 5334092 5334088 5334093 +
tcaattaccttcattccattct

SEQ ID NO: 102302 - DNA, 22 bp, Artificial Sequence
  Synthetic oligonucleotide; CTC chr11 5334073 5334094 5334090 5334095 +
aattaccttcattccattctcc

SEQ ID NO: 102303 - DNA, 22 bp, Artificial Sequence
  Synthetic oligonucleotide; TTA chr11 5334078 5334099 5334095 5334100 +
ccttcattccattctcccatag

SEQ ID NO: 102304 - DNA, 22 bp, Artificial Sequence
  Synthetic oligonucleotide; CTT chr11 5334082 5334103 5334099 5334104 +
cattccattctcccatagtcac

SEQ ID NO: 102305 - DNA, 22 bp, Artificial Sequence
  Synthetic oligonucleotide; TTC chr11 5334083 5334104 5334100 5334105 +
attccattctcccatagtcact

SEQ ID NO: 102306 - DNA, 22 bp, Artificial Sequence
  Synthetic oligonucleotide; TTC chr11 5334087 5334108 5334104 5334109 +
cattctcccatagtcactagag

SEQ ID NO: 102307 - DNA, 22 bp, Artificial Sequence
  Synthetic oligonucleotide; TTC chr11 5334092 5334113 5334109 5334114 +
tcccatagtcactagagcctga

SEQ ID NO: 102308 - DNA, 22 bp, Artificial Sequence
  Synthetic oligonucleotide; CTC chr11 5334094 5334115 5334111 5334116 +
ccatagtcactagagcctgacc

SEQ ID NO: 102309 - DNA, 22 bp, Artificial Sequence
  Synthetic oligonucleotide; CTA chr11 5334106 5334127 5334123 5334128 +
gagcctgacctggggtatcaga

SEQ ID NO: 102310 - DNA, 22 bp, Artificial Sequence
  Synthetic oligonucleotide; CTG chr11 5334113 5334134 5334130 5334135 +
acctggggtatcagaaattaag

SEQ ID NO: 102311 - DNA, 22 bp, Artificial Sequence
  Synthetic oligonucleotide; CTG chr11 5334118 5334139 5334135 5334140 +
gggtatcagaaattaaggggag

SEQ ID NO: 102312 - DNA, 22 bp, Artificial Sequence
  Synthetic oligonucleotide; TTA chr11 5334133 5334154 5334150 5334155 +
aggggagaggtaattgctgagt

SEQ ID NO: 102313 - DNA, 22 bp, Artificial Sequence
  Synthetic oligonucleotide; TTG chr11 5334149 5334170 5334166 5334171 +
ctgagtcctggtgtagaaattg

SEQ ID NO: 102314 - DNA, 22 bp, Artificial Sequence
  Synthetic oligonucleotide; CTG chr11 5334152 5334173 5334169 5334174 +
agtcctggtgtagaaattggtt

SEQ ID NO: 102315 - DNA, 22 bp, Artificial Sequence
  Synthetic oligonucleotide; CTG chr11 5334159 5334180 5334176 5334181 +
gtgtagaaattggtttaaatgg

SEQ ID NO: 102316 - DNA, 22 bp, Artificial Sequence
  Synthetic oligonucleotide; TTG chr11 5334171 5334192 5334188 5334193 +
gtttaaatggtatctctgaaga

SEQ ID NO: 102317 - DNA, 22 bp, Artificial Sequence
  Synthetic oligonucleotide; TTT chr11 5334175 5334196 5334192 5334197 +
aaatggtatctctgaagactgc

SEQ ID NO: 102318 - DNA, 22 bp, Artificial Sequence
  Synthetic oligonucleotide; TTA chr11 5334176 5334197 5334193 5334198 +
aatggtatctctgaagactgct

SEQ ID NO: 102319 - DNA, 22 bp, Artificial Sequence
  Synthetic oligonucleotide; CTC chr11 5334187 5334208 5334204 5334209 +
tgaagactgctaacagggttaa

SEQ ID NO: 102320 - DNA, 22 bp, Artificial Sequence
  Synthetic oligonucleotide; CTG chr11 5334189 5334210 5334206 5334211 +
aagactgctaacagggttaatt

SEQ ID NO: 102321 - DNA, 22 bp, Artificial Sequence
  Synthetic oligonucleotide; CTG chr11 5334196 5334217 5334213 5334218 +
ctaacagggttaatttgtgagg

SEQ ID NO: 102322 - DNA, 22 bp, Artificial Sequence
  Synthetic oligonucleotide; CTA chr11 5334199 5334220 5334216 5334221 +
acagggttaatttgtgaggtta

SEQ ID NO: 102323 - DNA, 22 bp, Artificial Sequence
  Synthetic oligonucleotide; TTA chr11 5334208 5334229 5334225 5334230 +
atttgtgaggttatttgtattc

SEQ ID NO: 102324 - DNA, 22 bp, Artificial Sequence
  Synthetic oligonucleotide; TTT chr11 5334212 5334233 5334229 5334234 +
gtgaggttatttgtattcaaaa

SEQ ID NO: 102325 - DNA, 22 bp, Artificial Sequence
  Synthetic oligonucleotide; TTG chr11 5334213 5334234 5334230 5334235 +
tgaggttatttgtattcaaaat

SEQ ID NO: 102326 - DNA, 22 bp, Artificial Sequence
  Synthetic oligonucleotide; TTA chr11 5334221 5334242 5334238 5334243 +
tttgtattcaaaattgttcccc

SEQ ID NO: 102327 - DNA, 22 bp, Artificial Sequence
  Synthetic oligonucleotide; TTT chr11 5334224 5334245 5334241 5334246 +
gtattcaaaattgttccccagt

SEQ ID NO: 102328 - DNA, 22 bp, Artificial Sequence
  Synthetic oligonucleotide; TTG chr11 5334225 5334246 5334242 5334247 +
tattcaaaattgttccccagta

SEQ ID NO: 102329 - DNA, 22 bp, Artificial Sequence
  Synthetic oligonucleotide; TTC chr11 5334230 5334251 5334247 5334252 +
aaaattgttccccagtatctgt

SEQ ID NO: 102330 - DNA, 22 bp, Artificial Sequence
  Synthetic oligonucleotide; TTG chr11 5334237 5334258 5334254 5334259 +
ttccccagtatctgtcttgatg

SEQ ID NO: 102331 - DNA, 22 bp, Artificial Sequence
  Synthetic oligonucleotide; TTC chr11 5334240 5334261 5334257 5334262 +
cccagtatctgtcttgatgctg

SEQ ID NO: 102332 - DNA, 22 bp, Artificial Sequence
  Synthetic oligonucleotide; CTG chr11 5334251 5334272 5334268 5334273 +
tcttgatgctggataattaggc

SEQ ID NO: 102333 - DNA, 22 bp, Artificial Sequence
  Synthetic oligonucleotide; CTT chr11 5334255 5334276 5334272 5334277 +
gatgctggataattaggctact

SEQ ID NO: 102334 - DNA, 22 bp, Artificial Sequence
  Synthetic oligonucleotide; TTG chr11 5334256 5334277 5334273 5334278 +
atgctggataattaggctactg

SEQ ID NO: 102335 - DNA, 22 bp, Artificial Sequence
  Synthetic oligonucleotide; CTG chr11 5334262 5334283 5334279 5334284 +
gataattaggctactgggatat

SEQ ID NO: 102336 - DNA, 22 bp, Artificial Sequence
  Synthetic oligonucleotide; TTA chr11 5334270 5334291 5334287 5334292 +
ggctactgggatattttttttc

SEQ ID NO: 102337 - DNA, 22 bp, Artificial Sequence
  Synthetic oligonucleotide; CTA chr11 5334275 5334296 5334292 5334297 +
ctgggatattttttttcaagcc

SEQ ID NO: 102338 - DNA, 22 bp, Artificial Sequence
  Synthetic oligonucleotide; CTG chr11 5334278 5334299 5334295 5334300 +
ggatattttttttcaagcctcc

SEQ ID NO: 102339 - DNA, 22 bp, Artificial Sequence
  Synthetic oligonucleotide; TTT chr11 5334286 5334307 5334303 5334308 +
tttttcaagcctcctttggaga

SEQ ID NO: 102340 - DNA, 22 bp, Artificial Sequence
  Synthetic oligonucleotide; TTT chr11 5334287 5334308 5334304 5334309 +
ttttcaagcctcctttggagaa

SEQ ID NO: 102341 - DNA, 22 bp, Artificial Sequence
  Synthetic oligonucleotide; TTT chr11 5334288 5334309 5334305 5334310 +
tttcaagcctcctttggagaag

SEQ ID NO: 102342 - DNA, 22 bp, Artificial Sequence
  Synthetic oligonucleotide; TTT chr11 5334289 5334310 5334306 5334311 +
ttcaagcctcctttggagaagg

SEQ ID NO: 102343 - DNA, 22 bp, Artificial Sequence
  Synthetic oligonucleotide; TTT chr11 5334290 5334311 5334307 5334312 +
tcaagcctcctttggagaagga

SEQ ID NO: 102344 - DNA, 22 bp, Artificial Sequence
  Synthetic oligonucleotide; TTT chr11 5334291 5334312 5334308 5334313 +
caagcctcctttggagaaggaa

SEQ ID NO: 102345 - DNA, 22 bp, Artificial Sequence
  Synthetic oligonucleotide; TTC chr11 5334292 5334313 5334309 5334314 +
aagcctcctttggagaaggaag

SEQ ID NO: 102346 - DNA, 22 bp, Artificial Sequence
  Synthetic oligonucleotide; CTC chr11 5334299 5334320 5334316 5334321 +
ctttggagaaggaagtgggctc

SEQ ID NO: 102347 - DNA, 22 bp, Artificial Sequence
  Synthetic oligonucleotide; CTT chr11 5334302 5334323 5334319 5334324 +
tggagaaggaagtgggctccag

SEQ ID NO: 102348 - DNA, 22 bp, Artificial Sequence
  Synthetic oligonucleotide; TTT chr11 5334303 5334324 5334320 5334325 +
ggagaaggaagtgggctccaga

SEQ ID NO: 102349 - DNA, 22 bp, Artificial Sequence
  Synthetic oligonucleotide; TTG chr11 5334304 5334325 5334321 5334326 +
gagaaggaagtgggctccagaa

SEQ ID NO: 102350 - DNA, 22 bp, Artificial Sequence
  Synthetic oligonucleotide; CTC chr11 5334321 5334342 5334338 5334343 +
cagaactgtgttcttaaagccc

SEQ ID NO: 102351 - DNA, 22 bp, Artificial Sequence
  Synthetic oligonucleotide; CTG chr11 5334329 5334350 5334346 5334351 +
tgttcttaaagccccatatttt

SEQ ID NO: 102352 - DNA, 22 bp, Artificial Sequence
  Synthetic oligonucleotide; TTC chr11 5334334 5334355 5334351 5334356 +
ttaaagccccatattttctttg

SEQ ID NO: 102353 - DNA, 22 bp, Artificial Sequence
  Synthetic oligonucleotide; CTT chr11 5334336 5334357 5334353 5334358 +
aaagccccatattttctttgca

SEQ ID NO: 102354 - DNA, 22 bp, Artificial Sequence
  Synthetic oligonucleotide; TTA chr11 5334337 5334358 5334354 5334359 +
aagccccatattttctttgcaa

SEQ ID NO: 102355 - DNA, 22 bp, Artificial Sequence
  Synthetic oligonucleotide; TTT chr11 5334350 5334371 5334367 5334372 +
tctttgcaaaaagaaaacagaa

SEQ ID NO: 102356 - DNA, 22 bp, Artificial Sequence
  Synthetic oligonucleotide; TTT chr11 5334351 5334372 5334368 5334373 +
ctttgcaaaaagaaaacagaat

SEQ ID NO: 102357 - DNA, 22 bp, Artificial Sequence
  Synthetic oligonucleotide; TTC chr11 5334352 5334373 5334369 5334374 +
tttgcaaaaagaaaacagaatt

SEQ ID NO: 102358 - DNA, 22 bp, Artificial Sequence
  Synthetic oligonucleotide; CTT chr11 5334354 5334375 5334371 5334376 +
tgcaaaaagaaaacagaattgt

SEQ ID NO: 102359 - DNA, 22 bp, Artificial Sequence
  Synthetic oligonucleotide; TTT chr11 5334355 5334376 5334372 5334377 +
gcaaaaagaaaacagaattgta

SEQ ID NO: 102360 - DNA, 22 bp, Artificial Sequence
  Synthetic oligonucleotide; TTG chr11 5334356 5334377 5334373 5334378 +
caaaaagaaaacagaattgtag

SEQ ID NO: 102361 - DNA, 22 bp, Artificial Sequence
  Synthetic oligonucleotide; TTG chr11 5334375 5334396 5334392 5334397 +
tagcttcatccagcacatggaa

SEQ ID NO: 102362 - DNA, 22 bp, Artificial Sequence
  Synthetic oligonucleotide; CTT chr11 5334381 5334402 5334398 5334403 +
catccagcacatggaagtcatg

SEQ ID NO: 102363 - DNA, 22 bp, Artificial Sequence
  Synthetic oligonucleotide; TTC chr11 5334382 5334403 5334399 5334404 +
atccagcacatggaagtcatgc

SEQ ID NO: 102364 - DNA, 22 bp, Artificial Sequence
  Synthetic oligonucleotide; CTA chr11 5334406 5334427 5334423 5334428 +
tctaactacctttgccttgtat

SEQ ID NO: 102365 - DNA, 22 bp, Artificial Sequence
  Synthetic oligonucleotide; CTA chr11 5334410 5334431 5334427 5334432 +
actacctttgccttgtatgatt

SEQ ID NO: 102366 - DNA, 22 bp, Artificial Sequence
  Synthetic oligonucleotide; CTA chr11 5334414 5334435 5334431 5334436 +
cctttgccttgtatgattcccc

SEQ ID NO: 102367 - DNA, 22 bp, Artificial Sequence
  Synthetic oligonucleotide; CTT chr11 5334418 5334439 5334435 5334440 +
tgccttgtatgattccccacct

SEQ ID NO: 102368 - DNA, 22 bp, Artificial Sequence
  Synthetic oligonucleotide; TTT chr11 5334419 5334440 5334436 5334441 +
gccttgtatgattccccacctc

SEQ ID NO: 102369 - DNA, 22 bp, Artificial Sequence
  Synthetic oligonucleotide; TTG chr11 5334420 5334441 5334437 5334442 +
ccttgtatgattccccacctca

SEQ ID NO: 102370 - DNA, 22 bp, Artificial Sequence
  Synthetic oligonucleotide; CTT chr11 5334424 5334445 5334441 5334446 +
gtatgattccccacctcaaaaa

SEQ ID NO: 102371 - DNA, 22 bp, Artificial Sequence
  Synthetic oligonucleotide; TTG chr11 5334425 5334446 5334442 5334447 +
tatgattccccacctcaaaaag

SEQ ID NO: 102372 - DNA, 22 bp, Artificial Sequence
  Synthetic oligonucleotide; TTC chr11 5334433 5334454 5334450 5334455 +
cccacctcaaaaagaagatacc

SEQ ID NO: 102373 - DNA, 22 bp, Artificial Sequence
  Synthetic oligonucleotide; CTC chr11 5334441 5334462 5334458 5334463 +
aaaaagaagataccgtgaagcc

SEQ ID NO: 102374 - DNA, 22 bp, Artificial Sequence
  Synthetic oligonucleotide; CTA chr11 5334465 5334486 5334482 5334487 +
cttttgttattccttaaccctg

SEQ ID NO: 102375 - DNA, 22 bp, Artificial Sequence
  Synthetic oligonucleotide; CTT chr11 5334468 5334489 5334485 5334490 +
ttgttattccttaaccctgtag

SEQ ID NO: 102376 - DNA, 22 bp, Artificial Sequence
  Synthetic oligonucleotide; TTT chr11 5334469 5334490 5334486 5334491 +
tgttattccttaaccctgtagc

SEQ ID NO: 102377 - DNA, 22 bp, Artificial Sequence
  Synthetic oligonucleotide; TTT chr11 5334470 5334491 5334487 5334492 +
gttattccttaaccctgtagcc

SEQ ID NO: 102378 - DNA, 22 bp, Artificial Sequence
  Synthetic oligonucleotide; TTG chr11 5334471 5334492 5334488 5334493 +
ttattccttaaccctgtagcca

SEQ ID NO: 102379 - DNA, 22 bp, Artificial Sequence
  Synthetic oligonucleotide; TTA chr11 5334474 5334495 5334491 5334496 +
ttccttaaccctgtagccaata

SEQ ID NO: 102380 - DNA, 22 bp, Artificial Sequence
  Synthetic oligonucleotide; TTC chr11 5334477 5334498 5334494 5334499 +
cttaaccctgtagccaataagc

SEQ ID NO: 102381 - DNA, 22 bp, Artificial Sequence
  Synthetic oligonucleotide; CTT chr11 5334480 5334501 5334497 5334502 +
aaccctgtagccaataagctca

SEQ ID NO: 102382 - DNA, 22 bp, Artificial Sequence
  Synthetic oligonucleotide; TTA chr11 5334481 5334502 5334498 5334503 +
accctgtagccaataagctcac

SEQ ID NO: 102383 - DNA, 22 bp, Artificial Sequence
  Synthetic oligonucleotide; CTG chr11 5334487 5334508 5334504 5334509 +
tagccaataagctcactcaact

SEQ ID NO: 102384 - DNA, 22 bp, Artificial Sequence
  Synthetic oligonucleotide; CTC chr11 5334501 5334522 5334518 5334523 +
actcaacttagacaaagcttaa

SEQ ID NO: 102385 - DNA, 22 bp, Artificial Sequence
  Synthetic oligonucleotide; CTC chr11 5334505 5334526 5334522 5334527 +
aacttagacaaagcttaataat

SEQ ID NO: 102386 - DNA, 22 bp, Artificial Sequence
  Synthetic oligonucleotide; CTT chr11 5334510 5334531 5334527 5334532 +
agacaaagcttaataatccctc

SEQ ID NO: 102387 - DNA, 22 bp, Artificial Sequence
  Synthetic oligonucleotide; TTA chr11 5334511 5334532 5334528 5334533 +
gacaaagcttaataatccctca

SEQ ID NO: 102388 - DNA, 22 bp, Artificial Sequence
  Synthetic oligonucleotide; CTT chr11 5334521 5334542 5334538 5334543 +
aataatccctcacacttaatct

SEQ ID NO: 102389 - DNA, 22 bp, Artificial Sequence
  Synthetic oligonucleotide; TTA chr11 5334522 5334543 5334539 5334544 +
ataatccctcacacttaatctt

SEQ ID NO: 102390 - DNA, 22 bp, Artificial Sequence
  Synthetic oligonucleotide; CTC chr11 5334532 5334553 5334549 5334554 +
acacttaatcttttcttggttt

SEQ ID NO: 102391 - DNA, 22 bp, Artificial Sequence
  Synthetic oligonucleotide; CTT chr11 5334538 5334559 5334555 5334560 +
aatcttttcttggtttcaaata

SEQ ID NO: 102392 - DNA, 22 bp, Artificial Sequence
  Synthetic oligonucleotide; TTA chr11 5334539 5334560 5334556 5334561 +
atcttttcttggtttcaaataa

SEQ ID NO: 102393 - DNA, 22 bp, Artificial Sequence
  Synthetic oligonucleotide; CTT chr11 5334544 5334565 5334561 5334566 +
ttcttggtttcaaataagattg

SEQ ID NO: 102394 - DNA, 22 bp, Artificial Sequence
  Synthetic oligonucleotide; TTT chr11 5334545 5334566 5334562 5334567 +
tcttggtttcaaataagattgt

SEQ ID NO: 102395 - DNA, 22 bp, Artificial Sequence
  Synthetic oligonucleotide; TTT chr11 5334546 5334567 5334563 5334568 +
cttggtttcaaataagattgtt

SEQ ID NO: 102396 - DNA, 22 bp, Artificial Sequence
  Synthetic oligonucleotide; TTC chr11 5334547 5334568 5334564 5334569 +
ttggtttcaaataagattgttt

SEQ ID NO: 102397 - DNA, 22 bp, Artificial Sequence
  Synthetic oligonucleotide; CTT chr11 5334549 5334570 5334566 5334571 +
ggtttcaaataagattgtttgt

SEQ ID NO: 102398 - DNA, 22 bp, Artificial Sequence
  Synthetic oligonucleotide; TTG chr11 5334550 5334571 5334567 5334572 +
gtttcaaataagattgtttgtt

SEQ ID NO: 102399 - DNA, 22 bp, Artificial Sequence
  Synthetic oligonucleotide; TTT chr11 5334554 5334575 5334571 5334576 +
caaataagattgtttgttatat

SEQ ID NO: 102400 - DNA, 22 bp, Artificial Sequence
  Synthetic oligonucleotide; TTC chr11 5334555 5334576 5334572 5334577 +
aaataagattgtttgttatata

SEQ ID NO: 102401 - DNA, 22 bp, Artificial Sequence
  Synthetic oligonucleotide; TTG chr11 5334566 5334587 5334583 5334588 +
tttgttatatatactcacaaat

SEQ ID NO: 102402 - DNA, 22 bp, Artificial Sequence
  Synthetic oligonucleotide; TTT chr11 5334569 5334590 5334586 5334591 +
gttatatatactcacaaatgag

SEQ ID NO: 102403 - DNA, 22 bp, Artificial Sequence
  Synthetic oligonucleotide; TTG chr11 5334570 5334591 5334587 5334592 +
ttatatatactcacaaatgagt

SEQ ID NO: 102404 - DNA, 22 bp, Artificial Sequence
  Synthetic oligonucleotide; TTA chr11 5334573 5334594 5334590 5334595 +
tatatactcacaaatgagtgct

SEQ ID NO: 102405 - DNA, 22 bp, Artificial Sequence
  Synthetic oligonucleotide; CTC chr11 5334582 5334603 5334599 5334604 +
acaaatgagtgctgctgataag

SEQ ID NO: 102406 - DNA, 22 bp, Artificial Sequence
  Synthetic oligonucleotide; CTG chr11 5334596 5334617 5334613 5334618 +
ctgataagttctttcaaacagt

SEQ ID NO: 102407 - DNA, 22 bp, Artificial Sequence
  Synthetic oligonucleotide; CTG chr11 5334599 5334620 5334616 5334621 +
ataagttctttcaaacagtaag

SEQ ID NO: 102408 - DNA, 22 bp, Artificial Sequence
  Synthetic oligonucleotide; TTC chr11 5334607 5334628 5334624 5334629 +
tttcaaacagtaagcttgtttt

SEQ ID NO: 102409 - DNA, 22 bp, Artificial Sequence
  Synthetic oligonucleotide; CTT chr11 5334609 5334630 5334626 5334631 +
tcaaacagtaagcttgttttct

SEQ ID NO: 102410 - DNA, 22 bp, Artificial Sequence
  Synthetic oligonucleotide; TTT chr11 5334610 5334631 5334627 5334632 +
caaacagtaagcttgttttctg

SEQ ID NO: 102411 - DNA, 22 bp, Artificial Sequence
  Synthetic oligonucleotide; TTC chr11 5334611 5334632 5334628 5334633 +
aaacagtaagcttgttttctgt

SEQ ID NO: 102412 - DNA, 22 bp, Artificial Sequence
  Synthetic oligonucleotide; CTT chr11 5334624 5334645 5334641 5334646 +
gttttctgtctcttggtaagtc

SEQ ID NO: 102413 - DNA, 22 bp, Artificial Sequence
  Synthetic oligonucleotide; TTG chr11 5334625 5334646 5334642 5334647 +
ttttctgtctcttggtaagtct

SEQ ID NO: 102414 - DNA, 22 bp, Artificial Sequence
  Synthetic oligonucleotide; TTT chr11 5334628 5334649 5334645 5334650 +
tctgtctcttggtaagtcttgc

SEQ ID NO: 102415 - DNA, 22 bp, Artificial Sequence
  Synthetic oligonucleotide; TTT chr11 5334629 5334650 5334646 5334651 +
ctgtctcttggtaagtcttgcc

SEQ ID NO: 102416 - DNA, 22 bp, Artificial Sequence
  Synthetic oligonucleotide; TTC chr11 5334630 5334651 5334647 5334652 +
tgtctcttggtaagtcttgccc

SEQ ID NO: 102417 - DNA, 22 bp, Artificial Sequence
  Synthetic oligonucleotide; CTG chr11 5334632 5334653 5334649 5334654 +
tctcttggtaagtcttgcccaa

SEQ ID NO: 102418 - DNA, 22 bp, Artificial Sequence
  Synthetic oligonucleotide; CTC chr11 5334636 5334657 5334653 5334658 +
ttggtaagtcttgcccaagaat

SEQ ID NO: 102419 - DNA, 22 bp, Artificial Sequence
  Synthetic oligonucleotide; CTT chr11 5334638 5334659 5334655 5334660 +
ggtaagtcttgcccaagaatca

SEQ ID NO: 102420 - DNA, 22 bp, Artificial Sequence
  Synthetic oligonucleotide; TTG chr11 5334639 5334660 5334656 5334661 +
gtaagtcttgcccaagaatcag

SEQ ID NO: 102421 - DNA, 22 bp, Artificial Sequence
  Synthetic oligonucleotide; CTT chr11 5334648 5334669 5334665 5334670 +
gcccaagaatcagagttactgc

SEQ ID NO: 102422 - DNA, 22 bp, Artificial Sequence
  Synthetic oligonucleotide; TTG chr11 5334649 5334670 5334666 5334671 +
cccaagaatcagagttactgct

SEQ ID NO: 102423 - DNA, 22 bp, Artificial Sequence
  Synthetic oligonucleotide; TTA chr11 5334666 5334687 5334683 5334688 +
ctgcttctggagcaatataaat

SEQ ID NO: 102424 - DNA, 22 bp, Artificial Sequence
  Synthetic oligonucleotide; CTG chr11 5334669 5334690 5334686 5334691 +
cttctggagcaatataaatcaa

SEQ ID NO: 102425 - DNA, 22 bp, Artificial Sequence
  Synthetic oligonucleotide; CTT chr11 5334672 5334693 5334689 5334694 +
ctggagcaatataaatcaagtt

SEQ ID NO: 102426 - DNA, 22 bp, Artificial Sequence
  Synthetic oligonucleotide; TTC chr11 5334673 5334694 5334690 5334695 +
tggagcaatataaatcaagttt

SEQ ID NO: 102427 - DNA, 22 bp, Artificial Sequence
  Synthetic oligonucleotide; CTG chr11 5334675 5334696 5334692 5334697 +
gagcaatataaatcaagtttaa

SEQ ID NO: 102428 - DNA, 22 bp, Artificial Sequence
  Synthetic oligonucleotide; TTT chr11 5334695 5334716 5334712 5334717 +
aaaaaattttatttaagtgtcc

SEQ ID NO: 102429 - DNA, 22 bp, Artificial Sequence
  Synthetic oligonucleotide; TTA chr11 5334696 5334717 5334713 5334718 +
aaaaattttatttaagtgtcct

SEQ ID NO: 102430 - DNA, 22 bp, Artificial Sequence
  Synthetic oligonucleotide; TTT chr11 5334704 5334725 5334721 5334726 +
tatttaagtgtcctgtagtaat

SEQ ID NO: 102431 - DNA, 22 bp, Artificial Sequence
  Synthetic oligonucleotide; TTT chr11 5334705 5334726 5334722 5334727 +
atttaagtgtcctgtagtaatg

SEQ ID NO: 102432 - DNA, 22 bp, Artificial Sequence
  Synthetic oligonucleotide; TTA chr11 5334706 5334727 5334723 5334728 +
tttaagtgtcctgtagtaatgt

SEQ ID NO: 102433 - DNA, 22 bp, Artificial Sequence
  Synthetic oligonucleotide; TTT chr11 5334709 5334730 5334726 5334731 +
aagtgtcctgtagtaatgttaa

SEQ ID NO: 102434 - DNA, 22 bp, Artificial Sequence
  Synthetic oligonucleotide; TTA chr11 5334710 5334731 5334727 5334732 +
agtgtcctgtagtaatgttaaa

SEQ ID NO: 102435 - DNA, 22 bp, Artificial Sequence
  Synthetic oligonucleotide; CTG chr11 5334719 5334740 5334736 5334741 +
tagtaatgttaaaaaggggaca

SEQ ID NO: 102436 - DNA, 22 bp, Artificial Sequence
  Synthetic oligonucleotide; TTA chr11 5334730 5334751 5334747 5334752 +
aaaaggggacatggtggaggta

SEQ ID NO: 102437 - DNA, 22 bp, Artificial Sequence
  Synthetic oligonucleotide; TTC chr11 5334755 5334776 5334772 5334777 +
tttaatccctggctttgtctga

SEQ ID NO: 102438 - DNA, 22 bp, Artificial Sequence
  Synthetic oligonucleotide; CTT chr11 5334757 5334778 5334774 5334779 +
taatccctggctttgtctgaca

SEQ ID NO: 102439 - DNA, 22 bp, Artificial Sequence
  Synthetic oligonucleotide; TTT chr11 5334758 5334779 5334775 5334780 +
aatccctggctttgtctgacaa

SEQ ID NO: 102440 - DNA, 22 bp, Artificial Sequence
  Synthetic oligonucleotide; TTA chr11 5334759 5334780 5334776 5334781 +
atccctggctttgtctgacaat

SEQ ID NO: 102441 - DNA, 22 bp, Artificial Sequence
  Synthetic oligonucleotide; CTG chr11 5334766 5334787 5334783 5334788 +
gctttgtctgacaatttgtact

SEQ ID NO: 102442 - DNA, 22 bp, Artificial Sequence
  Synthetic oligonucleotide; CTT chr11 5334770 5334791 5334787 5334792 +
tgtctgacaatttgtacttgaa

SEQ ID NO: 102443 - DNA, 22 bp, Artificial Sequence
  Synthetic oligonucleotide; TTT chr11 5334771 5334792 5334788 5334793 +
gtctgacaatttgtacttgaat

SEQ ID NO: 102444 - DNA, 22 bp, Artificial Sequence
  Synthetic oligonucleotide; TTG chr11 5334772 5334793 5334789 5334794 +
tctgacaatttgtacttgaata

SEQ ID NO: 102445 - DNA, 22 bp, Artificial Sequence
  Synthetic oligonucleotide; CTG chr11 5334776 5334797 5334793 5334798 +
acaatttgtacttgaatacaat

SEQ ID NO: 102446 - DNA, 22 bp, Artificial Sequence
  Synthetic oligonucleotide; TTT chr11 5334783 5334804 5334800 5334805 +
gtacttgaatacaatcatctca

SEQ ID NO: 102447 - DNA, 22 bp, Artificial Sequence
  Synthetic oligonucleotide; TTG chr11 5334784 5334805 5334801 5334806 +
tacttgaatacaatcatctcat

SEQ ID NO: 102448 - DNA, 22 bp, Artificial Sequence
  Synthetic oligonucleotide; CTT chr11 5334789 5334810 5334806 5334811 +
gaatacaatcatctcatagtct

SEQ ID NO: 102449 - DNA, 22 bp, Artificial Sequence
  Synthetic oligonucleotide; TTG chr11 5334790 5334811 5334807 5334812 +
aatacaatcatctcatagtctg

SEQ ID NO: 102450 - DNA, 22 bp, Artificial Sequence
  Synthetic oligonucleotide; CTC chr11 5334804 5334825 5334821 5334826 +
atagtctgtcagagaaataagg

SEQ ID NO: 102451 - DNA, 22 bp, Artificial Sequence
  Synthetic oligonucleotide; CTG chr11 5334812 5334833 5334829 5334834 +
tcagagaaataaggatctgaga

SEQ ID NO: 102452 - DNA, 22 bp, Artificial Sequence
  Synthetic oligonucleotide; CTG chr11 5334831 5334852 5334848 5334853 +
agaatttctattgtctcatcag

SEQ ID NO: 102453 - DNA, 22 bp, Artificial Sequence
  Synthetic oligonucleotide; TTT chr11 5334838 5334859 5334855 5334860 +
ctattgtctcatcagtcttaaa

SEQ ID NO: 102454 - DNA, 22 bp, Artificial Sequence
  Synthetic oligonucleotide; TTC chr11 5334839 5334860 5334856 5334861 +
tattgtctcatcagtcttaaat

SEQ ID NO: 102455 - DNA, 22 bp, Artificial Sequence
  Synthetic oligonucleotide; CTA chr11 5334841 5334862 5334858 5334863 +
ttgtctcatcagtcttaaatcc

SEQ ID NO: 102456 - DNA, 22 bp, Artificial Sequence
  Synthetic oligonucleotide; TTG chr11 5334844 5334865 5334861 5334866 +
tctcatcagtcttaaatcctaa

SEQ ID NO: 102457 - DNA, 22 bp, Artificial Sequence
  Synthetic oligonucleotide; CTC chr11 5334848 5334869 5334865 5334870 +
atcagtcttaaatcctaaattt

SEQ ID NO: 102458 - DNA, 22 bp, Artificial Sequence
  Synthetic oligonucleotide; CTT chr11 5334857 5334878 5334874 5334879 +
aaatcctaaatttatcctggaa

SEQ ID NO: 102459 - DNA, 22 bp, Artificial Sequence
  Synthetic oligonucleotide; TTA chr11 5334858 5334879 5334875 5334880 +
aatcctaaatttatcctggaac

SEQ ID NO: 102460 - DNA, 22 bp, Artificial Sequence
  Synthetic oligonucleotide; CTA chr11 5334865 5334886 5334882 5334887 +
aatttatcctggaacttagccc

SEQ ID NO: 102461 - DNA, 22 bp, Artificial Sequence
  Synthetic oligonucleotide; TTT chr11 5334870 5334891 5334887 5334892 +
atcctggaacttagcccaacta

SEQ ID NO: 102462 - DNA, 22 bp, Artificial Sequence
  Synthetic oligonucleotide; TTA chr11 5334871 5334892 5334888 5334893 +
tcctggaacttagcccaactat

SEQ ID NO: 102463 - DNA, 22 bp, Artificial Sequence
  Synthetic oligonucleotide; CTG chr11 5334876 5334897 5334893 5334898 +
gaacttagcccaactatgagat

SEQ ID NO: 102464 - DNA, 22 bp, Artificial Sequence
  Synthetic oligonucleotide; CTT chr11 5334882 5334903 5334899 5334904 +
agcccaactatgagattttaaa

SEQ ID NO: 102465 - DNA, 22 bp, Artificial Sequence
  Synthetic oligonucleotide; TTA chr11 5334883 5334904 5334900 5334905 +
gcccaactatgagattttaaaa

SEQ ID NO: 102466 - DNA, 22 bp, Artificial Sequence
  Synthetic oligonucleotide; CTA chr11 5334892 5334913 5334909 5334914 +
tgagattttaaaatgagtatgg

SEQ ID NO: 102467 - DNA, 22 bp, Artificial Sequence
  Synthetic oligonucleotide; TTT chr11 5334900 5334921 5334917 5334922 +
taaaatgagtatgggtgcaatg

SEQ ID NO: 102468 - DNA, 22 bp, Artificial Sequence
  Synthetic oligonucleotide; TTT chr11 5334901 5334922 5334918 5334923 +
aaaatgagtatgggtgcaatgt

SEQ ID NO: 102469 - DNA, 22 bp, Artificial Sequence
  Synthetic oligonucleotide; TTA chr11 5334902 5334923 5334919 5334924 +
aaatgagtatgggtgcaatgtg

SEQ ID NO: 102470 - DNA, 22 bp, Artificial Sequence
  Synthetic oligonucleotide; TTT chr11 5334946 5334967 5334963 5334968 +
tggtgcctgacatttcacatca

SEQ ID NO: 102471 - DNA, 22 bp, Artificial Sequence
  Synthetic oligonucleotide; TTT chr11 5334947 5334968 5334964 5334969 +
ggtgcctgacatttcacatcag

SEQ ID NO: 102472 - DNA, 22 bp, Artificial Sequence
  Synthetic oligonucleotide; TTG chr11 5334948 5334969 5334965 5334970 +
gtgcctgacatttcacatcagt

SEQ ID NO: 102473 - DNA, 22 bp, Artificial Sequence
  Synthetic oligonucleotide; CTG chr11 5334955 5334976 5334972 5334977 +
acatttcacatcagttaagttc

SEQ ID NO: 102474 - DNA, 22 bp, Artificial Sequence
  Synthetic oligonucleotide; TTT chr11 5334961 5334982 5334978 5334983 +
cacatcagttaagttcctcctg

SEQ ID NO: 102475 - DNA, 22 bp, Artificial Sequence
  Synthetic oligonucleotide; TTC chr11 5334962 5334983 5334979 5334984 +
acatcagttaagttcctcctga

SEQ ID NO: 102476 - DNA, 22 bp, Artificial Sequence
  Synthetic oligonucleotide; TTA chr11 5334972 5334993 5334989 5334994 +
agttcctcctgaactgcattct

SEQ ID NO: 102477 - DNA, 22 bp, Artificial Sequence
  Synthetic oligonucleotide; TTC chr11 5334977 5334998 5334994 5334999 +
ctcctgaactgcattctgctca

SEQ ID NO: 102478 - DNA, 22 bp, Artificial Sequence
  Synthetic oligonucleotide; CTC chr11 5334980 5335001 5334997 5335002 +
ctgaactgcattctgctcatag

SEQ ID NO: 102479 - DNA, 22 bp, Artificial Sequence
  Synthetic oligonucleotide; CTG chr11 5334983 5335004 5335000 5335005 +
aactgcattctgctcataggtc

SEQ ID NO: 102480 - DNA, 22 bp, Artificial Sequence
  Synthetic oligonucleotide; CTG chr11 5334988 5335009 5335005 5335010 +
cattctgctcataggtcttcct

SEQ ID NO: 102481 - DNA, 22 bp, Artificial Sequence
  Synthetic oligonucleotide; TTC chr11 5334993 5335014 5335010 5335015 +
tgctcataggtcttcctaaatg

SEQ ID NO: 102482 - DNA, 22 bp, Artificial Sequence
  Synthetic oligonucleotide; CTG chr11 5334995 5335016 5335012 5335017 +
ctcataggtcttcctaaatgta

SEQ ID NO: 102483 - DNA, 22 bp, Artificial Sequence
  Synthetic oligonucleotide; CTC chr11 5334998 5335019 5335015 5335020 +
ataggtcttcctaaatgtaagc

SEQ ID NO: 102484 - DNA, 22 bp, Artificial Sequence
  Synthetic oligonucleotide; CTT chr11 5335007 5335028 5335024 5335029 +
cctaaatgtaagcagaatagta

SEQ ID NO: 102485 - DNA, 22 bp, Artificial Sequence
  Synthetic oligonucleotide; TTC chr11 5335008 5335029 5335025 5335030 +
ctaaatgtaagcagaatagtag

SEQ ID NO: 102486 - DNA, 22 bp, Artificial Sequence
  Synthetic oligonucleotide; CTA chr11 5335011 5335032 5335028 5335033 +
aatgtaagcagaatagtagtag

SEQ ID NO: 102487 - DNA, 22 bp, Artificial Sequence
  Synthetic oligonucleotide; TTA chr11 5335046 5335067 5335063 5335068 +
aaagtcagtctctggaaatggc

SEQ ID NO: 102488 - DNA, 22 bp, Artificial Sequence
  Synthetic oligonucleotide; CTC chr11 5335058 5335079 5335075 5335080 +
tggaaatggcttaagtctgaaa

SEQ ID NO: 102489 - DNA, 22 bp, Artificial Sequence
  Synthetic oligonucleotide; CTG chr11 5335060 5335081 5335077 5335082 +
gaaatggcttaagtctgaaaat

SEQ ID NO: 102490 - DNA, 22 bp, Artificial Sequence
  Synthetic oligonucleotide; CTT chr11 5335070 5335091 5335087 5335092 +
aagtctgaaaatttgtgtgtcc

SEQ ID NO: 102491 - DNA, 22 bp, Artificial Sequence
  Synthetic oligonucleotide; TTA chr11 5335071 5335092 5335088 5335093 +
agtctgaaaatttgtgtgtcct

SEQ ID NO: 102492 - DNA, 22 bp, Artificial Sequence
  Synthetic oligonucleotide; CTG chr11 5335077 5335098 5335094 5335099 +
aaaatttgtgtgtcctctttgt

SEQ ID NO: 102493 - DNA, 22 bp, Artificial Sequence
  Synthetic oligonucleotide; TTT chr11 5335084 5335105 5335101 5335106 +
gtgtgtcctctttgtactaagt

SEQ ID NO: 102494 - DNA, 22 bp, Artificial Sequence
  Synthetic oligonucleotide; TTG chr11 5335085 5335106 5335102 5335107 +
tgtgtcctctttgtactaagtt

SEQ ID NO: 102495 - DNA, 22 bp, Artificial Sequence
  Synthetic oligonucleotide; CTC chr11 5335094 5335115 5335111 5335116 +
tttgtactaagttaaaatttag

SEQ ID NO: 102496 - DNA, 22 bp, Artificial Sequence
  Synthetic oligonucleotide; CTT chr11 5335096 5335117 5335113 5335118 +
tgtactaagttaaaatttaggt

SEQ ID NO: 102497 - DNA, 22 bp, Artificial Sequence
  Synthetic oligonucleotide; TTT chr11 5335097 5335118 5335114 5335119 +
gtactaagttaaaatttaggtc

SEQ ID NO: 102498 - DNA, 22 bp, Artificial Sequence
  Synthetic oligonucleotide; TTG chr11 5335098 5335119 5335115 5335120 +
tactaagttaaaatttaggtct

SEQ ID NO: 102499 - DNA, 22 bp, Artificial Sequence
  Synthetic oligonucleotide; CTA chr11 5335103 5335124 5335120 5335125 +
agttaaaatttaggtctggatt

SEQ ID NO: 102500 - DNA, 22 bp, Artificial Sequence
  Synthetic oligonucleotide; TTA chr11 5335108 5335129 5335125 5335130 +
aaatttaggtctggattgattt

SEQ ID NO: 102501 - DNA, 22 bp, Artificial Sequence
  Synthetic oligonucleotide; TTT chr11 5335114 5335135 5335131 5335136 +
aggtctggattgatttagggga

SEQ ID NO: 102502 - DNA, 22 bp, Artificial Sequence
  Synthetic oligonucleotide; TTA chr11 5335115 5335136 5335132 5335137 +
ggtctggattgatttaggggag

SEQ ID NO: 102503 - DNA, 22 bp, Artificial Sequence
  Synthetic oligonucleotide; CTG chr11 5335121 5335142 5335138 5335143 +
gattgatttaggggagccatgc

SEQ ID NO: 102504 - DNA, 22 bp, Artificial Sequence
  Synthetic oligonucleotide; TTG chr11 5335126 5335147 5335143 5335148 +
atttaggggagccatgctttga

SEQ ID NO: 102505 - DNA, 22 bp, Artificial Sequence
  Synthetic oligonucleotide; TTT chr11 5335130 5335151 5335147 5335152 +
aggggagccatgctttgaactt

SEQ ID NO: 102506 - DNA, 22 bp, Artificial Sequence
  Synthetic oligonucleotide; TTA chr11 5335131 5335152 5335148 5335153 +
ggggagccatgctttgaactta

SEQ ID NO: 102507 - DNA, 22 bp, Artificial Sequence
  Synthetic oligonucleotide; CTT chr11 5335145 5335166 5335162 5335167 +
tgaacttaaaatgaggtgaggt

SEQ ID NO: 102508 - DNA, 22 bp, Artificial Sequence
  Synthetic oligonucleotide; TTT chr11 5335146 5335167 5335163 5335168 +
gaacttaaaatgaggtgaggta

SEQ ID NO: 102509 - DNA, 22 bp, Artificial Sequence
  Synthetic oligonucleotide; TTG chr11 5335147 5335168 5335164 5335169 +
aacttaaaatgaggtgaggtag

SEQ ID NO: 102510 - DNA, 22 bp, Artificial Sequence
  Synthetic oligonucleotide; CTT chr11 5335152 5335173 5335169 5335174 +
aaaatgaggtgaggtagtaaga

SEQ ID NO: 102511 - DNA, 22 bp, Artificial Sequence
  Synthetic oligonucleotide; TTA chr11 5335153 5335174 5335170 5335175 +
aaatgaggtgaggtagtaagac

SEQ ID NO: 102512 - DNA, 22 bp, Artificial Sequence
  Synthetic oligonucleotide; CTG chr11 5335179 5335200 5335196 5335201 +
agataactgatttaatttcagg

SEQ ID NO: 102513 - DNA, 22 bp, Artificial Sequence
  Synthetic oligonucleotide; CTG chr11 5335188 5335209 5335205 5335210 +
atttaatttcaggctgccctcc

SEQ ID NO: 102514 - DNA, 22 bp, Artificial Sequence
  Synthetic oligonucleotide; TTT chr11 5335192 5335213 5335209 5335214 +
aatttcaggctgccctcccatt

SEQ ID NO: 102515 - DNA, 22 bp, Artificial Sequence
  Synthetic oligonucleotide; TTA chr11 5335193 5335214 5335210 5335215 +
atttcaggctgccctcccattt

SEQ ID NO: 102516 - DNA, 22 bp, Artificial Sequence
  Synthetic oligonucleotide; TTT chr11 5335197 5335218 5335214 5335219 +
caggctgccctcccatttcatt

SEQ ID NO: 102517 - DNA, 22 bp, Artificial Sequence
  Synthetic oligonucleotide; TTC chr11 5335198 5335219 5335215 5335220 +
aggctgccctcccatttcatta

SEQ ID NO: 102518 - DNA, 22 bp, Artificial Sequence
  Synthetic oligonucleotide; CTG chr11 5335204 5335225 5335221 5335226 +
ccctcccatttcattagtaggt

SEQ ID NO: 102519 - DNA, 22 bp, Artificial Sequence
  Synthetic oligonucleotide; CTC chr11 5335209 5335230 5335226 5335231 +
ccatttcattagtaggtatatt

SEQ ID NO: 102520 - DNA, 22 bp, Artificial Sequence
  Synthetic oligonucleotide; TTT chr11 5335215 5335236 5335232 5335237 +
cattagtaggtatattgaccct

SEQ ID NO: 102521 - DNA, 22 bp, Artificial Sequence
  Synthetic oligonucleotide; TTC chr11 5335216 5335237 5335233 5335238 +
attagtaggtatattgaccctc

SEQ ID NO: 102522 - DNA, 22 bp, Artificial Sequence
  Synthetic oligonucleotide; TTA chr11 5335220 5335241 5335237 5335242 +
gtaggtatattgaccctctcac

SEQ ID NO: 102523 - DNA, 22 bp, Artificial Sequence
  Synthetic oligonucleotide; TTG chr11 5335232 5335253 5335249 5335254 +
accctctcactggcagtacacg

SEQ ID NO: 102524 - DNA, 22 bp, Artificial Sequence
  Synthetic oligonucleotide; CTC chr11 5335238 5335259 5335255 5335260 +
tcactggcagtacacgaatctt

SEQ ID NO: 102525 - DNA, 22 bp, Artificial Sequence
  Synthetic oligonucleotide; CTC chr11 5335240 5335261 5335257 5335262 +
actggcagtacacgaatcttct

SEQ ID NO: 102526 - DNA, 22 bp, Artificial Sequence
  Synthetic oligonucleotide; CTG chr11 5335244 5335265 5335261 5335266 +
gcagtacacgaatcttctgccc

SEQ ID NO: 102527 - DNA, 22 bp, Artificial Sequence
  Synthetic oligonucleotide; CTT chr11 5335260 5335281 5335277 5335282 +
ctgccccataaatatgactcta

SEQ ID NO: 102528 - DNA, 22 bp, Artificial Sequence
  Synthetic oligonucleotide; TTC chr11 5335261 5335282 5335278 5335283 +
tgccccataaatatgactctat

SEQ ID NO: 102529 - DNA, 22 bp, Artificial Sequence
  Synthetic oligonucleotide; CTG chr11 5335263 5335284 5335280 5335285 +
ccccataaatatgactctattc

SEQ ID NO: 102530 - DNA, 22 bp, Artificial Sequence
  Synthetic oligonucleotide; CTC chr11 5335280 5335301 5335297 5335302 +
tattcctggaaacatcacttat

SEQ ID NO: 102531 - DNA, 22 bp, Artificial Sequence
  Synthetic oligonucleotide; CTA chr11 5335282 5335303 5335299 5335304 +
ttcctggaaacatcacttatct

SEQ ID NO: 102532 - DNA, 22 bp, Artificial Sequence
  Synthetic oligonucleotide; TTC chr11 5335285 5335306 5335302 5335307 +
ctggaaacatcacttatcttag

SEQ ID NO: 102533 - DNA, 22 bp, Artificial Sequence
  Synthetic oligonucleotide; CTG chr11 5335288 5335309 5335305 5335310 +
gaaacatcacttatcttagaac

SEQ ID NO: 102534 - DNA, 22 bp, Artificial Sequence
  Synthetic oligonucleotide; CTT chr11 5335300 5335321 5335317 5335322 +
atcttagaacagatataaagta

SEQ ID NO: 102535 - DNA, 22 bp, Artificial Sequence
  Synthetic oligonucleotide; TTA chr11 5335301 5335322 5335318 5335323 +
tcttagaacagatataaagtaa

SEQ ID NO: 102536 - DNA, 22 bp, Artificial Sequence
  Synthetic oligonucleotide; CTT chr11 5335305 5335326 5335322 5335327 +
agaacagatataaagtaatttc

SEQ ID NO: 102537 - DNA, 22 bp, Artificial Sequence
  Synthetic oligonucleotide; TTA chr11 5335306 5335327 5335323 5335328 +
gaacagatataaagtaatttcc

SEQ ID NO: 102538 - DNA, 22 bp, Artificial Sequence
  Synthetic oligonucleotide; TTT chr11 5335326 5335347 5335343 5335348 +
cctgcagactgccccagagttg

SEQ ID NO: 102539 - DNA, 22 bp, Artificial Sequence
  Synthetic oligonucleotide; TTC chr11 5335327 5335348 5335344 5335349 +
ctgcagactgccccagagttgg

SEQ ID NO: 102540 - DNA, 22 bp, Artificial Sequence
  Synthetic oligonucleotide; CTG chr11 5335330 5335351 5335347 5335352 +
cagactgccccagagttgggat

SEQ ID NO: 102541 - DNA, 22 bp, Artificial Sequence
  Synthetic oligonucleotide; CTG chr11 5335337 5335358 5335354 5335359 +
ccccagagttgggataaaatct

SEQ ID NO: 102542 - DNA, 22 bp, Artificial Sequence
  Synthetic oligonucleotide; TTG chr11 5335348 5335369 5335365 5335370 +
ggataaaatctcatgtgaagtg

SEQ ID NO: 102543 - DNA, 22 bp, Artificial Sequence
  Synthetic oligonucleotide; CTC chr11 5335360 5335381 5335377 5335382 +
atgtgaagtgacactgttggtg

SEQ ID NO: 102544 - DNA, 22 bp, Artificial Sequence
  Synthetic oligonucleotide; CTG chr11 5335376 5335397 5335393 5335398 +
ttggtggaggataagcctccag

SEQ ID NO: 102545 - DNA, 22 bp, Artificial Sequence
  Synthetic oligonucleotide; TTG chr11 5335379 5335400 5335396 5335401 +
gtggaggataagcctccagaga

SEQ ID NO: 102546 - DNA, 22 bp, Artificial Sequence
  Synthetic oligonucleotide; CTC chr11 5335395 5335416 5335412 5335417 +
cagagaatgggaacaactatta

SEQ ID NO: 102547 - DNA, 22 bp, Artificial Sequence
  Synthetic oligonucleotide; CTA chr11 5335414 5335435 5335431 5335436 +
ttatcagccaacactcaaagtc

SEQ ID NO: 102548 - DNA, 22 bp, Artificial Sequence
  Synthetic oligonucleotide; TTA chr11 5335417 5335438 5335434 5335439 +
tcagccaacactcaaagtcacc

SEQ ID NO: 102549 - DNA, 22 bp, Artificial Sequence
  Synthetic oligonucleotide; CTC chr11 5335430 5335451 5335447 5335452 +
aaagtcaccaagcttaggggca

SEQ ID NO: 102550 - DNA, 22 bp, Artificial Sequence
  Synthetic oligonucleotide; CTT chr11 5335445 5335466 5335462 5335467 +
aggggcactgggaggaagtagg

SEQ ID NO: 102551 - DNA, 22 bp, Artificial Sequence
  Synthetic oligonucleotide; TTA chr11 5335446 5335467 5335463 5335468 +
ggggcactgggaggaagtaggc

SEQ ID NO: 102552 - DNA, 22 bp, Artificial Sequence
  Synthetic oligonucleotide; CTG chr11 5335455 5335476 5335472 5335477 +
ggaggaagtaggcagggcaccc

SEQ ID NO: 102553 - DNA, 22 bp, Artificial Sequence
  Synthetic oligonucleotide; CTT chr11 5335487 5335508 5335504 5335509 +
ctatttccttaaatagccattg

SEQ ID NO: 102554 - DNA, 22 bp, Artificial Sequence
  Synthetic oligonucleotide; TTC chr11 5335488 5335509 5335505 5335510 +
tatttccttaaatagccattga

SEQ ID NO: 102555 - DNA, 22 bp, Artificial Sequence
  Synthetic oligonucleotide; CTA chr11 5335490 5335511 5335507 5335512 +
tttccttaaatagccattgatg

SEQ ID NO: 102556 - DNA, 22 bp, Artificial Sequence
  Synthetic oligonucleotide; TTT chr11 5335493 5335514 5335510 5335515 +
ccttaaatagccattgatgtgt

SEQ ID NO: 102557 - DNA, 22 bp, Artificial Sequence
  Synthetic oligonucleotide; TTC chr11 5335494 5335515 5335511 5335516 +
cttaaatagccattgatgtgtc

SEQ ID NO: 102558 - DNA, 22 bp, Artificial Sequence
  Synthetic oligonucleotide; CTT chr11 5335497 5335518 5335514 5335519 +
aaatagccattgatgtgtctct

SEQ ID NO: 102559 - DNA, 22 bp, Artificial Sequence
  Synthetic oligonucleotide; TTA chr11 5335498 5335519 5335515 5335520 +
aatagccattgatgtgtctctc

SEQ ID NO: 102560 - DNA, 22 bp, Artificial Sequence
  Synthetic oligonucleotide; TTG chr11 5335509 5335530 5335526 5335531 +
atgtgtctctcattcatgtatt

SEQ ID NO: 102561 - DNA, 22 bp, Artificial Sequence
  Synthetic oligonucleotide; CTC chr11 5335518 5335539 5335535 5335540 +
tcattcatgtattttctaagac

SEQ ID NO: 102562 - DNA, 22 bp, Artificial Sequence
  Synthetic oligonucleotide; CTC chr11 5335520 5335541 5335537 5335542 +
attcatgtattttctaagacct

SEQ ID NO: 102563 - DNA, 22 bp, Artificial Sequence
  Synthetic oligonucleotide; TTC chr11 5335524 5335545 5335541 5335546 +
atgtattttctaagaccttgtt

SEQ ID NO: 102564 - DNA, 22 bp, Artificial Sequence
  Synthetic oligonucleotide; TTT chr11 5335532 5335553 5335549 5335554 +
tctaagaccttgttcattcttt

SEQ ID NO: 102565 - DNA, 22 bp, Artificial Sequence
  Synthetic oligonucleotide; TTT chr11 5335533 5335554 5335550 5335555 +
ctaagaccttgttcattctttt

SEQ ID NO: 102566 - DNA, 22 bp, Artificial Sequence
  Synthetic oligonucleotide; TTC chr11 5335534 5335555 5335551 5335556 +
taagaccttgttcattcttttc

SEQ ID NO: 102567 - DNA, 22 bp, Artificial Sequence
  Synthetic oligonucleotide; CTA chr11 5335536 5335557 5335553 5335558 +
agaccttgttcattcttttcat

SEQ ID NO: 102568 - DNA, 22 bp, Artificial Sequence
  Synthetic oligonucleotide; CTT chr11 5335543 5335564 5335560 5335565 +
gttcattcttttcatatttcct

SEQ ID NO: 102569 - DNA, 22 bp, Artificial Sequence
  Synthetic oligonucleotide; TTG chr11 5335544 5335565 5335561 5335566 +
ttcattcttttcatatttcctg

SEQ ID NO: 102570 - DNA, 22 bp, Artificial Sequence
  Synthetic oligonucleotide; TTC chr11 5335547 5335568 5335564 5335569 +
attcttttcatatttcctgctg

SEQ ID NO: 102571 - DNA, 22 bp, Artificial Sequence
  Synthetic oligonucleotide; TTC chr11 5335551 5335572 5335568 5335573 +
ttttcatatttcctgctgtatt

SEQ ID NO: 102572 - DNA, 22 bp, Artificial Sequence
  Synthetic oligonucleotide; CTT chr11 5335553 5335574 5335570 5335575 +
ttcatatttcctgctgtattgc

SEQ ID NO: 102573 - DNA, 22 bp, Artificial Sequence
  Synthetic oligonucleotide; TTT chr11 5335554 5335575 5335571 5335576 +
tcatatttcctgctgtattgcc

SEQ ID NO: 102574 - DNA, 22 bp, Artificial Sequence
  Synthetic oligonucleotide; TTT chr11 5335555 5335576 5335572 5335577 +
catatttcctgctgtattgcct

SEQ ID NO: 102575 - DNA, 22 bp, Artificial Sequence
  Synthetic oligonucleotide; TTC chr11 5335556 5335577 5335573 5335578 +
atatttcctgctgtattgcctg

SEQ ID NO: 102576 - DNA, 22 bp, Artificial Sequence
  Synthetic oligonucleotide; TTT chr11 5335562 5335583 5335579 5335584 +
cctgctgtattgcctgtgaagt

SEQ ID NO: 102577 - DNA, 22 bp, Artificial Sequence
  Synthetic oligonucleotide; TTC chr11 5335563 5335584 5335580 5335585 +
ctgctgtattgcctgtgaagta

SEQ ID NO: 102578 - DNA, 22 bp, Artificial Sequence
  Synthetic oligonucleotide; CTG chr11 5335566 5335587 5335583 5335588 +
ctgtattgcctgtgaagtaaag

SEQ ID NO: 102579 - DNA, 22 bp, Artificial Sequence
  Synthetic oligonucleotide; CTG chr11 5335569 5335590 5335586 5335591 +
tattgcctgtgaagtaaagtat

SEQ ID NO: 102580 - DNA, 22 bp, Artificial Sequence
  Synthetic oligonucleotide; TTG chr11 5335574 5335595 5335591 5335596 +
cctgtgaagtaaagtatcatgt

SEQ ID NO: 102581 - DNA, 22 bp, Artificial Sequence
  Synthetic oligonucleotide; CTG chr11 5335578 5335599 5335595 5335600 +
tgaagtaaagtatcatgtcaca

SEQ ID NO: 102582 - DNA, 22 bp, Artificial Sequence
  Synthetic oligonucleotide; CTC chr11 5335613 5335634 5335630 5335635 +
agattgggaaggacctccatct

SEQ ID NO: 102583 - DNA, 22 bp, Artificial Sequence
  Synthetic oligonucleotide; TTG chr11 5335619 5335640 5335636 5335641 +
ggaaggacctccatctcctgta

SEQ ID NO: 102584 - DNA, 22 bp, Artificial Sequence
  Synthetic oligonucleotide; CTC chr11 5335630 5335651 5335647 5335652 +
catctcctgtaataaaagcctt

SEQ ID NO: 102585 - DNA, 22 bp, Artificial Sequence
  Synthetic oligonucleotide; CTC chr11 5335636 5335657 5335653 5335658 +
ctgtaataaaagccttctttga

SEQ ID NO: 102586 - DNA, 22 bp, Artificial Sequence
  Synthetic oligonucleotide; CTG chr11 5335639 5335660 5335656 5335661 +
taataaaagccttctttgatgc

SEQ ID NO: 102587 - DNA, 22 bp, Artificial Sequence
  Synthetic oligonucleotide; CTT chr11 5335652 5335673 5335669 5335674 +
ctttgatgcagtgtttcctgac

SEQ ID NO: 102588 - DNA, 22 bp, Artificial Sequence
  Synthetic oligonucleotide; TTC chr11 5335653 5335674 5335670 5335675 +
tttgatgcagtgtttcctgaca

SEQ ID NO: 102589 - DNA, 22 bp, Artificial Sequence
  Synthetic oligonucleotide; CTT chr11 5335655 5335676 5335672 5335677 +
tgatgcagtgtttcctgacaag

SEQ ID NO: 102590 - DNA, 22 bp, Artificial Sequence
  Synthetic oligonucleotide; TTT chr11 5335656 5335677 5335673 5335678 +
gatgcagtgtttcctgacaagg

SEQ ID NO: 102591 - DNA, 22 bp, Artificial Sequence
  Synthetic oligonucleotide; TTG chr11 5335657 5335678 5335674 5335679 +
atgcagtgtttcctgacaaggg

SEQ ID NO: 102592 - DNA, 22 bp, Artificial Sequence
  Synthetic oligonucleotide; TTT chr11 5335668 5335689 5335685 5335690 +
cctgacaagggtcatccgctga

SEQ ID NO: 102593 - DNA, 22 bp, Artificial Sequence
  Synthetic oligonucleotide; TTC chr11 5335669 5335690 5335686 5335691 +
ctgacaagggtcatccgctgag

SEQ ID NO: 102594 - DNA, 22 bp, Artificial Sequence
  Synthetic oligonucleotide; CTG chr11 5335672 5335693 5335689 5335694 +
acaagggtcatccgctgagtgc

SEQ ID NO: 102595 - DNA, 22 bp, Artificial Sequence
  Synthetic oligonucleotide; CTG chr11 5335689 5335710 5335706 5335711 +
agtgcctgtctctttctaaatc

SEQ ID NO: 102596 - DNA, 22 bp, Artificial Sequence
  Synthetic oligonucleotide; CTG chr11 5335697 5335718 5335714 5335719 +
tctctttctaaatcacataaca

SEQ ID NO: 102597 - DNA, 22 bp, Artificial Sequence
  Synthetic oligonucleotide; CTC chr11 5335701 5335722 5335718 5335723 +
tttctaaatcacataacacaat

SEQ ID NO: 102598 - DNA, 22 bp, Artificial Sequence
  Synthetic oligonucleotide; CTT chr11 5335703 5335724 5335720 5335725 +
tctaaatcacataacacaatat

SEQ ID NO: 102599 - DNA, 22 bp, Artificial Sequence
  Synthetic oligonucleotide; TTT chr11 5335704 5335725 5335721 5335726 +
ctaaatcacataacacaatatt

SEQ ID NO: 102600 - DNA, 22 bp, Artificial Sequence
  Synthetic oligonucleotide; TTC chr11 5335705 5335726 5335722 5335727 +
taaatcacataacacaatattt

SEQ ID NO: 102601 - DNA, 22 bp, Artificial Sequence
  Synthetic oligonucleotide; CTA chr11 5335707 5335728 5335724 5335729 +
aatcacataacacaatatttat

SEQ ID NO: 102602 - DNA, 22 bp, Artificial Sequence
  Synthetic oligonucleotide; TTT chr11 5335727 5335748 5335744 5335749 +
attagaatatctgtgctgaaaa

SEQ ID NO: 102603 - DNA, 22 bp, Artificial Sequence
  Synthetic oligonucleotide; TTA chr11 5335728 5335749 5335745 5335750 +
ttagaatatctgtgctgaaaat

SEQ ID NO: 102604 - DNA, 22 bp, Artificial Sequence
  Synthetic oligonucleotide; TTA chr11 5335731 5335752 5335748 5335753 +
gaatatctgtgctgaaaatact

SEQ ID NO: 102605 - DNA, 22 bp, Artificial Sequence
  Synthetic oligonucleotide; CTG chr11 5335740 5335761 5335757 5335762 +
tgctgaaaatactcaggcagcc

SEQ ID NO: 102606 - DNA, 22 bp, Artificial Sequence
  Synthetic oligonucleotide; CTG chr11 5335745 5335766 5335762 5335767 +
aaaatactcaggcagccacatt

SEQ ID NO: 102607 - DNA, 22 bp, Artificial Sequence
  Synthetic oligonucleotide; CTC chr11 5335754 5335775 5335771 5335776 +
aggcagccacattattagaaat

SEQ ID NO: 102608 - DNA, 22 bp, Artificial Sequence
  Synthetic oligonucleotide; TTA chr11 5335768 5335789 5335785 5335790 +
ttagaaattacctaacttttta

SEQ ID NO: 102609 - DNA, 22 bp, Artificial Sequence
  Synthetic oligonucleotide; TTA chr11 5335771 5335792 5335788 5335793 +
gaaattacctaactttttaaaa

SEQ ID NO: 102610 - DNA, 22 bp, Artificial Sequence
  Synthetic oligonucleotide; TTA chr11 5335778 5335799 5335795 5335800 +
cctaactttttaaaatgaaaat

SEQ ID NO: 102611 - DNA, 22 bp, Artificial Sequence
  Synthetic oligonucleotide; CTA chr11 5335782 5335803 5335799 5335804 +
actttttaaaatgaaaatattt

SEQ ID NO: 102612 - DNA, 22 bp, Artificial Sequence
  Synthetic oligonucleotide; CTT chr11 5335786 5335807 5335803 5335808 +
tttaaaatgaaaatatttttct

SEQ ID NO: 102613 - DNA, 22 bp, Artificial Sequence
  Synthetic oligonucleotide; TTT chr11 5335787 5335808 5335804 5335809 +
ttaaaatgaaaatatttttctg

SEQ ID NO: 102614 - DNA, 22 bp, Artificial Sequence
  Synthetic oligonucleotide; TTT chr11 5335788 5335809 5335805 5335810 +
taaaatgaaaatatttttctgg

SEQ ID NO: 102615 - DNA, 22 bp, Artificial Sequence
  Synthetic oligonucleotide; TTT chr11 5335789 5335810 5335806 5335811 +
aaaatgaaaatatttttctggt

SEQ ID NO: 102616 - DNA, 22 bp, Artificial Sequence
  Synthetic oligonucleotide; TTA chr11 5335790 5335811 5335807 5335812 +
aaatgaaaatatttttctggtc

SEQ ID NO: 102617 - DNA, 22 bp, Artificial Sequence
  Synthetic oligonucleotide; TTT chr11 5335804 5335825 5335821 5335826 +
ttctggtcttcctattccttgg

SEQ ID NO: 102618 - DNA, 22 bp, Artificial Sequence
  Synthetic oligonucleotide; TTT chr11 5335805 5335826 5335822 5335827 +
tctggtcttcctattccttggc

SEQ ID NO: 102619 - DNA, 22 bp, Artificial Sequence
  Synthetic oligonucleotide; TTT chr11 5335806 5335827 5335823 5335828 +
ctggtcttcctattccttggct

SEQ ID NO: 102620 - DNA, 22 bp, Artificial Sequence
  Synthetic oligonucleotide; TTC chr11 5335807 5335828 5335824 5335829 +
tggtcttcctattccttggctc

SEQ ID NO: 102621 - DNA, 22 bp, Artificial Sequence
  Synthetic oligonucleotide; CTG chr11 5335809 5335830 5335826 5335831 +
gtcttcctattccttggctctt

SEQ ID NO: 102622 - DNA, 22 bp, Artificial Sequence
  Synthetic oligonucleotide; CTT chr11 5335814 5335835 5335831 5335836 +
cctattccttggctcttggtct

SEQ ID NO: 102623 - DNA, 22 bp, Artificial Sequence
  Synthetic oligonucleotide; TTC chr11 5335815 5335836 5335832 5335837 +
ctattccttggctcttggtctg

SEQ ID NO: 102624 - DNA, 22 bp, Artificial Sequence
  Synthetic oligonucleotide; CTA chr11 5335818 5335839 5335835 5335840 +
ttccttggctcttggtctgagc

SEQ ID NO: 102625 - DNA, 22 bp, Artificial Sequence
  Synthetic oligonucleotide; TTC chr11 5335821 5335842 5335838 5335843 +
cttggctcttggtctgagctct

SEQ ID NO: 102626 - DNA, 22 bp, Artificial Sequence
  Synthetic oligonucleotide; CTT chr11 5335824 5335845 5335841 5335846 +
ggctcttggtctgagctctggc

SEQ ID NO: 102627 - DNA, 22 bp, Artificial Sequence
  Synthetic oligonucleotide; TTG chr11 5335825 5335846 5335842 5335847 +
gctcttggtctgagctctggca

SEQ ID NO: 102628 - DNA, 22 bp, Artificial Sequence
  Synthetic oligonucleotide; CTC chr11 5335829 5335850 5335846 5335851 +
ttggtctgagctctggcatcac

SEQ ID NO: 102629 - DNA, 22 bp, Artificial Sequence
  Synthetic oligonucleotide; CTT chr11 5335831 5335852 5335848 5335853 +
ggtctgagctctggcatcacag

SEQ ID NO: 102630 - DNA, 22 bp, Artificial Sequence
  Synthetic oligonucleotide; TTG chr11 5335832 5335853 5335849 5335854 +
gtctgagctctggcatcacagt

SEQ ID NO: 102631 - DNA, 22 bp, Artificial Sequence
  Synthetic oligonucleotide; CTG chr11 5335837 5335858 5335854 5335859 +
agctctggcatcacagtctata

SEQ ID NO: 102632 - DNA, 22 bp, Artificial Sequence
  Synthetic oligonucleotide; CTC chr11 5335842 5335863 5335859 5335864 +
tggcatcacagtctatatctaa

SEQ ID NO: 102633 - DNA, 22 bp, Artificial Sequence
  Synthetic oligonucleotide; CTG chr11 5335844 5335865 5335861 5335866 +
gcatcacagtctatatctaact

SEQ ID NO: 102634 - DNA, 22 bp, Artificial Sequence
  Synthetic oligonucleotide; CTA chr11 5335857 5335878 5335874 5335879 +
tatctaactgctgccttatatt

SEQ ID NO: 102635 - DNA, 22 bp, Artificial Sequence
  Synthetic oligonucleotide; CTA chr11 5335863 5335884 5335880 5335885 +
actgctgccttatattacatat

SEQ ID NO: 102636 - DNA, 22 bp, Artificial Sequence
  Synthetic oligonucleotide; CTG chr11 5335867 5335888 5335884 5335889 +
ctgccttatattacatatggca

SEQ ID NO: 102637 - DNA, 22 bp, Artificial Sequence
  Synthetic oligonucleotide; CTG chr11 5335870 5335891 5335887 5335892 +
ccttatattacatatggcatat

SEQ ID NO: 102638 - DNA, 22 bp, Artificial Sequence
  Synthetic oligonucleotide; CTT chr11 5335874 5335895 5335891 5335896 +
atattacatatggcatatagga

SEQ ID NO: 102639 - DNA, 22 bp, Artificial Sequence
  Synthetic oligonucleotide; TTA chr11 5335875 5335896 5335892 5335897 +
tattacatatggcatataggaa

SEQ ID NO: 102640 - DNA, 22 bp, Artificial Sequence
  Synthetic oligonucleotide; TTA chr11 5335880 5335901 5335897 5335902 +
catatggcatataggaaggcaa

SEQ ID NO: 102641 - DNA, 22 bp, Artificial Sequence
  Synthetic oligonucleotide; TTC chr11 5335907 5335928 5335924 5335929 +
aagtataataagcttatatcgc

SEQ ID NO: 102642 - DNA, 22 bp, Artificial Sequence
  Synthetic oligonucleotide; CTT chr11 5335922 5335943 5335939 5335944 +
atatcgctaacgattcaggaag

SEQ ID NO: 102643 - DNA, 22 bp, Artificial Sequence
  Synthetic oligonucleotide; TTA chr11 5335923 5335944 5335940 5335945 +
tatcgctaacgattcaggaagg

SEQ ID NO: 102644 - DNA, 22 bp, Artificial Sequence
  Synthetic oligonucleotide; CTA chr11 5335931 5335952 5335948 5335953 +
acgattcaggaaggtctctatc

SEQ ID NO: 102645 - DNA, 22 bp, Artificial Sequence
  Synthetic oligonucleotide; TTC chr11 5335938 5335959 5335955 5335960 +
aggaaggtctctatcctaggat

SEQ ID NO: 102646 - DNA, 22 bp, Artificial Sequence
  Synthetic oligonucleotide; CTC chr11 5335949 5335970 5335966 5335971 +
tatcctaggatttttgctgttt

SEQ ID NO: 102647 - DNA, 22 bp, Artificial Sequence
  Synthetic oligonucleotide; CTA chr11 5335951 5335972 5335968 5335973 +
tcctaggatttttgctgtttgt

SEQ ID NO: 102648 - DNA, 22 bp, Artificial Sequence
  Synthetic oligonucleotide; CTA chr11 5335956 5335977 5335973 5335978 +
ggatttttgctgtttgttgagt

SEQ ID NO: 102649 - DNA, 22 bp, Artificial Sequence
  Synthetic oligonucleotide; TTT chr11 5335962 5335983 5335979 5335984 +
ttgctgtttgttgagtaagtct

SEQ ID NO: 102650 - DNA, 22 bp, Artificial Sequence
  Synthetic oligonucleotide; TTT chr11 5335963 5335984 5335980 5335985 +
tgctgtttgttgagtaagtctg

SEQ ID NO: 102651 - DNA, 22 bp, Artificial Sequence
  Synthetic oligonucleotide; TTT chr11 5335964 5335985 5335981 5335986 +
gctgtttgttgagtaagtctgt

SEQ ID NO: 102652 - DNA, 22 bp, Artificial Sequence
  Synthetic oligonucleotide; TTG chr11 5335965 5335986 5335982 5335987 +
ctgtttgttgagtaagtctgtg

SEQ ID NO: 102653 - DNA, 22 bp, Artificial Sequence
  Synthetic oligonucleotide; CTG chr11 5335968 5335989 5335985 5335990 +
tttgttgagtaagtctgtgctg

SEQ ID NO: 102654 - DNA, 22 bp, Artificial Sequence
  Synthetic oligonucleotide; TTT chr11 5335971 5335992 5335988 5335993 +
gttgagtaagtctgtgctgaca

SEQ ID NO: 102655 - DNA, 22 bp, Artificial Sequence
  Synthetic oligonucleotide; TTG chr11 5335972 5335993 5335989 5335994 +
ttgagtaagtctgtgctgacaa

SEQ ID NO: 102656 - DNA, 22 bp, Artificial Sequence
  Synthetic oligonucleotide; TTG chr11 5335975 5335996 5335992 5335997 +
agtaagtctgtgctgacaatac

SEQ ID NO: 102657 - DNA, 22 bp, Artificial Sequence
  Synthetic oligonucleotide; CTG chr11 5335985 5336006 5336002 5336007 +
tgctgacaataccagcttcttt

SEQ ID NO: 102658 - DNA, 22 bp, Artificial Sequence
  Synthetic oligonucleotide; CTG chr11 5335990 5336011 5336007 5336012 +
acaataccagcttctttttttt

SEQ ID NO: 102659 - DNA, 22 bp, Artificial Sequence
  Synthetic oligonucleotide; CTT chr11 5336003 5336024 5336020 5336025 +
cttttttttttttttctgtgta

SEQ ID NO: 102660 - DNA, 22 bp, Artificial Sequence
  Synthetic oligonucleotide; TTC chr11 5336004 5336025 5336021 5336026 +
ttttttttttttttctgtgtag

SEQ ID NO: 102661 - DNA, 22 bp, Artificial Sequence
  Synthetic oligonucleotide; CTT chr11 5336006 5336027 5336023 5336028 +
ttttttttttttctgtgtagtt

SEQ ID NO: 102662 - DNA, 22 bp, Artificial Sequence
  Synthetic oligonucleotide; TTT chr11 5336007 5336028 5336024 5336029 +
tttttttttttctgtgtagttt

SEQ ID NO: 102663 - DNA, 22 bp, Artificial Sequence
  Synthetic oligonucleotide; TTT chr11 5336008 5336029 5336025 5336030 +
ttttttttttctgtgtagtttg

SEQ ID NO: 102664 - DNA, 22 bp, Artificial Sequence
  Synthetic oligonucleotide; TTT chr11 5336009 5336030 5336026 5336031 +
tttttttttctgtgtagtttga

SEQ ID NO: 102665 - DNA, 22 bp, Artificial Sequence
  Synthetic oligonucleotide; TTT chr11 5336010 5336031 5336027 5336032 +
ttttttttctgtgtagtttgat

SEQ ID NO: 102666 - DNA, 22 bp, Artificial Sequence
  Synthetic oligonucleotide; TTT chr11 5336011 5336032 5336028 5336033 +
tttttttctgtgtagtttgatt

SEQ ID NO: 102667 - DNA, 22 bp, Artificial Sequence
  Synthetic oligonucleotide; TTT chr11 5336012 5336033 5336029 5336034 +
ttttttctgtgtagtttgattc

SEQ ID NO: 102668 - DNA, 22 bp, Artificial Sequence
  Synthetic oligonucleotide; TTT chr11 5336013 5336034 5336030 5336035 +
tttttctgtgtagtttgattct

SEQ ID NO: 102669 - DNA, 22 bp, Artificial Sequence
  Synthetic oligonucleotide; TTT chr11 5336014 5336035 5336031 5336036 +
ttttctgtgtagtttgattcta

SEQ ID NO: 102670 - DNA, 22 bp, Artificial Sequence
  Synthetic oligonucleotide; TTT chr11 5336015 5336036 5336032 5336037 +
tttctgtgtagtttgattctat

SEQ ID NO: 102671 - DNA, 22 bp, Artificial Sequence
  Synthetic oligonucleotide; TTT chr11 5336016 5336037 5336033 5336038 +
ttctgtgtagtttgattctatt

SEQ ID NO: 102672 - DNA, 22 bp, Artificial Sequence
  Synthetic oligonucleotide; TTT chr11 5336017 5336038 5336034 5336039 +
tctgtgtagtttgattctatta

SEQ ID NO: 102673 - DNA, 22 bp, Artificial Sequence
  Synthetic oligonucleotide; TTT chr11 5336018 5336039 5336035 5336040 +
ctgtgtagtttgattctattat

SEQ ID NO: 102674 - DNA, 22 bp, Artificial Sequence
  Synthetic oligonucleotide; TTC chr11 5336019 5336040 5336036 5336041 +
tgtgtagtttgattctattatc

SEQ ID NO: 102675 - DNA, 22 bp, Artificial Sequence
  Synthetic oligonucleotide; CTG chr11 5336021 5336042 5336038 5336043 +
tgtagtttgattctattatctg

SEQ ID NO: 102676 - DNA, 22 bp, Artificial Sequence
  Synthetic oligonucleotide; TTT chr11 5336029 5336050 5336046 5336051 +
gattctattatctgtcagcctt

SEQ ID NO: 102677 - DNA, 22 bp, Artificial Sequence
  Synthetic oligonucleotide; TTG chr11 5336030 5336051 5336047 5336052 +
attctattatctgtcagccttc

SEQ ID NO: 102678 - DNA, 22 bp, Artificial Sequence
  Synthetic oligonucleotide; TTC chr11 5336034 5336055 5336051 5336056 +
tattatctgtcagccttctgga

SEQ ID NO: 102679 - DNA, 22 bp, Artificial Sequence
  Synthetic oligonucleotide; CTA chr11 5336036 5336057 5336053 5336058 +
ttatctgtcagccttctggatt

SEQ ID NO: 102680 - DNA, 22 bp, Artificial Sequence
  Synthetic oligonucleotide; TTA chr11 5336039 5336060 5336056 5336061 +
tctgtcagccttctggattcca

SEQ ID NO: 102681 - DNA, 22 bp, Artificial Sequence
  Synthetic oligonucleotide; CTG chr11 5336043 5336064 5336060 5336065 +
tcagccttctggattccacaat

SEQ ID NO: 102682 - DNA, 22 bp, Artificial Sequence
  Synthetic oligonucleotide; CTT chr11 5336051 5336072 5336068 5336073 +
ctggattccacaattatctccg

SEQ ID NO: 102683 - DNA, 22 bp, Artificial Sequence
  Synthetic oligonucleotide; TTC chr11 5336052 5336073 5336069 5336074 +
tggattccacaattatctccga

SEQ ID NO: 102684 - DNA, 22 bp, Artificial Sequence
  Synthetic oligonucleotide; CTG chr11 5336054 5336075 5336071 5336076 +
gattccacaattatctccgaag

SEQ ID NO: 102685 - DNA, 22 bp, Artificial Sequence
  Synthetic oligonucleotide; TTC chr11 5336059 5336080 5336076 5336081 +
cacaattatctccgaagattcc

SEQ ID NO: 102686 - DNA, 22 bp, Artificial Sequence
  Synthetic oligonucleotide; TTA chr11 5336067 5336088 5336084 5336089 +
tctccgaagattccatccttta

SEQ ID NO: 102687 - DNA, 22 bp, Artificial Sequence
  Synthetic oligonucleotide; CTC chr11 5336071 5336092 5336088 5336093 +
cgaagattccatcctttaactc

SEQ ID NO: 102688 - DNA, 22 bp, Artificial Sequence
  Synthetic oligonucleotide; TTC chr11 5336080 5336101 5336097 5336102 +
catcctttaactcatcctctac

SEQ ID NO: 102689 - DNA, 22 bp, Artificial Sequence
  Synthetic oligonucleotide; CTT chr11 5336087 5336108 5336104 5336109 +
taactcatcctctacaggctct

SEQ ID NO: 102690 - DNA, 22 bp, Artificial Sequence
  Synthetic oligonucleotide; TTT chr11 5336088 5336109 5336105 5336110 +
aactcatcctctacaggctctg

SEQ ID NO: 102691 - DNA, 22 bp, Artificial Sequence
  Synthetic oligonucleotide; TTA chr11 5336089 5336110 5336106 5336111 +
actcatcctctacaggctctga

SEQ ID NO: 102692 - DNA, 22 bp, Artificial Sequence
  Synthetic oligonucleotide; CTC chr11 5336093 5336114 5336110 5336115 +
atcctctacaggctctgatggt

SEQ ID NO: 102693 - DNA, 22 bp, Artificial Sequence
  Synthetic oligonucleotide; CTC chr11 5336099 5336120 5336116 5336121 +
tacaggctctgatggttaattt

SEQ ID NO: 102694 - DNA, 22 bp, Artificial Sequence
  Synthetic oligonucleotide; CTA chr11 5336101 5336122 5336118 5336123 +
caggctctgatggttaatttta

SEQ ID NO: 102695 - DNA, 22 bp, Artificial Sequence
  Synthetic oligonucleotide; CTC chr11 5336108 5336129 5336125 5336130 +
tgatggttaattttatatgcca

SEQ ID NO: 102696 - DNA, 22 bp, Artificial Sequence
  Synthetic oligonucleotide; CTG chr11 5336110 5336131 5336127 5336132 +
atggttaattttatatgccaat

SEQ ID NO: 102697 - DNA, 22 bp, Artificial Sequence
  Synthetic oligonucleotide; TTA chr11 5336117 5336138 5336134 5336139 +
attttatatgccaatttgactg

SEQ ID NO: 102698 - DNA, 22 bp, Artificial Sequence
  Synthetic oligonucleotide; TTT chr11 5336121 5336142 5336138 5336143 +
tatatgccaatttgactgggcc

SEQ ID NO: 102699 - DNA, 22 bp, Artificial Sequence
  Synthetic oligonucleotide; TTT chr11 5336122 5336143 5336139 5336144 +
atatgccaatttgactgggcca

SEQ ID NO: 102700 - DNA, 22 bp, Artificial Sequence
  Synthetic oligonucleotide; TTA chr11 5336123 5336144 5336140 5336145 +
tatgccaatttgactgggccat

SEQ ID NO: 102701 - DNA, 22 bp, Artificial Sequence
  Synthetic oligonucleotide; TTT chr11 5336134 5336155 5336151 5336156 +
gactgggccatggggtgcccaa

SEQ ID NO: 102702 - DNA, 22 bp, Artificial Sequence
  Synthetic oligonucleotide; TTG chr11 5336135 5336156 5336152 5336157 +
actgggccatggggtgcccaaa

SEQ ID NO: 102703 - DNA, 22 bp, Artificial Sequence
  Synthetic oligonucleotide; CTG chr11 5336139 5336160 5336156 5336161 +
ggccatggggtgcccaaatatt

SEQ ID NO: 102704 - DNA, 22 bp, Artificial Sequence
  Synthetic oligonucleotide; TTT chr11 5336162 5336183 5336179 5336184 +
gtcaaacattattctagatgtt

SEQ ID NO: 102705 - DNA, 22 bp, Artificial Sequence
  Synthetic oligonucleotide; TTG chr11 5336163 5336184 5336180 5336185 +
tcaaacattattctagatgttt

SEQ ID NO: 102706 - DNA, 22 bp, Artificial Sequence
  Synthetic oligonucleotide; TTA chr11 5336173 5336194 5336190 5336195 +
ttctagatgtttttgtgagggt

SEQ ID NO: 102707 - DNA, 22 bp, Artificial Sequence
  Synthetic oligonucleotide; TTC chr11 5336176 5336197 5336193 5336198 +
tagatgtttttgtgagggtgtt

SEQ ID NO: 102708 - DNA, 22 bp, Artificial Sequence
  Synthetic oligonucleotide; CTA chr11 5336178 5336199 5336195 5336200 +
gatgtttttgtgagggtgtttt

SEQ ID NO: 102709 - DNA, 22 bp, Artificial Sequence
  Synthetic oligonucleotide; TTT chr11 5336185 5336206 5336202 5336207 +
ttgtgagggtgtttttaggcaa

SEQ ID NO: 102710 - DNA, 22 bp, Artificial Sequence
  Synthetic oligonucleotide; TTT chr11 5336186 5336207 5336203 5336208 +
tgtgagggtgtttttaggcaag

SEQ ID NO: 102711 - DNA, 22 bp, Artificial Sequence
  Synthetic oligonucleotide; TTT chr11 5336187 5336208 5336204 5336209 +
gtgagggtgtttttaggcaaga

SEQ ID NO: 102712 - DNA, 22 bp, Artificial Sequence
  Synthetic oligonucleotide; TTG chr11 5336188 5336209 5336205 5336210 +
tgagggtgtttttaggcaagat

SEQ ID NO: 102713 - DNA, 22 bp, Artificial Sequence
  Synthetic oligonucleotide; TTT chr11 5336199 5336220 5336216 5336221 +
ttaggcaagattaacatttaaa

SEQ ID NO: 102714 - DNA, 22 bp, Artificial Sequence
  Synthetic oligonucleotide; TTT chr11 5336200 5336221 5336217 5336222 +
taggcaagattaacatttaaat

SEQ ID NO: 102715 - DNA, 22 bp, Artificial Sequence
  Synthetic oligonucleotide; TTT chr11 5336201 5336222 5336218 5336223 +
aggcaagattaacatttaaatc

SEQ ID NO: 102716 - DNA, 22 bp, Artificial Sequence
  Synthetic oligonucleotide; TTA chr11 5336202 5336223 5336219 5336224 +
ggcaagattaacatttaaatcg

SEQ ID NO: 102717 - DNA, 22 bp, Artificial Sequence
  Synthetic oligonucleotide; TTA chr11 5336212 5336233 5336229 5336234 +
acatttaaatcggtagaccaag

SEQ ID NO: 102718 - DNA, 22 bp, Artificial Sequence
  Synthetic oligonucleotide; TTT chr11 5336218 5336239 5336235 5336240 +
aaatcggtagaccaagtagagc

SEQ ID NO: 102719 - DNA, 22 bp, Artificial Sequence
  Synthetic oligonucleotide; TTA chr11 5336219 5336240 5336236 5336241 +
aatcggtagaccaagtagagca

SEQ ID NO: 102720 - DNA, 22 bp, Artificial Sequence
  Synthetic oligonucleotide; CTT chr11 5336251 5336272 5336268 5336273 +
cctattgcaggcggcttcctcc

SEQ ID NO: 102721 - DNA, 22 bp, Artificial Sequence
  Synthetic oligonucleotide; TTC chr11 5336252 5336273 5336269 5336274 +
ctattgcaggcggcttcctcca

SEQ ID NO: 102722 - DNA, 22 bp, Artificial Sequence
  Synthetic oligonucleotide; CTA chr11 5336255 5336276 5336272 5336277 +
ttgcaggcggcttcctccaatc

SEQ ID NO: 102723 - DNA, 22 bp, Artificial Sequence
  Synthetic oligonucleotide; TTG chr11 5336258 5336279 5336275 5336280 +
caggcggcttcctccaatcagt

SEQ ID NO: 102724 - DNA, 22 bp, Artificial Sequence
  Synthetic oligonucleotide; CTT chr11 5336268 5336289 5336285 5336290 +
cctccaatcagttgaaaacctg

SEQ ID NO: 102725 - DNA, 22 bp, Artificial Sequence
  Synthetic oligonucleotide; TTC chr11 5336269 5336290 5336286 5336291 +
ctccaatcagttgaaaacctga

SEQ ID NO: 102726 - DNA, 22 bp, Artificial Sequence
  Synthetic oligonucleotide; CTC chr11 5336272 5336293 5336289 5336294 +
caatcagttgaaaacctgaata

SEQ ID NO: 102727 - DNA, 22 bp, Artificial Sequence
  Synthetic oligonucleotide; TTG chr11 5336282 5336303 5336299 5336304 +
aaaacctgaatagaacaaaaag

SEQ ID NO: 102728 - DNA, 22 bp, Artificial Sequence
  Synthetic oligonucleotide; CTG chr11 5336290 5336311 5336307 5336312 +
aatagaacaaaaagtctgaccc

SEQ ID NO: 102729 - DNA, 22 bp, Artificial Sequence
  Synthetic oligonucleotide; CTG chr11 5336308 5336329 5336325 5336330 +
acccttccccaaatcagagaga

SEQ ID NO: 102730 - DNA, 22 bp, Artificial Sequence
  Synthetic oligonucleotide; CTT chr11 5336314 5336335 5336331 5336336 +
ccccaaatcagagagaattatt

SEQ ID NO: 102731 - DNA, 22 bp, Artificial Sequence
  Synthetic oligonucleotide; TTC chr11 5336315 5336336 5336332 5336337 +
cccaaatcagagagaattattc

SEQ ID NO: 102732 - DNA, 22 bp, Artificial Sequence
  Synthetic oligonucleotide; TTA chr11 5336334 5336355 5336351 5336356 +
ttccttattgatggccttcaaa

SEQ ID NO: 102733 - DNA, 22 bp, Artificial Sequence
  Synthetic oligonucleotide; TTC chr11 5336337 5336358 5336354 5336359 +
cttattgatggccttcaaactg

SEQ ID NO: 102734 - DNA, 22 bp, Artificial Sequence
  Synthetic oligonucleotide; CTT chr11 5336340 5336361 5336357 5336362 +
attgatggccttcaaactggaa

SEQ ID NO: 102735 - DNA, 22 bp, Artificial Sequence
  Synthetic oligonucleotide; TTA chr11 5336341 5336362 5336358 5336363 +
ttgatggccttcaaactggaat

SEQ ID NO: 102736 - DNA, 22 bp, Artificial Sequence
  Synthetic oligonucleotide; TTG chr11 5336344 5336365 5336361 5336366 +
atggccttcaaactggaatcta

SEQ ID NO: 102737 - DNA, 22 bp, Artificial Sequence
  Synthetic oligonucleotide; CTT chr11 5336352 5336373 5336369 5336374 +
caaactggaatctagacctttt

SEQ ID NO: 102738 - DNA, 22 bp, Artificial Sequence
  Synthetic oligonucleotide; TTC chr11 5336353 5336374 5336370 5336375 +
aaactggaatctagaccttttt

SEQ ID NO: 102739 - DNA, 22 bp, Artificial Sequence
  Synthetic oligonucleotide; CTG chr11 5336359 5336380 5336376 5336381 +
gaatctagacctttttttctgc

SEQ ID NO: 102740 - DNA, 22 bp, Artificial Sequence
  Synthetic oligonucleotide; CTA chr11 5336366 5336387 5336383 5336388 +
gacctttttttctgcctttaga

SEQ ID NO: 102741 - DNA, 22 bp, Artificial Sequence
  Synthetic oligonucleotide; CTT chr11 5336372 5336393 5336389 5336394 +
tttttctgcctttagattgaac

SEQ ID NO: 102742 - DNA, 22 bp, Artificial Sequence
  Synthetic oligonucleotide; TTT chr11 5336373 5336394 5336390 5336395 +
ttttctgcctttagattgaact

SEQ ID NO: 102743 - DNA, 22 bp, Artificial Sequence
  Synthetic oligonucleotide; TTT chr11 5336374 5336395 5336391 5336396 +
tttctgcctttagattgaactg

SEQ ID NO: 102744 - DNA, 22 bp, Artificial Sequence
  Synthetic oligonucleotide; TTT chr11 5336375 5336396 5336392 5336397 +
ttctgcctttagattgaactga

SEQ ID NO: 102745 - DNA, 22 bp, Artificial Sequence
  Synthetic oligonucleotide; TTT chr11 5336376 5336397 5336393 5336398 +
tctgcctttagattgaactgaa

SEQ ID NO: 102746 - DNA, 22 bp, Artificial Sequence
  Synthetic oligonucleotide; TTT chr11 5336377 5336398 5336394 5336399 +
ctgcctttagattgaactgaaa

SEQ ID NO: 102747 - DNA, 22 bp, Artificial Sequence
  Synthetic oligonucleotide; TTC chr11 5336378 5336399 5336395 5336400 +
tgcctttagattgaactgaaac

SEQ ID NO: 102748 - DNA, 22 bp, Artificial Sequence
  Synthetic oligonucleotide; CTG chr11 5336380 5336401 5336397 5336402 +
cctttagattgaactgaaacat

SEQ ID NO: 102749 - DNA, 22 bp, Artificial Sequence
  Synthetic oligonucleotide; CTT chr11 5336384 5336405 5336401 5336406 +
tagattgaactgaaacatcaaa

SEQ ID NO: 102750 - DNA, 22 bp, Artificial Sequence
  Synthetic oligonucleotide; TTT chr11 5336385 5336406 5336402 5336407 +
agattgaactgaaacatcaaaa

SEQ ID NO: 102751 - DNA, 22 bp, Artificial Sequence
  Synthetic oligonucleotide; TTA chr11 5336386 5336407 5336403 5336408 +
gattgaactgaaacatcaaaac

SEQ ID NO: 102752 - DNA, 22 bp, Artificial Sequence
  Synthetic oligonucleotide; TTG chr11 5336391 5336412 5336408 5336413 +
aactgaaacatcaaaacttcct

SEQ ID NO: 102753 - DNA, 22 bp, Artificial Sequence
  Synthetic oligonucleotide; CTG chr11 5336396 5336417 5336413 5336418 +
aaacatcaaaacttcctgggtc

SEQ ID NO: 102754 - DNA, 22 bp, Artificial Sequence
  Synthetic oligonucleotide; CTT chr11 5336410 5336431 5336427 5336432 +
cctgggtctgaagcctgatggc

SEQ ID NO: 102755 - DNA, 22 bp, Artificial Sequence
  Synthetic oligonucleotide; TTC chr11 5336411 5336432 5336428 5336433 +
ctgggtctgaagcctgatggct

SEQ ID NO: 102756 - DNA, 22 bp, Artificial Sequence
  Synthetic oligonucleotide; CTG chr11 5336414 5336435 5336431 5336436 +
ggtctgaagcctgatggctttt

SEQ ID NO: 102757 - DNA, 22 bp, Artificial Sequence
  Synthetic oligonucleotide; CTG chr11 5336420 5336441 5336437 5336442 +
aagcctgatggcttttgggttg

SEQ ID NO: 102758 - DNA, 22 bp, Artificial Sequence
  Synthetic oligonucleotide; CTG chr11 5336427 5336448 5336444 5336449 +
atggcttttgggttgcaagtac

SEQ ID NO: 102759 - DNA, 22 bp, Artificial Sequence
  Synthetic oligonucleotide; CTT chr11 5336434 5336455 5336451 5336456 +
ttgggttgcaagtacaccatca

SEQ ID NO: 102760 - DNA, 22 bp, Artificial Sequence
  Synthetic oligonucleotide; TTT chr11 5336435 5336456 5336452 5336457 +
tgggttgcaagtacaccatcaa

SEQ ID NO: 102761 - DNA, 22 bp, Artificial Sequence
  Synthetic oligonucleotide; TTT chr11 5336436 5336457 5336453 5336458 +
gggttgcaagtacaccatcaat

SEQ ID NO: 102762 - DNA, 22 bp, Artificial Sequence
  Synthetic oligonucleotide; TTG chr11 5336437 5336458 5336454 5336459 +
ggttgcaagtacaccatcaatc

SEQ ID NO: 102763 - DNA, 22 bp, Artificial Sequence
  Synthetic oligonucleotide; TTG chr11 5336442 5336463 5336459 5336464 +
caagtacaccatcaatcctcct

SEQ ID NO: 102764 - DNA, 22 bp, Artificial Sequence
  Synthetic oligonucleotide; CTC chr11 5336462 5336483 5336479 5336484 +
ctgtttcccaggccttcagact

SEQ ID NO: 102765 - DNA, 22 bp, Artificial Sequence
  Synthetic oligonucleotide; CTG chr11 5336465 5336486 5336482 5336487 +
tttcccaggccttcagacttgg

SEQ ID NO: 102766 - DNA, 22 bp, Artificial Sequence
  Synthetic oligonucleotide; TTT chr11 5336468 5336489 5336485 5336490 +
cccaggccttcagacttggact

SEQ ID NO: 102767 - DNA, 22 bp, Artificial Sequence
  Synthetic oligonucleotide; TTC chr11 5336469 5336490 5336486 5336491 +
ccaggccttcagacttggactg

SEQ ID NO: 102768 - DNA, 22 bp, Artificial Sequence
  Synthetic oligonucleotide; CTT chr11 5336478 5336499 5336495 5336500 +
cagacttggactgggactaaac

SEQ ID NO: 102769 - DNA, 22 bp, Artificial Sequence
  Synthetic oligonucleotide; TTC chr11 5336479 5336500 5336496 5336501 +
agacttggactgggactaaact

SEQ ID NO: 102770 - DNA, 22 bp, Artificial Sequence
  Synthetic oligonucleotide; CTT chr11 5336485 5336506 5336502 5336507 +
ggactgggactaaactaccagg

SEQ ID NO: 102771 - DNA, 22 bp, Artificial Sequence
  Synthetic oligonucleotide; TTG chr11 5336486 5336507 5336503 5336508 +
gactgggactaaactaccaggc

SEQ ID NO: 102772 - DNA, 22 bp, Artificial Sequence
  Synthetic oligonucleotide; CTG chr11 5336491 5336512 5336508 5336513 +
ggactaaactaccaggctctct

SEQ ID NO: 102773 - DNA, 22 bp, Artificial Sequence
  Synthetic oligonucleotide; CTA chr11 5336497 5336518 5336514 5336519 +
aactaccaggctctcttgagtt

SEQ ID NO: 102774 - DNA, 22 bp, Artificial Sequence
  Synthetic oligonucleotide; CTA chr11 5336502 5336523 5336519 5336524 +
ccaggctctcttgagttttcaa

SEQ ID NO: 102775 - DNA, 22 bp, Artificial Sequence
  Synthetic oligonucleotide; CTC chr11 5336510 5336531 5336527 5336532 +
tcttgagttttcaacttgatga

SEQ ID NO: 102776 - DNA, 22 bp, Artificial Sequence
  Synthetic oligonucleotide; CTC chr11 5336512 5336533 5336529 5336534 +
ttgagttttcaacttgatgact

SEQ ID NO: 102777 - DNA, 22 bp, Artificial Sequence
  Synthetic oligonucleotide; CTT chr11 5336514 5336535 5336531 5336536 +
gagttttcaacttgatgactca

SEQ ID NO: 102778 - DNA, 22 bp, Artificial Sequence
  Synthetic oligonucleotide; TTG chr11 5336515 5336536 5336532 5336537 +
agttttcaacttgatgactcac

SEQ ID NO: 102779 - DNA, 22 bp, Artificial Sequence
  Synthetic oligonucleotide; TTT chr11 5336520 5336541 5336537 5336542 +
tcaacttgatgactcactctgc

SEQ ID NO: 102780 - DNA, 22 bp, Artificial Sequence
  Synthetic oligonucleotide; TTT chr11 5336521 5336542 5336538 5336543 +
caacttgatgactcactctgca

SEQ ID NO: 102781 - DNA, 22 bp, Artificial Sequence
  Synthetic oligonucleotide; TTC chr11 5336522 5336543 5336539 5336544 +
aacttgatgactcactctgcat

SEQ ID NO: 102782 - DNA, 22 bp, Artificial Sequence
  Synthetic oligonucleotide; CTT chr11 5336527 5336548 5336544 5336549 +
gatgactcactctgcatatctt

SEQ ID NO: 102783 - DNA, 22 bp, Artificial Sequence
  Synthetic oligonucleotide; TTG chr11 5336528 5336549 5336545 5336550 +
atgactcactctgcatatcttg

SEQ ID NO: 102784 - DNA, 22 bp, Artificial Sequence
  Synthetic oligonucleotide; CTC chr11 5336535 5336556 5336552 5336557 +
actctgcatatcttgggacttg

SEQ ID NO: 102785 - DNA, 22 bp, Artificial Sequence
  Synthetic oligonucleotide; CTC chr11 5336539 5336560 5336556 5336561 +
tgcatatcttgggacttgcctt

SEQ ID NO: 102786 - DNA, 22 bp, Artificial Sequence
  Synthetic oligonucleotide; CTG chr11 5336541 5336562 5336558 5336563 +
catatcttgggacttgccttcc

SEQ ID NO: 102787 - DNA, 22 bp, Artificial Sequence
  Synthetic oligonucleotide; CTT chr11 5336549 5336570 5336566 5336571 +
gggacttgccttcctccataat

SEQ ID NO: 102788 - DNA, 22 bp, Artificial Sequence
  Synthetic oligonucleotide; TTG chr11 5336550 5336571 5336567 5336572 +
ggacttgccttcctccataatc

SEQ ID NO: 102789 - DNA, 22 bp, Artificial Sequence
  Synthetic oligonucleotide; CTT chr11 5336556 5336577 5336573 5336578 +
gccttcctccataatcacatct

SEQ ID NO: 102790 - DNA, 22 bp, Artificial Sequence
  Synthetic oligonucleotide; TTG chr11 5336557 5336578 5336574 5336579 +
ccttcctccataatcacatctg

SEQ ID NO: 102791 - DNA, 22 bp, Artificial Sequence
  Synthetic oligonucleotide; CTT chr11 5336561 5336582 5336578 5336583 +
cctccataatcacatctgctat

SEQ ID NO: 102792 - DNA, 22 bp, Artificial Sequence
  Synthetic oligonucleotide; TTC chr11 5336562 5336583 5336579 5336584 +
ctccataatcacatctgctatt

SEQ ID NO: 102793 - DNA, 22 bp, Artificial Sequence
  Synthetic oligonucleotide; CTC chr11 5336565 5336586 5336582 5336587 +
cataatcacatctgctatttcc

SEQ ID NO: 102794 - DNA, 22 bp, Artificial Sequence
  Synthetic oligonucleotide; CTG chr11 5336579 5336600 5336596 5336601 +
ctatttccttatattaggttgg

SEQ ID NO: 102795 - DNA, 22 bp, Artificial Sequence
  Synthetic oligonucleotide; CTA chr11 5336582 5336603 5336599 5336604 +
tttccttatattaggttggtgc

SEQ ID NO: 102796 - DNA, 22 bp, Artificial Sequence
  Synthetic oligonucleotide; TTT chr11 5336585 5336606 5336602 5336607 +
ccttatattaggttggtgcaac

SEQ ID NO: 102797 - DNA, 22 bp, Artificial Sequence
  Synthetic oligonucleotide; TTC chr11 5336586 5336607 5336603 5336608 +
cttatattaggttggtgcaaca

SEQ ID NO: 102798 - DNA, 22 bp, Artificial Sequence
  Synthetic oligonucleotide; CTT chr11 5336589 5336610 5336606 5336611 +
atattaggttggtgcaacagta

SEQ ID NO: 102799 - DNA, 22 bp, Artificial Sequence
  Synthetic oligonucleotide; TTA chr11 5336590 5336611 5336607 5336612 +
tattaggttggtgcaacagtaa

SEQ ID NO: 102800 - DNA, 22 bp, Artificial Sequence
  Synthetic oligonucleotide; TTA chr11 5336595 5336616 5336612 5336617 +
ggttggtgcaacagtaattgca

SEQ ID NO: 102801 - DNA, 22 bp, Artificial Sequence
  Synthetic oligonucleotide; TTG chr11 5336600 5336621 5336617 5336622 +
gtgcaacagtaattgcagtttt

SEQ ID NO: 102802 - DNA, 22 bp, Artificial Sequence
  Synthetic oligonucleotide; TTG chr11 5336615 5336636 5336632 5336637 +
cagtttttgccattattttttt

SEQ ID NO: 102803 - DNA, 22 bp, Artificial Sequence
  Synthetic oligonucleotide; TTT chr11 5336621 5336642 5336638 5336643 +
ttgccattatttttttttaatg

SEQ ID NO: 102804 - DNA, 22 bp, Artificial Sequence
  Synthetic oligonucleotide; TTT chr11 5336622 5336643 5336639 5336644 +
tgccattatttttttttaatgc

SEQ ID NO: 102805 - DNA, 22 bp, Artificial Sequence
  Synthetic oligonucleotide; TTT chr11 5336623 5336644 5336640 5336645 +
gccattatttttttttaatgca

SEQ ID NO: 102806 - DNA, 22 bp, Artificial Sequence
  Synthetic oligonucleotide; TTG chr11 5336624 5336645 5336641 5336646 +
ccattatttttttttaatgcag

SEQ ID NO: 102807 - DNA, 22 bp, Artificial Sequence
  Synthetic oligonucleotide; TTA chr11 5336630 5336651 5336647 5336652 +
tttttttttaatgcagtgaatt

SEQ ID NO: 102808 - DNA, 22 bp, Artificial Sequence
  Synthetic oligonucleotide; TTT chr11 5336633 5336654 5336650 5336655 +
ttttttaatgcagtgaattaca

SEQ ID NO: 102809 - DNA, 22 bp, Artificial Sequence
  Synthetic oligonucleotide; TTT chr11 5336634 5336655 5336651 5336656 +
tttttaatgcagtgaattacat

SEQ ID NO: 102810 - DNA, 22 bp, Artificial Sequence
  Synthetic oligonucleotide; TTT chr11 5336635 5336656 5336652 5336657 +
ttttaatgcagtgaattacatt

SEQ ID NO: 102811 - DNA, 22 bp, Artificial Sequence
  Synthetic oligonucleotide; TTT chr11 5336636 5336657 5336653 5336658 +
tttaatgcagtgaattacattt

SEQ ID NO: 102812 - DNA, 22 bp, Artificial Sequence
  Synthetic oligonucleotide; TTT chr11 5336637 5336658 5336654 5336659 +
ttaatgcagtgaattacattta

SEQ ID NO: 102813 - DNA, 22 bp, Artificial Sequence
  Synthetic oligonucleotide; TTT chr11 5336638 5336659 5336655 5336660 +
taatgcagtgaattacatttat

SEQ ID NO: 102814 - DNA, 22 bp, Artificial Sequence
  Synthetic oligonucleotide; TTT chr11 5336639 5336660 5336656 5336661 +
aatgcagtgaattacatttatt

SEQ ID NO: 102815 - DNA, 22 bp, Artificial Sequence
  Synthetic oligonucleotide; TTA chr11 5336640 5336661 5336657 5336662 +
atgcagtgaattacatttatta

SEQ ID NO: 102816 - DNA, 22 bp, Artificial Sequence
  Synthetic oligonucleotide; TTA chr11 5336653 5336674 5336670 5336675 +
catttattaatttccatatttt

SEQ ID NO: 102817 - DNA, 22 bp, Artificial Sequence
  Synthetic oligonucleotide; TTT chr11 5336658 5336679 5336675 5336680 +
attaatttccatatttttatgt

SEQ ID NO: 102818 - DNA, 22 bp, Artificial Sequence
  Synthetic oligonucleotide; TTA chr11 5336659 5336680 5336676 5336681 +
ttaatttccatatttttatgta

SEQ ID NO: 102819 - DNA, 22 bp, Artificial Sequence
  Synthetic oligonucleotide; TTA chr11 5336662 5336683 5336679 5336684 +
atttccatatttttatgtacat

SEQ ID NO: 102820 - DNA, 22 bp, Artificial Sequence
  Synthetic oligonucleotide; TTT chr11 5336666 5336687 5336683 5336688 +
ccatatttttatgtacattcaa

SEQ ID NO: 102821 - DNA, 22 bp, Artificial Sequence
  Synthetic oligonucleotide; TTC chr11 5336667 5336688 5336684 5336689 +
catatttttatgtacattcaat

SEQ ID NO: 102822 - DNA, 22 bp, Artificial Sequence
  Synthetic oligonucleotide; TTT chr11 5336674 5336695 5336691 5336696 +
ttatgtacattcaattttttta

SEQ ID NO: 102823 - DNA, 22 bp, Artificial Sequence
  Synthetic oligonucleotide; TTT chr11 5336675 5336696 5336692 5336697 +
tatgtacattcaatttttttaa

SEQ ID NO: 102824 - DNA, 22 bp, Artificial Sequence
  Synthetic oligonucleotide; TTT chr11 5336676 5336697 5336693 5336698 +
atgtacattcaatttttttaat

SEQ ID NO: 102825 - DNA, 22 bp, Artificial Sequence
  Synthetic oligonucleotide; TTA chr11 5336677 5336698 5336694 5336699 +
tgtacattcaatttttttaatt

SEQ ID NO: 102826 - DNA, 22 bp, Artificial Sequence
  Synthetic oligonucleotide; TTC chr11 5336686 5336707 5336703 5336708 +
aatttttttaatttttaagttc

SEQ ID NO: 102827 - DNA, 22 bp, Artificial Sequence
  Synthetic oligonucleotide; TTT chr11 5336691 5336712 5336708 5336713 +
ttttaatttttaagttctgagg

SEQ ID NO: 102828 - DNA, 22 bp, Artificial Sequence
  Synthetic oligonucleotide; TTT chr11 5336692 5336713 5336709 5336714 +
tttaatttttaagttctgaggt

SEQ ID NO: 102829 - DNA, 22 bp, Artificial Sequence
  Synthetic oligonucleotide; TTT chr11 5336693 5336714 5336710 5336715 +
ttaatttttaagttctgaggta

SEQ ID NO: 102830 - DNA, 22 bp, Artificial Sequence
  Synthetic oligonucleotide; TTT chr11 5336694 5336715 5336711 5336716 +
taatttttaagttctgaggtac

SEQ ID NO: 102831 - DNA, 22 bp, Artificial Sequence
  Synthetic oligonucleotide; TTT chr11 5336695 5336716 5336712 5336717 +
aatttttaagttctgaggtaca

SEQ ID NO: 102832 - DNA, 22 bp, Artificial Sequence
  Synthetic oligonucleotide; TTA chr11 5336696 5336717 5336713 5336718 +
atttttaagttctgaggtacat

SEQ ID NO: 102833 - DNA, 22 bp, Artificial Sequence
  Synthetic oligonucleotide; TTT chr11 5336700 5336721 5336717 5336722 +
ttaagttctgaggtacatgtgc

SEQ ID NO: 102834 - DNA, 22 bp, Artificial Sequence
  Synthetic oligonucleotide; TTT chr11 5336701 5336722 5336718 5336723 +
taagttctgaggtacatgtgca

SEQ ID NO: 102835 - DNA, 22 bp, Artificial Sequence
  Synthetic oligonucleotide; TTT chr11 5336702 5336723 5336719 5336724 +
aagttctgaggtacatgtgcag

SEQ ID NO: 102836 - DNA, 22 bp, Artificial Sequence
  Synthetic oligonucleotide; TTA chr11 5336703 5336724 5336720 5336725 +
agttctgaggtacatgtgcagg

SEQ ID NO: 102837 - DNA, 22 bp, Artificial Sequence
  Synthetic oligonucleotide; TTC chr11 5336708 5336729 5336725 5336730 +
tgaggtacatgtgcaggatgtg

SEQ ID NO: 102838 - DNA, 22 bp, Artificial Sequence
  Synthetic oligonucleotide; CTG chr11 5336710 5336731 5336727 5336732 +
aggtacatgtgcaggatgtgca

SEQ ID NO: 102839 - DNA, 22 bp, Artificial Sequence
  Synthetic oligonucleotide; TTT chr11 5336737 5336758 5336754 5336759 +
attacatacgtaaatgtgtgca

SEQ ID NO: 102840 - DNA, 22 bp, Artificial Sequence
  Synthetic oligonucleotide; TTA chr11 5336738 5336759 5336755 5336760 +
ttacatacgtaaatgtgtgcaa

SEQ ID NO: 102841 - DNA, 22 bp, Artificial Sequence
  Synthetic oligonucleotide; TTA chr11 5336741 5336762 5336758 5336763 +
catacgtaaatgtgtgcaatgg

SEQ ID NO: 102842 - DNA, 22 bp, Artificial Sequence
  Synthetic oligonucleotide; TTT chr11 5336769 5336790 5336786 5336791 +
gctgtacctatcaacccatcac

SEQ ID NO: 102843 - DNA, 22 bp, Artificial Sequence
  Synthetic oligonucleotide; TTG chr11 5336770 5336791 5336787 5336792 +
ctgtacctatcaacccatcacc

SEQ ID NO: 102844 - DNA, 22 bp, Artificial Sequence
  Synthetic oligonucleotide; CTG chr11 5336773 5336794 5336790 5336795 +
tacctatcaacccatcacctag

SEQ ID NO: 102845 - DNA, 22 bp, Artificial Sequence
  Synthetic oligonucleotide; CTA chr11 5336779 5336800 5336796 5336801 +
tcaacccatcacctaggtgtta

SEQ ID NO: 102846 - DNA, 22 bp, Artificial Sequence
  Synthetic oligonucleotide; CTA chr11 5336794 5336815 5336811 5336816 +
ggtgttaagcccagcatgcatt

SEQ ID NO: 102847 - DNA, 22 bp, Artificial Sequence
  Synthetic oligonucleotide; TTA chr11 5336801 5336822 5336818 5336823 +
agcccagcatgcattagctatt

SEQ ID NO: 102848 - DNA, 22 bp, Artificial Sequence
  Synthetic oligonucleotide; TTA chr11 5336817 5336838 5336834 5336839 +
gctattttttctaatgctcccc

SEQ ID NO: 102849 - DNA, 22 bp, Artificial Sequence
  Synthetic oligonucleotide; CTA chr11 5336821 5336842 5336838 5336843 +
ttttttctaatgctccccttca

SEQ ID NO: 102850 - DNA, 22 bp, Artificial Sequence
  Synthetic oligonucleotide; TTT chr11 5336824 5336845 5336841 5336846 +
tttctaatgctccccttcacca

SEQ ID NO: 102851 - DNA, 22 bp, Artificial Sequence
  Synthetic oligonucleotide; TTT chr11 5336825 5336846 5336842 5336847 +
ttctaatgctccccttcaccac

SEQ ID NO: 102852 - DNA, 22 bp, Artificial Sequence
  Synthetic oligonucleotide; TTT chr11 5336826 5336847 5336843 5336848 +
tctaatgctccccttcaccaca

SEQ ID NO: 102853 - DNA, 22 bp, Artificial Sequence
  Synthetic oligonucleotide; TTT chr11 5336827 5336848 5336844 5336849 +
ctaatgctccccttcaccacac

SEQ ID NO: 102854 - DNA, 22 bp, Artificial Sequence
  Synthetic oligonucleotide; TTC chr11 5336828 5336849 5336845 5336850 +
taatgctccccttcaccacacc

SEQ ID NO: 102855 - DNA, 22 bp, Artificial Sequence
  Synthetic oligonucleotide; CTA chr11 5336830 5336851 5336847 5336852 +
atgctccccttcaccacacccc

SEQ ID NO: 102856 - DNA, 22 bp, Artificial Sequence
  Synthetic oligonucleotide; CTC chr11 5336836 5336857 5336853 5336858 +
cccttcaccacaccccatgccc

SEQ ID NO: 102857 - DNA, 22 bp, Artificial Sequence
  Synthetic oligonucleotide; CTT chr11 5336841 5336862 5336858 5336863 +
caccacaccccatgccctgaca

SEQ ID NO: 102858 - DNA, 22 bp, Artificial Sequence
  Synthetic oligonucleotide; TTC chr11 5336842 5336863 5336859 5336864 +
accacaccccatgccctgacag

SEQ ID NO: 102859 - DNA, 22 bp, Artificial Sequence
  Synthetic oligonucleotide; CTG chr11 5336860 5336881 5336877 5336882 +
acaggctccagtgtgtgttctt

SEQ ID NO: 102860 - DNA, 22 bp, Artificial Sequence
  Synthetic oligonucleotide; CTC chr11 5336868 5336889 5336885 5336890 +
cagtgtgtgttcttcccctcac

SEQ ID NO: 102861 - DNA, 22 bp, Artificial Sequence
  Synthetic oligonucleotide; TTC chr11 5336880 5336901 5336897 5336902 +
ttcccctcactgtttccatgtg

SEQ ID NO: 102862 - DNA, 22 bp, Artificial Sequence
  Synthetic oligonucleotide; CTT chr11 5336882 5336903 5336899 5336904 +
cccctcactgtttccatgtgtt

SEQ ID NO: 102863 - DNA, 22 bp, Artificial Sequence
  Synthetic oligonucleotide; TTC chr11 5336883 5336904 5336900 5336905 +
ccctcactgtttccatgtgttc

SEQ ID NO: 102864 - DNA, 22 bp, Artificial Sequence
  Synthetic oligonucleotide; CTC chr11 5336888 5336909 5336905 5336910 +
actgtttccatgtgttctcatt

SEQ ID NO: 102865 - DNA, 22 bp, Artificial Sequence
  Synthetic oligonucleotide; CTG chr11 5336892 5336913 5336909 5336914 +
tttccatgtgttctcattctca

SEQ ID NO: 102866 - DNA, 22 bp, Artificial Sequence
  Synthetic oligonucleotide; TTT chr11 5336895 5336916 5336912 5336917 +
ccatgtgttctcattctcattg

SEQ ID NO: 102867 - DNA, 22 bp, Artificial Sequence
  Synthetic oligonucleotide; TTC chr11 5336896 5336917 5336913 5336918 +
catgtgttctcattctcattgt

SEQ ID NO: 102868 - DNA, 22 bp, Artificial Sequence
  Synthetic oligonucleotide; TTC chr11 5336905 5336926 5336922 5336927 +
tcattctcattgttcagctccc

SEQ ID NO: 102869 - DNA, 22 bp, Artificial Sequence
  Synthetic oligonucleotide; CTC chr11 5336907 5336928 5336924 5336929 +
attctcattgttcagctcccac

SEQ ID NO: 102870 - DNA, 22 bp, Artificial Sequence
  Synthetic oligonucleotide; TTC chr11 5336911 5336932 5336928 5336933 +
tcattgttcagctcccacttct

SEQ ID NO: 102871 - DNA, 22 bp, Artificial Sequence
  Synthetic oligonucleotide; CTC chr11 5336913 5336934 5336930 5336935 +
attgttcagctcccacttctaa

SEQ ID NO: 102872 - DNA, 22 bp, Artificial Sequence
  Synthetic oligonucleotide; TTG chr11 5336917 5336938 5336934 5336939 +
ttcagctcccacttctaagtga

SEQ ID NO: 102873 - DNA, 22 bp, Artificial Sequence
  Synthetic oligonucleotide; TTC chr11 5336920 5336941 5336937 5336942 +
agctcccacttctaagtgagaa

SEQ ID NO: 102874 - DNA, 22 bp, Artificial Sequence
  Synthetic oligonucleotide; CTC chr11 5336925 5336946 5336942 5336947 +
ccacttctaagtgagaacatgt

SEQ ID NO: 102875 - DNA, 22 bp, Artificial Sequence
  Synthetic oligonucleotide; CTT chr11 5336931 5336952 5336948 5336953 +
ctaagtgagaacatgtggtgtt

SEQ ID NO: 102876 - DNA, 22 bp, Artificial Sequence
  Synthetic oligonucleotide; TTC chr11 5336932 5336953 5336949 5336954 +
taagtgagaacatgtggtgttt

SEQ ID NO: 102877 - DNA, 22 bp, Artificial Sequence
  Synthetic oligonucleotide; CTA chr11 5336934 5336955 5336951 5336956 +
agtgagaacatgtggtgtttgg

SEQ ID NO: 102878 - DNA, 22 bp, Artificial Sequence
  Synthetic oligonucleotide; TTT chr11 5336954 5336975 5336971 5336976 +
ggttttctgttcctgcattagt

SEQ ID NO: 102879 - DNA, 22 bp, Artificial Sequence
  Synthetic oligonucleotide; TTG chr11 5336955 5336976 5336972 5336977 +
gttttctgttcctgcattagtt

SEQ ID NO: 102880 - DNA, 22 bp, Artificial Sequence
  Synthetic oligonucleotide; TTT chr11 5336959 5336980 5336976 5336981 +
tctgttcctgcattagtttact

SEQ ID NO: 102881 - DNA, 22 bp, Artificial Sequence
  Synthetic oligonucleotide; TTT chr11 5336960 5336981 5336977 5336982 +
ctgttcctgcattagtttactg

SEQ ID NO: 102882 - DNA, 22 bp, Artificial Sequence
  Synthetic oligonucleotide; TTC chr11 5336961 5336982 5336978 5336983 +
tgttcctgcattagtttactga

SEQ ID NO: 102883 - DNA, 22 bp, Artificial Sequence
  Synthetic oligonucleotide; CTG chr11 5336963 5336984 5336980 5336985 +
ttcctgcattagtttactgaag

SEQ ID NO: 102884 - DNA, 22 bp, Artificial Sequence
  Synthetic oligonucleotide; TTC chr11 5336966 5336987 5336983 5336988 +
ctgcattagtttactgaagata

SEQ ID NO: 102885 - DNA, 22 bp, Artificial Sequence
  Synthetic oligonucleotide; CTG chr11 5336969 5336990 5336986 5336991 +
cattagtttactgaagataatg

SEQ ID NO: 102886 - DNA, 22 bp, Artificial Sequence
  Synthetic oligonucleotide; TTA chr11 5336974 5336995 5336991 5336996 +
gtttactgaagataatggcttt

SEQ ID NO: 102887 - DNA, 22 bp, Artificial Sequence
  Synthetic oligonucleotide; TTT chr11 5336978 5336999 5336995 5337000 +
actgaagataatggctttcggc

SEQ ID NO: 102888 - DNA, 22 bp, Artificial Sequence
  Synthetic oligonucleotide; TTA chr11 5336979 5337000 5336996 5337001 +
ctgaagataatggctttcggct

SEQ ID NO: 102889 - DNA, 22 bp, Artificial Sequence
  Synthetic oligonucleotide; CTG chr11 5336982 5337003 5336999 5337004 +
aagataatggctttcggctcca

SEQ ID NO: 102890 - DNA, 22 bp, Artificial Sequence
  Synthetic oligonucleotide; CTT chr11 5336995 5337016 5337012 5337017 +
tcggctccatccatgtcccagc

SEQ ID NO: 102891 - DNA, 22 bp, Artificial Sequence
  Synthetic oligonucleotide; TTT chr11 5336996 5337017 5337013 5337018 +
cggctccatccatgtcccagca

SEQ ID NO: 102892 - DNA, 22 bp, Artificial Sequence
  Synthetic oligonucleotide; TTC chr11 5336997 5337018 5337014 5337019 +
ggctccatccatgtcccagcaa

SEQ ID NO: 102893 - DNA, 22 bp, Artificial Sequence
  Synthetic oligonucleotide; CTC chr11 5337002 5337023 5337019 5337024 +
catccatgtcccagcaaagggc

SEQ ID NO: 102894 - DNA, 22 bp, Artificial Sequence
  Synthetic oligonucleotide; CTC chr11 5337032 5337053 5337049 5337054 +
atccctttttatggttagatag

SEQ ID NO: 102895 - DNA, 22 bp, Artificial Sequence
  Synthetic oligonucleotide; CTT chr11 5337039 5337060 5337056 5337061 +
tttatggttagatagtatttca

SEQ ID NO: 102896 - DNA, 22 bp, Artificial Sequence
  Synthetic oligonucleotide; TTT chr11 5337040 5337061 5337057 5337062 +
ttatggttagatagtatttcat

SEQ ID NO: 102897 - DNA, 22 bp, Artificial Sequence
  Synthetic oligonucleotide; TTT chr11 5337041 5337062 5337058 5337063 +
tatggttagatagtatttcatg

SEQ ID NO: 102898 - DNA, 22 bp, Artificial Sequence
  Synthetic oligonucleotide; TTT chr11 5337042 5337063 5337059 5337064 +
atggttagatagtatttcatgg

SEQ ID NO: 102899 - DNA, 22 bp, Artificial Sequence
  Synthetic oligonucleotide; TTA chr11 5337043 5337064 5337060 5337065 +
tggttagatagtatttcatggt

SEQ ID NO: 102900 - DNA, 22 bp, Artificial Sequence
  Synthetic oligonucleotide; TTA chr11 5337049 5337070 5337066 5337071 +
gatagtatttcatggtttatat

SEQ ID NO: 102901 - DNA, 22 bp, Artificial Sequence
  Synthetic oligonucleotide; TTT chr11 5337059 5337080 5337076 5337081 +
catggtttatatgtaccacatt

SEQ ID NO: 102902 - DNA, 22 bp, Artificial Sequence
  Synthetic oligonucleotide; TTC chr11 5337060 5337081 5337077 5337082 +
atggtttatatgtaccacattt

SEQ ID NO: 102903 - DNA, 22 bp, Artificial Sequence
  Synthetic oligonucleotide; TTT chr11 5337067 5337088 5337084 5337089 +
atatgtaccacattttttaaat

SEQ ID NO: 102904 - DNA, 22 bp, Artificial Sequence
  Synthetic oligonucleotide; TTA chr11 5337068 5337089 5337085 5337090 +
tatgtaccacattttttaaatt

SEQ ID NO: 102905 - DNA, 22 bp, Artificial Sequence
  Synthetic oligonucleotide; TTT chr11 5337082 5337103 5337099 5337104 +
tttaaattgtctatcattgatg

SEQ ID NO: 102906 - DNA, 22 bp, Artificial Sequence
  Synthetic oligonucleotide; TTT chr11 5337083 5337104 5337100 5337105 +
ttaaattgtctatcattgatgg

SEQ ID NO: 102907 - DNA, 22 bp, Artificial Sequence
  Synthetic oligonucleotide; TTT chr11 5337084 5337105 5337101 5337106 +
taaattgtctatcattgatggc

SEQ ID NO: 102908 - DNA, 22 bp, Artificial Sequence
  Synthetic oligonucleotide; TTT chr11 5337085 5337106 5337102 5337107 +
aaattgtctatcattgatggcc

SEQ ID NO: 102909 - DNA, 22 bp, Artificial Sequence
  Synthetic oligonucleotide; TTA chr11 5337086 5337107 5337103 5337108 +
aattgtctatcattgatggcca

SEQ ID NO: 102910 - DNA, 22 bp, Artificial Sequence
  Synthetic oligonucleotide; TTG chr11 5337091 5337112 5337108 5337113 +
tctatcattgatggccatttgg

SEQ ID NO: 102911 - DNA, 22 bp, Artificial Sequence
  Synthetic oligonucleotide; CTA chr11 5337095 5337116 5337112 5337117 +
tcattgatggccatttgggttg

SEQ ID NO: 102912 - DNA, 22 bp, Artificial Sequence
  Synthetic oligonucleotide; TTG chr11 5337101 5337122 5337118 5337123 +
atggccatttgggttgattcta

SEQ ID NO: 102913 - DNA, 22 bp, Artificial Sequence
  Synthetic oligonucleotide; TTT chr11 5337111 5337132 5337128 5337133 +
gggttgattctatgtctttgct

SEQ ID NO: 102914 - DNA, 22 bp, Artificial Sequence
  Synthetic oligonucleotide; TTG chr11 5337112 5337133 5337129 5337134 +
ggttgattctatgtctttgcta

SEQ ID NO: 102915 - DNA, 22 bp, Artificial Sequence
  Synthetic oligonucleotide; TTG chr11 5337117 5337138 5337134 5337139 +
attctatgtctttgctattgtg

SEQ ID NO: 102916 - DNA, 22 bp, Artificial Sequence
  Synthetic oligonucleotide; TTC chr11 5337121 5337142 5337138 5337143 +
tatgtctttgctattgtgaata

SEQ ID NO: 102917 - DNA, 22 bp, Artificial Sequence
  Synthetic oligonucleotide; CTA chr11 5337123 5337144 5337140 5337145 +
tgtctttgctattgtgaatagt

SEQ ID NO: 102918 - DNA, 22 bp, Artificial Sequence
  Synthetic oligonucleotide; CTT chr11 5337129 5337150 5337146 5337151 +
tgctattgtgaatagtgctaca

SEQ ID NO: 102919 - DNA, 22 bp, Artificial Sequence
  Synthetic oligonucleotide; TTT chr11 5337130 5337151 5337147 5337152 +
gctattgtgaatagtgctacaa

SEQ ID NO: 102920 - DNA, 22 bp, Artificial Sequence
  Synthetic oligonucleotide; TTG chr11 5337131 5337152 5337148 5337153 +
ctattgtgaatagtgctacaat

SEQ ID NO: 102921 - DNA, 22 bp, Artificial Sequence
  Synthetic oligonucleotide; CTA chr11 5337134 5337155 5337151 5337156 +
ttgtgaatagtgctacaatgaa

SEQ ID NO: 102922 - DNA, 22 bp, Artificial Sequence
  Synthetic oligonucleotide; TTG chr11 5337137 5337158 5337154 5337159 +
tgaatagtgctacaatgaacat

SEQ ID NO: 102923 - DNA, 22 bp, Artificial Sequence
  Synthetic oligonucleotide; CTA chr11 5337149 5337170 5337166 5337171 +
caatgaacatacatgtgcatgt

SEQ ID NO: 102924 - DNA, 22 bp, Artificial Sequence
  Synthetic oligonucleotide; CTT chr11 5337176 5337197 5337193 5337198 +
agtaatagaatgatttatactc

SEQ ID NO: 102925 - DNA, 22 bp, Artificial Sequence
  Synthetic oligonucleotide; TTA chr11 5337177 5337198 5337194 5337199 +
gtaatagaatgatttatactcc

SEQ ID NO: 102926 - DNA, 22 bp, Artificial Sequence
  Synthetic oligonucleotide; TTT chr11 5337192 5337213 5337209 5337214 +
atactcctttaggtatataccc

SEQ ID NO: 102927 - DNA, 22 bp, Artificial Sequence
  Synthetic oligonucleotide; TTA chr11 5337193 5337214 5337210 5337215 +
tactcctttaggtatataccca

SEQ ID NO: 102928 - DNA, 22 bp, Artificial Sequence
  Synthetic oligonucleotide; CTC chr11 5337198 5337219 5337215 5337220 +
ctttaggtatatacccagtaat

SEQ ID NO: 102929 - DNA, 22 bp, Artificial Sequence
  Synthetic oligonucleotide; CTT chr11 5337201 5337222 5337218 5337223 +
taggtatatacccagtaatggg

SEQ ID NO: 102930 - DNA, 22 bp, Artificial Sequence
  Synthetic oligonucleotide; TTT chr11 5337202 5337223 5337219 5337224 +
aggtatatacccagtaatggga

SEQ ID NO: 102931 - DNA, 22 bp, Artificial Sequence
  Synthetic oligonucleotide; TTA chr11 5337203 5337224 5337220 5337225 +
ggtatatacccagtaatgggat

SEQ ID NO: 102932 - DNA, 22 bp, Artificial Sequence
  Synthetic oligonucleotide; TTG chr11 5337227 5337248 5337244 5337249 +
tgaggtcaaatggtatttctgg

SEQ ID NO: 102933 - DNA, 22 bp, Artificial Sequence
  Synthetic oligonucleotide; TTT chr11 5337245 5337266 5337262 5337267 +
ctggttctaaatctttgaggaa

SEQ ID NO: 102934 - DNA, 22 bp, Artificial Sequence
  Synthetic oligonucleotide; TTC chr11 5337246 5337267 5337263 5337268 +
tggttctaaatctttgaggaat

SEQ ID NO: 102935 - DNA, 22 bp, Artificial Sequence
  Synthetic oligonucleotide; CTG chr11 5337248 5337269 5337265 5337270 +
gttctaaatctttgaggaattg

SEQ ID NO: 102936 - DNA, 22 bp, Artificial Sequence
  Synthetic oligonucleotide; TTC chr11 5337252 5337273 5337269 5337274 +
taaatctttgaggaattgccac

SEQ ID NO: 102937 - DNA, 22 bp, Artificial Sequence
  Synthetic oligonucleotide; CTA chr11 5337254 5337275 5337271 5337276 +
aatctttgaggaattgccacac

SEQ ID NO: 102938 - DNA, 22 bp, Artificial Sequence
  Synthetic oligonucleotide; CTT chr11 5337260 5337281 5337277 5337282 +
tgaggaattgccacactgtctt

SEQ ID NO: 102939 - DNA, 22 bp, Artificial Sequence
  Synthetic oligonucleotide; TTT chr11 5337261 5337282 5337278 5337283 +
gaggaattgccacactgtcttc

SEQ ID NO: 102940 - DNA, 22 bp, Artificial Sequence
  Synthetic oligonucleotide; TTG chr11 5337262 5337283 5337279 5337284 +
aggaattgccacactgtcttcc

SEQ ID NO: 102941 - DNA, 22 bp, Artificial Sequence
  Synthetic oligonucleotide; TTG chr11 5337270 5337291 5337287 5337292 +
ccacactgtcttccacaatggt

SEQ ID NO: 102942 - DNA, 22 bp, Artificial Sequence
  Synthetic oligonucleotide; CTG chr11 5337278 5337299 5337295 5337300 +
tcttccacaatggttgaattag

SEQ ID NO: 102943 - DNA, 22 bp, Artificial Sequence
  Synthetic oligonucleotide; CTT chr11 5337282 5337303 5337299 5337304 +
ccacaatggttgaattagttta

SEQ ID NO: 102944 - DNA, 22 bp, Artificial Sequence
  Synthetic oligonucleotide; TTC chr11 5337283 5337304 5337300 5337305 +
cacaatggttgaattagtttac

SEQ ID NO: 102945 - DNA, 22 bp, Artificial Sequence
  Synthetic oligonucleotide; TTG chr11 5337294 5337315 5337311 5337316 +
aattagtttacagtcccaccaa

SEQ ID NO: 102946 - DNA, 22 bp, Artificial Sequence
  Synthetic oligonucleotide; TTA chr11 5337299 5337320 5337316 5337321 +
gtttacagtcccaccaacagtg

SEQ ID NO: 102947 - DNA, 22 bp, Artificial Sequence
  Synthetic oligonucleotide; TTT chr11 5337303 5337324 5337320 5337325 +
acagtcccaccaacagtgtaaa

SEQ ID NO: 102948 - DNA, 22 bp, Artificial Sequence
  Synthetic oligonucleotide; TTA chr11 5337304 5337325 5337321 5337326 +
cagtcccaccaacagtgtaaaa

SEQ ID NO: 102949 - DNA, 22 bp, Artificial Sequence
  Synthetic oligonucleotide; TTC chr11 5337332 5337353 5337349 5337354 +
ctatttctctgcaaccttgcta

SEQ ID NO: 102950 - DNA, 22 bp, Artificial Sequence
  Synthetic oligonucleotide; CTA chr11 5337335 5337356 5337352 5337357 +
tttctctgcaaccttgctagca

SEQ ID NO: 102951 - DNA, 22 bp, Artificial Sequence
  Synthetic oligonucleotide; TTT chr11 5337338 5337359 5337355 5337360 +
ctctgcaaccttgctagcatct

SEQ ID NO: 102952 - DNA, 22 bp, Artificial Sequence
  Synthetic oligonucleotide; TTC chr11 5337339 5337360 5337356 5337361 +
tctgcaaccttgctagcatctg

SEQ ID NO: 102953 - DNA, 22 bp, Artificial Sequence
  Synthetic oligonucleotide; CTC chr11 5337341 5337362 5337358 5337363 +
tgcaaccttgctagcatctgtt

SEQ ID NO: 102954 - DNA, 22 bp, Artificial Sequence
  Synthetic oligonucleotide; CTG chr11 5337343 5337364 5337360 5337365 +
caaccttgctagcatctgttgt

SEQ ID NO: 102955 - DNA, 22 bp, Artificial Sequence
  Synthetic oligonucleotide; CTT chr11 5337350 5337371 5337367 5337372 +
gctagcatctgttgtttcttga

SEQ ID NO: 102956 - DNA, 22 bp, Artificial Sequence
  Synthetic oligonucleotide; TTG chr11 5337351 5337372 5337368 5337373 +
ctagcatctgttgtttcttgac

SEQ ID NO: 102957 - DNA, 22 bp, Artificial Sequence
  Synthetic oligonucleotide; CTA chr11 5337354 5337375 5337371 5337376 +
gcatctgttgtttcttgacttt

SEQ ID NO: 102958 - DNA, 22 bp, Artificial Sequence
  Synthetic oligonucleotide; CTG chr11 5337361 5337382 5337378 5337383 +
ttgtttcttgactttaaaaacc

SEQ ID NO: 102959 - DNA, 22 bp, Artificial Sequence
  Synthetic oligonucleotide; TTG chr11 5337364 5337385 5337381 5337386 +
tttcttgactttaaaaaccacc

SEQ ID NO: 102960 - DNA, 22 bp, Artificial Sequence
  Synthetic oligonucleotide; TTT chr11 5337367 5337388 5337384 5337389 +
cttgactttaaaaaccaccatt

SEQ ID NO: 102961 - DNA, 22 bp, Artificial Sequence
  Synthetic oligonucleotide; TTC chr11 5337368 5337389 5337385 5337390 +
ttgactttaaaaaccaccattc

SEQ ID NO: 102962 - DNA, 22 bp, Artificial Sequence
  Synthetic oligonucleotide; CTT chr11 5337370 5337391 5337387 5337392 +
gactttaaaaaccaccattctg

SEQ ID NO: 102963 - DNA, 22 bp, Artificial Sequence
  Synthetic oligonucleotide; TTG chr11 5337371 5337392 5337388 5337393 +
actttaaaaaccaccattctga

SEQ ID NO: 102964 - DNA, 22 bp, Artificial Sequence
  Synthetic oligonucleotide; CTT chr11 5337375 5337396 5337392 5337397 +
taaaaaccaccattctgactgg

SEQ ID NO: 102965 - DNA, 22 bp, Artificial Sequence
  Synthetic oligonucleotide; TTT chr11 5337376 5337397 5337393 5337398 +
aaaaaccaccattctgactggt

SEQ ID NO: 102966 - DNA, 22 bp, Artificial Sequence
  Synthetic oligonucleotide; TTA chr11 5337377 5337398 5337394 5337399 +
aaaaccaccattctgactggtg

SEQ ID NO: 102967 - DNA, 22 bp, Artificial Sequence
  Synthetic oligonucleotide; TTC chr11 5337390 5337411 5337407 5337412 +
tgactggtgtcagatggtattt

SEQ ID NO: 102968 - DNA, 22 bp, Artificial Sequence
  Synthetic oligonucleotide; CTG chr11 5337392 5337413 5337409 5337414 +
actggtgtcagatggtatttca

SEQ ID NO: 102969 - DNA, 22 bp, Artificial Sequence
  Synthetic oligonucleotide; CTG chr11 5337396 5337417 5337413 5337418 +
gtgtcagatggtatttcattgt

SEQ ID NO: 102970 - DNA, 22 bp, Artificial Sequence
  Synthetic oligonucleotide; TTT chr11 5337412 5337433 5337429 5337434 +
cattgtggttttgatttgcatt

SEQ ID NO: 102971 - DNA, 22 bp, Artificial Sequence
  Synthetic oligonucleotide; TTC chr11 5337413 5337434 5337430 5337435 +
attgtggttttgatttgcattt

SEQ ID NO: 102972 - DNA, 22 bp, Artificial Sequence
  Synthetic oligonucleotide; TTG chr11 5337417 5337438 5337434 5337439 +
tggttttgatttgcatttctct

SEQ ID NO: 102973 - DNA, 22 bp, Artificial Sequence
  Synthetic oligonucleotide; TTT chr11 5337423 5337444 5337440 5337445 +
tgatttgcatttctctaatgat

SEQ ID NO: 102974 - DNA, 22 bp, Artificial Sequence
  Synthetic oligonucleotide; TTT chr11 5337424 5337445 5337441 5337446 +
gatttgcatttctctaatgatc

SEQ ID NO: 102975 - DNA, 22 bp, Artificial Sequence
  Synthetic oligonucleotide; TTG chr11 5337425 5337446 5337442 5337447 +
atttgcatttctctaatgatca

SEQ ID NO: 102976 - DNA, 22 bp, Artificial Sequence
  Synthetic oligonucleotide; TTT chr11 5337429 5337450 5337446 5337451 +
gcatttctctaatgatcagtga

SEQ ID NO: 102977 - DNA, 22 bp, Artificial Sequence
  Synthetic oligonucleotide; TTG chr11 5337430 5337451 5337447 5337452 +
catttctctaatgatcagtgac

SEQ ID NO: 102978 - DNA, 22 bp, Artificial Sequence
  Synthetic oligonucleotide; TTT chr11 5337435 5337456 5337452 5337457 +
ctctaatgatcagtgacattga

SEQ ID NO: 102979 - DNA, 22 bp, Artificial Sequence
  Synthetic oligonucleotide; TTC chr11 5337436 5337457 5337453 5337458 +
tctaatgatcagtgacattgag

SEQ ID NO: 102980 - DNA, 22 bp, Artificial Sequence
  Synthetic oligonucleotide; CTC chr11 5337438 5337459 5337455 5337460 +
taatgatcagtgacattgagac

SEQ ID NO: 102981 - DNA, 22 bp, Artificial Sequence
  Synthetic oligonucleotide; CTA chr11 5337440 5337461 5337457 5337462 +
atgatcagtgacattgagactt

SEQ ID NO: 102982 - DNA, 22 bp, Artificial Sequence
  Synthetic oligonucleotide; TTG chr11 5337456 5337477 5337473 5337478 +
agacttttttcgtatgtttctt

SEQ ID NO: 102983 - DNA, 22 bp, Artificial Sequence
  Synthetic oligonucleotide; CTT chr11 5337462 5337483 5337479 5337484 +
ttttcgtatgtttcttagccac

SEQ ID NO: 102984 - DNA, 22 bp, Artificial Sequence
  Synthetic oligonucleotide; TTT chr11 5337463 5337484 5337480 5337485 +
tttcgtatgtttcttagccaca

SEQ ID NO: 102985 - DNA, 22 bp, Artificial Sequence
  Synthetic oligonucleotide; TTT chr11 5337464 5337485 5337481 5337486 +
ttcgtatgtttcttagccacat

SEQ ID NO: 102986 - DNA, 22 bp, Artificial Sequence
  Synthetic oligonucleotide; TTT chr11 5337465 5337486 5337482 5337487 +
tcgtatgtttcttagccacata

SEQ ID NO: 102987 - DNA, 22 bp, Artificial Sequence
  Synthetic oligonucleotide; TTT chr11 5337466 5337487 5337483 5337488 +
cgtatgtttcttagccacataa

SEQ ID NO: 102988 - DNA, 22 bp, Artificial Sequence
  Synthetic oligonucleotide; TTC chr11 5337467 5337488 5337484 5337489 +
gtatgtttcttagccacataaa

SEQ ID NO: 102989 - DNA, 22 bp, Artificial Sequence
  Synthetic oligonucleotide; TTT chr11 5337475 5337496 5337492 5337497 +
cttagccacataaatgtcttct

SEQ ID NO: 102990 - DNA, 22 bp, Artificial Sequence
  Synthetic oligonucleotide; TTC chr11 5337476 5337497 5337493 5337498 +
ttagccacataaatgtcttctt

SEQ ID NO: 102991 - DNA, 22 bp, Artificial Sequence
  Synthetic oligonucleotide; CTT chr11 5337478 5337499 5337495 5337500 +
agccacataaatgtcttctttt

SEQ ID NO: 102992 - DNA, 22 bp, Artificial Sequence
  Synthetic oligonucleotide; TTA chr11 5337479 5337500 5337496 5337501 +
gccacataaatgtcttcttttg

SEQ ID NO: 102993 - DNA, 22 bp, Artificial Sequence
  Synthetic oligonucleotide; CTT chr11 5337495 5337516 5337512 5337517 +
cttttgagaagtgtctgttcat

SEQ ID NO: 102994 - DNA, 22 bp, Artificial Sequence
  Synthetic oligonucleotide; TTC chr11 5337496 5337517 5337513 5337518 +
ttttgagaagtgtctgttcatg

SEQ ID NO: 102995 - DNA, 22 bp, Artificial Sequence
  Synthetic oligonucleotide; CTT chr11 5337498 5337519 5337515 5337520 +
ttgagaagtgtctgttcatgtc

SEQ ID NO: 102996 - DNA, 22 bp, Artificial Sequence
  Synthetic oligonucleotide; TTT chr11 5337499 5337520 5337516 5337521 +
tgagaagtgtctgttcatgtcc

SEQ ID NO: 102997 - DNA, 22 bp, Artificial Sequence
  Synthetic oligonucleotide; TTT chr11 5337500 5337521 5337517 5337522 +
gagaagtgtctgttcatgtcct

SEQ ID NO: 102998 - DNA, 22 bp, Artificial Sequence
  Synthetic oligonucleotide; TTG chr11 5337501 5337522 5337518 5337523 +
agaagtgtctgttcatgtcctt

SEQ ID NO: 102999 - DNA, 22 bp, Artificial Sequence
  Synthetic oligonucleotide; CTG chr11 5337512 5337533 5337529 5337534 +
ttcatgtcctttgcccactttt

SEQ ID NO: 103000 - DNA, 22 bp, Artificial Sequence
  Synthetic oligonucleotide; TTC chr11 5337515 5337536 5337532 5337537 +
atgtcctttgcccactttttaa

SEQ ID NO: 103001 - DNA, 22 bp, Artificial Sequence
  Synthetic oligonucleotide; CTT chr11 5337523 5337544 5337540 5337545 +
tgcccactttttaatggggttg

SEQ ID NO: 103002 - DNA, 22 bp, Artificial Sequence
  Synthetic oligonucleotide; TTT chr11 5337524 5337545 5337541 5337546 +
gcccactttttaatggggttgt

SEQ ID NO: 103003 - DNA, 22 bp, Artificial Sequence
  Synthetic oligonucleotide; TTG chr11 5337525 5337546 5337542 5337547 +
cccactttttaatggggttgtt

SEQ ID NO: 103004 - DNA, 22 bp, Artificial Sequence
  Synthetic oligonucleotide; CTT chr11 5337532 5337553 5337549 5337554 +
tttaatggggttgtttgtgtgt

SEQ ID NO: 103005 - DNA, 22 bp, Artificial Sequence
  Synthetic oligonucleotide; TTT chr11 5337533 5337554 5337550 5337555 +
ttaatggggttgtttgtgtgtt

SEQ ID NO: 103006 - DNA, 22 bp, Artificial Sequence
  Synthetic oligonucleotide; TTT chr11 5337534 5337555 5337551 5337556 +
taatggggttgtttgtgtgttt

SEQ ID NO: 103007 - DNA, 22 bp, Artificial Sequence
  Synthetic oligonucleotide; TTT chr11 5337535 5337556 5337552 5337557 +
aatggggttgtttgtgtgtttc

SEQ ID NO: 103008 - DNA, 22 bp, Artificial Sequence
  Synthetic oligonucleotide; TTA chr11 5337536 5337557 5337553 5337558 +
atggggttgtttgtgtgtttct

SEQ ID NO: 103009 - DNA, 22 bp, Artificial Sequence
  Synthetic oligonucleotide; TTG chr11 5337545 5337566 5337562 5337567 +
tttgtgtgtttcttttgtaaat

SEQ ID NO: 103010 - DNA, 22 bp, Artificial Sequence
  Synthetic oligonucleotide; TTT chr11 5337548 5337569 5337565 5337570 +
gtgtgtttcttttgtaaatatg

SEQ ID NO: 103011 - DNA, 22 bp, Artificial Sequence
  Synthetic oligonucleotide; TTG chr11 5337549 5337570 5337566 5337571 +
tgtgtttcttttgtaaatatgt

SEQ ID NO: 103012 - DNA, 22 bp, Artificial Sequence
  Synthetic oligonucleotide; TTT chr11 5337556 5337577 5337573 5337578 +
cttttgtaaatatgtctaagtt

SEQ ID NO: 103013 - DNA, 22 bp, Artificial Sequence
  Synthetic oligonucleotide; TTC chr11 5337557 5337578 5337574 5337579 +
ttttgtaaatatgtctaagttc

SEQ ID NO: 103014 - DNA, 22 bp, Artificial Sequence
  Synthetic oligonucleotide; CTT chr11 5337559 5337580 5337576 5337581 +
ttgtaaatatgtctaagttcct

SEQ ID NO: 103015 - DNA, 22 bp, Artificial Sequence
  Synthetic oligonucleotide; TTT chr11 5337560 5337581 5337577 5337582 +
tgtaaatatgtctaagttcctc

SEQ ID NO: 103016 - DNA, 22 bp, Artificial Sequence
  Synthetic oligonucleotide; TTT chr11 5337561 5337582 5337578 5337583 +
gtaaatatgtctaagttcctca

SEQ ID NO: 103017 - DNA, 22 bp, Artificial Sequence
  Synthetic oligonucleotide; TTG chr11 5337562 5337583 5337579 5337584 +
taaatatgtctaagttcctcat

SEQ ID NO: 103018 - DNA, 22 bp, Artificial Sequence
  Synthetic oligonucleotide; CTA chr11 5337574 5337595 5337591 5337596 +
agttcctcatagattctggata

SEQ ID NO: 103019 - DNA, 22 bp, Artificial Sequence
  Synthetic oligonucleotide; TTC chr11 5337579 5337600 5337596 5337601 +
ctcatagattctggatattaga

SEQ ID NO: 103020 - DNA, 22 bp, Artificial Sequence
  Synthetic oligonucleotide; CTC chr11 5337582 5337603 5337599 5337604 +
atagattctggatattagacct

SEQ ID NO: 103021 - DNA, 22 bp, Artificial Sequence
  Synthetic oligonucleotide; TTC chr11 5337590 5337611 5337607 5337612 +
tggatattagacctttgtcaga

SEQ ID NO: 103022 - DNA, 22 bp, Artificial Sequence
  Synthetic oligonucleotide; CTG chr11 5337592 5337613 5337609 5337614 +
gatattagacctttgtcagatg

SEQ ID NO: 103023 - DNA, 22 bp, Artificial Sequence
  Synthetic oligonucleotide; TTA chr11 5337599 5337620 5337616 5337621 +
gacctttgtcagatgggtagat

SEQ ID NO: 103024 - DNA, 22 bp, Artificial Sequence
  Synthetic oligonucleotide; CTT chr11 5337605 5337626 5337622 5337627 +
tgtcagatgggtagattgcaga

SEQ ID NO: 103025 - DNA, 22 bp, Artificial Sequence
  Synthetic oligonucleotide; TTT chr11 5337606 5337627 5337623 5337628 +
gtcagatgggtagattgcagaa

SEQ ID NO: 103026 - DNA, 22 bp, Artificial Sequence
  Synthetic oligonucleotide; TTG chr11 5337607 5337628 5337624 5337629 +
tcagatgggtagattgcagaaa

SEQ ID NO: 103027 - DNA, 22 bp, Artificial Sequence
  Synthetic oligonucleotide; TTG chr11 5337623 5337644 5337640 5337645 +
cagaaattttctcccattctgt

SEQ ID NO: 103028 - DNA, 22 bp, Artificial Sequence
  Synthetic oligonucleotide; TTT chr11 5337632 5337653 5337649 5337654 +
tctcccattctgtaggttgcct

SEQ ID NO: 103029 - DNA, 22 bp, Artificial Sequence
  Synthetic oligonucleotide; TTT chr11 5337633 5337654 5337650 5337655 +
ctcccattctgtaggttgcctg

SEQ ID NO: 103030 - DNA, 22 bp, Artificial Sequence
  Synthetic oligonucleotide; TTC chr11 5337634 5337655 5337651 5337656 +
tcccattctgtaggttgcctgt

SEQ ID NO: 103031 - DNA, 22 bp, Artificial Sequence
  Synthetic oligonucleotide; CTC chr11 5337636 5337657 5337653 5337658 +
ccattctgtaggttgcctgttc

SEQ ID NO: 103032 - DNA, 22 bp, Artificial Sequence
  Synthetic oligonucleotide; TTC chr11 5337642 5337663 5337659 5337664 +
tgtaggttgcctgttcgctctg

SEQ ID NO: 103033 - DNA, 22 bp, Artificial Sequence
  Synthetic oligonucleotide; CTG chr11 5337644 5337665 5337661 5337666 +
taggttgcctgttcgctctgat

SEQ ID NO: 103034 - DNA, 22 bp, Artificial Sequence
  Synthetic oligonucleotide; TTG chr11 5337651 5337672 5337668 5337673 +
cctgttcgctctgatgatagtt

SEQ ID NO: 103035 - DNA, 22 bp, Artificial Sequence
  Synthetic oligonucleotide; CTG chr11 5337655 5337676 5337672 5337677 +
ttcgctctgatgatagtttatt

SEQ ID NO: 103036 - DNA, 22 bp, Artificial Sequence
  Synthetic oligonucleotide; TTC chr11 5337658 5337679 5337675 5337680 +
gctctgatgatagtttattttg

SEQ ID NO: 103037 - DNA, 22 bp, Artificial Sequence
  Synthetic oligonucleotide; CTC chr11 5337662 5337683 5337679 5337684 +
tgatgatagtttattttgctgt

SEQ ID NO: 103038 - DNA, 22 bp, Artificial Sequence
  Synthetic oligonucleotide; CTG chr11 5337664 5337685 5337681 5337686 +
atgatagtttattttgctgttt

SEQ ID NO: 103039 - DNA, 22 bp, Artificial Sequence
  Synthetic oligonucleotide; TTT chr11 5337674 5337695 5337691 5337696 +
attttgctgtttagaagctctg

SEQ ID NO: 103040 - DNA, 22 bp, Artificial Sequence
  Synthetic oligonucleotide; TTA chr11 5337675 5337696 5337692 5337697 +
ttttgctgtttagaagctctgt

SEQ ID NO: 103041 - DNA, 22 bp, Artificial Sequence
  Synthetic oligonucleotide; TTT chr11 5337678 5337699 5337695 5337700 +
tgctgtttagaagctctgtatt

SEQ ID NO: 103042 - DNA, 22 bp, Artificial Sequence
  Synthetic oligonucleotide; TTT chr11 5337679 5337700 5337696 5337701 +
gctgtttagaagctctgtattt

SEQ ID NO: 103043 - DNA, 22 bp, Artificial Sequence
  Synthetic oligonucleotide; TTG chr11 5337680 5337701 5337697 5337702 +
ctgtttagaagctctgtattta

SEQ ID NO: 103044 - DNA, 22 bp, Artificial Sequence
  Synthetic oligonucleotide; CTG chr11 5337683 5337704 5337700 5337705 +
tttagaagctctgtatttaatt

SEQ ID NO: 103045 - DNA, 22 bp, Artificial Sequence
  Synthetic oligonucleotide; TTT chr11 5337686 5337707 5337703 5337708 +
agaagctctgtatttaattgta

SEQ ID NO: 103046 - DNA, 22 bp, Artificial Sequence
  Synthetic oligonucleotide; TTA chr11 5337687 5337708 5337704 5337709 +
gaagctctgtatttaattgtat

SEQ ID NO: 103047 - DNA, 22 bp, Artificial Sequence
  Synthetic oligonucleotide; CTC chr11 5337694 5337715 5337711 5337716 +
tgtatttaattgtatttttctt

SEQ ID NO: 103048 - DNA, 22 bp, Artificial Sequence
  Synthetic oligonucleotide; CTG chr11 5337696 5337717 5337713 5337718 +
tatttaattgtatttttcttta

SEQ ID NO: 103049 - DNA, 22 bp, Artificial Sequence
  Synthetic oligonucleotide; TTT chr11 5337701 5337722 5337718 5337723 +
aattgtatttttctttattttg

SEQ ID NO: 103050 - DNA, 22 bp, Artificial Sequence
  Synthetic oligonucleotide; TTA chr11 5337702 5337723 5337719 5337724 +
attgtatttttctttattttga

SEQ ID NO: 103051 - DNA, 22 bp, Artificial Sequence
  Synthetic oligonucleotide; TTG chr11 5337706 5337727 5337723 5337728 +
tatttttctttattttgagatg

SEQ ID NO: 103052 - DNA, 22 bp, Artificial Sequence
  Synthetic oligonucleotide; TTT chr11 5337711 5337732 5337728 5337733 +
ttctttattttgagatgaagtc

SEQ ID NO: 103053 - DNA, 22 bp, Artificial Sequence
  Synthetic oligonucleotide; TTT chr11 5337712 5337733 5337729 5337734 +
tctttattttgagatgaagtct

SEQ ID NO: 103054 - DNA, 22 bp, Artificial Sequence
  Synthetic oligonucleotide; TTT chr11 5337713 5337734 5337730 5337735 +
ctttattttgagatgaagtctc

SEQ ID NO: 103055 - DNA, 22 bp, Artificial Sequence
  Synthetic oligonucleotide; TTC chr11 5337714 5337735 5337731 5337736 +
tttattttgagatgaagtctca

SEQ ID NO: 103056 - DNA, 22 bp, Artificial Sequence
  Synthetic oligonucleotide; CTT chr11 5337716 5337737 5337733 5337738 +
tattttgagatgaagtctcact

SEQ ID NO: 103057 - DNA, 22 bp, Artificial Sequence
  Synthetic oligonucleotide; TTT chr11 5337717 5337738 5337734 5337739 +
attttgagatgaagtctcactc

SEQ ID NO: 103058 - DNA, 22 bp, Artificial Sequence
  Synthetic oligonucleotide; TTA chr11 5337718 5337739 5337735 5337740 +
ttttgagatgaagtctcactct

SEQ ID NO: 103059 - DNA, 22 bp, Artificial Sequence
  Synthetic oligonucleotide; TTT chr11 5337721 5337742 5337738 5337743 +
tgagatgaagtctcactctttc

SEQ ID NO: 103060 - DNA, 22 bp, Artificial Sequence
  Synthetic oligonucleotide; TTT chr11 5337722 5337743 5337739 5337744 +
gagatgaagtctcactctttca

SEQ ID NO: 103061 - DNA, 22 bp, Artificial Sequence
  Synthetic oligonucleotide; TTG chr11 5337723 5337744 5337740 5337745 +
agatgaagtctcactctttcac

SEQ ID NO: 103062 - DNA, 22 bp, Artificial Sequence
  Synthetic oligonucleotide; CTC chr11 5337735 5337756 5337752 5337757 +
actctttcacccatgctagagt

SEQ ID NO: 103063 - DNA, 22 bp, Artificial Sequence
  Synthetic oligonucleotide; CTC chr11 5337739 5337760 5337756 5337761 +
tttcacccatgctagagtgcag

SEQ ID NO: 103064 - DNA, 22 bp, Artificial Sequence
  Synthetic oligonucleotide; CTT chr11 5337741 5337762 5337758 5337763 +
tcacccatgctagagtgcagtg

SEQ ID NO: 103065 - DNA, 22 bp, Artificial Sequence
  Synthetic oligonucleotide; TTT chr11 5337742 5337763 5337759 5337764 +
cacccatgctagagtgcagtgg

SEQ ID NO: 103066 - DNA, 22 bp, Artificial Sequence
  Synthetic oligonucleotide; TTC chr11 5337743 5337764 5337760 5337765 +
acccatgctagagtgcagtggt

SEQ ID NO: 103067 - DNA, 22 bp, Artificial Sequence
  Synthetic oligonucleotide; CTA chr11 5337753 5337774 5337770 5337775 +
gagtgcagtggtgcgatctcag

SEQ ID NO: 103068 - DNA, 22 bp, Artificial Sequence
  Synthetic oligonucleotide; CTC chr11 5337773 5337794 5337790 5337795 +
agctcactgcaacctctgcctc

SEQ ID NO: 103069 - DNA, 22 bp, Artificial Sequence
  Synthetic oligonucleotide; CTC chr11 5337778 5337799 5337795 5337800 +
actgcaacctctgcctcctggg

SEQ ID NO: 103070 - DNA, 22 bp, Artificial Sequence
  Synthetic oligonucleotide; CTG chr11 5337782 5337803 5337799 5337804 +
caacctctgcctcctgggttca

SEQ ID NO: 103071 - DNA, 22 bp, Artificial Sequence
  Synthetic oligonucleotide; CTC chr11 5337789 5337810 5337806 5337811 +
tgcctcctgggttcaagcaatt

SEQ ID NO: 103072 - DNA, 22 bp, Artificial Sequence
  Synthetic oligonucleotide; CTG chr11 5337791 5337812 5337808 5337813 +
cctcctgggttcaagcaattct

SEQ ID NO: 103073 - DNA, 22 bp, Artificial Sequence
  Synthetic oligonucleotide; CTC chr11 5337795 5337816 5337812 5337817 +
ctgggttcaagcaattctcctg

SEQ ID NO: 103074 - DNA, 22 bp, Artificial Sequence
  Synthetic oligonucleotide; CTG chr11 5337798 5337819 5337815 5337820 +
ggttcaagcaattctcctgcct

SEQ ID NO: 103075 - DNA, 22 bp, Artificial Sequence
  Synthetic oligonucleotide; TTC chr11 5337803 5337824 5337820 5337825 +
aagcaattctcctgcctcagcc

SEQ ID NO: 103076 - DNA, 22 bp, Artificial Sequence
  Synthetic oligonucleotide; TTC chr11 5337812 5337833 5337829 5337834 +
tcctgcctcagcctcctgagta

SEQ ID NO: 103077 - DNA, 22 bp, Artificial Sequence
  Synthetic oligonucleotide; CTC chr11 5337814 5337835 5337831 5337836 +
ctgcctcagcctcctgagtagc

SEQ ID NO: 103078 - DNA, 22 bp, Artificial Sequence
  Synthetic oligonucleotide; CTG chr11 5337817 5337838 5337834 5337839 +
cctcagcctcctgagtagctga

SEQ ID NO: 103079 - DNA, 22 bp, Artificial Sequence
  Synthetic oligonucleotide; CTC chr11 5337821 5337842 5337838 5337843 +
agcctcctgagtagctgagatt

SEQ ID NO: 103080 - DNA, 22 bp, Artificial Sequence
  Synthetic oligonucleotide; CTC chr11 5337827 5337848 5337844 5337849 +
ctgagtagctgagattacaggt

SEQ ID NO: 103081 - DNA, 22 bp, Artificial Sequence
  Synthetic oligonucleotide; CTG chr11 5337830 5337851 5337847 5337852 +
agtagctgagattacaggtacg

SEQ ID NO: 103082 - DNA, 22 bp, Artificial Sequence
  Synthetic oligonucleotide; CTG chr11 5337838 5337859 5337855 5337860 +
agattacaggtacgcaccacca

SEQ ID NO: 103083 - DNA, 22 bp, Artificial Sequence
  Synthetic oligonucleotide; TTA chr11 5337844 5337865 5337861 5337866 +
caggtacgcaccaccataccca

SEQ ID NO: 103084 - DNA, 22 bp, Artificial Sequence
  Synthetic oligonucleotide; TTT chr11 5337874 5337895 5337891 5337896 +
tttgtatttttagtagagatgg

SEQ ID NO: 103085 - DNA, 22 bp, Artificial Sequence
  Synthetic oligonucleotide; TTT chr11 5337875 5337896 5337892 5337897 +
ttgtatttttagtagagatgga

SEQ ID NO: 103086 - DNA, 22 bp, Artificial Sequence
  Synthetic oligonucleotide; TTT chr11 5337876 5337897 5337893 5337898 +
tgtatttttagtagagatggag

SEQ ID NO: 103087 - DNA, 22 bp, Artificial Sequence
  Synthetic oligonucleotide; TTT chr11 5337877 5337898 5337894 5337899 +
gtatttttagtagagatggagt

SEQ ID NO: 103088 - DNA, 22 bp, Artificial Sequence
  Synthetic oligonucleotide; TTG chr11 5337878 5337899 5337895 5337900 +
tatttttagtagagatggagtt

SEQ ID NO: 103089 - DNA, 22 bp, Artificial Sequence
  Synthetic oligonucleotide; TTT chr11 5337883 5337904 5337900 5337905 +
ttagtagagatggagtttcacc

SEQ ID NO: 103090 - DNA, 22 bp, Artificial Sequence
  Synthetic oligonucleotide; TTT chr11 5337884 5337905 5337901 5337906 +
tagtagagatggagtttcacca

SEQ ID NO: 103091 - DNA, 22 bp, Artificial Sequence
  Synthetic oligonucleotide; TTT chr11 5337885 5337906 5337902 5337907 +
agtagagatggagtttcaccat

SEQ ID NO: 103092 - DNA, 22 bp, Artificial Sequence
  Synthetic oligonucleotide; TTA chr11 5337886 5337907 5337903 5337908 +
gtagagatggagtttcaccatg

SEQ ID NO: 103093 - DNA, 22 bp, Artificial Sequence
  Synthetic oligonucleotide; TTT chr11 5337901 5337922 5337918 5337923 +
caccatgttggccaggctgctc

SEQ ID NO: 103094 - DNA, 22 bp, Artificial Sequence
  Synthetic oligonucleotide; TTC chr11 5337902 5337923 5337919 5337924 +
accatgttggccaggctgctct

SEQ ID NO: 103095 - DNA, 22 bp, Artificial Sequence
  Synthetic oligonucleotide; TTG chr11 5337911 5337932 5337928 5337933 +
gccaggctgctcttatactccc

SEQ ID NO: 103096 - DNA, 22 bp, Artificial Sequence
  Synthetic oligonucleotide; CTG chr11 5337920 5337941 5337937 5337942 +
ctcttatactccccacctcaag

SEQ ID NO: 103097 - DNA, 22 bp, Artificial Sequence
  Synthetic oligonucleotide; CTC chr11 5337923 5337944 5337940 5337945 +
ttatactccccacctcaagtga

SEQ ID NO: 103098 - DNA, 22 bp, Artificial Sequence
  Synthetic oligonucleotide; CTT chr11 5337925 5337946 5337942 5337947 +
atactccccacctcaagtgatc

SEQ ID NO: 103099 - DNA, 22 bp, Artificial Sequence
  Synthetic oligonucleotide; TTA chr11 5337926 5337947 5337943 5337948 +
tactccccacctcaagtgatcc

SEQ ID NO: 103100 - DNA, 22 bp, Artificial Sequence
  Synthetic oligonucleotide; CTC chr11 5337931 5337952 5337948 5337953 +
cccacctcaagtgatccaccca

SEQ ID NO: 103101 - DNA, 22 bp, Artificial Sequence
  Synthetic oligonucleotide; CTC chr11 5337939 5337960 5337956 5337961 +
aagtgatccacccaccttggcc

SEQ ID NO: 103102 - DNA, 22 bp, Artificial Sequence
  Synthetic oligonucleotide; CTT chr11 5337957 5337978 5337974 5337979 +
ggcctcccaaagtgctgggatt

SEQ ID NO: 103103 - DNA, 22 bp, Artificial Sequence
  Synthetic oligonucleotide; TTG chr11 5337958 5337979 5337975 5337980 +
gcctcccaaagtgctgggatta

SEQ ID NO: 103104 - DNA, 22 bp, Artificial Sequence
  Synthetic oligonucleotide; CTC chr11 5337963 5337984 5337980 5337985 +
ccaaagtgctgggattacaggc

SEQ ID NO: 103105 - DNA, 22 bp, Artificial Sequence
  Synthetic oligonucleotide; CTG chr11 5337974 5337995 5337991 5337996 +
ggattacaggcgtgagccacca

SEQ ID NO: 103106 - DNA, 22 bp, Artificial Sequence
  Synthetic oligonucleotide; TTA chr11 5337980 5338001 5337997 5338002 +
caggcgtgagccaccatgcccg

SEQ ID NO: 103107 - DNA, 22 bp, Artificial Sequence
  Synthetic oligonucleotide; CTC chr11 5338007 5338028 5338024 5338029 +
tttagtttaattagatctcatt

SEQ ID NO: 103108 - DNA, 22 bp, Artificial Sequence
  Synthetic oligonucleotide; CTT chr11 5338009 5338030 5338026 5338031 +
tagtttaattagatctcatttg

SEQ ID NO: 103109 - DNA, 22 bp, Artificial Sequence
  Synthetic oligonucleotide; TTT chr11 5338010 5338031 5338027 5338032 +
agtttaattagatctcatttga

SEQ ID NO: 103110 - DNA, 22 bp, Artificial Sequence
  Synthetic oligonucleotide; TTA chr11 5338011 5338032 5338028 5338033 +
gtttaattagatctcatttgac

SEQ ID NO: 103111 - DNA, 22 bp, Artificial Sequence
  Synthetic oligonucleotide; TTT chr11 5338015 5338036 5338032 5338037 +
aattagatctcatttgacagtg

SEQ ID NO: 103112 - DNA, 22 bp, Artificial Sequence
  Synthetic oligonucleotide; TTA chr11 5338016 5338037 5338033 5338038 +
attagatctcatttgacagtgt

SEQ ID NO: 103113 - DNA, 22 bp, Artificial Sequence
  Synthetic oligonucleotide; TTA chr11 5338020 5338041 5338037 5338042 +
gatctcatttgacagtgtttgc

SEQ ID NO: 103114 - DNA, 22 bp, Artificial Sequence
  Synthetic oligonucleotide; CTC chr11 5338026 5338047 5338043 5338048 +
atttgacagtgtttgcttttgt

SEQ ID NO: 103115 - DNA, 22 bp, Artificial Sequence
  Synthetic oligonucleotide; TTT chr11 5338030 5338051 5338047 5338052 +
gacagtgtttgcttttgttgca

SEQ ID NO: 103116 - DNA, 22 bp, Artificial Sequence
  Synthetic oligonucleotide; TTG chr11 5338031 5338052 5338048 5338053 +
acagtgtttgcttttgttgcaa

SEQ ID NO: 103117 - DNA, 22 bp, Artificial Sequence
  Synthetic oligonucleotide; TTT chr11 5338040 5338061 5338057 5338062 +
gcttttgttgcaattgtttttg

SEQ ID NO: 103118 - DNA, 22 bp, Artificial Sequence
  Synthetic oligonucleotide; TTG chr11 5338041 5338062 5338058 5338063 +
cttttgttgcaattgtttttga

SEQ ID NO: 103119 - DNA, 22 bp, Artificial Sequence
  Synthetic oligonucleotide; CTT chr11 5338044 5338065 5338061 5338066 +
ttgttgcaattgtttttgacat

SEQ ID NO: 103120 - DNA, 22 bp, Artificial Sequence
  Synthetic oligonucleotide; TTT chr11 5338045 5338066 5338062 5338067 +
tgttgcaattgtttttgacatt

SEQ ID NO: 103121 - DNA, 22 bp, Artificial Sequence
  Synthetic oligonucleotide; TTT chr11 5338046 5338067 5338063 5338068 +
gttgcaattgtttttgacattt

SEQ ID NO: 103122 - DNA, 22 bp, Artificial Sequence
  Synthetic oligonucleotide; TTG chr11 5338047 5338068 5338064 5338069 +
ttgcaattgtttttgacatttt

SEQ ID NO: 103123 - DNA, 22 bp, Artificial Sequence
  Synthetic oligonucleotide; TTG chr11 5338050 5338071 5338067 5338072 +
caattgtttttgacattttcat

SEQ ID NO: 103124 - DNA, 22 bp, Artificial Sequence
  Synthetic oligonucleotide; TTG chr11 5338056 5338077 5338073 5338078 +
tttttgacattttcatcatgaa

SEQ ID NO: 103125 - DNA, 22 bp, Artificial Sequence
  Synthetic oligonucleotide; TTT chr11 5338059 5338080 5338076 5338081 +
ttgacattttcatcatgaaatc

SEQ ID NO: 103126 - DNA, 22 bp, Artificial Sequence
  Synthetic oligonucleotide; TTT chr11 5338060 5338081 5338077 5338082 +
tgacattttcatcatgaaatct

SEQ ID NO: 103127 - DNA, 22 bp, Artificial Sequence
  Synthetic oligonucleotide; TTT chr11 5338061 5338082 5338078 5338083 +
gacattttcatcatgaaatctt

SEQ ID NO: 103128 - DNA, 22 bp, Artificial Sequence
  Synthetic oligonucleotide; TTG chr11 5338062 5338083 5338079 5338084 +
acattttcatcatgaaatcttt

SEQ ID NO: 103129 - DNA, 22 bp, Artificial Sequence
  Synthetic oligonucleotide; TTT chr11 5338068 5338089 5338085 5338090 +
tcatcatgaaatctttgcctgt

SEQ ID NO: 103130 - DNA, 22 bp, Artificial Sequence
  Synthetic oligonucleotide; TTT chr11 5338069 5338090 5338086 5338091 +
catcatgaaatctttgcctgtg

SEQ ID NO: 103131 - DNA, 22 bp, Artificial Sequence
  Synthetic oligonucleotide; TTC chr11 5338070 5338091 5338087 5338092 +
atcatgaaatctttgcctgtgt

SEQ ID NO: 103132 - DNA, 22 bp, Artificial Sequence
  Synthetic oligonucleotide; CTT chr11 5338083 5338104 5338100 5338105 +
tgcctgtgtctatgtccggaat

SEQ ID NO: 103133 - DNA, 22 bp, Artificial Sequence
  Synthetic oligonucleotide; TTT chr11 5338084 5338105 5338101 5338106 +
gcctgtgtctatgtccggaatg

SEQ ID NO: 103134 - DNA, 22 bp, Artificial Sequence
  Synthetic oligonucleotide; TTG chr11 5338085 5338106 5338102 5338107 +
cctgtgtctatgtccggaatgg

SEQ ID NO: 103135 - DNA, 22 bp, Artificial Sequence
  Synthetic oligonucleotide; CTG chr11 5338089 5338110 5338106 5338111 +
tgtctatgtccggaatggtatt

SEQ ID NO: 103136 - DNA, 22 bp, Artificial Sequence
  Synthetic oligonucleotide; CTA chr11 5338095 5338116 5338112 5338117 +
tgtccggaatggtattgcctag

SEQ ID NO: 103137 - DNA, 22 bp, Artificial Sequence
  Synthetic oligonucleotide; TTG chr11 5338112 5338133 5338129 5338134 +
cctaggttttcttctaaagttt

SEQ ID NO: 103138 - DNA, 22 bp, Artificial Sequence
  Synthetic oligonucleotide; CTA chr11 5338116 5338137 5338133 5338138 +
ggttttcttctaaagtttttat

SEQ ID NO: 103139 - DNA, 22 bp, Artificial Sequence
  Synthetic oligonucleotide; TTT chr11 5338121 5338142 5338138 5338143 +
tcttctaaagtttttatagttt

SEQ ID NO: 103140 - DNA, 22 bp, Artificial Sequence
  Synthetic oligonucleotide; TTT chr11 5338122 5338143 5338139 5338144 +
cttctaaagtttttatagtttt

SEQ ID NO: 103141 - DNA, 22 bp, Artificial Sequence
  Synthetic oligonucleotide; TTC chr11 5338123 5338144 5338140 5338145 +
ttctaaagtttttatagttttg

SEQ ID NO: 103142 - DNA, 22 bp, Artificial Sequence
  Synthetic oligonucleotide; CTT chr11 5338125 5338146 5338142 5338147 +
ctaaagtttttatagttttggg

SEQ ID NO: 103143 - DNA, 22 bp, Artificial Sequence
  Synthetic oligonucleotide; TTC chr11 5338126 5338147 5338143 5338148 +
taaagtttttatagttttgggt

SEQ ID NO: 103144 - DNA, 22 bp, Artificial Sequence
  Synthetic oligonucleotide; CTA chr11 5338128 5338149 5338145 5338150 +
aagtttttatagttttgggttt

SEQ ID NO: 103145 - DNA, 22 bp, Artificial Sequence
  Synthetic oligonucleotide; TTT chr11 5338134 5338155 5338151 5338156 +
ttatagttttgggttttacact

SEQ ID NO: 103146 - DNA, 22 bp, Artificial Sequence
  Synthetic oligonucleotide; TTT chr11 5338135 5338156 5338152 5338157 +
tatagttttgggttttacactt

SEQ ID NO: 103147 - DNA, 22 bp, Artificial Sequence
  Synthetic oligonucleotide; TTT chr11 5338136 5338157 5338153 5338158 +
atagttttgggttttacactta

SEQ ID NO: 103148 - DNA, 22 bp, Artificial Sequence
  Synthetic oligonucleotide; TTA chr11 5338137 5338158 5338154 5338159 +
tagttttgggttttacacttaa

SEQ ID NO: 103149 - DNA, 22 bp, Artificial Sequence
  Synthetic oligonucleotide; TTT chr11 5338143 5338164 5338160 5338165 +
tgggttttacacttaagtcttt

SEQ ID NO: 103150 - DNA, 22 bp, Artificial Sequence
  Synthetic oligonucleotide; TTT chr11 5338144 5338165 5338161 5338166 +
gggttttacacttaagtcttta

SEQ ID NO: 103151 - DNA, 22 bp, Artificial Sequence
  Synthetic oligonucleotide; TTG chr11 5338145 5338166 5338162 5338167 +
ggttttacacttaagtctttaa

SEQ ID NO: 103152 - DNA, 22 bp, Artificial Sequence
  Synthetic oligonucleotide; TTT chr11 5338150 5338171 5338167 5338172 +
tacacttaagtctttaatgcat

SEQ ID NO: 103153 - DNA, 22 bp, Artificial Sequence
  Synthetic oligonucleotide; TTT chr11 5338151 5338172 5338168 5338173 +
acacttaagtctttaatgcatc

SEQ ID NO: 103154 - DNA, 22 bp, Artificial Sequence
  Synthetic oligonucleotide; TTA chr11 5338152 5338173 5338169 5338174 +
cacttaagtctttaatgcatct

SEQ ID NO: 103155 - DNA, 22 bp, Artificial Sequence
  Synthetic oligonucleotide; CTT chr11 5338157 5338178 5338174 5338179 +
aagtctttaatgcatcttgagt

SEQ ID NO: 103156 - DNA, 22 bp, Artificial Sequence
  Synthetic oligonucleotide; TTA chr11 5338158 5338179 5338175 5338180 +
agtctttaatgcatcttgagtt

SEQ ID NO: 103157 - DNA, 22 bp, Artificial Sequence
  Synthetic oligonucleotide; CTT chr11 5338164 5338185 5338181 5338186 +
taatgcatcttgagttaattta

SEQ ID NO: 103158 - DNA, 22 bp, Artificial Sequence
  Synthetic oligonucleotide; TTT chr11 5338165 5338186 5338182 5338187 +
aatgcatcttgagttaatttat

SEQ ID NO: 103159 - DNA, 22 bp, Artificial Sequence
  Synthetic oligonucleotide; TTA chr11 5338166 5338187 5338183 5338188 +
atgcatcttgagttaatttatg

SEQ ID NO: 103160 - DNA, 22 bp, Artificial Sequence
  Synthetic oligonucleotide; CTT chr11 5338175 5338196 5338192 5338197 +
gagttaatttatgtataagatg

SEQ ID NO: 103161 - DNA, 22 bp, Artificial Sequence
  Synthetic oligonucleotide; TTG chr11 5338176 5338197 5338193 5338198 +
agttaatttatgtataagatgt

SEQ ID NO: 103162 - DNA, 22 bp, Artificial Sequence
  Synthetic oligonucleotide; TTA chr11 5338181 5338202 5338198 5338203 +
atttatgtataagatgtaagga

SEQ ID NO: 103163 - DNA, 22 bp, Artificial Sequence
  Synthetic oligonucleotide; TTT chr11 5338185 5338206 5338202 5338207 +
atgtataagatgtaaggaaggg

SEQ ID NO: 103164 - DNA, 22 bp, Artificial Sequence
  Synthetic oligonucleotide; TTA chr11 5338186 5338207 5338203 5338208 +
tgtataagatgtaaggaagggg

SEQ ID NO: 103165 - DNA, 22 bp, Artificial Sequence
  Synthetic oligonucleotide; TTT chr11 5338216 5338237 5338233 5338238 +
caattttctgcatatggctagc

SEQ ID NO: 103166 - DNA, 22 bp, Artificial Sequence
  Synthetic oligonucleotide; TTC chr11 5338217 5338238 5338234 5338239 +
aattttctgcatatggctagcc

SEQ ID NO: 103167 - DNA, 22 bp, Artificial Sequence
  Synthetic oligonucleotide; TTT chr11 5338222 5338243 5338239 5338244 +
tctgcatatggctagccagttc

SEQ ID NO: 103168 - DNA, 22 bp, Artificial Sequence
  Synthetic oligonucleotide; TTT chr11 5338223 5338244 5338240 5338245 +
ctgcatatggctagccagttct

SEQ ID NO: 103169 - DNA, 22 bp, Artificial Sequence
  Synthetic oligonucleotide; TTC chr11 5338224 5338245 5338241 5338246 +
tgcatatggctagccagttctc

SEQ ID NO: 103170 - DNA, 22 bp, Artificial Sequence
  Synthetic oligonucleotide; CTG chr11 5338226 5338247 5338243 5338248 +
catatggctagccagttctccc

SEQ ID NO: 103171 - DNA, 22 bp, Artificial Sequence
  Synthetic oligonucleotide; CTA chr11 5338236 5338257 5338253 5338258 +
gccagttctcccagcacaattt

SEQ ID NO: 103172 - DNA, 22 bp, Artificial Sequence
  Synthetic oligonucleotide; TTC chr11 5338244 5338265 5338261 5338266 +
tcccagcacaatttataaaata

SEQ ID NO: 103173 - DNA, 22 bp, Artificial Sequence
  Synthetic oligonucleotide; CTC chr11 5338246 5338267 5338263 5338268 +
ccagcacaatttataaaatagg

SEQ ID NO: 103174 - DNA, 22 bp, Artificial Sequence
  Synthetic oligonucleotide; TTT chr11 5338258 5338279 5338275 5338280 +
ataaaatagggaatcccttccc

SEQ ID NO: 103175 - DNA, 22 bp, Artificial Sequence
  Synthetic oligonucleotide; TTA chr11 5338259 5338280 5338276 5338281 +
taaaatagggaatcccttcccc

SEQ ID NO: 103176 - DNA, 22 bp, Artificial Sequence
  Synthetic oligonucleotide; CTT chr11 5338277 5338298 5338294 5338299 +
ccccattacttgtttttaccag

SEQ ID NO: 103177 - DNA, 22 bp, Artificial Sequence
  Synthetic oligonucleotide; TTC chr11 5338278 5338299 5338295 5338300 +
cccattacttgtttttaccagg

SEQ ID NO: 103178 - DNA, 22 bp, Artificial Sequence
  Synthetic oligonucleotide; TTA chr11 5338285 5338306 5338302 5338307 +
cttgtttttaccaggtttgttg

SEQ ID NO: 103179 - DNA, 22 bp, Artificial Sequence
  Synthetic oligonucleotide; CTT chr11 5338288 5338309 5338305 5338310 +
gtttttaccaggtttgttgaag

SEQ ID NO: 103180 - DNA, 22 bp, Artificial Sequence
  Synthetic oligonucleotide; TTG chr11 5338289 5338310 5338306 5338311 +
tttttaccaggtttgttgaaga

SEQ ID NO: 103181 - DNA, 22 bp, Artificial Sequence
  Synthetic oligonucleotide; TTT chr11 5338292 5338313 5338309 5338314 +
ttaccaggtttgttgaagatca

SEQ ID NO: 103182 - DNA, 22 bp, Artificial Sequence
  Synthetic oligonucleotide; TTT chr11 5338293 5338314 5338310 5338315 +
taccaggtttgttgaagatcag

SEQ ID NO: 103183 - DNA, 22 bp, Artificial Sequence
  Synthetic oligonucleotide; TTT chr11 5338294 5338315 5338311 5338316 +
accaggtttgttgaagatcaga

SEQ ID NO: 103184 - DNA, 22 bp, Artificial Sequence
  Synthetic oligonucleotide; TTA chr11 5338295 5338316 5338312 5338317 +
ccaggtttgttgaagatcagat

SEQ ID NO: 103185 - DNA, 22 bp, Artificial Sequence
  Synthetic oligonucleotide; TTT chr11 5338303 5338324 5338320 5338325 +
gttgaagatcagattgtttcag

SEQ ID NO: 103186 - DNA, 22 bp, Artificial Sequence
  Synthetic oligonucleotide; TTG chr11 5338304 5338325 5338321 5338326 +
ttgaagatcagattgtttcaga

SEQ ID NO: 103187 - DNA, 22 bp, Artificial Sequence
  Synthetic oligonucleotide; TTG chr11 5338307 5338328 5338324 5338329 +
aagatcagattgtttcagatgc

SEQ ID NO: 103188 - DNA, 22 bp, Artificial Sequence
  Synthetic oligonucleotide; TTG chr11 5338319 5338340 5338336 5338341 +
tttcagatgcgcggtcttactt

SEQ ID NO: 103189 - DNA, 22 bp, Artificial Sequence
  Synthetic oligonucleotide; TTT chr11 5338322 5338343 5338339 5338344 +
cagatgcgcggtcttacttctg

SEQ ID NO: 103190 - DNA, 22 bp, Artificial Sequence
  Synthetic oligonucleotide; TTC chr11 5338323 5338344 5338340 5338345 +
agatgcgcggtcttacttctga

SEQ ID NO: 103191 - DNA, 22 bp, Artificial Sequence
  Synthetic oligonucleotide; CTT chr11 5338337 5338358 5338354 5338359 +
acttctgagttctccattctgt

SEQ ID NO: 103192 - DNA, 22 bp, Artificial Sequence
  Synthetic oligonucleotide; TTA chr11 5338338 5338359 5338355 5338360 +
cttctgagttctccattctgtt

SEQ ID NO: 103193 - DNA, 22 bp, Artificial Sequence
  Synthetic oligonucleotide; CTT chr11 5338341 5338362 5338358 5338363 +
ctgagttctccattctgttcca

SEQ ID NO: 103194 - DNA, 22 bp, Artificial Sequence
  Synthetic oligonucleotide; TTC chr11 5338342 5338363 5338359 5338364 +
tgagttctccattctgttccat

SEQ ID NO: 103195 - DNA, 22 bp, Artificial Sequence
  Synthetic oligonucleotide; CTG chr11 5338344 5338365 5338361 5338366 +
agttctccattctgttccatta

SEQ ID NO: 103196 - DNA, 22 bp, Artificial Sequence
  Synthetic oligonucleotide; TTC chr11 5338349 5338370 5338366 5338371 +
tccattctgttccattagtcag

SEQ ID NO: 103197 - DNA, 22 bp, Artificial Sequence
  Synthetic oligonucleotide; CTC chr11 5338351 5338372 5338368 5338373 +
cattctgttccattagtcagtg

SEQ ID NO: 103198 - DNA, 22 bp, Artificial Sequence
  Synthetic oligonucleotide; TTC chr11 5338356 5338377 5338373 5338378 +
tgttccattagtcagtgtgtct

SEQ ID NO: 103199 - DNA, 22 bp, Artificial Sequence
  Synthetic oligonucleotide; CTG chr11 5338358 5338379 5338375 5338380 +
ttccattagtcagtgtgtctgt

SEQ ID NO: 103200 - DNA, 22 bp, Artificial Sequence
  Synthetic oligonucleotide; TTC chr11 5338361 5338382 5338378 5338383 +
cattagtcagtgtgtctgtttg

SEQ ID NO: 103201 - DNA, 22 bp, Artificial Sequence
  Synthetic oligonucleotide; TTA chr11 5338366 5338387 5338383 5338388 +
gtcagtgtgtctgtttggtatc

SEQ ID NO: 103202 - DNA, 22 bp, Artificial Sequence
  Synthetic oligonucleotide; CTG chr11 5338379 5338400 5338396 5338401 +
tttggtatcagtaccatgctgt

SEQ ID NO: 103203 - DNA, 22 bp, Artificial Sequence
  Synthetic oligonucleotide; TTT chr11 5338382 5338403 5338399 5338404 +
ggtatcagtaccatgctgtttc

SEQ ID NO: 103204 - DNA, 22 bp, Artificial Sequence
  Synthetic oligonucleotide; TTG chr11 5338383 5338404 5338400 5338405 +
gtatcagtaccatgctgtttca

SEQ ID NO: 103205 - DNA, 22 bp, Artificial Sequence
  Synthetic oligonucleotide; CTG chr11 5338400 5338421 5338417 5338422 +
tttcagttagttactgtcacct

SEQ ID NO: 103206 - DNA, 22 bp, Artificial Sequence
  Synthetic oligonucleotide; TTT chr11 5338403 5338424 5338420 5338425 +
cagttagttactgtcaccttgt

SEQ ID NO: 103207 - DNA, 22 bp, Artificial Sequence
  Synthetic oligonucleotide; TTC chr11 5338404 5338425 5338421 5338426 +
agttagttactgtcaccttgta

SEQ ID NO: 103208 - DNA, 22 bp, Artificial Sequence
  Synthetic oligonucleotide; TTA chr11 5338409 5338430 5338426 5338431 +
gttactgtcaccttgtagtata

SEQ ID NO: 103209 - DNA, 22 bp, Artificial Sequence
  Synthetic oligonucleotide; TTA chr11 5338413 5338434 5338430 5338435 +
ctgtcaccttgtagtataattt

SEQ ID NO: 103210 - DNA, 22 bp, Artificial Sequence
  Synthetic oligonucleotide; CTG chr11 5338416 5338437 5338433 5338438 +
tcaccttgtagtataatttgaa

SEQ ID NO: 103211 - DNA, 22 bp, Artificial Sequence
  Synthetic oligonucleotide; CTT chr11 5338423 5338444 5338440 5338445 +
gtagtataatttgaagttgggt

SEQ ID NO: 103212 - DNA, 22 bp, Artificial Sequence
  Synthetic oligonucleotide; TTG chr11 5338424 5338445 5338441 5338446 +
tagtataatttgaagttgggta

SEQ ID NO: 103213 - DNA, 22 bp, Artificial Sequence
  Synthetic oligonucleotide; TTT chr11 5338435 5338456 5338452 5338457 +
gaagttgggtaaatcctgttga

SEQ ID NO: 103214 - DNA, 22 bp, Artificial Sequence
  Synthetic oligonucleotide; TTG chr11 5338436 5338457 5338453 5338458 +
aagttgggtaaatcctgttgat

SEQ ID NO: 103215 - DNA, 22 bp, Artificial Sequence
  Synthetic oligonucleotide; TTG chr11 5338442 5338463 5338459 5338464 +
ggtaaatcctgttgattctatt

SEQ ID NO: 103216 - DNA, 22 bp, Artificial Sequence
  Synthetic oligonucleotide; CTG chr11 5338453 5338474 5338470 5338475 +
ttgattctatttttctggagaa

SEQ ID NO: 103217 - DNA, 22 bp, Artificial Sequence
  Synthetic oligonucleotide; TTG chr11 5338456 5338477 5338473 5338478 +
attctatttttctggagaacca

SEQ ID NO: 103218 - DNA, 22 bp, Artificial Sequence
  Synthetic oligonucleotide; TTC chr11 5338460 5338481 5338477 5338482 +
tatttttctggagaaccatgac

SEQ ID NO: 103219 - DNA, 22 bp, Artificial Sequence
  Synthetic oligonucleotide; CTA chr11 5338462 5338483 5338479 5338484 +
tttttctggagaaccatgacta

SEQ ID NO: 103220 - DNA, 22 bp, Artificial Sequence
  Synthetic oligonucleotide; TTT chr11 5338465 5338486 5338482 5338487 +
ttctggagaaccatgactaaca

SEQ ID NO: 103221 - DNA, 22 bp, Artificial Sequence
  Synthetic oligonucleotide; TTT chr11 5338466 5338487 5338483 5338488 +
tctggagaaccatgactaacat

SEQ ID NO: 103222 - DNA, 22 bp, Artificial Sequence
  Synthetic oligonucleotide; TTT chr11 5338467 5338488 5338484 5338489 +
ctggagaaccatgactaacata

SEQ ID NO: 103223 - DNA, 22 bp, Artificial Sequence
  Synthetic oligonucleotide; TTC chr11 5338468 5338489 5338485 5338490 +
tggagaaccatgactaacatag

SEQ ID NO: 103224 - DNA, 22 bp, Artificial Sequence
  Synthetic oligonucleotide; CTG chr11 5338470 5338491 5338487 5338492 +
gagaaccatgactaacataggg

SEQ ID NO: 103225 - DNA, 22 bp, Artificial Sequence
  Synthetic oligonucleotide; CTA chr11 5338484 5338505 5338501 5338506 +
acatagggccatctatttttga

SEQ ID NO: 103226 - DNA, 22 bp, Artificial Sequence
  Synthetic oligonucleotide; CTA chr11 5338499 5338520 5338516 5338521 +
tttttgaggcactttgtgacta

SEQ ID NO: 103227 - DNA, 22 bp, Artificial Sequence
  Synthetic oligonucleotide; TTT chr11 5338502 5338523 5338519 5338524 +
ttgaggcactttgtgactaatc

SEQ ID NO: 103228 - DNA, 22 bp, Artificial Sequence
  Synthetic oligonucleotide; TTT chr11 5338503 5338524 5338520 5338525 +
tgaggcactttgtgactaatca

SEQ ID NO: 103229 - DNA, 22 bp, Artificial Sequence
  Synthetic oligonucleotide; TTT chr11 5338504 5338525 5338521 5338526 +
gaggcactttgtgactaatcac

SEQ ID NO: 103230 - DNA, 22 bp, Artificial Sequence
  Synthetic oligonucleotide; TTG chr11 5338505 5338526 5338522 5338527 +
aggcactttgtgactaatcact

SEQ ID NO: 103231 - DNA, 22 bp, Artificial Sequence
  Synthetic oligonucleotide; CTT chr11 5338513 5338534 5338530 5338535 +
tgtgactaatcactgtcatctg

SEQ ID NO: 103232 - DNA, 22 bp, Artificial Sequence
  Synthetic oligonucleotide; TTT chr11 5338514 5338535 5338531 5338536 +
gtgactaatcactgtcatctgt

SEQ ID NO: 103233 - DNA, 22 bp, Artificial Sequence
  Synthetic oligonucleotide; TTG chr11 5338515 5338536 5338532 5338537 +
tgactaatcactgtcatctgtc

SEQ ID NO: 103234 - DNA, 22 bp, Artificial Sequence
  Synthetic oligonucleotide; CTA chr11 5338521 5338542 5338538 5338543 +
atcactgtcatctgtcagtttg

SEQ ID NO: 103235 - DNA, 22 bp, Artificial Sequence
  Synthetic oligonucleotide; CTG chr11 5338528 5338549 5338545 5338550 +
tcatctgtcagtttggtggcat

SEQ ID NO: 103236 - DNA, 22 bp, Artificial Sequence
  Synthetic oligonucleotide; CTG chr11 5338535 5338556 5338552 5338557 +
tcagtttggtggcatgtacttg

SEQ ID NO: 103237 - DNA, 22 bp, Artificial Sequence
  Synthetic oligonucleotide; TTT chr11 5338542 5338563 5338559 5338564 +
ggtggcatgtacttgaaatcta

SEQ ID NO: 103238 - DNA, 22 bp, Artificial Sequence
  Synthetic oligonucleotide; TTG chr11 5338543 5338564 5338560 5338565 +
gtggcatgtacttgaaatctag

SEQ ID NO: 103239 - DNA, 22 bp, Artificial Sequence
  Synthetic oligonucleotide; CTT chr11 5338556 5338577 5338573 5338578 +
gaaatctagggacataaactcc

SEQ ID NO: 103240 - DNA, 22 bp, Artificial Sequence
  Synthetic oligonucleotide; TTG chr11 5338557 5338578 5338574 5338579 +
aaatctagggacataaactcct

SEQ ID NO: 103241 - DNA, 22 bp, Artificial Sequence
  Synthetic oligonucleotide; CTA chr11 5338564 5338585 5338581 5338586 +
gggacataaactcctaaatttc

SEQ ID NO: 103242 - DNA, 22 bp, Artificial Sequence
  Synthetic oligonucleotide; CTC chr11 5338577 5338598 5338594 5338599 +
ctaaatttcccataaaataaat

SEQ ID NO: 103243 - DNA, 22 bp, Artificial Sequence
  Synthetic oligonucleotide; CTA chr11 5338580 5338601 5338597 5338602 +
aatttcccataaaataaatttt

SEQ ID NO: 103244 - DNA, 22 bp, Artificial Sequence
  Synthetic oligonucleotide; TTT chr11 5338585 5338606 5338602 5338607 +
cccataaaataaattttgtcta

SEQ ID NO: 103245 - DNA, 22 bp, Artificial Sequence
  Synthetic oligonucleotide; TTC chr11 5338586 5338607 5338603 5338608 +
ccataaaataaattttgtctat

SEQ ID NO: 103246 - DNA, 22 bp, Artificial Sequence
  Synthetic oligonucleotide; TTT chr11 5338601 5338622 5338618 5338623 +
tgtctatgagtttattaataac

SEQ ID NO: 103247 - DNA, 22 bp, Artificial Sequence
  Synthetic oligonucleotide; TTT chr11 5338602 5338623 5338619 5338624 +
gtctatgagtttattaataaca

SEQ ID NO: 103248 - DNA, 22 bp, Artificial Sequence
  Synthetic oligonucleotide; TTG chr11 5338603 5338624 5338620 5338625 +
tctatgagtttattaataacaa

SEQ ID NO: 103249 - DNA, 22 bp, Artificial Sequence
  Synthetic oligonucleotide; CTA chr11 5338607 5338628 5338624 5338629 +
tgagtttattaataacaatgac

SEQ ID NO: 103250 - DNA, 22 bp, Artificial Sequence
  Synthetic oligonucleotide; TTT chr11 5338614 5338635 5338631 5338636 +
attaataacaatgactgtgtct

SEQ ID NO: 103251 - DNA, 22 bp, Artificial Sequence
  Synthetic oligonucleotide; TTA chr11 5338615 5338636 5338632 5338637 +
ttaataacaatgactgtgtcta

SEQ ID NO: 103252 - DNA, 22 bp, Artificial Sequence
  Synthetic oligonucleotide; TTA chr11 5338618 5338639 5338635 5338640 +
ataacaatgactgtgtctaagg

SEQ ID NO: 103253 - DNA, 22 bp, Artificial Sequence
  Synthetic oligonucleotide; CTG chr11 5338631 5338652 5338648 5338653 +
tgtctaaggatttaggctataa

SEQ ID NO: 103254 - DNA, 22 bp, Artificial Sequence
  Synthetic oligonucleotide; CTA chr11 5338637 5338658 5338654 5338659 +
aggatttaggctataaaatcaa

SEQ ID NO: 103255 - DNA, 22 bp, Artificial Sequence
  Synthetic oligonucleotide; TTT chr11 5338644 5338665 5338661 5338666 +
aggctataaaatcaaaaacaga

SEQ ID NO: 103256 - DNA, 22 bp, Artificial Sequence
  Synthetic oligonucleotide; TTA chr11 5338645 5338666 5338662 5338667 +
ggctataaaatcaaaaacagat

SEQ ID NO: 103257 - DNA, 22 bp, Artificial Sequence
  Synthetic oligonucleotide; CTA chr11 5338650 5338671 5338667 5338672 +
taaaatcaaaaacagatttaca

SEQ ID NO: 103258 - DNA, 22 bp, Artificial Sequence
  Synthetic oligonucleotide; TTT chr11 5338669 5338690 5338686 5338691 +
acattctttaattggacatgga

SEQ ID NO: 103259 - DNA, 22 bp, Artificial Sequence
  Synthetic oligonucleotide; TTA chr11 5338670 5338691 5338687 5338692 +
cattctttaattggacatggag

SEQ ID NO: 103260 - DNA, 22 bp, Artificial Sequence
  Synthetic oligonucleotide; TTC chr11 5338675 5338696 5338692 5338697 +
tttaattggacatggagacctc

SEQ ID NO: 103261 - DNA, 22 bp, Artificial Sequence
  Synthetic oligonucleotide; CTT chr11 5338677 5338698 5338694 5338699 +
taattggacatggagacctctg

SEQ ID NO: 103262 - DNA, 22 bp, Artificial Sequence
  Synthetic oligonucleotide; TTT chr11 5338678 5338699 5338695 5338700 +
aattggacatggagacctctgg

SEQ ID NO: 103263 - DNA, 22 bp, Artificial Sequence
  Synthetic oligonucleotide; TTA chr11 5338679 5338700 5338696 5338701 +
attggacatggagacctctggg

SEQ ID NO: 103264 - DNA, 22 bp, Artificial Sequence
  Synthetic oligonucleotide; TTG chr11 5338683 5338704 5338700 5338705 +
gacatggagacctctgggtcct

SEQ ID NO: 103265 - DNA, 22 bp, Artificial Sequence
  Synthetic oligonucleotide; CTC chr11 5338697 5338718 5338714 5338719 +
tgggtccttaatcatttctaat

SEQ ID NO: 103266 - DNA, 22 bp, Artificial Sequence
  Synthetic oligonucleotide; CTG chr11 5338699 5338720 5338716 5338721 +
ggtccttaatcatttctaatca

SEQ ID NO: 103267 - DNA, 22 bp, Artificial Sequence
  Synthetic oligonucleotide; CTT chr11 5338706 5338727 5338723 5338728 +
aatcatttctaatcatccttgc

SEQ ID NO: 103268 - DNA, 22 bp, Artificial Sequence
  Synthetic oligonucleotide; TTA chr11 5338707 5338728 5338724 5338729 +
atcatttctaatcatccttgct

SEQ ID NO: 103269 - DNA, 22 bp, Artificial Sequence
  Synthetic oligonucleotide; TTT chr11 5338714 5338735 5338731 5338736 +
ctaatcatccttgctgcccaat

SEQ ID NO: 103270 - DNA, 22 bp, Artificial Sequence
  Synthetic oligonucleotide; TTC chr11 5338715 5338736 5338732 5338737 +
taatcatccttgctgcccaatt

SEQ ID NO: 103271 - DNA, 22 bp, Artificial Sequence
  Synthetic oligonucleotide; CTA chr11 5338717 5338738 5338734 5338739 +
atcatccttgctgcccaattta

SEQ ID NO: 103272 - DNA, 22 bp, Artificial Sequence
  Synthetic oligonucleotide; CTT chr11 5338726 5338747 5338743 5338748 +
gctgcccaatttaatactcata

SEQ ID NO: 103273 - DNA, 22 bp, Artificial Sequence
  Synthetic oligonucleotide; TTG chr11 5338727 5338748 5338744 5338749 +
ctgcccaatttaatactcatat

SEQ ID NO: 103274 - DNA, 22 bp, Artificial Sequence
  Synthetic oligonucleotide; CTG chr11 5338730 5338751 5338747 5338752 +
cccaatttaatactcatataat

SEQ ID NO: 103275 - DNA, 22 bp, Artificial Sequence
  Synthetic oligonucleotide; TTT chr11 5338738 5338759 5338755 5338760 +
aatactcatataatctagtaag

SEQ ID NO: 103276 - DNA, 22 bp, Artificial Sequence
  Synthetic oligonucleotide; TTA chr11 5338739 5338760 5338756 5338761 +
atactcatataatctagtaagt

SEQ ID NO: 103277 - DNA, 22 bp, Artificial Sequence
  Synthetic oligonucleotide; CTC chr11 5338745 5338766 5338762 5338767 +
atataatctagtaagtatcttt

SEQ ID NO: 103278 - DNA, 22 bp, Artificial Sequence
  Synthetic oligonucleotide; CTA chr11 5338755 5338776 5338772 5338777 +
gtaagtatctttaaatatatca

SEQ ID NO: 103279 - DNA, 22 bp, Artificial Sequence
  Synthetic oligonucleotide; CTT chr11 5338766 5338787 5338783 5338788 +
taaatatatcacctttcattta

SEQ ID NO: 103280 - DNA, 22 bp, Artificial Sequence
  Synthetic oligonucleotide; TTT chr11 5338767 5338788 5338784 5338789 +
aaatatatcacctttcatttac

SEQ ID NO: 103281 - DNA, 22 bp, Artificial Sequence
  Synthetic oligonucleotide; TTA chr11 5338768 5338789 5338785 5338790 +
aatatatcacctttcatttacc

SEQ ID NO: 103282 - DNA, 22 bp, Artificial Sequence
  Synthetic oligonucleotide; CTT chr11 5338781 5338802 5338798 5338803 +
tcatttaccctataaaaatctg

SEQ ID NO: 103283 - DNA, 22 bp, Artificial Sequence
  Synthetic oligonucleotide; TTT chr11 5338782 5338803 5338799 5338804 +
catttaccctataaaaatctgc

SEQ ID NO: 103284 - DNA, 22 bp, Artificial Sequence
  Synthetic oligonucleotide; TTC chr11 5338783 5338804 5338800 5338805 +
atttaccctataaaaatctgca

SEQ ID NO: 103285 - DNA, 22 bp, Artificial Sequence
  Synthetic oligonucleotide; TTT chr11 5338787 5338808 5338804 5338809 +
accctataaaaatctgcatctc

SEQ ID NO: 103286 - DNA, 22 bp, Artificial Sequence
  Synthetic oligonucleotide; TTA chr11 5338788 5338809 5338805 5338810 +
ccctataaaaatctgcatctct

SEQ ID NO: 103287 - DNA, 22 bp, Artificial Sequence
  Synthetic oligonucleotide; CTA chr11 5338793 5338814 5338810 5338815 +
taaaaatctgcatctctggtga

SEQ ID NO: 103288 - DNA, 22 bp, Artificial Sequence
  Synthetic oligonucleotide; CTG chr11 5338803 5338824 5338820 5338825 +
catctctggtgaaggaacccag

SEQ ID NO: 103289 - DNA, 22 bp, Artificial Sequence
  Synthetic oligonucleotide; CTC chr11 5338809 5338830 5338826 5338831 +
tggtgaaggaacccagcaatta

SEQ ID NO: 103290 - DNA, 22 bp, Artificial Sequence
  Synthetic oligonucleotide; CTG chr11 5338811 5338832 5338828 5338833 +
gtgaaggaacccagcaattatt

SEQ ID NO: 103291 - DNA, 22 bp, Artificial Sequence
  Synthetic oligonucleotide; TTA chr11 5338831 5338852 5338848 5338853 +
tttgttaatgagaggaataaag

SEQ ID NO: 103292 - DNA, 22 bp, Artificial Sequence
  Synthetic oligonucleotide; TTT chr11 5338834 5338855 5338851 5338856 +
gttaatgagaggaataaagttc

SEQ ID NO: 103293 - DNA, 22 bp, Artificial Sequence
  Synthetic oligonucleotide; TTG chr11 5338835 5338856 5338852 5338857 +
ttaatgagaggaataaagttca

SEQ ID NO: 103294 - DNA, 22 bp, Artificial Sequence
  Synthetic oligonucleotide; TTA chr11 5338838 5338859 5338855 5338860 +
atgagaggaataaagttcatct

SEQ ID NO: 103295 - DNA, 22 bp, Artificial Sequence
  Synthetic oligonucleotide; TTC chr11 5338856 5338877 5338873 5338878 +
atcttccccttatctagtataa

SEQ ID NO: 103296 - DNA, 22 bp, Artificial Sequence
  Synthetic oligonucleotide; CTT chr11 5338861 5338882 5338878 5338883 +
ccccttatctagtataaattca

SEQ ID NO: 103297 - DNA, 22 bp, Artificial Sequence
  Synthetic oligonucleotide; TTC chr11 5338862 5338883 5338879 5338884 +
cccttatctagtataaattcat

SEQ ID NO: 103298 - DNA, 22 bp, Artificial Sequence
  Synthetic oligonucleotide; CTT chr11 5338867 5338888 5338884 5338889 +
atctagtataaattcattttat

SEQ ID NO: 103299 - DNA, 22 bp, Artificial Sequence
  Synthetic oligonucleotide; TTA chr11 5338868 5338889 5338885 5338890 +
tctagtataaattcattttata

SEQ ID NO: 103300 - DNA, 22 bp, Artificial Sequence
  Synthetic oligonucleotide; CTA chr11 5338872 5338893 5338889 5338894 +
gtataaattcattttatatggg

SEQ ID NO: 103301 - DNA, 22 bp, Artificial Sequence
  Synthetic oligonucleotide; TTC chr11 5338882 5338903 5338899 5338904 +
attttatatgggaggaaaagtg

SEQ ID NO: 103302 - DNA, 22 bp, Artificial Sequence
  Synthetic oligonucleotide; TTT chr11 5338886 5338907 5338903 5338908 +
tatatgggaggaaaagtgatct

SEQ ID NO: 103303 - DNA, 22 bp, Artificial Sequence
  Synthetic oligonucleotide; TTT chr11 5338887 5338908 5338904 5338909 +
atatgggaggaaaagtgatctg

SEQ ID NO: 103304 - DNA, 22 bp, Artificial Sequence
  Synthetic oligonucleotide; TTA chr11 5338888 5338909 5338905 5338910 +
tatgggaggaaaagtgatctgt

SEQ ID NO: 103305 - DNA, 22 bp, Artificial Sequence
  Synthetic oligonucleotide; CTG chr11 5338909 5338930 5338926 5338931 +
taaactcattagaccatacata

SEQ ID NO: 103306 - DNA, 22 bp, Artificial Sequence
  Synthetic oligonucleotide; CTC chr11 5338916 5338937 5338933 5338938 +
attagaccatacatattttttc

SEQ ID NO: 103307 - DNA, 22 bp, Artificial Sequence
  Synthetic oligonucleotide; TTA chr11 5338920 5338941 5338937 5338942 +
gaccatacatattttttcagtg

SEQ ID NO: 103308 - DNA, 22 bp, Artificial Sequence
  Synthetic oligonucleotide; TTT chr11 5338934 5338955 5338951 5338956 +
tttcagtgtgtctctaagattc

SEQ ID NO: 103309 - DNA, 22 bp, Artificial Sequence
  Synthetic oligonucleotide; TTT chr11 5338935 5338956 5338952 5338957 +
ttcagtgtgtctctaagattct

SEQ ID NO: 103310 - DNA, 22 bp, Artificial Sequence
  Synthetic oligonucleotide; TTT chr11 5338936 5338957 5338953 5338958 +
tcagtgtgtctctaagattctt

SEQ ID NO: 103311 - DNA, 22 bp, Artificial Sequence
  Synthetic oligonucleotide; TTT chr11 5338937 5338958 5338954 5338959 +
cagtgtgtctctaagattcttc

SEQ ID NO: 103312 - DNA, 22 bp, Artificial Sequence
  Synthetic oligonucleotide; TTC chr11 5338938 5338959 5338955 5338960 +
agtgtgtctctaagattcttcc

SEQ ID NO: 103313 - DNA, 22 bp, Artificial Sequence
  Synthetic oligonucleotide; CTC chr11 5338948 5338969 5338965 5338970 +
taagattcttccacgtcttctt

SEQ ID NO: 103314 - DNA, 22 bp, Artificial Sequence
  Synthetic oligonucleotide; CTA chr11 5338950 5338971 5338967 5338972 +
agattcttccacgtcttcttaa

SEQ ID NO: 103315 - DNA, 22 bp, Artificial Sequence
  Synthetic oligonucleotide; TTC chr11 5338956 5338977 5338973 5338978 +
ttccacgtcttcttaatcattt

SEQ ID NO: 103316 - DNA, 22 bp, Artificial Sequence
  Synthetic oligonucleotide; CTT chr11 5338958 5338979 5338975 5338980 +
ccacgtcttcttaatcatttct

SEQ ID NO: 103317 - DNA, 22 bp, Artificial Sequence
  Synthetic oligonucleotide; TTC chr11 5338959 5338980 5338976 5338981 +
cacgtcttcttaatcatttcta

SEQ ID NO: 103318 - DNA, 22 bp, Artificial Sequence
  Synthetic oligonucleotide; CTT chr11 5338967 5338988 5338984 5338989 +
cttaatcatttctaagattggc

SEQ ID NO: 103319 - DNA, 22 bp, Artificial Sequence
  Synthetic oligonucleotide; TTC chr11 5338968 5338989 5338985 5338990 +
ttaatcatttctaagattggct

SEQ ID NO: 103320 - DNA, 22 bp, Artificial Sequence
  Synthetic oligonucleotide; CTT chr11 5338970 5338991 5338987 5338992 +
aatcatttctaagattggctta

SEQ ID NO: 103321 - DNA, 22 bp, Artificial Sequence
  Synthetic oligonucleotide; TTA chr11 5338971 5338992 5338988 5338993 +
atcatttctaagattggcttag

SEQ ID NO: 103322 - DNA, 22 bp, Artificial Sequence
  Synthetic oligonucleotide; TTT chr11 5338978 5338999 5338995 5339000 +
ctaagattggcttagtctacag

SEQ ID NO: 103323 - DNA, 22 bp, Artificial Sequence
  Synthetic oligonucleotide; TTC chr11 5338979 5339000 5338996 5339001 +
taagattggcttagtctacaga

SEQ ID NO: 103324 - DNA, 22 bp, Artificial Sequence
  Synthetic oligonucleotide; CTA chr11 5338981 5339002 5338998 5339003 +
agattggcttagtctacagaaa

SEQ ID NO: 103325 - DNA, 22 bp, Artificial Sequence
  Synthetic oligonucleotide; TTG chr11 5338987 5339008 5339004 5339009 +
gcttagtctacagaaatgcaca

SEQ ID NO: 103326 - DNA, 22 bp, Artificial Sequence
  Synthetic oligonucleotide; CTT chr11 5338991 5339012 5339008 5339013 +
agtctacagaaatgcacactta

SEQ ID NO: 103327 - DNA, 22 bp, Artificial Sequence
  Synthetic oligonucleotide; TTA chr11 5338992 5339013 5339009 5339014 +
gtctacagaaatgcacacttag

SEQ ID NO: 103328 - DNA, 22 bp, Artificial Sequence
  Synthetic oligonucleotide; CTA chr11 5338997 5339018 5339014 5339019 +
cagaaatgcacacttagccttt

SEQ ID NO: 103329 - DNA, 22 bp, Artificial Sequence
  Synthetic oligonucleotide; CTT chr11 5339012 5339033 5339029 5339034 +
agcctttcatttcctgactcaa

SEQ ID NO: 103330 - DNA, 22 bp, Artificial Sequence
  Synthetic oligonucleotide; TTA chr11 5339013 5339034 5339030 5339035 +
gcctttcatttcctgactcaaa

SEQ ID NO: 103331 - DNA, 22 bp, Artificial Sequence
  Synthetic oligonucleotide; CTT chr11 5339018 5339039 5339035 5339040 +
tcatttcctgactcaaattaaa

SEQ ID NO: 103332 - DNA, 22 bp, Artificial Sequence
  Synthetic oligonucleotide; TTT chr11 5339019 5339040 5339036 5339041 +
catttcctgactcaaattaaat

SEQ ID NO: 103333 - DNA, 22 bp, Artificial Sequence
  Synthetic oligonucleotide; TTC chr11 5339020 5339041 5339037 5339042 +
atttcctgactcaaattaaata

SEQ ID NO: 103334 - DNA, 22 bp, Artificial Sequence
  Synthetic oligonucleotide; TTT chr11 5339024 5339045 5339041 5339046 +
cctgactcaaattaaatattct

SEQ ID NO: 103335 - DNA, 22 bp, Artificial Sequence
  Synthetic oligonucleotide; TTC chr11 5339025 5339046 5339042 5339047 +
ctgactcaaattaaatattctt

SEQ ID NO: 103336 - DNA, 22 bp, Artificial Sequence
  Synthetic oligonucleotide; CTG chr11 5339028 5339049 5339045 5339050 +
actcaaattaaatattcttatg

SEQ ID NO: 103337 - DNA, 22 bp, Artificial Sequence
  Synthetic oligonucleotide; CTC chr11 5339032 5339053 5339049 5339054 +
aaattaaatattcttatggtat

SEQ ID NO: 103338 - DNA, 22 bp, Artificial Sequence
  Synthetic oligonucleotide; TTA chr11 5339038 5339059 5339055 5339060 +
aatattcttatggtatgttatc

SEQ ID NO: 103339 - DNA, 22 bp, Artificial Sequence
  Synthetic oligonucleotide; TTC chr11 5339045 5339066 5339062 5339067 +
ttatggtatgttatcccttcaa

SEQ ID NO: 103340 - DNA, 22 bp, Artificial Sequence
  Synthetic oligonucleotide; CTT chr11 5339047 5339068 5339064 5339069 +
atggtatgttatcccttcaagc

SEQ ID NO: 103341 - DNA, 22 bp, Artificial Sequence
  Synthetic oligonucleotide; TTA chr11 5339048 5339069 5339065 5339070 +
tggtatgttatcccttcaagcc

SEQ ID NO: 103342 - DNA, 22 bp, Artificial Sequence
  Synthetic oligonucleotide; TTA chr11 5339058 5339079 5339075 5339080 +
tcccttcaagcccatactacac

SEQ ID NO: 103343 - DNA, 22 bp, Artificial Sequence
  Synthetic oligonucleotide; CTT chr11 5339064 5339085 5339081 5339086 +
caagcccatactacacaagtat

SEQ ID NO: 103344 - DNA, 22 bp, Artificial Sequence
  Synthetic oligonucleotide; TTC chr11 5339065 5339086 5339082 5339087 +
aagcccatactacacaagtata

SEQ ID NO: 103345 - DNA, 22 bp, Artificial Sequence
  Synthetic oligonucleotide; CTA chr11 5339077 5339098 5339094 5339099 +
cacaagtatattattatttgaa

SEQ ID NO: 103346 - DNA, 22 bp, Artificial Sequence
  Synthetic oligonucleotide; TTA chr11 5339090 5339111 5339107 5339112 +
ttatttgaaaaagaaaggatgg

SEQ ID NO: 103347 - DNA, 22 bp, Artificial Sequence
  Synthetic oligonucleotide; TTA chr11 5339093 5339114 5339110 5339115 +
tttgaaaaagaaaggatggtat

SEQ ID NO: 103348 - DNA, 22 bp, Artificial Sequence
  Synthetic oligonucleotide; TTT chr11 5339096 5339117 5339113 5339118 +
gaaaaagaaaggatggtatttg

SEQ ID NO: 103349 - DNA, 22 bp, Artificial Sequence
  Synthetic oligonucleotide; TTG chr11 5339097 5339118 5339114 5339119 +
aaaaagaaaggatggtatttgg

SEQ ID NO: 103350 - DNA, 22 bp, Artificial Sequence
  Synthetic oligonucleotide; TTT chr11 5339117 5339138 5339134 5339139 +
ggcaagggctttttttaatgta

SEQ ID NO: 103351 - DNA, 22 bp, Artificial Sequence
  Synthetic oligonucleotide; TTG chr11 5339118 5339139 5339135 5339140 +
gcaagggctttttttaatgtat

SEQ ID NO: 103352 - DNA, 22 bp, Artificial Sequence
  Synthetic oligonucleotide; CTT chr11 5339128 5339149 5339145 5339150 +
tttttaatgtatattcttttac

SEQ ID NO: 103353 - DNA, 22 bp, Artificial Sequence
  Synthetic oligonucleotide; TTT chr11 5339129 5339150 5339146 5339151 +
ttttaatgtatattcttttaca

SEQ ID NO: 103354 - DNA, 22 bp, Artificial Sequence
  Synthetic oligonucleotide; TTT chr11 5339130 5339151 5339147 5339152 +
tttaatgtatattcttttacac

SEQ ID NO: 103355 - DNA, 22 bp, Artificial Sequence
  Synthetic oligonucleotide; TTT chr11 5339131 5339152 5339148 5339153 +
ttaatgtatattcttttacacc

SEQ ID NO: 103356 - DNA, 22 bp, Artificial Sequence
  Synthetic oligonucleotide; TTT chr11 5339132 5339153 5339149 5339154 +
taatgtatattcttttacacct

SEQ ID NO: 103357 - DNA, 22 bp, Artificial Sequence
  Synthetic oligonucleotide; TTT chr11 5339133 5339154 5339150 5339155 +
aatgtatattcttttacacctt

SEQ ID NO: 103358 - DNA, 22 bp, Artificial Sequence
  Synthetic oligonucleotide; TTA chr11 5339134 5339155 5339151 5339156 +
atgtatattcttttacacctta

SEQ ID NO: 103359 - DNA, 22 bp, Artificial Sequence
  Synthetic oligonucleotide; TTC chr11 5339144 5339165 5339161 5339166 +
ttttacaccttagatttcccat

SEQ ID NO: 103360 - DNA, 22 bp, Artificial Sequence
  Synthetic oligonucleotide; CTT chr11 5339146 5339167 5339163 5339168 +
ttacaccttagatttcccataa

SEQ ID NO: 103361 - DNA, 22 bp, Artificial Sequence
  Synthetic oligonucleotide; TTT chr11 5339147 5339168 5339164 5339169 +
tacaccttagatttcccataac

SEQ ID NO: 103362 - DNA, 22 bp, Artificial Sequence
  Synthetic oligonucleotide; TTT chr11 5339148 5339169 5339165 5339170 +
acaccttagatttcccataact

SEQ ID NO: 103363 - DNA, 22 bp, Artificial Sequence
  Synthetic oligonucleotide; TTA chr11 5339149 5339170 5339166 5339171 +
caccttagatttcccataacta

SEQ ID NO: 103364 - DNA, 22 bp, Artificial Sequence
  Synthetic oligonucleotide; CTT chr11 5339155 5339176 5339172 5339177 +
agatttcccataactacatggt

SEQ ID NO: 103365 - DNA, 22 bp, Artificial Sequence
  Synthetic oligonucleotide; TTA chr11 5339156 5339177 5339173 5339178 +
gatttcccataactacatggta

SEQ ID NO: 103366 - DNA, 22 bp, Artificial Sequence
  Synthetic oligonucleotide; TTT chr11 5339161 5339182 5339178 5339183 +
cccataactacatggtacttat

SEQ ID NO: 103367 - DNA, 22 bp, Artificial Sequence
  Synthetic oligonucleotide; TTC chr11 5339162 5339183 5339179 5339184 +
ccataactacatggtacttatt

SEQ ID NO: 103368 - DNA, 22 bp, Artificial Sequence
  Synthetic oligonucleotide; CTA chr11 5339171 5339192 5339188 5339193 +
catggtacttatttatcttaat

SEQ ID NO: 103369 - DNA, 22 bp, Artificial Sequence
  Synthetic oligonucleotide; CTT chr11 5339181 5339202 5339198 5339203 +
atttatcttaataggcaccatg

SEQ ID NO: 103370 - DNA, 22 bp, Artificial Sequence
  Synthetic oligonucleotide; TTA chr11 5339182 5339203 5339199 5339204 +
tttatcttaataggcaccatga

SEQ ID NO: 103371 - DNA, 22 bp, Artificial Sequence
  Synthetic oligonucleotide; TTT chr11 5339185 5339206 5339202 5339207 +
atcttaataggcaccatgaaat

SEQ ID NO: 103372 - DNA, 22 bp, Artificial Sequence
  Synthetic oligonucleotide; TTA chr11 5339186 5339207 5339203 5339208 +
tcttaataggcaccatgaaatt

SEQ ID NO: 103373 - DNA, 22 bp, Artificial Sequence
  Synthetic oligonucleotide; CTT chr11 5339190 5339211 5339207 5339212 +
aataggcaccatgaaatttatt

SEQ ID NO: 103374 - DNA, 22 bp, Artificial Sequence
  Synthetic oligonucleotide; TTA chr11 5339191 5339212 5339208 5339213 +
ataggcaccatgaaatttattc

SEQ ID NO: 103375 - DNA, 22 bp, Artificial Sequence
  Synthetic oligonucleotide; TTT chr11 5339209 5339230 5339226 5339231 +
attcctcatgaggtccttctct

SEQ ID NO: 103376 - DNA, 22 bp, Artificial Sequence
  Synthetic oligonucleotide; TTA chr11 5339210 5339231 5339227 5339232 +
ttcctcatgaggtccttctcta

SEQ ID NO: 103377 - DNA, 22 bp, Artificial Sequence
  Synthetic oligonucleotide; TTC chr11 5339213 5339234 5339230 5339235 +
ctcatgaggtccttctctatat

SEQ ID NO: 103378 - DNA, 22 bp, Artificial Sequence
  Synthetic oligonucleotide; CTC chr11 5339216 5339237 5339233 5339238 +
atgaggtccttctctatataag

SEQ ID NO: 103379 - DNA, 22 bp, Artificial Sequence
  Synthetic oligonucleotide; CTT chr11 5339227 5339248 5339244 5339249 +
ctctatataagttatattcttc

SEQ ID NO: 103380 - DNA, 22 bp, Artificial Sequence
  Synthetic oligonucleotide; TTC chr11 5339228 5339249 5339245 5339250 +
tctatataagttatattcttct

SEQ ID NO: 103381 - DNA, 22 bp, Artificial Sequence
  Synthetic oligonucleotide; CTC chr11 5339230 5339251 5339247 5339252 +
tatataagttatattcttcttt

SEQ ID NO: 103382 - DNA, 22 bp, Artificial Sequence
  Synthetic oligonucleotide; CTA chr11 5339232 5339253 5339249 5339254 +
tataagttatattcttctttca

SEQ ID NO: 103383 - DNA, 22 bp, Artificial Sequence
  Synthetic oligonucleotide; TTA chr11 5339241 5339262 5339258 5339263 +
tattcttctttcagtcttgaat

SEQ ID NO: 103384 - DNA, 22 bp, Artificial Sequence
  Synthetic oligonucleotide; TTC chr11 5339246 5339267 5339263 5339268 +
ttctttcagtcttgaatgatga

SEQ ID NO: 103385 - DNA, 22 bp, Artificial Sequence
  Synthetic oligonucleotide; CTT chr11 5339248 5339269 5339265 5339270 +
ctttcagtcttgaatgatgaaa

SEQ ID NO: 103386 - DNA, 22 bp, Artificial Sequence
  Synthetic oligonucleotide; TTC chr11 5339249 5339270 5339266 5339271 +
tttcagtcttgaatgatgaaaa

SEQ ID NO: 103387 - DNA, 22 bp, Artificial Sequence
  Synthetic oligonucleotide; CTT chr11 5339251 5339272 5339268 5339273 +
tcagtcttgaatgatgaaaagc

SEQ ID NO: 103388 - DNA, 22 bp, Artificial Sequence
  Synthetic oligonucleotide; TTT chr11 5339252 5339273 5339269 5339274 +
cagtcttgaatgatgaaaagct

SEQ ID NO: 103389 - DNA, 22 bp, Artificial Sequence
  Synthetic oligonucleotide; TTC chr11 5339253 5339274 5339270 5339275 +
agtcttgaatgatgaaaagctg

SEQ ID NO: 103390 - DNA, 22 bp, Artificial Sequence
  Synthetic oligonucleotide; CTT chr11 5339259 5339280 5339276 5339281 +
gaatgatgaaaagctgaattac

SEQ ID NO: 103391 - DNA, 22 bp, Artificial Sequence
  Synthetic oligonucleotide; TTG chr11 5339260 5339281 5339277 5339282 +
aatgatgaaaagctgaattaca

SEQ ID NO: 103392 - DNA, 22 bp, Artificial Sequence
  Synthetic oligonucleotide; CTG chr11 5339275 5339296 5339292 5339297 +
aattacaggcttcacctgctgt

SEQ ID NO: 103393 - DNA, 22 bp, Artificial Sequence
  Synthetic oligonucleotide; TTA chr11 5339280 5339301 5339297 5339302 +
caggcttcacctgctgtaagaa

SEQ ID NO: 103394 - DNA, 22 bp, Artificial Sequence
  Synthetic oligonucleotide; CTT chr11 5339287 5339308 5339304 5339309 +
cacctgctgtaagaaggtggtt

SEQ ID NO: 103395 - DNA, 22 bp, Artificial Sequence
  Synthetic oligonucleotide; TTC chr11 5339288 5339309 5339305 5339310 +
acctgctgtaagaaggtggttc

SEQ ID NO: 103396 - DNA, 22 bp, Artificial Sequence
  Synthetic oligonucleotide; CTG chr11 5339293 5339314 5339310 5339315 +
ctgtaagaaggtggttcaccag

SEQ ID NO: 103397 - DNA, 22 bp, Artificial Sequence
  Synthetic oligonucleotide; CTG chr11 5339296 5339317 5339313 5339318 +
taagaaggtggttcaccagttt

SEQ ID NO: 103398 - DNA, 22 bp, Artificial Sequence
  Synthetic oligonucleotide; TTC chr11 5339310 5339331 5339327 5339332 +
accagtttgttagtccactgga

SEQ ID NO: 103399 - DNA, 22 bp, Artificial Sequence
  Synthetic oligonucleotide; TTT chr11 5339318 5339339 5339335 5339340 +
gttagtccactggaccactctg

SEQ ID NO: 103400 - DNA, 22 bp, Artificial Sequence
  Synthetic oligonucleotide; TTG chr11 5339319 5339340 5339336 5339341 +
ttagtccactggaccactctga

SEQ ID NO: 103401 - DNA, 22 bp, Artificial Sequence
  Synthetic oligonucleotide; TTA chr11 5339322 5339343 5339339 5339344 +
gtccactggaccactctgaatt

SEQ ID NO: 103402 - DNA, 22 bp, Artificial Sequence
  Synthetic oligonucleotide; CTG chr11 5339330 5339351 5339347 5339352 +
gaccactctgaattctactctt

SEQ ID NO: 103403 - DNA, 22 bp, Artificial Sequence
  Synthetic oligonucleotide; CTC chr11 5339338 5339359 5339355 5339360 +
tgaattctactcttcttatgaa

SEQ ID NO: 103404 - DNA, 22 bp, Artificial Sequence
  Synthetic oligonucleotide; CTG chr11 5339340 5339361 5339357 5339362 +
aattctactcttcttatgaata

SEQ ID NO: 103405 - DNA, 22 bp, Artificial Sequence
  Synthetic oligonucleotide; TTC chr11 5339345 5339366 5339362 5339367 +
tactcttcttatgaatacaaat

SEQ ID NO: 103406 - DNA, 22 bp, Artificial Sequence
  Synthetic oligonucleotide; CTA chr11 5339347 5339368 5339364 5339369 +
ctcttcttatgaatacaaattc

SEQ ID NO: 103407 - DNA, 22 bp, Artificial Sequence
  Synthetic oligonucleotide; CTC chr11 5339350 5339371 5339367 5339372 +
ttcttatgaatacaaattcatg

SEQ ID NO: 103408 - DNA, 22 bp, Artificial Sequence
  Synthetic oligonucleotide; CTT chr11 5339352 5339373 5339369 5339374 +
cttatgaatacaaattcatgtg

SEQ ID NO: 103409 - DNA, 22 bp, Artificial Sequence
  Synthetic oligonucleotide; TTC chr11 5339353 5339374 5339370 5339375 +
ttatgaatacaaattcatgtgc

SEQ ID NO: 103410 - DNA, 22 bp, Artificial Sequence
  Synthetic oligonucleotide; CTT chr11 5339355 5339376 5339372 5339377 +
atgaatacaaattcatgtgcag

SEQ ID NO: 103411 - DNA, 22 bp, Artificial Sequence
  Synthetic oligonucleotide; TTA chr11 5339356 5339377 5339373 5339378 +
tgaatacaaattcatgtgcagt

SEQ ID NO: 103412 - DNA, 22 bp, Artificial Sequence
  Synthetic oligonucleotide; TTC chr11 5339369 5339390 5339386 5339391 +
atgtgcagtgtttcctaggaga

SEQ ID NO: 103413 - DNA, 22 bp, Artificial Sequence
  Synthetic oligonucleotide; TTT chr11 5339382 5339403 5339399 5339404 +
cctaggagatagtgttataaat

SEQ ID NO: 103414 - DNA, 22 bp, Artificial Sequence
  Synthetic oligonucleotide; TTC chr11 5339383 5339404 5339400 5339405 +
ctaggagatagtgttataaata

SEQ ID NO: 103415 - DNA, 22 bp, Artificial Sequence
  Synthetic oligonucleotide; CTA chr11 5339386 5339407 5339403 5339408 +
ggagatagtgttataaataggc

SEQ ID NO: 103416 - DNA, 22 bp, Artificial Sequence
  Synthetic oligonucleotide; TTA chr11 5339399 5339420 5339416 5339421 +
taaataggcttcttttcctaac

SEQ ID NO: 103417 - DNA, 22 bp, Artificial Sequence
  Synthetic oligonucleotide; CTT chr11 5339410 5339431 5339427 5339432 +
cttttcctaactaacttttatt

SEQ ID NO: 103418 - DNA, 22 bp, Artificial Sequence
  Synthetic oligonucleotide; TTC chr11 5339411 5339432 5339428 5339433 +
ttttcctaactaacttttattt

SEQ ID NO: 103419 - DNA, 22 bp, Artificial Sequence
  Synthetic oligonucleotide; CTT chr11 5339413 5339434 5339430 5339435 +
ttcctaactaacttttatttta

SEQ ID NO: 103420 - DNA, 22 bp, Artificial Sequence
  Synthetic oligonucleotide; TTT chr11 5339414 5339435 5339431 5339436 +
tcctaactaacttttattttag

SEQ ID NO: 103421 - DNA, 22 bp, Artificial Sequence
  Synthetic oligonucleotide; TTT chr11 5339415 5339436 5339432 5339437 +
cctaactaacttttattttagg

SEQ ID NO: 103422 - DNA, 22 bp, Artificial Sequence
  Synthetic oligonucleotide; TTC chr11 5339416 5339437 5339433 5339438 +
ctaactaacttttattttaggt

SEQ ID NO: 103423 - DNA, 22 bp, Artificial Sequence
  Synthetic oligonucleotide; CTA chr11 5339419 5339440 5339436 5339441 +
actaacttttattttaggttca

SEQ ID NO: 103424 - DNA, 22 bp, Artificial Sequence
  Synthetic oligonucleotide; CTA chr11 5339423 5339444 5339440 5339445 +
acttttattttaggttcaggag

SEQ ID NO: 103425 - DNA, 22 bp, Artificial Sequence
  Synthetic oligonucleotide; CTT chr11 5339427 5339448 5339444 5339449 +
ttattttaggttcaggagtaca

SEQ ID NO: 103426 - DNA, 22 bp, Artificial Sequence
  Synthetic oligonucleotide; TTT chr11 5339428 5339449 5339445 5339450 +
tattttaggttcaggagtacaa

SEQ ID NO: 103427 - DNA, 22 bp, Artificial Sequence
  Synthetic oligonucleotide; TTT chr11 5339429 5339450 5339446 5339451 +
attttaggttcaggagtacaag

SEQ ID NO: 103428 - DNA, 22 bp, Artificial Sequence
  Synthetic oligonucleotide; TTA chr11 5339430 5339451 5339447 5339452 +
ttttaggttcaggagtacaaga

SEQ ID NO: 103429 - DNA, 22 bp, Artificial Sequence
  Synthetic oligonucleotide; TTT chr11 5339433 5339454 5339450 5339455 +
taggttcaggagtacaagagca

SEQ ID NO: 103430 - DNA, 22 bp, Artificial Sequence
  Synthetic oligonucleotide; TTT chr11 5339434 5339455 5339451 5339456 +
aggttcaggagtacaagagcag

SEQ ID NO: 103431 - DNA, 22 bp, Artificial Sequence
  Synthetic oligonucleotide; TTA chr11 5339435 5339456 5339452 5339457 +
ggttcaggagtacaagagcagg

SEQ ID NO: 103432 - DNA, 22 bp, Artificial Sequence
  Synthetic oligonucleotide; TTC chr11 5339440 5339461 5339457 5339462 +
aggagtacaagagcaggtctgt

SEQ ID NO: 103433 - DNA, 22 bp, Artificial Sequence
  Synthetic oligonucleotide; CTG chr11 5339461 5339482 5339478 5339483 +
ttacatatttaaacttgtgtca

SEQ ID NO: 103434 - DNA, 22 bp, Artificial Sequence
  Synthetic oligonucleotide; TTA chr11 5339464 5339485 5339481 5339486 +
catatttaaacttgtgtcacga

SEQ ID NO: 103435 - DNA, 22 bp, Artificial Sequence
  Synthetic oligonucleotide; TTT chr11 5339471 5339492 5339488 5339493 +
aaacttgtgtcacgagggtttg

SEQ ID NO: 103436 - DNA, 22 bp, Artificial Sequence
  Synthetic oligonucleotide; TTA chr11 5339472 5339493 5339489 5339494 +
aacttgtgtcacgagggtttgt

SEQ ID NO: 103437 - DNA, 22 bp, Artificial Sequence
  Synthetic oligonucleotide; CTT chr11 5339477 5339498 5339494 5339499 +
gtgtcacgagggtttgttgtac

SEQ ID NO: 103438 - DNA, 22 bp, Artificial Sequence
  Synthetic oligonucleotide; TTG chr11 5339478 5339499 5339495 5339500 +
tgtcacgagggtttgttgtaca

SEQ ID NO: 103439 - DNA, 22 bp, Artificial Sequence
  Synthetic oligonucleotide; TTT chr11 5339492 5339513 5339509 5339514 +
gttgtacagattatgtcatcac

SEQ ID NO: 103440 - DNA, 22 bp, Artificial Sequence
  Synthetic oligonucleotide; TTG chr11 5339493 5339514 5339510 5339515 +
ttgtacagattatgtcatcact

SEQ ID NO: 103441 - DNA, 22 bp, Artificial Sequence
  Synthetic oligonucleotide; TTG chr11 5339496 5339517 5339513 5339518 +
tacagattatgtcatcactcac

SEQ ID NO: 103442 - DNA, 22 bp, Artificial Sequence
  Synthetic oligonucleotide; TTA chr11 5339505 5339526 5339522 5339527 +
tgtcatcactcactcaggtatt

SEQ ID NO: 103443 - DNA, 22 bp, Artificial Sequence
  Synthetic oligonucleotide; CTC chr11 5339516 5339537 5339533 5339538 +
actcaggtattaagcctagtac

SEQ ID NO: 103444 - DNA, 22 bp, Artificial Sequence
  Synthetic oligonucleotide; CTC chr11 5339520 5339541 5339537 5339542 +
aggtattaagcctagtaccctt

SEQ ID NO: 103445 - DNA, 22 bp, Artificial Sequence
  Synthetic oligonucleotide; TTA chr11 5339528 5339549 5339545 5339550 +
agcctagtacccttttgttact

SEQ ID NO: 103446 - DNA, 22 bp, Artificial Sequence
  Synthetic oligonucleotide; CTA chr11 5339534 5339555 5339551 5339556 +
gtacccttttgttacttttcct

SEQ ID NO: 103447 - DNA, 22 bp, Artificial Sequence
  Synthetic oligonucleotide; CTT chr11 5339542 5339563 5339559 5339564 +
ttgttacttttcctgatcctct

SEQ ID NO: 103448 - DNA, 22 bp, Artificial Sequence
  Synthetic oligonucleotide; TTT chr11 5339543 5339564 5339560 5339565 +
tgttacttttcctgatcctctc

SEQ ID NO: 103449 - DNA, 22 bp, Artificial Sequence
  Synthetic oligonucleotide; TTT chr11 5339544 5339565 5339561 5339566 +
gttacttttcctgatcctctcc

SEQ ID NO: 103450 - DNA, 22 bp, Artificial Sequence
  Synthetic oligonucleotide; TTG chr11 5339545 5339566 5339562 5339567 +
ttacttttcctgatcctctccc

SEQ ID NO: 103451 - DNA, 22 bp, Artificial Sequence
  Synthetic oligonucleotide; TTA chr11 5339548 5339569 5339565 5339570 +
cttttcctgatcctctccctcc

SEQ ID NO: 103452 - DNA, 22 bp, Artificial Sequence
  Synthetic oligonucleotide; CTT chr11 5339551 5339572 5339568 5339573 +
ttcctgatcctctccctccttt

SEQ ID NO: 103453 - DNA, 22 bp, Artificial Sequence
  Synthetic oligonucleotide; TTT chr11 5339552 5339573 5339569 5339574 +
tcctgatcctctccctcctttc

SEQ ID NO: 103454 - DNA, 22 bp, Artificial Sequence
  Synthetic oligonucleotide; TTT chr11 5339553 5339574 5339570 5339575 +
cctgatcctctccctcctttca

SEQ ID NO: 103455 - DNA, 22 bp, Artificial Sequence
  Synthetic oligonucleotide; TTC chr11 5339554 5339575 5339571 5339576 +
ctgatcctctccctcctttcac

SEQ ID NO: 103456 - DNA, 22 bp, Artificial Sequence
  Synthetic oligonucleotide; CTG chr11 5339557 5339578 5339574 5339579 +
atcctctccctcctttcaccct

SEQ ID NO: 103457 - DNA, 22 bp, Artificial Sequence
  Synthetic oligonucleotide; CTC chr11 5339563 5339584 5339580 5339585 +
tccctcctttcaccctccatcc

SEQ ID NO: 103458 - DNA, 22 bp, Artificial Sequence
  Synthetic oligonucleotide; CTC chr11 5339565 5339586 5339582 5339587 +
cctcctttcaccctccatcctc

SEQ ID NO: 103459 - DNA, 22 bp, Artificial Sequence
  Synthetic oligonucleotide; CTC chr11 5339569 5339590 5339586 5339591 +
ctttcaccctccatcctccaat

SEQ ID NO: 103460 - DNA, 22 bp, Artificial Sequence
  Synthetic oligonucleotide; CTT chr11 5339572 5339593 5339589 5339594 +
tcaccctccatcctccaatagg

SEQ ID NO: 103461 - DNA, 22 bp, Artificial Sequence
  Synthetic oligonucleotide; TTT chr11 5339573 5339594 5339590 5339595 +
caccctccatcctccaataggc

SEQ ID NO: 103462 - DNA, 22 bp, Artificial Sequence
  Synthetic oligonucleotide; TTC chr11 5339574 5339595 5339591 5339596 +
accctccatcctccaataggcc

SEQ ID NO: 103463 - DNA, 22 bp, Artificial Sequence
  Synthetic oligonucleotide; CTC chr11 5339580 5339601 5339597 5339602 +
catcctccaataggccccagtg

SEQ ID NO: 103464 - DNA, 22 bp, Artificial Sequence
  Synthetic oligonucleotide; CTC chr11 5339587 5339608 5339604 5339609 +
caataggccccagtgtgtgatg

SEQ ID NO: 103465 - DNA, 22 bp, Artificial Sequence
  Synthetic oligonucleotide; TTC chr11 5339612 5339633 5339629 5339634 +
ccctccatgtgtccatgtgttc

SEQ ID NO: 103466 - DNA, 22 bp, Artificial Sequence
  Synthetic oligonucleotide; CTC chr11 5339617 5339638 5339634 5339639 +
catgtgtccatgtgttctcatc

SEQ ID NO: 103467 - DNA, 22 bp, Artificial Sequence
  Synthetic oligonucleotide; TTC chr11 5339634 5339655 5339651 5339656 +
tcatcatttagctcccactcat

SEQ ID NO: 103468 - DNA, 22 bp, Artificial Sequence
  Synthetic oligonucleotide; CTC chr11 5339636 5339657 5339653 5339658 +
atcatttagctcccactcataa

SEQ ID NO: 103469 - DNA, 22 bp, Artificial Sequence
  Synthetic oligonucleotide; TTT chr11 5339643 5339664 5339660 5339665 +
agctcccactcataagtgagaa

SEQ ID NO: 103470 - DNA, 22 bp, Artificial Sequence
  Synthetic oligonucleotide; TTA chr11 5339644 5339665 5339661 5339666 +
gctcccactcataagtgagaac

SEQ ID NO: 103471 - DNA, 22 bp, Artificial Sequence
  Synthetic oligonucleotide; CTC chr11 5339648 5339669 5339665 5339670 +
ccactcataagtgagaacacgt

SEQ ID NO: 103472 - DNA, 22 bp, Artificial Sequence
  Synthetic oligonucleotide; CTC chr11 5339654 5339675 5339671 5339676 +
ataagtgagaacacgtggtatt

SEQ ID NO: 103473 - DNA, 22 bp, Artificial Sequence
  Synthetic oligonucleotide; TTT chr11 5339677 5339698 5339694 5339699 +
ggttttctgttcctgtattaat

SEQ ID NO: 103474 - DNA, 22 bp, Artificial Sequence
  Synthetic oligonucleotide; TTG chr11 5339678 5339699 5339695 5339700 +
gttttctgttcctgtattaatt

SEQ ID NO: 103475 - DNA, 22 bp, Artificial Sequence
  Synthetic oligonucleotide; TTT chr11 5339682 5339703 5339699 5339704 +
tctgttcctgtattaatttgct

SEQ ID NO: 103476 - DNA, 22 bp, Artificial Sequence
  Synthetic oligonucleotide; TTT chr11 5339683 5339704 5339700 5339705 +
ctgttcctgtattaatttgcta

SEQ ID NO: 103477 - DNA, 22 bp, Artificial Sequence
  Synthetic oligonucleotide; TTC chr11 5339684 5339705 5339701 5339706 +
tgttcctgtattaatttgctaa

SEQ ID NO: 103478 - DNA, 22 bp, Artificial Sequence
  Synthetic oligonucleotide; CTG chr11 5339686 5339707 5339703 5339708 +
ttcctgtattaatttgctaagg

SEQ ID NO: 103479 - DNA, 22 bp, Artificial Sequence
  Synthetic oligonucleotide; TTC chr11 5339689 5339710 5339706 5339711 +
ctgtattaatttgctaaggctt

SEQ ID NO: 103480 - DNA, 22 bp, Artificial Sequence
  Synthetic oligonucleotide; CTG chr11 5339692 5339713 5339709 5339714 +
tattaatttgctaaggcttcta

SEQ ID NO: 103481 - DNA, 22 bp, Artificial Sequence
  Synthetic oligonucleotide; TTA chr11 5339697 5339718 5339714 5339719 +
atttgctaaggcttctaatagt

SEQ ID NO: 103482 - DNA, 22 bp, Artificial Sequence
  Synthetic oligonucleotide; TTT chr11 5339701 5339722 5339718 5339723 +
gctaaggcttctaatagtacat

SEQ ID NO: 103483 - DNA, 22 bp, Artificial Sequence
  Synthetic oligonucleotide; TTG chr11 5339702 5339723 5339719 5339724 +
ctaaggcttctaatagtacata

SEQ ID NO: 103484 - DNA, 22 bp, Artificial Sequence
  Synthetic oligonucleotide; CTA chr11 5339705 5339726 5339722 5339727 +
aggcttctaatagtacatagca

SEQ ID NO: 103485 - DNA, 22 bp, Artificial Sequence
  Synthetic oligonucleotide; CTT chr11 5339711 5339732 5339728 5339733 +
ctaatagtacatagcattttac

SEQ ID NO: 103486 - DNA, 22 bp, Artificial Sequence
  Synthetic oligonucleotide; TTC chr11 5339712 5339733 5339729 5339734 +
taatagtacatagcattttacc

SEQ ID NO: 103487 - DNA, 22 bp, Artificial Sequence
  Synthetic oligonucleotide; CTA chr11 5339714 5339735 5339731 5339736 +
atagtacatagcattttaccac

SEQ ID NO: 103488 - DNA, 22 bp, Artificial Sequence
  Synthetic oligonucleotide; TTT chr11 5339730 5339751 5339747 5339752 +
taccacaggaagacttgtagga

SEQ ID NO: 103489 - DNA, 22 bp, Artificial Sequence
  Synthetic oligonucleotide; TTT chr11 5339731 5339752 5339748 5339753 +
accacaggaagacttgtaggag

SEQ ID NO: 103490 - DNA, 22 bp, Artificial Sequence
  Synthetic oligonucleotide; TTA chr11 5339732 5339753 5339749 5339754 +
ccacaggaagacttgtaggaga

SEQ ID NO: 103491 - DNA, 22 bp, Artificial Sequence
  Synthetic oligonucleotide; CTT chr11 5339746 5339767 5339763 5339768 +
gtaggagatcacagaaagttct

SEQ ID NO: 103492 - DNA, 22 bp, Artificial Sequence
  Synthetic oligonucleotide; TTG chr11 5339747 5339768 5339764 5339769 +
taggagatcacagaaagttcta

SEQ ID NO: 103493 - DNA, 22 bp, Artificial Sequence
  Synthetic oligonucleotide; TTC chr11 5339767 5339788 5339784 5339789 +
taaattttatgataatactaac

SEQ ID NO: 103494 - DNA, 22 bp, Artificial Sequence
  Synthetic oligonucleotide; CTA chr11 5339769 5339790 5339786 5339791 +
aattttatgataatactaacat

SEQ ID NO: 103495 - DNA, 22 bp, Artificial Sequence
  Synthetic oligonucleotide; TTT chr11 5339774 5339795 5339791 5339796 +
tatgataatactaacatactgt

SEQ ID NO: 103496 - DNA, 22 bp, Artificial Sequence
  Synthetic oligonucleotide; TTT chr11 5339775 5339796 5339792 5339797 +
atgataatactaacatactgtg

SEQ ID NO: 103497 - DNA, 22 bp, Artificial Sequence
  Synthetic oligonucleotide; TTA chr11 5339776 5339797 5339793 5339798 +
tgataatactaacatactgtgt

SEQ ID NO: 103498 - DNA, 22 bp, Artificial Sequence
  Synthetic oligonucleotide; CTA chr11 5339787 5339808 5339804 5339809 +
acatactgtgtttatgttgatt

SEQ ID NO: 103499 - DNA, 22 bp, Artificial Sequence
  Synthetic oligonucleotide; CTG chr11 5339795 5339816 5339812 5339817 +
tgtttatgttgattgttacaat

SEQ ID NO: 103500 - DNA, 22 bp, Artificial Sequence
  Synthetic oligonucleotide; TTT chr11 5339800 5339821 5339817 5339822 +
atgttgattgttacaatgggtt

SEQ ID NO: 103501 - DNA, 22 bp, Artificial Sequence
  Synthetic oligonucleotide; TTA chr11 5339801 5339822 5339818 5339823 +
tgttgattgttacaatgggttt

SEQ ID NO: 103502 - DNA, 22 bp, Artificial Sequence
  Synthetic oligonucleotide; TTG chr11 5339806 5339827 5339823 5339828 +
attgttacaatgggttttgaat

SEQ ID NO: 103503 - DNA, 22 bp, Artificial Sequence
  Synthetic oligonucleotide; TTG chr11 5339810 5339831 5339827 5339832 +
ttacaatgggttttgaatagaa

SEQ ID NO: 103504 - DNA, 22 bp, Artificial Sequence
  Synthetic oligonucleotide; TTA chr11 5339813 5339834 5339830 5339835 +
caatgggttttgaatagaaaaa

SEQ ID NO: 103505 - DNA, 22 bp, Artificial Sequence
  Synthetic oligonucleotide; TTT chr11 5339823 5339844 5339840 5339845 +
tgaatagaaaaacatgtctgag

SEQ ID NO: 103506 - DNA, 22 bp, Artificial Sequence
  Synthetic oligonucleotide; TTT chr11 5339824 5339845 5339841 5339846 +
gaatagaaaaacatgtctgagt

SEQ ID NO: 103507 - DNA, 22 bp, Artificial Sequence
  Synthetic oligonucleotide; TTG chr11 5339825 5339846 5339842 5339847 +
aatagaaaaacatgtctgagtg

SEQ ID NO: 103508 - DNA, 22 bp, Artificial Sequence
  Synthetic oligonucleotide; CTG chr11 5339843 5339864 5339860 5339865 +
agtggatttccaccatgtagcc

SEQ ID NO: 103509 - DNA, 22 bp, Artificial Sequence
  Synthetic oligonucleotide; TTT chr11 5339852 5339873 5339869 5339874 +
ccaccatgtagccttctgtata

SEQ ID NO: 103510 - DNA, 22 bp, Artificial Sequence
  Synthetic oligonucleotide; TTC chr11 5339853 5339874 5339870 5339875 +
caccatgtagccttctgtataa

SEQ ID NO: 103511 - DNA, 22 bp, Artificial Sequence
  Synthetic oligonucleotide; CTT chr11 5339867 5339888 5339884 5339889 +
ctgtataactaagtttgagata

SEQ ID NO: 103512 - DNA, 22 bp, Artificial Sequence
  Synthetic oligonucleotide; TTC chr11 5339868 5339889 5339885 5339890 +
tgtataactaagtttgagataa

SEQ ID NO: 103513 - DNA, 22 bp, Artificial Sequence
  Synthetic oligonucleotide; CTG chr11 5339870 5339891 5339887 5339892 +
tataactaagtttgagataatt

SEQ ID NO: 103514 - DNA, 22 bp, Artificial Sequence
  Synthetic oligonucleotide; CTA chr11 5339878 5339899 5339895 5339900 +
agtttgagataattatttagtc

SEQ ID NO: 103515 - DNA, 22 bp, Artificial Sequence
  Synthetic oligonucleotide; TTT chr11 5339883 5339904 5339900 5339905 +
gagataattatttagtcttccc

SEQ ID NO: 103516 - DNA, 22 bp, Artificial Sequence
  Synthetic oligonucleotide; TTG chr11 5339884 5339905 5339901 5339906 +
agataattatttagtcttcccc

SEQ ID NO: 103517 - DNA, 22 bp, Artificial Sequence
  Synthetic oligonucleotide; TTA chr11 5339893 5339914 5339910 5339915 +
tttagtcttccccccacctccg

SEQ ID NO: 103518 - DNA, 22 bp, Artificial Sequence
  Synthetic oligonucleotide; TTT chr11 5339896 5339917 5339913 5339918 +
agtcttccccccacctccgatg

SEQ ID NO: 103519 - DNA, 22 bp, Artificial Sequence
  Synthetic oligonucleotide; TTA chr11 5339897 5339918 5339914 5339919 +
gtcttccccccacctccgatgt

SEQ ID NO: 103520 - DNA, 22 bp, Artificial Sequence
  Synthetic oligonucleotide; CTT chr11 5339902 5339923 5339919 5339924 +
ccccccacctccgatgtcctgt

SEQ ID NO: 103521 - DNA, 22 bp, Artificial Sequence
  Synthetic oligonucleotide; TTC chr11 5339903 5339924 5339920 5339925 +
cccccacctccgatgtcctgtg

SEQ ID NO: 103522 - DNA, 22 bp, Artificial Sequence
  Synthetic oligonucleotide; CTC chr11 5339913 5339934 5339930 5339935 +
cgatgtcctgtgtctgtattca

SEQ ID NO: 103523 - DNA, 22 bp, Artificial Sequence
  Synthetic oligonucleotide; CTG chr11 5339923 5339944 5339940 5339945 +
tgtctgtattcatcctacagca

SEQ ID NO: 103524 - DNA, 22 bp, Artificial Sequence
  Synthetic oligonucleotide; CTG chr11 5339929 5339950 5339946 5339951 +
tattcatcctacagcatcttct

SEQ ID NO: 103525 - DNA, 22 bp, Artificial Sequence
  Synthetic oligonucleotide; TTC chr11 5339934 5339955 5339951 5339956 +
atcctacagcatcttctcagtg

SEQ ID NO: 103526 - DNA, 22 bp, Artificial Sequence
  Synthetic oligonucleotide; CTA chr11 5339940 5339961 5339957 5339962 +
cagcatcttctcagtgaattta

SEQ ID NO: 103527 - DNA, 22 bp, Artificial Sequence
  Synthetic oligonucleotide; CTT chr11 5339949 5339970 5339966 5339971 +
ctcagtgaatttagtttcacac

SEQ ID NO: 103528 - DNA, 22 bp, Artificial Sequence
  Synthetic oligonucleotide; TTC chr11 5339950 5339971 5339967 5339972 +
tcagtgaatttagtttcacact

SEQ ID NO: 103529 - DNA, 22 bp, Artificial Sequence
  Synthetic oligonucleotide; CTC chr11 5339952 5339973 5339969 5339974 +
agtgaatttagtttcacactta

SEQ ID NO: 103530 - DNA, 22 bp, Artificial Sequence
  Synthetic oligonucleotide; TTT chr11 5339961 5339982 5339978 5339983 +
agtttcacacttactttcaagt

SEQ ID NO: 103531 - DNA, 22 bp, Artificial Sequence
  Synthetic oligonucleotide; TTA chr11 5339962 5339983 5339979 5339984 +
gtttcacacttactttcaagtc

SEQ ID NO: 103532 - DNA, 22 bp, Artificial Sequence
  Synthetic oligonucleotide; TTT chr11 5339966 5339987 5339983 5339988 +
cacacttactttcaagtcagaa

SEQ ID NO: 103533 - DNA, 22 bp, Artificial Sequence
  Synthetic oligonucleotide; TTC chr11 5339967 5339988 5339984 5339989 +
acacttactttcaagtcagaaa

SEQ ID NO: 103534 - DNA, 22 bp, Artificial Sequence
  Synthetic oligonucleotide; CTT chr11 5339973 5339994 5339990 5339995 +
actttcaagtcagaaatgaact

SEQ ID NO: 103535 - DNA, 22 bp, Artificial Sequence
  Synthetic oligonucleotide; TTA chr11 5339974 5339995 5339991 5339996 +
ctttcaagtcagaaatgaactt

SEQ ID NO: 103536 - DNA, 22 bp, Artificial Sequence
  Synthetic oligonucleotide; CTT chr11 5339977 5339998 5339994 5339999 +
tcaagtcagaaatgaacttctt

SEQ ID NO: 103537 - DNA, 22 bp, Artificial Sequence
  Synthetic oligonucleotide; TTT chr11 5339978 5339999 5339995 5340000 +
caagtcagaaatgaacttctta

SEQ ID NO: 103538 - DNA, 22 bp, Artificial Sequence
  Synthetic oligonucleotide; TTC chr11 5339979 5340000 5339996 5340001 +
aagtcagaaatgaacttcttaa

SEQ ID NO: 103539 - DNA, 22 bp, Artificial Sequence
  Synthetic oligonucleotide; CTT chr11 5339996 5340017 5340013 5340018 +
cttaaacaagggaaataacttc

SEQ ID NO: 103540 - DNA, 22 bp, Artificial Sequence
  Synthetic oligonucleotide; TTC chr11 5339997 5340018 5340014 5340019 +
ttaaacaagggaaataacttca

SEQ ID NO: 103541 - DNA, 22 bp, Artificial Sequence
  Synthetic oligonucleotide; CTT chr11 5339999 5340020 5340016 5340021 +
aaacaagggaaataacttcata

SEQ ID NO: 103542 - DNA, 22 bp, Artificial Sequence
  Synthetic oligonucleotide; TTA chr11 5340000 5340021 5340017 5340022 +
aacaagggaaataacttcataa

SEQ ID NO: 103543 - DNA, 22 bp, Artificial Sequence
  Synthetic oligonucleotide; CTT chr11 5340017 5340038 5340034 5340039 +
cataaatcattcaccaaatggt

SEQ ID NO: 103544 - DNA, 22 bp, Artificial Sequence
  Synthetic oligonucleotide; TTC chr11 5340018 5340039 5340035 5340040 +
ataaatcattcaccaaatggtc

SEQ ID NO: 103545 - DNA, 22 bp, Artificial Sequence
  Synthetic oligonucleotide; TTC chr11 5340029 5340050 5340046 5340051 +
accaaatggtcaactttcctgc

SEQ ID NO: 103546 - DNA, 22 bp, Artificial Sequence
  Synthetic oligonucleotide; CTT chr11 5340045 5340066 5340062 5340067 +
tcctgccatttttaggttccat

SEQ ID NO: 103547 - DNA, 22 bp, Artificial Sequence
  Synthetic oligonucleotide; TTT chr11 5340046 5340067 5340063 5340068 +
cctgccatttttaggttccatt

SEQ ID NO: 103548 - DNA, 22 bp, Artificial Sequence
  Synthetic oligonucleotide; TTC chr11 5340047 5340068 5340064 5340069 +
ctgccatttttaggttccattt

SEQ ID NO: 103549 - DNA, 22 bp, Artificial Sequence
  Synthetic oligonucleotide; CTG chr11 5340050 5340071 5340067 5340072 +
ccatttttaggttccatttcct

SEQ ID NO: 103550 - DNA, 22 bp, Artificial Sequence
  Synthetic oligonucleotide; TTT chr11 5340056 5340077 5340073 5340078 +
ttaggttccatttcctgtattt

SEQ ID NO: 103551 - DNA, 22 bp, Artificial Sequence
  Synthetic oligonucleotide; TTT chr11 5340057 5340078 5340074 5340079 +
taggttccatttcctgtatttt

SEQ ID NO: 103552 - DNA, 22 bp, Artificial Sequence
  Synthetic oligonucleotide; TTT chr11 5340058 5340079 5340075 5340080 +
aggttccatttcctgtatttta

SEQ ID NO: 103553 - DNA, 22 bp, Artificial Sequence
  Synthetic oligonucleotide; TTA chr11 5340059 5340080 5340076 5340081 +
ggttccatttcctgtattttag

SEQ ID NO: 103554 - DNA, 22 bp, Artificial Sequence
  Synthetic oligonucleotide; TTC chr11 5340064 5340085 5340081 5340086 +
catttcctgtattttagaaaaa

SEQ ID NO: 103555 - DNA, 22 bp, Artificial Sequence
  Synthetic oligonucleotide; TTT chr11 5340069 5340090 5340086 5340091 +
cctgtattttagaaaaagaggc

SEQ ID NO: 103556 - DNA, 22 bp, Artificial Sequence
  Synthetic oligonucleotide; TTC chr11 5340070 5340091 5340087 5340092 +
ctgtattttagaaaaagaggca

SEQ ID NO: 103557 - DNA, 22 bp, Artificial Sequence
  Synthetic oligonucleotide; CTG chr11 5340073 5340094 5340090 5340095 +
tattttagaaaaagaggcagct

SEQ ID NO: 103558 - DNA, 22 bp, Artificial Sequence
  Synthetic oligonucleotide; TTT chr11 5340078 5340099 5340095 5340100 +
tagaaaaagaggcagctcttct

SEQ ID NO: 103559 - DNA, 22 bp, Artificial Sequence
  Synthetic oligonucleotide; TTT chr11 5340079 5340100 5340096 5340101 +
agaaaaagaggcagctcttcta

SEQ ID NO: 103560 - DNA, 22 bp, Artificial Sequence
  Synthetic oligonucleotide; TTA chr11 5340080 5340101 5340097 5340102 +
gaaaaagaggcagctcttctac

SEQ ID NO: 103561 - DNA, 22 bp, Artificial Sequence
  Synthetic oligonucleotide; CTC chr11 5340096 5340117 5340113 5340118 +
ttctacctaacagtattttcca

SEQ ID NO: 103562 - DNA, 22 bp, Artificial Sequence
  Synthetic oligonucleotide; CTT chr11 5340098 5340119 5340115 5340120 +
ctacctaacagtattttccagt

SEQ ID NO: 103563 - DNA, 22 bp, Artificial Sequence
  Synthetic oligonucleotide; TTC chr11 5340099 5340120 5340116 5340121 +
tacctaacagtattttccagtt

SEQ ID NO: 103564 - DNA, 22 bp, Artificial Sequence
  Synthetic oligonucleotide; CTA chr11 5340101 5340122 5340118 5340123 +
cctaacagtattttccagtttt

SEQ ID NO: 103565 - DNA, 22 bp, Artificial Sequence
  Synthetic oligonucleotide; CTA chr11 5340105 5340126 5340122 5340127 +
acagtattttccagttttaaat

SEQ ID NO: 103566 - DNA, 22 bp, Artificial Sequence
  Synthetic oligonucleotide; TTT chr11 5340114 5340135 5340131 5340136 +
tccagttttaaatattagttag

SEQ ID NO: 103567 - DNA, 22 bp, Artificial Sequence
  Synthetic oligonucleotide; TTT chr11 5340115 5340136 5340132 5340137 +
ccagttttaaatattagttaga

SEQ ID NO: 103568 - DNA, 22 bp, Artificial Sequence
  Synthetic oligonucleotide; TTC chr11 5340116 5340137 5340133 5340138 +
cagttttaaatattagttagag

SEQ ID NO: 103569 - DNA, 22 bp, Artificial Sequence
  Synthetic oligonucleotide; TTT chr11 5340122 5340143 5340139 5340144 +
taaatattagttagagaagatt

SEQ ID NO: 103570 - DNA, 22 bp, Artificial Sequence
  Synthetic oligonucleotide; TTT chr11 5340123 5340144 5340140 5340145 +
aaatattagttagagaagattc

SEQ ID NO: 103571 - DNA, 22 bp, Artificial Sequence
  Synthetic oligonucleotide; TTA chr11 5340124 5340145 5340141 5340146 +
aatattagttagagaagattca

SEQ ID NO: 103572 - DNA, 22 bp, Artificial Sequence
  Synthetic oligonucleotide; TTA chr11 5340131 5340152 5340148 5340153 +
gttagagaagattcacatatct

SEQ ID NO: 103573 - DNA, 22 bp, Artificial Sequence
  Synthetic oligonucleotide; TTA chr11 5340135 5340156 5340152 5340157 +
gagaagattcacatatctataa

SEQ ID NO: 103574 - DNA, 22 bp, Artificial Sequence
  Synthetic oligonucleotide; TTC chr11 5340145 5340166 5340162 5340167 +
acatatctataactgagatgat

SEQ ID NO: 103575 - DNA, 22 bp, Artificial Sequence
  Synthetic oligonucleotide; CTA chr11 5340154 5340175 5340171 5340176 +
taactgagatgatataattatt

SEQ ID NO: 103576 - DNA, 22 bp, Artificial Sequence
  Synthetic oligonucleotide; CTG chr11 5340160 5340181 5340177 5340182 +
agatgatataattattaatagc

SEQ ID NO: 103577 - DNA, 22 bp, Artificial Sequence
  Synthetic oligonucleotide; TTA chr11 5340174 5340195 5340191 5340196 +
ttaatagcctttggttataagt

SEQ ID NO: 103578 - DNA, 22 bp, Artificial Sequence
  Synthetic oligonucleotide; TTA chr11 5340177 5340198 5340194 5340199 +
atagcctttggttataagtgaa

SEQ ID NO: 103579 - DNA, 22 bp, Artificial Sequence
  Synthetic oligonucleotide; CTT chr11 5340185 5340206 5340202 5340207 +
tggttataagtgaaactcaact

SEQ ID NO: 103580 - DNA, 22 bp, Artificial Sequence
  Synthetic oligonucleotide; TTT chr11 5340186 5340207 5340203 5340208 +
ggttataagtgaaactcaactg

SEQ ID NO: 103581 - DNA, 22 bp, Artificial Sequence
  Synthetic oligonucleotide; TTG chr11 5340187 5340208 5340204 5340209 +
gttataagtgaaactcaactga

SEQ ID NO: 103582 - DNA, 22 bp, Artificial Sequence
  Synthetic oligonucleotide; TTA chr11 5340191 5340212 5340208 5340213 +
taagtgaaactcaactgaaact

SEQ ID NO: 103583 - DNA, 22 bp, Artificial Sequence
  Synthetic oligonucleotide; CTC chr11 5340203 5340224 5340220 5340225 +
aactgaaactaggctgaacaaa

SEQ ID NO: 103584 - DNA, 22 bp, Artificial Sequence
  Synthetic oligonucleotide; CTG chr11 5340208 5340229 5340225 5340230 +
aaactaggctgaacaaaacaaa

SEQ ID NO: 103585 - DNA, 22 bp, Artificial Sequence
  Synthetic oligonucleotide; CTA chr11 5340214 5340235 5340231 5340236 +
ggctgaacaaaacaaattacaa

SEQ ID NO: 103586 - DNA, 22 bp, Artificial Sequence
  Synthetic oligonucleotide; CTG chr11 5340219 5340240 5340236 5340241 +
aacaaaacaaattacaagaaga

SEQ ID NO: 103587 - DNA, 22 bp, Artificial Sequence
  Synthetic oligonucleotide; TTA chr11 5340233 5340254 5340250 5340255 +
caagaagaggagtttattaggc

SEQ ID NO: 103588 - DNA, 22 bp, Artificial Sequence
  Synthetic oligonucleotide; TTT chr11 5340248 5340269 5340265 5340270 +
attaggctgtggaatcaaaaaa

SEQ ID NO: 103589 - DNA, 22 bp, Artificial Sequence
  Synthetic oligonucleotide; TTA chr11 5340249 5340270 5340266 5340271 +
ttaggctgtggaatcaaaaaaa

SEQ ID NO: 103590 - DNA, 22 bp, Artificial Sequence
  Synthetic oligonucleotide; TTA chr11 5340252 5340273 5340269 5340274 +
ggctgtggaatcaaaaaaaaga

SEQ ID NO: 103591 - DNA, 22 bp, Artificial Sequence
  Synthetic oligonucleotide; CTG chr11 5340257 5340278 5340274 5340279 +
tggaatcaaaaaaaagattcaa

SEQ ID NO: 103592 - DNA, 22 bp, Artificial Sequence
  Synthetic oligonucleotide; TTC chr11 5340277 5340298 5340294 5340299 +
aaactgtcctccttgtcactga

SEQ ID NO: 103593 - DNA, 22 bp, Artificial Sequence
  Synthetic oligonucleotide; CTG chr11 5340283 5340304 5340300 5340305 +
tcctccttgtcactgagtctca

SEQ ID NO: 103594 - DNA, 22 bp, Artificial Sequence
  Synthetic oligonucleotide; CTC chr11 5340288 5340309 5340305 5340310 +
cttgtcactgagtctcaggaaa

SEQ ID NO: 103595 - DNA, 22 bp, Artificial Sequence
  Synthetic oligonucleotide; CTT chr11 5340291 5340312 5340308 5340313 +
gtcactgagtctcaggaaaaca

SEQ ID NO: 103596 - DNA, 22 bp, Artificial Sequence
  Synthetic oligonucleotide; TTG chr11 5340292 5340313 5340309 5340314 +
tcactgagtctcaggaaaacat

SEQ ID NO: 103597 - DNA, 22 bp, Artificial Sequence
  Synthetic oligonucleotide; CTG chr11 5340298 5340319 5340315 5340320 +
agtctcaggaaaacatggaatc

SEQ ID NO: 103598 - DNA, 22 bp, Artificial Sequence
  Synthetic oligonucleotide; CTC chr11 5340304 5340325 5340321 5340326 +
aggaaaacatggaatcagagat

SEQ ID NO: 103599 - DNA, 22 bp, Artificial Sequence
  Synthetic oligonucleotide; TTT chr11 5340328 5340349 5340345 5340350 +
gaagattctttttatttattat

SEQ ID NO: 103600 - DNA, 22 bp, Artificial Sequence
  Synthetic oligonucleotide; TTG chr11 5340329 5340350 5340346 5340351 +
aagattctttttatttattatc

SEQ ID NO: 103601 - DNA, 22 bp, Artificial Sequence
  Synthetic oligonucleotide; TTC chr11 5340336 5340357 5340353 5340358 +
tttttatttattatcatttctt

SEQ ID NO: 103602 - DNA, 22 bp, Artificial Sequence
  Synthetic oligonucleotide; CTT chr11 5340338 5340359 5340355 5340360 +
tttatttattatcatttcttta

SEQ ID NO: 103603 - DNA, 22 bp, Artificial Sequence
  Synthetic oligonucleotide; TTT chr11 5340339 5340360 5340356 5340361 +
ttatttattatcatttctttat

SEQ ID NO: 103604 - DNA, 22 bp, Artificial Sequence
  Synthetic oligonucleotide; TTT chr11 5340340 5340361 5340357 5340362 +
tatttattatcatttctttatc

SEQ ID NO: 103605 - DNA, 22 bp, Artificial Sequence
  Synthetic oligonucleotide; TTT chr11 5340341 5340362 5340358 5340363 +
atttattatcatttctttatct

SEQ ID NO: 103606 - DNA, 22 bp, Artificial Sequence
  Synthetic oligonucleotide; TTA chr11 5340342 5340363 5340359 5340364 +
tttattatcatttctttatcta

SEQ ID NO: 103607 - DNA, 22 bp, Artificial Sequence
  Synthetic oligonucleotide; TTT chr11 5340345 5340366 5340362 5340367 +
attatcatttctttatctataa

SEQ ID NO: 103608 - DNA, 22 bp, Artificial Sequence
  Synthetic oligonucleotide; TTA chr11 5340346 5340367 5340363 5340368 +
ttatcatttctttatctataat

SEQ ID NO: 103609 - DNA, 22 bp, Artificial Sequence
  Synthetic oligonucleotide; TTA chr11 5340349 5340370 5340366 5340371 +
tcatttctttatctataattta

SEQ ID NO: 103610 - DNA, 22 bp, Artificial Sequence
  Synthetic oligonucleotide; TTT chr11 5340355 5340376 5340372 5340377 +
ctttatctataatttactctaa

SEQ ID NO: 103611 - DNA, 22 bp, Artificial Sequence
  Synthetic oligonucleotide; TTC chr11 5340356 5340377 5340373 5340378 +
tttatctataatttactctaaa

SEQ ID NO: 103612 - DNA, 22 bp, Artificial Sequence
  Synthetic oligonucleotide; CTT chr11 5340358 5340379 5340375 5340380 +
tatctataatttactctaaata

SEQ ID NO: 103613 - DNA, 22 bp, Artificial Sequence
  Synthetic oligonucleotide; TTT chr11 5340359 5340380 5340376 5340381 +
atctataatttactctaaatat

SEQ ID NO: 103614 - DNA, 22 bp, Artificial Sequence
  Synthetic oligonucleotide; TTA chr11 5340360 5340381 5340377 5340382 +
tctataatttactctaaatatt

SEQ ID NO: 103615 - DNA, 22 bp, Artificial Sequence
  Synthetic oligonucleotide; CTA chr11 5340364 5340385 5340381 5340386 +
taatttactctaaatatttatt

SEQ ID NO: 103616 - DNA, 22 bp, Artificial Sequence
  Synthetic oligonucleotide; TTT chr11 5340370 5340391 5340387 5340392 +
actctaaatatttattatagtt

SEQ ID NO: 103617 - DNA, 22 bp, Artificial Sequence
  Synthetic oligonucleotide; TTA chr11 5340371 5340392 5340388 5340393 +
ctctaaatatttattatagttt

SEQ ID NO: 103618 - DNA, 22 bp, Artificial Sequence
  Synthetic oligonucleotide; CTC chr11 5340374 5340395 5340391 5340396 +
taaatatttattatagtttgaa

SEQ ID NO: 103619 - DNA, 22 bp, Artificial Sequence
  Synthetic oligonucleotide; CTA chr11 5340376 5340397 5340393 5340398 +
aatatttattatagtttgaagt

SEQ ID NO: 103620 - DNA, 22 bp, Artificial Sequence
  Synthetic oligonucleotide; TTT chr11 5340383 5340404 5340400 5340405 +
attatagtttgaagtcacttgc

SEQ ID NO: 103621 - DNA, 22 bp, Artificial Sequence
  Synthetic oligonucleotide; TTA chr11 5340384 5340405 5340401 5340406 +
ttatagtttgaagtcacttgcc

SEQ ID NO: 103622 - DNA, 22 bp, Artificial Sequence
  Synthetic oligonucleotide; TTA chr11 5340387 5340408 5340404 5340409 +
tagtttgaagtcacttgcctga

SEQ ID NO: 103623 - DNA, 22 bp, Artificial Sequence
  Synthetic oligonucleotide; TTT chr11 5340393 5340414 5340410 5340415 +
gaagtcacttgcctgatgaaaa

SEQ ID NO: 103624 - DNA, 22 bp, Artificial Sequence
  Synthetic oligonucleotide; TTG chr11 5340394 5340415 5340411 5340416 +
aagtcacttgcctgatgaaaaa

SEQ ID NO: 103625 - DNA, 22 bp, Artificial Sequence
  Synthetic oligonucleotide; CTT chr11 5340403 5340424 5340420 5340425 +
gcctgatgaaaaacattgtcat

SEQ ID NO: 103626 - DNA, 22 bp, Artificial Sequence
  Synthetic oligonucleotide; TTG chr11 5340404 5340425 5340421 5340426 +
cctgatgaaaaacattgtcatt

SEQ ID NO: 103627 - DNA, 22 bp, Artificial Sequence
  Synthetic oligonucleotide; CTG chr11 5340408 5340429 5340425 5340430 +
atgaaaaacattgtcattaaca

SEQ ID NO: 103628 - DNA, 22 bp, Artificial Sequence
  Synthetic oligonucleotide; TTG chr11 5340421 5340442 5340438 5340443 +
tcattaacaattctaagcattg

SEQ ID NO: 103629 - DNA, 22 bp, Artificial Sequence
  Synthetic oligonucleotide; TTA chr11 5340427 5340448 5340444 5340449 +
acaattctaagcattgcatttt

SEQ ID NO: 103630 - DNA, 22 bp, Artificial Sequence
  Synthetic oligonucleotide; TTC chr11 5340434 5340455 5340451 5340456 +
taagcattgcattttagtaatt

SEQ ID NO: 103631 - DNA, 22 bp, Artificial Sequence
  Synthetic oligonucleotide; CTA chr11 5340436 5340457 5340453 5340458 +
agcattgcattttagtaattct

SEQ ID NO: 103632 - DNA, 22 bp, Artificial Sequence
  Synthetic oligonucleotide; TTG chr11 5340443 5340464 5340460 5340465 +
cattttagtaattctacaacaa

SEQ ID NO: 103633 - DNA, 22 bp, Artificial Sequence
  Synthetic oligonucleotide; TTT chr11 5340448 5340469 5340465 5340470 +
tagtaattctacaacaaaagca

SEQ ID NO: 103634 - DNA, 22 bp, Artificial Sequence
  Synthetic oligonucleotide; TTT chr11 5340449 5340470 5340466 5340471 +
agtaattctacaacaaaagcat

SEQ ID NO: 103635 - DNA, 22 bp, Artificial Sequence
  Synthetic oligonucleotide; TTA chr11 5340450 5340471 5340467 5340472 +
gtaattctacaacaaaagcatt

SEQ ID NO: 103636 - DNA, 22 bp, Artificial Sequence
  Synthetic oligonucleotide; TTC chr11 5340457 5340478 5340474 5340479 +
tacaacaaaagcattactcttt

SEQ ID NO: 103637 - DNA, 22 bp, Artificial Sequence
  Synthetic oligonucleotide; CTA chr11 5340459 5340480 5340476 5340481 +
caacaaaagcattactcttttt

SEQ ID NO: 103638 - DNA, 22 bp, Artificial Sequence
  Synthetic oligonucleotide; TTA chr11 5340473 5340494 5340490 5340495 +
ctctttttttttttgcaatgtc

SEQ ID NO: 103639 - DNA, 22 bp, Artificial Sequence
  Synthetic oligonucleotide; CTC chr11 5340476 5340497 5340493 5340498 +
tttttttttttgcaatgtcata

SEQ ID NO: 103640 - DNA, 22 bp, Artificial Sequence
  Synthetic oligonucleotide; CTT chr11 5340478 5340499 5340495 5340500 +
tttttttttgcaatgtcatatt

SEQ ID NO: 103641 - DNA, 22 bp, Artificial Sequence
  Synthetic oligonucleotide; TTT chr11 5340479 5340500 5340496 5340501 +
ttttttttgcaatgtcatattg

SEQ ID NO: 103642 - DNA, 22 bp, Artificial Sequence
  Synthetic oligonucleotide; TTT chr11 5340480 5340501 5340497 5340502 +
tttttttgcaatgtcatattga

SEQ ID NO: 103643 - DNA, 22 bp, Artificial Sequence
  Synthetic oligonucleotide; TTT chr11 5340481 5340502 5340498 5340503 +
ttttttgcaatgtcatattgaa

SEQ ID NO: 103644 - DNA, 22 bp, Artificial Sequence
  Synthetic oligonucleotide; TTT chr11 5340482 5340503 5340499 5340504 +
tttttgcaatgtcatattgaaa

SEQ ID NO: 103645 - DNA, 22 bp, Artificial Sequence
  Synthetic oligonucleotide; TTT chr11 5340483 5340504 5340500 5340505 +
ttttgcaatgtcatattgaaaa

SEQ ID NO: 103646 - DNA, 22 bp, Artificial Sequence
  Synthetic oligonucleotide; TTT chr11 5340484 5340505 5340501 5340506 +
tttgcaatgtcatattgaaaaa

SEQ ID NO: 103647 - DNA, 22 bp, Artificial Sequence
  Synthetic oligonucleotide; TTT chr11 5340485 5340506 5340502 5340507 +
ttgcaatgtcatattgaaaaat

SEQ ID NO: 103648 - DNA, 22 bp, Artificial Sequence
  Synthetic oligonucleotide; TTT chr11 5340486 5340507 5340503 5340508 +
tgcaatgtcatattgaaaaatt

SEQ ID NO: 103649 - DNA, 22 bp, Artificial Sequence
  Synthetic oligonucleotide; TTT chr11 5340487 5340508 5340504 5340509 +
gcaatgtcatattgaaaaattc

SEQ ID NO: 103650 - DNA, 22 bp, Artificial Sequence
  Synthetic oligonucleotide; TTG chr11 5340488 5340509 5340505 5340510 +
caatgtcatattgaaaaattct

SEQ ID NO: 103651 - DNA, 22 bp, Artificial Sequence
  Synthetic oligonucleotide; TTG chr11 5340501 5340522 5340518 5340523 +
aaaaattctttttaaaaaagtt

SEQ ID NO: 103652 - DNA, 22 bp, Artificial Sequence
  Synthetic oligonucleotide; TTC chr11 5340509 5340530 5340526 5340531 +
tttttaaaaaagttcttctact

SEQ ID NO: 103653 - DNA, 22 bp, Artificial Sequence
  Synthetic oligonucleotide; CTT chr11 5340511 5340532 5340528 5340533 +
tttaaaaaagttcttctactgc

SEQ ID NO: 103654 - DNA, 22 bp, Artificial Sequence
  Synthetic oligonucleotide; TTT chr11 5340512 5340533 5340529 5340534 +
ttaaaaaagttcttctactgcg

SEQ ID NO: 103655 - DNA, 22 bp, Artificial Sequence
  Synthetic oligonucleotide; TTT chr11 5340513 5340534 5340530 5340535 +
taaaaaagttcttctactgcgg

SEQ ID NO: 103656 - DNA, 22 bp, Artificial Sequence
  Synthetic oligonucleotide; TTT chr11 5340514 5340535 5340531 5340536 +
aaaaaagttcttctactgcggt

SEQ ID NO: 103657 - DNA, 22 bp, Artificial Sequence
  Synthetic oligonucleotide; TTA chr11 5340515 5340536 5340532 5340537 +
aaaaagttcttctactgcggtt

SEQ ID NO: 103658 - DNA, 22 bp, Artificial Sequence
  Synthetic oligonucleotide; TTC chr11 5340524 5340545 5340541 5340546 +
ttctactgcggttaggagtttg

SEQ ID NO: 103659 - DNA, 22 bp, Artificial Sequence
  Synthetic oligonucleotide; CTT chr11 5340526 5340547 5340543 5340548 +
ctactgcggttaggagtttgga

SEQ ID NO: 103660 - DNA, 22 bp, Artificial Sequence
  Synthetic oligonucleotide; TTC chr11 5340527 5340548 5340544 5340549 +
tactgcggttaggagtttggag

SEQ ID NO: 103661 - DNA, 22 bp, Artificial Sequence
  Synthetic oligonucleotide; CTA chr11 5340529 5340550 5340546 5340551 +
ctgcggttaggagtttggagat

SEQ ID NO: 103662 - DNA, 22 bp, Artificial Sequence
  Synthetic oligonucleotide; CTG chr11 5340532 5340553 5340549 5340554 +
cggttaggagtttggagataca

SEQ ID NO: 103663 - DNA, 22 bp, Artificial Sequence
  Synthetic oligonucleotide; TTA chr11 5340538 5340559 5340555 5340560 +
ggagtttggagatacaatgcaa

SEQ ID NO: 103664 - DNA, 22 bp, Artificial Sequence
  Synthetic oligonucleotide; TTT chr11 5340545 5340566 5340562 5340567 +
ggagatacaatgcaaaatatca

SEQ ID NO: 103665 - DNA, 22 bp, Artificial Sequence
  Synthetic oligonucleotide; TTG chr11 5340546 5340567 5340563 5340568 +
gagatacaatgcaaaatatcag

SEQ ID NO: 103666 - DNA, 22 bp, Artificial Sequence
  Synthetic oligonucleotide; TTT chr11 5340571 5340592 5340588 5340593 +
tcatagggaacaatatttttgg

SEQ ID NO: 103667 - DNA, 22 bp, Artificial Sequence
  Synthetic oligonucleotide; TTT chr11 5340572 5340593 5340589 5340594 +
catagggaacaatatttttgga

SEQ ID NO: 103668 - DNA, 22 bp, Artificial Sequence
  Synthetic oligonucleotide; TTC chr11 5340573 5340594 5340590 5340595 +
atagggaacaatatttttggag

SEQ ID NO: 103669 - DNA, 22 bp, Artificial Sequence
  Synthetic oligonucleotide; TTT chr11 5340589 5340610 5340606 5340611 +
ttggagtagaaggaggagaaat

SEQ ID NO: 103670 - DNA, 22 bp, Artificial Sequence
  Synthetic oligonucleotide; TTT chr11 5340590 5340611 5340607 5340612 +
tggagtagaaggaggagaaatt

SEQ ID NO: 103671 - DNA, 22 bp, Artificial Sequence
  Synthetic oligonucleotide; TTT chr11 5340591 5340612 5340608 5340613 +
ggagtagaaggaggagaaattt

SEQ ID NO: 103672 - DNA, 22 bp, Artificial Sequence
  Synthetic oligonucleotide; TTG chr11 5340592 5340613 5340609 5340614 +
gagtagaaggaggagaaatttt

SEQ ID NO: 103673 - DNA, 22 bp, Artificial Sequence
  Synthetic oligonucleotide; TTT chr11 5340613 5340634 5340630 5340635 +
tcagaaaaagaaagtaggtact

SEQ ID NO: 103674 - DNA, 22 bp, Artificial Sequence
  Synthetic oligonucleotide; TTT chr11 5340614 5340635 5340631 5340636 +
cagaaaaagaaagtaggtacta

SEQ ID NO: 103675 - DNA, 22 bp, Artificial Sequence
  Synthetic oligonucleotide; TTC chr11 5340615 5340636 5340632 5340637 +
agaaaaagaaagtaggtactac

SEQ ID NO: 103676 - DNA, 22 bp, Artificial Sequence
  Synthetic oligonucleotide; CTA chr11 5340636 5340657 5340653 5340658 +
caagcatgacggaatacaaggc

SEQ ID NO: 103677 - DNA, 22 bp, Artificial Sequence
  Synthetic oligonucleotide; CTA chr11 5340676 5340697 5340693 5340698 +
aggatagtctactgtagtggag

SEQ ID NO: 103678 - DNA, 22 bp, Artificial Sequence
  Synthetic oligonucleotide; CTA chr11 5340687 5340708 5340704 5340709 +
ctgtagtggagtaccattcaca

SEQ ID NO: 103679 - DNA, 22 bp, Artificial Sequence
  Synthetic oligonucleotide; CTG chr11 5340690 5340711 5340707 5340712 +
tagtggagtaccattcacactg

SEQ ID NO: 103680 - DNA, 22 bp, Artificial Sequence
  Synthetic oligonucleotide; TTC chr11 5340706 5340727 5340723 5340728 +
acactggccttatagttagaag

SEQ ID NO: 103681 - DNA, 22 bp, Artificial Sequence
  Synthetic oligonucleotide; CTG chr11 5340712 5340733 5340729 5340734 +
gccttatagttagaagatataa

SEQ ID NO: 103682 - DNA, 22 bp, Artificial Sequence
  Synthetic oligonucleotide; CTT chr11 5340717 5340738 5340734 5340739 +
atagttagaagatataaatttg

SEQ ID NO: 103683 - DNA, 22 bp, Artificial Sequence
  Synthetic oligonucleotide; TTA chr11 5340718 5340739 5340735 5340740 +
tagttagaagatataaatttga

SEQ ID NO: 103684 - DNA, 22 bp, Artificial Sequence
  Synthetic oligonucleotide; TTA chr11 5340724 5340745 5340741 5340746 +
gaagatataaatttgaatcatg

SEQ ID NO: 103685 - DNA, 22 bp, Artificial Sequence
  Synthetic oligonucleotide; TTT chr11 5340738 5340759 5340755 5340760 +
gaatcatgactataccaattaa

SEQ ID NO: 103686 - DNA, 22 bp, Artificial Sequence
  Synthetic oligonucleotide; TTG chr11 5340739 5340760 5340756 5340761 +
aatcatgactataccaattaaa

SEQ ID NO: 103687 - DNA, 22 bp, Artificial Sequence
  Synthetic oligonucleotide; CTA chr11 5340750 5340771 5340767 5340772 +
taccaattaaaaatgttatgcc

SEQ ID NO: 103688 - DNA, 22 bp, Artificial Sequence
  Synthetic oligonucleotide; TTA chr11 5340759 5340780 5340776 5340781 +
aaaatgttatgcccttggaggg

SEQ ID NO: 103689 - DNA, 22 bp, Artificial Sequence
  Synthetic oligonucleotide; TTA chr11 5340768 5340789 5340785 5340790 +
tgcccttggagggaatatttaa

SEQ ID NO: 103690 - DNA, 22 bp, Artificial Sequence
  Synthetic oligonucleotide; CTT chr11 5340775 5340796 5340792 5340797 +
ggagggaatatttaactttttt

SEQ ID NO: 103691 - DNA, 22 bp, Artificial Sequence
  Synthetic oligonucleotide; TTG chr11 5340776 5340797 5340793 5340798 +
gagggaatatttaactttttta

SEQ ID NO: 103692 - DNA, 22 bp, Artificial Sequence
  Synthetic oligonucleotide; TTT chr11 5340788 5340809 5340805 5340810 +
aacttttttatattaaatttcc

SEQ ID NO: 103693 - DNA, 22 bp, Artificial Sequence
  Synthetic oligonucleotide; TTA chr11 5340789 5340810 5340806 5340811 +
acttttttatattaaatttccc

SEQ ID NO: 103694 - DNA, 22 bp, Artificial Sequence
  Synthetic oligonucleotide; CTT chr11 5340793 5340814 5340810 5340815 +
ttttatattaaatttccccatc

SEQ ID NO: 103695 - DNA, 22 bp, Artificial Sequence
  Synthetic oligonucleotide; TTT chr11 5340794 5340815 5340811 5340816 +
tttatattaaatttccccatca

SEQ ID NO: 103696 - DNA, 22 bp, Artificial Sequence
  Synthetic oligonucleotide; TTT chr11 5340795 5340816 5340812 5340817 +
ttatattaaatttccccatcaa

SEQ ID NO: 103697 - DNA, 22 bp, Artificial Sequence
  Synthetic oligonucleotide; TTT chr11 5340796 5340817 5340813 5340818 +
tatattaaatttccccatcaag

SEQ ID NO: 103698 - DNA, 22 bp, Artificial Sequence
  Synthetic oligonucleotide; TTT chr11 5340797 5340818 5340814 5340819 +
atattaaatttccccatcaaga

SEQ ID NO: 103699 - DNA, 22 bp, Artificial Sequence
  Synthetic oligonucleotide; TTA chr11 5340798 5340819 5340815 5340820 +
tattaaatttccccatcaagaa

SEQ ID NO: 103700 - DNA, 22 bp, Artificial Sequence
  Synthetic oligonucleotide; TTA chr11 5340803 5340824 5340820 5340825 +
aatttccccatcaagaaaacag

SEQ ID NO: 103701 - DNA, 22 bp, Artificial Sequence
  Synthetic oligonucleotide; TTT chr11 5340808 5340829 5340825 5340830 +
ccccatcaagaaaacagtgata

SEQ ID NO: 103702 - DNA, 22 bp, Artificial Sequence
  Synthetic oligonucleotide; TTC chr11 5340809 5340830 5340826 5340831 +
cccatcaagaaaacagtgataa

SEQ ID NO: 103703 - DNA, 22 bp, Artificial Sequence
  Synthetic oligonucleotide; CTA chr11 5340837 5340858 5340854 5340859 +
ccccacaatatttttatgaata

SEQ ID NO: 103704 - DNA, 22 bp, Artificial Sequence
  Synthetic oligonucleotide; TTT chr11 5340850 5340871 5340867 5340872 +
ttatgaataaaataagttgtgg

SEQ ID NO: 103705 - DNA, 22 bp, Artificial Sequence
  Synthetic oligonucleotide; TTT chr11 5340851 5340872 5340868 5340873 +
tatgaataaaataagttgtgga

SEQ ID NO: 103706 - DNA, 22 bp, Artificial Sequence
  Synthetic oligonucleotide; TTT chr11 5340852 5340873 5340869 5340874 +
atgaataaaataagttgtggat

SEQ ID NO: 103707 - DNA, 22 bp, Artificial Sequence
  Synthetic oligonucleotide; TTA chr11 5340853 5340874 5340870 5340875 +
tgaataaaataagttgtggatg

SEQ ID NO: 103708 - DNA, 22 bp, Artificial Sequence
  Synthetic oligonucleotide; TTG chr11 5340869 5340890 5340886 5340891 +
tggatgtagtagagcataatta

SEQ ID NO: 103709 - DNA, 22 bp, Artificial Sequence
  Synthetic oligonucleotide; TTA chr11 5340891 5340912 5340908 5340913 +
agggacacatgtttggttttat

SEQ ID NO: 103710 - DNA, 22 bp, Artificial Sequence
  Synthetic oligonucleotide; TTT chr11 5340905 5340926 5340922 5340927 +
ggttttatgaatgattgaaaac

SEQ ID NO: 103711 - DNA, 22 bp, Artificial Sequence
  Synthetic oligonucleotide; TTG chr11 5340906 5340927 5340923 5340928 +
gttttatgaatgattgaaaaca

SEQ ID NO: 103712 - DNA, 22 bp, Artificial Sequence
  Synthetic oligonucleotide; TTT chr11 5340910 5340931 5340927 5340932 +
tatgaatgattgaaaacaggac

SEQ ID NO: 103713 - DNA, 22 bp, Artificial Sequence
  Synthetic oligonucleotide; TTT chr11 5340911 5340932 5340928 5340933 +
atgaatgattgaaaacaggaca

SEQ ID NO: 103714 - DNA, 22 bp, Artificial Sequence
  Synthetic oligonucleotide; TTA chr11 5340912 5340933 5340929 5340934 +
tgaatgattgaaaacaggacaa

SEQ ID NO: 103715 - DNA, 22 bp, Artificial Sequence
  Synthetic oligonucleotide; TTG chr11 5340922 5340943 5340939 5340944 +
aaaacaggacaaaaacctacca

SEQ ID NO: 103716 - DNA, 22 bp, Artificial Sequence
  Synthetic oligonucleotide; CTA chr11 5340941 5340962 5340958 5340963 +
ccatcacatatatgcactcaca

SEQ ID NO: 103717 - DNA, 22 bp, Artificial Sequence
  Synthetic oligonucleotide; CTC chr11 5340960 5340981 5340977 5340982 +
acactcacaatttagtattcag

SEQ ID NO: 103718 - DNA, 22 bp, Artificial Sequence
  Synthetic oligonucleotide; CTC chr11 5340966 5340987 5340983 5340988 +
acaatttagtattcagactgtg

SEQ ID NO: 103719 - DNA, 22 bp, Artificial Sequence
  Synthetic oligonucleotide; TTT chr11 5340973 5340994 5340990 5340995 +
agtattcagactgtgttgctca

SEQ ID NO: 103720 - DNA, 22 bp, Artificial Sequence
  Synthetic oligonucleotide; TTA chr11 5340974 5340995 5340991 5340996 +
gtattcagactgtgttgctcag

SEQ ID NO: 103721 - DNA, 22 bp, Artificial Sequence
  Synthetic oligonucleotide; TTC chr11 5340980 5341001 5340997 5341002 +
agactgtgttgctcaggtgaca

SEQ ID NO: 103722 - DNA, 22 bp, Artificial Sequence
  Synthetic oligonucleotide; CTG chr11 5340986 5341007 5341003 5341008 +
tgttgctcaggtgacatggcgt

SEQ ID NO: 103723 - DNA, 22 bp, Artificial Sequence
  Synthetic oligonucleotide; TTG chr11 5340991 5341012 5341008 5341013 +
ctcaggtgacatggcgtgacaa

SEQ ID NO: 103724 - DNA, 22 bp, Artificial Sequence
  Synthetic oligonucleotide; CTC chr11 5340994 5341015 5341011 5341016 +
aggtgacatggcgtgacaagga

SEQ ID NO: 103725 - DNA, 22 bp, Artificial Sequence
  Synthetic oligonucleotide; CTG chr11 5341036 5341057 5341053 5341058 +
atttttttatatgttcagttct

SEQ ID NO: 103726 - DNA, 22 bp, Artificial Sequence
  Synthetic oligonucleotide; TTT chr11 5341040 5341061 5341057 5341062 +
ttttatatgttcagttctttca

SEQ ID NO: 103727 - DNA, 22 bp, Artificial Sequence
  Synthetic oligonucleotide; TTT chr11 5341041 5341062 5341058 5341063 +
tttatatgttcagttctttcac

SEQ ID NO: 103728 - DNA, 22 bp, Artificial Sequence
  Synthetic oligonucleotide; TTT chr11 5341042 5341063 5341059 5341064 +
ttatatgttcagttctttcaca

SEQ ID NO: 103729 - DNA, 22 bp, Artificial Sequence
  Synthetic oligonucleotide; TTT chr11 5341043 5341064 5341060 5341065 +
tatatgttcagttctttcacaa

SEQ ID NO: 103730 - DNA, 22 bp, Artificial Sequence
  Synthetic oligonucleotide; TTT chr11 5341044 5341065 5341061 5341066 +
atatgttcagttctttcacaat

SEQ ID NO: 103731 - DNA, 22 bp, Artificial Sequence
  Synthetic oligonucleotide; TTA chr11 5341045 5341066 5341062 5341067 +
tatgttcagttctttcacaatt

SEQ ID NO: 103732 - DNA, 22 bp, Artificial Sequence
  Synthetic oligonucleotide; TTC chr11 5341052 5341073 5341069 5341074 +
agttctttcacaattacatctc

SEQ ID NO: 103733 - DNA, 22 bp, Artificial Sequence
  Synthetic oligonucleotide; TTC chr11 5341057 5341078 5341074 5341079 +
tttcacaattacatctcttaat

SEQ ID NO: 103734 - DNA, 22 bp, Artificial Sequence
  Synthetic oligonucleotide; CTT chr11 5341059 5341080 5341076 5341081 +
tcacaattacatctcttaatga

SEQ ID NO: 103735 - DNA, 22 bp, Artificial Sequence
  Synthetic oligonucleotide; TTT chr11 5341060 5341081 5341077 5341082 +
cacaattacatctcttaatgaa

SEQ ID NO: 103736 - DNA, 22 bp, Artificial Sequence
  Synthetic oligonucleotide; TTC chr11 5341061 5341082 5341078 5341083 +
acaattacatctcttaatgaaa

SEQ ID NO: 103737 - DNA, 22 bp, Artificial Sequence
  Synthetic oligonucleotide; TTA chr11 5341068 5341089 5341085 5341090 +
catctcttaatgaaacagaata

SEQ ID NO: 103738 - DNA, 22 bp, Artificial Sequence
  Synthetic oligonucleotide; CTC chr11 5341074 5341095 5341091 5341096 +
ttaatgaaacagaatataaata

SEQ ID NO: 103739 - DNA, 22 bp, Artificial Sequence
  Synthetic oligonucleotide; CTT chr11 5341076 5341097 5341093 5341098 +
aatgaaacagaatataaataag

SEQ ID NO: 103740 - DNA, 22 bp, Artificial Sequence
  Synthetic oligonucleotide; TTA chr11 5341077 5341098 5341094 5341099 +
atgaaacagaatataaataagg

SEQ ID NO: 103741 - DNA, 22 bp, Artificial Sequence
  Synthetic oligonucleotide; TTG chr11 5341103 5341124 5341120 5341125 +
cagtttttcttaagttggactc

SEQ ID NO: 103742 - DNA, 22 bp, Artificial Sequence
  Synthetic oligonucleotide; TTT chr11 5341109 5341130 5341126 5341131 +
ttcttaagttggactctctatg

SEQ ID NO: 103743 - DNA, 22 bp, Artificial Sequence
  Synthetic oligonucleotide; TTT chr11 5341110 5341131 5341127 5341132 +
tcttaagttggactctctatga

SEQ ID NO: 103744 - DNA, 22 bp, Artificial Sequence
  Synthetic oligonucleotide; TTT chr11 5341111 5341132 5341128 5341133 +
cttaagttggactctctatgag

SEQ ID NO: 103745 - DNA, 22 bp, Artificial Sequence
  Synthetic oligonucleotide; TTC chr11 5341112 5341133 5341129 5341134 +
ttaagttggactctctatgagc

SEQ ID NO: 103746 - DNA, 22 bp, Artificial Sequence
  Synthetic oligonucleotide; CTT chr11 5341114 5341135 5341131 5341136 +
aagttggactctctatgagcaa

SEQ ID NO: 103747 - DNA, 22 bp, Artificial Sequence
  Synthetic oligonucleotide; TTA chr11 5341115 5341136 5341132 5341137 +
agttggactctctatgagcaat

SEQ ID NO: 103748 - DNA, 22 bp, Artificial Sequence
  Synthetic oligonucleotide; TTG chr11 5341120 5341141 5341137 5341142 +
gactctctatgagcaatacctg

SEQ ID NO: 103749 - DNA, 22 bp, Artificial Sequence
  Synthetic oligonucleotide; CTC chr11 5341125 5341146 5341142 5341147 +
tctatgagcaatacctgagata

SEQ ID NO: 103750 - DNA, 22 bp, Artificial Sequence
  Synthetic oligonucleotide; CTC chr11 5341127 5341148 5341144 5341149 +
tatgagcaatacctgagatagg

SEQ ID NO: 103751 - DNA, 22 bp, Artificial Sequence
  Synthetic oligonucleotide; CTA chr11 5341129 5341150 5341146 5341151 +
tgagcaatacctgagataggga

SEQ ID NO: 103752 - DNA, 22 bp, Artificial Sequence
  Synthetic oligonucleotide; CTG chr11 5341142 5341163 5341159 5341164 +
agatagggattcaaatgtgtgc

SEQ ID NO: 103753 - DNA, 22 bp, Artificial Sequence
  Synthetic oligonucleotide; TTC chr11 5341154 5341175 5341171 5341176 +
aaatgtgtgcaatttattaatg

SEQ ID NO: 103754 - DNA, 22 bp, Artificial Sequence
  Synthetic oligonucleotide; TTT chr11 5341169 5341190 5341186 5341191 +
attaatgaatgctctcaggaga

SEQ ID NO: 103755 - DNA, 22 bp, Artificial Sequence
  Synthetic oligonucleotide; TTA chr11 5341170 5341191 5341187 5341192 +
ttaatgaatgctctcaggagac

SEQ ID NO: 103756 - DNA, 22 bp, Artificial Sequence
  Synthetic oligonucleotide; TTA chr11 5341173 5341194 5341190 5341195 +
atgaatgctctcaggagacagg

SEQ ID NO: 103757 - DNA, 22 bp, Artificial Sequence
  Synthetic oligonucleotide; CTC chr11 5341183 5341204 5341200 5341205 +
tcaggagacagggagcaagtaa

SEQ ID NO: 103758 - DNA, 22 bp, Artificial Sequence
  Synthetic oligonucleotide; CTC chr11 5341185 5341206 5341202 5341207 +
aggagacagggagcaagtaaaa

SEQ ID NO: 103759 - DNA, 22 bp, Artificial Sequence
  Synthetic oligonucleotide; CTG chr11 5341247 5341268 5341264 5341269 +
aagctggagcttagcttcagaa

SEQ ID NO: 103760 - DNA, 22 bp, Artificial Sequence
  Synthetic oligonucleotide; CTG chr11 5341253 5341274 5341270 5341275 +
gagcttagcttcagaaggcaag

SEQ ID NO: 103761 - DNA, 22 bp, Artificial Sequence
  Synthetic oligonucleotide; CTT chr11 5341259 5341280 5341276 5341281 +
agcttcagaaggcaagagggtc

SEQ ID NO: 103762 - DNA, 22 bp, Artificial Sequence
  Synthetic oligonucleotide; TTA chr11 5341260 5341281 5341277 5341282 +
gcttcagaaggcaagagggtca

SEQ ID NO: 103763 - DNA, 22 bp, Artificial Sequence
  Synthetic oligonucleotide; CTT chr11 5341264 5341285 5341281 5341286 +
cagaaggcaagagggtcagtat

SEQ ID NO: 103764 - DNA, 22 bp, Artificial Sequence
  Synthetic oligonucleotide; TTC chr11 5341265 5341286 5341282 5341287 +
agaaggcaagagggtcagtatt

SEQ ID NO: 103765 - DNA, 22 bp, Artificial Sequence
  Synthetic oligonucleotide; TTT chr11 5341288 5341309 5341305 5341310 +
gcctatggcctgctacctaagg

SEQ ID NO: 103766 - DNA, 22 bp, Artificial Sequence
  Synthetic oligonucleotide; TTG chr11 5341289 5341310 5341306 5341311 +
cctatggcctgctacctaagga

SEQ ID NO: 103767 - DNA, 22 bp, Artificial Sequence
  Synthetic oligonucleotide; CTA chr11 5341293 5341314 5341310 5341315 +
tggcctgctacctaaggagcag

SEQ ID NO: 103768 - DNA, 22 bp, Artificial Sequence
  Synthetic oligonucleotide; CTG chr11 5341300 5341321 5341317 5341322 +
ctacctaaggagcaggggccat

SEQ ID NO: 103769 - DNA, 22 bp, Artificial Sequence
  Synthetic oligonucleotide; CTA chr11 5341303 5341324 5341320 5341325 +
cctaaggagcaggggccatttt

SEQ ID NO: 103770 - DNA, 22 bp, Artificial Sequence
  Synthetic oligonucleotide; CTA chr11 5341307 5341328 5341324 5341329 +
aggagcaggggccattttcttc

SEQ ID NO: 103771 - DNA, 22 bp, Artificial Sequence
  Synthetic oligonucleotide; TTT chr11 5341324 5341345 5341341 5341346 +
tcttcataagacatttcctgct

SEQ ID NO: 103772 - DNA, 22 bp, Artificial Sequence
  Synthetic oligonucleotide; TTT chr11 5341325 5341346 5341342 5341347 +
cttcataagacatttcctgctg

SEQ ID NO: 103773 - DNA, 22 bp, Artificial Sequence
  Synthetic oligonucleotide; TTC chr11 5341326 5341347 5341343 5341348 +
ttcataagacatttcctgctga

SEQ ID NO: 103774 - DNA, 22 bp, Artificial Sequence
  Synthetic oligonucleotide; CTT chr11 5341328 5341349 5341345 5341350 +
cataagacatttcctgctgagt

SEQ ID NO: 103775 - DNA, 22 bp, Artificial Sequence
  Synthetic oligonucleotide; TTC chr11 5341329 5341350 5341346 5341351 +
ataagacatttcctgctgagtt

SEQ ID NO: 103776 - DNA, 22 bp, Artificial Sequence
  Synthetic oligonucleotide; TTT chr11 5341340 5341361 5341357 5341362 +
cctgctgagttgagaacaacaa

SEQ ID NO: 103777 - DNA, 22 bp, Artificial Sequence
  Synthetic oligonucleotide; TTC chr11 5341341 5341362 5341358 5341363 +
ctgctgagttgagaacaacaac

SEQ ID NO: 103778 - DNA, 22 bp, Artificial Sequence
  Synthetic oligonucleotide; CTG chr11 5341344 5341365 5341361 5341366 +
ctgagttgagaacaacaacctg

SEQ ID NO: 103779 - DNA, 22 bp, Artificial Sequence
  Synthetic oligonucleotide; CTG chr11 5341347 5341368 5341364 5341369 +
agttgagaacaacaacctgcag

SEQ ID NO: 103780 - DNA, 22 bp, Artificial Sequence
  Synthetic oligonucleotide; TTG chr11 5341352 5341373 5341369 5341374 +
agaacaacaacctgcagaaagc

SEQ ID NO: 103781 - DNA, 22 bp, Artificial Sequence
  Synthetic oligonucleotide; CTG chr11 5341366 5341387 5341383 5341388 +
cagaaagcagaaacatgaacaa

SEQ ID NO: 103782 - DNA, 22 bp, Artificial Sequence
  Synthetic oligonucleotide; TTC chr11 5341404 5341425 5341421 5341426 +
acaggtgcacaattctgtaaaa

SEQ ID NO: 103783 - DNA, 22 bp, Artificial Sequence
  Synthetic oligonucleotide; TTC chr11 5341419 5341440 5341436 5341441 +
tgtaaaatgatcggggtaaaac

SEQ ID NO: 103784 - DNA, 22 bp, Artificial Sequence
  Synthetic oligonucleotide; CTG chr11 5341421 5341442 5341438 5341443 +
taaaatgatcggggtaaaacac

SEQ ID NO: 103785 - DNA, 22 bp, Artificial Sequence
  Synthetic oligonucleotide; CTT chr11 5341464 5341485 5341481 5341486 +
ctatatagtcccctctcttgtc

SEQ ID NO: 103786 - DNA, 22 bp, Artificial Sequence
  Synthetic oligonucleotide; TTC chr11 5341465 5341486 5341482 5341487 +
tatatagtcccctctcttgtct

SEQ ID NO: 103787 - DNA, 22 bp, Artificial Sequence
  Synthetic oligonucleotide; CTA chr11 5341467 5341488 5341484 5341489 +
tatagtcccctctcttgtctca

SEQ ID NO: 103788 - DNA, 22 bp, Artificial Sequence
  Synthetic oligonucleotide; CTC chr11 5341479 5341500 5341496 5341501 +
tcttgtctcactgaagtattat

SEQ ID NO: 103789 - DNA, 22 bp, Artificial Sequence
  Synthetic oligonucleotide; CTC chr11 5341481 5341502 5341498 5341503 +
ttgtctcactgaagtattattt

SEQ ID NO: 103790 - DNA, 22 bp, Artificial Sequence
  Synthetic oligonucleotide; CTT chr11 5341483 5341504 5341500 5341505 +
gtctcactgaagtattattttt

SEQ ID NO: 103791 - DNA, 22 bp, Artificial Sequence
  Synthetic oligonucleotide; TTG chr11 5341484 5341505 5341501 5341506 +
tctcactgaagtattatttttg

SEQ ID NO: 103792 - DNA, 22 bp, Artificial Sequence
  Synthetic oligonucleotide; CTC chr11 5341488 5341509 5341505 5341510 +
actgaagtattatttttgctct

SEQ ID NO: 103793 - DNA, 22 bp, Artificial Sequence
  Synthetic oligonucleotide; CTG chr11 5341492 5341513 5341509 5341514 +
aagtattatttttgctctgatt

SEQ ID NO: 103794 - DNA, 22 bp, Artificial Sequence
  Synthetic oligonucleotide; TTA chr11 5341500 5341521 5341517 5341522 +
tttttgctctgattaaagtata

SEQ ID NO: 103795 - DNA, 22 bp, Artificial Sequence
  Synthetic oligonucleotide; TTT chr11 5341503 5341524 5341520 5341525 +
ttgctctgattaaagtataatt

SEQ ID NO: 103796 - DNA, 22 bp, Artificial Sequence
  Synthetic oligonucleotide; TTT chr11 5341504 5341525 5341521 5341526 +
tgctctgattaaagtataatta

SEQ ID NO: 103797 - DNA, 22 bp, Artificial Sequence
  Synthetic oligonucleotide; TTT chr11 5341505 5341526 5341522 5341527 +
gctctgattaaagtataattaa

SEQ ID NO: 103798 - DNA, 22 bp, Artificial Sequence
  Synthetic oligonucleotide; TTG chr11 5341506 5341527 5341523 5341528 +
ctctgattaaagtataattaag

SEQ ID NO: 103799 - DNA, 22 bp, Artificial Sequence
  Synthetic oligonucleotide; CTC chr11 5341509 5341530 5341526 5341531 +
tgattaaagtataattaagaca

SEQ ID NO: 103800 - DNA, 22 bp, Artificial Sequence
  Synthetic oligonucleotide; CTG chr11 5341511 5341532 5341528 5341533 +
attaaagtataattaagacata

SEQ ID NO: 103801 - DNA, 22 bp, Artificial Sequence
  Synthetic oligonucleotide; TTA chr11 5341515 5341536 5341532 5341537 +
aagtataattaagacataacct

SEQ ID NO: 103802 - DNA, 22 bp, Artificial Sequence
  Synthetic oligonucleotide; TTA chr11 5341526 5341547 5341543 5341548 +
agacataacctccctcttttta

SEQ ID NO: 103803 - DNA, 22 bp, Artificial Sequence
  Synthetic oligonucleotide; CTC chr11 5341538 5341559 5341555 5341560 +
cctctttttaggatattttaaa

SEQ ID NO: 103804 - DNA, 22 bp, Artificial Sequence
  Synthetic oligonucleotide; CTC chr11 5341542 5341563 5341559 5341564 +
tttttaggatattttaaattga

SEQ ID NO: 103805 - DNA, 22 bp, Artificial Sequence
  Synthetic oligonucleotide; CTT chr11 5341544 5341565 5341561 5341566 +
tttaggatattttaaattgagt

SEQ ID NO: 103806 - DNA, 22 bp, Artificial Sequence
  Synthetic oligonucleotide; TTT chr11 5341545 5341566 5341562 5341567 +
ttaggatattttaaattgagtt

SEQ ID NO: 103807 - DNA, 22 bp, Artificial Sequence
  Synthetic oligonucleotide; TTT chr11 5341546 5341567 5341563 5341568 +
taggatattttaaattgagtta

SEQ ID NO: 103808 - DNA, 22 bp, Artificial Sequence
  Synthetic oligonucleotide; TTT chr11 5341547 5341568 5341564 5341569 +
aggatattttaaattgagttat

SEQ ID NO: 103809 - DNA, 22 bp, Artificial Sequence
  Synthetic oligonucleotide; TTA chr11 5341548 5341569 5341565 5341570 +
ggatattttaaattgagttatg

SEQ ID NO: 103810 - DNA, 22 bp, Artificial Sequence
  Synthetic oligonucleotide; TTT chr11 5341556 5341577 5341573 5341578 +
taaattgagttatgggtccctt

SEQ ID NO: 103811 - DNA, 22 bp, Artificial Sequence
  Synthetic oligonucleotide; TTT chr11 5341557 5341578 5341574 5341579 +
aaattgagttatgggtcccttc

SEQ ID NO: 103812 - DNA, 22 bp, Artificial Sequence
  Synthetic oligonucleotide; TTA chr11 5341558 5341579 5341575 5341580 +
aattgagttatgggtcccttcc

SEQ ID NO: 103813 - DNA, 22 bp, Artificial Sequence
  Synthetic oligonucleotide; TTG chr11 5341563 5341584 5341580 5341585 +
agttatgggtcccttcctaact

SEQ ID NO: 103814 - DNA, 22 bp, Artificial Sequence
  Synthetic oligonucleotide; TTA chr11 5341568 5341589 5341585 5341590 +
tgggtcccttcctaactcatca

SEQ ID NO: 103815 - DNA, 22 bp, Artificial Sequence
  Synthetic oligonucleotide; CTT chr11 5341578 5341599 5341595 5341600 +
cctaactcatcagacaatttta

SEQ ID NO: 103816 - DNA, 22 bp, Artificial Sequence
  Synthetic oligonucleotide; TTC chr11 5341579 5341600 5341596 5341601 +
ctaactcatcagacaattttaa

SEQ ID NO: 103817 - DNA, 22 bp, Artificial Sequence
  Synthetic oligonucleotide; CTA chr11 5341582 5341603 5341599 5341604 +
actcatcagacaattttaatca

SEQ ID NO: 103818 - DNA, 22 bp, Artificial Sequence
  Synthetic oligonucleotide; CTC chr11 5341586 5341607 5341603 5341608 +
atcagacaattttaatcaaatg

SEQ ID NO: 103819 - DNA, 22 bp, Artificial Sequence
  Synthetic oligonucleotide; TTT chr11 5341598 5341619 5341615 5341620 +
taatcaaatgagaatgacattg

SEQ ID NO: 103820 - DNA, 22 bp, Artificial Sequence
  Synthetic oligonucleotide; TTT chr11 5341599 5341620 5341616 5341621 +
aatcaaatgagaatgacattgt

SEQ ID NO: 103821 - DNA, 22 bp, Artificial Sequence
  Synthetic oligonucleotide; TTA chr11 5341600 5341621 5341617 5341622 +
atcaaatgagaatgacattgtt

SEQ ID NO: 103822 - DNA, 22 bp, Artificial Sequence
  Synthetic oligonucleotide; TTG chr11 5341620 5341641 5341637 5341642 +
ttgtattctttgggaaatttac

SEQ ID NO: 103823 - DNA, 22 bp, Artificial Sequence
  Synthetic oligonucleotide; TTG chr11 5341623 5341644 5341640 5341645 +
tattctttgggaaatttacact

SEQ ID NO: 103824 - DNA, 22 bp, Artificial Sequence
  Synthetic oligonucleotide; TTC chr11 5341628 5341649 5341645 5341650 +
tttgggaaatttacacttatta

SEQ ID NO: 103825 - DNA, 22 bp, Artificial Sequence
  Synthetic oligonucleotide; CTT chr11 5341630 5341651 5341647 5341652 +
tgggaaatttacacttattaca

SEQ ID NO: 103826 - DNA, 22 bp, Artificial Sequence
  Synthetic oligonucleotide; TTT chr11 5341631 5341652 5341648 5341653 +
gggaaatttacacttattacat

SEQ ID NO: 103827 - DNA, 22 bp, Artificial Sequence
  Synthetic oligonucleotide; TTG chr11 5341632 5341653 5341649 5341654 +
ggaaatttacacttattacatg

SEQ ID NO: 103828 - DNA, 22 bp, Artificial Sequence
  Synthetic oligonucleotide; TTT chr11 5341640 5341661 5341657 5341662 +
acacttattacatggaatcaga

SEQ ID NO: 103829 - DNA, 22 bp, Artificial Sequence
  Synthetic oligonucleotide; TTA chr11 5341641 5341662 5341658 5341663 +
cacttattacatggaatcagaa

SEQ ID NO: 103830 - DNA, 22 bp, Artificial Sequence
  Synthetic oligonucleotide; CTT chr11 5341646 5341667 5341663 5341668 +
attacatggaatcagaatgtat

SEQ ID NO: 103831 - DNA, 22 bp, Artificial Sequence
  Synthetic oligonucleotide; TTA chr11 5341647 5341668 5341664 5341669 +
ttacatggaatcagaatgtatg

SEQ ID NO: 103832 - DNA, 22 bp, Artificial Sequence
  Synthetic oligonucleotide; TTA chr11 5341650 5341671 5341667 5341672 +
catggaatcagaatgtatgtac

SEQ ID NO: 103833 - DNA, 22 bp, Artificial Sequence
  Synthetic oligonucleotide; TTC chr11 5341687 5341708 5341704 5341709 +
ttcaaaaaaatgcagaaaccta

SEQ ID NO: 103834 - DNA, 22 bp, Artificial Sequence
  Synthetic oligonucleotide; CTT chr11 5341689 5341710 5341706 5341711 +
caaaaaaatgcagaaacctatt

SEQ ID NO: 103835 - DNA, 22 bp, Artificial Sequence
  Synthetic oligonucleotide; TTC chr11 5341690 5341711 5341707 5341712 +
aaaaaaatgcagaaacctattt

SEQ ID NO: 103836 - DNA, 22 bp, Artificial Sequence
  Synthetic oligonucleotide; CTA chr11 5341709 5341730 5341726 5341731 +
tttttttttgttccttcagacc

SEQ ID NO: 103837 - DNA, 22 bp, Artificial Sequence
  Synthetic oligonucleotide; TTT chr11 5341712 5341733 5341729 5341734 +
ttttttgttccttcagaccttt

SEQ ID NO: 103838 - DNA, 22 bp, Artificial Sequence
  Synthetic oligonucleotide; TTT chr11 5341713 5341734 5341730 5341735 +
tttttgttccttcagacctttt

SEQ ID NO: 103839 - DNA, 22 bp, Artificial Sequence
  Synthetic oligonucleotide; TTT chr11 5341714 5341735 5341731 5341736 +
ttttgttccttcagaccttttt

SEQ ID NO: 103840 - DNA, 22 bp, Artificial Sequence
  Synthetic oligonucleotide; TTT chr11 5341715 5341736 5341732 5341737 +
tttgttccttcagacctttttc

SEQ ID NO: 103841 - DNA, 22 bp, Artificial Sequence
  Synthetic oligonucleotide; TTT chr11 5341716 5341737 5341733 5341738 +
ttgttccttcagacctttttca

SEQ ID NO: 103842 - DNA, 22 bp, Artificial Sequence
  Synthetic oligonucleotide; TTT chr11 5341717 5341738 5341734 5341739 +
tgttccttcagacctttttcat

SEQ ID NO: 103843 - DNA, 22 bp, Artificial Sequence
  Synthetic oligonucleotide; TTT chr11 5341718 5341739 5341735 5341740 +
gttccttcagacctttttcata

SEQ ID NO: 103844 - DNA, 22 bp, Artificial Sequence
  Synthetic oligonucleotide; TTG chr11 5341719 5341740 5341736 5341741 +
ttccttcagacctttttcatag

SEQ ID NO: 103845 - DNA, 22 bp, Artificial Sequence
  Synthetic oligonucleotide; TTC chr11 5341722 5341743 5341739 5341744 +
cttcagacctttttcatagcaa

SEQ ID NO: 103846 - DNA, 22 bp, Artificial Sequence
  Synthetic oligonucleotide; CTT chr11 5341725 5341746 5341742 5341747 +
cagacctttttcatagcaaaag

SEQ ID NO: 103847 - DNA, 22 bp, Artificial Sequence
  Synthetic oligonucleotide; TTC chr11 5341726 5341747 5341743 5341748 +
agacctttttcatagcaaaagg

SEQ ID NO: 103848 - DNA, 22 bp, Artificial Sequence
  Synthetic oligonucleotide; CTT chr11 5341733 5341754 5341750 5341755 +
tttcatagcaaaaggagggtga

SEQ ID NO: 103849 - DNA, 22 bp, Artificial Sequence
  Synthetic oligonucleotide; TTT chr11 5341734 5341755 5341751 5341756 +
ttcatagcaaaaggagggtgaa

SEQ ID NO: 103850 - DNA, 22 bp, Artificial Sequence
  Synthetic oligonucleotide; TTT chr11 5341735 5341756 5341752 5341757 +
tcatagcaaaaggagggtgaag

SEQ ID NO: 103851 - DNA, 22 bp, Artificial Sequence
  Synthetic oligonucleotide; TTT chr11 5341736 5341757 5341753 5341758 +
catagcaaaaggagggtgaagg

SEQ ID NO: 103852 - DNA, 22 bp, Artificial Sequence
  Synthetic oligonucleotide; TTC chr11 5341737 5341758 5341754 5341759 +
atagcaaaaggagggtgaagga

SEQ ID NO: 103853 - DNA, 22 bp, Artificial Sequence
  Synthetic oligonucleotide; CTG chr11 5341763 5341784 5341780 5341785 +
tctcttccactaatttggacta

SEQ ID NO: 103854 - DNA, 22 bp, Artificial Sequence
  Synthetic oligonucleotide; CTC chr11 5341767 5341788 5341784 5341789 +
ttccactaatttggactagtca

SEQ ID NO: 103855 - DNA, 22 bp, Artificial Sequence
  Synthetic oligonucleotide; CTT chr11 5341769 5341790 5341786 5341791 +
ccactaatttggactagtcagc

SEQ ID NO: 103856 - DNA, 22 bp, Artificial Sequence
  Synthetic oligonucleotide; TTC chr11 5341770 5341791 5341787 5341792 +
cactaatttggactagtcagcc

SEQ ID NO: 103857 - DNA, 22 bp, Artificial Sequence
  Synthetic oligonucleotide; CTA chr11 5341775 5341796 5341792 5341797 +
atttggactagtcagccagcgt

SEQ ID NO: 103858 - DNA, 22 bp, Artificial Sequence
  Synthetic oligonucleotide; TTT chr11 5341779 5341800 5341796 5341801 +
ggactagtcagccagcgtagat

SEQ ID NO: 103859 - DNA, 22 bp, Artificial Sequence
  Synthetic oligonucleotide; TTG chr11 5341780 5341801 5341797 5341802 +
gactagtcagccagcgtagata

SEQ ID NO: 103860 - DNA, 22 bp, Artificial Sequence
  Synthetic oligonucleotide; CTA chr11 5341785 5341806 5341802 5341807 +
gtcagccagcgtagatatctga

SEQ ID NO: 103861 - DNA, 22 bp, Artificial Sequence
  Synthetic oligonucleotide; CTG chr11 5341806 5341827 5341823 5341828 +
aggatggcctcaacattggagc

SEQ ID NO: 103862 - DNA, 22 bp, Artificial Sequence
  Synthetic oligonucleotide; CTC chr11 5341817 5341838 5341834 5341839 +
aacattggagctagcaactagg

SEQ ID NO: 103863 - DNA, 22 bp, Artificial Sequence
  Synthetic oligonucleotide; TTG chr11 5341824 5341845 5341841 5341846 +
gagctagcaactagggtagtag

SEQ ID NO: 103864 - DNA, 22 bp, Artificial Sequence
  Synthetic oligonucleotide; CTA chr11 5341830 5341851 5341847 5341852 +
gcaactagggtagtagaataag

SEQ ID NO: 103865 - DNA, 22 bp, Artificial Sequence
  Synthetic oligonucleotide; CTA chr11 5341837 5341858 5341854 5341859 +
gggtagtagaataagaatgaga

SEQ ID NO: 103866 - DNA, 22 bp, Artificial Sequence
  Synthetic oligonucleotide; CTG chr11 5341880 5341901 5341897 5341902 +
actgtgtctacgtcctctcatt

SEQ ID NO: 103867 - DNA, 22 bp, Artificial Sequence
  Synthetic oligonucleotide; CTG chr11 5341884 5341905 5341901 5341906 +
tgtctacgtcctctcatttatc

SEQ ID NO: 103868 - DNA, 22 bp, Artificial Sequence
  Synthetic oligonucleotide; CTA chr11 5341890 5341911 5341907 5341912 +
cgtcctctcatttatccgtgat

SEQ ID NO: 103869 - DNA, 22 bp, Artificial Sequence
  Synthetic oligonucleotide; CTC chr11 5341897 5341918 5341914 5341919 +
tcatttatccgtgattcctctt

SEQ ID NO: 103870 - DNA, 22 bp, Artificial Sequence
  Synthetic oligonucleotide; CTC chr11 5341899 5341920 5341916 5341921 +
atttatccgtgattcctcttct

SEQ ID NO: 103871 - DNA, 22 bp, Artificial Sequence
  Synthetic oligonucleotide; TTT chr11 5341903 5341924 5341920 5341925 +
atccgtgattcctcttctcaca

SEQ ID NO: 103872 - DNA, 22 bp, Artificial Sequence
  Synthetic oligonucleotide; TTA chr11 5341904 5341925 5341921 5341926 +
tccgtgattcctcttctcacat

SEQ ID NO: 103873 - DNA, 22 bp, Artificial Sequence
  Synthetic oligonucleotide; TTC chr11 5341914 5341935 5341931 5341936 +
ctcttctcacatttttttgtta

SEQ ID NO: 103874 - DNA, 22 bp, Artificial Sequence
  Synthetic oligonucleotide; CTC chr11 5341917 5341938 5341934 5341939 +
ttctcacatttttttgttacaa

SEQ ID NO: 103875 - DNA, 22 bp, Artificial Sequence
  Synthetic oligonucleotide; CTT chr11 5341919 5341940 5341936 5341941 +
ctcacatttttttgttacaagt

SEQ ID NO: 103876 - DNA, 22 bp, Artificial Sequence
  Synthetic oligonucleotide; TTC chr11 5341920 5341941 5341937 5341942 +
tcacatttttttgttacaagtt

SEQ ID NO: 103877 - DNA, 22 bp, Artificial Sequence
  Synthetic oligonucleotide; CTC chr11 5341922 5341943 5341939 5341944 +
acatttttttgttacaagtttg

SEQ ID NO: 103878 - DNA, 22 bp, Artificial Sequence
  Synthetic oligonucleotide; TTT chr11 5341928 5341949 5341945 5341950 +
ttttgttacaagtttgtcagaa

SEQ ID NO: 103879 - DNA, 22 bp, Artificial Sequence
  Synthetic oligonucleotide; TTT chr11 5341929 5341950 5341946 5341951 +
tttgttacaagtttgtcagaag

SEQ ID NO: 103880 - DNA, 22 bp, Artificial Sequence
  Synthetic oligonucleotide; TTT chr11 5341930 5341951 5341947 5341952 +
ttgttacaagtttgtcagaagg

SEQ ID NO: 103881 - DNA, 22 bp, Artificial Sequence
  Synthetic oligonucleotide; TTT chr11 5341931 5341952 5341948 5341953 +
tgttacaagtttgtcagaaggt

SEQ ID NO: 103882 - DNA, 22 bp, Artificial Sequence
  Synthetic oligonucleotide; TTT chr11 5341932 5341953 5341949 5341954 +
gttacaagtttgtcagaaggta

SEQ ID NO: 103883 - DNA, 22 bp, Artificial Sequence
  Synthetic oligonucleotide; TTG chr11 5341933 5341954 5341950 5341955 +
ttacaagtttgtcagaaggtac

SEQ ID NO: 103884 - DNA, 22 bp, Artificial Sequence
  Synthetic oligonucleotide; TTA chr11 5341936 5341957 5341953 5341958 +
caagtttgtcagaaggtactgc

SEQ ID NO: 103885 - DNA, 22 bp, Artificial Sequence
  Synthetic oligonucleotide; TTT chr11 5341943 5341964 5341960 5341965 +
gtcagaaggtactgccttgggg

SEQ ID NO: 103886 - DNA, 22 bp, Artificial Sequence
  Synthetic oligonucleotide; TTG chr11 5341944 5341965 5341961 5341966 +
tcagaaggtactgccttgggga

SEQ ID NO: 103887 - DNA, 22 bp, Artificial Sequence
  Synthetic oligonucleotide; CTG chr11 5341957 5341978 5341974 5341979 +
ccttggggaataaatatgagtt

SEQ ID NO: 103888 - DNA, 22 bp, Artificial Sequence
  Synthetic oligonucleotide; CTT chr11 5341961 5341982 5341978 5341983 +
ggggaataaatatgagtttatg

SEQ ID NO: 103889 - DNA, 22 bp, Artificial Sequence
  Synthetic oligonucleotide; TTG chr11 5341962 5341983 5341979 5341984 +
gggaataaatatgagtttatgg

SEQ ID NO: 103890 - DNA, 22 bp, Artificial Sequence
  Synthetic oligonucleotide; TTT chr11 5341980 5342001 5341997 5342002 +
atggtttttgagacaaattcat

SEQ ID NO: 103891 - DNA, 22 bp, Artificial Sequence
  Synthetic oligonucleotide; TTA chr11 5341981 5342002 5341998 5342003 +
tggtttttgagacaaattcatt

SEQ ID NO: 103892 - DNA, 22 bp, Artificial Sequence
  Synthetic oligonucleotide; TTT chr11 5341987 5342008 5342004 5342009 +
ttgagacaaattcattataatt

SEQ ID NO: 103893 - DNA, 22 bp, Artificial Sequence
  Synthetic oligonucleotide; TTT chr11 5341988 5342009 5342005 5342010 +
tgagacaaattcattataattt

SEQ ID NO: 103894 - DNA, 22 bp, Artificial Sequence
  Synthetic oligonucleotide; TTT chr11 5341989 5342010 5342006 5342011 +
gagacaaattcattataatttg

SEQ ID NO: 103895 - DNA, 22 bp, Artificial Sequence
  Synthetic oligonucleotide; TTG chr11 5341990 5342011 5342007 5342012 +
agacaaattcattataatttga

SEQ ID NO: 103896 - DNA, 22 bp, Artificial Sequence
  Synthetic oligonucleotide; TTC chr11 5342000 5342021 5342017 5342022 +
attataatttgatggagggagg

SEQ ID NO: 103897 - DNA, 22 bp, Artificial Sequence
  Synthetic oligonucleotide; TTA chr11 5342004 5342025 5342021 5342026 +
taatttgatggagggaggagga

SEQ ID NO: 103898 - DNA, 22 bp, Artificial Sequence
  Synthetic oligonucleotide; TTT chr11 5342010 5342031 5342027 5342032 +
gatggagggaggaggaaccaac

SEQ ID NO: 103899 - DNA, 22 bp, Artificial Sequence
  Synthetic oligonucleotide; TTG chr11 5342011 5342032 5342028 5342033 +
atggagggaggaggaaccaact

SEQ ID NO: 103900 - DNA, 22 bp, Artificial Sequence
  Synthetic oligonucleotide; CTA chr11 5342034 5342055 5342051 5342056 +
gactgttgagatgataagtaat

SEQ ID NO: 103901 - DNA, 22 bp, Artificial Sequence
  Synthetic oligonucleotide; CTG chr11 5342039 5342060 5342056 5342061 +
ttgagatgataagtaattaggt

SEQ ID NO: 103902 - DNA, 22 bp, Artificial Sequence
  Synthetic oligonucleotide; TTG chr11 5342042 5342063 5342059 5342064 +
agatgataagtaattaggtcac

SEQ ID NO: 103903 - DNA, 22 bp, Artificial Sequence
  Synthetic oligonucleotide; TTA chr11 5342058 5342079 5342075 5342080 +
ggtcactgatcaaagaagatta

SEQ ID NO: 103904 - DNA, 22 bp, Artificial Sequence
  Synthetic oligonucleotide; CTG chr11 5342066 5342087 5342083 5342088 +
atcaaagaagattatattcttt

SEQ ID NO: 103905 - DNA, 22 bp, Artificial Sequence
  Synthetic oligonucleotide; TTA chr11 5342080 5342101 5342097 5342102 +
tattcttttttgcaggaaaatt

SEQ ID NO: 103906 - DNA, 22 bp, Artificial Sequence
  Synthetic oligonucleotide; TTC chr11 5342085 5342106 5342102 5342107 +
ttttttgcaggaaaattcctgg

SEQ ID NO: 103907 - DNA, 22 bp, Artificial Sequence
  Synthetic oligonucleotide; CTT chr11 5342087 5342108 5342104 5342109 +
ttttgcaggaaaattcctggac

SEQ ID NO: 103908 - DNA, 22 bp, Artificial Sequence
  Synthetic oligonucleotide; TTT chr11 5342088 5342109 5342105 5342110 +
tttgcaggaaaattcctggact

SEQ ID NO: 103909 - DNA, 22 bp, Artificial Sequence
  Synthetic oligonucleotide; TTT chr11 5342089 5342110 5342106 5342111 +
ttgcaggaaaattcctggactt

SEQ ID NO: 103910 - DNA, 22 bp, Artificial Sequence
  Synthetic oligonucleotide; TTT chr11 5342090 5342111 5342107 5342112 +
tgcaggaaaattcctggacttc

SEQ ID NO: 103911 - DNA, 22 bp, Artificial Sequence
  Synthetic oligonucleotide; TTT chr11 5342091 5342112 5342108 5342113 +
gcaggaaaattcctggacttca

SEQ ID NO: 103912 - DNA, 22 bp, Artificial Sequence
  Synthetic oligonucleotide; TTG chr11 5342092 5342113 5342109 5342114 +
caggaaaattcctggacttcag

SEQ ID NO: 103913 - DNA, 22 bp, Artificial Sequence
  Synthetic oligonucleotide; TTC chr11 5342103 5342124 5342120 5342125 +
ctggacttcagtgaccaaattt

SEQ ID NO: 103914 - DNA, 22 bp, Artificial Sequence
  Synthetic oligonucleotide; CTG chr11 5342106 5342127 5342123 5342128 +
gacttcagtgaccaaatttata

SEQ ID NO: 103915 - DNA, 22 bp, Artificial Sequence
  Synthetic oligonucleotide; CTT chr11 5342111 5342132 5342128 5342133 +
cagtgaccaaatttataggttc

SEQ ID NO: 103916 - DNA, 22 bp, Artificial Sequence
  Synthetic oligonucleotide; TTC chr11 5342112 5342133 5342129 5342134 +
agtgaccaaatttataggttcc

SEQ ID NO: 103917 - DNA, 22 bp, Artificial Sequence
  Synthetic oligonucleotide; TTT chr11 5342125 5342146 5342142 5342147 +
ataggttcccattgtttgtatg

SEQ ID NO: 103918 - DNA, 22 bp, Artificial Sequence
  Synthetic oligonucleotide; TTA chr11 5342126 5342147 5342143 5342148 +
taggttcccattgtttgtatgg

SEQ ID NO: 103919 - DNA, 22 bp, Artificial Sequence
  Synthetic oligonucleotide; TTC chr11 5342133 5342154 5342150 5342155 +
ccattgtttgtatggacacctg

SEQ ID NO: 103920 - DNA, 22 bp, Artificial Sequence
  Synthetic oligonucleotide; TTG chr11 5342139 5342160 5342156 5342161 +
tttgtatggacacctgcagaga

SEQ ID NO: 103921 - DNA, 22 bp, Artificial Sequence
  Synthetic oligonucleotide; TTT chr11 5342142 5342163 5342159 5342164 +
gtatggacacctgcagagaaat

SEQ ID NO: 103922 - DNA, 22 bp, Artificial Sequence
  Synthetic oligonucleotide; TTG chr11 5342143 5342164 5342160 5342165 +
tatggacacctgcagagaaatt

SEQ ID NO: 103923 - DNA, 22 bp, Artificial Sequence
  Synthetic oligonucleotide; CTG chr11 5342155 5342176 5342172 5342177 +
cagagaaattcataagagttgg

SEQ ID NO: 103924 - DNA, 22 bp, Artificial Sequence
  Synthetic oligonucleotide; TTC chr11 5342166 5342187 5342183 5342188 +
ataagagttggaaattagattt

SEQ ID NO: 103925 - DNA, 22 bp, Artificial Sequence
  Synthetic oligonucleotide; TTG chr11 5342176 5342197 5342193 5342198 +
gaaattagatttgacatagtaa

SEQ ID NO: 103926 - DNA, 22 bp, Artificial Sequence
  Synthetic oligonucleotide; TTA chr11 5342183 5342204 5342200 5342205 +
gatttgacatagtaaaccaaac

SEQ ID NO: 103927 - DNA, 22 bp, Artificial Sequence
  Synthetic oligonucleotide; TTT chr11 5342188 5342209 5342205 5342210 +
gacatagtaaaccaaactctat

SEQ ID NO: 103928 - DNA, 22 bp, Artificial Sequence
  Synthetic oligonucleotide; TTG chr11 5342189 5342210 5342206 5342211 +
acatagtaaaccaaactctatt

SEQ ID NO: 103929 - DNA, 22 bp, Artificial Sequence
  Synthetic oligonucleotide; CTC chr11 5342207 5342228 5342224 5342229 +
tattccatttcactcgaaccaa

SEQ ID NO: 103930 - DNA, 22 bp, Artificial Sequence
  Synthetic oligonucleotide; CTA chr11 5342209 5342230 5342226 5342231 +
ttccatttcactcgaaccaact

SEQ ID NO: 103931 - DNA, 22 bp, Artificial Sequence
  Synthetic oligonucleotide; TTC chr11 5342212 5342233 5342229 5342234 +
catttcactcgaaccaactaat

SEQ ID NO: 103932 - DNA, 22 bp, Artificial Sequence
  Synthetic oligonucleotide; TTT chr11 5342217 5342238 5342234 5342239 +
cactcgaaccaactaataattt

SEQ ID NO: 103933 - DNA, 22 bp, Artificial Sequence
  Synthetic oligonucleotide; TTC chr11 5342218 5342239 5342235 5342240 +
actcgaaccaactaataatttt

SEQ ID NO: 103934 - DNA, 22 bp, Artificial Sequence
  Synthetic oligonucleotide; CTC chr11 5342222 5342243 5342239 5342244 +
gaaccaactaataattttatat

SEQ ID NO: 103935 - DNA, 22 bp, Artificial Sequence
  Synthetic oligonucleotide; CTA chr11 5342232 5342253 5342249 5342254 +
ataattttatatttttatgatt

SEQ ID NO: 103936 - DNA, 22 bp, Artificial Sequence
  Synthetic oligonucleotide; TTT chr11 5342239 5342260 5342256 5342261 +
tatatttttatgattctgttcc

SEQ ID NO: 103937 - DNA, 22 bp, Artificial Sequence
  Synthetic oligonucleotide; TTT chr11 5342240 5342261 5342257 5342262 +
atatttttatgattctgttcct

SEQ ID NO: 103938 - DNA, 22 bp, Artificial Sequence
  Synthetic oligonucleotide; TTA chr11 5342241 5342262 5342258 5342263 +
tatttttatgattctgttccta

SEQ ID NO: 103939 - DNA, 22 bp, Artificial Sequence
  Synthetic oligonucleotide; TTT chr11 5342246 5342267 5342263 5342268 +
ttatgattctgttcctatctgc

SEQ ID NO: 103940 - DNA, 22 bp, Artificial Sequence
  Synthetic oligonucleotide; TTT chr11 5342247 5342268 5342264 5342269 +
tatgattctgttcctatctgct

SEQ ID NO: 103941 - DNA, 22 bp, Artificial Sequence
  Synthetic oligonucleotide; TTT chr11 5342248 5342269 5342265 5342270 +
atgattctgttcctatctgcta

SEQ ID NO: 103942 - DNA, 22 bp, Artificial Sequence
  Synthetic oligonucleotide; TTA chr11 5342249 5342270 5342266 5342271 +
tgattctgttcctatctgctaa

SEQ ID NO: 103943 - DNA, 22 bp, Artificial Sequence
  Synthetic oligonucleotide; TTC chr11 5342255 5342276 5342272 5342277 +
tgttcctatctgctaactttat

SEQ ID NO: 103944 - DNA, 22 bp, Artificial Sequence
  Synthetic oligonucleotide; CTG chr11 5342257 5342278 5342274 5342279 +
ttcctatctgctaactttatac

SEQ ID NO: 103945 - DNA, 22 bp, Artificial Sequence
  Synthetic oligonucleotide; TTC chr11 5342260 5342281 5342277 5342282 +
ctatctgctaactttataccat

SEQ ID NO: 103946 - DNA, 22 bp, Artificial Sequence
  Synthetic oligonucleotide; CTA chr11 5342263 5342284 5342280 5342285 +
tctgctaactttataccatgaa

SEQ ID NO: 103947 - DNA, 22 bp, Artificial Sequence
  Synthetic oligonucleotide; CTG chr11 5342267 5342288 5342284 5342289 +
ctaactttataccatgaaataa

SEQ ID NO: 103948 - DNA, 22 bp, Artificial Sequence
  Synthetic oligonucleotide; CTA chr11 5342270 5342291 5342287 5342292 +
actttataccatgaaataaaca

SEQ ID NO: 103949 - DNA, 22 bp, Artificial Sequence
  Synthetic oligonucleotide; CTT chr11 5342274 5342295 5342291 5342296 +
tataccatgaaataaacatatg

SEQ ID NO: 103950 - DNA, 22 bp, Artificial Sequence
  Synthetic oligonucleotide; TTT chr11 5342275 5342296 5342292 5342297 +
ataccatgaaataaacatatgt

SEQ ID NO: 103951 - DNA, 22 bp, Artificial Sequence
  Synthetic oligonucleotide; TTA chr11 5342276 5342297 5342293 5342298 +
taccatgaaataaacatatgtt

SEQ ID NO: 103952 - DNA, 22 bp, Artificial Sequence
  Synthetic oligonucleotide; TTA chr11 5342299 5342320 5342316 5342321 +
gttacattatagacataccaat

SEQ ID NO: 103953 - DNA, 22 bp, Artificial Sequence
  Synthetic oligonucleotide; TTA chr11 5342303 5342324 5342320 5342325 +
cattatagacataccaatagat

SEQ ID NO: 103954 - DNA, 22 bp, Artificial Sequence
  Synthetic oligonucleotide; TTA chr11 5342308 5342329 5342325 5342330 +
tagacataccaatagatgccta

SEQ ID NO: 103955 - DNA, 22 bp, Artificial Sequence
  Synthetic oligonucleotide; CTA chr11 5342330 5342351 5342347 5342352 +
aggtattgttatcacaataatt

SEQ ID NO: 103956 - DNA, 22 bp, Artificial Sequence
  Synthetic oligonucleotide; TTG chr11 5342338 5342359 5342355 5342360 +
ttatcacaataatttagtggaa

SEQ ID NO: 103957 - DNA, 22 bp, Artificial Sequence
  Synthetic oligonucleotide; TTA chr11 5342341 5342362 5342358 5342363 +
tcacaataatttagtggaaagc

SEQ ID NO: 103958 - DNA, 22 bp, Artificial Sequence
  Synthetic oligonucleotide; TTT chr11 5342353 5342374 5342370 5342375 +
agtggaaagcttagagaaatat

SEQ ID NO: 103959 - DNA, 22 bp, Artificial Sequence
  Synthetic oligonucleotide; TTA chr11 5342354 5342375 5342371 5342376 +
gtggaaagcttagagaaatatt

SEQ ID NO: 103960 - DNA, 22 bp, Artificial Sequence
  Synthetic oligonucleotide; CTT chr11 5342365 5342386 5342382 5342387 +
agagaaatattccgtttacagg

SEQ ID NO: 103961 - DNA, 22 bp, Artificial Sequence
  Synthetic oligonucleotide; TTA chr11 5342366 5342387 5342383 5342388 +
gagaaatattccgtttacagga

SEQ ID NO: 103962 - DNA, 22 bp, Artificial Sequence
  Synthetic oligonucleotide; TTC chr11 5342377 5342398 5342394 5342399 +
cgtttacaggaatgcaacaaaa

SEQ ID NO: 103963 - DNA, 22 bp, Artificial Sequence
  Synthetic oligonucleotide; TTT chr11 5342382 5342403 5342399 5342404 +
acaggaatgcaacaaaaatttg

SEQ ID NO: 103964 - DNA, 22 bp, Artificial Sequence
  Synthetic oligonucleotide; TTA chr11 5342383 5342404 5342400 5342405 +
caggaatgcaacaaaaatttgt

SEQ ID NO: 103965 - DNA, 22 bp, Artificial Sequence
  Synthetic oligonucleotide; TTT chr11 5342403 5342424 5342420 5342425 +
gtacaaactacatttagctaaa

SEQ ID NO: 103966 - DNA, 22 bp, Artificial Sequence
  Synthetic oligonucleotide; TTG chr11 5342404 5342425 5342421 5342426 +
tacaaactacatttagctaaag

SEQ ID NO: 103967 - DNA, 22 bp, Artificial Sequence
  Synthetic oligonucleotide; CTA chr11 5342413 5342434 5342430 5342435 +
catttagctaaagagttgggct

SEQ ID NO: 103968 - DNA, 22 bp, Artificial Sequence
  Synthetic oligonucleotide; TTT chr11 5342418 5342439 5342435 5342440 +
agctaaagagttgggcttaaag

SEQ ID NO: 103969 - DNA, 22 bp, Artificial Sequence
  Synthetic oligonucleotide; TTA chr11 5342419 5342440 5342436 5342441 +
gctaaagagttgggcttaaaga

SEQ ID NO: 103970 - DNA, 22 bp, Artificial Sequence
  Synthetic oligonucleotide; CTA chr11 5342423 5342444 5342440 5342445 +
aagagttgggcttaaagagata

SEQ ID NO: 103971 - DNA, 22 bp, Artificial Sequence
  Synthetic oligonucleotide; TTG chr11 5342431 5342452 5342448 5342453 +
ggcttaaagagataccttaggg

SEQ ID NO: 103972 - DNA, 22 bp, Artificial Sequence
  Synthetic oligonucleotide; CTT chr11 5342436 5342457 5342453 5342458 +
aaagagataccttagggaaact

SEQ ID NO: 103973 - DNA, 22 bp, Artificial Sequence
  Synthetic oligonucleotide; TTA chr11 5342437 5342458 5342454 5342459 +
aagagataccttagggaaactt

SEQ ID NO: 103974 - DNA, 22 bp, Artificial Sequence
  Synthetic oligonucleotide; CTT chr11 5342449 5342470 5342466 5342471 +
agggaaacttgaagctgtattt

SEQ ID NO: 103975 - DNA, 22 bp, Artificial Sequence
  Synthetic oligonucleotide; TTA chr11 5342450 5342471 5342467 5342472 +
gggaaacttgaagctgtatttt

SEQ ID NO: 103976 - DNA, 22 bp, Artificial Sequence
  Synthetic oligonucleotide; CTT chr11 5342459 5342480 5342476 5342481 +
gaagctgtattttaacacctat

SEQ ID NO: 103977 - DNA, 22 bp, Artificial Sequence
  Synthetic oligonucleotide; TTG chr11 5342460 5342481 5342477 5342482 +
aagctgtattttaacacctatt

SEQ ID NO: 103978 - DNA, 22 bp, Artificial Sequence
  Synthetic oligonucleotide; CTG chr11 5342466 5342487 5342483 5342488 +
tattttaacacctattttacca

SEQ ID NO: 103979 - DNA, 22 bp, Artificial Sequence
  Synthetic oligonucleotide; TTT chr11 5342471 5342492 5342488 5342493 +
taacacctattttaccaagtca

SEQ ID NO: 103980 - DNA, 22 bp, Artificial Sequence
  Synthetic oligonucleotide; TTT chr11 5342472 5342493 5342489 5342494 +
aacacctattttaccaagtcat

SEQ ID NO: 103981 - DNA, 22 bp, Artificial Sequence
  Synthetic oligonucleotide; TTA chr11 5342473 5342494 5342490 5342495 +
acacctattttaccaagtcata

SEQ ID NO: 103982 - DNA, 22 bp, Artificial Sequence
  Synthetic oligonucleotide; CTA chr11 5342480 5342501 5342497 5342502 +
ttttaccaagtcatatgagcat

SEQ ID NO: 103983 - DNA, 22 bp, Artificial Sequence
  Synthetic oligonucleotide; TTT chr11 5342483 5342504 5342500 5342505 +
taccaagtcatatgagcatgca

SEQ ID NO: 103984 - DNA, 22 bp, Artificial Sequence
  Synthetic oligonucleotide; TTT chr11 5342484 5342505 5342501 5342506 +
accaagtcatatgagcatgcat

SEQ ID NO: 103985 - DNA, 22 bp, Artificial Sequence
  Synthetic oligonucleotide; TTA chr11 5342485 5342506 5342502 5342507 +
ccaagtcatatgagcatgcatg

SEQ ID NO: 103986 - DNA, 22 bp, Artificial Sequence
  Synthetic oligonucleotide; CTA chr11 5342510 5342531 5342527 5342532 +
gatatgagacttctttgctctc

SEQ ID NO: 103987 - DNA, 22 bp, Artificial Sequence
  Synthetic oligonucleotide; CTT chr11 5342522 5342543 5342539 5342544 +
ctttgctctcctgctaaatatt

SEQ ID NO: 103988 - DNA, 22 bp, Artificial Sequence
  Synthetic oligonucleotide; TTC chr11 5342523 5342544 5342540 5342545 +
tttgctctcctgctaaatatta

SEQ ID NO: 103989 - DNA, 22 bp, Artificial Sequence
  Synthetic oligonucleotide; CTT chr11 5342525 5342546 5342542 5342547 +
tgctctcctgctaaatattaga

SEQ ID NO: 103990 - DNA, 22 bp, Artificial Sequence
  Synthetic oligonucleotide; TTT chr11 5342526 5342547 5342543 5342548 +
gctctcctgctaaatattagag

SEQ ID NO: 103991 - DNA, 22 bp, Artificial Sequence
  Synthetic oligonucleotide; TTG chr11 5342527 5342548 5342544 5342549 +
ctctcctgctaaatattagagt

SEQ ID NO: 103992 - DNA, 22 bp, Artificial Sequence
  Synthetic oligonucleotide; CTC chr11 5342530 5342551 5342547 5342552 +
tcctgctaaatattagagtttt

SEQ ID NO: 103993 - DNA, 22 bp, Artificial Sequence
  Synthetic oligonucleotide; CTC chr11 5342532 5342553 5342549 5342554 +
ctgctaaatattagagttttta

SEQ ID NO: 103994 - DNA, 22 bp, Artificial Sequence
  Synthetic oligonucleotide; CTG chr11 5342535 5342556 5342552 5342557 +
ctaaatattagagtttttacat

SEQ ID NO: 103995 - DNA, 22 bp, Artificial Sequence
  Synthetic oligonucleotide; CTA chr11 5342538 5342559 5342555 5342560 +
aatattagagtttttacattct

SEQ ID NO: 103996 - DNA, 22 bp, Artificial Sequence
  Synthetic oligonucleotide; TTA chr11 5342545 5342566 5342562 5342567 +
gagtttttacattctgtgagag

SEQ ID NO: 103997 - DNA, 22 bp, Artificial Sequence
  Synthetic oligonucleotide; TTT chr11 5342551 5342572 5342568 5342573 +
ttacattctgtgagagtgactg

SEQ ID NO: 103998 - DNA, 22 bp, Artificial Sequence
  Synthetic oligonucleotide; TTT chr11 5342552 5342573 5342569 5342574 +
tacattctgtgagagtgactgt

SEQ ID NO: 103999 - DNA, 22 bp, Artificial Sequence
  Synthetic oligonucleotide; TTT chr11 5342553 5342574 5342570 5342575 +
acattctgtgagagtgactgtg

SEQ ID NO: 104000 - DNA, 22 bp, Artificial Sequence
  Synthetic oligonucleotide; TTA chr11 5342554 5342575 5342571 5342576 +
cattctgtgagagtgactgtga

SEQ ID NO: 104001 - DNA, 22 bp, Artificial Sequence
  Synthetic oligonucleotide; TTC chr11 5342559 5342580 5342576 5342581 +
tgtgagagtgactgtgatgatt

SEQ ID NO: 104002 - DNA, 22 bp, Artificial Sequence
  Synthetic oligonucleotide; CTG chr11 5342561 5342582 5342578 5342583 +
tgagagtgactgtgatgattgg

SEQ ID NO: 104003 - DNA, 22 bp, Artificial Sequence
  Synthetic oligonucleotide; CTG chr11 5342573 5342594 5342590 5342595 +
tgatgattggagatcaggttcc

SEQ ID NO: 104004 - DNA, 22 bp, Artificial Sequence
  Synthetic oligonucleotide; TTG chr11 5342582 5342603 5342599 5342604 +
gagatcaggttccaattctatg

SEQ ID NO: 104005 - DNA, 22 bp, Artificial Sequence
  Synthetic oligonucleotide; TTC chr11 5342594 5342615 5342611 5342616 +
caattctatgggtagtaaaaag

SEQ ID NO: 104006 - DNA, 22 bp, Artificial Sequence
  Synthetic oligonucleotide; TTC chr11 5342600 5342621 5342617 5342622 +
tatgggtagtaaaaaggtgaag

SEQ ID NO: 104007 - DNA, 22 bp, Artificial Sequence
  Synthetic oligonucleotide; CTA chr11 5342602 5342623 5342619 5342624 +
tgggtagtaaaaaggtgaagaa

SEQ ID NO: 104008 - DNA, 22 bp, Artificial Sequence
  Synthetic oligonucleotide; TTC chr11 5342632 5342653 5342649 5342654 +
tgaatctgcttggtcttgacac

SEQ ID NO: 104009 - DNA, 22 bp, Artificial Sequence
  Synthetic oligonucleotide; CTG chr11 5342634 5342655 5342651 5342656 +
aatctgcttggtcttgacacta

SEQ ID NO: 104010 - DNA, 22 bp, Artificial Sequence
  Synthetic oligonucleotide; CTG chr11 5342640 5342661 5342657 5342662 +
cttggtcttgacactatatgtt

SEQ ID NO: 104011 - DNA, 22 bp, Artificial Sequence
  Synthetic oligonucleotide; CTT chr11 5342643 5342664 5342660 5342665 +
ggtcttgacactatatgttata

SEQ ID NO: 104012 - DNA, 22 bp, Artificial Sequence
  Synthetic oligonucleotide; TTG chr11 5342644 5342665 5342661 5342666 +
gtcttgacactatatgttatag

SEQ ID NO: 104013 - DNA, 22 bp, Artificial Sequence
  Synthetic oligonucleotide; CTT chr11 5342649 5342670 5342666 5342671 +
gacactatatgttataggattc

SEQ ID NO: 104014 - DNA, 22 bp, Artificial Sequence
  Synthetic oligonucleotide; TTG chr11 5342650 5342671 5342667 5342672 +
acactatatgttataggattca

SEQ ID NO: 104015 - DNA, 22 bp, Artificial Sequence
  Synthetic oligonucleotide; CTA chr11 5342656 5342677 5342673 5342678 +
tatgttataggattcattagtg

SEQ ID NO: 104016 - DNA, 22 bp, Artificial Sequence
  Synthetic oligonucleotide; TTA chr11 5342663 5342684 5342680 5342685 +
taggattcattagtggagggaa

SEQ ID NO: 104017 - DNA, 22 bp, Artificial Sequence
  Synthetic oligonucleotide; TTC chr11 5342671 5342692 5342688 5342693 +
attagtggagggaacagaaaat

SEQ ID NO: 104018 - DNA, 22 bp, Artificial Sequence
  Synthetic oligonucleotide; TTA chr11 5342675 5342696 5342692 5342697 +
gtggagggaacagaaaataggc

SEQ ID NO: 104019 - DNA, 22 bp, Artificial Sequence
  Synthetic oligonucleotide; CTC chr11 5342704 5342725 5342721 5342726 +
ataatgaggtgaacaatatgtg

SEQ ID NO: 104020 - DNA, 22 bp, Artificial Sequence
  Synthetic oligonucleotide; CTG chr11 5342733 5342754 5342750 5342755 +
ctttccaaaacgatgaatcaga

SEQ ID NO: 104021 - DNA, 22 bp, Artificial Sequence
  Synthetic oligonucleotide; CTT chr11 5342736 5342757 5342753 5342758 +
tccaaaacgatgaatcagagac

SEQ ID NO: 104022 - DNA, 22 bp, Artificial Sequence
  Synthetic oligonucleotide; TTT chr11 5342737 5342758 5342754 5342759 +
ccaaaacgatgaatcagagaca

SEQ ID NO: 104023 - DNA, 22 bp, Artificial Sequence
  Synthetic oligonucleotide; TTC chr11 5342738 5342759 5342755 5342760 +
caaaacgatgaatcagagacaa

SEQ ID NO: 104024 - DNA, 22 bp, Artificial Sequence
  Synthetic oligonucleotide; CTG chr11 5342771 5342792 5342788 5342793 +
tgacataaaaaaccaggacaca

SEQ ID NO: 104025 - DNA, 22 bp, Artificial Sequence
  Synthetic oligonucleotide; CTT chr11 5342826 5342847 5342843 5342848 +
ggccctctcctctctggaggca

SEQ ID NO: 104026 - DNA, 22 bp, Artificial Sequence
  Synthetic oligonucleotide; TTG chr11 5342827 5342848 5342844 5342849 +
gccctctcctctctggaggcaa

SEQ ID NO: 104027 - DNA, 22 bp, Artificial Sequence
  Synthetic oligonucleotide; CTC chr11 5342833 5342854 5342850 5342855 +
tcctctctggaggcaatgctca

SEQ ID NO: 104028 - DNA, 22 bp, Artificial Sequence
  Synthetic oligonucleotide; CTC chr11 5342835 5342856 5342852 5342857 +
ctctctggaggcaatgctcagg

SEQ ID NO: 104029 - DNA, 22 bp, Artificial Sequence
  Synthetic oligonucleotide; CTC chr11 5342838 5342859 5342855 5342860 +
tctggaggcaatgctcaggaca

SEQ ID NO: 104030 - DNA, 22 bp, Artificial Sequence
  Synthetic oligonucleotide; CTC chr11 5342840 5342861 5342857 5342862 +
tggaggcaatgctcaggacagt

SEQ ID NO: 104031 - DNA, 22 bp, Artificial Sequence
  Synthetic oligonucleotide; CTG chr11 5342842 5342863 5342859 5342864 +
gaggcaatgctcaggacagtct

SEQ ID NO: 104032 - DNA, 22 bp, Artificial Sequence
  Synthetic oligonucleotide; CTC chr11 5342854 5342875 5342871 5342876 +
aggacagtcttgagtatcaaca

SEQ ID NO: 104033 - DNA, 22 bp, Artificial Sequence
  Synthetic oligonucleotide; CTT chr11 5342865 5342886 5342882 5342887 +
gagtatcaacacataggagatg

SEQ ID NO: 104034 - DNA, 22 bp, Artificial Sequence
  Synthetic oligonucleotide; TTG chr11 5342866 5342887 5342883 5342888 +
agtatcaacacataggagatga

SEQ ID NO: 104035 - DNA, 22 bp, Artificial Sequence
  Synthetic oligonucleotide; CTA chr11 5342924 5342945 5342941 5342946 +
caagcacagctgggtacagtcg

SEQ ID NO: 104036 - DNA, 22 bp, Artificial Sequence
  Synthetic oligonucleotide; CTG chr11 5342936 5342957 5342953 5342958 +
ggtacagtcggttgaaggtggt

SEQ ID NO: 104037 - DNA, 22 bp, Artificial Sequence
  Synthetic oligonucleotide; TTG chr11 5342950 5342971 5342967 5342972 +
aaggtggtatcagcacaggcga

SEQ ID NO: 104038 - DNA, 22 bp, Artificial Sequence
  Synthetic oligonucleotide; TTT chr11 5342976 5342997 5342993 5342998 +
aatgacatcctggtgaaggcag

SEQ ID NO: 104039 - DNA, 22 bp, Artificial Sequence
  Synthetic oligonucleotide; TTA chr11 5342977 5342998 5342994 5342999 +
atgacatcctggtgaaggcaga

SEQ ID NO: 104040 - DNA, 22 bp, Artificial Sequence
  Synthetic oligonucleotide; CTG chr11 5342988 5343009 5343005 5343010 +
gtgaaggcagaatgcatgtgaa

SEQ ID NO: 104041 - DNA, 22 bp, Artificial Sequence
  Synthetic oligonucleotide; CTG chr11 5343052 5343073 5343069 5343074 +
attgggggaacaacggatacaa

SEQ ID NO: 104042 - DNA, 22 bp, Artificial Sequence
  Synthetic oligonucleotide; TTG chr11 5343056 5343077 5343073 5343078 +
ggggaacaacggatacaaatcc

SEQ ID NO: 104043 - DNA, 22 bp, Artificial Sequence
  Synthetic oligonucleotide; CTC chr11 5343082 5343103 5343099 5343104 +
atcagaactcccagcccaatct

SEQ ID NO: 104044 - DNA, 22 bp, Artificial Sequence
  Synthetic oligonucleotide; CTC chr11 5343092 5343113 5343109 5343114 +
ccagcccaatcttcactactcg

SEQ ID NO: 104045 - DNA, 22 bp, Artificial Sequence
  Synthetic oligonucleotide; CTT chr11 5343105 5343126 5343122 5343127 +
cactactcgagtattagtaagt

SEQ ID NO: 104046 - DNA, 22 bp, Artificial Sequence
  Synthetic oligonucleotide; TTC chr11 5343106 5343127 5343123 5343128 +
actactcgagtattagtaagta

SEQ ID NO: 104047 - DNA, 22 bp, Artificial Sequence
  Synthetic oligonucleotide; CTA chr11 5343110 5343131 5343127 5343132 +
ctcgagtattagtaagtacaga

SEQ ID NO: 104048 - DNA, 22 bp, Artificial Sequence
  Synthetic oligonucleotide; CTC chr11 5343113 5343134 5343130 5343135 +
gagtattagtaagtacagaggt

SEQ ID NO: 104049 - DNA, 22 bp, Artificial Sequence
  Synthetic oligonucleotide; TTA chr11 5343121 5343142 5343138 5343143 +
gtaagtacagaggtatatctaa

SEQ ID NO: 104050 - DNA, 22 bp, Artificial Sequence
  Synthetic oligonucleotide; CTA chr11 5343142 5343163 5343159 5343164 +
agagggttgcagatggcaataa

SEQ ID NO: 104051 - DNA, 22 bp, Artificial Sequence
  Synthetic oligonucleotide; TTG chr11 5343151 5343172 5343168 5343173 +
cagatggcaataaaacggtcat

SEQ ID NO: 104052 - DNA, 22 bp, Artificial Sequence
  Synthetic oligonucleotide; CTC chr11 5343201 5343222 5343218 5343223 +
gagaaaggaaagtgagtgtata

SEQ ID NO: 104053 - DNA, 22 bp, Artificial Sequence
  Synthetic oligonucleotide; CTG chr11 5343234 5343255 5343251 5343256 +
ggaaaagcaggccgcacttcca

SEQ ID NO: 104054 - DNA, 22 bp, Artificial Sequence
  Synthetic oligonucleotide; CTT chr11 5343253 5343274 5343270 5343275 +
ccaatctccctgtgatccagcc

SEQ ID NO: 104055 - DNA, 22 bp, Artificial Sequence
  Synthetic oligonucleotide; TTC chr11 5343254 5343275 5343271 5343276 +
caatctccctgtgatccagcca

SEQ ID NO: 104056 - DNA, 22 bp, Artificial Sequence
  Synthetic oligonucleotide; CTC chr11 5343261 5343282 5343278 5343283 +
cctgtgatccagccagaggact

SEQ ID NO: 104057 - DNA, 22 bp, Artificial Sequence
  Synthetic oligonucleotide; CTG chr11 5343265 5343286 5343282 5343287 +
tgatccagccagaggactccca

SEQ ID NO: 104058 - DNA, 22 bp, Artificial Sequence
  Synthetic oligonucleotide; CTC chr11 5343284 5343305 5343301 5343306 +
ccagcaccgtgggcattgtggt

SEQ ID NO: 104059 - DNA, 22 bp, Artificial Sequence
  Synthetic oligonucleotide; TTG chr11 5343302 5343323 5343319 5343324 +
tggtcagggccagccccaggtc

SEQ ID NO: 104060 - DNA, 22 bp, Artificial Sequence
  Synthetic oligonucleotide; CTG chr11 5343326 5343347 5343343 5343348 +
tggcagccagcatggccagaaa

SEQ ID NO: 104061 - DNA, 22 bp, Artificial Sequence
  Synthetic oligonucleotide; CTC chr11 5343363 5343384 5343380 5343385 +
atgaagattgtgatcttcctta

SEQ ID NO: 104062 - DNA, 22 bp, Artificial Sequence
  Synthetic oligonucleotide; TTG chr11 5343373 5343394 5343390 5343395 +
tgatcttccttaatgagaagaa

SEQ ID NO: 104063 - DNA, 22 bp, Artificial Sequence
  Synthetic oligonucleotide; CTT chr11 5343380 5343401 5343397 5343402 +
ccttaatgagaagaaggagggt

SEQ ID NO: 104064 - DNA, 22 bp, Artificial Sequence
  Synthetic oligonucleotide; TTC chr11 5343381 5343402 5343398 5343403 +
cttaatgagaagaaggagggtg

SEQ ID NO: 104065 - DNA, 22 bp, Artificial Sequence
  Synthetic oligonucleotide; CTT chr11 5343384 5343405 5343401 5343406 +
aatgagaagaaggagggtgcca

SEQ ID NO: 104066 - DNA, 22 bp, Artificial Sequence
  Synthetic oligonucleotide; TTA chr11 5343385 5343406 5343402 5343407 +
atgagaagaaggagggtgccat

SEQ ID NO: 104067 - DNA, 22 bp, Artificial Sequence
  Synthetic oligonucleotide; TTG chr11 5343409 5343430 5343426 5343431 +
ccaaaaaggatggatatataca

SEQ ID NO: 104068 - DNA, 22 bp, Artificial Sequence
  Synthetic oligonucleotide; CTT chr11 5343467 5343488 5343484 5343489 +
cctccaagcctggaaaaccagt

SEQ ID NO: 104069 - DNA, 22 bp, Artificial Sequence
  Synthetic oligonucleotide; TTC chr11 5343468 5343489 5343485 5343490 +
ctccaagcctggaaaaccagtc

SEQ ID NO: 104070 - DNA, 22 bp, Artificial Sequence
  Synthetic oligonucleotide; CTC chr11 5343471 5343492 5343488 5343493 +
caagcctggaaaaccagtcaat

SEQ ID NO: 104071 - DNA, 22 bp, Artificial Sequence
  Synthetic oligonucleotide; CTG chr11 5343479 5343500 5343496 5343501 +
gaaaaccagtcaataggaaggg

SEQ ID NO: 104072 - DNA, 22 bp, Artificial Sequence
  Synthetic oligonucleotide; CTG chr11 5343511 5343532 5343528 5343533 +
ccgctggacgacatcctgggtt

SEQ ID NO: 104073 - DNA, 22 bp, Artificial Sequence
  Synthetic oligonucleotide; CTG chr11 5343517 5343538 5343534 5343539 +
gacgacatcctgggtttatata

SEQ ID NO: 104074 - DNA, 22 bp, Artificial Sequence
  Synthetic oligonucleotide; CTG chr11 5343529 5343550 5343546 5343551 +
ggtttatatagaagaaatgtct

SEQ ID NO: 104075 - DNA, 22 bp, Artificial Sequence
  Synthetic oligonucleotide; TTT chr11 5343534 5343555 5343551 5343556 +
atatagaagaaatgtctttctg

SEQ ID NO: 104076 - DNA, 22 bp, Artificial Sequence
  Synthetic oligonucleotide; TTA chr11 5343535 5343556 5343552 5343557 +
tatagaagaaatgtctttctgt

SEQ ID NO: 104077 - DNA, 22 bp, Artificial Sequence
  Synthetic oligonucleotide; CTT chr11 5343552 5343573 5343569 5343574 +
tctgtttctgttattaccacag

SEQ ID NO: 104078 - DNA, 22 bp, Artificial Sequence
  Synthetic oligonucleotide; TTT chr11 5343553 5343574 5343570 5343575 +
ctgtttctgttattaccacagt

SEQ ID NO: 104079 - DNA, 22 bp, Artificial Sequence
  Synthetic oligonucleotide; TTC chr11 5343554 5343575 5343571 5343576 +
tgtttctgttattaccacagtg

SEQ ID NO: 104080 - DNA, 22 bp, Artificial Sequence
  Synthetic oligonucleotide; CTG chr11 5343556 5343577 5343573 5343578 +
tttctgttattaccacagtgca

SEQ ID NO: 104081 - DNA, 22 bp, Artificial Sequence
  Synthetic oligonucleotide; TTT chr11 5343559 5343580 5343576 5343581 +
ctgttattaccacagtgcacag

SEQ ID NO: 104082 - DNA, 22 bp, Artificial Sequence
  Synthetic oligonucleotide; TTC chr11 5343560 5343581 5343577 5343582 +
tgttattaccacagtgcacagt

SEQ ID NO: 104083 - DNA, 22 bp, Artificial Sequence
  Synthetic oligonucleotide; CTG chr11 5343562 5343583 5343579 5343584 +
ttattaccacagtgcacagttc

SEQ ID NO: 104084 - DNA, 22 bp, Artificial Sequence
  Synthetic oligonucleotide; TTA chr11 5343565 5343586 5343582 5343587 +
ttaccacagtgcacagttctac

SEQ ID NO: 104085 - DNA, 22 bp, Artificial Sequence
  Synthetic oligonucleotide; TTA chr11 5343568 5343589 5343585 5343590 +
ccacagtgcacagttctacctt

SEQ ID NO: 104086 - DNA, 22 bp, Artificial Sequence
  Synthetic oligonucleotide; TTC chr11 5343584 5343605 5343601 5343606 +
taccttcaaggtatcacttcga

SEQ ID NO: 104087 - DNA, 22 bp, Artificial Sequence
  Synthetic oligonucleotide; CTA chr11 5343586 5343607 5343603 5343608 +
ccttcaaggtatcacttcgact

SEQ ID NO: 104088 - DNA, 22 bp, Artificial Sequence
  Synthetic oligonucleotide; CTT chr11 5343590 5343611 5343607 5343612 +
caaggtatcacttcgactatat

SEQ ID NO: 104089 - DNA, 22 bp, Artificial Sequence
  Synthetic oligonucleotide; TTC chr11 5343591 5343612 5343608 5343613 +
aaggtatcacttcgactatatc

SEQ ID NO: 104090 - DNA, 22 bp, Artificial Sequence
  Synthetic oligonucleotide; CTT chr11 5343603 5343624 5343620 5343625 +
cgactatatcattctcagaatt

SEQ ID NO: 104091 - DNA, 22 bp, Artificial Sequence
  Synthetic oligonucleotide; TTC chr11 5343604 5343625 5343621 5343626 +
gactatatcattctcagaattt

SEQ ID NO: 104092 - DNA, 22 bp, Artificial Sequence
  Synthetic oligonucleotide; CTA chr11 5343609 5343630 5343626 5343631 +
tatcattctcagaattttttcc

SEQ ID NO: 104093 - DNA, 22 bp, Artificial Sequence
  Synthetic oligonucleotide; TTC chr11 5343617 5343638 5343634 5343639 +
tcagaattttttcctaaagata

SEQ ID NO: 104094 - DNA, 22 bp, Artificial Sequence
  Synthetic oligonucleotide; CTC chr11 5343619 5343640 5343636 5343641 +
agaattttttcctaaagataat

SEQ ID NO: 104095 - DNA, 22 bp, Artificial Sequence
  Synthetic oligonucleotide; TTT chr11 5343626 5343647 5343643 5343648 +
tttcctaaagataataatgaca

SEQ ID NO: 104096 - DNA, 22 bp, Artificial Sequence
  Synthetic oligonucleotide; TTT chr11 5343627 5343648 5343644 5343649 +
ttcctaaagataataatgacat

SEQ ID NO: 104097 - DNA, 22 bp, Artificial Sequence
  Synthetic oligonucleotide; TTT chr11 5343628 5343649 5343645 5343650 +
tcctaaagataataatgacatc

SEQ ID NO: 104098 - DNA, 22 bp, Artificial Sequence
  Synthetic oligonucleotide; TTT chr11 5343629 5343650 5343646 5343651 +
cctaaagataataatgacatca

SEQ ID NO: 104099 - DNA, 22 bp, Artificial Sequence
  Synthetic oligonucleotide; TTC chr11 5343630 5343651 5343647 5343652 +
ctaaagataataatgacatcaa

SEQ ID NO: 104100 - DNA, 22 bp, Artificial Sequence
  Synthetic oligonucleotide; CTA chr11 5343633 5343654 5343650 5343655 +
aagataataatgacatcaatat

SEQ ID NO: 104101 - DNA, 22 bp, Artificial Sequence
  Synthetic oligonucleotide; TTG chr11 5343664 5343685 5343681 5343686 +
tttctcaaaatacattctcagg

SEQ ID NO: 104102 - DNA, 22 bp, Artificial Sequence
  Synthetic oligonucleotide; TTT chr11 5343667 5343688 5343684 5343689 +
ctcaaaatacattctcagggtt

SEQ ID NO: 104103 - DNA, 22 bp, Artificial Sequence
  Synthetic oligonucleotide; TTC chr11 5343668 5343689 5343685 5343690 +
tcaaaatacattctcagggtta

SEQ ID NO: 104104 - DNA, 22 bp, Artificial Sequence
  Synthetic oligonucleotide; CTC chr11 5343670 5343691 5343687 5343692 +
aaaatacattctcagggttact

SEQ ID NO: 104105 - DNA, 22 bp, Artificial Sequence
  Synthetic oligonucleotide; TTC chr11 5343681 5343702 5343698 5343703 +
tcagggttactcatactatttg

SEQ ID NO: 104106 - DNA, 22 bp, Artificial Sequence
  Synthetic oligonucleotide; CTC chr11 5343683 5343704 5343700 5343705 +
agggttactcatactatttgta

SEQ ID NO: 104107 - DNA, 22 bp, Artificial Sequence
  Synthetic oligonucleotide; TTA chr11 5343690 5343711 5343707 5343712 +
ctcatactatttgtattcttaa

SEQ ID NO: 104108 - DNA, 22 bp, Artificial Sequence
  Synthetic oligonucleotide; CTC chr11 5343693 5343714 5343710 5343715 +
atactatttgtattcttaactg

SEQ ID NO: 104109 - DNA, 22 bp, Artificial Sequence
  Synthetic oligonucleotide; CTA chr11 5343699 5343720 5343716 5343721 +
tttgtattcttaactgcacatt

SEQ ID NO: 104110 - DNA, 22 bp, Artificial Sequence
  Synthetic oligonucleotide; TTT chr11 5343702 5343723 5343719 5343724 +
gtattcttaactgcacattcca

SEQ ID NO: 104111 - DNA, 22 bp, Artificial Sequence
  Synthetic oligonucleotide; TTG chr11 5343703 5343724 5343720 5343725 +
tattcttaactgcacattccag

SEQ ID NO: 104112 - DNA, 22 bp, Artificial Sequence
  Synthetic oligonucleotide; TTC chr11 5343708 5343729 5343725 5343730 +
ttaactgcacattccaggatct

SEQ ID NO: 104113 - DNA, 22 bp, Artificial Sequence
  Synthetic oligonucleotide; CTT chr11 5343710 5343731 5343727 5343732 +
aactgcacattccaggatctat

SEQ ID NO: 104114 - DNA, 22 bp, Artificial Sequence
  Synthetic oligonucleotide; TTA chr11 5343711 5343732 5343728 5343733 +
actgcacattccaggatctatc

SEQ ID NO: 104115 - DNA, 22 bp, Artificial Sequence
  Synthetic oligonucleotide; CTG chr11 5343715 5343736 5343732 5343737 +
cacattccaggatctatctcct

SEQ ID NO: 104116 - DNA, 22 bp, Artificial Sequence
  Synthetic oligonucleotide; TTC chr11 5343722 5343743 5343739 5343744 +
caggatctatctcctacctacg

SEQ ID NO: 104117 - DNA, 22 bp, Artificial Sequence
  Synthetic oligonucleotide; CTA chr11 5343731 5343752 5343748 5343753 +
tctcctacctacgtaatcaaat

SEQ ID NO: 104118 - DNA, 22 bp, Artificial Sequence
  Synthetic oligonucleotide; CTC chr11 5343735 5343756 5343752 5343757 +
ctacctacgtaatcaaattctt

SEQ ID NO: 104119 - DNA, 22 bp, Artificial Sequence
  Synthetic oligonucleotide; CTA chr11 5343738 5343759 5343755 5343760 +
cctacgtaatcaaattcttgga

SEQ ID NO: 104120 - DNA, 22 bp, Artificial Sequence
  Synthetic oligonucleotide; CTA chr11 5343742 5343763 5343759 5343764 +
cgtaatcaaattcttggagttt

SEQ ID NO: 104121 - DNA, 22 bp, Artificial Sequence
  Synthetic oligonucleotide; TTC chr11 5343755 5343776 5343772 5343777 +
ttggagtttcaactgtttatat

SEQ ID NO: 104122 - DNA, 22 bp, Artificial Sequence
  Synthetic oligonucleotide; CTT chr11 5343757 5343778 5343774 5343779 +
ggagtttcaactgtttatatgc

SEQ ID NO: 104123 - DNA, 22 bp, Artificial Sequence
  Synthetic oligonucleotide; TTG chr11 5343758 5343779 5343775 5343780 +
gagtttcaactgtttatatgca

SEQ ID NO: 104124 - DNA, 22 bp, Artificial Sequence
  Synthetic oligonucleotide; TTT chr11 5343764 5343785 5343781 5343786 +
caactgtttatatgcatttaag

SEQ ID NO: 104125 - DNA, 22 bp, Artificial Sequence
  Synthetic oligonucleotide; TTC chr11 5343765 5343786 5343782 5343787 +
aactgtttatatgcatttaagc

SEQ ID NO: 104126 - DNA, 22 bp, Artificial Sequence
  Synthetic oligonucleotide; CTG chr11 5343770 5343791 5343787 5343792 +
tttatatgcatttaagcattct

SEQ ID NO: 104127 - DNA, 22 bp, Artificial Sequence
  Synthetic oligonucleotide; TTT chr11 5343773 5343794 5343790 5343795 +
atatgcatttaagcattctctt

SEQ ID NO: 104128 - DNA, 22 bp, Artificial Sequence
  Synthetic oligonucleotide; TTA chr11 5343774 5343795 5343791 5343796 +
tatgcatttaagcattctcttc

SEQ ID NO: 104129 - DNA, 22 bp, Artificial Sequence
  Synthetic oligonucleotide; TTT chr11 5343783 5343804 5343800 5343805 +
aagcattctcttcagaaaaaaa

SEQ ID NO: 104130 - DNA, 22 bp, Artificial Sequence
  Synthetic oligonucleotide; TTA chr11 5343784 5343805 5343801 5343806 +
agcattctcttcagaaaaaaaa

SEQ ID NO: 104131 - DNA, 22 bp, Artificial Sequence
  Synthetic oligonucleotide; TTC chr11 5343791 5343812 5343808 5343813 +
tcttcagaaaaaaaattatgta

SEQ ID NO: 104132 - DNA, 22 bp, Artificial Sequence
  Synthetic oligonucleotide; CTC chr11 5343793 5343814 5343810 5343815 +
ttcagaaaaaaaattatgtaaa

SEQ ID NO: 104133 - DNA, 22 bp, Artificial Sequence
  Synthetic oligonucleotide; CTT chr11 5343795 5343816 5343812 5343817 +
cagaaaaaaaattatgtaaact

SEQ ID NO: 104134 - DNA, 22 bp, Artificial Sequence
  Synthetic oligonucleotide; TTC chr11 5343796 5343817 5343813 5343818 +
agaaaaaaaattatgtaaacta

SEQ ID NO: 104135 - DNA, 22 bp, Artificial Sequence
  Synthetic oligonucleotide; TTA chr11 5343809 5343830 5343826 5343831 +
tgtaaactacaacttctaaact

SEQ ID NO: 104136 - DNA, 22 bp, Artificial Sequence
  Synthetic oligonucleotide; CTA chr11 5343818 5343839 5343835 5343840 +
caacttctaaactgttaccctt

SEQ ID NO: 104137 - DNA, 22 bp, Artificial Sequence
  Synthetic oligonucleotide; CTT chr11 5343824 5343845 5343841 5343846 +
ctaaactgttacccttaactat

SEQ ID NO: 104138 - DNA, 22 bp, Artificial Sequence
  Synthetic oligonucleotide; TTC chr11 5343825 5343846 5343842 5343847 +
taaactgttacccttaactatg

SEQ ID NO: 104139 - DNA, 22 bp, Artificial Sequence
  Synthetic oligonucleotide; CTA chr11 5343827 5343848 5343844 5343849 +
aactgttacccttaactatgca

SEQ ID NO: 104140 - DNA, 22 bp, Artificial Sequence
  Synthetic oligonucleotide; CTG chr11 5343832 5343853 5343849 5343854 +
ttacccttaactatgcagattt

SEQ ID NO: 104141 - DNA, 22 bp, Artificial Sequence
  Synthetic oligonucleotide; TTA chr11 5343835 5343856 5343852 5343857 +
cccttaactatgcagattttaa

SEQ ID NO: 104142 - DNA, 22 bp, Artificial Sequence
  Synthetic oligonucleotide; CTT chr11 5343840 5343861 5343857 5343862 +
aactatgcagattttaaagaat

SEQ ID NO: 104143 - DNA, 22 bp, Artificial Sequence
  Synthetic oligonucleotide; TTA chr11 5343841 5343862 5343858 5343863 +
actatgcagattttaaagaatt

SEQ ID NO: 104144 - DNA, 22 bp, Artificial Sequence
  Synthetic oligonucleotide; CTA chr11 5343845 5343866 5343862 5343867 +
tgcagattttaaagaattcgta

SEQ ID NO: 104145 - DNA, 22 bp, Artificial Sequence
  Synthetic oligonucleotide; TTT chr11 5343854 5343875 5343871 5343876 +
taaagaattcgtattctatggg

SEQ ID NO: 104146 - DNA, 22 bp, Artificial Sequence
  Synthetic oligonucleotide; TTT chr11 5343855 5343876 5343872 5343877 +
aaagaattcgtattctatgggg

SEQ ID NO: 104147 - DNA, 22 bp, Artificial Sequence
  Synthetic oligonucleotide; TTA chr11 5343856 5343877 5343873 5343878 +
aagaattcgtattctatggggc

SEQ ID NO: 104148 - DNA, 22 bp, Artificial Sequence
  Synthetic oligonucleotide; TTC chr11 5343864 5343885 5343881 5343886 +
gtattctatggggcattcaagg

SEQ ID NO: 104149 - DNA, 22 bp, Artificial Sequence
  Synthetic oligonucleotide; TTC chr11 5343870 5343891 5343887 5343892 +
tatggggcattcaaggggattt

SEQ ID NO: 104150 - DNA, 22 bp, Artificial Sequence
  Synthetic oligonucleotide; CTA chr11 5343872 5343893 5343889 5343894 +
tggggcattcaaggggatttcc

SEQ ID NO: 104151 - DNA, 22 bp, Artificial Sequence
  Synthetic oligonucleotide; TTC chr11 5343882 5343903 5343899 5343904 +
aaggggatttccagaaagctaa

SEQ ID NO: 104152 - DNA, 22 bp, Artificial Sequence
  Synthetic oligonucleotide; TTT chr11 5343892 5343913 5343909 5343914 +
ccagaaagctaacactaatttt

SEQ ID NO: 104153 - DNA, 22 bp, Artificial Sequence
  Synthetic oligonucleotide; TTC chr11 5343893 5343914 5343910 5343915 +
cagaaagctaacactaattttt

SEQ ID NO: 104154 - DNA, 22 bp, Artificial Sequence
  Synthetic oligonucleotide; CTA chr11 5343903 5343924 5343920 5343925 +
acactaatttttttctggtcta

SEQ ID NO: 104155 - DNA, 22 bp, Artificial Sequence
  Synthetic oligonucleotide; CTA chr11 5343909 5343930 5343926 5343931 +
atttttttctggtctaccacct

SEQ ID NO: 104156 - DNA, 22 bp, Artificial Sequence
  Synthetic oligonucleotide; TTT chr11 5343913 5343934 5343930 5343935 +
ttttctggtctaccacctaaac

SEQ ID NO: 104157 - DNA, 22 bp, Artificial Sequence
  Synthetic oligonucleotide; TTT chr11 5343914 5343935 5343931 5343936 +
tttctggtctaccacctaaacc

SEQ ID NO: 104158 - DNA, 22 bp, Artificial Sequence
  Synthetic oligonucleotide; TTT chr11 5343915 5343936 5343932 5343937 +
ttctggtctaccacctaaacct

SEQ ID NO: 104159 - DNA, 22 bp, Artificial Sequence
  Synthetic oligonucleotide; TTT chr11 5343916 5343937 5343933 5343938 +
tctggtctaccacctaaacctg

SEQ ID NO: 104160 - DNA, 22 bp, Artificial Sequence
  Synthetic oligonucleotide; TTT chr11 5343917 5343938 5343934 5343939 +
ctggtctaccacctaaacctgt

SEQ ID NO: 104161 - DNA, 22 bp, Artificial Sequence
  Synthetic oligonucleotide; TTC chr11 5343918 5343939 5343935 5343940 +
tggtctaccacctaaacctgta

SEQ ID NO: 104162 - DNA, 22 bp, Artificial Sequence
  Synthetic oligonucleotide; CTG chr11 5343920 5343941 5343937 5343942 +
gtctaccacctaaacctgtaat

SEQ ID NO: 104163 - DNA, 22 bp, Artificial Sequence
  Synthetic oligonucleotide; CTA chr11 5343925 5343946 5343942 5343947 +
ccacctaaacctgtaattgcct

SEQ ID NO: 104164 - DNA, 22 bp, Artificial Sequence
  Synthetic oligonucleotide; CTA chr11 5343932 5343953 5343949 5343954 +
aacctgtaattgccttcacagt

SEQ ID NO: 104165 - DNA, 22 bp, Artificial Sequence
  Synthetic oligonucleotide; CTG chr11 5343938 5343959 5343955 5343960 +
taattgccttcacagtagtgat

SEQ ID NO: 104166 - DNA, 22 bp, Artificial Sequence
  Synthetic oligonucleotide; TTG chr11 5343944 5343965 5343961 5343966 +
ccttcacagtagtgatccctaa

SEQ ID NO: 104167 - DNA, 22 bp, Artificial Sequence
  Synthetic oligonucleotide; CTT chr11 5343948 5343969 5343965 5343970 +
cacagtagtgatccctaatcca

SEQ ID NO: 104168 - DNA, 22 bp, Artificial Sequence
  Synthetic oligonucleotide; TTC chr11 5343949 5343970 5343966 5343971 +
acagtagtgatccctaatccac

SEQ ID NO: 104169 - DNA, 22 bp, Artificial Sequence
  Synthetic oligonucleotide; CTA chr11 5343965 5343986 5343982 5343987 +
atccacattttcctgcatgtaa

SEQ ID NO: 104170 - DNA, 22 bp, Artificial Sequence
  Synthetic oligonucleotide; TTT chr11 5343975 5343996 5343992 5343997 +
tcctgcatgtaaagacttacct

SEQ ID NO: 104171 - DNA, 22 bp, Artificial Sequence
  Synthetic oligonucleotide; TTT chr11 5343976 5343997 5343993 5343998 +
cctgcatgtaaagacttacctg

SEQ ID NO: 104172 - DNA, 22 bp, Artificial Sequence
  Synthetic oligonucleotide; TTC chr11 5343977 5343998 5343994 5343999 +
ctgcatgtaaagacttacctga

SEQ ID NO: 104173 - DNA, 22 bp, Artificial Sequence
  Synthetic oligonucleotide; CTG chr11 5343980 5344001 5343997 5344002 +
catgtaaagacttacctgaatt

SEQ ID NO: 104174 - DNA, 22 bp, Artificial Sequence
  Synthetic oligonucleotide; CTT chr11 5343993 5344014 5344010 5344015 +
acctgaattatcagctaaagtc

SEQ ID NO: 104175 - DNA, 22 bp, Artificial Sequence
  Synthetic oligonucleotide; TTA chr11 5343994 5344015 5344011 5344016 +
cctgaattatcagctaaagtct

SEQ ID NO: 104176 - DNA, 22 bp, Artificial Sequence
  Synthetic oligonucleotide; CTG chr11 5343998 5344019 5344015 5344020 +
aattatcagctaaagtctcaac

SEQ ID NO: 104177 - DNA, 22 bp, Artificial Sequence
  Synthetic oligonucleotide; TTA chr11 5344003 5344024 5344020 5344025 +
tcagctaaagtctcaacagcct

SEQ ID NO: 104178 - DNA, 22 bp, Artificial Sequence
  Synthetic oligonucleotide; CTA chr11 5344010 5344031 5344027 5344032 +
aagtctcaacagcctaagaaag

SEQ ID NO: 104179 - DNA, 22 bp, Artificial Sequence
  Synthetic oligonucleotide; CTC chr11 5344017 5344038 5344034 5344039 +
aacagcctaagaaagaaaagtg

SEQ ID NO: 104180 - DNA, 22 bp, Artificial Sequence
  Synthetic oligonucleotide; CTA chr11 5344026 5344047 5344043 5344048 +
agaaagaaaagtgtgggaagag

SEQ ID NO: 104181 - DNA, 22 bp, Artificial Sequence
  Synthetic oligonucleotide; CTC chr11 5344054 5344075 5344071 5344076 +
tgccactaccactgtagctaag

SEQ ID NO: 104182 - DNA, 22 bp, Artificial Sequence
  Synthetic oligonucleotide; CTG chr11 5344056 5344077 5344073 5344078 +
ccactaccactgtagctaagga

SEQ ID NO: 104183 - DNA, 22 bp, Artificial Sequence
  Synthetic oligonucleotide; CTA chr11 5344062 5344083 5344079 5344084 +
ccactgtagctaaggagcagtc

SEQ ID NO: 104184 - DNA, 22 bp, Artificial Sequence
  Synthetic oligonucleotide; CTG chr11 5344068 5344089 5344085 5344090 +
tagctaaggagcagtcagattg

SEQ ID NO: 104185 - DNA, 22 bp, Artificial Sequence
  Synthetic oligonucleotide; CTA chr11 5344074 5344095 5344091 5344096 +
aggagcagtcagattgagaaag

SEQ ID NO: 104186 - DNA, 22 bp, Artificial Sequence
  Synthetic oligonucleotide; TTG chr11 5344090 5344111 5344107 5344112 +
agaaagagacacttggcctcca

SEQ ID NO: 104187 - DNA, 22 bp, Artificial Sequence
  Synthetic oligonucleotide; CTT chr11 5344104 5344125 5344121 5344126 +
ggcctccagatttcatggacta

SEQ ID NO: 104188 - DNA, 22 bp, Artificial Sequence
  Synthetic oligonucleotide; TTG chr11 5344105 5344126 5344122 5344127 +
gcctccagatttcatggactag

SEQ ID NO: 104189 - DNA, 22 bp, Artificial Sequence
  Synthetic oligonucleotide; CTC chr11 5344110 5344131 5344127 5344132 +
cagatttcatggactagtgatg

SEQ ID NO: 104190 - DNA, 22 bp, Artificial Sequence
  Synthetic oligonucleotide; TTT chr11 5344117 5344138 5344134 5344139 +
catggactagtgatggggaaca

SEQ ID NO: 104191 - DNA, 22 bp, Artificial Sequence
  Synthetic oligonucleotide; TTC chr11 5344118 5344139 5344135 5344140 +
atggactagtgatggggaacag

SEQ ID NO: 104192 - DNA, 22 bp, Artificial Sequence
  Synthetic oligonucleotide; CTA chr11 5344126 5344147 5344143 5344148 +
gtgatggggaacagacattcac

SEQ ID NO: 104193 - DNA, 22 bp, Artificial Sequence
  Synthetic oligonucleotide; TTC chr11 5344146 5344167 5344163 5344168 +
acgattagtgtgaattaccctc

SEQ ID NO: 104194 - DNA, 22 bp, Artificial Sequence
  Synthetic oligonucleotide; TTA chr11 5344153 5344174 5344170 5344175 +
gtgtgaattaccctcttgtaga

SEQ ID NO: 104195 - DNA, 22 bp, Artificial Sequence
  Synthetic oligonucleotide; TTA chr11 5344163 5344184 5344180 5344185 +
ccctcttgtagaatccttcagt

SEQ ID NO: 104196 - DNA, 22 bp, Artificial Sequence
  Synthetic oligonucleotide; CTC chr11 5344168 5344189 5344185 5344190 +
ttgtagaatccttcagtactac

SEQ ID NO: 104197 - DNA, 22 bp, Artificial Sequence
  Synthetic oligonucleotide; CTT chr11 5344170 5344191 5344187 5344192 +
gtagaatccttcagtactactc

SEQ ID NO: 104198 - DNA, 22 bp, Artificial Sequence
  Synthetic oligonucleotide; TTG chr11 5344171 5344192 5344188 5344193 +
tagaatccttcagtactactca

SEQ ID NO: 104199 - DNA, 22 bp, Artificial Sequence
  Synthetic oligonucleotide; CTT chr11 5344181 5344202 5344198 5344203 +
cagtactactcactacttgtga

SEQ ID NO: 104200 - DNA, 22 bp, Artificial Sequence
  Synthetic oligonucleotide; TTC chr11 5344182 5344203 5344199 5344204 +
agtactactcactacttgtgac

SEQ ID NO: 104201 - DNA, 22 bp, Artificial Sequence
  Synthetic oligonucleotide; CTA chr11 5344189 5344210 5344206 5344211 +
ctcactacttgtgacaatagct

SEQ ID NO: 104202 - DNA, 22 bp, Artificial Sequence
  Synthetic oligonucleotide; CTC chr11 5344192 5344213 5344209 5344214 +
actacttgtgacaatagctcag

SEQ ID NO: 104203 - DNA, 22 bp, Artificial Sequence
  Synthetic oligonucleotide; CTA chr11 5344196 5344217 5344213 5344218 +
cttgtgacaatagctcagtcta

SEQ ID NO: 104204 - DNA, 22 bp, Artificial Sequence
  Synthetic oligonucleotide; CTT chr11 5344199 5344220 5344216 5344221 +
gtgacaatagctcagtctaatt

SEQ ID NO: 104205 - DNA, 22 bp, Artificial Sequence
  Synthetic oligonucleotide; TTG chr11 5344200 5344221 5344217 5344222 +
tgacaatagctcagtctaatta

SEQ ID NO: 104206 - DNA, 22 bp, Artificial Sequence
  Synthetic oligonucleotide; CTC chr11 5344212 5344233 5344229 5344234 +
agtctaattataagttagactt

SEQ ID NO: 104207 - DNA, 22 bp, Artificial Sequence
  Synthetic oligonucleotide; CTA chr11 5344218 5344239 5344235 5344240 +
attataagttagactttggggc

SEQ ID NO: 104208 - DNA, 22 bp, Artificial Sequence
  Synthetic oligonucleotide; TTA chr11 5344222 5344243 5344239 5344244 +
taagttagactttggggctgga

SEQ ID NO: 104209 - DNA, 22 bp, Artificial Sequence
  Synthetic oligonucleotide; TTA chr11 5344229 5344250 5344246 5344251 +
gactttggggctggaataaatg

SEQ ID NO: 104210 - DNA, 22 bp, Artificial Sequence
  Synthetic oligonucleotide; CTT chr11 5344234 5344255 5344251 5344256 +
tggggctggaataaatgattag

SEQ ID NO: 104211 - DNA, 22 bp, Artificial Sequence
  Synthetic oligonucleotide; TTT chr11 5344235 5344256 5344252 5344257 +
ggggctggaataaatgattagg

SEQ ID NO: 104212 - DNA, 22 bp, Artificial Sequence
  Synthetic oligonucleotide; TTG chr11 5344236 5344257 5344253 5344258 +
gggctggaataaatgattaggc

SEQ ID NO: 104213 - DNA, 22 bp, Artificial Sequence
  Synthetic oligonucleotide; CTG chr11 5344242 5344263 5344259 5344264 +
gaataaatgattaggccagcca

SEQ ID NO: 104214 - DNA, 22 bp, Artificial Sequence
  Synthetic oligonucleotide; TTA chr11 5344255 5344276 5344272 5344277 +
ggccagccaaagacatcactta

SEQ ID NO: 104215 - DNA, 22 bp, Artificial Sequence
  Synthetic oligonucleotide; CTT chr11 5344276 5344297 5344293 5344298 +
ataatagtgtatctccttcagt

SEQ ID NO: 104216 - DNA, 22 bp, Artificial Sequence
  Synthetic oligonucleotide; TTA chr11 5344277 5344298 5344294 5344299 +
taatagtgtatctccttcagtt

SEQ ID NO: 104217 - DNA, 22 bp, Artificial Sequence
  Synthetic oligonucleotide; CTC chr11 5344291 5344312 5344308 5344313 +
cttcagtttaaacatcttactg

SEQ ID NO: 104218 - DNA, 22 bp, Artificial Sequence
  Synthetic oligonucleotide; CTT chr11 5344294 5344315 5344311 5344316 +
cagtttaaacatcttactgttt

SEQ ID NO: 104219 - DNA, 22 bp, Artificial Sequence
  Synthetic oligonucleotide; TTC chr11 5344295 5344316 5344312 5344317 +
agtttaaacatcttactgtttc

SEQ ID NO: 104220 - DNA, 22 bp, Artificial Sequence
  Synthetic oligonucleotide; TTT chr11 5344300 5344321 5344317 5344322 +
aaacatcttactgtttcttatt

SEQ ID NO: 104221 - DNA, 22 bp, Artificial Sequence
  Synthetic oligonucleotide; TTA chr11 5344301 5344322 5344318 5344323 +
aacatcttactgtttcttattt

SEQ ID NO: 104222 - DNA, 22 bp, Artificial Sequence
  Synthetic oligonucleotide; CTT chr11 5344309 5344330 5344326 5344331 +
actgtttcttatttacaagtag

SEQ ID NO: 104223 - DNA, 22 bp, Artificial Sequence
  Synthetic oligonucleotide; TTA chr11 5344310 5344331 5344327 5344332 +
ctgtttcttatttacaagtagt

SEQ ID NO: 104224 - DNA, 22 bp, Artificial Sequence
  Synthetic oligonucleotide; CTG chr11 5344313 5344334 5344330 5344335 +
tttcttatttacaagtagtgtc

SEQ ID NO: 104225 - DNA, 22 bp, Artificial Sequence
  Synthetic oligonucleotide; TTT chr11 5344316 5344337 5344333 5344338 +
cttatttacaagtagtgtcttt

SEQ ID NO: 104226 - DNA, 22 bp, Artificial Sequence
  Synthetic oligonucleotide; TTC chr11 5344317 5344338 5344334 5344339 +
ttatttacaagtagtgtctttt

SEQ ID NO: 104227 - DNA, 22 bp, Artificial Sequence
  Synthetic oligonucleotide; CTT chr11 5344319 5344340 5344336 5344341 +
atttacaagtagtgtctttttc

SEQ ID NO: 104228 - DNA, 22 bp, Artificial Sequence
  Synthetic oligonucleotide; TTA chr11 5344320 5344341 5344337 5344342 +
tttacaagtagtgtctttttct

SEQ ID NO: 104229 - DNA, 22 bp, Artificial Sequence
  Synthetic oligonucleotide; TTT chr11 5344323 5344344 5344340 5344345 +
acaagtagtgtctttttctttt

SEQ ID NO: 104230 - DNA, 22 bp, Artificial Sequence
  Synthetic oligonucleotide; TTA chr11 5344324 5344345 5344341 5344346 +
caagtagtgtctttttcttttt

SEQ ID NO: 104231 - DNA, 22 bp, Artificial Sequence
  Synthetic oligonucleotide; CTT chr11 5344337 5344358 5344354 5344359 +
tttctttttaaattatttttct

SEQ ID NO: 104232 - DNA, 22 bp, Artificial Sequence
  Synthetic oligonucleotide; TTT chr11 5344338 5344359 5344355 5344360 +
ttctttttaaattatttttcta

SEQ ID NO: 104233 - DNA, 22 bp, Artificial Sequence
  Synthetic oligonucleotide; TTT chr11 5344339 5344360 5344356 5344361 +
tctttttaaattatttttctat

SEQ ID NO: 104234 - DNA, 22 bp, Artificial Sequence
  Synthetic oligonucleotide; TTT chr11 5344340 5344361 5344357 5344362 +
ctttttaaattatttttctata

SEQ ID NO: 104235 - DNA, 22 bp, Artificial Sequence
  Synthetic oligonucleotide; TTC chr11 5344341 5344362 5344358 5344363 +
tttttaaattatttttctatag

SEQ ID NO: 104236 - DNA, 22 bp, Artificial Sequence
  Synthetic oligonucleotide; CTT chr11 5344343 5344364 5344360 5344365 +
tttaaattatttttctataggc

SEQ ID NO: 104237 - DNA, 22 bp, Artificial Sequence
  Synthetic oligonucleotide; TTT chr11 5344344 5344365 5344361 5344366 +
ttaaattatttttctataggcc

SEQ ID NO: 104238 - DNA, 22 bp, Artificial Sequence
  Synthetic oligonucleotide; TTT chr11 5344345 5344366 5344362 5344367 +
taaattatttttctataggcct

SEQ ID NO: 104239 - DNA, 22 bp, Artificial Sequence
  Synthetic oligonucleotide; TTT chr11 5344346 5344367 5344363 5344368 +
aaattatttttctataggccta

SEQ ID NO: 104240 - DNA, 22 bp, Artificial Sequence
  Synthetic oligonucleotide; TTA chr11 5344347 5344368 5344364 5344369 +
aattatttttctataggcctac

SEQ ID NO: 104241 - DNA, 22 bp, Artificial Sequence
  Synthetic oligonucleotide; TTA chr11 5344352 5344373 5344369 5344374 +
tttttctataggcctactgaag

SEQ ID NO: 104242 - DNA, 22 bp, Artificial Sequence
  Synthetic oligonucleotide; TTT chr11 5344355 5344376 5344372 5344377 +
ttctataggcctactgaagtaa

SEQ ID NO: 104243 - DNA, 22 bp, Artificial Sequence
  Synthetic oligonucleotide; TTT chr11 5344356 5344377 5344373 5344378 +
tctataggcctactgaagtaat

SEQ ID NO: 104244 - DNA, 22 bp, Artificial Sequence
  Synthetic oligonucleotide; TTT chr11 5344357 5344378 5344374 5344379 +
ctataggcctactgaagtaatt

SEQ ID NO: 104245 - DNA, 22 bp, Artificial Sequence
  Synthetic oligonucleotide; TTC chr11 5344358 5344379 5344375 5344380 +
tataggcctactgaagtaattc

SEQ ID NO: 104246 - DNA, 22 bp, Artificial Sequence
  Synthetic oligonucleotide; CTA chr11 5344360 5344381 5344377 5344382 +
taggcctactgaagtaattccc

SEQ ID NO: 104247 - DNA, 22 bp, Artificial Sequence
  Synthetic oligonucleotide; CTA chr11 5344368 5344389 5344385 5344390 +
ctgaagtaattccctagaatct

SEQ ID NO: 104248 - DNA, 22 bp, Artificial Sequence
  Synthetic oligonucleotide; CTG chr11 5344371 5344392 5344388 5344393 +
aagtaattccctagaatctgac

SEQ ID NO: 104249 - DNA, 22 bp, Artificial Sequence
  Synthetic oligonucleotide; TTC chr11 5344380 5344401 5344397 5344402 +
cctagaatctgacctctctcat

SEQ ID NO: 104250 - DNA, 22 bp, Artificial Sequence
  Synthetic oligonucleotide; CTA chr11 5344384 5344405 5344401 5344406 +
gaatctgacctctctcatttca

SEQ ID NO: 104251 - DNA, 22 bp, Artificial Sequence
  Synthetic oligonucleotide; CTG chr11 5344391 5344412 5344408 5344413 +
acctctctcatttcaagttctc

SEQ ID NO: 104252 - DNA, 22 bp, Artificial Sequence
  Synthetic oligonucleotide; CTC chr11 5344396 5344417 5344413 5344418 +
tctcatttcaagttctccattt

SEQ ID NO: 104253 - DNA, 22 bp, Artificial Sequence
  Synthetic oligonucleotide; CTC chr11 5344398 5344419 5344415 5344420 +
tcatttcaagttctccatttat

SEQ ID NO: 104254 - DNA, 22 bp, Artificial Sequence
  Synthetic oligonucleotide; CTC chr11 5344400 5344421 5344417 5344422 +
atttcaagttctccatttatat

SEQ ID NO: 104255 - DNA, 22 bp, Artificial Sequence
  Synthetic oligonucleotide; TTT chr11 5344404 5344425 5344421 5344426 +
caagttctccatttatatttaa

SEQ ID NO: 104256 - DNA, 22 bp, Artificial Sequence
  Synthetic oligonucleotide; TTC chr11 5344405 5344426 5344422 5344427 +
aagttctccatttatatttaaa

SEQ ID NO: 104257 - DNA, 22 bp, Artificial Sequence
  Synthetic oligonucleotide; TTC chr11 5344411 5344432 5344428 5344433 +
tccatttatatttaaacatcca

SEQ ID NO: 104258 - DNA, 22 bp, Artificial Sequence
  Synthetic oligonucleotide; CTC chr11 5344413 5344434 5344430 5344435 +
catttatatttaaacatccatc

SEQ ID NO: 104259 - DNA, 22 bp, Artificial Sequence
  Synthetic oligonucleotide; TTT chr11 5344418 5344439 5344435 5344440 +
atatttaaacatccatcttcct

SEQ ID NO: 104260 - DNA, 22 bp, Artificial Sequence
  Synthetic oligonucleotide; TTA chr11 5344419 5344440 5344436 5344441 +
tatttaaacatccatcttcctg

SEQ ID NO: 104261 - DNA, 22 bp, Artificial Sequence
  Synthetic oligonucleotide; TTT chr11 5344424 5344445 5344441 5344446 +
aaacatccatcttcctggtttc

SEQ ID NO: 104262 - DNA, 22 bp, Artificial Sequence
  Synthetic oligonucleotide; TTA chr11 5344425 5344446 5344442 5344447 +
aacatccatcttcctggtttcc

SEQ ID NO: 104263 - DNA, 22 bp, Artificial Sequence
  Synthetic oligonucleotide; CTT chr11 5344437 5344458 5344454 5344459 +
cctggtttccttccctttatcc

SEQ ID NO: 104264 - DNA, 22 bp, Artificial Sequence
  Synthetic oligonucleotide; TTC chr11 5344438 5344459 5344455 5344460 +
ctggtttccttccctttatccc

SEQ ID NO: 104265 - DNA, 22 bp, Artificial Sequence
  Synthetic oligonucleotide; CTG chr11 5344441 5344462 5344458 5344463 +
gtttccttccctttatccccag

SEQ ID NO: 104266 - DNA, 22 bp, Artificial Sequence
  Synthetic oligonucleotide; TTT chr11 5344445 5344466 5344462 5344467 +
ccttccctttatccccagccat

SEQ ID NO: 104267 - DNA, 22 bp, Artificial Sequence
  Synthetic oligonucleotide; TTC chr11 5344446 5344467 5344463 5344468 +
cttccctttatccccagccata

SEQ ID NO: 104268 - DNA, 22 bp, Artificial Sequence
  Synthetic oligonucleotide; CTT chr11 5344449 5344470 5344466 5344471 +
ccctttatccccagccataggc

SEQ ID NO: 104269 - DNA, 22 bp, Artificial Sequence
  Synthetic oligonucleotide; TTC chr11 5344450 5344471 5344467 5344472 +
cctttatccccagccataggct

SEQ ID NO: 104270 - DNA, 22 bp, Artificial Sequence
  Synthetic oligonucleotide; CTT chr11 5344454 5344475 5344471 5344476 +
tatccccagccataggcttctg

SEQ ID NO: 104271 - DNA, 22 bp, Artificial Sequence
  Synthetic oligonucleotide; TTT chr11 5344455 5344476 5344472 5344477 +
atccccagccataggcttctga

SEQ ID NO: 104272 - DNA, 22 bp, Artificial Sequence
  Synthetic oligonucleotide; TTA chr11 5344456 5344477 5344473 5344478 +
tccccagccataggcttctgaa

SEQ ID NO: 104273 - DNA, 22 bp, Artificial Sequence
  Synthetic oligonucleotide; CTT chr11 5344473 5344494 5344490 5344495 +
ctgaatctgttctccccaatac

SEQ ID NO: 104274 - DNA, 22 bp, Artificial Sequence
  Synthetic oligonucleotide; TTC chr11 5344474 5344495 5344491 5344496 +
tgaatctgttctccccaatact

SEQ ID NO: 104275 - DNA, 22 bp, Artificial Sequence
  Synthetic oligonucleotide; CTG chr11 5344476 5344497 5344493 5344498 +
aatctgttctccccaatactga

SEQ ID NO: 104276 - DNA, 22 bp, Artificial Sequence
  Synthetic oligonucleotide; CTG chr11 5344482 5344503 5344499 5344504 +
ttctccccaatactgagtgaga

SEQ ID NO: 104277 - DNA, 22 bp, Artificial Sequence
  Synthetic oligonucleotide; TTC chr11 5344485 5344506 5344502 5344507 +
tccccaatactgagtgagagct

SEQ ID NO: 104278 - DNA, 22 bp, Artificial Sequence
  Synthetic oligonucleotide; CTC chr11 5344487 5344508 5344504 5344509 +
cccaatactgagtgagagctat

SEQ ID NO: 104279 - DNA, 22 bp, Artificial Sequence
  Synthetic oligonucleotide; CTG chr11 5344497 5344518 5344514 5344519 +
agtgagagctatttccctgctt

SEQ ID NO: 104280 - DNA, 22 bp, Artificial Sequence
  Synthetic oligonucleotide; CTA chr11 5344508 5344529 5344525 5344530 +
tttccctgcttaaacgtggtgc

SEQ ID NO: 104281 - DNA, 22 bp, Artificial Sequence
  Synthetic oligonucleotide; TTT chr11 5344511 5344532 5344528 5344533 +
ccctgcttaaacgtggtgctgt

SEQ ID NO: 104282 - DNA, 22 bp, Artificial Sequence
  Synthetic oligonucleotide; TTC chr11 5344512 5344533 5344529 5344534 +
cctgcttaaacgtggtgctgtc

SEQ ID NO: 104283 - DNA, 22 bp, Artificial Sequence
  Synthetic oligonucleotide; CTG chr11 5344516 5344537 5344533 5344538 +
cttaaacgtggtgctgtctttt

SEQ ID NO: 104284 - DNA, 22 bp, Artificial Sequence
  Synthetic oligonucleotide; CTT chr11 5344519 5344540 5344536 5344541 +
aaacgtggtgctgtcttttact

SEQ ID NO: 104285 - DNA, 22 bp, Artificial Sequence
  Synthetic oligonucleotide; TTA chr11 5344520 5344541 5344537 5344542 +
aacgtggtgctgtcttttactg

SEQ ID NO: 104286 - DNA, 22 bp, Artificial Sequence
  Synthetic oligonucleotide; CTG chr11 5344532 5344553 5344549 5344554 +
tcttttactgaagagaagagat

SEQ ID NO: 104287 - DNA, 22 bp, Artificial Sequence
  Synthetic oligonucleotide; CTT chr11 5344536 5344557 5344553 5344558 +
ttactgaagagaagagattagt

SEQ ID NO: 104288 - DNA, 22 bp, Artificial Sequence
  Synthetic oligonucleotide; TTT chr11 5344537 5344558 5344554 5344559 +
tactgaagagaagagattagtc

SEQ ID NO: 104289 - DNA, 22 bp, Artificial Sequence
  Synthetic oligonucleotide; TTT chr11 5344538 5344559 5344555 5344560 +
actgaagagaagagattagtcc

SEQ ID NO: 104290 - DNA, 22 bp, Artificial Sequence
  Synthetic oligonucleotide; TTA chr11 5344539 5344560 5344556 5344561 +
ctgaagagaagagattagtcct

SEQ ID NO: 104291 - DNA, 22 bp, Artificial Sequence
  Synthetic oligonucleotide; CTG chr11 5344542 5344563 5344559 5344564 +
aagagaagagattagtcctttg

SEQ ID NO: 104292 - DNA, 22 bp, Artificial Sequence
  Synthetic oligonucleotide; TTA chr11 5344556 5344577 5344573 5344578 +
gtcctttgagaaggttttaata

SEQ ID NO: 104293 - DNA, 22 bp, Artificial Sequence
  Synthetic oligonucleotide; CTT chr11 5344562 5344583 5344579 5344584 +
tgagaaggttttaatattcctt

SEQ ID NO: 104294 - DNA, 22 bp, Artificial Sequence
  Synthetic oligonucleotide; TTT chr11 5344563 5344584 5344580 5344585 +
gagaaggttttaatattccttc

SEQ ID NO: 104295 - DNA, 22 bp, Artificial Sequence
  Synthetic oligonucleotide; TTG chr11 5344564 5344585 5344581 5344586 +
agaaggttttaatattccttct

SEQ ID NO: 104296 - DNA, 22 bp, Artificial Sequence
  Synthetic oligonucleotide; TTT chr11 5344573 5344594 5344590 5344595 +
taatattccttctgccactaga

SEQ ID NO: 104297 - DNA, 22 bp, Artificial Sequence
  Synthetic oligonucleotide; TTT chr11 5344574 5344595 5344591 5344596 +
aatattccttctgccactagac

SEQ ID NO: 104298 - DNA, 22 bp, Artificial Sequence
  Synthetic oligonucleotide; TTA chr11 5344575 5344596 5344592 5344597 +
atattccttctgccactagact

SEQ ID NO: 104299 - DNA, 22 bp, Artificial Sequence
  Synthetic oligonucleotide; TTC chr11 5344581 5344602 5344598 5344603 +
cttctgccactagactaggggc

SEQ ID NO: 104300 - DNA, 22 bp, Artificial Sequence
  Synthetic oligonucleotide; CTT chr11 5344584 5344605 5344601 5344606 +
ctgccactagactaggggcttc

SEQ ID NO: 104301 - DNA, 22 bp, Artificial Sequence
  Synthetic oligonucleotide; TTC chr11 5344585 5344606 5344602 5344607 +
tgccactagactaggggcttct

SEQ ID NO: 104302 - DNA, 22 bp, Artificial Sequence
  Synthetic oligonucleotide; CTG chr11 5344587 5344608 5344604 5344609 +
ccactagactaggggcttcttg

SEQ ID NO: 104303 - DNA, 22 bp, Artificial Sequence
  Synthetic oligonucleotide; CTA chr11 5344593 5344614 5344610 5344615 +
gactaggggcttcttgcatata

SEQ ID NO: 104304 - DNA, 22 bp, Artificial Sequence
  Synthetic oligonucleotide; CTA chr11 5344598 5344619 5344615 5344620 +
ggggcttcttgcatatagacat

SEQ ID NO: 104305 - DNA, 22 bp, Artificial Sequence
  Synthetic oligonucleotide; CTT chr11 5344605 5344626 5344622 5344627 +
cttgcatatagacatggtgttt

SEQ ID NO: 104306 - DNA, 22 bp, Artificial Sequence
  Synthetic oligonucleotide; TTC chr11 5344606 5344627 5344623 5344628 +
ttgcatatagacatggtgttta

SEQ ID NO: 104307 - DNA, 22 bp, Artificial Sequence
  Synthetic oligonucleotide; CTT chr11 5344608 5344629 5344625 5344630 +
gcatatagacatggtgtttatt

SEQ ID NO: 104308 - DNA, 22 bp, Artificial Sequence
  Synthetic oligonucleotide; TTG chr11 5344609 5344630 5344626 5344631 +
catatagacatggtgtttattt

SEQ ID NO: 104309 - DNA, 22 bp, Artificial Sequence
  Synthetic oligonucleotide; TTT chr11 5344627 5344648 5344644 5344649 +
atttgctttgctcaacaccttg

SEQ ID NO: 104310 - DNA, 22 bp, Artificial Sequence
  Synthetic oligonucleotide; TTA chr11 5344628 5344649 5344645 5344650 +
tttgctttgctcaacaccttgc

SEQ ID NO: 104311 - DNA, 22 bp, Artificial Sequence
  Synthetic oligonucleotide; TTT chr11 5344631 5344652 5344648 5344653 +
gctttgctcaacaccttgcaaa

SEQ ID NO: 104312 - DNA, 22 bp, Artificial Sequence
  Synthetic oligonucleotide; TTG chr11 5344632 5344653 5344649 5344654 +
ctttgctcaacaccttgcaaag

SEQ ID NO: 104313 - DNA, 22 bp, Artificial Sequence
  Synthetic oligonucleotide; CTT chr11 5344635 5344656 5344652 5344657 +
tgctcaacaccttgcaaagtat

SEQ ID NO: 104314 - DNA, 22 bp, Artificial Sequence
  Synthetic oligonucleotide; TTT chr11 5344636 5344657 5344653 5344658 +
gctcaacaccttgcaaagtatc

SEQ ID NO: 104315 - DNA, 22 bp, Artificial Sequence
  Synthetic oligonucleotide; TTG chr11 5344637 5344658 5344654 5344659 +
ctcaacaccttgcaaagtatct

SEQ ID NO: 104316 - DNA, 22 bp, Artificial Sequence
  Synthetic oligonucleotide; CTC chr11 5344640 5344661 5344657 5344662 +
aacaccttgcaaagtatctaac

SEQ ID NO: 104317 - DNA, 22 bp, Artificial Sequence
  Synthetic oligonucleotide; CTT chr11 5344648 5344669 5344665 5344670 +
gcaaagtatctaacatgtgact

SEQ ID NO: 104318 - DNA, 22 bp, Artificial Sequence
  Synthetic oligonucleotide; TTG chr11 5344649 5344670 5344666 5344671 +
caaagtatctaacatgtgactg

SEQ ID NO: 104319 - DNA, 22 bp, Artificial Sequence
  Synthetic oligonucleotide; CTA chr11 5344660 5344681 5344677 5344682 +
acatgtgactgataaacatttc

SEQ ID NO: 104320 - DNA, 22 bp, Artificial Sequence
  Synthetic oligonucleotide; CTG chr11 5344671 5344692 5344688 5344693 +
ataaacatttcttagttcacct

SEQ ID NO: 104321 - DNA, 22 bp, Artificial Sequence
  Synthetic oligonucleotide; TTT chr11 5344681 5344702 5344698 5344703 +
cttagttcacctaatatttgtg

SEQ ID NO: 104322 - DNA, 22 bp, Artificial Sequence
  Synthetic oligonucleotide; TTC chr11 5344682 5344703 5344699 5344704 +
ttagttcacctaatatttgtga

SEQ ID NO: 104323 - DNA, 22 bp, Artificial Sequence
  Synthetic oligonucleotide; CTT chr11 5344684 5344705 5344701 5344706 +
agttcacctaatatttgtgaac

SEQ ID NO: 104324 - DNA, 22 bp, Artificial Sequence
  Synthetic oligonucleotide; TTA chr11 5344685 5344706 5344702 5344707 +
gttcacctaatatttgtgaaca

SEQ ID NO: 104325 - DNA, 22 bp, Artificial Sequence
  Synthetic oligonucleotide; TTC chr11 5344689 5344710 5344706 5344711 +
acctaatatttgtgaacacgca

SEQ ID NO: 104326 - DNA, 22 bp, Artificial Sequence
  Synthetic oligonucleotide; CTA chr11 5344694 5344715 5344711 5344716 +
atatttgtgaacacgcatcatg

SEQ ID NO: 104327 - DNA, 22 bp, Artificial Sequence
  Synthetic oligonucleotide; TTT chr11 5344700 5344721 5344717 5344722 +
gtgaacacgcatcatgtgacag

SEQ ID NO: 104328 - DNA, 22 bp, Artificial Sequence
  Synthetic oligonucleotide; TTG chr11 5344701 5344722 5344718 5344723 +
tgaacacgcatcatgtgacagc

SEQ ID NO: 104329 - DNA, 22 bp, Artificial Sequence
  Synthetic oligonucleotide; TTT chr11 5344733 5344754 5344750 5344755 +
aaagctctctggaattaaatgg

SEQ ID NO: 104330 - DNA, 22 bp, Artificial Sequence
  Synthetic oligonucleotide; TTA chr11 5344734 5344755 5344751 5344756 +
aagctctctggaattaaatggt

SEQ ID NO: 104331 - DNA, 22 bp, Artificial Sequence
  Synthetic oligonucleotide; CTC chr11 5344740 5344761 5344757 5344762 +
tctggaattaaatggtaataag

SEQ ID NO: 104332 - DNA, 22 bp, Artificial Sequence
  Synthetic oligonucleotide; CTC chr11 5344742 5344763 5344759 5344764 +
tggaattaaatggtaataagac

SEQ ID NO: 104333 - DNA, 22 bp, Artificial Sequence
  Synthetic oligonucleotide; CTG chr11 5344744 5344765 5344761 5344766 +
gaattaaatggtaataagacaa

SEQ ID NO: 104334 - DNA, 22 bp, Artificial Sequence
  Synthetic oligonucleotide; TTA chr11 5344750 5344771 5344767 5344772 +
aatggtaataagacaaagtccc

SEQ ID NO: 104335 - DNA, 22 bp, Artificial Sequence
  Synthetic oligonucleotide; CTA chr11 5344774 5344795 5344791 5344796 +
atcttataaaccataaattaag

SEQ ID NO: 104336 - DNA, 22 bp, Artificial Sequence
  Synthetic oligonucleotide; CTT chr11 5344779 5344800 5344796 5344801 +
ataaaccataaattaagttgaa

SEQ ID NO: 104337 - DNA, 22 bp, Artificial Sequence
  Synthetic oligonucleotide; TTA chr11 5344780 5344801 5344797 5344802 +
taaaccataaattaagttgaaa

SEQ ID NO: 104338 - DNA, 22 bp, Artificial Sequence
  Synthetic oligonucleotide; TTA chr11 5344794 5344815 5344811 5344816 +
agttgaaaaataaataagacaa

SEQ ID NO: 104339 - DNA, 22 bp, Artificial Sequence
  Synthetic oligonucleotide; TTG chr11 5344799 5344820 5344816 5344821 +
aaaaataaataagacaatttta

SEQ ID NO: 104340 - DNA, 22 bp, Artificial Sequence
  Synthetic oligonucleotide; TTT chr11 5344819 5344840 5344836 5344841 +
taaacaaatataaatgcaagtt

SEQ ID NO: 104341 - DNA, 22 bp, Artificial Sequence
  Synthetic oligonucleotide; TTT chr11 5344820 5344841 5344837 5344842 +
aaacaaatataaatgcaagttt

SEQ ID NO: 104342 - DNA, 22 bp, Artificial Sequence
  Synthetic oligonucleotide; TTA chr11 5344821 5344842 5344838 5344843 +
aacaaatataaatgcaagttta

SEQ ID NO: 104343 - DNA, 22 bp, Artificial Sequence
  Synthetic oligonucleotide; TTT chr11 5344842 5344863 5344859 5344864 +
aacataaaacagtactacttga

SEQ ID NO: 104344 - DNA, 22 bp, Artificial Sequence
  Synthetic oligonucleotide; TTA chr11 5344843 5344864 5344860 5344865 +
acataaaacagtactacttgat

SEQ ID NO: 104345 - DNA, 22 bp, Artificial Sequence
  Synthetic oligonucleotide; CTA chr11 5344859 5344880 5344876 5344881 +
cttgatgtagattaattggatg

SEQ ID NO: 104346 - DNA, 22 bp, Artificial Sequence
  Synthetic oligonucleotide; CTT chr11 5344862 5344883 5344879 5344884 +
gatgtagattaattggatggta

SEQ ID NO: 104347 - DNA, 22 bp, Artificial Sequence
  Synthetic oligonucleotide; TTG chr11 5344863 5344884 5344880 5344885 +
atgtagattaattggatggtat

SEQ ID NO: 104348 - DNA, 22 bp, Artificial Sequence
  Synthetic oligonucleotide; TTA chr11 5344873 5344894 5344890 5344895 +
attggatggtattgtatacaag

SEQ ID NO: 104349 - DNA, 22 bp, Artificial Sequence
  Synthetic oligonucleotide; TTG chr11 5344877 5344898 5344894 5344899 +
gatggtattgtatacaagatag

SEQ ID NO: 104350 - DNA, 22 bp, Artificial Sequence
  Synthetic oligonucleotide; TTG chr11 5344887 5344908 5344904 5344909 +
tatacaagatagtatagcagtt

SEQ ID NO: 104351 - DNA, 22 bp, Artificial Sequence
  Synthetic oligonucleotide; TTT chr11 5344910 5344931 5344927 5344932 +
gaggggcctagaactgcaccta

SEQ ID NO: 104352 - DNA, 22 bp, Artificial Sequence
  Synthetic oligonucleotide; TTG chr11 5344911 5344932 5344928 5344933 +
aggggcctagaactgcacctat

SEQ ID NO: 104353 - DNA, 22 bp, Artificial Sequence
  Synthetic oligonucleotide; CTA chr11 5344920 5344941 5344937 5344942 +
gaactgcacctatgaggaggtc

SEQ ID NO: 104354 - DNA, 22 bp, Artificial Sequence
  Synthetic oligonucleotide; CTG chr11 5344926 5344947 5344943 5344948 +
cacctatgaggaggtcccattt

SEQ ID NO: 104355 - DNA, 22 bp, Artificial Sequence
  Synthetic oligonucleotide; CTA chr11 5344932 5344953 5344949 5344954 +
tgaggaggtcccatttgaactg

SEQ ID NO: 104356 - DNA, 22 bp, Artificial Sequence
  Synthetic oligonucleotide; TTT chr11 5344948 5344969 5344965 5344970 +
gaactgagacctcaatacaaaa

SEQ ID NO: 104357 - DNA, 22 bp, Artificial Sequence
  Synthetic oligonucleotide; TTG chr11 5344949 5344970 5344966 5344971 +
aactgagacctcaatacaaaag

SEQ ID NO: 104358 - DNA, 22 bp, Artificial Sequence
  Synthetic oligonucleotide; CTG chr11 5344954 5344975 5344971 5344976 +
agacctcaatacaaaagaaaac

SEQ ID NO: 104359 - DNA, 22 bp, Artificial Sequence
  Synthetic oligonucleotide; CTC chr11 5344961 5344982 5344978 5344983 +
aatacaaaagaaaacctgaccg

SEQ ID NO: 104360 - DNA, 22 bp, Artificial Sequence
  Synthetic oligonucleotide; CTG chr11 5344979 5345000 5344996 5345001 +
accgtatacagacctagaggaa

SEQ ID NO: 104361 - DNA, 22 bp, Artificial Sequence
  Synthetic oligonucleotide; CTA chr11 5344995 5345016 5345012 5345017 +
gaggaaaactgttccagaggga

SEQ ID NO: 104362 - DNA, 22 bp, Artificial Sequence
  Synthetic oligonucleotide; CTG chr11 5345006 5345027 5345023 5345028 +
ttccagagggaaaatcagcatg

SEQ ID NO: 104363 - DNA, 22 bp, Artificial Sequence
  Synthetic oligonucleotide; TTC chr11 5345009 5345030 5345026 5345031 +
cagagggaaaatcagcatgact

SEQ ID NO: 104364 - DNA, 22 bp, Artificial Sequence
  Synthetic oligonucleotide; CTG chr11 5345032 5345053 5345049 5345054 +
gcatttgataagaaaacaggag

SEQ ID NO: 104365 - DNA, 22 bp, Artificial Sequence
  Synthetic oligonucleotide; TTT chr11 5345038 5345059 5345055 5345060 +
gataagaaaacaggagagggac

SEQ ID NO: 104366 - DNA, 22 bp, Artificial Sequence
  Synthetic oligonucleotide; TTG chr11 5345039 5345060 5345056 5345061 +
ataagaaaacaggagagggaca

SEQ ID NO: 104367 - DNA, 22 bp, Artificial Sequence
  Synthetic oligonucleotide; CTT chr11 5345109 5345130 5345126 5345131 +
acagaccaccacggaatttttg

SEQ ID NO: 104368 - DNA, 22 bp, Artificial Sequence
  Synthetic oligonucleotide; TTA chr11 5345110 5345131 5345127 5345132 +
cagaccaccacggaatttttgt

SEQ ID NO: 104369 - DNA, 22 bp, Artificial Sequence
  Synthetic oligonucleotide; TTT chr11 5345128 5345149 5345145 5345150 +
ttgttttgttttgttttcttct

SEQ ID NO: 104370 - DNA, 22 bp, Artificial Sequence
  Synthetic oligonucleotide; TTT chr11 5345129 5345150 5345146 5345151 +
tgttttgttttgttttcttctt

SEQ ID NO: 104371 - DNA, 22 bp, Artificial Sequence
  Synthetic oligonucleotide; TTT chr11 5345130 5345151 5345147 5345152 +
gttttgttttgttttcttctta

SEQ ID NO: 104372 - DNA, 22 bp, Artificial Sequence
  Synthetic oligonucleotide; TTG chr11 5345131 5345152 5345148 5345153 +
ttttgttttgttttcttcttac

SEQ ID NO: 104373 - DNA, 22 bp, Artificial Sequence
  Synthetic oligonucleotide; TTT chr11 5345134 5345155 5345151 5345156 +
tgttttgttttcttcttactat

SEQ ID NO: 104374 - DNA, 22 bp, Artificial Sequence
  Synthetic oligonucleotide; TTT chr11 5345135 5345156 5345152 5345157 +
gttttgttttcttcttactata

SEQ ID NO: 104375 - DNA, 22 bp, Artificial Sequence
  Synthetic oligonucleotide; TTG chr11 5345136 5345157 5345153 5345158 +
ttttgttttcttcttactataa

SEQ ID NO: 104376 - DNA, 22 bp, Artificial Sequence
  Synthetic oligonucleotide; TTT chr11 5345139 5345160 5345156 5345161 +
tgttttcttcttactataaatg

SEQ ID NO: 104377 - DNA, 22 bp, Artificial Sequence
  Synthetic oligonucleotide; TTT chr11 5345140 5345161 5345157 5345162 +
gttttcttcttactataaatgt

SEQ ID NO: 104378 - DNA, 22 bp, Artificial Sequence
  Synthetic oligonucleotide; TTG chr11 5345141 5345162 5345158 5345163 +
ttttcttcttactataaatgta

SEQ ID NO: 104379 - DNA, 22 bp, Artificial Sequence
  Synthetic oligonucleotide; TTT chr11 5345144 5345165 5345161 5345166 +
tcttcttactataaatgtagta

SEQ ID NO: 104380 - DNA, 22 bp, Artificial Sequence
  Synthetic oligonucleotide; TTT chr11 5345145 5345166 5345162 5345167 +
cttcttactataaatgtagtaa

SEQ ID NO: 104381 - DNA, 22 bp, Artificial Sequence
  Synthetic oligonucleotide; TTC chr11 5345146 5345167 5345163 5345168 +
ttcttactataaatgtagtaaa

SEQ ID NO: 104382 - DNA, 22 bp, Artificial Sequence
  Synthetic oligonucleotide; CTT chr11 5345148 5345169 5345165 5345170 +
cttactataaatgtagtaaaga

SEQ ID NO: 104383 - DNA, 22 bp, Artificial Sequence
  Synthetic oligonucleotide; TTC chr11 5345149 5345170 5345166 5345171 +
ttactataaatgtagtaaagac

SEQ ID NO: 104384 - DNA, 22 bp, Artificial Sequence
  Synthetic oligonucleotide; CTT chr11 5345151 5345172 5345168 5345173 +
actataaatgtagtaaagacat

SEQ ID NO: 104385 - DNA, 22 bp, Artificial Sequence
  Synthetic oligonucleotide; TTA chr11 5345152 5345173 5345169 5345174 +
ctataaatgtagtaaagacatt

SEQ ID NO: 104386 - DNA, 22 bp, Artificial Sequence
  Synthetic oligonucleotide; CTA chr11 5345155 5345176 5345172 5345177 +
taaatgtagtaaagacattagg

SEQ ID NO: 104387 - DNA, 22 bp, Artificial Sequence
  Synthetic oligonucleotide; TTA chr11 5345175 5345196 5345192 5345197 +
ggacactttgaaaatcacaatg

SEQ ID NO: 104388 - DNA, 22 bp, Artificial Sequence
  Synthetic oligonucleotide; CTT chr11 5345183 5345204 5345200 5345205 +
tgaaaatcacaatggaaaatag

SEQ ID NO: 104389 - DNA, 22 bp, Artificial Sequence
  Synthetic oligonucleotide; TTT chr11 5345184 5345205 5345201 5345206 +
gaaaatcacaatggaaaatagt

SEQ ID NO: 104390 - DNA, 22 bp, Artificial Sequence
  Synthetic oligonucleotide; TTG chr11 5345185 5345206 5345202 5345207 +
aaaatcacaatggaaaatagtg

SEQ ID NO: 104391 - DNA, 22 bp, Artificial Sequence
  Synthetic oligonucleotide; TTC chr11 5345220 5345241 5345237 5345242 +
tgatttgtatttttaaattact

SEQ ID NO: 104392 - DNA, 22 bp, Artificial Sequence
  Synthetic oligonucleotide; CTG chr11 5345222 5345243 5345239 5345244 +
atttgtatttttaaattactca

SEQ ID NO: 104393 - DNA, 22 bp, Artificial Sequence
  Synthetic oligonucleotide; TTT chr11 5345226 5345247 5345243 5345248 +
gtatttttaaattactcactta

SEQ ID NO: 104394 - DNA, 22 bp, Artificial Sequence
  Synthetic oligonucleotide; TTG chr11 5345227 5345248 5345244 5345249 +
tatttttaaattactcacttag

SEQ ID NO: 104395 - DNA, 22 bp, Artificial Sequence
  Synthetic oligonucleotide; TTT chr11 5345232 5345253 5345249 5345254 +
ttaaattactcacttagactgc

SEQ ID NO: 104396 - DNA, 22 bp, Artificial Sequence
  Synthetic oligonucleotide; TTT chr11 5345233 5345254 5345250 5345255 +
taaattactcacttagactgct

SEQ ID NO: 104397 - DNA, 22 bp, Artificial Sequence
  Synthetic oligonucleotide; TTT chr11 5345234 5345255 5345251 5345256 +
aaattactcacttagactgcta

SEQ ID NO: 104398 - DNA, 22 bp, Artificial Sequence
  Synthetic oligonucleotide; TTA chr11 5345235 5345256 5345252 5345257 +
aattactcacttagactgctat

SEQ ID NO: 104399 - DNA, 22 bp, Artificial Sequence
  Synthetic oligonucleotide; TTA chr11 5345240 5345261 5345257 5345262 +
ctcacttagactgctatgtgaa

SEQ ID NO: 104400 - DNA, 22 bp, Artificial Sequence
  Synthetic oligonucleotide; CTC chr11 5345243 5345264 5345260 5345265 +
acttagactgctatgtgaagaa

SEQ ID NO: 104401 - DNA, 22 bp, Artificial Sequence
  Synthetic oligonucleotide; CTT chr11 5345247 5345268 5345264 5345269 +
agactgctatgtgaagaagact

SEQ ID NO: 104402 - DNA, 22 bp, Artificial Sequence
  Synthetic oligonucleotide; TTA chr11 5345248 5345269 5345265 5345270 +
gactgctatgtgaagaagacta

SEQ ID NO: 104403 - DNA, 22 bp, Artificial Sequence
  Synthetic oligonucleotide; CTG chr11 5345253 5345274 5345270 5345275 +
ctatgtgaagaagactaagcaa

SEQ ID NO: 104404 - DNA, 22 bp, Artificial Sequence
  Synthetic oligonucleotide; CTA chr11 5345256 5345277 5345273 5345278 +
tgtgaagaagactaagcaagag

SEQ ID NO: 104405 - DNA, 22 bp, Artificial Sequence
  Synthetic oligonucleotide; CTA chr11 5345270 5345291 5345287 5345292 +
agcaagagacaagaaaagagat

SEQ ID NO: 104406 - DNA, 22 bp, Artificial Sequence
  Synthetic oligonucleotide; TTA chr11 5345298 5345319 5345315 5345320 +
gaaagctattttaaaaatccat

SEQ ID NO: 104407 - DNA, 22 bp, Artificial Sequence
  Synthetic oligonucleotide; CTA chr11 5345306 5345327 5345323 5345328 +
ttttaaaaatccatatgaagag

SEQ ID NO: 104408 - DNA, 22 bp, Artificial Sequence
  Synthetic oligonucleotide; TTT chr11 5345309 5345330 5345326 5345331 +
taaaaatccatatgaagagtca

SEQ ID NO: 104409 - DNA, 22 bp, Artificial Sequence
  Synthetic oligonucleotide; TTT chr11 5345310 5345331 5345327 5345332 +
aaaaatccatatgaagagtcat

SEQ ID NO: 104410 - DNA, 22 bp, Artificial Sequence
  Synthetic oligonucleotide; TTA chr11 5345311 5345332 5345328 5345333 +
aaaatccatatgaagagtcatg

SEQ ID NO: 104411 - DNA, 22 bp, Artificial Sequence
  Synthetic oligonucleotide; CTT chr11 5345341 5345362 5345358 5345363 +
gactaggagagaagcaggggaa

SEQ ID NO: 104412 - DNA, 22 bp, Artificial Sequence
  Synthetic oligonucleotide; TTG chr11 5345342 5345363 5345359 5345364 +
actaggagagaagcaggggaaa

SEQ ID NO: 104413 - DNA, 22 bp, Artificial Sequence
  Synthetic oligonucleotide; CTA chr11 5345346 5345367 5345363 5345368 +
ggagagaagcaggggaaatgaa

SEQ ID NO: 104414 - DNA, 22 bp, Artificial Sequence
  Synthetic oligonucleotide; CTT chr11 5345392 5345413 5345409 5345414 +
aaacagagacagatgcattttt

SEQ ID NO: 104415 - DNA, 22 bp, Artificial Sequence
  Synthetic oligonucleotide; TTA chr11 5345393 5345414 5345410 5345415 +
aacagagacagatgcatttttg

SEQ ID NO: 104416 - DNA, 22 bp, Artificial Sequence
  Synthetic oligonucleotide; TTT chr11 5345412 5345433 5345429 5345434 +
ttgaagtagtgccaagatttgc

SEQ ID NO: 104417 - DNA, 22 bp, Artificial Sequence
  Synthetic oligonucleotide; TTT chr11 5345413 5345434 5345430 5345435 +
tgaagtagtgccaagatttgct

SEQ ID NO: 104418 - DNA, 22 bp, Artificial Sequence
  Synthetic oligonucleotide; TTT chr11 5345414 5345435 5345431 5345436 +
gaagtagtgccaagatttgctg

SEQ ID NO: 104419 - DNA, 22 bp, Artificial Sequence
  Synthetic oligonucleotide; TTG chr11 5345415 5345436 5345432 5345437 +
aagtagtgccaagatttgctga

SEQ ID NO: 104420 - DNA, 22 bp, Artificial Sequence
  Synthetic oligonucleotide; TTT chr11 5345432 5345453 5345449 5345454 +
gctgatatattaaaaatgggag

SEQ ID NO: 104421 - DNA, 22 bp, Artificial Sequence
  Synthetic oligonucleotide; TTG chr11 5345433 5345454 5345450 5345455 +
ctgatatattaaaaatgggagt

SEQ ID NO: 104422 - DNA, 22 bp, Artificial Sequence
  Synthetic oligonucleotide; CTG chr11 5345436 5345457 5345453 5345458 +
atatattaaaaatgggagtgag

SEQ ID NO: 104423 - DNA, 22 bp, Artificial Sequence
  Synthetic oligonucleotide; TTA chr11 5345444 5345465 5345461 5345466 +
aaaatgggagtgagggaaaaat

SEQ ID NO: 104424 - DNA, 22 bp, Artificial Sequence
  Synthetic oligonucleotide; TTT chr11 5345478 5345499 5345495 5345500 +
cccctagatttctgtttgaaca

SEQ ID NO: 104425 - DNA, 22 bp, Artificial Sequence
  Synthetic oligonucleotide; TTC chr11 5345479 5345500 5345496 5345501 +
ccctagatttctgtttgaacaa

SEQ ID NO: 104426 - DNA, 22 bp, Artificial Sequence
  Synthetic oligonucleotide; CTA chr11 5345484 5345505 5345501 5345506 +
gatttctgtttgaacaaatgaa

SEQ ID NO: 104427 - DNA, 22 bp, Artificial Sequence
  Synthetic oligonucleotide; TTT chr11 5345489 5345510 5345506 5345511 +
ctgtttgaacaaatgaaagaat

SEQ ID NO: 104428 - DNA, 22 bp, Artificial Sequence
  Synthetic oligonucleotide; TTC chr11 5345490 5345511 5345507 5345512 +
tgtttgaacaaatgaaagaatg

SEQ ID NO: 104429 - DNA, 22 bp, Artificial Sequence
  Synthetic oligonucleotide; CTG chr11 5345492 5345513 5345509 5345514 +
tttgaacaaatgaaagaatggt

SEQ ID NO: 104430 - DNA, 22 bp, Artificial Sequence
  Synthetic oligonucleotide; TTT chr11 5345495 5345516 5345512 5345517 +
gaacaaatgaaagaatggtgaa

SEQ ID NO: 104431 - DNA, 22 bp, Artificial Sequence
  Synthetic oligonucleotide; TTG chr11 5345496 5345517 5345513 5345518 +
aacaaatgaaagaatggtgaag

SEQ ID NO: 104432 - DNA, 22 bp, Artificial Sequence
  Synthetic oligonucleotide; TTT chr11 5345524 5345545 5345541 5345546 +
actcaaaatggaagtctgaggg

SEQ ID NO: 104433 - DNA, 22 bp, Artificial Sequence
  Synthetic oligonucleotide; TTA chr11 5345525 5345546 5345542 5345547 +
ctcaaaatggaagtctgagggg

SEQ ID NO: 104434 - DNA, 22 bp, Artificial Sequence
  Synthetic oligonucleotide; CTC chr11 5345528 5345549 5345545 5345550 +
aaaatggaagtctgagggggat

SEQ ID NO: 104435 - DNA, 22 bp, Artificial Sequence
  Synthetic oligonucleotide; CTG chr11 5345542 5345563 5345559 5345564 +
agggggatacatattcacttgt

SEQ ID NO: 104436 - DNA, 22 bp, Artificial Sequence
  Synthetic oligonucleotide; TTC chr11 5345558 5345579 5345575 5345580 +
acttgtgaggaaatcaagagtc

SEQ ID NO: 104437 - DNA, 22 bp, Artificial Sequence
  Synthetic oligonucleotide; CTT chr11 5345562 5345583 5345579 5345584 +
gtgaggaaatcaagagtcatta

SEQ ID NO: 104438 - DNA, 22 bp, Artificial Sequence
  Synthetic oligonucleotide; TTG chr11 5345563 5345584 5345580 5345585 +
tgaggaaatcaagagtcattag

SEQ ID NO: 104439 - DNA, 22 bp, Artificial Sequence
  Synthetic oligonucleotide; TTA chr11 5345584 5345605 5345601 5345606 +
gtaaatatagctgaattagagc

SEQ ID NO: 104440 - DNA, 22 bp, Artificial Sequence
  Synthetic oligonucleotide; CTG chr11 5345597 5345618 5345614 5345619 +
aattagagcaaatgcatccctt

SEQ ID NO: 104441 - DNA, 22 bp, Artificial Sequence
  Synthetic oligonucleotide; TTA chr11 5345602 5345623 5345619 5345624 +
gagcaaatgcatcccttgcttt

SEQ ID NO: 104442 - DNA, 22 bp, Artificial Sequence
  Synthetic oligonucleotide; CTT chr11 5345619 5345640 5345636 5345641 +
gcttttttttcttgtcacatgc

SEQ ID NO: 104443 - DNA, 22 bp, Artificial Sequence
  Synthetic oligonucleotide; TTG chr11 5345620 5345641 5345637 5345642 +
cttttttttcttgtcacatgcc

SEQ ID NO: 104444 - DNA, 22 bp, Artificial Sequence
  Synthetic oligonucleotide; CTT chr11 5345623 5345644 5345640 5345645 +
ttttttcttgtcacatgccaga

SEQ ID NO: 104445 - DNA, 22 bp, Artificial Sequence
  Synthetic oligonucleotide; TTT chr11 5345624 5345645 5345641 5345646 +
tttttcttgtcacatgccagaa

SEQ ID NO: 104446 - DNA, 22 bp, Artificial Sequence
  Synthetic oligonucleotide; TTT chr11 5345625 5345646 5345642 5345647 +
ttttcttgtcacatgccagaac

SEQ ID NO: 104447 - DNA, 22 bp, Artificial Sequence
  Synthetic oligonucleotide; TTT chr11 5345626 5345647 5345643 5345648 +
tttcttgtcacatgccagaaca

SEQ ID NO: 104448 - DNA, 22 bp, Artificial Sequence
  Synthetic oligonucleotide; TTT chr11 5345627 5345648 5345644 5345649 +
ttcttgtcacatgccagaacaa

SEQ ID NO: 104449 - DNA, 22 bp, Artificial Sequence
  Synthetic oligonucleotide; TTT chr11 5345628 5345649 5345645 5345650 +
tcttgtcacatgccagaacaac

SEQ ID NO: 104450 - DNA, 22 bp, Artificial Sequence
  Synthetic oligonucleotide; TTT chr11 5345629 5345650 5345646 5345651 +
cttgtcacatgccagaacaact

SEQ ID NO: 104451 - DNA, 22 bp, Artificial Sequence
  Synthetic oligonucleotide; TTC chr11 5345630 5345651 5345647 5345652 +
ttgtcacatgccagaacaactt

SEQ ID NO: 104452 - DNA, 22 bp, Artificial Sequence
  Synthetic oligonucleotide; CTT chr11 5345632 5345653 5345649 5345654 +
gtcacatgccagaacaacttct

SEQ ID NO: 104453 - DNA, 22 bp, Artificial Sequence
  Synthetic oligonucleotide; TTG chr11 5345633 5345654 5345650 5345655 +
tcacatgccagaacaacttctt

SEQ ID NO: 104454 - DNA, 22 bp, Artificial Sequence
  Synthetic oligonucleotide; CTT chr11 5345652 5345673 5345669 5345674 +
cttgaagttgtttttatcctaa

SEQ ID NO: 104455 - DNA, 22 bp, Artificial Sequence
  Synthetic oligonucleotide; TTC chr11 5345653 5345674 5345670 5345675 +
ttgaagttgtttttatcctaag

SEQ ID NO: 104456 - DNA, 22 bp, Artificial Sequence
  Synthetic oligonucleotide; CTT chr11 5345655 5345676 5345672 5345677 +
gaagttgtttttatcctaagtt

SEQ ID NO: 104457 - DNA, 22 bp, Artificial Sequence
  Synthetic oligonucleotide; TTG chr11 5345656 5345677 5345673 5345678 +
aagttgtttttatcctaagtta

SEQ ID NO: 104458 - DNA, 22 bp, Artificial Sequence
  Synthetic oligonucleotide; TTG chr11 5345662 5345683 5345679 5345684 +
tttttatcctaagttaaaaaga

SEQ ID NO: 104459 - DNA, 22 bp, Artificial Sequence
  Synthetic oligonucleotide; TTT chr11 5345665 5345686 5345682 5345687 +
ttatcctaagttaaaaagatgg

SEQ ID NO: 104460 - DNA, 22 bp, Artificial Sequence
  Synthetic oligonucleotide; TTT chr11 5345666 5345687 5345683 5345688 +
tatcctaagttaaaaagatggt

SEQ ID NO: 104461 - DNA, 22 bp, Artificial Sequence
  Synthetic oligonucleotide; TTT chr11 5345667 5345688 5345684 5345689 +
atcctaagttaaaaagatggtc

SEQ ID NO: 104462 - DNA, 22 bp, Artificial Sequence
  Synthetic oligonucleotide; TTA chr11 5345668 5345689 5345685 5345690 +
tcctaagttaaaaagatggtcg

SEQ ID NO: 104463 - DNA, 22 bp, Artificial Sequence
  Synthetic oligonucleotide; CTA chr11 5345673 5345694 5345690 5345695 +
agttaaaaagatggtcgtatcc

SEQ ID NO: 104464 - DNA, 22 bp, Artificial Sequence
  Synthetic oligonucleotide; TTA chr11 5345678 5345699 5345695 5345700 +
aaaagatggtcgtatccaaata

SEQ ID NO: 104465 - DNA, 22 bp, Artificial Sequence
  Synthetic oligonucleotide; CTT chr11 5345708 5345729 5345725 5345730 +
cagagttactttgtcagtgtaa

SEQ ID NO: 104466 - DNA, 22 bp, Artificial Sequence
  Synthetic oligonucleotide; TTC chr11 5345709 5345730 5345726 5345731 +
agagttactttgtcagtgtaag

SEQ ID NO: 104467 - DNA, 22 bp, Artificial Sequence
  Synthetic oligonucleotide; TTA chr11 5345716 5345737 5345733 5345738 +
ctttgtcagtgtaaggcactac

SEQ ID NO: 104468 - DNA, 22 bp, Artificial Sequence
  Synthetic oligonucleotide; CTT chr11 5345719 5345740 5345736 5345741 +
tgtcagtgtaaggcactaccct

SEQ ID NO: 104469 - DNA, 22 bp, Artificial Sequence
  Synthetic oligonucleotide; TTT chr11 5345720 5345741 5345737 5345742 +
gtcagtgtaaggcactacccta

SEQ ID NO: 104470 - DNA, 22 bp, Artificial Sequence
  Synthetic oligonucleotide; TTG chr11 5345721 5345742 5345738 5345743 +
tcagtgtaaggcactaccctaa

SEQ ID NO: 104471 - DNA, 22 bp, Artificial Sequence
  Synthetic oligonucleotide; CTA chr11 5345737 5345758 5345754 5345759 +
ccctaaagatgccaccaaagga

SEQ ID NO: 104472 - DNA, 22 bp, Artificial Sequence
  Synthetic oligonucleotide; CTA chr11 5345742 5345763 5345759 5345764 +
aagatgccaccaaaggaaacga

SEQ ID NO: 104473 - DNA, 22 bp, Artificial Sequence
  Synthetic oligonucleotide; CTC chr11 5345769 5345790 5345786 5345791 +
ttaccttccacccatagagatg

SEQ ID NO: 104474 - DNA, 22 bp, Artificial Sequence
  Synthetic oligonucleotide; CTT chr11 5345771 5345792 5345788 5345793 +
accttccacccatagagatgag

SEQ ID NO: 104475 - DNA, 22 bp, Artificial Sequence
  Synthetic oligonucleotide; TTA chr11 5345772 5345793 5345789 5345794 +
ccttccacccatagagatgaga

SEQ ID NO: 104476 - DNA, 22 bp, Artificial Sequence
  Synthetic oligonucleotide; CTT chr11 5345776 5345797 5345793 5345798 +
ccacccatagagatgagatcta

SEQ ID NO: 104477 - DNA, 22 bp, Artificial Sequence
  Synthetic oligonucleotide; TTC chr11 5345777 5345798 5345794 5345799 +
cacccatagagatgagatctaa

SEQ ID NO: 104478 - DNA, 22 bp, Artificial Sequence
  Synthetic oligonucleotide; CTA chr11 5345798 5345819 5345815 5345820 +
actgtaatagtttcagtgaaga

SEQ ID NO: 104479 - DNA, 22 bp, Artificial Sequence
  Synthetic oligonucleotide; CTG chr11 5345802 5345823 5345819 5345824 +
taatagtttcagtgaagagatg

SEQ ID NO: 104480 - DNA, 22 bp, Artificial Sequence
  Synthetic oligonucleotide; TTT chr11 5345811 5345832 5345828 5345833 +
cagtgaagagatgccagacaac

SEQ ID NO: 104481 - DNA, 22 bp, Artificial Sequence
  Synthetic oligonucleotide; TTC chr11 5345812 5345833 5345829 5345834 +
agtgaagagatgccagacaact

SEQ ID NO: 104482 - DNA, 22 bp, Artificial Sequence
  Synthetic oligonucleotide; CTG chr11 5345835 5345856 5345852 5345857 +
ggcgtgaggcaacaactcagca

SEQ ID NO: 104483 - DNA, 22 bp, Artificial Sequence
  Synthetic oligonucleotide; CTC chr11 5345853 5345874 5345870 5345875 +
agcactttgaaagaatcatttt

SEQ ID NO: 104484 - DNA, 22 bp, Artificial Sequence
  Synthetic oligonucleotide; CTT chr11 5345860 5345881 5345877 5345882 +
tgaaagaatcatttttcagcat

SEQ ID NO: 104485 - DNA, 22 bp, Artificial Sequence
  Synthetic oligonucleotide; TTT chr11 5345861 5345882 5345878 5345883 +
gaaagaatcatttttcagcatc

SEQ ID NO: 104486 - DNA, 22 bp, Artificial Sequence
  Synthetic oligonucleotide; TTG chr11 5345862 5345883 5345879 5345884 +
aaagaatcatttttcagcatcc

SEQ ID NO: 104487 - DNA, 22 bp, Artificial Sequence
  Synthetic oligonucleotide; TTT chr11 5345874 5345895 5345891 5345896 +
ttcagcatccatattctgtcct

SEQ ID NO: 104488 - DNA, 22 bp, Artificial Sequence
  Synthetic oligonucleotide; TTT chr11 5345875 5345896 5345892 5345897 +
tcagcatccatattctgtccta

SEQ ID NO: 104489 - DNA, 22 bp, Artificial Sequence
  Synthetic oligonucleotide; TTT chr11 5345876 5345897 5345893 5345898 +
cagcatccatattctgtcctag

SEQ ID NO: 104490 - DNA, 22 bp, Artificial Sequence
  Synthetic oligonucleotide; TTC chr11 5345877 5345898 5345894 5345899 +
agcatccatattctgtcctagg

SEQ ID NO: 104491 - DNA, 22 bp, Artificial Sequence
  Synthetic oligonucleotide; TTC chr11 5345890 5345911 5345907 5345912 +
tgtcctaggactgagagacata

SEQ ID NO: 104492 - DNA, 22 bp, Artificial Sequence
  Synthetic oligonucleotide; CTG chr11 5345892 5345913 5345909 5345914 +
tcctaggactgagagacataaa

SEQ ID NO: 104493 - DNA, 22 bp, Artificial Sequence
  Synthetic oligonucleotide; CTA chr11 5345897 5345918 5345914 5345919 +
ggactgagagacataaaccaga

SEQ ID NO: 104494 - DNA, 22 bp, Artificial Sequence
  Synthetic oligonucleotide; CTG chr11 5345903 5345924 5345920 5345925 +
agagacataaaccagaattcag

SEQ ID NO: 104495 - DNA, 22 bp, Artificial Sequence
  Synthetic oligonucleotide; TTC chr11 5345923 5345944 5345940 5345945 +
agtgcctactgaacatacaatg

SEQ ID NO: 104496 - DNA, 22 bp, Artificial Sequence
  Synthetic oligonucleotide; CTA chr11 5345931 5345952 5345948 5345953 +
ctgaacatacaatgagtgatgt

SEQ ID NO: 104497 - DNA, 22 bp, Artificial Sequence
  Synthetic oligonucleotide; CTG chr11 5345934 5345955 5345951 5345956 +
aacatacaatgagtgatgtata

SEQ ID NO: 104498 - DNA, 22 bp, Artificial Sequence
  Synthetic oligonucleotide; TTC chr11 5345959 5345980 5345976 5345981 +
ttcagttactagacgcaaagat

SEQ ID NO: 104499 - DNA, 22 bp, Artificial Sequence
  Synthetic oligonucleotide; CTT chr11 5345961 5345982 5345978 5345983 +
cagttactagacgcaaagataa

SEQ ID NO: 104500 - DNA, 22 bp, Artificial Sequence
  Synthetic oligonucleotide; TTC chr11 5345962 5345983 5345979 5345984 +
agttactagacgcaaagataat

SEQ ID NO: 104501 - DNA, 22 bp, Artificial Sequence
  Synthetic oligonucleotide; TTA chr11 5345967 5345988 5345984 5345989 +
ctagacgcaaagataatccagc

SEQ ID NO: 104502 - DNA, 22 bp, Artificial Sequence
  Synthetic oligonucleotide; CTA chr11 5345970 5345991 5345987 5345992 +
gacgcaaagataatccagctta

SEQ ID NO: 104503 - DNA, 22 bp, Artificial Sequence
  Synthetic oligonucleotide; CTT chr11 5345991 5346012 5346008 5346013 +
agctcctccccttctgtgttct

SEQ ID NO: 104504 - DNA, 22 bp, Artificial Sequence
  Synthetic oligonucleotide; TTA chr11 5345992 5346013 5346009 5346014 +
gctcctccccttctgtgttcta

SEQ ID NO: 104505 - DNA, 22 bp, Artificial Sequence
  Synthetic oligonucleotide; CTC chr11 5345996 5346017 5346013 5346018 +
ctccccttctgtgttctatgta

SEQ ID NO: 104506 - DNA, 22 bp, Artificial Sequence
  Synthetic oligonucleotide; CTC chr11 5345999 5346020 5346016 5346021 +
cccttctgtgttctatgtactt

SEQ ID NO: 104507 - DNA, 22 bp, Artificial Sequence
  Synthetic oligonucleotide; CTT chr11 5346004 5346025 5346021 5346026 +
ctgtgttctatgtacttcattt

SEQ ID NO: 104508 - DNA, 22 bp, Artificial Sequence
  Synthetic oligonucleotide; TTC chr11 5346005 5346026 5346022 5346027 +
tgtgttctatgtacttcatttc

SEQ ID NO: 104509 - DNA, 22 bp, Artificial Sequence
  Synthetic oligonucleotide; CTG chr11 5346007 5346028 5346024 5346029 +
tgttctatgtacttcatttctc

SEQ ID NO: 104510 - DNA, 22 bp, Artificial Sequence
  Synthetic oligonucleotide; TTC chr11 5346012 5346033 5346029 5346034 +
tatgtacttcatttctctgtca

SEQ ID NO: 104511 - DNA, 22 bp, Artificial Sequence
  Synthetic oligonucleotide; CTA chr11 5346014 5346035 5346031 5346036 +
tgtacttcatttctctgtcaac

SEQ ID NO: 104512 - DNA, 22 bp, Artificial Sequence
  Synthetic oligonucleotide; CTT chr11 5346021 5346042 5346038 5346043 +
catttctctgtcaacactctta

SEQ ID NO: 104513 - DNA, 22 bp, Artificial Sequence
  Synthetic oligonucleotide; TTC chr11 5346022 5346043 5346039 5346044 +
atttctctgtcaacactcttac

SEQ ID NO: 104514 - DNA, 22 bp, Artificial Sequence
  Synthetic oligonucleotide; TTT chr11 5346026 5346047 5346043 5346048 +
ctctgtcaacactcttacttct

SEQ ID NO: 104515 - DNA, 22 bp, Artificial Sequence
  Synthetic oligonucleotide; TTC chr11 5346027 5346048 5346044 5346049 +
tctgtcaacactcttacttctc

SEQ ID NO: 104516 - DNA, 22 bp, Artificial Sequence
  Synthetic oligonucleotide; CTC chr11 5346029 5346050 5346046 5346051 +
tgtcaacactcttacttctctg

SEQ ID NO: 104517 - DNA, 22 bp, Artificial Sequence
  Synthetic oligonucleotide; CTG chr11 5346031 5346052 5346048 5346053 +
tcaacactcttacttctctgac

SEQ ID NO: 104518 - DNA, 22 bp, Artificial Sequence
  Synthetic oligonucleotide; CTC chr11 5346040 5346061 5346057 5346062 +
ttacttctctgacgtttcagca

SEQ ID NO: 104519 - DNA, 22 bp, Artificial Sequence
  Synthetic oligonucleotide; CTT chr11 5346042 5346063 5346059 5346064 +
acttctctgacgtttcagcaat

SEQ ID NO: 104520 - DNA, 22 bp, Artificial Sequence
  Synthetic oligonucleotide; TTA chr11 5346043 5346064 5346060 5346065 +
cttctctgacgtttcagcaata

SEQ ID NO: 104521 - DNA, 22 bp, Artificial Sequence
  Synthetic oligonucleotide; CTT chr11 5346046 5346067 5346063 5346068 +
ctctgacgtttcagcaataatc

SEQ ID NO: 104522 - DNA, 22 bp, Artificial Sequence
  Synthetic oligonucleotide; TTC chr11 5346047 5346068 5346064 5346069 +
tctgacgtttcagcaataatct

SEQ ID NO: 104523 - DNA, 22 bp, Artificial Sequence
  Synthetic oligonucleotide; CTC chr11 5346049 5346070 5346066 5346071 +
tgacgtttcagcaataatctcc

SEQ ID NO: 104524 - DNA, 22 bp, Artificial Sequence
  Synthetic oligonucleotide; CTG chr11 5346051 5346072 5346068 5346073 +
acgtttcagcaataatctcctt

SEQ ID NO: 104525 - DNA, 22 bp, Artificial Sequence
  Synthetic oligonucleotide; TTT chr11 5346057 5346078 5346074 5346079 +
cagcaataatctcctttaacct

SEQ ID NO: 104526 - DNA, 22 bp, Artificial Sequence
  Synthetic oligonucleotide; TTC chr11 5346058 5346079 5346075 5346080 +
agcaataatctcctttaaccta

SEQ ID NO: 104527 - DNA, 22 bp, Artificial Sequence
  Synthetic oligonucleotide; CTC chr11 5346070 5346091 5346087 5346092 +
ctttaacctaatctttcactgt

SEQ ID NO: 104528 - DNA, 22 bp, Artificial Sequence
  Synthetic oligonucleotide; CTT chr11 5346073 5346094 5346090 5346095 +
taacctaatctttcactgtatc

SEQ ID NO: 104529 - DNA, 22 bp, Artificial Sequence
  Synthetic oligonucleotide; TTT chr11 5346074 5346095 5346091 5346096 +
aacctaatctttcactgtatct

SEQ ID NO: 104530 - DNA, 22 bp, Artificial Sequence
  Synthetic oligonucleotide; TTA chr11 5346075 5346096 5346092 5346097 +
acctaatctttcactgtatctc

SEQ ID NO: 104531 - DNA, 22 bp, Artificial Sequence
  Synthetic oligonucleotide; CTA chr11 5346080 5346101 5346097 5346102 +
atctttcactgtatctcaactt

SEQ ID NO: 104532 - DNA, 22 bp, Artificial Sequence
  Synthetic oligonucleotide; CTT chr11 5346085 5346106 5346102 5346107 +
tcactgtatctcaactttgtga

SEQ ID NO: 104533 - DNA, 22 bp, Artificial Sequence
  Synthetic oligonucleotide; TTT chr11 5346086 5346107 5346103 5346108 +
cactgtatctcaactttgtgaa

SEQ ID NO: 104534 - DNA, 22 bp, Artificial Sequence
  Synthetic oligonucleotide; TTC chr11 5346087 5346108 5346104 5346109 +
actgtatctcaactttgtgaaa

SEQ ID NO: 104535 - DNA, 22 bp, Artificial Sequence
  Synthetic oligonucleotide; CTG chr11 5346091 5346112 5346108 5346113 +
tatctcaactttgtgaaaaatt

SEQ ID NO: 104536 - DNA, 22 bp, Artificial Sequence
  Synthetic oligonucleotide; CTC chr11 5346097 5346118 5346114 5346119 +
aactttgtgaaaaattccttct

SEQ ID NO: 104537 - DNA, 22 bp, Artificial Sequence
  Synthetic oligonucleotide; CTT chr11 5346102 5346123 5346119 5346124 +
tgtgaaaaattccttcttatca

SEQ ID NO: 104538 - DNA, 22 bp, Artificial Sequence
  Synthetic oligonucleotide; TTT chr11 5346103 5346124 5346120 5346125 +
gtgaaaaattccttcttatcag

SEQ ID NO: 104539 - DNA, 22 bp, Artificial Sequence
  Synthetic oligonucleotide; TTG chr11 5346104 5346125 5346121 5346126 +
tgaaaaattccttcttatcaga

SEQ ID NO: 104540 - DNA, 22 bp, Artificial Sequence
  Synthetic oligonucleotide; TTC chr11 5346114 5346135 5346131 5346136 +
cttcttatcagagaatatgcag

SEQ ID NO: 104541 - DNA, 22 bp, Artificial Sequence
  Synthetic oligonucleotide; CTT chr11 5346117 5346138 5346134 5346139 +
cttatcagagaatatgcagcac

SEQ ID NO: 104542 - DNA, 22 bp, Artificial Sequence
  Synthetic oligonucleotide; TTC chr11 5346118 5346139 5346135 5346140 +
ttatcagagaatatgcagcaca

SEQ ID NO: 104543 - DNA, 22 bp, Artificial Sequence
  Synthetic oligonucleotide; CTT chr11 5346120 5346141 5346137 5346142 +
atcagagaatatgcagcacaag

SEQ ID NO: 104544 - DNA, 22 bp, Artificial Sequence
  Synthetic oligonucleotide; TTA chr11 5346121 5346142 5346138 5346143 +
tcagagaatatgcagcacaagt

SEQ ID NO: 104545 - DNA, 22 bp, Artificial Sequence
  Synthetic oligonucleotide; CTA chr11 5346155 5346176 5346172 5346177 +
cagggaaagctaaccaaactgt

SEQ ID NO: 104546 - DNA, 22 bp, Artificial Sequence
  Synthetic oligonucleotide; CTA chr11 5346167 5346188 5346184 5346189 +
accaaactgtaaggcaatgatt

SEQ ID NO: 104547 - DNA, 22 bp, Artificial Sequence
  Synthetic oligonucleotide; CTG chr11 5346176 5346197 5346193 5346198 +
taaggcaatgattgtattttgc

SEQ ID NO: 104548 - DNA, 22 bp, Artificial Sequence
  Synthetic oligonucleotide; TTG chr11 5346190 5346211 5346207 5346212 +
tattttgccaataataacctgc

SEQ ID NO: 104549 - DNA, 22 bp, Artificial Sequence
  Synthetic oligonucleotide; TTT chr11 5346195 5346216 5346212 5346217 +
tgccaataataacctgcaactt

SEQ ID NO: 104550 - DNA, 22 bp, Artificial Sequence
  Synthetic oligonucleotide; TTT chr11 5346196 5346217 5346213 5346218 +
gccaataataacctgcaactta

SEQ ID NO: 104551 - DNA, 22 bp, Artificial Sequence
  Synthetic oligonucleotide; TTG chr11 5346197 5346218 5346214 5346219 +
ccaataataacctgcaacttaa

SEQ ID NO: 104552 - DNA, 22 bp, Artificial Sequence
  Synthetic oligonucleotide; CTG chr11 5346211 5346232 5346228 5346233 +
caacttaaagtttcctccttct

SEQ ID NO: 104553 - DNA, 22 bp, Artificial Sequence
  Synthetic oligonucleotide; CTT chr11 5346217 5346238 5346234 5346239 +
aaagtttcctccttctccattc

SEQ ID NO: 104554 - DNA, 22 bp, Artificial Sequence
  Synthetic oligonucleotide; TTA chr11 5346218 5346239 5346235 5346240 +
aagtttcctccttctccattcc

SEQ ID NO: 104555 - DNA, 22 bp, Artificial Sequence
  Synthetic oligonucleotide; TTT chr11 5346224 5346245 5346241 5346246 +
cctccttctccattcccaagaa

SEQ ID NO: 104556 - DNA, 22 bp, Artificial Sequence
  Synthetic oligonucleotide; TTC chr11 5346225 5346246 5346242 5346247 +
ctccttctccattcccaagaat

SEQ ID NO: 104557 - DNA, 22 bp, Artificial Sequence
  Synthetic oligonucleotide; CTC chr11 5346228 5346249 5346245 5346250 +
cttctccattcccaagaattcc

SEQ ID NO: 104558 - DNA, 22 bp, Artificial Sequence
  Synthetic oligonucleotide; CTT chr11 5346231 5346252 5346248 5346253 +
ctccattcccaagaattccatg

SEQ ID NO: 104559 - DNA, 22 bp, Artificial Sequence
  Synthetic oligonucleotide; TTC chr11 5346232 5346253 5346249 5346254 +
tccattcccaagaattccatgc

SEQ ID NO: 104560 - DNA, 22 bp, Artificial Sequence
  Synthetic oligonucleotide; CTC chr11 5346234 5346255 5346251 5346256 +
cattcccaagaattccatgcag

SEQ ID NO: 104561 - DNA, 22 bp, Artificial Sequence
  Synthetic oligonucleotide; TTC chr11 5346239 5346260 5346256 5346261 +
ccaagaattccatgcagacata

SEQ ID NO: 104562 - DNA, 22 bp, Artificial Sequence
  Synthetic oligonucleotide; TTC chr11 5346249 5346270 5346266 5346271 +
catgcagacatacctggtaatg

SEQ ID NO: 104563 - DNA, 22 bp, Artificial Sequence
  Synthetic oligonucleotide; CTG chr11 5346265 5346286 5346282 5346287 +
gtaatgcagctataatagtgat

SEQ ID NO: 104564 - DNA, 22 bp, Artificial Sequence
  Synthetic oligonucleotide; CTA chr11 5346277 5346298 5346294 5346299 +
taatagtgatctatggaatcac

SEQ ID NO: 104565 - DNA, 22 bp, Artificial Sequence
  Synthetic oligonucleotide; CTA chr11 5346290 5346311 5346307 5346312 +
tggaatcactctactttgtttt

SEQ ID NO: 104566 - DNA, 22 bp, Artificial Sequence
  Synthetic oligonucleotide; CTC chr11 5346301 5346322 5346318 5346323 +
tactttgttttgtgaaaattct

SEQ ID NO: 104567 - DNA, 22 bp, Artificial Sequence
  Synthetic oligonucleotide; CTA chr11 5346303 5346324 5346320 5346325 +
ctttgttttgtgaaaattcttg

SEQ ID NO: 104568 - DNA, 22 bp, Artificial Sequence
  Synthetic oligonucleotide; CTT chr11 5346306 5346327 5346323 5346328 +
tgttttgtgaaaattcttgtgt

SEQ ID NO: 104569 - DNA, 22 bp, Artificial Sequence
  Synthetic oligonucleotide; TTT chr11 5346307 5346328 5346324 5346329 +
gttttgtgaaaattcttgtgtc

SEQ ID NO: 104570 - DNA, 22 bp, Artificial Sequence
  Synthetic oligonucleotide; TTG chr11 5346308 5346329 5346325 5346330 +
ttttgtgaaaattcttgtgtcc

SEQ ID NO: 104571 - DNA, 22 bp, Artificial Sequence
  Synthetic oligonucleotide; TTT chr11 5346311 5346332 5346328 5346333 +
tgtgaaaattcttgtgtcctca

SEQ ID NO: 104572 - DNA, 22 bp, Artificial Sequence
  Synthetic oligonucleotide; TTT chr11 5346312 5346333 5346329 5346334 +
gtgaaaattcttgtgtcctcag

SEQ ID NO: 104573 - DNA, 22 bp, Artificial Sequence
  Synthetic oligonucleotide; TTG chr11 5346313 5346334 5346330 5346335 +
tgaaaattcttgtgtcctcagc

SEQ ID NO: 104574 - DNA, 22 bp, Artificial Sequence
  Synthetic oligonucleotide; TTC chr11 5346322 5346343 5346339 5346344 +
ttgtgtcctcagctagtcgtgg

SEQ ID NO: 104575 - DNA, 22 bp, Artificial Sequence
  Synthetic oligonucleotide; CTT chr11 5346324 5346345 5346341 5346346 +
gtgtcctcagctagtcgtggct

SEQ ID NO: 104576 - DNA, 22 bp, Artificial Sequence
  Synthetic oligonucleotide; TTG chr11 5346325 5346346 5346342 5346347 +
tgtcctcagctagtcgtggctc

SEQ ID NO: 104577 - DNA, 22 bp, Artificial Sequence
  Synthetic oligonucleotide; CTC chr11 5346332 5346353 5346349 5346354 +
agctagtcgtggctcttggttt

SEQ ID NO: 104578 - DNA, 22 bp, Artificial Sequence
  Synthetic oligonucleotide; CTA chr11 5346337 5346358 5346354 5346359 +
gtcgtggctcttggtttctgag

SEQ ID NO: 104579 - DNA, 22 bp, Artificial Sequence
  Synthetic oligonucleotide; CTC chr11 5346347 5346368 5346364 5346369 +
ttggtttctgagaagaaagaca

SEQ ID NO: 104580 - DNA, 22 bp, Artificial Sequence
  Synthetic oligonucleotide; CTT chr11 5346349 5346370 5346366 5346371 +
ggtttctgagaagaaagacaat

SEQ ID NO: 104581 - DNA, 22 bp, Artificial Sequence
  Synthetic oligonucleotide; TTG chr11 5346350 5346371 5346367 5346372 +
gtttctgagaagaaagacaatg

SEQ ID NO: 104582 - DNA, 22 bp, Artificial Sequence
  Synthetic oligonucleotide; TTT chr11 5346354 5346375 5346371 5346376 +
ctgagaagaaagacaatgagag

SEQ ID NO: 104583 - DNA, 22 bp, Artificial Sequence
  Synthetic oligonucleotide; TTC chr11 5346355 5346376 5346372 5346377 +
tgagaagaaagacaatgagaga

SEQ ID NO: 104584 - DNA, 22 bp, Artificial Sequence
  Synthetic oligonucleotide; CTG chr11 5346357 5346378 5346374 5346379 +
agaagaaagacaatgagagaag

SEQ ID NO: 104585 - DNA, 22 bp, Artificial Sequence
  Synthetic oligonucleotide; CTG chr11 5346391 5346412 5346408 5346413 +
aggaaaaaaaatatagggaagg

SEQ ID NO: 104586 - DNA, 22 bp, Artificial Sequence
  Synthetic oligonucleotide; CTG chr11 5346432 5346453 5346449 5346454 +
aggatagaagcaagaagattct

SEQ ID NO: 104587 - DNA, 22 bp, Artificial Sequence
  Synthetic oligonucleotide; TTC chr11 5346453 5346474 5346470 5346475 +
tataatggaacacctagaaaat

SEQ ID NO: 104588 - DNA, 22 bp, Artificial Sequence
  Synthetic oligonucleotide; CTA chr11 5346455 5346476 5346472 5346477 +
taatggaacacctagaaaatca

SEQ ID NO: 104589 - DNA, 22 bp, Artificial Sequence
  Synthetic oligonucleotide; CTA chr11 5346469 5346490 5346486 5346491 +
gaaaatcagataaacttctaac

SEQ ID NO: 104590 - DNA, 22 bp, Artificial Sequence
  Synthetic oligonucleotide; CTT chr11 5346486 5346507 5346503 5346508 +
ctaacatttacagccataattt

SEQ ID NO: 104591 - DNA, 22 bp, Artificial Sequence
  Synthetic oligonucleotide; TTC chr11 5346487 5346508 5346504 5346509 +
taacatttacagccataatttt

SEQ ID NO: 104592 - DNA, 22 bp, Artificial Sequence
  Synthetic oligonucleotide; CTA chr11 5346489 5346510 5346506 5346511 +
acatttacagccataatttttc

SEQ ID NO: 104593 - DNA, 22 bp, Artificial Sequence
  Synthetic oligonucleotide; TTT chr11 5346495 5346516 5346512 5346517 +
acagccataatttttctctgct

SEQ ID NO: 104594 - DNA, 22 bp, Artificial Sequence
  Synthetic oligonucleotide; TTA chr11 5346496 5346517 5346513 5346518 +
cagccataatttttctctgctt

SEQ ID NO: 104595 - DNA, 22 bp, Artificial Sequence
  Synthetic oligonucleotide; TTT chr11 5346508 5346529 5346525 5346530 +
ttctctgctttgtttaaaaagt

SEQ ID NO: 104596 - DNA, 22 bp, Artificial Sequence
  Synthetic oligonucleotide; TTT chr11 5346509 5346530 5346526 5346531 +
tctctgctttgtttaaaaagta

SEQ ID NO: 104597 - DNA, 22 bp, Artificial Sequence
  Synthetic oligonucleotide; TTT chr11 5346510 5346531 5346527 5346532 +
ctctgctttgtttaaaaagtaa

SEQ ID NO: 104598 - DNA, 22 bp, Artificial Sequence
  Synthetic oligonucleotide; TTC chr11 5346511 5346532 5346528 5346533 +
tctgctttgtttaaaaagtaaa

SEQ ID NO: 104599 - DNA, 22 bp, Artificial Sequence
  Synthetic oligonucleotide; CTC chr11 5346513 5346534 5346530 5346535 +
tgctttgtttaaaaagtaaaat

SEQ ID NO: 104600 - DNA, 22 bp, Artificial Sequence
  Synthetic oligonucleotide; CTG chr11 5346515 5346536 5346532 5346537 +
ctttgtttaaaaagtaaaatgt

SEQ ID NO: 104601 - DNA, 22 bp, Artificial Sequence
  Synthetic oligonucleotide; CTT chr11 5346518 5346539 5346535 5346540 +
tgtttaaaaagtaaaatgtagt

SEQ ID NO: 104602 - DNA, 22 bp, Artificial Sequence
  Synthetic oligonucleotide; TTT chr11 5346519 5346540 5346536 5346541 +
gtttaaaaagtaaaatgtagta

SEQ ID NO: 104603 - DNA, 22 bp, Artificial Sequence
  Synthetic oligonucleotide; TTG chr11 5346520 5346541 5346537 5346542 +
tttaaaaagtaaaatgtagtag

SEQ ID NO: 104604 - DNA, 22 bp, Artificial Sequence
  Synthetic oligonucleotide; TTT chr11 5346523 5346544 5346540 5346545 +
aaaaagtaaaatgtagtagaat

SEQ ID NO: 104605 - DNA, 22 bp, Artificial Sequence
  Synthetic oligonucleotide; TTA chr11 5346524 5346545 5346541 5346546 +
aaaagtaaaatgtagtagaata

SEQ ID NO: 104606 - DNA, 22 bp, Artificial Sequence
  Synthetic oligonucleotide; CTT chr11 5346557 5346578 5346574 5346579 +
cctgttcatcttttagaaagga

SEQ ID NO: 104607 - DNA, 22 bp, Artificial Sequence
  Synthetic oligonucleotide; TTC chr11 5346558 5346579 5346575 5346580 +
ctgttcatcttttagaaaggaa

SEQ ID NO: 104608 - DNA, 22 bp, Artificial Sequence
  Synthetic oligonucleotide; CTG chr11 5346561 5346582 5346578 5346583 +
ttcatcttttagaaaggaaaga

SEQ ID NO: 104609 - DNA, 22 bp, Artificial Sequence
  Synthetic oligonucleotide; TTC chr11 5346564 5346585 5346581 5346586 +
atcttttagaaaggaaagaaga

SEQ ID NO: 104610 - DNA, 22 bp, Artificial Sequence
  Synthetic oligonucleotide; CTT chr11 5346569 5346590 5346586 5346591 +
ttagaaaggaaagaagacatat

SEQ ID NO: 104611 - DNA, 22 bp, Artificial Sequence
  Synthetic oligonucleotide; TTT chr11 5346570 5346591 5346587 5346592 +
tagaaaggaaagaagacatatg

SEQ ID NO: 104612 - DNA, 22 bp, Artificial Sequence
  Synthetic oligonucleotide; TTT chr11 5346571 5346592 5346588 5346593 +
agaaaggaaagaagacatatga

SEQ ID NO: 104613 - DNA, 22 bp, Artificial Sequence
  Synthetic oligonucleotide; TTA chr11 5346572 5346593 5346589 5346594 +
gaaaggaaagaagacatatgag

SEQ ID NO: 104614 - DNA, 22 bp, Artificial Sequence
  Synthetic oligonucleotide; TTC chr11 5346610 5346631 5346627 5346632 +
acatcactgagtacagaaggtc

SEQ ID NO: 104615 - DNA, 22 bp, Artificial Sequence
  Synthetic oligonucleotide; CTG chr11 5346619 5346640 5346636 5346641 +
agtacagaaggtcttaggtagt

SEQ ID NO: 104616 - DNA, 22 bp, Artificial Sequence
  Synthetic oligonucleotide; CTT chr11 5346634 5346655 5346651 5346656 +
aggtagttggttggtagcactt

SEQ ID NO: 104617 - DNA, 22 bp, Artificial Sequence
  Synthetic oligonucleotide; TTA chr11 5346635 5346656 5346652 5346657 +
ggtagttggttggtagcacttg

SEQ ID NO: 104618 - DNA, 22 bp, Artificial Sequence
  Synthetic oligonucleotide; TTG chr11 5346643 5346664 5346660 5346665 +
gttggtagcacttggaattgct

SEQ ID NO: 104619 - DNA, 22 bp, Artificial Sequence
  Synthetic oligonucleotide; TTG chr11 5346647 5346668 5346664 5346669 +
gtagcacttggaattgcttttg

SEQ ID NO: 104620 - DNA, 22 bp, Artificial Sequence
  Synthetic oligonucleotide; CTT chr11 5346656 5346677 5346673 5346678 +
ggaattgcttttgaagttctat

SEQ ID NO: 104621 - DNA, 22 bp, Artificial Sequence
  Synthetic oligonucleotide; TTG chr11 5346657 5346678 5346674 5346679 +
gaattgcttttgaagttctatc

SEQ ID NO: 104622 - DNA, 22 bp, Artificial Sequence
  Synthetic oligonucleotide; TTG chr11 5346663 5346684 5346680 5346685 +
cttttgaagttctatcaacttc

SEQ ID NO: 104623 - DNA, 22 bp, Artificial Sequence
  Synthetic oligonucleotide; CTT chr11 5346666 5346687 5346683 5346688 +
ttgaagttctatcaacttcaga

SEQ ID NO: 104624 - DNA, 22 bp, Artificial Sequence
  Synthetic oligonucleotide; TTT chr11 5346667 5346688 5346684 5346689 +
tgaagttctatcaacttcagac

SEQ ID NO: 104625 - DNA, 22 bp, Artificial Sequence
  Synthetic oligonucleotide; TTT chr11 5346668 5346689 5346685 5346690 +
gaagttctatcaacttcagact

SEQ ID NO: 104626 - DNA, 22 bp, Artificial Sequence
  Synthetic oligonucleotide; TTG chr11 5346669 5346690 5346686 5346691 +
aagttctatcaacttcagactg

SEQ ID NO: 104627 - DNA, 22 bp, Artificial Sequence
  Synthetic oligonucleotide; TTC chr11 5346675 5346696 5346692 5346697 +
tatcaacttcagactgaaatct

SEQ ID NO: 104628 - DNA, 22 bp, Artificial Sequence
  Synthetic oligonucleotide; CTA chr11 5346677 5346698 5346694 5346699 +
tcaacttcagactgaaatctgt

SEQ ID NO: 104629 - DNA, 22 bp, Artificial Sequence
  Synthetic oligonucleotide; CTT chr11 5346684 5346705 5346701 5346706 +
cagactgaaatctgtgcacaca

SEQ ID NO: 104630 - DNA, 22 bp, Artificial Sequence
  Synthetic oligonucleotide; TTC chr11 5346685 5346706 5346702 5346707 +
agactgaaatctgtgcacacat

SEQ ID NO: 104631 - DNA, 22 bp, Artificial Sequence
  Synthetic oligonucleotide; CTG chr11 5346691 5346712 5346708 5346713 +
aaatctgtgcacacatccaaag

SEQ ID NO: 104632 - DNA, 22 bp, Artificial Sequence
  Synthetic oligonucleotide; CTG chr11 5346698 5346719 5346715 5346720 +
tgcacacatccaaagctgtgga

SEQ ID NO: 104633 - DNA, 22 bp, Artificial Sequence
  Synthetic oligonucleotide; CTG chr11 5346716 5346737 5346733 5346738 +
tggactattgagatccttcact

SEQ ID NO: 104634 - DNA, 22 bp, Artificial Sequence
  Synthetic oligonucleotide; CTA chr11 5346723 5346744 5346740 5346745 +
ttgagatccttcacttcttctc

SEQ ID NO: 104635 - DNA, 22 bp, Artificial Sequence
  Synthetic oligonucleotide; TTG chr11 5346726 5346747 5346743 5346748 +
agatccttcacttcttctccgt

SEQ ID NO: 104636 - DNA, 22 bp, Artificial Sequence
  Synthetic oligonucleotide; CTT chr11 5346734 5346755 5346751 5346756 +
cacttcttctccgtatctttct

SEQ ID NO: 104637 - DNA, 22 bp, Artificial Sequence
  Synthetic oligonucleotide; TTC chr11 5346735 5346756 5346752 5346757 +
acttcttctccgtatctttctc

SEQ ID NO: 104638 - DNA, 22 bp, Artificial Sequence
  Synthetic oligonucleotide; CTT chr11 5346739 5346760 5346756 5346761 +
cttctccgtatctttctctgga

SEQ ID NO: 104639 - DNA, 22 bp, Artificial Sequence
  Synthetic oligonucleotide; TTC chr11 5346740 5346761 5346757 5346762 +
ttctccgtatctttctctggag

SEQ ID NO: 104640 - DNA, 22 bp, Artificial Sequence
  Synthetic oligonucleotide; CTT chr11 5346742 5346763 5346759 5346764 +
ctccgtatctttctctggagag

SEQ ID NO: 104641 - DNA, 22 bp, Artificial Sequence
  Synthetic oligonucleotide; TTC chr11 5346743 5346764 5346760 5346765 +
tccgtatctttctctggagagc

SEQ ID NO: 104642 - DNA, 22 bp, Artificial Sequence
  Synthetic oligonucleotide; CTC chr11 5346745 5346766 5346762 5346767 +
cgtatctttctctggagagctt

SEQ ID NO: 104643 - DNA, 22 bp, Artificial Sequence
  Synthetic oligonucleotide; CTT chr11 5346753 5346774 5346770 5346775 +
tctctggagagcttatagagga

SEQ ID NO: 104644 - DNA, 22 bp, Artificial Sequence
  Synthetic oligonucleotide; TTT chr11 5346754 5346775 5346771 5346776 +
ctctggagagcttatagaggag

SEQ ID NO: 104645 - DNA, 22 bp, Artificial Sequence
  Synthetic oligonucleotide; TTC chr11 5346755 5346776 5346772 5346777 +
tctggagagcttatagaggagt

SEQ ID NO: 104646 - DNA, 22 bp, Artificial Sequence
  Synthetic oligonucleotide; CTC chr11 5346757 5346778 5346774 5346779 +
tggagagcttatagaggagtct

SEQ ID NO: 104647 - DNA, 22 bp, Artificial Sequence
  Synthetic oligonucleotide; CTG chr11 5346759 5346780 5346776 5346781 +
gagagcttatagaggagtctcc

SEQ ID NO: 104648 - DNA, 22 bp, Artificial Sequence
  Synthetic oligonucleotide; CTT chr11 5346767 5346788 5346784 5346789 +
atagaggagtctcctagtacac

SEQ ID NO: 104649 - DNA, 22 bp, Artificial Sequence
  Synthetic oligonucleotide; TTA chr11 5346768 5346789 5346785 5346790 +
tagaggagtctcctagtacact

SEQ ID NO: 104650 - DNA, 22 bp, Artificial Sequence
  Synthetic oligonucleotide; CTC chr11 5346780 5346801 5346797 5346802 +
ctagtacactctttatatatct

SEQ ID NO: 104651 - DNA, 22 bp, Artificial Sequence
  Synthetic oligonucleotide; CTA chr11 5346783 5346804 5346800 5346805 +
gtacactctttatatatctagg

SEQ ID NO: 104652 - DNA, 22 bp, Artificial Sequence
  Synthetic oligonucleotide; CTC chr11 5346791 5346812 5346808 5346813 +
tttatatatctaggagtatttc

SEQ ID NO: 104653 - DNA, 22 bp, Artificial Sequence
  Synthetic oligonucleotide; CTT chr11 5346793 5346814 5346810 5346815 +
tatatatctaggagtatttcac

SEQ ID NO: 104654 - DNA, 22 bp, Artificial Sequence
  Synthetic oligonucleotide; TTT chr11 5346794 5346815 5346811 5346816 +
atatatctaggagtatttcacc

SEQ ID NO: 104655 - DNA, 22 bp, Artificial Sequence
  Synthetic oligonucleotide; TTA chr11 5346795 5346816 5346812 5346817 +
tatatctaggagtatttcacca

SEQ ID NO: 104656 - DNA, 22 bp, Artificial Sequence
  Synthetic oligonucleotide; CTA chr11 5346803 5346824 5346820 5346825 +
ggagtatttcaccatactccca

SEQ ID NO: 104657 - DNA, 22 bp, Artificial Sequence
  Synthetic oligonucleotide; TTT chr11 5346812 5346833 5346829 5346834 +
caccatactcccaggtaccata

SEQ ID NO: 104658 - DNA, 22 bp, Artificial Sequence
  Synthetic oligonucleotide; TTC chr11 5346813 5346834 5346830 5346835 +
accatactcccaggtaccataa

SEQ ID NO: 104659 - DNA, 22 bp, Artificial Sequence
  Synthetic oligonucleotide; CTC chr11 5346822 5346843 5346839 5346844 +
ccaggtaccataacttgtttga

SEQ ID NO: 104660 - DNA, 22 bp, Artificial Sequence
  Synthetic oligonucleotide; CTT chr11 5346838 5346859 5346855 5346860 +
gtttgatggtgaggaagagcag

SEQ ID NO: 104661 - DNA, 22 bp, Artificial Sequence
  Synthetic oligonucleotide; TTG chr11 5346839 5346860 5346856 5346861 +
tttgatggtgaggaagagcagg

SEQ ID NO: 104662 - DNA, 22 bp, Artificial Sequence
  Synthetic oligonucleotide; TTT chr11 5346842 5346863 5346859 5346864 +
gatggtgaggaagagcagggtt

SEQ ID NO: 104663 - DNA, 22 bp, Artificial Sequence
  Synthetic oligonucleotide; TTG chr11 5346843 5346864 5346860 5346865 +
atggtgaggaagagcagggttc

SEQ ID NO: 104664 - DNA, 22 bp, Artificial Sequence
  Synthetic oligonucleotide; TTC chr11 5346865 5346886 5346882 5346887 +
ttgtgtcttacctaaagactta

SEQ ID NO: 104665 - DNA, 22 bp, Artificial Sequence
  Synthetic oligonucleotide; CTT chr11 5346867 5346888 5346884 5346889 +
gtgtcttacctaaagacttaga

SEQ ID NO: 104666 - DNA, 22 bp, Artificial Sequence
  Synthetic oligonucleotide; TTG chr11 5346868 5346889 5346885 5346890 +
tgtcttacctaaagacttagat

SEQ ID NO: 104667 - DNA, 22 bp, Artificial Sequence
  Synthetic oligonucleotide; CTT chr11 5346874 5346895 5346891 5346896 +
acctaaagacttagatcatgtt

SEQ ID NO: 104668 - DNA, 22 bp, Artificial Sequence
  Synthetic oligonucleotide; TTA chr11 5346875 5346896 5346892 5346897 +
cctaaagacttagatcatgttg

SEQ ID NO: 104669 - DNA, 22 bp, Artificial Sequence
  Synthetic oligonucleotide; CTA chr11 5346879 5346900 5346896 5346901 +
aagacttagatcatgttgttcc

SEQ ID NO: 104670 - DNA, 22 bp, Artificial Sequence
  Synthetic oligonucleotide; CTT chr11 5346886 5346907 5346903 5346908 +
agatcatgttgttccttctcaa

SEQ ID NO: 104671 - DNA, 22 bp, Artificial Sequence
  Synthetic oligonucleotide; TTA chr11 5346887 5346908 5346904 5346909 +
gatcatgttgttccttctcaac

SEQ ID NO: 104672 - DNA, 22 bp, Artificial Sequence
  Synthetic oligonucleotide; TTG chr11 5346897 5346918 5346914 5346919 +
ttccttctcaacatctgtgaag

SEQ ID NO: 104673 - DNA, 22 bp, Artificial Sequence
  Synthetic oligonucleotide; TTC chr11 5346900 5346921 5346917 5346922 +
cttctcaacatctgtgaagaga

SEQ ID NO: 104674 - DNA, 22 bp, Artificial Sequence
  Synthetic oligonucleotide; CTT chr11 5346903 5346924 5346920 5346925 +
ctcaacatctgtgaagagaagc

SEQ ID NO: 104675 - DNA, 22 bp, Artificial Sequence
  Synthetic oligonucleotide; TTC chr11 5346904 5346925 5346921 5346926 +
tcaacatctgtgaagagaagca

SEQ ID NO: 104676 - DNA, 22 bp, Artificial Sequence
  Synthetic oligonucleotide; CTC chr11 5346906 5346927 5346923 5346928 +
aacatctgtgaagagaagcagt

SEQ ID NO: 104677 - DNA, 22 bp, Artificial Sequence
  Synthetic oligonucleotide; CTG chr11 5346914 5346935 5346931 5346936 +
tgaagagaagcagtcactgtgg

SEQ ID NO: 104678 - DNA, 22 bp, Artificial Sequence
  Synthetic oligonucleotide; CTG chr11 5346933 5346954 5346950 5346955 +
tggttattaataaagatagcac

SEQ ID NO: 104679 - DNA, 22 bp, Artificial Sequence
  Synthetic oligonucleotide; TTA chr11 5346939 5346960 5346956 5346961 +
ttaataaagatagcaccttccc

SEQ ID NO: 104680 - DNA, 22 bp, Artificial Sequence
  Synthetic oligonucleotide; TTA chr11 5346942 5346963 5346959 5346964 +
ataaagatagcaccttcccaga

SEQ ID NO: 104681 - DNA, 22 bp, Artificial Sequence
  Synthetic oligonucleotide; CTT chr11 5346958 5346979 5346975 5346980 +
cccagatgtctcccttttatag

SEQ ID NO: 104682 - DNA, 22 bp, Artificial Sequence
  Synthetic oligonucleotide; TTC chr11 5346959 5346980 5346976 5346981 +
ccagatgtctcccttttatagc

SEQ ID NO: 104683 - DNA, 22 bp, Artificial Sequence
  Synthetic oligonucleotide; CTC chr11 5346970 5346991 5346987 5346992 +
ccttttatagccaacttggatc

SEQ ID NO: 104684 - DNA, 22 bp, Artificial Sequence
  Synthetic oligonucleotide; CTT chr11 5346974 5346995 5346991 5346996 +
ttatagccaacttggatcttaa

SEQ ID NO: 104685 - DNA, 22 bp, Artificial Sequence
  Synthetic oligonucleotide; TTT chr11 5346975 5346996 5346992 5346997 +
tatagccaacttggatcttaag

SEQ ID NO: 104686 - DNA, 22 bp, Artificial Sequence
  Synthetic oligonucleotide; TTT chr11 5346976 5346997 5346993 5346998 +
atagccaacttggatcttaaga

SEQ ID NO: 104687 - DNA, 22 bp, Artificial Sequence
  Synthetic oligonucleotide; TTA chr11 5346977 5346998 5346994 5346999 +
tagccaacttggatcttaagaa

SEQ ID NO: 104688 - DNA, 22 bp, Artificial Sequence
  Synthetic oligonucleotide; CTT chr11 5346987 5347008 5347004 5347009 +
ggatcttaagaaatatttactc

SEQ ID NO: 104689 - DNA, 22 bp, Artificial Sequence
  Synthetic oligonucleotide; TTG chr11 5346988 5347009 5347005 5347010 +
gatcttaagaaatatttactct

SEQ ID NO: 104690 - DNA, 22 bp, Artificial Sequence
  Synthetic oligonucleotide; CTT chr11 5346994 5347015 5347011 5347016 +
aagaaatatttactctgtatta

SEQ ID NO: 104691 - DNA, 22 bp, Artificial Sequence
  Synthetic oligonucleotide; TTA chr11 5346995 5347016 5347012 5347017 +
agaaatatttactctgtattaa

SEQ ID NO: 104692 - DNA, 22 bp, Artificial Sequence
  Synthetic oligonucleotide; TTT chr11 5347005 5347026 5347022 5347027 +
actctgtattaactcctcctta

SEQ ID NO: 104693 - DNA, 22 bp, Artificial Sequence
  Synthetic oligonucleotide; TTA chr11 5347006 5347027 5347023 5347028 +
ctctgtattaactcctccttag

SEQ ID NO: 104694 - DNA, 22 bp, Artificial Sequence
  Synthetic oligonucleotide; CTC chr11 5347009 5347030 5347026 5347031 +
tgtattaactcctccttagagg

SEQ ID NO: 104695 - DNA, 22 bp, Artificial Sequence
  Synthetic oligonucleotide; CTG chr11 5347011 5347032 5347028 5347033 +
tattaactcctccttagaggga

SEQ ID NO: 104696 - DNA, 22 bp, Artificial Sequence
  Synthetic oligonucleotide; TTA chr11 5347016 5347037 5347033 5347038 +
actcctccttagagggagctgg

SEQ ID NO: 104697 - DNA, 22 bp, Artificial Sequence
  Synthetic oligonucleotide; CTC chr11 5347020 5347041 5347037 5347042 +
ctccttagagggagctggaaca

SEQ ID NO: 104698 - DNA, 22 bp, Artificial Sequence
  Synthetic oligonucleotide; CTC chr11 5347023 5347044 5347040 5347045 +
cttagagggagctggaacactt

SEQ ID NO: 104699 - DNA, 22 bp, Artificial Sequence
  Synthetic oligonucleotide; CTT chr11 5347026 5347047 5347043 5347048 +
agagggagctggaacacttaat

SEQ ID NO: 104700 - DNA, 22 bp, Artificial Sequence
  Synthetic oligonucleotide; TTA chr11 5347027 5347048 5347044 5347049 +
gagggagctggaacacttaatt

SEQ ID NO: 104701 - DNA, 22 bp, Artificial Sequence
  Synthetic oligonucleotide; CTG chr11 5347037 5347058 5347054 5347059 +
gaacacttaattagtcccccca

SEQ ID NO: 104702 - DNA, 22 bp, Artificial Sequence
  Synthetic oligonucleotide; CTT chr11 5347045 5347066 5347062 5347067 +
aattagtccccccaagctttta

SEQ ID NO: 104703 - DNA, 22 bp, Artificial Sequence
  Synthetic oligonucleotide; TTA chr11 5347046 5347067 5347063 5347068 +
attagtccccccaagcttttaa

SEQ ID NO: 104704 - DNA, 22 bp, Artificial Sequence
  Synthetic oligonucleotide; TTA chr11 5347050 5347071 5347067 5347072 +
gtccccccaagcttttaaataa

SEQ ID NO: 104705 - DNA, 22 bp, Artificial Sequence
  Synthetic oligonucleotide; CTT chr11 5347064 5347085 5347081 5347086 +
ttaaataatctttcttttttca

SEQ ID NO: 104706 - DNA, 22 bp, Artificial Sequence
  Synthetic oligonucleotide; TTT chr11 5347065 5347086 5347082 5347087 +
taaataatctttcttttttcaa

SEQ ID NO: 104707 - DNA, 22 bp, Artificial Sequence
  Synthetic oligonucleotide; TTT chr11 5347066 5347087 5347083 5347088 +
aaataatctttcttttttcaaa

SEQ ID NO: 104708 - DNA, 22 bp, Artificial Sequence
  Synthetic oligonucleotide; TTA chr11 5347067 5347088 5347084 5347089 +
aataatctttcttttttcaaat

SEQ ID NO: 104709 - DNA, 22 bp, Artificial Sequence
  Synthetic oligonucleotide; CTT chr11 5347076 5347097 5347093 5347098 +
tcttttttcaaataagttactg

SEQ ID NO: 104710 - DNA, 22 bp, Artificial Sequence
  Synthetic oligonucleotide; TTT chr11 5347077 5347098 5347094 5347099 +
cttttttcaaataagttactgg

SEQ ID NO: 104711 - DNA, 22 bp, Artificial Sequence
  Synthetic oligonucleotide; TTC chr11 5347078 5347099 5347095 5347100 +
ttttttcaaataagttactggc

SEQ ID NO: 104712 - DNA, 22 bp, Artificial Sequence
  Synthetic oligonucleotide; CTT chr11 5347080 5347101 5347097 5347102 +
ttttcaaataagttactggctg

SEQ ID NO: 104713 - DNA, 22 bp, Artificial Sequence
  Synthetic oligonucleotide; TTT chr11 5347081 5347102 5347098 5347103 +
tttcaaataagttactggctga

SEQ ID NO: 104714 - DNA, 22 bp, Artificial Sequence
  Synthetic oligonucleotide; TTT chr11 5347082 5347103 5347099 5347104 +
ttcaaataagttactggctgaa

SEQ ID NO: 104715 - DNA, 22 bp, Artificial Sequence
  Synthetic oligonucleotide; TTT chr11 5347083 5347104 5347100 5347105 +
tcaaataagttactggctgaat

SEQ ID NO: 104716 - DNA, 22 bp, Artificial Sequence
  Synthetic oligonucleotide; TTT chr11 5347084 5347105 5347101 5347106 +
caaataagttactggctgaatc

SEQ ID NO: 104717 - DNA, 22 bp, Artificial Sequence
  Synthetic oligonucleotide; TTC chr11 5347085 5347106 5347102 5347107 +
aaataagttactggctgaatca

SEQ ID NO: 104718 - DNA, 22 bp, Artificial Sequence
  Synthetic oligonucleotide; TTA chr11 5347095 5347116 5347112 5347117 +
ctggctgaatcaagccactggt

SEQ ID NO: 104719 - DNA, 22 bp, Artificial Sequence
  Synthetic oligonucleotide; CTG chr11 5347098 5347119 5347115 5347120 +
gctgaatcaagccactggtagg

SEQ ID NO: 104720 - DNA, 22 bp, Artificial Sequence
  Synthetic oligonucleotide; CTG chr11 5347102 5347123 5347119 5347124 +
aatcaagccactggtaggacct

SEQ ID NO: 104721 - DNA, 22 bp, Artificial Sequence
  Synthetic oligonucleotide; CTG chr11 5347115 5347136 5347132 5347137 +
gtaggacctttatgtgtgggga

SEQ ID NO: 104722 - DNA, 22 bp, Artificial Sequence
  Synthetic oligonucleotide; CTT chr11 5347125 5347146 5347142 5347147 +
tatgtgtggggaatcagacagc

SEQ ID NO: 104723 - DNA, 22 bp, Artificial Sequence
  Synthetic oligonucleotide; TTT chr11 5347126 5347147 5347143 5347148 +
atgtgtggggaatcagacagcc

SEQ ID NO: 104724 - DNA, 22 bp, Artificial Sequence
  Synthetic oligonucleotide; TTA chr11 5347127 5347148 5347144 5347149 +
tgtgtggggaatcagacagcct

SEQ ID NO: 104725 - DNA, 22 bp, Artificial Sequence
  Synthetic oligonucleotide; CTG chr11 5347150 5347171 5347167 5347172 +
tcttcatagccccagcagactc

SEQ ID NO: 104726 - DNA, 22 bp, Artificial Sequence
  Synthetic oligonucleotide; CTT chr11 5347154 5347175 5347171 5347176 +
catagccccagcagactctggt

SEQ ID NO: 104727 - DNA, 22 bp, Artificial Sequence
  Synthetic oligonucleotide; TTC chr11 5347155 5347176 5347172 5347177 +
atagccccagcagactctggta

SEQ ID NO: 104728 - DNA, 22 bp, Artificial Sequence
  Synthetic oligonucleotide; CTC chr11 5347172 5347193 5347189 5347194 +
tggtatcacctctgggaggtaa

SEQ ID NO: 104729 - DNA, 22 bp, Artificial Sequence
  Synthetic oligonucleotide; CTG chr11 5347174 5347195 5347191 5347196 +
gtatcacctctgggaggtaatt

SEQ ID NO: 104730 - DNA, 22 bp, Artificial Sequence
  Synthetic oligonucleotide; CTC chr11 5347184 5347205 5347201 5347206 +
tgggaggtaatttattccctac

SEQ ID NO: 104731 - DNA, 22 bp, Artificial Sequence
  Synthetic oligonucleotide; CTG chr11 5347186 5347207 5347203 5347208 +
ggaggtaatttattccctacat

SEQ ID NO: 104732 - DNA, 22 bp, Artificial Sequence
  Synthetic oligonucleotide; TTT chr11 5347197 5347218 5347214 5347219 +
attccctacatttacttcaaca

SEQ ID NO: 104733 - DNA, 22 bp, Artificial Sequence
  Synthetic oligonucleotide; TTA chr11 5347198 5347219 5347215 5347220 +
ttccctacatttacttcaacag

SEQ ID NO: 104734 - DNA, 22 bp, Artificial Sequence
  Synthetic oligonucleotide; TTC chr11 5347201 5347222 5347218 5347223 +
cctacatttacttcaacagtca

SEQ ID NO: 104735 - DNA, 22 bp, Artificial Sequence
  Synthetic oligonucleotide; CTA chr11 5347205 5347226 5347222 5347227 +
catttacttcaacagtcaaatc

SEQ ID NO: 104736 - DNA, 22 bp, Artificial Sequence
  Synthetic oligonucleotide; TTT chr11 5347210 5347231 5347227 5347232 +
acttcaacagtcaaatctttcc

SEQ ID NO: 104737 - DNA, 22 bp, Artificial Sequence
  Synthetic oligonucleotide; TTA chr11 5347211 5347232 5347228 5347233 +
cttcaacagtcaaatctttccc

SEQ ID NO: 104738 - DNA, 22 bp, Artificial Sequence
  Synthetic oligonucleotide; CTT chr11 5347214 5347235 5347231 5347236 +
caacagtcaaatctttcccagt

SEQ ID NO: 104739 - DNA, 22 bp, Artificial Sequence
  Synthetic oligonucleotide; TTC chr11 5347215 5347236 5347232 5347237 +
aacagtcaaatctttcccagtt

SEQ ID NO: 104740 - DNA, 22 bp, Artificial Sequence
  Synthetic oligonucleotide; CTT chr11 5347229 5347250 5347246 5347251 +
tcccagtttatctcaagagaaa

SEQ ID NO: 104741 - DNA, 22 bp, Artificial Sequence
  Synthetic oligonucleotide; TTT chr11 5347230 5347251 5347247 5347252 +
cccagtttatctcaagagaaag

SEQ ID NO: 104742 - DNA, 22 bp, Artificial Sequence
  Synthetic oligonucleotide; TTC chr11 5347231 5347252 5347248 5347253 +
ccagtttatctcaagagaaagc

SEQ ID NO: 104743 - DNA, 22 bp, Artificial Sequence
  Synthetic oligonucleotide; TTT chr11 5347238 5347259 5347255 5347260 +
atctcaagagaaagcctatata

SEQ ID NO: 104744 - DNA, 22 bp, Artificial Sequence
  Synthetic oligonucleotide; TTA chr11 5347239 5347260 5347256 5347261 +
tctcaagagaaagcctatatat

SEQ ID NO: 104745 - DNA, 22 bp, Artificial Sequence
  Synthetic oligonucleotide; CTC chr11 5347243 5347264 5347260 5347265 +
aagagaaagcctatatatcttc

SEQ ID NO: 104746 - DNA, 22 bp, Artificial Sequence
  Synthetic oligonucleotide; CTA chr11 5347256 5347277 5347273 5347278 +
tatatcttcttggcctatgtaa

SEQ ID NO: 104747 - DNA, 22 bp, Artificial Sequence
  Synthetic oligonucleotide; CTT chr11 5347264 5347285 5347281 5347286 +
cttggcctatgtaacctgaatt

SEQ ID NO: 104748 - DNA, 22 bp, Artificial Sequence
  Synthetic oligonucleotide; TTC chr11 5347265 5347286 5347282 5347287 +
ttggcctatgtaacctgaattt

SEQ ID NO: 104749 - DNA, 22 bp, Artificial Sequence
  Synthetic oligonucleotide; CTT chr11 5347267 5347288 5347284 5347289 +
ggcctatgtaacctgaatttct

SEQ ID NO: 104750 - DNA, 22 bp, Artificial Sequence
  Synthetic oligonucleotide; TTG chr11 5347268 5347289 5347285 5347290 +
gcctatgtaacctgaatttcta

SEQ ID NO: 104751 - DNA, 22 bp, Artificial Sequence
  Synthetic oligonucleotide; CTA chr11 5347273 5347294 5347290 5347295 +
tgtaacctgaatttctactata

SEQ ID NO: 104752 - DNA, 22 bp, Artificial Sequence
  Synthetic oligonucleotide; CTG chr11 5347282 5347303 5347299 5347304 +
aatttctactatatttcctgct

SEQ ID NO: 104753 - DNA, 22 bp, Artificial Sequence
  Synthetic oligonucleotide; TTT chr11 5347287 5347308 5347304 5347309 +
ctactatatttcctgcttggtt

SEQ ID NO: 104754 - DNA, 22 bp, Artificial Sequence
  Synthetic oligonucleotide; TTC chr11 5347288 5347309 5347305 5347310 +
tactatatttcctgcttggttt

SEQ ID NO: 104755 - DNA, 22 bp, Artificial Sequence
  Synthetic oligonucleotide; CTA chr11 5347290 5347311 5347307 5347312 +
ctatatttcctgcttggtttag

SEQ ID NO: 104756 - DNA, 22 bp, Artificial Sequence
  Synthetic oligonucleotide; CTA chr11 5347293 5347314 5347310 5347315 +
tatttcctgcttggtttagatc

SEQ ID NO: 104757 - DNA, 22 bp, Artificial Sequence
  Synthetic oligonucleotide; TTT chr11 5347298 5347319 5347315 5347320 +
cctgcttggtttagatcagaga

SEQ ID NO: 104758 - DNA, 22 bp, Artificial Sequence
  Synthetic oligonucleotide; TTC chr11 5347299 5347320 5347316 5347321 +
ctgcttggtttagatcagagaa

SEQ ID NO: 104759 - DNA, 22 bp, Artificial Sequence
  Synthetic oligonucleotide; CTG chr11 5347302 5347323 5347319 5347324 +
cttggtttagatcagagaaagc

SEQ ID NO: 104760 - DNA, 22 bp, Artificial Sequence
  Synthetic oligonucleotide; CTT chr11 5347305 5347326 5347322 5347327 +
ggtttagatcagagaaagcttg

SEQ ID NO: 104761 - DNA, 22 bp, Artificial Sequence
  Synthetic oligonucleotide; TTG chr11 5347306 5347327 5347323 5347328 +
gtttagatcagagaaagcttga

SEQ ID NO: 104762 - DNA, 22 bp, Artificial Sequence
  Synthetic oligonucleotide; TTT chr11 5347310 5347331 5347327 5347332 +
agatcagagaaagcttgaaagc

SEQ ID NO: 104763 - DNA, 22 bp, Artificial Sequence
  Synthetic oligonucleotide; TTA chr11 5347311 5347332 5347328 5347333 +
gatcagagaaagcttgaaagca

SEQ ID NO: 104764 - DNA, 22 bp, Artificial Sequence
  Synthetic oligonucleotide; CTT chr11 5347326 5347347 5347343 5347348 +
gaaagcagagagctagatagac

SEQ ID NO: 104765 - DNA, 22 bp, Artificial Sequence
  Synthetic oligonucleotide; TTG chr11 5347327 5347348 5347344 5347349 +
aaagcagagagctagatagact

SEQ ID NO: 104766 - DNA, 22 bp, Artificial Sequence
  Synthetic oligonucleotide; CTA chr11 5347341 5347362 5347358 5347363 +
gatagactagagtcaatataat

SEQ ID NO: 104767 - DNA, 22 bp, Artificial Sequence
  Synthetic oligonucleotide; CTA chr11 5347350 5347371 5347367 5347372 +
gagtcaatataataaaattcag

SEQ ID NO: 104768 - DNA, 22 bp, Artificial Sequence
  Synthetic oligonucleotide; TTC chr11 5347370 5347391 5347387 5347392 +
aggcagccttctctagtaccca

SEQ ID NO: 104769 - DNA, 22 bp, Artificial Sequence
  Synthetic oligonucleotide; CTT chr11 5347380 5347401 5347397 5347402 +
ctctagtacccaacgtgaacgc

SEQ ID NO: 104770 - DNA, 22 bp, Artificial Sequence
  Synthetic oligonucleotide; TTC chr11 5347381 5347402 5347398 5347403 +
tctagtacccaacgtgaacgca

SEQ ID NO: 104771 - DNA, 22 bp, Artificial Sequence
  Synthetic oligonucleotide; CTC chr11 5347383 5347404 5347400 5347405 +
tagtacccaacgtgaacgcaca

SEQ ID NO: 104772 - DNA, 22 bp, Artificial Sequence
  Synthetic oligonucleotide; CTA chr11 5347385 5347406 5347402 5347407 +
gtacccaacgtgaacgcacatt

SEQ ID NO: 104773 - DNA, 22 bp, Artificial Sequence
  Synthetic oligonucleotide; TTC chr11 5347408 5347429 5347425 5347430 +
tgcagttatcactaactattcc

SEQ ID NO: 104774 - DNA, 22 bp, Artificial Sequence
  Synthetic oligonucleotide; CTG chr11 5347410 5347431 5347427 5347432 +
cagttatcactaactattccct

SEQ ID NO: 104775 - DNA, 22 bp, Artificial Sequence
  Synthetic oligonucleotide; TTA chr11 5347416 5347437 5347433 5347438 +
tcactaactattcccttcttga

SEQ ID NO: 104776 - DNA, 22 bp, Artificial Sequence
  Synthetic oligonucleotide; CTA chr11 5347422 5347443 5347439 5347444 +
actattcccttcttgagtttag

SEQ ID NO: 104777 - DNA, 22 bp, Artificial Sequence
  Synthetic oligonucleotide; CTA chr11 5347426 5347447 5347443 5347448 +
ttcccttcttgagtttagccta

SEQ ID NO: 104778 - DNA, 22 bp, Artificial Sequence
  Synthetic oligonucleotide; TTC chr11 5347429 5347450 5347446 5347451 +
ccttcttgagtttagcctacca

SEQ ID NO: 104779 - DNA, 22 bp, Artificial Sequence
  Synthetic oligonucleotide; CTT chr11 5347433 5347454 5347450 5347455 +
cttgagtttagcctaccagaag

SEQ ID NO: 104780 - DNA, 22 bp, Artificial Sequence
  Synthetic oligonucleotide; TTC chr11 5347434 5347455 5347451 5347456 +
ttgagtttagcctaccagaagt

SEQ ID NO: 104781 - DNA, 22 bp, Artificial Sequence
  Synthetic oligonucleotide; CTT chr11 5347436 5347457 5347453 5347458 +
gagtttagcctaccagaagttt

SEQ ID NO: 104782 - DNA, 22 bp, Artificial Sequence
  Synthetic oligonucleotide; TTG chr11 5347437 5347458 5347454 5347459 +
agtttagcctaccagaagtttt

SEQ ID NO: 104783 - DNA, 22 bp, Artificial Sequence
  Synthetic oligonucleotide; TTT chr11 5347442 5347463 5347459 5347464 +
agcctaccagaagttttctctt

SEQ ID NO: 104784 - DNA, 22 bp, Artificial Sequence
  Synthetic oligonucleotide; TTA chr11 5347443 5347464 5347460 5347465 +
gcctaccagaagttttctcttt

SEQ ID NO: 104785 - DNA, 22 bp, Artificial Sequence
  Synthetic oligonucleotide; CTA chr11 5347448 5347469 5347465 5347470 +
ccagaagttttctcttttccag

SEQ ID NO: 104786 - DNA, 22 bp, Artificial Sequence
  Synthetic oligonucleotide; TTT chr11 5347458 5347479 5347475 5347480 +
tctcttttccaggggatgcagc

SEQ ID NO: 104787 - DNA, 22 bp, Artificial Sequence
  Synthetic oligonucleotide; TTT chr11 5347459 5347480 5347476 5347481 +
ctcttttccaggggatgcagca

SEQ ID NO: 104788 - DNA, 22 bp, Artificial Sequence
  Synthetic oligonucleotide; TTC chr11 5347460 5347481 5347477 5347482 +
tcttttccaggggatgcagcag

SEQ ID NO: 104789 - DNA, 22 bp, Artificial Sequence
  Synthetic oligonucleotide; CTC chr11 5347462 5347483 5347479 5347484 +
ttttccaggggatgcagcaggc

SEQ ID NO: 104790 - DNA, 22 bp, Artificial Sequence
  Synthetic oligonucleotide; CTT chr11 5347464 5347485 5347481 5347486 +
ttccaggggatgcagcaggcat

SEQ ID NO: 104791 - DNA, 22 bp, Artificial Sequence
  Synthetic oligonucleotide; TTT chr11 5347465 5347486 5347482 5347487 +
tccaggggatgcagcaggcata

SEQ ID NO: 104792 - DNA, 22 bp, Artificial Sequence
  Synthetic oligonucleotide; TTT chr11 5347466 5347487 5347483 5347488 +
ccaggggatgcagcaggcatac

SEQ ID NO: 104793 - DNA, 22 bp, Artificial Sequence
  Synthetic oligonucleotide; TTC chr11 5347467 5347488 5347484 5347489 +
caggggatgcagcaggcatact

SEQ ID NO: 104794 - DNA, 22 bp, Artificial Sequence
  Synthetic oligonucleotide; CTC chr11 5347490 5347511 5347507 5347512 +
atcacatggtgcttcagccaag

SEQ ID NO: 104795 - DNA, 22 bp, Artificial Sequence
  Synthetic oligonucleotide; CTT chr11 5347504 5347525 5347521 5347526 +
cagccaagcacaccacatcact

SEQ ID NO: 104796 - DNA, 22 bp, Artificial Sequence
  Synthetic oligonucleotide; TTC chr11 5347505 5347526 5347522 5347527 +
agccaagcacaccacatcactt

SEQ ID NO: 104797 - DNA, 22 bp, Artificial Sequence
  Synthetic oligonucleotide; CTT chr11 5347527 5347548 5347544 5347549 +
tgtgatggcaattattatatgc

SEQ ID NO: 104798 - DNA, 22 bp, Artificial Sequence
  Synthetic oligonucleotide; TTT chr11 5347528 5347549 5347545 5347550 +
gtgatggcaattattatatgcg

SEQ ID NO: 104799 - DNA, 22 bp, Artificial Sequence
  Synthetic oligonucleotide; TTG chr11 5347529 5347550 5347546 5347551 +
tgatggcaattattatatgcgt

SEQ ID NO: 104800 - DNA, 22 bp, Artificial Sequence
  Synthetic oligonucleotide; TTA chr11 5347541 5347562 5347558 5347563 +
ttatatgcgttttacagtaagg

SEQ ID NO: 104801 - DNA, 22 bp, Artificial Sequence
  Synthetic oligonucleotide; TTA chr11 5347544 5347565 5347561 5347566 +
tatgcgttttacagtaaggact

SEQ ID NO: 104802 - DNA, 22 bp, Artificial Sequence
  Synthetic oligonucleotide; TTT chr11 5347553 5347574 5347570 5347575 +
tacagtaaggactatgaaatgc

SEQ ID NO: 104803 - DNA, 22 bp, Artificial Sequence
  Synthetic oligonucleotide; TTT chr11 5347554 5347575 5347571 5347576 +
acagtaaggactatgaaatgca

SEQ ID NO: 104804 - DNA, 22 bp, Artificial Sequence
  Synthetic oligonucleotide; TTA chr11 5347555 5347576 5347572 5347577 +
cagtaaggactatgaaatgcaa

SEQ ID NO: 104805 - DNA, 22 bp, Artificial Sequence
  Synthetic oligonucleotide; CTA chr11 5347567 5347588 5347584 5347589 +
tgaaatgcaatgagataaaata

SEQ ID NO: 104806 - DNA, 22 bp, Artificial Sequence
  Synthetic oligonucleotide; TTC chr11 5347593 5347614 5347610 5347615 +
caaagtagcacagcaagagcca

SEQ ID NO: 104807 - DNA, 22 bp, Artificial Sequence
  Synthetic oligonucleotide; TTC chr11 5347640 5347661 5347657 5347662 +
aacctccaacagaggaaaacct

SEQ ID NO: 104808 - DNA, 22 bp, Artificial Sequence
  Synthetic oligonucleotide; CTC chr11 5347646 5347667 5347663 5347668 +
caacagaggaaaacctccagta

SEQ ID NO: 104809 - DNA, 22 bp, Artificial Sequence
  Synthetic oligonucleotide; CTC chr11 5347663 5347684 5347680 5347685 +
cagtaaaagccaggacagagac

SEQ ID NO: 104810 - DNA, 22 bp, Artificial Sequence
  Synthetic oligonucleotide; CTT chr11 5347694 5347715 5347711 5347716 +
gagttgtgctgttcaaagccca

SEQ ID NO: 104811 - DNA, 22 bp, Artificial Sequence
  Synthetic oligonucleotide; TTG chr11 5347695 5347716 5347712 5347717 +
agttgtgctgttcaaagcccaa

SEQ ID NO: 104812 - DNA, 22 bp, Artificial Sequence
  Synthetic oligonucleotide; TTG chr11 5347700 5347721 5347717 5347722 +
tgctgttcaaagcccaataccc

SEQ ID NO: 104813 - DNA, 22 bp, Artificial Sequence
  Synthetic oligonucleotide; CTG chr11 5347705 5347726 5347722 5347727 +
ttcaaagcccaatacccacaag

SEQ ID NO: 104814 - DNA, 22 bp, Artificial Sequence
  Synthetic oligonucleotide; TTC chr11 5347708 5347729 5347725 5347730 +
aaagcccaatacccacaaggct

SEQ ID NO: 104815 - DNA, 22 bp, Artificial Sequence
  Synthetic oligonucleotide; CTG chr11 5347731 5347752 5347748 5347753 +
agggcacaaataatagagaaaa

SEQ ID NO: 104816 - DNA, 22 bp, Artificial Sequence
  Synthetic oligonucleotide; TTA chr11 5347829 5347850 5347846 5347851 +
tctaaatcaggaatggtctctg

SEQ ID NO: 104817 - DNA, 22 bp, Artificial Sequence
  Synthetic oligonucleotide; CTA chr11 5347833 5347854 5347850 5347855 +
aatcaggaatggtctctgggga

SEQ ID NO: 104818 - DNA, 22 bp, Artificial Sequence
  Synthetic oligonucleotide; CTC chr11 5347849 5347870 5347866 5347871 +
tggggaggagcttctaaaataa

SEQ ID NO: 104819 - DNA, 22 bp, Artificial Sequence
  Synthetic oligonucleotide; CTG chr11 5347851 5347872 5347868 5347873 +
gggaggagcttctaaaataaat

SEQ ID NO: 104820 - DNA, 22 bp, Artificial Sequence
  Synthetic oligonucleotide; CTT chr11 5347862 5347883 5347879 5347884 +
ctaaaataaatgttcctaccag

SEQ ID NO: 104821 - DNA, 22 bp, Artificial Sequence
  Synthetic oligonucleotide; TTC chr11 5347863 5347884 5347880 5347885 +
taaaataaatgttcctaccagc

SEQ ID NO: 104822 - DNA, 22 bp, Artificial Sequence
  Synthetic oligonucleotide; CTA chr11 5347865 5347886 5347882 5347887 +
aaataaatgttcctaccagcca

SEQ ID NO: 104823 - DNA, 22 bp, Artificial Sequence
  Synthetic oligonucleotide; TTC chr11 5347877 5347898 5347894 5347899 +
ctaccagccaggctcatgtgca

SEQ ID NO: 104824 - DNA, 22 bp, Artificial Sequence
  Synthetic oligonucleotide; CTA chr11 5347880 5347901 5347897 5347902 +
ccagccaggctcatgtgcagat

SEQ ID NO: 104825 - DNA, 22 bp, Artificial Sequence
  Synthetic oligonucleotide; CTC chr11 5347892 5347913 5347909 5347914 +
atgtgcagattctgaaaagatg

SEQ ID NO: 104826 - DNA, 22 bp, Artificial Sequence
  Synthetic oligonucleotide; TTC chr11 5347904 5347925 5347921 5347926 +
tgaaaagatgatgcccaaatct

SEQ ID NO: 104827 - DNA, 22 bp, Artificial Sequence
  Synthetic oligonucleotide; CTG chr11 5347906 5347927 5347923 5347928 +
aaaagatgatgcccaaatcttt

SEQ ID NO: 104828 - DNA, 22 bp, Artificial Sequence
  Synthetic oligonucleotide; CTT chr11 5347927 5347948 5347944 5347949 +
tcatacggctaaagatgtgaga

SEQ ID NO: 104829 - DNA, 22 bp, Artificial Sequence
  Synthetic oligonucleotide; TTT chr11 5347928 5347949 5347945 5347950 +
catacggctaaagatgtgagat

SEQ ID NO: 104830 - DNA, 22 bp, Artificial Sequence
  Synthetic oligonucleotide; TTC chr11 5347929 5347950 5347946 5347951 +
atacggctaaagatgtgagata

SEQ ID NO: 104831 - DNA, 22 bp, Artificial Sequence
  Synthetic oligonucleotide; CTA chr11 5347938 5347959 5347955 5347960 +
aagatgtgagatacatgactat

SEQ ID NO: 104832 - DNA, 22 bp, Artificial Sequence
  Synthetic oligonucleotide; CTA chr11 5347959 5347980 5347976 5347981 +
tggaactgaagaatggaaggga

SEQ ID NO: 104833 - DNA, 22 bp, Artificial Sequence
  Synthetic oligonucleotide; CTG chr11 5347967 5347988 5347984 5347989 +
aagaatggaagggaacaaagtt

SEQ ID NO: 104834 - DNA, 22 bp, Artificial Sequence
  Synthetic oligonucleotide; TTT chr11 5347990 5348011 5348007 5348012 +
caggtcagtgagggtatttaat

SEQ ID NO: 104835 - DNA, 22 bp, Artificial Sequence
  Synthetic oligonucleotide; TTC chr11 5347991 5348012 5348008 5348013 +
aggtcagtgagggtatttaatg

SEQ ID NO: 104836 - DNA, 22 bp, Artificial Sequence
  Synthetic oligonucleotide; TTT chr11 5348009 5348030 5348026 5348031 +
aatgaatctcctctgtaagatc

SEQ ID NO: 104837 - DNA, 22 bp, Artificial Sequence
  Synthetic oligonucleotide; TTA chr11 5348010 5348031 5348027 5348032 +
atgaatctcctctgtaagatct

SEQ ID NO: 104838 - DNA, 22 bp, Artificial Sequence
  Synthetic oligonucleotide; CTC chr11 5348019 5348040 5348036 5348041 +
ctctgtaagatctcattgcagg

SEQ ID NO: 104839 - DNA, 22 bp, Artificial Sequence
  Synthetic oligonucleotide; CTC chr11 5348022 5348043 5348039 5348044 +
tgtaagatctcattgcaggaac

SEQ ID NO: 104840 - DNA, 22 bp, Artificial Sequence
  Synthetic oligonucleotide; CTG chr11 5348024 5348045 5348041 5348046 +
taagatctcattgcaggaacca

SEQ ID NO: 104841 - DNA, 22 bp, Artificial Sequence
  Synthetic oligonucleotide; CTC chr11 5348033 5348054 5348050 5348055 +
attgcaggaaccaaggcaaaaa

SEQ ID NO: 104842 - DNA, 22 bp, Artificial Sequence
  Synthetic oligonucleotide; TTG chr11 5348037 5348058 5348054 5348059 +
caggaaccaaggcaaaaaaaaa

SEQ ID NO: 104843 - DNA, 22 bp, Artificial Sequence
  Synthetic oligonucleotide; CTG chr11 5348077 5348098 5348094 5348099 +
atttcttagcaagagaaaagta

SEQ ID NO: 104844 - DNA, 22 bp, Artificial Sequence
  Synthetic oligonucleotide; TTT chr11 5348081 5348102 5348098 5348103 +
cttagcaagagaaaagtaatag

SEQ ID NO: 104845 - DNA, 22 bp, Artificial Sequence
  Synthetic oligonucleotide; TTC chr11 5348082 5348103 5348099 5348104 +
ttagcaagagaaaagtaatagt

SEQ ID NO: 104846 - DNA, 22 bp, Artificial Sequence
  Synthetic oligonucleotide; CTT chr11 5348084 5348105 5348101 5348106 +
agcaagagaaaagtaatagtgt

SEQ ID NO: 104847 - DNA, 22 bp, Artificial Sequence
  Synthetic oligonucleotide; TTA chr11 5348085 5348106 5348102 5348107 +
gcaagagaaaagtaatagtgtt

SEQ ID NO: 104848 - DNA, 22 bp, Artificial Sequence
  Synthetic oligonucleotide; TTG chr11 5348108 5348129 5348125 5348130 +
tctgctaagagtagatatatgt

SEQ ID NO: 104849 - DNA, 22 bp, Artificial Sequence
  Synthetic oligonucleotide; CTG chr11 5348112 5348133 5348129 5348134 +
ctaagagtagatatatgtagta

SEQ ID NO: 104850 - DNA, 22 bp, Artificial Sequence
  Synthetic oligonucleotide; CTA chr11 5348115 5348136 5348132 5348137 +
agagtagatatatgtagtaggc

SEQ ID NO: 104851 - DNA, 22 bp, Artificial Sequence
  Synthetic oligonucleotide; CTA chr11 5348147 5348168 5348164 5348169 +
aagactccctgacatctctaaa

SEQ ID NO: 104852 - DNA, 22 bp, Artificial Sequence
  Synthetic oligonucleotide; CTC chr11 5348154 5348175 5348171 5348176 +
cctgacatctctaaaacttggt

SEQ ID NO: 104853 - DNA, 22 bp, Artificial Sequence
  Synthetic oligonucleotide; CTG chr11 5348158 5348179 5348175 5348180 +
acatctctaaaacttggtttct

SEQ ID NO: 104854 - DNA, 22 bp, Artificial Sequence
  Synthetic oligonucleotide; CTC chr11 5348165 5348186 5348182 5348187 +
taaaacttggtttctttgagag

SEQ ID NO: 104855 - DNA, 22 bp, Artificial Sequence
  Synthetic oligonucleotide; CTA chr11 5348167 5348188 5348184 5348189 +
aaacttggtttctttgagagtt

SEQ ID NO: 104856 - DNA, 22 bp, Artificial Sequence
  Synthetic oligonucleotide; CTT chr11 5348173 5348194 5348190 5348195 +
ggtttctttgagagttacctct

SEQ ID NO: 104857 - DNA, 22 bp, Artificial Sequence
  Synthetic oligonucleotide; TTG chr11 5348174 5348195 5348191 5348196 +
gtttctttgagagttacctctt

SEQ ID NO: 104858 - DNA, 22 bp, Artificial Sequence
  Synthetic oligonucleotide; TTT chr11 5348178 5348199 5348195 5348200 +
ctttgagagttacctcttcaaa

SEQ ID NO: 104859 - DNA, 22 bp, Artificial Sequence
  Synthetic oligonucleotide; TTC chr11 5348179 5348200 5348196 5348201 +
tttgagagttacctcttcaaat

SEQ ID NO: 104860 - DNA, 22 bp, Artificial Sequence
  Synthetic oligonucleotide; CTT chr11 5348181 5348202 5348198 5348203 +
tgagagttacctcttcaaatat

SEQ ID NO: 104861 - DNA, 22 bp, Artificial Sequence
  Synthetic oligonucleotide; TTT chr11 5348182 5348203 5348199 5348204 +
gagagttacctcttcaaatata

SEQ ID NO: 104862 - DNA, 22 bp, Artificial Sequence
  Synthetic oligonucleotide; TTG chr11 5348183 5348204 5348200 5348205 +
agagttacctcttcaaatataa

SEQ ID NO: 104863 - DNA, 22 bp, Artificial Sequence
  Synthetic oligonucleotide; TTA chr11 5348190 5348211 5348207 5348212 +
cctcttcaaatataaaaaagtg

SEQ ID NO: 104864 - DNA, 22 bp, Artificial Sequence
  Synthetic oligonucleotide; CTC chr11 5348194 5348215 5348211 5348216 +
ttcaaatataaaaaagtgaagg

SEQ ID NO: 104865 - DNA, 22 bp, Artificial Sequence
  Synthetic oligonucleotide; CTT chr11 5348196 5348217 5348213 5348218 +
caaatataaaaaagtgaaggat

SEQ ID NO: 104866 - DNA, 22 bp, Artificial Sequence
  Synthetic oligonucleotide; TTC chr11 5348197 5348218 5348214 5348219 +
aaatataaaaaagtgaaggata

SEQ ID NO: 104867 - DNA, 22 bp, Artificial Sequence
  Synthetic oligonucleotide; TTC chr11 5348224 5348245 5348241 5348246 +
tggaacacataaggcaaacaat

SEQ ID NO: 104868 - DNA, 22 bp, Artificial Sequence
  Synthetic oligonucleotide; CTG chr11 5348226 5348247 5348243 5348248 +
gaacacataaggcaaacaattc

SEQ ID NO: 104869 - DNA, 22 bp, Artificial Sequence
  Synthetic oligonucleotide; TTC chr11 5348248 5348269 5348265 5348270 +
tacgaacaaaccagagcatggg

SEQ ID NO: 104870 - DNA, 22 bp, Artificial Sequence
  Synthetic oligonucleotide; CTA chr11 5348250 5348271 5348267 5348272 +
cgaacaaaccagagcatgggtg

SEQ ID NO: 104871 - DNA, 22 bp, Artificial Sequence
  Synthetic oligonucleotide; TTG chr11 5348275 5348296 5348292 5348297 +
actcaggcatgaattatggggt

SEQ ID NO: 104872 - DNA, 22 bp, Artificial Sequence
  Synthetic oligonucleotide; CTC chr11 5348279 5348300 5348296 5348301 +
aggcatgaattatggggttgta

SEQ ID NO: 104873 - DNA, 22 bp, Artificial Sequence
  Synthetic oligonucleotide; TTA chr11 5348291 5348312 5348308 5348313 +
tggggttgtagtaatttctctc

SEQ ID NO: 104874 - DNA, 22 bp, Artificial Sequence
  Synthetic oligonucleotide; TTG chr11 5348299 5348320 5348316 5348321 +
tagtaatttctctccacctgac

SEQ ID NO: 104875 - DNA, 22 bp, Artificial Sequence
  Synthetic oligonucleotide; TTT chr11 5348308 5348329 5348325 5348330 +
ctctccacctgactgattcttt

SEQ ID NO: 104876 - DNA, 22 bp, Artificial Sequence
  Synthetic oligonucleotide; TTC chr11 5348309 5348330 5348326 5348331 +
tctccacctgactgattcttta

SEQ ID NO: 104877 - DNA, 22 bp, Artificial Sequence
  Synthetic oligonucleotide; CTC chr11 5348311 5348332 5348328 5348333 +
tccacctgactgattctttaat

SEQ ID NO: 104878 - DNA, 22 bp, Artificial Sequence
  Synthetic oligonucleotide; CTC chr11 5348313 5348334 5348330 5348335 +
cacctgactgattctttaatct

SEQ ID NO: 104879 - DNA, 22 bp, Artificial Sequence
  Synthetic oligonucleotide; CTG chr11 5348319 5348340 5348336 5348341 +
actgattctttaatctctctgg

SEQ ID NO: 104880 - DNA, 22 bp, Artificial Sequence
  Synthetic oligonucleotide; CTG chr11 5348323 5348344 5348340 5348345 +
attctttaatctctctggcttc

SEQ ID NO: 104881 - DNA, 22 bp, Artificial Sequence
  Synthetic oligonucleotide; TTC chr11 5348327 5348348 5348344 5348349 +
tttaatctctctggcttccatt

SEQ ID NO: 104882 - DNA, 22 bp, Artificial Sequence
  Synthetic oligonucleotide; CTT chr11 5348329 5348350 5348346 5348351 +
taatctctctggcttccattct

SEQ ID NO: 104883 - DNA, 22 bp, Artificial Sequence
  Synthetic oligonucleotide; TTT chr11 5348330 5348351 5348347 5348352 +
aatctctctggcttccattcta

SEQ ID NO: 104884 - DNA, 22 bp, Artificial Sequence
  Synthetic oligonucleotide; TTA chr11 5348331 5348352 5348348 5348353 +
atctctctggcttccattctaa

SEQ ID NO: 104885 - DNA, 22 bp, Artificial Sequence
  Synthetic oligonucleotide; CTC chr11 5348336 5348357 5348353 5348358 +
tctggcttccattctaaccctg

SEQ ID NO: 104886 - DNA, 22 bp, Artificial Sequence
  Synthetic oligonucleotide; CTC chr11 5348338 5348359 5348355 5348360 +
tggcttccattctaaccctgag

SEQ ID NO: 104887 - DNA, 22 bp, Artificial Sequence
  Synthetic oligonucleotide; CTG chr11 5348340 5348361 5348357 5348362 +
gcttccattctaaccctgagag

SEQ ID NO: 104888 - DNA, 22 bp, Artificial Sequence
  Synthetic oligonucleotide; CTT chr11 5348344 5348365 5348361 5348366 +
ccattctaaccctgagagtccc

SEQ ID NO: 104889 - DNA, 22 bp, Artificial Sequence
  Synthetic oligonucleotide; TTC chr11 5348345 5348366 5348362 5348367 +
cattctaaccctgagagtcccc

SEQ ID NO: 104890 - DNA, 22 bp, Artificial Sequence
  Synthetic oligonucleotide; TTC chr11 5348350 5348371 5348367 5348372 +
taaccctgagagtccccctgcc

SEQ ID NO: 104891 - DNA, 22 bp, Artificial Sequence
  Synthetic oligonucleotide; CTA chr11 5348352 5348373 5348369 5348374 +
accctgagagtccccctgcccc

SEQ ID NO: 104892 - DNA, 22 bp, Artificial Sequence
  Synthetic oligonucleotide; CTG chr11 5348358 5348379 5348375 5348380 +
agagtccccctgcccccaaccc

SEQ ID NO: 104893 - DNA, 22 bp, Artificial Sequence
  Synthetic oligonucleotide; CTG chr11 5348370 5348391 5348387 5348392 +
cccccaaccccatgtcttttac

SEQ ID NO: 104894 - DNA, 22 bp, Artificial Sequence
  Synthetic oligonucleotide; CTT chr11 5348388 5348409 5348405 5348410 +
ttaccttagaagtccagataag

SEQ ID NO: 104895 - DNA, 22 bp, Artificial Sequence
  Synthetic oligonucleotide; TTT chr11 5348389 5348410 5348406 5348411 +
taccttagaagtccagataagt

SEQ ID NO: 104896 - DNA, 22 bp, Artificial Sequence
  Synthetic oligonucleotide; TTT chr11 5348390 5348411 5348407 5348412 +
accttagaagtccagataagtg

SEQ ID NO: 104897 - DNA, 22 bp, Artificial Sequence
  Synthetic oligonucleotide; TTA chr11 5348391 5348412 5348408 5348413 +
ccttagaagtccagataagtgc

SEQ ID NO: 104898 - DNA, 22 bp, Artificial Sequence
  Synthetic oligonucleotide; CTT chr11 5348395 5348416 5348412 5348417 +
agaagtccagataagtgccaaa

SEQ ID NO: 104899 - DNA, 22 bp, Artificial Sequence
  Synthetic oligonucleotide; TTA chr11 5348396 5348417 5348413 5348418 +
gaagtccagataagtgccaaat

SEQ ID NO: 104900 - DNA, 22 bp, Artificial Sequence
  Synthetic oligonucleotide; CTC chr11 5348431 5348452 5348448 5348453 +
ttccaaattcttgaggaggtat

SEQ ID NO: 104901 - DNA, 22 bp, Artificial Sequence
  Synthetic oligonucleotide; CTT chr11 5348433 5348454 5348450 5348455 +
ccaaattcttgaggaggtatac

SEQ ID NO: 104902 - DNA, 22 bp, Artificial Sequence
  Synthetic oligonucleotide; TTC chr11 5348434 5348455 5348451 5348456 +
caaattcttgaggaggtatacc

SEQ ID NO: 104903 - DNA, 22 bp, Artificial Sequence
  Synthetic oligonucleotide; TTC chr11 5348441 5348462 5348458 5348463 +
ttgaggaggtatacctctgtaa

SEQ ID NO: 104904 - DNA, 22 bp, Artificial Sequence
  Synthetic oligonucleotide; CTT chr11 5348443 5348464 5348460 5348465 +
gaggaggtatacctctgtaatc

SEQ ID NO: 104905 - DNA, 22 bp, Artificial Sequence
  Synthetic oligonucleotide; TTG chr11 5348444 5348465 5348461 5348466 +
aggaggtatacctctgtaatca

SEQ ID NO: 104906 - DNA, 22 bp, Artificial Sequence
  Synthetic oligonucleotide; CTC chr11 5348458 5348479 5348475 5348480 +
tgtaatcatcagaggttcaaat

SEQ ID NO: 104907 - DNA, 22 bp, Artificial Sequence
  Synthetic oligonucleotide; CTG chr11 5348460 5348481 5348477 5348482 +
taatcatcagaggttcaaatac

SEQ ID NO: 104908 - DNA, 22 bp, Artificial Sequence
  Synthetic oligonucleotide; TTC chr11 5348476 5348497 5348493 5348498 +
aaatactttctagaaaaaaagt

SEQ ID NO: 104909 - DNA, 22 bp, Artificial Sequence
  Synthetic oligonucleotide; CTT chr11 5348484 5348505 5348501 5348506 +
tctagaaaaaaagtcactatct

SEQ ID NO: 104910 - DNA, 22 bp, Artificial Sequence
  Synthetic oligonucleotide; TTT chr11 5348485 5348506 5348502 5348507 +
ctagaaaaaaagtcactatctg

SEQ ID NO: 104911 - DNA, 22 bp, Artificial Sequence
  Synthetic oligonucleotide; TTC chr11 5348486 5348507 5348503 5348508 +
tagaaaaaaagtcactatctga

SEQ ID NO: 104912 - DNA, 22 bp, Artificial Sequence
  Synthetic oligonucleotide; CTA chr11 5348488 5348509 5348505 5348510 +
gaaaaaaagtcactatctgacc

SEQ ID NO: 104913 - DNA, 22 bp, Artificial Sequence
  Synthetic oligonucleotide; CTA chr11 5348503 5348524 5348520 5348525 +
tctgaccatatgactaataaac

SEQ ID NO: 104914 - DNA, 22 bp, Artificial Sequence
  Synthetic oligonucleotide; CTG chr11 5348507 5348528 5348524 5348529 +
accatatgactaataaaccaat

SEQ ID NO: 104915 - DNA, 22 bp, Artificial Sequence
  Synthetic oligonucleotide; CTA chr11 5348519 5348540 5348536 5348541 +
ataaaccaattcaaaattaagc

SEQ ID NO: 104916 - DNA, 22 bp, Artificial Sequence
  Synthetic oligonucleotide; TTC chr11 5348531 5348552 5348548 5348553 +
aaaattaagcttggacggagct

SEQ ID NO: 104917 - DNA, 22 bp, Artificial Sequence
  Synthetic oligonucleotide; TTA chr11 5348538 5348559 5348555 5348560 +
agcttggacggagcttgggtta

SEQ ID NO: 104918 - DNA, 22 bp, Artificial Sequence
  Synthetic oligonucleotide; CTT chr11 5348543 5348564 5348560 5348565 +
ggacggagcttgggttatgtgt

SEQ ID NO: 104919 - DNA, 22 bp, Artificial Sequence
  Synthetic oligonucleotide; TTG chr11 5348544 5348565 5348561 5348566 +
gacggagcttgggttatgtgtg

SEQ ID NO: 104920 - DNA, 22 bp, Artificial Sequence
  Synthetic oligonucleotide; CTT chr11 5348554 5348575 5348571 5348576 +
gggttatgtgtgcctctggatc

SEQ ID NO: 104921 - DNA, 22 bp, Artificial Sequence
  Synthetic oligonucleotide; TTG chr11 5348555 5348576 5348572 5348577 +
ggttatgtgtgcctctggatca

SEQ ID NO: 104922 - DNA, 22 bp, Artificial Sequence
  Synthetic oligonucleotide; TTA chr11 5348560 5348581 5348577 5348582 +
tgtgtgcctctggatcaggggt

SEQ ID NO: 104923 - DNA, 22 bp, Artificial Sequence
  Synthetic oligonucleotide; CTC chr11 5348570 5348591 5348587 5348592 +
tggatcaggggtacagattcac

SEQ ID NO: 104924 - DNA, 22 bp, Artificial Sequence
  Synthetic oligonucleotide; CTG chr11 5348572 5348593 5348589 5348594 +
gatcaggggtacagattcacat

SEQ ID NO: 104925 - DNA, 22 bp, Artificial Sequence
  Synthetic oligonucleotide; TTC chr11 5348590 5348611 5348607 5348612 +
acatagcctgtgtgactttagc

SEQ ID NO: 104926 - DNA, 22 bp, Artificial Sequence
  Synthetic oligonucleotide; CTG chr11 5348600 5348621 5348617 5348622 +
tgtgactttagcacctggaaag

SEQ ID NO: 104927 - DNA, 22 bp, Artificial Sequence
  Synthetic oligonucleotide; CTT chr11 5348608 5348629 5348625 5348630 +
tagcacctggaaaggtttatat

SEQ ID NO: 104928 - DNA, 22 bp, Artificial Sequence
  Synthetic oligonucleotide; TTT chr11 5348609 5348630 5348626 5348631 +
agcacctggaaaggtttatatt

SEQ ID NO: 104929 - DNA, 22 bp, Artificial Sequence
  Synthetic oligonucleotide; TTA chr11 5348610 5348631 5348627 5348632 +
gcacctggaaaggtttatattg

SEQ ID NO: 104930 - DNA, 22 bp, Artificial Sequence
  Synthetic oligonucleotide; CTG chr11 5348617 5348638 5348634 5348639 +
gaaaggtttatattgtgtaaca

SEQ ID NO: 104931 - DNA, 22 bp, Artificial Sequence
  Synthetic oligonucleotide; TTT chr11 5348626 5348647 5348643 5348648 +
atattgtgtaacaggcatccac

SEQ ID NO: 104932 - DNA, 22 bp, Artificial Sequence
  Synthetic oligonucleotide; TTA chr11 5348627 5348648 5348644 5348649 +
tattgtgtaacaggcatccact

SEQ ID NO: 104933 - DNA, 22 bp, Artificial Sequence
  Synthetic oligonucleotide; TTG chr11 5348632 5348653 5348649 5348654 +
tgtaacaggcatccactactct

SEQ ID NO: 104934 - DNA, 22 bp, Artificial Sequence
  Synthetic oligonucleotide; CTA chr11 5348650 5348671 5348667 5348672 +
ctcttccatcttcttttgcctg

SEQ ID NO: 104935 - DNA, 22 bp, Artificial Sequence
  Synthetic oligonucleotide; CTC chr11 5348653 5348674 5348670 5348675 +
ttccatcttcttttgcctgctt

SEQ ID NO: 104936 - DNA, 22 bp, Artificial Sequence
  Synthetic oligonucleotide; CTT chr11 5348655 5348676 5348672 5348677 +
ccatcttcttttgcctgctttc

SEQ ID NO: 104937 - DNA, 22 bp, Artificial Sequence
  Synthetic oligonucleotide; TTC chr11 5348656 5348677 5348673 5348678 +
catcttcttttgcctgctttct

SEQ ID NO: 104938 - DNA, 22 bp, Artificial Sequence
  Synthetic oligonucleotide; CTT chr11 5348662 5348683 5348679 5348684 +
cttttgcctgctttcttctagc

SEQ ID NO: 104939 - DNA, 22 bp, Artificial Sequence
  Synthetic oligonucleotide; TTC chr11 5348663 5348684 5348680 5348685 +
ttttgcctgctttcttctagcc

SEQ ID NO: 104940 - DNA, 22 bp, Artificial Sequence
  Synthetic oligonucleotide; CTT chr11 5348665 5348686 5348682 5348687 +
ttgcctgctttcttctagccgc

SEQ ID NO: 104941 - DNA, 22 bp, Artificial Sequence
  Synthetic oligonucleotide; TTT chr11 5348666 5348687 5348683 5348688 +
tgcctgctttcttctagccgcc

SEQ ID NO: 104942 - DNA, 22 bp, Artificial Sequence
  Synthetic oligonucleotide; TTT chr11 5348667 5348688 5348684 5348689 +
gcctgctttcttctagccgccc

SEQ ID NO: 104943 - DNA, 22 bp, Artificial Sequence
  Synthetic oligonucleotide; TTG chr11 5348668 5348689 5348685 5348690 +
cctgctttcttctagccgccct

SEQ ID NO: 104944 - DNA, 22 bp, Artificial Sequence
  Synthetic oligonucleotide; CTG chr11 5348672 5348693 5348689 5348694 +
ctttcttctagccgccctggca

SEQ ID NO: 104945 - DNA, 22 bp, Artificial Sequence
  Synthetic oligonucleotide; CTT chr11 5348675 5348696 5348692 5348697 +
tcttctagccgccctggcagct

SEQ ID NO: 104946 - DNA, 22 bp, Artificial Sequence
  Synthetic oligonucleotide; TTT chr11 5348676 5348697 5348693 5348698 +
cttctagccgccctggcagctg

SEQ ID NO: 104947 - DNA, 22 bp, Artificial Sequence
  Synthetic oligonucleotide; TTC chr11 5348677 5348698 5348694 5348699 +
ttctagccgccctggcagctga

SEQ ID NO: 104948 - DNA, 22 bp, Artificial Sequence
  Synthetic oligonucleotide; CTT chr11 5348679 5348700 5348696 5348701 +
ctagccgccctggcagctgatt

SEQ ID NO: 104949 - DNA, 22 bp, Artificial Sequence
  Synthetic oligonucleotide; TTC chr11 5348680 5348701 5348697 5348702 +
tagccgccctggcagctgatta

SEQ ID NO: 104950 - DNA, 22 bp, Artificial Sequence
  Synthetic oligonucleotide; CTA chr11 5348682 5348703 5348699 5348704 +
gccgccctggcagctgattaga

SEQ ID NO: 104951 - DNA, 22 bp, Artificial Sequence
  Synthetic oligonucleotide; CTG chr11 5348691 5348712 5348708 5348713 +
gcagctgattagatagtaccca

SEQ ID NO: 104952 - DNA, 22 bp, Artificial Sequence
  Synthetic oligonucleotide; CTG chr11 5348698 5348719 5348715 5348720 +
attagatagtacccacccagac

SEQ ID NO: 104953 - DNA, 22 bp, Artificial Sequence
  Synthetic oligonucleotide; TTA chr11 5348702 5348723 5348719 5348724 +
gatagtacccacccagacggag

SEQ ID NO: 104954 - DNA, 22 bp, Artificial Sequence
  Synthetic oligonucleotide; CTG chr11 5348738 5348759 5348755 5348760 +
cctctcccagtctactgactca

SEQ ID NO: 104955 - DNA, 22 bp, Artificial Sequence
  Synthetic oligonucleotide; CTC chr11 5348742 5348763 5348759 5348764 +
tcccagtctactgactcaaatg

SEQ ID NO: 104956 - DNA, 22 bp, Artificial Sequence
  Synthetic oligonucleotide; CTC chr11 5348744 5348765 5348761 5348766 +
ccagtctactgactcaaatgtt

SEQ ID NO: 104957 - DNA, 22 bp, Artificial Sequence
  Synthetic oligonucleotide; CTA chr11 5348752 5348773 5348769 5348774 +
ctgactcaaatgttaatctcct

SEQ ID NO: 104958 - DNA, 22 bp, Artificial Sequence
  Synthetic oligonucleotide; CTG chr11 5348755 5348776 5348772 5348777 +
actcaaatgttaatctcctttg

SEQ ID NO: 104959 - DNA, 22 bp, Artificial Sequence
  Synthetic oligonucleotide; CTC chr11 5348759 5348780 5348776 5348781 +
aaatgttaatctcctttggcaa

SEQ ID NO: 104960 - DNA, 22 bp, Artificial Sequence
  Synthetic oligonucleotide; TTA chr11 5348767 5348788 5348784 5348789 +
atctcctttggcaacaccctta

SEQ ID NO: 104961 - DNA, 22 bp, Artificial Sequence
  Synthetic oligonucleotide; CTC chr11 5348772 5348793 5348789 5348794 +
ctttggcaacacccttacagca

SEQ ID NO: 104962 - DNA, 22 bp, Artificial Sequence
  Synthetic oligonucleotide; CTT chr11 5348775 5348796 5348792 5348797 +
tggcaacacccttacagcacac

SEQ ID NO: 104963 - DNA, 22 bp, Artificial Sequence
  Synthetic oligonucleotide; TTT chr11 5348776 5348797 5348793 5348798 +
ggcaacacccttacagcacacc

SEQ ID NO: 104964 - DNA, 22 bp, Artificial Sequence
  Synthetic oligonucleotide; TTG chr11 5348777 5348798 5348794 5348799 +
gcaacacccttacagcacaccc

SEQ ID NO: 104965 - DNA, 22 bp, Artificial Sequence
  Synthetic oligonucleotide; CTT chr11 5348788 5348809 5348805 5348810 +
acagcacacccaggaacaatac

SEQ ID NO: 104966 - DNA, 22 bp, Artificial Sequence
  Synthetic oligonucleotide; TTA chr11 5348789 5348810 5348806 5348811 +
cagcacacccaggaacaatact

SEQ ID NO: 104967 - DNA, 22 bp, Artificial Sequence
  Synthetic oligonucleotide; CTT chr11 5348812 5348833 5348829 5348834 +
tgcatccttcaatccaatcaag

SEQ ID NO: 104968 - DNA, 22 bp, Artificial Sequence
  Synthetic oligonucleotide; TTT chr11 5348813 5348834 5348830 5348835 +
gcatccttcaatccaatcaagt

SEQ ID NO: 104969 - DNA, 22 bp, Artificial Sequence
  Synthetic oligonucleotide; TTG chr11 5348814 5348835 5348831 5348836 +
catccttcaatccaatcaagtt

SEQ ID NO: 104970 - DNA, 22 bp, Artificial Sequence
  Synthetic oligonucleotide; CTT chr11 5348821 5348842 5348838 5348843 +
caatccaatcaagtttgcactc

SEQ ID NO: 104971 - DNA, 22 bp, Artificial Sequence
  Synthetic oligonucleotide; TTC chr11 5348822 5348843 5348839 5348844 +
aatccaatcaagtttgcactca

SEQ ID NO: 104972 - DNA, 22 bp, Artificial Sequence
  Synthetic oligonucleotide; TTT chr11 5348837 5348858 5348854 5348859 +
gcactcaatattaaccatcaca

SEQ ID NO: 104973 - DNA, 22 bp, Artificial Sequence
  Synthetic oligonucleotide; TTG chr11 5348838 5348859 5348855 5348860 +
cactcaatattaaccatcacag

SEQ ID NO: 104974 - DNA, 22 bp, Artificial Sequence
  Synthetic oligonucleotide; CTC chr11 5348843 5348864 5348860 5348865 +
aatattaaccatcacagaaagg

SEQ ID NO: 104975 - DNA, 22 bp, Artificial Sequence
  Synthetic oligonucleotide; TTA chr11 5348850 5348871 5348867 5348872 +
accatcacagaaaggataatag

SEQ ID NO: 104976 - DNA, 22 bp, Artificial Sequence
  Synthetic oligonucleotide; CTA chr11 5348909 5348930 5348926 5348931 +
agtgcttgagacagaaaagagt

SEQ ID NO: 104977 - DNA, 22 bp, Artificial Sequence
  Synthetic oligonucleotide; CTT chr11 5348916 5348937 5348933 5348938 +
gagacagaaaagagtgtcagga

SEQ ID NO: 104978 - DNA, 22 bp, Artificial Sequence
  Synthetic oligonucleotide; TTG chr11 5348917 5348938 5348934 5348939 +
agacagaaaagagtgtcaggaa

SEQ ID NO: 104979 - DNA, 22 bp, Artificial Sequence
  Synthetic oligonucleotide; TTA chr11 5348988 5349009 5349005 5349010 +
acatctgaatgggctcctgctg

SEQ ID NO: 104980 - DNA, 22 bp, Artificial Sequence
  Synthetic oligonucleotide; CTG chr11 5348995 5349016 5349012 5349017 +
aatgggctcctgctgaggtgtc

SEQ ID NO: 104981 - DNA, 22 bp, Artificial Sequence
  Synthetic oligonucleotide; CTC chr11 5349004 5349025 5349021 5349026 +
ctgctgaggtgtctgcatagag

SEQ ID NO: 104982 - DNA, 22 bp, Artificial Sequence
  Synthetic oligonucleotide; CTG chr11 5349007 5349028 5349024 5349029 +
ctgaggtgtctgcatagagcca

SEQ ID NO: 104983 - DNA, 22 bp, Artificial Sequence
  Synthetic oligonucleotide; CTG chr11 5349010 5349031 5349027 5349032 +
aggtgtctgcatagagccatca

SEQ ID NO: 104984 - DNA, 22 bp, Artificial Sequence
  Synthetic oligonucleotide; CTG chr11 5349019 5349040 5349036 5349041 +
catagagccatcagtttatgcg

SEQ ID NO: 104985 - DNA, 22 bp, Artificial Sequence
  Synthetic oligonucleotide; TTT chr11 5349036 5349057 5349053 5349058 +
atgcggcagagtttgagacttt

SEQ ID NO: 104986 - DNA, 22 bp, Artificial Sequence
  Synthetic oligonucleotide; TTA chr11 5349037 5349058 5349054 5349059 +
tgcggcagagtttgagactttg

SEQ ID NO: 104987 - DNA, 22 bp, Artificial Sequence
  Synthetic oligonucleotide; TTT chr11 5349050 5349071 5349067 5349072 +
gagactttgagaattagtttct

SEQ ID NO: 104988 - DNA, 22 bp, Artificial Sequence
  Synthetic oligonucleotide; TTG chr11 5349051 5349072 5349068 5349073 +
agactttgagaattagtttctc

SEQ ID NO: 104989 - DNA, 22 bp, Artificial Sequence
  Synthetic oligonucleotide; CTT chr11 5349057 5349078 5349074 5349079 +
tgagaattagtttctcattaat

SEQ ID NO: 104990 - DNA, 22 bp, Artificial Sequence
  Synthetic oligonucleotide; TTT chr11 5349058 5349079 5349075 5349080 +
gagaattagtttctcattaata

SEQ ID NO: 104991 - DNA, 22 bp, Artificial Sequence
  Synthetic oligonucleotide; TTG chr11 5349059 5349080 5349076 5349081 +
agaattagtttctcattaataa

SEQ ID NO: 104992 - DNA, 22 bp, Artificial Sequence
  Synthetic oligonucleotide; TTA chr11 5349066 5349087 5349083 5349088 +
gtttctcattaataaaaactca

SEQ ID NO: 104993 - DNA, 22 bp, Artificial Sequence
  Synthetic oligonucleotide; TTT chr11 5349070 5349091 5349087 5349092 +
ctcattaataaaaactcaagtc

SEQ ID NO: 104994 - DNA, 22 bp, Artificial Sequence
  Synthetic oligonucleotide; TTC chr11 5349071 5349092 5349088 5349093 +
tcattaataaaaactcaagtct

SEQ ID NO: 104995 - DNA, 22 bp, Artificial Sequence
  Synthetic oligonucleotide; CTC chr11 5349073 5349094 5349090 5349095 +
attaataaaaactcaagtctat

SEQ ID NO: 104996 - DNA, 22 bp, Artificial Sequence
  Synthetic oligonucleotide; TTA chr11 5349077 5349098 5349094 5349099 +
ataaaaactcaagtctattcta

SEQ ID NO: 104997 - DNA, 22 bp, Artificial Sequence
  Synthetic oligonucleotide; CTC chr11 5349087 5349108 5349104 5349109 +
aagtctattctatgacagagac

SEQ ID NO: 104998 - DNA, 22 bp, Artificial Sequence
  Synthetic oligonucleotide; CTA chr11 5349094 5349115 5349111 5349116 +
ttctatgacagagaccctggaa

SEQ ID NO: 104999 - DNA, 22 bp, Artificial Sequence
  Synthetic oligonucleotide; TTC chr11 5349097 5349118 5349114 5349119 +
tatgacagagaccctggaagag

SEQ ID NO: 105000 - DNA, 22 bp, Artificial Sequence
  Synthetic oligonucleotide; CTA chr11 5349099 5349120 5349116 5349121 +
tgacagagaccctggaagaggg

SEQ ID NO: 105001 - DNA, 22 bp, Artificial Sequence
  Synthetic oligonucleotide; CTG chr11 5349113 5349134 5349130 5349135 +
gaagagggtgaatggctgcagg

SEQ ID NO: 105002 - DNA, 22 bp, Artificial Sequence
  Synthetic oligonucleotide; CTG chr11 5349131 5349152 5349148 5349153 +
cagggatgaggcaaaggtttta

SEQ ID NO: 105003 - DNA, 22 bp, Artificial Sequence
  Synthetic oligonucleotide; TTT chr11 5349151 5349172 5349168 5349173 +
tagatttttatcccctctgaaa

SEQ ID NO: 105004 - DNA, 22 bp, Artificial Sequence
  Synthetic oligonucleotide; TTT chr11 5349152 5349173 5349169 5349174 +
agatttttatcccctctgaaac

SEQ ID NO: 105005 - DNA, 22 bp, Artificial Sequence
  Synthetic oligonucleotide; TTA chr11 5349153 5349174 5349170 5349175 +
gatttttatcccctctgaaact

SEQ ID NO: 105006 - DNA, 22 bp, Artificial Sequence
  Synthetic oligonucleotide; TTT chr11 5349158 5349179 5349175 5349180 +
ttatcccctctgaaactcacag

SEQ ID NO: 105007 - DNA, 22 bp, Artificial Sequence
  Synthetic oligonucleotide; TTT chr11 5349159 5349180 5349176 5349181 +
tatcccctctgaaactcacaga

SEQ ID NO: 105008 - DNA, 22 bp, Artificial Sequence
  Synthetic oligonucleotide; TTT chr11 5349160 5349181 5349177 5349182 +
atcccctctgaaactcacagat

SEQ ID NO: 105009 - DNA, 22 bp, Artificial Sequence
  Synthetic oligonucleotide; TTA chr11 5349161 5349182 5349178 5349183 +
tcccctctgaaactcacagatc

SEQ ID NO: 105010 - DNA, 22 bp, Artificial Sequence
  Synthetic oligonucleotide; CTC chr11 5349168 5349189 5349185 5349190 +
tgaaactcacagatcatctcat

SEQ ID NO: 105011 - DNA, 22 bp, Artificial Sequence
  Synthetic oligonucleotide; CTG chr11 5349170 5349191 5349187 5349192 +
aaactcacagatcatctcatat

SEQ ID NO: 105012 - DNA, 22 bp, Artificial Sequence
  Synthetic oligonucleotide; CTC chr11 5349176 5349197 5349193 5349198 +
acagatcatctcatataccaca

SEQ ID NO: 105013 - DNA, 22 bp, Artificial Sequence
  Synthetic oligonucleotide; CTC chr11 5349188 5349209 5349205 5349210 +
atataccacaaaagcaactgag

SEQ ID NO: 105014 - DNA, 22 bp, Artificial Sequence
  Synthetic oligonucleotide; CTG chr11 5349208 5349229 5349225 5349230 +
agtgaatcaagtgaaagcactc

SEQ ID NO: 105015 - DNA, 22 bp, Artificial Sequence
  Synthetic oligonucleotide; CTC chr11 5349230 5349251 5349247 5349252 +
agttttcaatatgaaaacagac

SEQ ID NO: 105016 - DNA, 22 bp, Artificial Sequence
  Synthetic oligonucleotide; TTT chr11 5349235 5349256 5349252 5349257 +
tcaatatgaaaacagacaagac

SEQ ID NO: 105017 - DNA, 22 bp, Artificial Sequence
  Synthetic oligonucleotide; TTT chr11 5349236 5349257 5349253 5349258 +
caatatgaaaacagacaagaca

SEQ ID NO: 105018 - DNA, 22 bp, Artificial Sequence
  Synthetic oligonucleotide; TTC chr11 5349237 5349258 5349254 5349259 +
aatatgaaaacagacaagacaa

SEQ ID NO: 105019 - DNA, 22 bp, Artificial Sequence
  Synthetic oligonucleotide; CTA chr11 5349266 5349287 5349283 5349288 +
ttttaaggattcttcccaaaaa

SEQ ID NO: 105020 - DNA, 22 bp, Artificial Sequence
  Synthetic oligonucleotide; TTT chr11 5349269 5349290 5349286 5349291 +
taaggattcttcccaaaaaatg

SEQ ID NO: 105021 - DNA, 22 bp, Artificial Sequence
  Synthetic oligonucleotide; TTT chr11 5349270 5349291 5349287 5349292 +
aaggattcttcccaaaaaatga

SEQ ID NO: 105022 - DNA, 22 bp, Artificial Sequence
  Synthetic oligonucleotide; TTA chr11 5349271 5349292 5349288 5349293 +
aggattcttcccaaaaaatgag

SEQ ID NO: 105023 - DNA, 22 bp, Artificial Sequence
  Synthetic oligonucleotide; TTC chr11 5349278 5349299 5349295 5349300 +
ttcccaaaaaatgaggtgtata

SEQ ID NO: 105024 - DNA, 22 bp, Artificial Sequence
  Synthetic oligonucleotide; CTT chr11 5349280 5349301 5349297 5349302 +
cccaaaaaatgaggtgtatata

SEQ ID NO: 105025 - DNA, 22 bp, Artificial Sequence
  Synthetic oligonucleotide; TTC chr11 5349281 5349302 5349298 5349303 +
ccaaaaaatgaggtgtatataa

SEQ ID NO: 105026 - DNA, 22 bp, Artificial Sequence
  Synthetic oligonucleotide; CTT chr11 5349321 5349342 5349338 5349343 +
gacacacggtagaaattcaaca

SEQ ID NO: 105027 - DNA, 22 bp, Artificial Sequence
  Synthetic oligonucleotide; TTG chr11 5349322 5349343 5349339 5349344 +
acacacggtagaaattcaacaa

SEQ ID NO: 105028 - DNA, 22 bp, Artificial Sequence
  Synthetic oligonucleotide; TTC chr11 5349339 5349360 5349356 5349361 +
aacaattatttgttccatacat

SEQ ID NO: 105029 - DNA, 22 bp, Artificial Sequence
  Synthetic oligonucleotide; TTA chr11 5349347 5349368 5349364 5349369 +
tttgttccatacatttgtttct

SEQ ID NO: 105030 - DNA, 22 bp, Artificial Sequence
  Synthetic oligonucleotide; TTT chr11 5349350 5349371 5349367 5349372 +
gttccatacatttgtttctcag

SEQ ID NO: 105031 - DNA, 22 bp, Artificial Sequence
  Synthetic oligonucleotide; TTG chr11 5349351 5349372 5349368 5349373 +
ttccatacatttgtttctcagc

SEQ ID NO: 105032 - DNA, 22 bp, Artificial Sequence
  Synthetic oligonucleotide; TTC chr11 5349354 5349375 5349371 5349376 +
catacatttgtttctcagcttt

SEQ ID NO: 105033 - DNA, 22 bp, Artificial Sequence
  Synthetic oligonucleotide; TTT chr11 5349363 5349384 5349380 5349385 +
gtttctcagctttattttccct

SEQ ID NO: 105034 - DNA, 22 bp, Artificial Sequence
  Synthetic oligonucleotide; TTG chr11 5349364 5349385 5349381 5349386 +
tttctcagctttattttcccta

SEQ ID NO: 105035 - DNA, 22 bp, Artificial Sequence
  Synthetic oligonucleotide; TTT chr11 5349367 5349388 5349384 5349389 +
ctcagctttattttccctatct

SEQ ID NO: 105036 - DNA, 22 bp, Artificial Sequence
  Synthetic oligonucleotide; TTC chr11 5349368 5349389 5349385 5349390 +
tcagctttattttccctatctg

SEQ ID NO: 105037 - DNA, 22 bp, Artificial Sequence
  Synthetic oligonucleotide; CTC chr11 5349370 5349391 5349387 5349392 +
agctttattttccctatctggt

SEQ ID NO: 105038 - DNA, 22 bp, Artificial Sequence
  Synthetic oligonucleotide; CTT chr11 5349375 5349396 5349392 5349397 +
tattttccctatctggtattcc

SEQ ID NO: 105039 - DNA, 22 bp, Artificial Sequence
  Synthetic oligonucleotide; TTT chr11 5349376 5349397 5349393 5349398 +
attttccctatctggtattcct

SEQ ID NO: 105040 - DNA, 22 bp, Artificial Sequence
  Synthetic oligonucleotide; TTA chr11 5349377 5349398 5349394 5349399 +
ttttccctatctggtattccta

SEQ ID NO: 105041 - DNA, 22 bp, Artificial Sequence
  Synthetic oligonucleotide; TTT chr11 5349380 5349401 5349397 5349402 +
tccctatctggtattcctactc

SEQ ID NO: 105042 - DNA, 22 bp, Artificial Sequence
  Synthetic oligonucleotide; TTT chr11 5349381 5349402 5349398 5349403 +
ccctatctggtattcctactcc

SEQ ID NO: 105043 - DNA, 22 bp, Artificial Sequence
  Synthetic oligonucleotide; TTC chr11 5349382 5349403 5349399 5349404 +
cctatctggtattcctactcct

SEQ ID NO: 105044 - DNA, 22 bp, Artificial Sequence
  Synthetic oligonucleotide; CTA chr11 5349386 5349407 5349403 5349408 +
tctggtattcctactcctgttt

SEQ ID NO: 105045 - DNA, 22 bp, Artificial Sequence
  Synthetic oligonucleotide; CTG chr11 5349390 5349411 5349407 5349412 +
gtattcctactcctgttttttt

SEQ ID NO: 105046 - DNA, 22 bp, Artificial Sequence
  Synthetic oligonucleotide; TTC chr11 5349396 5349417 5349413 5349418 +
ctactcctgtttttttttaatt

SEQ ID NO: 105047 - DNA, 22 bp, Artificial Sequence
  Synthetic oligonucleotide; CTA chr11 5349399 5349420 5349416 5349421 +
ctcctgtttttttttaatttat

SEQ ID NO: 105048 - DNA, 22 bp, Artificial Sequence
  Synthetic oligonucleotide; CTC chr11 5349402 5349423 5349419 5349424 +
ctgtttttttttaatttatcaa

SEQ ID NO: 105049 - DNA, 22 bp, Artificial Sequence
  Synthetic oligonucleotide; CTG chr11 5349405 5349426 5349422 5349427 +
tttttttttaatttatcaatta

SEQ ID NO: 105050 - DNA, 22 bp, Artificial Sequence
  Synthetic oligonucleotide; TTT chr11 5349408 5349429 5349425 5349430 +
ttttttaatttatcaattatat

SEQ ID NO: 105051 - DNA, 22 bp, Artificial Sequence
  Synthetic oligonucleotide; TTT chr11 5349409 5349430 5349426 5349431 +
tttttaatttatcaattatatg

SEQ ID NO: 105052 - DNA, 22 bp, Artificial Sequence
  Synthetic oligonucleotide; TTT chr11 5349410 5349431 5349427 5349432 +
ttttaatttatcaattatatgt

SEQ ID NO: 105053 - DNA, 22 bp, Artificial Sequence
  Synthetic oligonucleotide; TTT chr11 5349411 5349432 5349428 5349433 +
tttaatttatcaattatatgtt

SEQ ID NO: 105054 - DNA, 22 bp, Artificial Sequence
  Synthetic oligonucleotide; TTT chr11 5349412 5349433 5349429 5349434 +
ttaatttatcaattatatgttt

SEQ ID NO: 105055 - DNA, 22 bp, Artificial Sequence
  Synthetic oligonucleotide; TTT chr11 5349413 5349434 5349430 5349435 +
taatttatcaattatatgttta

SEQ ID NO: 105056 - DNA, 22 bp, Artificial Sequence
  Synthetic oligonucleotide; TTT chr11 5349414 5349435 5349431 5349436 +
aatttatcaattatatgtttat

SEQ ID NO: 105057 - DNA, 22 bp, Artificial Sequence
  Synthetic oligonucleotide; TTA chr11 5349415 5349436 5349432 5349437 +
atttatcaattatatgtttatt

SEQ ID NO: 105058 - DNA, 22 bp, Artificial Sequence
  Synthetic oligonucleotide; TTT chr11 5349419 5349440 5349436 5349441 +
atcaattatatgtttatttagt

SEQ ID NO: 105059 - DNA, 22 bp, Artificial Sequence
  Synthetic oligonucleotide; TTA chr11 5349420 5349441 5349437 5349442 +
tcaattatatgtttatttagta

SEQ ID NO: 105060 - DNA, 22 bp, Artificial Sequence
  Synthetic oligonucleotide; TTA chr11 5349427 5349448 5349444 5349449 +
tatgtttatttagtagtaatat

SEQ ID NO: 105061 - DNA, 22 bp, Artificial Sequence
  Synthetic oligonucleotide; TTT chr11 5349434 5349455 5349451 5349456 +
atttagtagtaatataacacaa

SEQ ID NO: 105062 - DNA, 22 bp, Artificial Sequence
  Synthetic oligonucleotide; TTA chr11 5349435 5349456 5349452 5349457 +
tttagtagtaatataacacaat

SEQ ID NO: 105063 - DNA, 22 bp, Artificial Sequence
  Synthetic oligonucleotide; TTT chr11 5349438 5349459 5349455 5349460 +
agtagtaatataacacaattaa

SEQ ID NO: 105064 - DNA, 22 bp, Artificial Sequence
  Synthetic oligonucleotide; TTA chr11 5349439 5349460 5349456 5349461 +
gtagtaatataacacaattaac

SEQ ID NO: 105065 - DNA, 22 bp, Artificial Sequence
  Synthetic oligonucleotide; TTA chr11 5349459 5349480 5349476 5349481 +
actagattaatgttctgtatta

SEQ ID NO: 105066 - DNA, 22 bp, Artificial Sequence
  Synthetic oligonucleotide; CTA chr11 5349463 5349484 5349480 5349485 +
gattaatgttctgtattatctt

SEQ ID NO: 105067 - DNA, 22 bp, Artificial Sequence
  Synthetic oligonucleotide; TTA chr11 5349468 5349489 5349485 5349490 +
atgttctgtattatcttttccc

SEQ ID NO: 105068 - DNA, 22 bp, Artificial Sequence
  Synthetic oligonucleotide; TTC chr11 5349474 5349495 5349491 5349496 +
tgtattatcttttccctcccag

SEQ ID NO: 105069 - DNA, 22 bp, Artificial Sequence
  Synthetic oligonucleotide; CTG chr11 5349476 5349497 5349493 5349498 +
tattatcttttccctcccagct

SEQ ID NO: 105070 - DNA, 22 bp, Artificial Sequence
  Synthetic oligonucleotide; TTA chr11 5349481 5349502 5349498 5349503 +
tcttttccctcccagctttatt

SEQ ID NO: 105071 - DNA, 22 bp, Artificial Sequence
  Synthetic oligonucleotide; CTT chr11 5349485 5349506 5349502 5349507 +
ttccctcccagctttatttagg

SEQ ID NO: 105072 - DNA, 22 bp, Artificial Sequence
  Synthetic oligonucleotide; TTT chr11 5349486 5349507 5349503 5349508 +
tccctcccagctttatttaggt

SEQ ID NO: 105073 - DNA, 22 bp, Artificial Sequence
  Synthetic oligonucleotide; TTT chr11 5349487 5349508 5349504 5349509 +
ccctcccagctttatttaggta

SEQ ID NO: 105074 - DNA, 22 bp, Artificial Sequence
  Synthetic oligonucleotide; TTC chr11 5349488 5349509 5349505 5349510 +
cctcccagctttatttaggtat

SEQ ID NO: 105075 - DNA, 22 bp, Artificial Sequence
  Synthetic oligonucleotide; CTC chr11 5349492 5349513 5349509 5349514 +
ccagctttatttaggtatattt

SEQ ID NO: 105076 - DNA, 22 bp, Artificial Sequence
  Synthetic oligonucleotide; CTT chr11 5349499 5349520 5349516 5349521 +
tatttaggtatatttaaaattt

SEQ ID NO: 105077 - DNA, 22 bp, Artificial Sequence
  Synthetic oligonucleotide; TTT chr11 5349500 5349521 5349517 5349522 +
atttaggtatatttaaaatttg

SEQ ID NO: 105078 - DNA, 22 bp, Artificial Sequence
  Synthetic oligonucleotide; TTA chr11 5349501 5349522 5349518 5349523 +
tttaggtatatttaaaatttgc

SEQ ID NO: 105079 - DNA, 22 bp, Artificial Sequence
  Synthetic oligonucleotide; TTT chr11 5349504 5349525 5349521 5349526 +
aggtatatttaaaatttgctaa

SEQ ID NO: 105080 - DNA, 22 bp, Artificial Sequence
  Synthetic oligonucleotide; TTA chr11 5349505 5349526 5349522 5349527 +
ggtatatttaaaatttgctaag

SEQ ID NO: 105081 - DNA, 22 bp, Artificial Sequence
  Synthetic oligonucleotide; TTT chr11 5349514 5349535 5349531 5349536 +
aaaatttgctaagaaagcagac

SEQ ID NO: 105082 - DNA, 22 bp, Artificial Sequence
  Synthetic oligonucleotide; TTA chr11 5349515 5349536 5349532 5349537 +
aaatttgctaagaaagcagacc

SEQ ID NO: 105083 - DNA, 22 bp, Artificial Sequence
  Synthetic oligonucleotide; TTT chr11 5349521 5349542 5349538 5349543 +
gctaagaaagcagacctcacat

SEQ ID NO: 105084 - DNA, 22 bp, Artificial Sequence
  Synthetic oligonucleotide; TTG chr11 5349522 5349543 5349539 5349544 +
ctaagaaagcagacctcacata

SEQ ID NO: 105085 - DNA, 22 bp, Artificial Sequence
  Synthetic oligonucleotide; CTA chr11 5349525 5349546 5349542 5349547 +
agaaagcagacctcacatattt

SEQ ID NO: 105086 - DNA, 22 bp, Artificial Sequence
  Synthetic oligonucleotide; CTC chr11 5349539 5349560 5349556 5349561 +
acatatttttactaccaaaaaa

SEQ ID NO: 105087 - DNA, 22 bp, Artificial Sequence
  Synthetic oligonucleotide; TTT chr11 5349547 5349568 5349564 5349569 +
ttactaccaaaaaaattaaagt

SEQ ID NO: 105088 - DNA, 22 bp, Artificial Sequence
  Synthetic oligonucleotide; TTT chr11 5349548 5349569 5349565 5349570 +
tactaccaaaaaaattaaagtt

SEQ ID NO: 105089 - DNA, 22 bp, Artificial Sequence
  Synthetic oligonucleotide; TTT chr11 5349549 5349570 5349566 5349571 +
actaccaaaaaaattaaagtta

SEQ ID NO: 105090 - DNA, 22 bp, Artificial Sequence
  Synthetic oligonucleotide; TTA chr11 5349550 5349571 5349567 5349572 +
ctaccaaaaaaattaaagttat

SEQ ID NO: 105091 - DNA, 22 bp, Artificial Sequence
  Synthetic oligonucleotide; CTA chr11 5349553 5349574 5349570 5349575 +
ccaaaaaaattaaagttattat

SEQ ID NO: 105092 - DNA, 22 bp, Artificial Sequence
  Synthetic oligonucleotide; TTA chr11 5349565 5349586 5349582 5349587 +
aagttattatgtgaggtgatag

SEQ ID NO: 105093 - DNA, 22 bp, Artificial Sequence
  Synthetic oligonucleotide; TTA chr11 5349571 5349592 5349588 5349593 +
ttatgtgaggtgatagatatat

SEQ ID NO: 105094 - DNA, 22 bp, Artificial Sequence
  Synthetic oligonucleotide; TTA chr11 5349574 5349595 5349591 5349596 +
tgtgaggtgatagatatattaa

SEQ ID NO: 105095 - DNA, 22 bp, Artificial Sequence
  Synthetic oligonucleotide; TTA chr11 5349595 5349616 5349612 5349617 +
attagtttgattatggtaatca

SEQ ID NO: 105096 - DNA, 22 bp, Artificial Sequence
  Synthetic oligonucleotide; TTA chr11 5349599 5349620 5349616 5349621 +
gtttgattatggtaatcattta

SEQ ID NO: 105097 - DNA, 22 bp, Artificial Sequence
  Synthetic oligonucleotide; TTT chr11 5349603 5349624 5349620 5349625 +
gattatggtaatcatttaacaa

SEQ ID NO: 105098 - DNA, 22 bp, Artificial Sequence
  Synthetic oligonucleotide; TTG chr11 5349604 5349625 5349621 5349626 +
attatggtaatcatttaacaat

SEQ ID NO: 105099 - DNA, 22 bp, Artificial Sequence
  Synthetic oligonucleotide; TTA chr11 5349608 5349629 5349625 5349630 +
tggtaatcatttaacaatgaat

SEQ ID NO: 105100 - DNA, 22 bp, Artificial Sequence
  Synthetic oligonucleotide; TTT chr11 5349620 5349641 5349637 5349642 +
aacaatgaatacctataataaa

SEQ ID NO: 105101 - DNA, 22 bp, Artificial Sequence
  Synthetic oligonucleotide; TTA chr11 5349621 5349642 5349638 5349643 +
acaatgaatacctataataaaa

SEQ ID NO: 105102 - DNA, 22 bp, Artificial Sequence
  Synthetic oligonucleotide; CTA chr11 5349635 5349656 5349652 5349657 +
taataaaacaataagttatata

SEQ ID NO: 105103 - DNA, 22 bp, Artificial Sequence
  Synthetic oligonucleotide; TTA chr11 5349653 5349674 5349670 5349675 +
tatacctatgtacaatttttat

SEQ ID NO: 105104 - DNA, 22 bp, Artificial Sequence
  Synthetic oligonucleotide; CTA chr11 5349661 5349682 5349678 5349683 +
tgtacaatttttatttgccata

SEQ ID NO: 105105 - DNA, 22 bp, Artificial Sequence
  Synthetic oligonucleotide; TTT chr11 5349671 5349692 5349688 5349693 +
ttatttgccatactgcttcttt

SEQ ID NO: 105106 - DNA, 22 bp, Artificial Sequence
  Synthetic oligonucleotide; TTT chr11 5349672 5349693 5349689 5349694 +
tatttgccatactgcttcttta

SEQ ID NO: 105107 - DNA, 22 bp, Artificial Sequence
  Synthetic oligonucleotide; TTT chr11 5349673 5349694 5349690 5349695 +
atttgccatactgcttctttaa

SEQ ID NO: 105108 - DNA, 22 bp, Artificial Sequence
  Synthetic oligonucleotide; TTA chr11 5349674 5349695 5349691 5349696 +
tttgccatactgcttctttaat

SEQ ID NO: 105109 - DNA, 22 bp, Artificial Sequence
  Synthetic oligonucleotide; TTT chr11 5349677 5349698 5349694 5349699 +
gccatactgcttctttaatcct

SEQ ID NO: 105110 - DNA, 22 bp, Artificial Sequence
  Synthetic oligonucleotide; TTG chr11 5349678 5349699 5349695 5349700 +
ccatactgcttctttaatcctg

SEQ ID NO: 105111 - DNA, 22 bp, Artificial Sequence
  Synthetic oligonucleotide; CTG chr11 5349686 5349707 5349703 5349708 +
cttctttaatcctgcataagct

SEQ ID NO: 105112 - DNA, 22 bp, Artificial Sequence
  Synthetic oligonucleotide; CTT chr11 5349689 5349710 5349706 5349711 +
ctttaatcctgcataagctgag

SEQ ID NO: 105113 - DNA, 22 bp, Artificial Sequence
  Synthetic oligonucleotide; TTC chr11 5349690 5349711 5349707 5349712 +
tttaatcctgcataagctgagt

SEQ ID NO: 105114 - DNA, 22 bp, Artificial Sequence
  Synthetic oligonucleotide; CTT chr11 5349692 5349713 5349709 5349714 +
taatcctgcataagctgagtat

SEQ ID NO: 105115 - DNA, 22 bp, Artificial Sequence
  Synthetic oligonucleotide; TTT chr11 5349693 5349714 5349710 5349715 +
aatcctgcataagctgagtatt

SEQ ID NO: 105116 - DNA, 22 bp, Artificial Sequence
  Synthetic oligonucleotide; TTA chr11 5349694 5349715 5349711 5349716 +
atcctgcataagctgagtattg

SEQ ID NO: 105117 - DNA, 22 bp, Artificial Sequence
  Synthetic oligonucleotide; CTG chr11 5349700 5349721 5349717 5349722 +
cataagctgagtattgtctgaa

SEQ ID NO: 105118 - DNA, 22 bp, Artificial Sequence
  Synthetic oligonucleotide; CTG chr11 5349709 5349730 5349726 5349731 +
agtattgtctgaacctctcact

SEQ ID NO: 105119 - DNA, 22 bp, Artificial Sequence
  Synthetic oligonucleotide; TTG chr11 5349716 5349737 5349733 5349738 +
tctgaacctctcactggcaggc

SEQ ID NO: 105120 - DNA, 22 bp, Artificial Sequence
  Synthetic oligonucleotide; CTG chr11 5349720 5349741 5349737 5349742 +
aacctctcactggcaggcagat

SEQ ID NO: 105121 - DNA, 22 bp, Artificial Sequence
  Synthetic oligonucleotide; CTC chr11 5349726 5349747 5349743 5349748 +
tcactggcaggcagattgagca

SEQ ID NO: 105122 - DNA, 22 bp, Artificial Sequence
  Synthetic oligonucleotide; CTC chr11 5349728 5349749 5349745 5349750 +
actggcaggcagattgagcaat

SEQ ID NO: 105123 - DNA, 22 bp, Artificial Sequence
  Synthetic oligonucleotide; CTG chr11 5349732 5349753 5349749 5349754 +
gcaggcagattgagcaataata

SEQ ID NO: 105124 - DNA, 22 bp, Artificial Sequence
  Synthetic oligonucleotide; TTG chr11 5349744 5349765 5349761 5349766 +
agcaataatacctccttttctc

SEQ ID NO: 105125 - DNA, 22 bp, Artificial Sequence
  Synthetic oligonucleotide; CTC chr11 5349758 5349779 5349775 5349780 +
cttttctcactttttgaggaca

SEQ ID NO: 105126 - DNA, 22 bp, Artificial Sequence
  Synthetic oligonucleotide; CTT chr11 5349761 5349782 5349778 5349783 +
ttctcactttttgaggacagag

SEQ ID NO: 105127 - DNA, 22 bp, Artificial Sequence
  Synthetic oligonucleotide; TTT chr11 5349762 5349783 5349779 5349784 +
tctcactttttgaggacagagt

SEQ ID NO: 105128 - DNA, 22 bp, Artificial Sequence
  Synthetic oligonucleotide; TTT chr11 5349763 5349784 5349780 5349785 +
ctcactttttgaggacagagtt

SEQ ID NO: 105129 - DNA, 22 bp, Artificial Sequence
  Synthetic oligonucleotide; TTC chr11 5349764 5349785 5349781 5349786 +
tcactttttgaggacagagttg

SEQ ID NO: 105130 - DNA, 22 bp, Artificial Sequence
  Synthetic oligonucleotide; CTC chr11 5349766 5349787 5349783 5349788 +
actttttgaggacagagttgct

SEQ ID NO: 105131 - DNA, 22 bp, Artificial Sequence
  Synthetic oligonucleotide; CTT chr11 5349770 5349791 5349787 5349792 +
tttgaggacagagttgctttcc

SEQ ID NO: 105132 - DNA, 22 bp, Artificial Sequence
  Synthetic oligonucleotide; TTT chr11 5349771 5349792 5349788 5349793 +
ttgaggacagagttgctttccc

SEQ ID NO: 105133 - DNA, 22 bp, Artificial Sequence
  Synthetic oligonucleotide; TTT chr11 5349772 5349793 5349789 5349794 +
tgaggacagagttgctttcccc

SEQ ID NO: 105134 - DNA, 22 bp, Artificial Sequence
  Synthetic oligonucleotide; TTT chr11 5349773 5349794 5349790 5349795 +
gaggacagagttgctttcccct

SEQ ID NO: 105135 - DNA, 22 bp, Artificial Sequence
  Synthetic oligonucleotide; TTG chr11 5349774 5349795 5349791 5349796 +
aggacagagttgctttcccctc

SEQ ID NO: 105136 - DNA, 22 bp, Artificial Sequence
  Synthetic oligonucleotide; TTG chr11 5349786 5349807 5349803 5349808 +
ctttcccctctacttccctcag

SEQ ID NO: 105137 - DNA, 22 bp, Artificial Sequence
  Synthetic oligonucleotide; CTT chr11 5349789 5349810 5349806 5349811 +
tcccctctacttccctcagtcc

SEQ ID NO: 105138 - DNA, 22 bp, Artificial Sequence
  Synthetic oligonucleotide; TTT chr11 5349790 5349811 5349807 5349812 +
cccctctacttccctcagtccc

SEQ ID NO: 105139 - DNA, 22 bp, Artificial Sequence
  Synthetic oligonucleotide; TTC chr11 5349791 5349812 5349808 5349813 +
ccctctacttccctcagtccca

SEQ ID NO: 105140 - DNA, 22 bp, Artificial Sequence
  Synthetic oligonucleotide; CTC chr11 5349796 5349817 5349813 5349818 +
tacttccctcagtcccaatgcc

SEQ ID NO: 105141 - DNA, 22 bp, Artificial Sequence
  Synthetic oligonucleotide; CTA chr11 5349798 5349819 5349815 5349820 +
cttccctcagtcccaatgcccc

SEQ ID NO: 105142 - DNA, 22 bp, Artificial Sequence
  Synthetic oligonucleotide; CTT chr11 5349801 5349822 5349818 5349823 +
ccctcagtcccaatgccccagg

SEQ ID NO: 105143 - DNA, 22 bp, Artificial Sequence
  Synthetic oligonucleotide; TTC chr11 5349802 5349823 5349819 5349824 +
cctcagtcccaatgccccaggc

SEQ ID NO: 105144 - DNA, 22 bp, Artificial Sequence
  Synthetic oligonucleotide; CTC chr11 5349806 5349827 5349823 5349828 +
agtcccaatgccccaggctcaa

SEQ ID NO: 105145 - DNA, 22 bp, Artificial Sequence
  Synthetic oligonucleotide; CTC chr11 5349826 5349847 5349843 5349848 +
aacgttacttttagctatgtca

SEQ ID NO: 105146 - DNA, 22 bp, Artificial Sequence
  Synthetic oligonucleotide; TTA chr11 5349833 5349854 5349850 5349855 +
cttttagctatgtcagaagttc

SEQ ID NO: 105147 - DNA, 22 bp, Artificial Sequence
  Synthetic oligonucleotide; CTT chr11 5349836 5349857 5349853 5349858 +
ttagctatgtcagaagttccca

SEQ ID NO: 105148 - DNA, 22 bp, Artificial Sequence
  Synthetic oligonucleotide; TTT chr11 5349837 5349858 5349854 5349859 +
tagctatgtcagaagttcccac

SEQ ID NO: 105149 - DNA, 22 bp, Artificial Sequence
  Synthetic oligonucleotide; TTT chr11 5349838 5349859 5349855 5349860 +
agctatgtcagaagttcccaca

SEQ ID NO: 105150 - DNA, 22 bp, Artificial Sequence
  Synthetic oligonucleotide; TTA chr11 5349839 5349860 5349856 5349861 +
gctatgtcagaagttcccacat

SEQ ID NO: 105151 - DNA, 22 bp, Artificial Sequence
  Synthetic oligonucleotide; CTA chr11 5349843 5349864 5349860 5349865 +
tgtcagaagttcccacattggc

SEQ ID NO: 105152 - DNA, 22 bp, Artificial Sequence
  Synthetic oligonucleotide; TTC chr11 5349855 5349876 5349872 5349877 +
ccacattggctcatcaatcttt

SEQ ID NO: 105153 - DNA, 22 bp, Artificial Sequence
  Synthetic oligonucleotide; TTG chr11 5349863 5349884 5349880 5349885 +
gctcatcaatcttttctccttt

SEQ ID NO: 105154 - DNA, 22 bp, Artificial Sequence
  Synthetic oligonucleotide; CTC chr11 5349867 5349888 5349884 5349889 +
atcaatcttttctcctttccct

SEQ ID NO: 105155 - DNA, 22 bp, Artificial Sequence
  Synthetic oligonucleotide; CTT chr11 5349876 5349897 5349893 5349898 +
ttctcctttccctttcccaccc

SEQ ID NO: 105156 - DNA, 22 bp, Artificial Sequence
  Synthetic oligonucleotide; TTT chr11 5349877 5349898 5349894 5349899 +
tctcctttccctttcccaccca

SEQ ID NO: 105157 - DNA, 22 bp, Artificial Sequence
  Synthetic oligonucleotide; TTT chr11 5349878 5349899 5349895 5349900 +
ctcctttccctttcccacccag

SEQ ID NO: 105158 - DNA, 22 bp, Artificial Sequence
  Synthetic oligonucleotide; TTC chr11 5349879 5349900 5349896 5349901 +
tcctttccctttcccacccaga

SEQ ID NO: 105159 - DNA, 22 bp, Artificial Sequence
  Synthetic oligonucleotide; CTC chr11 5349881 5349902 5349898 5349903 +
ctttccctttcccacccagaca

SEQ ID NO: 105160 - DNA, 22 bp, Artificial Sequence
  Synthetic oligonucleotide; CTT chr11 5349884 5349905 5349901 5349906 +
tccctttcccacccagacatat

SEQ ID NO: 105161 - DNA, 22 bp, Artificial Sequence
  Synthetic oligonucleotide; TTT chr11 5349885 5349906 5349902 5349907 +
ccctttcccacccagacatatc

SEQ ID NO: 105162 - DNA, 22 bp, Artificial Sequence
  Synthetic oligonucleotide; TTC chr11 5349886 5349907 5349903 5349908 +
cctttcccacccagacatatca

SEQ ID NO: 105163 - DNA, 22 bp, Artificial Sequence
  Synthetic oligonucleotide; CTT chr11 5349890 5349911 5349907 5349912 +
tcccacccagacatatcacatt

SEQ ID NO: 105164 - DNA, 22 bp, Artificial Sequence
  Synthetic oligonucleotide; TTT chr11 5349891 5349912 5349908 5349913 +
cccacccagacatatcacattt

SEQ ID NO: 105165 - DNA, 22 bp, Artificial Sequence
  Synthetic oligonucleotide; TTC chr11 5349892 5349913 5349909 5349914 +
ccacccagacatatcacatttt

SEQ ID NO: 105166 - DNA, 22 bp, Artificial Sequence
  Synthetic oligonucleotide; TTT chr11 5349913 5349934 5349930 5349935 +
tatctgctgattagagaaacta

SEQ ID NO: 105167 - DNA, 22 bp, Artificial Sequence
  Synthetic oligonucleotide; TTT chr11 5349914 5349935 5349931 5349936 +
atctgctgattagagaaactat

SEQ ID NO: 105168 - DNA, 22 bp, Artificial Sequence
  Synthetic oligonucleotide; TTA chr11 5349915 5349936 5349932 5349937 +
tctgctgattagagaaactata

SEQ ID NO: 105169 - DNA, 22 bp, Artificial Sequence
  Synthetic oligonucleotide; CTG chr11 5349919 5349940 5349936 5349941 +
ctgattagagaaactatagttt

SEQ ID NO: 105170 - DNA, 22 bp, Artificial Sequence
  Synthetic oligonucleotide; CTG chr11 5349922 5349943 5349939 5349944 +
attagagaaactatagtttaat

SEQ ID NO: 105171 - DNA, 22 bp, Artificial Sequence
  Synthetic oligonucleotide; TTA chr11 5349926 5349947 5349943 5349948 +
gagaaactatagtttaatatct

SEQ ID NO: 105172 - DNA, 22 bp, Artificial Sequence
  Synthetic oligonucleotide; CTA chr11 5349935 5349956 5349952 5349957 +
tagtttaatatctttatttaaa

SEQ ID NO: 105173 - DNA, 22 bp, Artificial Sequence
  Synthetic oligonucleotide; TTT chr11 5349941 5349962 5349958 5349963 +
aatatctttatttaaagtcaaa

SEQ ID NO: 105174 - DNA, 22 bp, Artificial Sequence
  Synthetic oligonucleotide; TTA chr11 5349942 5349963 5349959 5349964 +
atatctttatttaaagtcaaac

SEQ ID NO: 105175 - DNA, 22 bp, Artificial Sequence
  Synthetic oligonucleotide; CTT chr11 5349949 5349970 5349966 5349971 +
tatttaaagtcaaacacaggct

SEQ ID NO: 105176 - DNA, 22 bp, Artificial Sequence
  Synthetic oligonucleotide; TTT chr11 5349950 5349971 5349967 5349972 +
atttaaagtcaaacacaggctc

SEQ ID NO: 105177 - DNA, 22 bp, Artificial Sequence
  Synthetic oligonucleotide; TTA chr11 5349951 5349972 5349968 5349973 +
tttaaagtcaaacacaggctcc

SEQ ID NO: 105178 - DNA, 22 bp, Artificial Sequence
  Synthetic oligonucleotide; TTT chr11 5349954 5349975 5349971 5349976 +
aaagtcaaacacaggctcctaa

SEQ ID NO: 105179 - DNA, 22 bp, Artificial Sequence
  Synthetic oligonucleotide; TTA chr11 5349955 5349976 5349972 5349977 +
aagtcaaacacaggctcctaaa

SEQ ID NO: 105180 - DNA, 22 bp, Artificial Sequence
  Synthetic oligonucleotide; CTC chr11 5349972 5349993 5349989 5349994 +
ctaaaaaccccatcatcatctt

SEQ ID NO: 105181 - DNA, 22 bp, Artificial Sequence
  Synthetic oligonucleotide; CTA chr11 5349975 5349996 5349992 5349997 +
aaaaccccatcatcatcttata

SEQ ID NO: 105182 - DNA, 22 bp, Artificial Sequence
  Synthetic oligonucleotide; CTT chr11 5349994 5350015 5350011 5350016 +
atatctgttcccaaggcttcca

SEQ ID NO: 105183 - DNA, 22 bp, Artificial Sequence
  Synthetic oligonucleotide; TTA chr11 5349995 5350016 5350012 5350017 +
tatctgttcccaaggcttccac

SEQ ID NO: 105184 - DNA, 22 bp, Artificial Sequence
  Synthetic oligonucleotide; CTG chr11 5350001 5350022 5350018 5350023 +
ttcccaaggcttccacagaaaa

SEQ ID NO: 105185 - DNA, 22 bp, Artificial Sequence
  Synthetic oligonucleotide; TTC chr11 5350004 5350025 5350021 5350026 +
ccaaggcttccacagaaaaaaa

SEQ ID NO: 105186 - DNA, 22 bp, Artificial Sequence
  Synthetic oligonucleotide; CTT chr11 5350013 5350034 5350030 5350035 +
ccacagaaaaaaaggaaatcat

SEQ ID NO: 105187 - DNA, 22 bp, Artificial Sequence
  Synthetic oligonucleotide; TTC chr11 5350014 5350035 5350031 5350036 +
cacagaaaaaaaggaaatcatt

SEQ ID NO: 105188 - DNA, 22 bp, Artificial Sequence
  Synthetic oligonucleotide; TTT chr11 5350037 5350058 5350054 5350059 +
gacacacctctgggtgaataat

SEQ ID NO: 105189 - DNA, 22 bp, Artificial Sequence
  Synthetic oligonucleotide; TTG chr11 5350038 5350059 5350055 5350060 +
acacacctctgggtgaataatc

SEQ ID NO: 105190 - DNA, 22 bp, Artificial Sequence
  Synthetic oligonucleotide; CTC chr11 5350047 5350068 5350064 5350069 +
tgggtgaataatcctgacatgt

SEQ ID NO: 105191 - DNA, 22 bp, Artificial Sequence
  Synthetic oligonucleotide; CTG chr11 5350049 5350070 5350066 5350071 +
ggtgaataatcctgacatgtac

SEQ ID NO: 105192 - DNA, 22 bp, Artificial Sequence
  Synthetic oligonucleotide; CTG chr11 5350063 5350084 5350080 5350085 +
acatgtactcactagagaaaga

SEQ ID NO: 105193 - DNA, 22 bp, Artificial Sequence
  Synthetic oligonucleotide; CTC chr11 5350073 5350094 5350090 5350095 +
actagagaaagagaaaggaggt

SEQ ID NO: 105194 - DNA, 22 bp, Artificial Sequence
  Synthetic oligonucleotide; CTA chr11 5350077 5350098 5350094 5350099 +
gagaaagagaaaggaggtactt

SEQ ID NO: 105195 - DNA, 22 bp, Artificial Sequence
  Synthetic oligonucleotide; CTT chr11 5350099 5350120 5350116 5350121 +
ctctgaaacaataacaaaaaca

SEQ ID NO: 105196 - DNA, 22 bp, Artificial Sequence
  Synthetic oligonucleotide; TTC chr11 5350100 5350121 5350117 5350122 +
tctgaaacaataacaaaaacac

SEQ ID NO: 105197 - DNA, 22 bp, Artificial Sequence
  Synthetic oligonucleotide; CTC chr11 5350102 5350123 5350119 5350124 +
tgaaacaataacaaaaacacaa

SEQ ID NO: 105198 - DNA, 22 bp, Artificial Sequence
  Synthetic oligonucleotide; CTG chr11 5350104 5350125 5350121 5350126 +
aaacaataacaaaaacacaaaa

SEQ ID NO: 105199 - DNA, 22 bp, Artificial Sequence
  Synthetic oligonucleotide; TTA chr11 5350138 5350159 5350155 5350160 +
tccactctttacaaaacatttc

SEQ ID NO: 105200 - DNA, 22 bp, Artificial Sequence
  Synthetic oligonucleotide; CTC chr11 5350145 5350166 5350162 5350167 +
tttacaaaacatttccccttac

SEQ ID NO: 105201 - DNA, 22 bp, Artificial Sequence
  Synthetic oligonucleotide; CTT chr11 5350147 5350168 5350164 5350169 +
tacaaaacatttccccttactt

SEQ ID NO: 105202 - DNA, 22 bp, Artificial Sequence
  Synthetic oligonucleotide; TTT chr11 5350148 5350169 5350165 5350170 +
acaaaacatttccccttacttt

SEQ ID NO: 105203 - DNA, 22 bp, Artificial Sequence
  Synthetic oligonucleotide; TTA chr11 5350149 5350170 5350166 5350171 +
caaaacatttccccttactttg

SEQ ID NO: 105204 - DNA, 22 bp, Artificial Sequence
  Synthetic oligonucleotide; TTT chr11 5350159 5350180 5350176 5350181 +
ccccttactttgtgtcaagaga

SEQ ID NO: 105205 - DNA, 22 bp, Artificial Sequence
  Synthetic oligonucleotide; TTC chr11 5350160 5350181 5350177 5350182 +
cccttactttgtgtcaagagaa

SEQ ID NO: 105206 - DNA, 22 bp, Artificial Sequence
  Synthetic oligonucleotide; CTT chr11 5350165 5350186 5350182 5350187 +
actttgtgtcaagagaatgact

SEQ ID NO: 105207 - DNA, 22 bp, Artificial Sequence
  Synthetic oligonucleotide; TTA chr11 5350166 5350187 5350183 5350188 +
ctttgtgtcaagagaatgactg

SEQ ID NO: 105208 - DNA, 22 bp, Artificial Sequence
  Synthetic oligonucleotide; CTT chr11 5350169 5350190 5350186 5350191 +
tgtgtcaagagaatgactgaga

SEQ ID NO: 105209 - DNA, 22 bp, Artificial Sequence
  Synthetic oligonucleotide; TTT chr11 5350170 5350191 5350187 5350192 +
gtgtcaagagaatgactgagaa

SEQ ID NO: 105210 - DNA, 22 bp, Artificial Sequence
  Synthetic oligonucleotide; TTG chr11 5350171 5350192 5350188 5350193 +
tgtcaagagaatgactgagaag

SEQ ID NO: 105211 - DNA, 22 bp, Artificial Sequence
  Synthetic oligonucleotide; CTG chr11 5350188 5350209 5350205 5350210 +
agaagacagaaatcactagtag

SEQ ID NO: 105212 - DNA, 22 bp, Artificial Sequence
  Synthetic oligonucleotide; CTA chr11 5350206 5350227 5350223 5350228 +
gtagtctttacaggttatgtaa

SEQ ID NO: 105213 - DNA, 22 bp, Artificial Sequence
  Synthetic oligonucleotide; CTT chr11 5350214 5350235 5350231 5350236 +
tacaggttatgtaaccaaatct

SEQ ID NO: 105214 - DNA, 22 bp, Artificial Sequence
  Synthetic oligonucleotide; TTT chr11 5350215 5350236 5350232 5350237 +
acaggttatgtaaccaaatctc

SEQ ID NO: 105215 - DNA, 22 bp, Artificial Sequence
  Synthetic oligonucleotide; TTA chr11 5350216 5350237 5350233 5350238 +
caggttatgtaaccaaatctca

SEQ ID NO: 105216 - DNA, 22 bp, Artificial Sequence
  Synthetic oligonucleotide; TTA chr11 5350223 5350244 5350240 5350245 +
tgtaaccaaatctcaagattaa

SEQ ID NO: 105217 - DNA, 22 bp, Artificial Sequence
  Synthetic oligonucleotide; CTC chr11 5350237 5350258 5350254 5350259 +
aagattaaattactttcccaag

SEQ ID NO: 105218 - DNA, 22 bp, Artificial Sequence
  Synthetic oligonucleotide; TTA chr11 5350244 5350265 5350261 5350266 +
aattactttcccaagatcatta

SEQ ID NO: 105219 - DNA, 22 bp, Artificial Sequence
  Synthetic oligonucleotide; TTA chr11 5350249 5350270 5350266 5350271 +
ctttcccaagatcattattgtt

SEQ ID NO: 105220 - DNA, 22 bp, Artificial Sequence
  Synthetic oligonucleotide; CTT chr11 5350252 5350273 5350269 5350274 +
tcccaagatcattattgttaga

SEQ ID NO: 105221 - DNA, 22 bp, Artificial Sequence
  Synthetic oligonucleotide; TTT chr11 5350253 5350274 5350270 5350275 +
cccaagatcattattgttagaa

SEQ ID NO: 105222 - DNA, 22 bp, Artificial Sequence
  Synthetic oligonucleotide; TTC chr11 5350254 5350275 5350271 5350276 +
ccaagatcattattgttagaaa

SEQ ID NO: 105223 - DNA, 22 bp, Artificial Sequence
  Synthetic oligonucleotide; TTA chr11 5350266 5350287 5350283 5350288 +
ttgttagaaagagcagagctga

SEQ ID NO: 105224 - DNA, 22 bp, Artificial Sequence
  Synthetic oligonucleotide; TTG chr11 5350269 5350290 5350286 5350291 +
ttagaaagagcagagctgaaac

SEQ ID NO: 105225 - DNA, 22 bp, Artificial Sequence
  Synthetic oligonucleotide; TTA chr11 5350272 5350293 5350289 5350294 +
gaaagagcagagctgaaacttc

SEQ ID NO: 105226 - DNA, 22 bp, Artificial Sequence
  Synthetic oligonucleotide; CTG chr11 5350287 5350308 5350304 5350309 +
aaacttcaacaaattcttctga

SEQ ID NO: 105227 - DNA, 22 bp, Artificial Sequence
  Synthetic oligonucleotide; CTT chr11 5350293 5350314 5350310 5350315 +
caacaaattcttctgaaaatga

SEQ ID NO: 105228 - DNA, 22 bp, Artificial Sequence
  Synthetic oligonucleotide; TTC chr11 5350294 5350315 5350311 5350316 +
aacaaattcttctgaaaatgaa

SEQ ID NO: 105229 - DNA, 22 bp, Artificial Sequence
  Synthetic oligonucleotide; TTC chr11 5350303 5350324 5350320 5350325 +
ttctgaaaatgaaagtccagta

SEQ ID NO: 105230 - DNA, 22 bp, Artificial Sequence
  Synthetic oligonucleotide; CTT chr11 5350305 5350326 5350322 5350327 +
ctgaaaatgaaagtccagtaat

SEQ ID NO: 105231 - DNA, 22 bp, Artificial Sequence
  Synthetic oligonucleotide; TTC chr11 5350306 5350327 5350323 5350328 +
tgaaaatgaaagtccagtaatc

SEQ ID NO: 105232 - DNA, 22 bp, Artificial Sequence
  Synthetic oligonucleotide; CTG chr11 5350308 5350329 5350325 5350330 +
aaaatgaaagtccagtaatctt

SEQ ID NO: 105233 - DNA, 22 bp, Artificial Sequence
  Synthetic oligonucleotide; CTT chr11 5350330 5350351 5350347 5350352 +
ggatgcattcttttcatggaca

SEQ ID NO: 105234 - DNA, 22 bp, Artificial Sequence
  Synthetic oligonucleotide; TTG chr11 5350331 5350352 5350348 5350353 +
gatgcattcttttcatggacag

SEQ ID NO: 105235 - DNA, 22 bp, Artificial Sequence
  Synthetic oligonucleotide; TTC chr11 5350340 5350361 5350357 5350362 +
ttttcatggacagaaagaggtc

SEQ ID NO: 105236 - DNA, 22 bp, Artificial Sequence
  Synthetic oligonucleotide; CTT chr11 5350342 5350363 5350359 5350364 +
ttcatggacagaaagaggtctt

SEQ ID NO: 105237 - DNA, 22 bp, Artificial Sequence
  Synthetic oligonucleotide; TTT chr11 5350343 5350364 5350360 5350365 +
tcatggacagaaagaggtcttg

SEQ ID NO: 105238 - DNA, 22 bp, Artificial Sequence
  Synthetic oligonucleotide; TTT chr11 5350344 5350365 5350361 5350366 +
catggacagaaagaggtcttgt

SEQ ID NO: 105239 - DNA, 22 bp, Artificial Sequence
  Synthetic oligonucleotide; TTC chr11 5350345 5350366 5350362 5350367 +
atggacagaaagaggtcttgta

SEQ ID NO: 105240 - DNA, 22 bp, Artificial Sequence
  Synthetic oligonucleotide; CTT chr11 5350364 5350385 5350381 5350386 +
gtaaatcgtgcataaatttaca

SEQ ID NO: 105241 - DNA, 22 bp, Artificial Sequence
  Synthetic oligonucleotide; TTG chr11 5350365 5350386 5350382 5350387 +
taaatcgtgcataaatttacat

SEQ ID NO: 105242 - DNA, 22 bp, Artificial Sequence
  Synthetic oligonucleotide; TTT chr11 5350383 5350404 5350400 5350405 +
acatcaatatgctctttcaata

SEQ ID NO: 105243 - DNA, 22 bp, Artificial Sequence
  Synthetic oligonucleotide; TTA chr11 5350384 5350405 5350401 5350406 +
catcaatatgctctttcaatag

SEQ ID NO: 105244 - DNA, 22 bp, Artificial Sequence
  Synthetic oligonucleotide; CTC chr11 5350397 5350418 5350414 5350419 +
tttcaatagtatatgagatgta

SEQ ID NO: 105245 - DNA, 22 bp, Artificial Sequence
  Synthetic oligonucleotide; CTT chr11 5350399 5350420 5350416 5350421 +
tcaatagtatatgagatgtata

SEQ ID NO: 105246 - DNA, 22 bp, Artificial Sequence
  Synthetic oligonucleotide; TTT chr11 5350400 5350421 5350417 5350422 +
caatagtatatgagatgtatag

SEQ ID NO: 105247 - DNA, 22 bp, Artificial Sequence
  Synthetic oligonucleotide; TTC chr11 5350401 5350422 5350418 5350423 +
aatagtatatgagatgtatagt

SEQ ID NO: 105248 - DNA, 22 bp, Artificial Sequence
  Synthetic oligonucleotide; CTA chr11 5350453 5350474 5350470 5350475 +
ttttctctggctcatgccacca

SEQ ID NO: 105249 - DNA, 22 bp, Artificial Sequence
  Synthetic oligonucleotide; TTT chr11 5350456 5350477 5350473 5350478 +
tctctggctcatgccaccaaca

SEQ ID NO: 105250 - DNA, 22 bp, Artificial Sequence
  Synthetic oligonucleotide; TTT chr11 5350457 5350478 5350474 5350479 +
ctctggctcatgccaccaacac

SEQ ID NO: 105251 - DNA, 22 bp, Artificial Sequence
  Synthetic oligonucleotide; TTC chr11 5350458 5350479 5350475 5350480 +
tctggctcatgccaccaacaca

SEQ ID NO: 105252 - DNA, 22 bp, Artificial Sequence
  Synthetic oligonucleotide; CTC chr11 5350460 5350481 5350477 5350482 +
tggctcatgccaccaacacaca

SEQ ID NO: 105253 - DNA, 22 bp, Artificial Sequence
  Synthetic oligonucleotide; CTG chr11 5350462 5350483 5350479 5350484 +
gctcatgccaccaacacacaat

SEQ ID NO: 105254 - DNA, 22 bp, Artificial Sequence
  Synthetic oligonucleotide; CTC chr11 5350466 5350487 5350483 5350488 +
atgccaccaacacacaatttat

SEQ ID NO: 105255 - DNA, 22 bp, Artificial Sequence
  Synthetic oligonucleotide; TTT chr11 5350486 5350507 5350503 5350508 +
atgtattctcagaggttggctg

SEQ ID NO: 105256 - DNA, 22 bp, Artificial Sequence
  Synthetic oligonucleotide; TTA chr11 5350487 5350508 5350504 5350509 +
tgtattctcagaggttggctgc

SEQ ID NO: 105257 - DNA, 22 bp, Artificial Sequence
  Synthetic oligonucleotide; TTC chr11 5350494 5350515 5350511 5350516 +
tcagaggttggctgcctgcacc

SEQ ID NO: 105258 - DNA, 22 bp, Artificial Sequence
  Synthetic oligonucleotide; CTC chr11 5350496 5350517 5350513 5350518 +
agaggttggctgcctgcaccag

SEQ ID NO: 105259 - DNA, 22 bp, Artificial Sequence
  Synthetic oligonucleotide; TTG chr11 5350504 5350525 5350521 5350526 +
gctgcctgcaccagctgaaatc

SEQ ID NO: 105260 - DNA, 22 bp, Artificial Sequence
  Synthetic oligonucleotide; CTG chr11 5350508 5350529 5350525 5350530 +
cctgcaccagctgaaatcttag

SEQ ID NO: 105261 - DNA, 22 bp, Artificial Sequence
  Synthetic oligonucleotide; CTG chr11 5350512 5350533 5350529 5350534 +
caccagctgaaatcttagaatt

SEQ ID NO: 105262 - DNA, 22 bp, Artificial Sequence
  Synthetic oligonucleotide; CTG chr11 5350521 5350542 5350538 5350543 +
aaatcttagaattctaatgagt

SEQ ID NO: 105263 - DNA, 22 bp, Artificial Sequence
  Synthetic oligonucleotide; CTT chr11 5350528 5350549 5350545 5350550 +
agaattctaatgagtcacagag

SEQ ID NO: 105264 - DNA, 22 bp, Artificial Sequence
  Synthetic oligonucleotide; TTA chr11 5350529 5350550 5350546 5350551 +
gaattctaatgagtcacagagc

SEQ ID NO: 105265 - DNA, 22 bp, Artificial Sequence
  Synthetic oligonucleotide; TTC chr11 5350535 5350556 5350552 5350557 +
taatgagtcacagagccttctc

SEQ ID NO: 105266 - DNA, 22 bp, Artificial Sequence
  Synthetic oligonucleotide; CTA chr11 5350537 5350558 5350554 5350559 +
atgagtcacagagccttctcac

SEQ ID NO: 105267 - DNA, 22 bp, Artificial Sequence
  Synthetic oligonucleotide; CTT chr11 5350554 5350575 5350571 5350576 +
ctcacttttgtcaaatcccatc

SEQ ID NO: 105268 - DNA, 22 bp, Artificial Sequence
  Synthetic oligonucleotide; TTC chr11 5350555 5350576 5350572 5350577 +
tcacttttgtcaaatcccatca

SEQ ID NO: 105269 - DNA, 22 bp, Artificial Sequence
  Synthetic oligonucleotide; CTC chr11 5350557 5350578 5350574 5350579 +
acttttgtcaaatcccatcaga

SEQ ID NO: 105270 - DNA, 22 bp, Artificial Sequence
  Synthetic oligonucleotide; CTT chr11 5350561 5350582 5350578 5350583 +
ttgtcaaatcccatcagattcc

SEQ ID NO: 105271 - DNA, 22 bp, Artificial Sequence
  Synthetic oligonucleotide; TTT chr11 5350562 5350583 5350579 5350584 +
tgtcaaatcccatcagattcca

SEQ ID NO: 105272 - DNA, 22 bp, Artificial Sequence
  Synthetic oligonucleotide; TTT chr11 5350563 5350584 5350580 5350585 +
gtcaaatcccatcagattccat

SEQ ID NO: 105273 - DNA, 22 bp, Artificial Sequence
  Synthetic oligonucleotide; TTG chr11 5350564 5350585 5350581 5350586 +
tcaaatcccatcagattccata

SEQ ID NO: 105274 - DNA, 22 bp, Artificial Sequence
  Synthetic oligonucleotide; TTC chr11 5350582 5350603 5350599 5350604 +
catagttttaaaaaaaaaattc

SEQ ID NO: 105275 - DNA, 22 bp, Artificial Sequence
  Synthetic oligonucleotide; TTT chr11 5350590 5350611 5350607 5350612 +
taaaaaaaaaattctccttgat

SEQ ID NO: 105276 - DNA, 22 bp, Artificial Sequence
  Synthetic oligonucleotide; TTT chr11 5350591 5350612 5350608 5350613 +
aaaaaaaaaattctccttgatc

SEQ ID NO: 105277 - DNA, 22 bp, Artificial Sequence
  Synthetic oligonucleotide; TTA chr11 5350592 5350613 5350609 5350614 +
aaaaaaaaattctccttgatct

SEQ ID NO: 105278 - DNA, 22 bp, Artificial Sequence
  Synthetic oligonucleotide; TTC chr11 5350604 5350625 5350621 5350626 +
tccttgatcttgcctaaattac

SEQ ID NO: 105279 - DNA, 22 bp, Artificial Sequence
  Synthetic oligonucleotide; CTC chr11 5350606 5350627 5350623 5350628 +
cttgatcttgcctaaattacca

SEQ ID NO: 105280 - DNA, 22 bp, Artificial Sequence
  Synthetic oligonucleotide; CTT chr11 5350609 5350630 5350626 5350631 +
gatcttgcctaaattaccaatt

SEQ ID NO: 105281 - DNA, 22 bp, Artificial Sequence
  Synthetic oligonucleotide; TTG chr11 5350610 5350631 5350627 5350632 +
atcttgcctaaattaccaattt

SEQ ID NO: 105282 - DNA, 22 bp, Artificial Sequence
  Synthetic oligonucleotide; CTT chr11 5350615 5350636 5350632 5350637 +
gcctaaattaccaatttttatt

SEQ ID NO: 105283 - DNA, 22 bp, Artificial Sequence
  Synthetic oligonucleotide; TTG chr11 5350616 5350637 5350633 5350638 +
cctaaattaccaatttttattt

SEQ ID NO: 105284 - DNA, 22 bp, Artificial Sequence
  Synthetic oligonucleotide; CTA chr11 5350620 5350641 5350637 5350642 +
aattaccaatttttatttttgc

SEQ ID NO: 105285 - DNA, 22 bp, Artificial Sequence
  Synthetic oligonucleotide; TTA chr11 5350625 5350646 5350642 5350647 +
ccaatttttatttttgcatcac

SEQ ID NO: 105286 - DNA, 22 bp, Artificial Sequence
  Synthetic oligonucleotide; TTT chr11 5350632 5350653 5350649 5350654 +
ttatttttgcatcaccaagtag

SEQ ID NO: 105287 - DNA, 22 bp, Artificial Sequence
  Synthetic oligonucleotide; TTT chr11 5350633 5350654 5350650 5350655 +
tatttttgcatcaccaagtagg

SEQ ID NO: 105288 - DNA, 22 bp, Artificial Sequence
  Synthetic oligonucleotide; TTT chr11 5350634 5350655 5350651 5350656 +
atttttgcatcaccaagtaggt

SEQ ID NO: 105289 - DNA, 22 bp, Artificial Sequence
  Synthetic oligonucleotide; TTA chr11 5350635 5350656 5350652 5350657 +
tttttgcatcaccaagtaggtg

SEQ ID NO: 105290 - DNA, 22 bp, Artificial Sequence
  Synthetic oligonucleotide; TTT chr11 5350638 5350659 5350655 5350660 +
ttgcatcaccaagtaggtgata

SEQ ID NO: 105291 - DNA, 22 bp, Artificial Sequence
  Synthetic oligonucleotide; TTT chr11 5350639 5350660 5350656 5350661 +
tgcatcaccaagtaggtgatat

SEQ ID NO: 105292 - DNA, 22 bp, Artificial Sequence
  Synthetic oligonucleotide; TTT chr11 5350640 5350661 5350657 5350662 +
gcatcaccaagtaggtgatatg

SEQ ID NO: 105293 - DNA, 22 bp, Artificial Sequence
  Synthetic oligonucleotide; TTG chr11 5350641 5350662 5350658 5350663 +
catcaccaagtaggtgatatgc

SEQ ID NO: 105294 - DNA, 22 bp, Artificial Sequence
  Synthetic oligonucleotide; TTT chr11 5350674 5350695 5350691 5350696 +
ggtgctattatcaattagtgcc

SEQ ID NO: 105295 - DNA, 22 bp, Artificial Sequence
  Synthetic oligonucleotide; TTG chr11 5350675 5350696 5350692 5350697 +
gtgctattatcaattagtgcct

SEQ ID NO: 105296 - DNA, 22 bp, Artificial Sequence
  Synthetic oligonucleotide; CTA chr11 5350681 5350702 5350698 5350703 +
ttatcaattagtgccttcaaaa

SEQ ID NO: 105297 - DNA, 22 bp, Artificial Sequence
  Synthetic oligonucleotide; TTA chr11 5350684 5350705 5350701 5350706 +
tcaattagtgccttcaaaagct

SEQ ID NO: 105298 - DNA, 22 bp, Artificial Sequence
  Synthetic oligonucleotide; TTA chr11 5350691 5350712 5350708 5350713 +
gtgccttcaaaagcttatcatc

SEQ ID NO: 105299 - DNA, 22 bp, Artificial Sequence
  Synthetic oligonucleotide; CTT chr11 5350698 5350719 5350715 5350720 +
caaaagcttatcatcaaatcca

SEQ ID NO: 105300 - DNA, 22 bp, Artificial Sequence
  Synthetic oligonucleotide; TTC chr11 5350699 5350720 5350716 5350721 +
aaaagcttatcatcaaatccac

SEQ ID NO: 105301 - DNA, 22 bp, Artificial Sequence
  Synthetic oligonucleotide; CTT chr11 5350707 5350728 5350724 5350729 +
atcatcaaatccacattttact

SEQ ID NO: 105302 - DNA, 22 bp, Artificial Sequence
  Synthetic oligonucleotide; TTA chr11 5350708 5350729 5350725 5350730 +
tcatcaaatccacattttactg

SEQ ID NO: 105303 - DNA, 22 bp, Artificial Sequence
  Synthetic oligonucleotide; TTT chr11 5350725 5350746 5350742 5350747 +
tactgtttattcttcaatttat

SEQ ID NO: 105304 - DNA, 22 bp, Artificial Sequence
  Synthetic oligonucleotide; TTT chr11 5350726 5350747 5350743 5350748 +
actgtttattcttcaatttata

SEQ ID NO: 105305 - DNA, 22 bp, Artificial Sequence
  Synthetic oligonucleotide; TTA chr11 5350727 5350748 5350744 5350749 +
ctgtttattcttcaatttatat

SEQ ID NO: 105306 - DNA, 22 bp, Artificial Sequence
  Synthetic oligonucleotide; CTG chr11 5350730 5350751 5350747 5350752 +
tttattcttcaatttatattat

SEQ ID NO: 105307 - DNA, 22 bp, Artificial Sequence
  Synthetic oligonucleotide; TTT chr11 5350733 5350754 5350750 5350755 +
attcttcaatttatattatgaa

SEQ ID NO: 105308 - DNA, 22 bp, Artificial Sequence
  Synthetic oligonucleotide; TTA chr11 5350734 5350755 5350751 5350756 +
ttcttcaatttatattatgaaa

SEQ ID NO: 105309 - DNA, 22 bp, Artificial Sequence
  Synthetic oligonucleotide; TTC chr11 5350737 5350758 5350754 5350759 +
ttcaatttatattatgaaaatt

SEQ ID NO: 105310 - DNA, 22 bp, Artificial Sequence
  Synthetic oligonucleotide; CTT chr11 5350739 5350760 5350756 5350761 +
caatttatattatgaaaatttg

SEQ ID NO: 105311 - DNA, 22 bp, Artificial Sequence
  Synthetic oligonucleotide; TTC chr11 5350740 5350761 5350757 5350762 +
aatttatattatgaaaatttga

SEQ ID NO: 105312 - DNA, 22 bp, Artificial Sequence
  Synthetic oligonucleotide; TTT chr11 5350745 5350766 5350762 5350767 +
atattatgaaaatttgaattct

SEQ ID NO: 105313 - DNA, 22 bp, Artificial Sequence
  Synthetic oligonucleotide; TTA chr11 5350746 5350767 5350763 5350768 +
tattatgaaaatttgaattctt

SEQ ID NO: 105314 - DNA, 22 bp, Artificial Sequence
  Synthetic oligonucleotide; TTA chr11 5350751 5350772 5350768 5350773 +
tgaaaatttgaattctttgaag

SEQ ID NO: 105315 - DNA, 22 bp, Artificial Sequence
  Synthetic oligonucleotide; TTT chr11 5350760 5350781 5350777 5350782 +
gaattctttgaagcagtgtatc

SEQ ID NO: 105316 - DNA, 22 bp, Artificial Sequence
  Synthetic oligonucleotide; TTG chr11 5350761 5350782 5350778 5350783 +
aattctttgaagcagtgtatca

SEQ ID NO: 105317 - DNA, 22 bp, Artificial Sequence
  Synthetic oligonucleotide; TTC chr11 5350766 5350787 5350783 5350788 +
tttgaagcagtgtatcaataac

SEQ ID NO: 105318 - DNA, 22 bp, Artificial Sequence
  Synthetic oligonucleotide; CTT chr11 5350768 5350789 5350785 5350790 +
tgaagcagtgtatcaataacta

SEQ ID NO: 105319 - DNA, 22 bp, Artificial Sequence
  Synthetic oligonucleotide; TTT chr11 5350769 5350790 5350786 5350791 +
gaagcagtgtatcaataactag

SEQ ID NO: 105320 - DNA, 22 bp, Artificial Sequence
  Synthetic oligonucleotide; TTG chr11 5350770 5350791 5350787 5350792 +
aagcagtgtatcaataactagg

SEQ ID NO: 105321 - DNA, 22 bp, Artificial Sequence
  Synthetic oligonucleotide; CTA chr11 5350790 5350811 5350807 5350812 +
gggttataaagctgggcaactt

SEQ ID NO: 105322 - DNA, 22 bp, Artificial Sequence
  Synthetic oligonucleotide; TTA chr11 5350796 5350817 5350813 5350818 +
taaagctgggcaacttagagtt

SEQ ID NO: 105323 - DNA, 22 bp, Artificial Sequence
  Synthetic oligonucleotide; CTG chr11 5350804 5350825 5350821 5350826 +
ggcaacttagagttctatgtgc

SEQ ID NO: 105324 - DNA, 22 bp, Artificial Sequence
  Synthetic oligonucleotide; CTT chr11 5350812 5350833 5350829 5350834 +
agagttctatgtgctttggaaa

SEQ ID NO: 105325 - DNA, 22 bp, Artificial Sequence
  Synthetic oligonucleotide; TTA chr11 5350813 5350834 5350830 5350835 +
gagttctatgtgctttggaaac

SEQ ID NO: 105326 - DNA, 22 bp, Artificial Sequence
  Synthetic oligonucleotide; TTC chr11 5350819 5350840 5350836 5350841 +
tatgtgctttggaaacacacac

SEQ ID NO: 105327 - DNA, 22 bp, Artificial Sequence
  Synthetic oligonucleotide; CTA chr11 5350821 5350842 5350838 5350843 +
tgtgctttggaaacacacacag

SEQ ID NO: 105328 - DNA, 22 bp, Artificial Sequence
  Synthetic oligonucleotide; CTT chr11 5350828 5350849 5350845 5350850 +
tggaaacacacacaggtaagtc

SEQ ID NO: 105329 - DNA, 22 bp, Artificial Sequence
  Synthetic oligonucleotide; TTT chr11 5350829 5350850 5350846 5350851 +
ggaaacacacacaggtaagtca

SEQ ID NO: 105330 - DNA, 22 bp, Artificial Sequence
  Synthetic oligonucleotide; TTG chr11 5350830 5350851 5350847 5350852 +
gaaacacacacaggtaagtcac

SEQ ID NO: 105331 - DNA, 22 bp, Artificial Sequence
  Synthetic oligonucleotide; CTC chr11 5350854 5350875 5350871 5350876 +
ttacgtcattttctaactaccc

SEQ ID NO: 105332 - DNA, 22 bp, Artificial Sequence
  Synthetic oligonucleotide; CTT chr11 5350856 5350877 5350873 5350878 +
acgtcattttctaactacccaa

SEQ ID NO: 105333 - DNA, 22 bp, Artificial Sequence
  Synthetic oligonucleotide; TTA chr11 5350857 5350878 5350874 5350879 +
cgtcattttctaactacccaaa

SEQ ID NO: 105334 - DNA, 22 bp, Artificial Sequence
  Synthetic oligonucleotide; TTT chr11 5350865 5350886 5350882 5350887 +
tctaactacccaaaagtctctg

SEQ ID NO: 105335 - DNA, 22 bp, Artificial Sequence
  Synthetic oligonucleotide; TTT chr11 5350866 5350887 5350883 5350888 +
ctaactacccaaaagtctctgg

SEQ ID NO: 105336 - DNA, 22 bp, Artificial Sequence
  Synthetic oligonucleotide; TTC chr11 5350867 5350888 5350884 5350889 +
taactacccaaaagtctctgga

SEQ ID NO: 105337 - DNA, 22 bp, Artificial Sequence
  Synthetic oligonucleotide; CTA chr11 5350869 5350890 5350886 5350891 +
actacccaaaagtctctggagc

SEQ ID NO: 105338 - DNA, 22 bp, Artificial Sequence
  Synthetic oligonucleotide; CTA chr11 5350873 5350894 5350890 5350895 +
cccaaaagtctctggagcttca

SEQ ID NO: 105339 - DNA, 22 bp, Artificial Sequence
  Synthetic oligonucleotide; CTC chr11 5350885 5350906 5350902 5350907 +
tggagcttcatcaattgaattt

SEQ ID NO: 105340 - DNA, 22 bp, Artificial Sequence
  Synthetic oligonucleotide; CTG chr11 5350887 5350908 5350904 5350909 +
gagcttcatcaattgaattttc

SEQ ID NO: 105341 - DNA, 22 bp, Artificial Sequence
  Synthetic oligonucleotide; CTT chr11 5350893 5350914 5350910 5350915 +
catcaattgaattttccctcca

SEQ ID NO: 105342 - DNA, 22 bp, Artificial Sequence
  Synthetic oligonucleotide; TTC chr11 5350894 5350915 5350911 5350916 +
atcaattgaattttccctccag

SEQ ID NO: 105343 - DNA, 22 bp, Artificial Sequence
  Synthetic oligonucleotide; TTG chr11 5350902 5350923 5350919 5350924 +
aattttccctccaggaatattg

SEQ ID NO: 105344 - DNA, 22 bp, Artificial Sequence
  Synthetic oligonucleotide; TTT chr11 5350907 5350928 5350924 5350929 +
tccctccaggaatattgaagaa

SEQ ID NO: 105345 - DNA, 22 bp, Artificial Sequence
  Synthetic oligonucleotide; TTT chr11 5350908 5350929 5350925 5350930 +
ccctccaggaatattgaagaaa

SEQ ID NO: 105346 - DNA, 22 bp, Artificial Sequence
  Synthetic oligonucleotide; TTC chr11 5350909 5350930 5350926 5350931 +
cctccaggaatattgaagaaaa

SEQ ID NO: 105347 - DNA, 22 bp, Artificial Sequence
  Synthetic oligonucleotide; CTC chr11 5350913 5350934 5350930 5350935 +
caggaatattgaagaaaagtca

SEQ ID NO: 105348 - DNA, 22 bp, Artificial Sequence
  Synthetic oligonucleotide; TTG chr11 5350924 5350945 5350941 5350946 +
aagaaaagtcaatctctgaaat

SEQ ID NO: 105349 - DNA, 22 bp, Artificial Sequence
  Synthetic oligonucleotide; CTC chr11 5350940 5350961 5350957 5350962 +
tgaaatttactattttattgta

SEQ ID NO: 105350 - DNA, 22 bp, Artificial Sequence
  Synthetic oligonucleotide; CTG chr11 5350942 5350963 5350959 5350964 +
aaatttactattttattgtatt

SEQ ID NO: 105351 - DNA, 22 bp, Artificial Sequence
  Synthetic oligonucleotide; TTT chr11 5350948 5350969 5350965 5350970 +
actattttattgtatttgctca

SEQ ID NO: 105352 - DNA, 22 bp, Artificial Sequence
  Synthetic oligonucleotide; TTA chr11 5350949 5350970 5350966 5350971 +
ctattttattgtatttgctcat

SEQ ID NO: 105353 - DNA, 22 bp, Artificial Sequence
  Synthetic oligonucleotide; CTA chr11 5350952 5350973 5350969 5350974 +
ttttattgtatttgctcatata

SEQ ID NO: 105354 - DNA, 22 bp, Artificial Sequence
  Synthetic oligonucleotide; TTT chr11 5350955 5350976 5350972 5350977 +
tattgtatttgctcatatattt

SEQ ID NO: 105355 - DNA, 22 bp, Artificial Sequence
  Synthetic oligonucleotide; TTT chr11 5350956 5350977 5350973 5350978 +
attgtatttgctcatatatttc

SEQ ID NO: 105356 - DNA, 22 bp, Artificial Sequence
  Synthetic oligonucleotide; TTA chr11 5350957 5350978 5350974 5350979 +
ttgtatttgctcatatatttct

SEQ ID NO: 105357 - DNA, 22 bp, Artificial Sequence
  Synthetic oligonucleotide; TTG chr11 5350960 5350981 5350977 5350982 +
tatttgctcatatatttcttac

SEQ ID NO: 105358 - DNA, 22 bp, Artificial Sequence
  Synthetic oligonucleotide; TTT chr11 5350965 5350986 5350982 5350987 +
gctcatatatttcttacttgtg

SEQ ID NO: 105359 - DNA, 22 bp, Artificial Sequence
  Synthetic oligonucleotide; TTG chr11 5350966 5350987 5350983 5350988 +
ctcatatatttcttacttgtgt

SEQ ID NO: 105360 - DNA, 22 bp, Artificial Sequence
  Synthetic oligonucleotide; CTC chr11 5350969 5350990 5350986 5350991 +
atatatttcttacttgtgtatt

SEQ ID NO: 105361 - DNA, 22 bp, Artificial Sequence
  Synthetic oligonucleotide; TTT chr11 5350977 5350998 5350994 5350999 +
cttacttgtgtatttgtttttc

SEQ ID NO: 105362 - DNA, 22 bp, Artificial Sequence
  Synthetic oligonucleotide; TTC chr11 5350978 5350999 5350995 5351000 +
ttacttgtgtatttgtttttcc

SEQ ID NO: 105363 - DNA, 22 bp, Artificial Sequence
  Synthetic oligonucleotide; CTT chr11 5350980 5351001 5350997 5351002 +
acttgtgtatttgtttttccat

SEQ ID NO: 105364 - DNA, 22 bp, Artificial Sequence
  Synthetic oligonucleotide; TTA chr11 5350981 5351002 5350998 5351003 +
cttgtgtatttgtttttccata

SEQ ID NO: 105365 - DNA, 22 bp, Artificial Sequence
  Synthetic oligonucleotide; CTT chr11 5350984 5351005 5351001 5351006 +
gtgtatttgtttttccatataa

SEQ ID NO: 105366 - DNA, 22 bp, Artificial Sequence
  Synthetic oligonucleotide; TTG chr11 5350985 5351006 5351002 5351007 +
tgtatttgtttttccatataat

SEQ ID NO: 105367 - DNA, 22 bp, Artificial Sequence
  Synthetic oligonucleotide; TTT chr11 5350992 5351013 5351009 5351014 +
gtttttccatataatctttata

SEQ ID NO: 105368 - DNA, 22 bp, Artificial Sequence
  Synthetic oligonucleotide; TTG chr11 5350993 5351014 5351010 5351015 +
tttttccatataatctttatat

SEQ ID NO: 105369 - DNA, 22 bp, Artificial Sequence
  Synthetic oligonucleotide; TTT chr11 5350996 5351017 5351013 5351018 +
ttccatataatctttatatctg

SEQ ID NO: 105370 - DNA, 22 bp, Artificial Sequence
  Synthetic oligonucleotide; TTT chr11 5350997 5351018 5351014 5351019 +
tccatataatctttatatctgc

SEQ ID NO: 105371 - DNA, 22 bp, Artificial Sequence
  Synthetic oligonucleotide; TTT chr11 5350998 5351019 5351015 5351020 +
ccatataatctttatatctgct

SEQ ID NO: 105372 - DNA, 22 bp, Artificial Sequence
  Synthetic oligonucleotide; TTC chr11 5350999 5351020 5351016 5351021 +
catataatctttatatctgctt

SEQ ID NO: 105373 - DNA, 22 bp, Artificial Sequence
  Synthetic oligonucleotide; CTT chr11 5351010 5351031 5351027 5351032 +
tatatctgcttttccaatagtg

SEQ ID NO: 105374 - DNA, 22 bp, Artificial Sequence
  Synthetic oligonucleotide; TTT chr11 5351011 5351032 5351028 5351033 +
atatctgcttttccaatagtgc

SEQ ID NO: 105375 - DNA, 22 bp, Artificial Sequence
  Synthetic oligonucleotide; TTA chr11 5351012 5351033 5351029 5351034 +
tatctgcttttccaatagtgct

SEQ ID NO: 105376 - DNA, 22 bp, Artificial Sequence
  Synthetic oligonucleotide; CTG chr11 5351018 5351039 5351035 5351040 +
cttttccaatagtgcttagaac

SEQ ID NO: 105377 - DNA, 22 bp, Artificial Sequence
  Synthetic oligonucleotide; CTT chr11 5351021 5351042 5351038 5351043 +
ttccaatagtgcttagaaccat

SEQ ID NO: 105378 - DNA, 22 bp, Artificial Sequence
  Synthetic oligonucleotide; TTT chr11 5351022 5351043 5351039 5351044 +
tccaatagtgcttagaaccatt

SEQ ID NO: 105379 - DNA, 22 bp, Artificial Sequence
  Synthetic oligonucleotide; TTT chr11 5351023 5351044 5351040 5351045 +
ccaatagtgcttagaaccattt

SEQ ID NO: 105380 - DNA, 22 bp, Artificial Sequence
  Synthetic oligonucleotide; TTC chr11 5351024 5351045 5351041 5351046 +
caatagtgcttagaaccatttt

SEQ ID NO: 105381 - DNA, 22 bp, Artificial Sequence
  Synthetic oligonucleotide; CTT chr11 5351035 5351056 5351052 5351057 +
agaaccatttttctactgatct

SEQ ID NO: 105382 - DNA, 22 bp, Artificial Sequence
  Synthetic oligonucleotide; TTA chr11 5351036 5351057 5351053 5351058 +
gaaccatttttctactgatctt

SEQ ID NO: 105383 - DNA, 22 bp, Artificial Sequence
  Synthetic oligonucleotide; TTT chr11 5351045 5351066 5351062 5351067 +
ttctactgatcttttaggtctc

SEQ ID NO: 105384 - DNA, 22 bp, Artificial Sequence
  Synthetic oligonucleotide; TTT chr11 5351046 5351067 5351063 5351068 +
tctactgatcttttaggtctca

SEQ ID NO: 105385 - DNA, 22 bp, Artificial Sequence
  Synthetic oligonucleotide; TTT chr11 5351047 5351068 5351064 5351069 +
ctactgatcttttaggtctcac

SEQ ID NO: 105386 - DNA, 22 bp, Artificial Sequence
  Synthetic oligonucleotide; TTC chr11 5351048 5351069 5351065 5351070 +
tactgatcttttaggtctcaca

SEQ ID NO: 105387 - DNA, 22 bp, Artificial Sequence
  Synthetic oligonucleotide; CTA chr11 5351050 5351071 5351067 5351072 +
ctgatcttttaggtctcacata

SEQ ID NO: 105388 - DNA, 22 bp, Artificial Sequence
  Synthetic oligonucleotide; CTG chr11 5351053 5351074 5351070 5351075 +
atcttttaggtctcacatagcc

SEQ ID NO: 105389 - DNA, 22 bp, Artificial Sequence
  Synthetic oligonucleotide; CTT chr11 5351058 5351079 5351075 5351080 +
ttaggtctcacatagcctggga

SEQ ID NO: 105390 - DNA, 22 bp, Artificial Sequence
  Synthetic oligonucleotide; TTT chr11 5351059 5351080 5351076 5351081 +
taggtctcacatagcctgggaa

SEQ ID NO: 105391 - DNA, 22 bp, Artificial Sequence
  Synthetic oligonucleotide; TTT chr11 5351060 5351081 5351077 5351082 +
aggtctcacatagcctgggaaa

SEQ ID NO: 105392 - DNA, 22 bp, Artificial Sequence
  Synthetic oligonucleotide; TTA chr11 5351061 5351082 5351078 5351083 +
ggtctcacatagcctgggaaac

SEQ ID NO: 105393 - DNA, 22 bp, Artificial Sequence
  Synthetic oligonucleotide; CTC chr11 5351067 5351088 5351084 5351089 +
acatagcctgggaaacctttac

SEQ ID NO: 105394 - DNA, 22 bp, Artificial Sequence
  Synthetic oligonucleotide; CTG chr11 5351077 5351098 5351094 5351099 +
ggaaacctttacatccacccta

SEQ ID NO: 105395 - DNA, 22 bp, Artificial Sequence
  Synthetic oligonucleotide; CTT chr11 5351086 5351107 5351103 5351108 +
tacatccaccctataataccac

SEQ ID NO: 105396 - DNA, 22 bp, Artificial Sequence
  Synthetic oligonucleotide; TTT chr11 5351087 5351108 5351104 5351109 +
acatccaccctataataccacc

SEQ ID NO: 105397 - DNA, 22 bp, Artificial Sequence
  Synthetic oligonucleotide; TTA chr11 5351088 5351109 5351105 5351110 +
catccaccctataataccacca

SEQ ID NO: 105398 - DNA, 22 bp, Artificial Sequence
  Synthetic oligonucleotide; CTA chr11 5351099 5351120 5351116 5351121 +
taataccaccagtcaggatgaa

SEQ ID NO: 105399 - DNA, 22 bp, Artificial Sequence
  Synthetic oligonucleotide; CTA chr11 5351143 5351164 5351160 5351165 +
taagtttcaggccattacagca

SEQ ID NO: 105400 - DNA, 22 bp, Artificial Sequence
  Synthetic oligonucleotide; TTT chr11 5351150 5351171 5351167 5351172 +
caggccattacagcactattca

SEQ ID NO: 105401 - DNA, 22 bp, Artificial Sequence
  Synthetic oligonucleotide; TTC chr11 5351151 5351172 5351168 5351173 +
aggccattacagcactattcaa

SEQ ID NO: 105402 - DNA, 22 bp, Artificial Sequence
  Synthetic oligonucleotide; TTA chr11 5351160 5351181 5351177 5351182 +
cagcactattcaaatatagtga

SEQ ID NO: 105403 - DNA, 22 bp, Artificial Sequence
  Synthetic oligonucleotide; CTA chr11 5351168 5351189 5351185 5351190 +
ttcaaatatagtgatttcttct

SEQ ID NO: 105404 - DNA, 22 bp, Artificial Sequence
  Synthetic oligonucleotide; TTC chr11 5351171 5351192 5351188 5351193 +
aaatatagtgatttcttctttc

SEQ ID NO: 105405 - DNA, 22 bp, Artificial Sequence
  Synthetic oligonucleotide; TTT chr11 5351185 5351206 5351202 5351207 +
cttctttcattttgtttttatt

SEQ ID NO: 105406 - DNA, 22 bp, Artificial Sequence
  Synthetic oligonucleotide; TTC chr11 5351186 5351207 5351203 5351208 +
ttctttcattttgtttttattt

SEQ ID NO: 105407 - DNA, 22 bp, Artificial Sequence
  Synthetic oligonucleotide; CTT chr11 5351188 5351209 5351205 5351210 +
ctttcattttgtttttattttc

SEQ ID NO: 105408 - DNA, 22 bp, Artificial Sequence
  Synthetic oligonucleotide; TTC chr11 5351189 5351210 5351206 5351211 +
tttcattttgtttttattttct

SEQ ID NO: 105409 - DNA, 22 bp, Artificial Sequence
  Synthetic oligonucleotide; CTT chr11 5351191 5351212 5351208 5351213 +
tcattttgtttttattttctgg

SEQ ID NO: 105410 - DNA, 22 bp, Artificial Sequence
  Synthetic oligonucleotide; TTT chr11 5351192 5351213 5351209 5351214 +
cattttgtttttattttctggg

SEQ ID NO: 105411 - DNA, 22 bp, Artificial Sequence
  Synthetic oligonucleotide; TTC chr11 5351193 5351214 5351210 5351215 +
attttgtttttattttctgggt

SEQ ID NO: 105412 - DNA, 22 bp, Artificial Sequence
  Synthetic oligonucleotide; TTT chr11 5351197 5351218 5351214 5351219 +
tgtttttattttctgggttata

SEQ ID NO: 105413 - DNA, 22 bp, Artificial Sequence
  Synthetic oligonucleotide; TTT chr11 5351198 5351219 5351215 5351220 +
gtttttattttctgggttatat

SEQ ID NO: 105414 - DNA, 22 bp, Artificial Sequence
  Synthetic oligonucleotide; TTG chr11 5351199 5351220 5351216 5351221 +
tttttattttctgggttatatg

SEQ ID NO: 105415 - DNA, 22 bp, Artificial Sequence
  Synthetic oligonucleotide; TTT chr11 5351202 5351223 5351219 5351224 +
ttattttctgggttatatgatt

SEQ ID NO: 105416 - DNA, 22 bp, Artificial Sequence
  Synthetic oligonucleotide; TTT chr11 5351203 5351224 5351220 5351225 +
tattttctgggttatatgattt

SEQ ID NO: 105417 - DNA, 22 bp, Artificial Sequence
  Synthetic oligonucleotide; TTT chr11 5351204 5351225 5351221 5351226 +
attttctgggttatatgattta

SEQ ID NO: 105418 - DNA, 22 bp, Artificial Sequence
  Synthetic oligonucleotide; TTA chr11 5351205 5351226 5351222 5351227 +
ttttctgggttatatgatttac

SEQ ID NO: 105419 - DNA, 22 bp, Artificial Sequence
  Synthetic oligonucleotide; TTT chr11 5351208 5351229 5351225 5351230 +
tctgggttatatgatttacaat

SEQ ID NO: 105420 - DNA, 22 bp, Artificial Sequence
  Synthetic oligonucleotide; TTT chr11 5351209 5351230 5351226 5351231 +
ctgggttatatgatttacaatg

SEQ ID NO: 105421 - DNA, 22 bp, Artificial Sequence
  Synthetic oligonucleotide; TTC chr11 5351210 5351231 5351227 5351232 +
tgggttatatgatttacaatga

SEQ ID NO: 105422 - DNA, 22 bp, Artificial Sequence
  Synthetic oligonucleotide; CTG chr11 5351212 5351233 5351229 5351234 +
ggttatatgatttacaatgaat

SEQ ID NO: 105423 - DNA, 22 bp, Artificial Sequence
  Synthetic oligonucleotide; TTA chr11 5351217 5351238 5351234 5351239 +
tatgatttacaatgaattcaac

SEQ ID NO: 105424 - DNA, 22 bp, Artificial Sequence
  Synthetic oligonucleotide; TTT chr11 5351225 5351246 5351242 5351247 +
acaatgaattcaacaatgttta

SEQ ID NO: 105425 - DNA, 22 bp, Artificial Sequence
  Synthetic oligonucleotide; TTA chr11 5351226 5351247 5351243 5351248 +
caatgaattcaacaatgtttat

SEQ ID NO: 105426 - DNA, 22 bp, Artificial Sequence
  Synthetic oligonucleotide; TTC chr11 5351236 5351257 5351253 5351258 +
aacaatgtttattctgcatgaa

SEQ ID NO: 105427 - DNA, 22 bp, Artificial Sequence
  Synthetic oligonucleotide; TTT chr11 5351246 5351267 5351263 5351268 +
attctgcatgaatagctgtatc

SEQ ID NO: 105428 - DNA, 22 bp, Artificial Sequence
  Synthetic oligonucleotide; TTA chr11 5351247 5351268 5351264 5351269 +
ttctgcatgaatagctgtatcc

SEQ ID NO: 105429 - DNA, 22 bp, Artificial Sequence
  Synthetic oligonucleotide; TTC chr11 5351250 5351271 5351267 5351272 +
tgcatgaatagctgtatcccca

SEQ ID NO: 105430 - DNA, 22 bp, Artificial Sequence
  Synthetic oligonucleotide; CTG chr11 5351252 5351273 5351269 5351274 +
catgaatagctgtatccccaac

SEQ ID NO: 105431 - DNA, 22 bp, Artificial Sequence
  Synthetic oligonucleotide; CTG chr11 5351264 5351285 5351281 5351286 +
tatccccaacgtagtatccaat

SEQ ID NO: 105432 - DNA, 22 bp, Artificial Sequence
  Synthetic oligonucleotide; CTT chr11 5351292 5351313 5351309 5351314 +
acatagagtaaaccctaaataa

SEQ ID NO: 105433 - DNA, 22 bp, Artificial Sequence
  Synthetic oligonucleotide; TTA chr11 5351293 5351314 5351310 5351315 +
catagagtaaaccctaaataat

SEQ ID NO: 105434 - DNA, 22 bp, Artificial Sequence
  Synthetic oligonucleotide; CTA chr11 5351309 5351330 5351326 5351331 +
aataatatcttctttatacatt

SEQ ID NO: 105435 - DNA, 22 bp, Artificial Sequence
  Synthetic oligonucleotide; CTT chr11 5351320 5351341 5351337 5351342 +
ctttatacattctattttccca

SEQ ID NO: 105436 - DNA, 22 bp, Artificial Sequence
  Synthetic oligonucleotide; TTC chr11 5351321 5351342 5351338 5351343 +
tttatacattctattttcccat

SEQ ID NO: 105437 - DNA, 22 bp, Artificial Sequence
  Synthetic oligonucleotide; CTT chr11 5351323 5351344 5351340 5351345 +
tatacattctattttcccatac

SEQ ID NO: 105438 - DNA, 22 bp, Artificial Sequence
  Synthetic oligonucleotide; TTT chr11 5351324 5351345 5351341 5351346 +
atacattctattttcccatacc

SEQ ID NO: 105439 - DNA, 22 bp, Artificial Sequence
  Synthetic oligonucleotide; TTA chr11 5351325 5351346 5351342 5351347 +
tacattctattttcccatacct

SEQ ID NO: 105440 - DNA, 22 bp, Artificial Sequence
  Synthetic oligonucleotide; TTC chr11 5351332 5351353 5351349 5351354 +
tattttcccatacctaggatct

SEQ ID NO: 105441 - DNA, 22 bp, Artificial Sequence
  Synthetic oligonucleotide; CTA chr11 5351334 5351355 5351351 5351356 +
ttttcccatacctaggatctcc

SEQ ID NO: 105442 - DNA, 22 bp, Artificial Sequence
  Synthetic oligonucleotide; TTT chr11 5351337 5351358 5351354 5351359 +
tcccatacctaggatctcccag

SEQ ID NO: 105443 - DNA, 22 bp, Artificial Sequence
  Synthetic oligonucleotide; TTT chr11 5351338 5351359 5351355 5351360 +
cccatacctaggatctcccagg

SEQ ID NO: 105444 - DNA, 22 bp, Artificial Sequence
  Synthetic oligonucleotide; TTC chr11 5351339 5351360 5351356 5351361 +
ccatacctaggatctcccagga

SEQ ID NO: 105445 - DNA, 22 bp, Artificial Sequence
  Synthetic oligonucleotide; CTA chr11 5351348 5351369 5351365 5351370 +
ggatctcccaggaatgactaaa

SEQ ID NO: 105446 - DNA, 22 bp, Artificial Sequence
  Synthetic oligonucleotide; CTC chr11 5351355 5351376 5351372 5351377 +
ccaggaatgactaaattatcat

SEQ ID NO: 105447 - DNA, 22 bp, Artificial Sequence
  Synthetic oligonucleotide; CTA chr11 5351368 5351389 5351385 5351390 +
aattatcatccttgctgtcact

SEQ ID NO: 105448 - DNA, 22 bp, Artificial Sequence
  Synthetic oligonucleotide; TTA chr11 5351373 5351394 5351390 5351395 +
tcatccttgctgtcactgaaag

SEQ ID NO: 105449 - DNA, 22 bp, Artificial Sequence
  Synthetic oligonucleotide; CTT chr11 5351381 5351402 5351398 5351403 +
gctgtcactgaaagtcaggact

SEQ ID NO: 105450 - DNA, 22 bp, Artificial Sequence
  Synthetic oligonucleotide; TTG chr11 5351382 5351403 5351399 5351404 +
ctgtcactgaaagtcaggactg

SEQ ID NO: 105451 - DNA, 22 bp, Artificial Sequence
  Synthetic oligonucleotide; CTG chr11 5351385 5351406 5351402 5351407 +
tcactgaaagtcaggactggtg

SEQ ID NO: 105452 - DNA, 22 bp, Artificial Sequence
  Synthetic oligonucleotide; CTG chr11 5351391 5351412 5351408 5351413 +
aaagtcaggactggtgaacatc

SEQ ID NO: 105453 - DNA, 22 bp, Artificial Sequence
  Synthetic oligonucleotide; CTG chr11 5351404 5351425 5351421 5351426 +
gtgaacatcttatgaacaggta

SEQ ID NO: 105454 - DNA, 22 bp, Artificial Sequence
  Synthetic oligonucleotide; CTT chr11 5351415 5351436 5351432 5351437 +
atgaacaggtagaattctcaag

SEQ ID NO: 105455 - DNA, 22 bp, Artificial Sequence
  Synthetic oligonucleotide; TTA chr11 5351416 5351437 5351433 5351438 +
tgaacaggtagaattctcaagg

SEQ ID NO: 105456 - DNA, 22 bp, Artificial Sequence
  Synthetic oligonucleotide; TTC chr11 5351432 5351453 5351449 5351454 +
tcaaggagcaacttttatacaa

SEQ ID NO: 105457 - DNA, 22 bp, Artificial Sequence
  Synthetic oligonucleotide; CTC chr11 5351434 5351455 5351451 5351456 +
aaggagcaacttttatacaact

SEQ ID NO: 105458 - DNA, 22 bp, Artificial Sequence
  Synthetic oligonucleotide; CTT chr11 5351446 5351467 5351463 5351468 +
ttatacaactgattactattgc

SEQ ID NO: 105459 - DNA, 22 bp, Artificial Sequence
  Synthetic oligonucleotide; TTT chr11 5351447 5351468 5351464 5351469 +
tatacaactgattactattgct

SEQ ID NO: 105460 - DNA, 22 bp, Artificial Sequence
  Synthetic oligonucleotide; TTT chr11 5351448 5351469 5351465 5351470 +
atacaactgattactattgctt

SEQ ID NO: 105461 - DNA, 22 bp, Artificial Sequence
  Synthetic oligonucleotide; TTA chr11 5351449 5351470 5351466 5351471 +
tacaactgattactattgcttt

SEQ ID NO: 105462 - DNA, 22 bp, Artificial Sequence
  Synthetic oligonucleotide; CTG chr11 5351457 5351478 5351474 5351479 +
attactattgctttacctggag

SEQ ID NO: 105463 - DNA, 22 bp, Artificial Sequence
  Synthetic oligonucleotide; TTA chr11 5351461 5351482 5351478 5351483 +
ctattgctttacctggagtaaa

SEQ ID NO: 105464 - DNA, 22 bp, Artificial Sequence
  Synthetic oligonucleotide; CTA chr11 5351464 5351485 5351481 5351486 +
ttgctttacctggagtaaatat

SEQ ID NO: 105465 - DNA, 22 bp, Artificial Sequence
  Synthetic oligonucleotide; TTG chr11 5351467 5351488 5351484 5351489 +
ctttacctggagtaaatatttg

SEQ ID NO: 105466 - DNA, 22 bp, Artificial Sequence
  Synthetic oligonucleotide; CTT chr11 5351470 5351491 5351487 5351492 +
tacctggagtaaatatttgcct

SEQ ID NO: 105467 - DNA, 22 bp, Artificial Sequence
  Synthetic oligonucleotide; TTT chr11 5351471 5351492 5351488 5351493 +
acctggagtaaatatttgcctc

SEQ ID NO: 105468 - DNA, 22 bp, Artificial Sequence
  Synthetic oligonucleotide; TTA chr11 5351472 5351493 5351489 5351494 +
cctggagtaaatatttgcctct

SEQ ID NO: 105469 - DNA, 22 bp, Artificial Sequence
  Synthetic oligonucleotide; CTG chr11 5351476 5351497 5351493 5351498 +
gagtaaatatttgcctctttgc

SEQ ID NO: 105470 - DNA, 22 bp, Artificial Sequence
  Synthetic oligonucleotide; TTT chr11 5351488 5351509 5351505 5351510 +
gcctctttgcaaagctggcaat

SEQ ID NO: 105471 - DNA, 22 bp, Artificial Sequence
  Synthetic oligonucleotide; TTG chr11 5351489 5351510 5351506 5351511 +
cctctttgcaaagctggcaatg

SEQ ID NO: 105472 - DNA, 22 bp, Artificial Sequence
  Synthetic oligonucleotide; CTC chr11 5351493 5351514 5351510 5351515 +
tttgcaaagctggcaatggggc

SEQ ID NO: 105473 - DNA, 22 bp, Artificial Sequence
  Synthetic oligonucleotide; CTT chr11 5351495 5351516 5351512 5351517 +
tgcaaagctggcaatggggctc

SEQ ID NO: 105474 - DNA, 22 bp, Artificial Sequence
  Synthetic oligonucleotide; TTT chr11 5351496 5351517 5351513 5351518 +
gcaaagctggcaatggggctca

SEQ ID NO: 105475 - DNA, 22 bp, Artificial Sequence
  Synthetic oligonucleotide; TTG chr11 5351497 5351518 5351514 5351519 +
caaagctggcaatggggctcaa

SEQ ID NO: 105476 - DNA, 22 bp, Artificial Sequence
  Synthetic oligonucleotide; CTG chr11 5351505 5351526 5351522 5351527 +
gcaatggggctcaataagtctg

SEQ ID NO: 105477 - DNA, 22 bp, Artificial Sequence
  Synthetic oligonucleotide; CTC chr11 5351517 5351538 5351534 5351539 +
aataagtctgcttccaccttcc

SEQ ID NO: 105478 - DNA, 22 bp, Artificial Sequence
  Synthetic oligonucleotide; CTG chr11 5351527 5351548 5351544 5351549 +
cttccaccttccagcttactgg

SEQ ID NO: 105479 - DNA, 22 bp, Artificial Sequence
  Synthetic oligonucleotide; CTT chr11 5351530 5351551 5351547 5351552 +
ccaccttccagcttactggctt

SEQ ID NO: 105480 - DNA, 22 bp, Artificial Sequence
  Synthetic oligonucleotide; TTC chr11 5351531 5351552 5351548 5351553 +
caccttccagcttactggcttc

SEQ ID NO: 105481 - DNA, 22 bp, Artificial Sequence
  Synthetic oligonucleotide; CTT chr11 5351537 5351558 5351554 5351559 +
ccagcttactggcttcccaggc

SEQ ID NO: 105482 - DNA, 22 bp, Artificial Sequence
  Synthetic oligonucleotide; TTC chr11 5351538 5351559 5351555 5351560 +
cagcttactggcttcccaggca

SEQ ID NO: 105483 - DNA, 22 bp, Artificial Sequence
  Synthetic oligonucleotide; CTT chr11 5351544 5351565 5351561 5351566 +
actggcttcccaggcatggaga

SEQ ID NO: 105484 - DNA, 22 bp, Artificial Sequence
  Synthetic oligonucleotide; TTA chr11 5351545 5351566 5351562 5351567 +
ctggcttcccaggcatggagaa

SEQ ID NO: 105485 - DNA, 22 bp, Artificial Sequence
  Synthetic oligonucleotide; CTG chr11 5351548 5351569 5351565 5351570 +
gcttcccaggcatggagaaggc

SEQ ID NO: 105486 - DNA, 22 bp, Artificial Sequence
  Synthetic oligonucleotide; CTT chr11 5351552 5351573 5351569 5351574 +
cccaggcatggagaaggcacat

SEQ ID NO: 105487 - DNA, 22 bp, Artificial Sequence
  Synthetic oligonucleotide; TTC chr11 5351553 5351574 5351570 5351575 +
ccaggcatggagaaggcacatc

SEQ ID NO: 105488 - DNA, 22 bp, Artificial Sequence
  Synthetic oligonucleotide; CTG chr11 5351579 5351600 5351596 5351601 +
gatattcatcccattattggca

SEQ ID NO: 105489 - DNA, 22 bp, Artificial Sequence
  Synthetic oligonucleotide; TTC chr11 5351586 5351607 5351603 5351608 +
atcccattattggcagcctaca

SEQ ID NO: 105490 - DNA, 22 bp, Artificial Sequence
  Synthetic oligonucleotide; TTA chr11 5351595 5351616 5351612 5351617 +
ttggcagcctacatctccatac

SEQ ID NO: 105491 - DNA, 22 bp, Artificial Sequence
  Synthetic oligonucleotide; TTG chr11 5351598 5351619 5351615 5351620 +
gcagcctacatctccatacttc

SEQ ID NO: 105492 - DNA, 22 bp, Artificial Sequence
  Synthetic oligonucleotide; CTA chr11 5351606 5351627 5351623 5351628 +
catctccatacttcttggcaat

SEQ ID NO: 105493 - DNA, 22 bp, Artificial Sequence
  Synthetic oligonucleotide; CTC chr11 5351612 5351633 5351629 5351634 +
catacttcttggcaatggcact

SEQ ID NO: 105494 - DNA, 22 bp, Artificial Sequence
  Synthetic oligonucleotide; CTT chr11 5351619 5351640 5351636 5351641 +
cttggcaatggcactcttctct

SEQ ID NO: 105495 - DNA, 22 bp, Artificial Sequence
  Synthetic oligonucleotide; TTC chr11 5351620 5351641 5351637 5351642 +
ttggcaatggcactcttctctt

SEQ ID NO: 105496 - DNA, 22 bp, Artificial Sequence
  Synthetic oligonucleotide; CTT chr11 5351622 5351643 5351639 5351644 +
ggcaatggcactcttctctttc

SEQ ID NO: 105497 - DNA, 22 bp, Artificial Sequence
  Synthetic oligonucleotide; TTG chr11 5351623 5351644 5351640 5351645 +
gcaatggcactcttctctttct

SEQ ID NO: 105498 - DNA, 22 bp, Artificial Sequence
  Synthetic oligonucleotide; CTC chr11 5351635 5351656 5351652 5351657 +
ttctctttctcatcaggaatga

SEQ ID NO: 105499 - DNA, 22 bp, Artificial Sequence
  Synthetic oligonucleotide; CTT chr11 5351637 5351658 5351654 5351659 +
ctctttctcatcaggaatgatc

SEQ ID NO: 105500 - DNA, 22 bp, Artificial Sequence
  Synthetic oligonucleotide; TTC chr11 5351638 5351659 5351655 5351660 +
tctttctcatcaggaatgatca

SEQ ID NO: 105501 - DNA, 22 bp, Artificial Sequence
  Synthetic oligonucleotide; CTC chr11 5351640 5351661 5351657 5351662 +
tttctcatcaggaatgatcata

SEQ ID NO: 105502 - DNA, 22 bp, Artificial Sequence
  Synthetic oligonucleotide; CTT chr11 5351642 5351663 5351659 5351664 +
tctcatcaggaatgatcataac

SEQ ID NO: 105503 - DNA, 22 bp, Artificial Sequence
  Synthetic oligonucleotide; TTT chr11 5351643 5351664 5351660 5351665 +
ctcatcaggaatgatcataacc

SEQ ID NO: 105504 - DNA, 22 bp, Artificial Sequence
  Synthetic oligonucleotide; TTC chr11 5351644 5351665 5351661 5351666 +
tcatcaggaatgatcataacct

SEQ ID NO: 105505 - DNA, 22 bp, Artificial Sequence
  Synthetic oligonucleotide; CTC chr11 5351646 5351667 5351663 5351668 +
atcaggaatgatcataacctcc

SEQ ID NO: 105506 - DNA, 22 bp, Artificial Sequence
  Synthetic oligonucleotide; CTC chr11 5351667 5351688 5351684 5351689 +
catgagcccatgtactatttct

SEQ ID NO: 105507 - DNA, 22 bp, Artificial Sequence
  Synthetic oligonucleotide; CTA chr11 5351684 5351705 5351701 5351706 +
tttcttagctatgttggcagct

SEQ ID NO: 105508 - DNA, 22 bp, Artificial Sequence
  Synthetic oligonucleotide; TTT chr11 5351687 5351708 5351704 5351709 +
cttagctatgttggcagctaca

SEQ ID NO: 105509 - DNA, 22 bp, Artificial Sequence
  Synthetic oligonucleotide; TTC chr11 5351688 5351709 5351705 5351710 +
ttagctatgttggcagctacag

SEQ ID NO: 105510 - DNA, 22 bp, Artificial Sequence
  Synthetic oligonucleotide; CTT chr11 5351690 5351711 5351707 5351712 +
agctatgttggcagctacagac

SEQ ID NO: 105511 - DNA, 22 bp, Artificial Sequence
  Synthetic oligonucleotide; TTA chr11 5351691 5351712 5351708 5351713 +
gctatgttggcagctacagacc

SEQ ID NO: 105512 - DNA, 22 bp, Artificial Sequence
  Synthetic oligonucleotide; CTA chr11 5351695 5351716 5351712 5351717 +
tgttggcagctacagacctcgg

SEQ ID NO: 105513 - DNA, 22 bp, Artificial Sequence
  Synthetic oligonucleotide; TTG chr11 5351700 5351721 5351717 5351722 +
gcagctacagacctcggagtga

SEQ ID NO: 105514 - DNA, 22 bp, Artificial Sequence
  Synthetic oligonucleotide; CTA chr11 5351707 5351728 5351724 5351729 +
cagacctcggagtgacattgac

SEQ ID NO: 105515 - DNA, 22 bp, Artificial Sequence
  Synthetic oligonucleotide; CTC chr11 5351715 5351736 5351732 5351737 +
ggagtgacattgaccacaatgc

SEQ ID NO: 105516 - DNA, 22 bp, Artificial Sequence
  Synthetic oligonucleotide; TTG chr11 5351727 5351748 5351744 5351749 +
accacaatgcccacagtgctag

SEQ ID NO: 105517 - DNA, 22 bp, Artificial Sequence
  Synthetic oligonucleotide; CTA chr11 5351748 5351769 5351765 5351770 +
ggtgttctgtggttagatcaca

SEQ ID NO: 105518 - DNA, 22 bp, Artificial Sequence
  Synthetic oligonucleotide; TTC chr11 5351755 5351776 5351772 5351777 +
tgtggttagatcacagggagat

SEQ ID NO: 105519 - DNA, 22 bp, Artificial Sequence
  Synthetic oligonucleotide; CTG chr11 5351757 5351778 5351774 5351779 +
tggttagatcacagggagattg

SEQ ID NO: 105520 - DNA, 22 bp, Artificial Sequence
  Synthetic oligonucleotide; TTA chr11 5351763 5351784 5351780 5351785 +
gatcacagggagattggccatg

SEQ ID NO: 105521 - DNA, 22 bp, Artificial Sequence
  Synthetic oligonucleotide; TTG chr11 5351779 5351800 5351796 5351801 +
gccatggagcctgcttctctca

SEQ ID NO: 105522 - DNA, 22 bp, Artificial Sequence
  Synthetic oligonucleotide; CTG chr11 5351792 5351813 5351809 5351814 +
cttctctcaggcctattttatc

SEQ ID NO: 105523 - DNA, 22 bp, Artificial Sequence
  Synthetic oligonucleotide; CTT chr11 5351795 5351816 5351812 5351817 +
ctctcaggcctattttatccat

SEQ ID NO: 105524 - DNA, 22 bp, Artificial Sequence
  Synthetic oligonucleotide; TTC chr11 5351796 5351817 5351813 5351818 +
tctcaggcctattttatccata

SEQ ID NO: 105525 - DNA, 22 bp, Artificial Sequence
  Synthetic oligonucleotide; CTC chr11 5351798 5351819 5351815 5351820 +
tcaggcctattttatccatact

SEQ ID NO: 105526 - DNA, 22 bp, Artificial Sequence
  Synthetic oligonucleotide; CTC chr11 5351800 5351821 5351817 5351822 +
aggcctattttatccatactct

SEQ ID NO: 105527 - DNA, 22 bp, Artificial Sequence
  Synthetic oligonucleotide; CTA chr11 5351807 5351828 5351824 5351829 +
ttttatccatactctttctgtc

SEQ ID NO: 105528 - DNA, 22 bp, Artificial Sequence
  Synthetic oligonucleotide; TTT chr11 5351810 5351831 5351827 5351832 +
tatccatactctttctgtcatg

SEQ ID NO: 105529 - DNA, 22 bp, Artificial Sequence
  Synthetic oligonucleotide; TTT chr11 5351811 5351832 5351828 5351833 +
atccatactctttctgtcatgg

SEQ ID NO: 105530 - DNA, 22 bp, Artificial Sequence
  Synthetic oligonucleotide; TTA chr11 5351812 5351833 5351829 5351834 +
tccatactctttctgtcatgga

SEQ ID NO: 105531 - DNA, 22 bp, Artificial Sequence
  Synthetic oligonucleotide; CTC chr11 5351821 5351842 5351838 5351843 +
tttctgtcatggagtcaggtgt

SEQ ID NO: 105532 - DNA, 22 bp, Artificial Sequence
  Synthetic oligonucleotide; CTT chr11 5351823 5351844 5351840 5351845 +
tctgtcatggagtcaggtgtct

SEQ ID NO: 105533 - DNA, 22 bp, Artificial Sequence
  Synthetic oligonucleotide; TTT chr11 5351824 5351845 5351841 5351846 +
ctgtcatggagtcaggtgtctt

SEQ ID NO: 105534 - DNA, 22 bp, Artificial Sequence
  Synthetic oligonucleotide; TTC chr11 5351825 5351846 5351842 5351847 +
tgtcatggagtcaggtgtcttg

SEQ ID NO: 105535 - DNA, 22 bp, Artificial Sequence
  Synthetic oligonucleotide; CTG chr11 5351827 5351848 5351844 5351849 +
tcatggagtcaggtgtcttgct

SEQ ID NO: 105536 - DNA, 22 bp, Artificial Sequence
  Synthetic oligonucleotide; CTT chr11 5351846 5351867 5351863 5351868 +
gcttgccatggcttatgactgt

SEQ ID NO: 105537 - DNA, 22 bp, Artificial Sequence
  Synthetic oligonucleotide; TTG chr11 5351847 5351868 5351864 5351869 +
cttgccatggcttatgactgtt

SEQ ID NO: 105538 - DNA, 22 bp, Artificial Sequence
  Synthetic oligonucleotide; CTT chr11 5351850 5351871 5351867 5351872 +
gccatggcttatgactgtttca

SEQ ID NO: 105539 - DNA, 22 bp, Artificial Sequence
  Synthetic oligonucleotide; TTG chr11 5351851 5351872 5351868 5351873 +
ccatggcttatgactgtttcat

SEQ ID NO: 105540 - DNA, 22 bp, Artificial Sequence
  Synthetic oligonucleotide; CTT chr11 5351860 5351881 5351877 5351882 +
atgactgtttcattaccatccg

SEQ ID NO: 105541 - DNA, 22 bp, Artificial Sequence
  Synthetic oligonucleotide; TTA chr11 5351861 5351882 5351878 5351883 +
tgactgtttcattaccatccgc

SEQ ID NO: 105542 - DNA, 22 bp, Artificial Sequence
  Synthetic oligonucleotide; CTG chr11 5351867 5351888 5351884 5351889 +
tttcattaccatccgcagcccc

SEQ ID NO: 105543 - DNA, 22 bp, Artificial Sequence
  Synthetic oligonucleotide; TTT chr11 5351870 5351891 5351887 5351892 +
cattaccatccgcagcccctta

SEQ ID NO: 105544 - DNA, 22 bp, Artificial Sequence
  Synthetic oligonucleotide; TTC chr11 5351871 5351892 5351888 5351893 +
attaccatccgcagccccttaa

SEQ ID NO: 105545 - DNA, 22 bp, Artificial Sequence
  Synthetic oligonucleotide; TTA chr11 5351875 5351896 5351892 5351897 +
ccatccgcagccccttaagata

SEQ ID NO: 105546 - DNA, 22 bp, Artificial Sequence
  Synthetic oligonucleotide; CTT chr11 5351891 5351912 5351908 5351913 +
aagatatacctctatcctgacc

SEQ ID NO: 105547 - DNA, 22 bp, Artificial Sequence
  Synthetic oligonucleotide; TTA chr11 5351892 5351913 5351909 5351914 +
agatatacctctatcctgacca

SEQ ID NO: 105548 - DNA, 22 bp, Artificial Sequence
  Synthetic oligonucleotide; CTC chr11 5351903 5351924 5351920 5351925 +
tatcctgaccaacacccaggta

SEQ ID NO: 105549 - DNA, 22 bp, Artificial Sequence
  Synthetic oligonucleotide; CTA chr11 5351905 5351926 5351922 5351927 +
tcctgaccaacacccaggtaat

SEQ ID NO: 105550 - DNA, 22 bp, Artificial Sequence
  Synthetic oligonucleotide; CTG chr11 5351910 5351931 5351927 5351932 +
accaacacccaggtaatgaaga

SEQ ID NO: 105551 - DNA, 22 bp, Artificial Sequence
  Synthetic oligonucleotide; TTG chr11 5351935 5351956 5351952 5351957 +
gtgtgcgggtattgacaagggc

SEQ ID NO: 105552 - DNA, 22 bp, Artificial Sequence
  Synthetic oligonucleotide; TTG chr11 5351949 5351970 5351966 5351971 +
acaagggctggtctgtccatta

SEQ ID NO: 105553 - DNA, 22 bp, Artificial Sequence
  Synthetic oligonucleotide; CTG chr11 5351959 5351980 5351976 5351981 +
gtctgtccattatgccaatagt

SEQ ID NO: 105554 - DNA, 22 bp, Artificial Sequence
  Synthetic oligonucleotide; CTG chr11 5351964 5351985 5351981 5351986 +
tccattatgccaatagttgttc

SEQ ID NO: 105555 - DNA, 22 bp, Artificial Sequence
  Synthetic oligonucleotide; TTA chr11 5351971 5351992 5351988 5351993 +
tgccaatagttgttcgcctaca

SEQ ID NO: 105556 - DNA, 22 bp, Artificial Sequence
  Synthetic oligonucleotide; TTG chr11 5351983 5352004 5352000 5352005 +
ttcgcctacactggtttcccta

SEQ ID NO: 105557 - DNA, 22 bp, Artificial Sequence
  Synthetic oligonucleotide; TTC chr11 5351986 5352007 5352003 5352008 +
gcctacactggtttccctactg

SEQ ID NO: 105558 - DNA, 22 bp, Artificial Sequence
  Synthetic oligonucleotide; CTA chr11 5351991 5352012 5352008 5352013 +
cactggtttccctactgtcgat

SEQ ID NO: 105559 - DNA, 22 bp, Artificial Sequence
  Synthetic oligonucleotide; CTG chr11 5351996 5352017 5352013 5352018 +
gtttccctactgtcgatcccat

SEQ ID NO: 105560 - DNA, 22 bp, Artificial Sequence
  Synthetic oligonucleotide; TTT chr11 5352000 5352021 5352017 5352022 +
ccctactgtcgatcccatgtac

SEQ ID NO: 105561 - DNA, 22 bp, Artificial Sequence
  Synthetic oligonucleotide; TTC chr11 5352001 5352022 5352018 5352023 +
cctactgtcgatcccatgtact

SEQ ID NO: 105562 - DNA, 22 bp, Artificial Sequence
  Synthetic oligonucleotide; CTA chr11 5352005 5352026 5352022 5352027 +
ctgtcgatcccatgtactctcc

SEQ ID NO: 105563 - DNA, 22 bp, Artificial Sequence
  Synthetic oligonucleotide; CTG chr11 5352008 5352029 5352025 5352030 +
tcgatcccatgtactctcccat

SEQ ID NO: 105564 - DNA, 22 bp, Artificial Sequence
  Synthetic oligonucleotide; CTC chr11 5352024 5352045 5352041 5352046 +
tcccatgctttctgtctacacc

SEQ ID NO: 105565 - DNA, 22 bp, Artificial Sequence
  Synthetic oligonucleotide; CTC chr11 5352026 5352047 5352043 5352048 +
ccatgctttctgtctacaccaa

SEQ ID NO: 105566 - DNA, 22 bp, Artificial Sequence
  Synthetic oligonucleotide; CTT chr11 5352034 5352055 5352051 5352056 +
tctgtctacaccaagatgtcat

SEQ ID NO: 105567 - DNA, 22 bp, Artificial Sequence
  Synthetic oligonucleotide; TTT chr11 5352035 5352056 5352052 5352057 +
ctgtctacaccaagatgtcatc

SEQ ID NO: 105568 - DNA, 22 bp, Artificial Sequence
  Synthetic oligonucleotide; TTC chr11 5352036 5352057 5352053 5352058 +
tgtctacaccaagatgtcatca

SEQ ID NO: 105569 - DNA, 22 bp, Artificial Sequence
  Synthetic oligonucleotide; CTG chr11 5352038 5352059 5352055 5352060 +
tctacaccaagatgtcatcaag

SEQ ID NO: 105570 - DNA, 22 bp, Artificial Sequence
  Synthetic oligonucleotide; CTA chr11 5352042 5352063 5352059 5352064 +
caccaagatgtcatcaagctag

SEQ ID NO: 105571 - DNA, 22 bp, Artificial Sequence
  Synthetic oligonucleotide; CTA chr11 5352063 5352084 5352080 5352085 +
gcctgtgctgacatcaccttca

SEQ ID NO: 105572 - DNA, 22 bp, Artificial Sequence
  Synthetic oligonucleotide; CTG chr11 5352068 5352089 5352085 5352090 +
tgctgacatcaccttcaaccgt

SEQ ID NO: 105573 - DNA, 22 bp, Artificial Sequence
  Synthetic oligonucleotide; CTG chr11 5352073 5352094 5352090 5352095 +
acatcaccttcaaccgtctcta

SEQ ID NO: 105574 - DNA, 22 bp, Artificial Sequence
  Synthetic oligonucleotide; CTT chr11 5352083 5352104 5352100 5352105 +
caaccgtctctatccagttgta

SEQ ID NO: 105575 - DNA, 22 bp, Artificial Sequence
  Synthetic oligonucleotide; TTC chr11 5352084 5352105 5352101 5352106 +
aaccgtctctatccagttgtag

SEQ ID NO: 105576 - DNA, 22 bp, Artificial Sequence
  Synthetic oligonucleotide; CTC chr11 5352093 5352114 5352110 5352115 +
tatccagttgtagttttatttg

SEQ ID NO: 105577 - DNA, 22 bp, Artificial Sequence
  Synthetic oligonucleotide; CTA chr11 5352095 5352116 5352112 5352117 +
tccagttgtagttttatttgca

SEQ ID NO: 105578 - DNA, 22 bp, Artificial Sequence
  Synthetic oligonucleotide; TTG chr11 5352103 5352124 5352120 5352125 +
tagttttatttgcaatggtctt

SEQ ID NO: 105579 - DNA, 22 bp, Artificial Sequence
  Synthetic oligonucleotide; TTT chr11 5352109 5352130 5352126 5352131 +
tatttgcaatggtcttgttgga

SEQ ID NO: 105580 - DNA, 22 bp, Artificial Sequence
  Synthetic oligonucleotide; TTT chr11 5352110 5352131 5352127 5352132 +
atttgcaatggtcttgttggac

SEQ ID NO: 105581 - DNA, 22 bp, Artificial Sequence
  Synthetic oligonucleotide; TTA chr11 5352111 5352132 5352128 5352133 +
tttgcaatggtcttgttggact

SEQ ID NO: 105582 - DNA, 22 bp, Artificial Sequence
  Synthetic oligonucleotide; TTT chr11 5352114 5352135 5352131 5352136 +
gcaatggtcttgttggactttc

SEQ ID NO: 105583 - DNA, 22 bp, Artificial Sequence
  Synthetic oligonucleotide; TTG chr11 5352115 5352136 5352132 5352137 +
caatggtcttgttggactttct

SEQ ID NO: 105584 - DNA, 22 bp, Artificial Sequence
  Synthetic oligonucleotide; CTT chr11 5352125 5352146 5352142 5352147 +
gttggactttctcatcatcttt

SEQ ID NO: 105585 - DNA, 22 bp, Artificial Sequence
  Synthetic oligonucleotide; TTG chr11 5352126 5352147 5352143 5352148 +
ttggactttctcatcatctttt

SEQ ID NO: 105586 - DNA, 22 bp, Artificial Sequence
  Synthetic oligonucleotide; TTG chr11 5352129 5352150 5352146 5352151 +
gactttctcatcatctttttct

SEQ ID NO: 105587 - DNA, 22 bp, Artificial Sequence
  Synthetic oligonucleotide; CTT chr11 5352134 5352155 5352151 5352156 +
tctcatcatctttttctcctac

SEQ ID NO: 105588 - DNA, 22 bp, Artificial Sequence
  Synthetic oligonucleotide; TTT chr11 5352135 5352156 5352152 5352157 +
ctcatcatctttttctcctaca

SEQ ID NO: 105589 - DNA, 22 bp, Artificial Sequence
  Synthetic oligonucleotide; TTC chr11 5352136 5352157 5352153 5352158 +
tcatcatctttttctcctacat

SEQ ID NO: 105590 - DNA, 22 bp, Artificial Sequence
  Synthetic oligonucleotide; CTC chr11 5352138 5352159 5352155 5352160 +
atcatctttttctcctacattt

SEQ ID NO: 105591 - DNA, 22 bp, Artificial Sequence
  Synthetic oligonucleotide; CTT chr11 5352146 5352167 5352163 5352168 +
tttctcctacattttgattctc

SEQ ID NO: 105592 - DNA, 22 bp, Artificial Sequence
  Synthetic oligonucleotide; TTT chr11 5352147 5352168 5352164 5352169 +
ttctcctacattttgattctca

SEQ ID NO: 105593 - DNA, 22 bp, Artificial Sequence
  Synthetic oligonucleotide; TTT chr11 5352148 5352169 5352165 5352170 +
tctcctacattttgattctcaa

SEQ ID NO: 105594 - DNA, 22 bp, Artificial Sequence
  Synthetic oligonucleotide; TTT chr11 5352149 5352170 5352166 5352171 +
ctcctacattttgattctcaag

SEQ ID NO: 105595 - DNA, 22 bp, Artificial Sequence
  Synthetic oligonucleotide; TTC chr11 5352150 5352171 5352167 5352172 +
tcctacattttgattctcaaga

SEQ ID NO: 105596 - DNA, 22 bp, Artificial Sequence
  Synthetic oligonucleotide; CTC chr11 5352152 5352173 5352169 5352174 +
ctacattttgattctcaagact

SEQ ID NO: 105597 - DNA, 22 bp, Artificial Sequence
  Synthetic oligonucleotide; CTA chr11 5352155 5352176 5352172 5352177 +
cattttgattctcaagactgtc

SEQ ID NO: 105598 - DNA, 22 bp, Artificial Sequence
  Synthetic oligonucleotide; TTT chr11 5352160 5352181 5352177 5352182 +
tgattctcaagactgtcatggg

SEQ ID NO: 105599 - DNA, 22 bp, Artificial Sequence
  Synthetic oligonucleotide; TTT chr11 5352161 5352182 5352178 5352183 +
gattctcaagactgtcatgggc

SEQ ID NO: 105600 - DNA, 22 bp, Artificial Sequence
  Synthetic oligonucleotide; TTG chr11 5352162 5352183 5352179 5352184 +
attctcaagactgtcatgggca

SEQ ID NO: 105601 - DNA, 22 bp, Artificial Sequence
  Synthetic oligonucleotide; TTC chr11 5352166 5352187 5352183 5352188 +
tcaagactgtcatgggcattgg

SEQ ID NO: 105602 - DNA, 22 bp, Artificial Sequence
  Synthetic oligonucleotide; CTC chr11 5352168 5352189 5352185 5352190 +
aagactgtcatgggcattggtt

SEQ ID NO: 105603 - DNA, 22 bp, Artificial Sequence
  Synthetic oligonucleotide; CTG chr11 5352175 5352196 5352192 5352197 +
tcatgggcattggttctggagg

SEQ ID NO: 105604 - DNA, 22 bp, Artificial Sequence
  Synthetic oligonucleotide; TTG chr11 5352187 5352208 5352204 5352209 +
gttctggaggagaaagggccaa

SEQ ID NO: 105605 - DNA, 22 bp, Artificial Sequence
  Synthetic oligonucleotide; TTC chr11 5352191 5352212 5352208 5352213 +
tggaggagaaagggccaaggcc

SEQ ID NO: 105606 - DNA, 22 bp, Artificial Sequence
  Synthetic oligonucleotide; CTG chr11 5352193 5352214 5352210 5352215 +
gaggagaaagggccaaggccct

SEQ ID NO: 105607 - DNA, 22 bp, Artificial Sequence
  Synthetic oligonucleotide; CTC chr11 5352216 5352237 5352233 5352238 +
aacacatgtgtctctcatatct

SEQ ID NO: 105608 - DNA, 22 bp, Artificial Sequence
  Synthetic oligonucleotide; CTC chr11 5352230 5352251 5352247 5352252 +
tcatatctgctgcatcctggtc

SEQ ID NO: 105609 - DNA, 22 bp, Artificial Sequence
  Synthetic oligonucleotide; CTC chr11 5352232 5352253 5352249 5352254 +
atatctgctgcatcctggtctt

SEQ ID NO: 105610 - DNA, 22 bp, Artificial Sequence
  Synthetic oligonucleotide; CTG chr11 5352239 5352260 5352256 5352261 +
ctgcatcctggtcttctatgtc

SEQ ID NO: 105611 - DNA, 22 bp, Artificial Sequence
  Synthetic oligonucleotide; CTG chr11 5352242 5352263 5352259 5352264 +
catcctggtcttctatgtcact

SEQ ID NO: 105612 - DNA, 22 bp, Artificial Sequence
  Synthetic oligonucleotide; CTG chr11 5352249 5352270 5352266 5352271 +
gtcttctatgtcactgtagttt

SEQ ID NO: 105613 - DNA, 22 bp, Artificial Sequence
  Synthetic oligonucleotide; CTT chr11 5352254 5352275 5352271 5352276 +
ctatgtcactgtagtttgtctg

SEQ ID NO: 105614 - DNA, 22 bp, Artificial Sequence
  Synthetic oligonucleotide; TTC chr11 5352255 5352276 5352272 5352277 +
tatgtcactgtagtttgtctga

SEQ ID NO: 105615 - DNA, 22 bp, Artificial Sequence
  Synthetic oligonucleotide; CTA chr11 5352257 5352278 5352274 5352279 +
tgtcactgtagtttgtctgaca

SEQ ID NO: 105616 - DNA, 22 bp, Artificial Sequence
  Synthetic oligonucleotide; CTG chr11 5352265 5352286 5352282 5352287 +
tagtttgtctgacatttattca

SEQ ID NO: 105617 - DNA, 22 bp, Artificial Sequence
  Synthetic oligonucleotide; TTT chr11 5352271 5352292 5352288 5352293 +
gtctgacatttattcataggtt

SEQ ID NO: 105618 - DNA, 22 bp, Artificial Sequence
  Synthetic oligonucleotide; TTG chr11 5352272 5352293 5352289 5352294 +
tctgacatttattcataggttt

SEQ ID NO: 105619 - DNA, 22 bp, Artificial Sequence
  Synthetic oligonucleotide; CTG chr11 5352276 5352297 5352293 5352298 +
acatttattcataggtttggaa

SEQ ID NO: 105620 - DNA, 22 bp, Artificial Sequence
  Synthetic oligonucleotide; TTT chr11 5352282 5352303 5352299 5352304 +
attcataggtttggaaagcatg

SEQ ID NO: 105621 - DNA, 22 bp, Artificial Sequence
  Synthetic oligonucleotide; TTA chr11 5352283 5352304 5352300 5352305 +
ttcataggtttggaaagcatgt

SEQ ID NO: 105622 - DNA, 22 bp, Artificial Sequence
  Synthetic oligonucleotide; TTC chr11 5352286 5352307 5352303 5352308 +
ataggtttggaaagcatgttcc

SEQ ID NO: 105623 - DNA, 22 bp, Artificial Sequence
  Synthetic oligonucleotide; TTT chr11 5352294 5352315 5352311 5352316 +
ggaaagcatgttcctcatgtcg

SEQ ID NO: 105624 - DNA, 22 bp, Artificial Sequence
  Synthetic oligonucleotide; TTG chr11 5352295 5352316 5352312 5352317 +
gaaagcatgttcctcatgtcgt

SEQ ID NO: 105625 - DNA, 22 bp, Artificial Sequence
  Synthetic oligonucleotide; TTC chr11 5352307 5352328 5352324 5352329 +
ctcatgtcgttcacatcacaat

SEQ ID NO: 105626 - DNA, 22 bp, Artificial Sequence
  Synthetic oligonucleotide; CTC chr11 5352310 5352331 5352327 5352332 +
atgtcgttcacatcacaatgag

SEQ ID NO: 105627 - DNA, 22 bp, Artificial Sequence
  Synthetic oligonucleotide; TTC chr11 5352319 5352340 5352336 5352341 +
acatcacaatgagctacatcca

SEQ ID NO: 105628 - DNA, 22 bp, Artificial Sequence
  Synthetic oligonucleotide; CTA chr11 5352335 5352356 5352352 5352357 +
catccacttccttttcccacct

SEQ ID NO: 105629 - DNA, 22 bp, Artificial Sequence
  Synthetic oligonucleotide; CTT chr11 5352344 5352365 5352361 5352366 +
ccttttcccaccttttatgaac

SEQ ID NO: 105630 - DNA, 22 bp, Artificial Sequence
  Synthetic oligonucleotide; TTC chr11 5352345 5352366 5352362 5352367 +
cttttcccaccttttatgaacc

SEQ ID NO: 105631 - DNA, 22 bp, Artificial Sequence
  Synthetic oligonucleotide; CTT chr11 5352348 5352369 5352365 5352370 +
ttcccaccttttatgaacccat

SEQ ID NO: 105632 - DNA, 22 bp, Artificial Sequence
  Synthetic oligonucleotide; TTT chr11 5352349 5352370 5352366 5352371 +
tcccaccttttatgaacccatt

SEQ ID NO: 105633 - DNA, 22 bp, Artificial Sequence
  Synthetic oligonucleotide; TTT chr11 5352350 5352371 5352367 5352372 +
cccaccttttatgaacccattt

SEQ ID NO: 105634 - DNA, 22 bp, Artificial Sequence
  Synthetic oligonucleotide; TTC chr11 5352351 5352372 5352368 5352373 +
ccaccttttatgaacccattta

SEQ ID NO: 105635 - DNA, 22 bp, Artificial Sequence
  Synthetic oligonucleotide; CTT chr11 5352358 5352379 5352375 5352380 +
ttatgaacccatttatctatag

SEQ ID NO: 105636 - DNA, 22 bp, Artificial Sequence
  Synthetic oligonucleotide; TTT chr11 5352359 5352380 5352376 5352381 +
tatgaacccatttatctatagc

SEQ ID NO: 105637 - DNA, 22 bp, Artificial Sequence
  Synthetic oligonucleotide; TTT chr11 5352360 5352381 5352377 5352382 +
atgaacccatttatctatagca

SEQ ID NO: 105638 - DNA, 22 bp, Artificial Sequence
  Synthetic oligonucleotide; TTA chr11 5352361 5352382 5352378 5352383 +
tgaacccatttatctatagcat

SEQ ID NO: 105639 - DNA, 22 bp, Artificial Sequence
  Synthetic oligonucleotide; TTT chr11 5352372 5352393 5352389 5352394 +
atctatagcattaaaactaagc

SEQ ID NO: 105640 - DNA, 22 bp, Artificial Sequence
  Synthetic oligonucleotide; TTA chr11 5352373 5352394 5352390 5352395 +
tctatagcattaaaactaagca

SEQ ID NO: 105641 - DNA, 22 bp, Artificial Sequence
  Synthetic oligonucleotide; CTA chr11 5352377 5352398 5352394 5352399 +
tagcattaaaactaagcagatt

SEQ ID NO: 105642 - DNA, 22 bp, Artificial Sequence
  Synthetic oligonucleotide; TTA chr11 5352385 5352406 5352402 5352407 +
aaactaagcagattcagagtgg

SEQ ID NO: 105643 - DNA, 22 bp, Artificial Sequence
  Synthetic oligonucleotide; CTA chr11 5352391 5352412 5352408 5352413 +
agcagattcagagtggcatact

SEQ ID NO: 105644 - DNA, 22 bp, Artificial Sequence
  Synthetic oligonucleotide; TTC chr11 5352400 5352421 5352417 5352422 +
agagtggcatacttcgtttatt

SEQ ID NO: 105645 - DNA, 22 bp, Artificial Sequence
  Synthetic oligonucleotide; CTT chr11 5352414 5352435 5352431 5352436 +
cgtttattctctctgcctcact

SEQ ID NO: 105646 - DNA, 22 bp, Artificial Sequence
  Synthetic oligonucleotide; TTC chr11 5352415 5352436 5352432 5352437 +
gtttattctctctgcctcactc

SEQ ID NO: 105647 - DNA, 22 bp, Artificial Sequence
  Synthetic oligonucleotide; TTT chr11 5352419 5352440 5352436 5352441 +
attctctctgcctcactctaga

SEQ ID NO: 105648 - DNA, 22 bp, Artificial Sequence
  Synthetic oligonucleotide; TTA chr11 5352420 5352441 5352437 5352442 +
ttctctctgcctcactctagag

SEQ ID NO: 105649 - DNA, 22 bp, Artificial Sequence
  Synthetic oligonucleotide; TTC chr11 5352423 5352444 5352440 5352445 +
tctctgcctcactctagagcat

SEQ ID NO: 105650 - DNA, 22 bp, Artificial Sequence
  Synthetic oligonucleotide; CTC chr11 5352425 5352446 5352442 5352447 +
tctgcctcactctagagcatga

SEQ ID NO: 105651 - DNA, 22 bp, Artificial Sequence
  Synthetic oligonucleotide; CTC chr11 5352427 5352448 5352444 5352449 +
tgcctcactctagagcatgaca

SEQ ID NO: 105652 - DNA, 22 bp, Artificial Sequence
  Synthetic oligonucleotide; CTG chr11 5352429 5352450 5352446 5352451 +
cctcactctagagcatgacatt

SEQ ID NO: 105653 - DNA, 22 bp, Artificial Sequence
  Synthetic oligonucleotide; CTC chr11 5352433 5352454 5352450 5352455 +
actctagagcatgacattgttt

SEQ ID NO: 105654 - DNA, 22 bp, Artificial Sequence
  Synthetic oligonucleotide; CTC chr11 5352437 5352458 5352454 5352459 +
tagagcatgacattgtttcact

SEQ ID NO: 105655 - DNA, 22 bp, Artificial Sequence
  Synthetic oligonucleotide; CTA chr11 5352439 5352460 5352456 5352461 +
gagcatgacattgtttcactgg

SEQ ID NO: 105656 - DNA, 22 bp, Artificial Sequence
  Synthetic oligonucleotide; TTG chr11 5352452 5352473 5352469 5352474 +
tttcactggtctctgaggaata

SEQ ID NO: 105657 - DNA, 22 bp, Artificial Sequence
  Synthetic oligonucleotide; TTT chr11 5352455 5352476 5352472 5352477 +
cactggtctctgaggaataatt

SEQ ID NO: 105658 - DNA, 22 bp, Artificial Sequence
  Synthetic oligonucleotide; TTC chr11 5352456 5352477 5352473 5352478 +
actggtctctgaggaataattc

SEQ ID NO: 105659 - DNA, 22 bp, Artificial Sequence
  Synthetic oligonucleotide; CTG chr11 5352460 5352481 5352477 5352482 +
gtctctgaggaataattcaggg

SEQ ID NO: 105660 - DNA, 22 bp, Artificial Sequence
  Synthetic oligonucleotide; CTC chr11 5352465 5352486 5352482 5352487 +
tgaggaataattcaggggacct

SEQ ID NO: 105661 - DNA, 22 bp, Artificial Sequence
  Synthetic oligonucleotide; CTG chr11 5352467 5352488 5352484 5352489 +
aggaataattcaggggacctgg

SEQ ID NO: 105662 - DNA, 22 bp, Artificial Sequence
  Synthetic oligonucleotide; TTC chr11 5352478 5352499 5352495 5352500 +
aggggacctggacaggatgaca

SEQ ID NO: 105663 - DNA, 22 bp, Artificial Sequence
  Synthetic oligonucleotide; CTG chr11 5352488 5352509 5352505 5352510 +
gacaggatgacaatgttgccag

SEQ ID NO: 105664 - DNA, 22 bp, Artificial Sequence
  Synthetic oligonucleotide; TTG chr11 5352506 5352527 5352523 5352528 +
ccagcataagtaactagggaaa

SEQ ID NO: 105665 - DNA, 22 bp, Artificial Sequence
  Synthetic oligonucleotide; CTA chr11 5352522 5352543 5352539 5352544 +
gggaaagtcatttcaatgagaa

SEQ ID NO: 105666 - DNA, 22 bp, Artificial Sequence
  Synthetic oligonucleotide; TTT chr11 5352535 5352556 5352552 5352557 +
caatgagaactaatcaatccct

SEQ ID NO: 105667 - DNA, 22 bp, Artificial Sequence
  Synthetic oligonucleotide; TTC chr11 5352536 5352557 5352553 5352558 +
aatgagaactaatcaatccctg

SEQ ID NO: 105668 - DNA, 22 bp, Artificial Sequence
  Synthetic oligonucleotide; CTA chr11 5352547 5352568 5352564 5352569 +
atcaatccctgagcatttcagt

SEQ ID NO: 105669 - DNA, 22 bp, Artificial Sequence
  Synthetic oligonucleotide; CTG chr11 5352558 5352579 5352575 5352580 +
agcatttcagtggaaatcagtc

SEQ ID NO: 105670 - DNA, 22 bp, Artificial Sequence
  Synthetic oligonucleotide; TTT chr11 5352565 5352586 5352582 5352587 +
cagtggaaatcagtcaatccct

SEQ ID NO: 105671 - DNA, 22 bp, Artificial Sequence
  Synthetic oligonucleotide; TTC chr11 5352566 5352587 5352583 5352588 +
agtggaaatcagtcaatccctc

SEQ ID NO: 105672 - DNA, 22 bp, Artificial Sequence
  Synthetic oligonucleotide; CTC chr11 5352588 5352609 5352605 5352610 +
tgctacttagaacattatttta

SEQ ID NO: 105673 - DNA, 22 bp, Artificial Sequence
  Synthetic oligonucleotide; CTG chr11 5352590 5352611 5352607 5352612 +
ctacttagaacattattttacc

SEQ ID NO: 105674 - DNA, 22 bp, Artificial Sequence
  Synthetic oligonucleotide; CTA chr11 5352593 5352614 5352610 5352615 +
cttagaacattattttaccctg

SEQ ID NO: 105675 - DNA, 22 bp, Artificial Sequence
  Synthetic oligonucleotide; CTT chr11 5352596 5352617 5352613 5352618 +
agaacattattttaccctgcct

SEQ ID NO: 105676 - DNA, 22 bp, Artificial Sequence
  Synthetic oligonucleotide; TTA chr11 5352597 5352618 5352614 5352619 +
gaacattattttaccctgcctg

SEQ ID NO: 105677 - DNA, 22 bp, Artificial Sequence
  Synthetic oligonucleotide; TTA chr11 5352605 5352626 5352622 5352627 +
ttttaccctgcctgtctattgc

SEQ ID NO: 105678 - DNA, 22 bp, Artificial Sequence
  Synthetic oligonucleotide; TTT chr11 5352608 5352629 5352625 5352630 +
taccctgcctgtctattgctga

SEQ ID NO: 105679 - DNA, 22 bp, Artificial Sequence
  Synthetic oligonucleotide; TTT chr11 5352609 5352630 5352626 5352631 +
accctgcctgtctattgctgat

SEQ ID NO: 105680 - DNA, 22 bp, Artificial Sequence
  Synthetic oligonucleotide; TTA chr11 5352610 5352631 5352627 5352632 +
ccctgcctgtctattgctgatt

SEQ ID NO: 105681 - DNA, 22 bp, Artificial Sequence
  Synthetic oligonucleotide; CTG chr11 5352615 5352636 5352632 5352637 +
cctgtctattgctgatttgtat

SEQ ID NO: 105682 - DNA, 22 bp, Artificial Sequence
  Synthetic oligonucleotide; CTG chr11 5352619 5352640 5352636 5352641 +
tctattgctgatttgtataaga

SEQ ID NO: 105683 - DNA, 22 bp, Artificial Sequence
  Synthetic oligonucleotide; CTA chr11 5352623 5352644 5352640 5352645 +
ttgctgatttgtataagatata

SEQ ID NO: 105684 - DNA, 22 bp, Artificial Sequence
  Synthetic oligonucleotide; TTG chr11 5352626 5352647 5352643 5352648 +
ctgatttgtataagatatatgt

SEQ ID NO: 105685 - DNA, 22 bp, Artificial Sequence
  Synthetic oligonucleotide; CTG chr11 5352629 5352650 5352646 5352651 +
atttgtataagatatatgtaca

SEQ ID NO: 105686 - DNA, 22 bp, Artificial Sequence
  Synthetic oligonucleotide; TTT chr11 5352633 5352654 5352650 5352655 +
gtataagatatatgtacaacac

SEQ ID NO: 105687 - DNA, 22 bp, Artificial Sequence
  Synthetic oligonucleotide; TTG chr11 5352634 5352655 5352651 5352656 +
tataagatatatgtacaacact

SEQ ID NO: 105688 - DNA, 22 bp, Artificial Sequence
  Synthetic oligonucleotide; CTA chr11 5352657 5352678 5352674 5352679 +
agtacatatctcagtgctcaac

SEQ ID NO: 105689 - DNA, 22 bp, Artificial Sequence
  Synthetic oligonucleotide; CTC chr11 5352669 5352690 5352686 5352691 +
agtgctcaactgatattgtttt

SEQ ID NO: 105690 - DNA, 22 bp, Artificial Sequence
  Synthetic oligonucleotide; CTC chr11 5352676 5352697 5352693 5352698 +
aactgatattgttttctcaggt

SEQ ID NO: 105691 - DNA, 22 bp, Artificial Sequence
  Synthetic oligonucleotide; CTG chr11 5352681 5352702 5352698 5352703 +
atattgttttctcaggtaattt

SEQ ID NO: 105692 - DNA, 22 bp, Artificial Sequence
  Synthetic oligonucleotide; TTG chr11 5352687 5352708 5352704 5352709 +
ttttctcaggtaatttaactca

SEQ ID NO: 105693 - DNA, 22 bp, Artificial Sequence
  Synthetic oligonucleotide; TTT chr11 5352690 5352711 5352707 5352712 +
tctcaggtaatttaactcacat

SEQ ID NO: 105694 - DNA, 22 bp, Artificial Sequence
  Synthetic oligonucleotide; TTT chr11 5352691 5352712 5352708 5352713 +
ctcaggtaatttaactcacatt

SEQ ID NO: 105695 - DNA, 22 bp, Artificial Sequence
  Synthetic oligonucleotide; TTC chr11 5352692 5352713 5352709 5352714 +
tcaggtaatttaactcacattg

SEQ ID NO: 105696 - DNA, 22 bp, Artificial Sequence
  Synthetic oligonucleotide; CTC chr11 5352694 5352715 5352711 5352716 +
aggtaatttaactcacattgtt

SEQ ID NO: 105697 - DNA, 22 bp, Artificial Sequence
  Synthetic oligonucleotide; TTT chr11 5352703 5352724 5352720 5352725 +
aactcacattgtttgattagct

SEQ ID NO: 105698 - DNA, 22 bp, Artificial Sequence
  Synthetic oligonucleotide; TTA chr11 5352704 5352725 5352721 5352726 +
actcacattgtttgattagctt

SEQ ID NO: 105699 - DNA, 22 bp, Artificial Sequence
  Synthetic oligonucleotide; CTC chr11 5352708 5352729 5352725 5352730 +
acattgtttgattagcttatgg

SEQ ID NO: 105700 - DNA, 22 bp, Artificial Sequence
  Synthetic oligonucleotide; TTG chr11 5352714 5352735 5352731 5352736 +
tttgattagcttatggctggca

SEQ ID NO: 105701 - DNA, 22 bp, Artificial Sequence
  Synthetic oligonucleotide; TTT chr11 5352717 5352738 5352734 5352739 +
gattagcttatggctggcacca

SEQ ID NO: 105702 - DNA, 22 bp, Artificial Sequence
  Synthetic oligonucleotide; TTG chr11 5352718 5352739 5352735 5352740 +
attagcttatggctggcaccat

SEQ ID NO: 105703 - DNA, 22 bp, Artificial Sequence
  Synthetic oligonucleotide; TTA chr11 5352722 5352743 5352739 5352744 +
gcttatggctggcaccatacac

SEQ ID NO: 105704 - DNA, 22 bp, Artificial Sequence
  Synthetic oligonucleotide; CTT chr11 5352726 5352747 5352743 5352748 +
atggctggcaccatacacatac

SEQ ID NO: 105705 - DNA, 22 bp, Artificial Sequence
  Synthetic oligonucleotide; TTA chr11 5352727 5352748 5352744 5352749 +
tggctggcaccatacacataca

SEQ ID NO: 105706 - DNA, 22 bp, Artificial Sequence
  Synthetic oligonucleotide; CTG chr11 5352733 5352754 5352750 5352755 +
gcaccatacacatacatacata

SEQ ID NO: 105707 - DNA, 22 bp, Artificial Sequence
  Synthetic oligonucleotide; CTT chr11 5352758 5352779 5352775 5352780 +
acacacatacatatacacacac

SEQ ID NO: 105708 - DNA, 22 bp, Artificial Sequence
  Synthetic oligonucleotide; TTA chr11 5352759 5352780 5352776 5352781 +
cacacatacatatacacacaca

SEQ ID NO: 105709 - DNA, 22 bp, Artificial Sequence
  Synthetic oligonucleotide; CTA chr11 5352800 5352821 5352817 5352822 +
ttatatatatttaatatatata

SEQ ID NO: 105710 - DNA, 22 bp, Artificial Sequence
  Synthetic oligonucleotide; TTA chr11 5352803 5352824 5352820 5352825 +
tatatatttaatatatataata

SEQ ID NO: 105711 - DNA, 22 bp, Artificial Sequence
  Synthetic oligonucleotide; TTT chr11 5352812 5352833 5352829 5352834 +
aatatatataatacacactatt

SEQ ID NO: 105712 - DNA, 22 bp, Artificial Sequence
  Synthetic oligonucleotide; TTA chr11 5352813 5352834 5352830 5352835 +
atatatataatacacactatta

SEQ ID NO: 105713 - DNA, 22 bp, Artificial Sequence
  Synthetic oligonucleotide; CTA chr11 5352832 5352853 5352849 5352854 +
ttatatatacttaatatataat

SEQ ID NO: 105714 - DNA, 22 bp, Artificial Sequence
  Synthetic oligonucleotide; TTA chr11 5352835 5352856 5352852 5352857 +
tatatacttaatatataatagt

SEQ ID NO: 105715 - DNA, 22 bp, Artificial Sequence
  Synthetic oligonucleotide; CTT chr11 5352844 5352865 5352861 5352866 +
aatatataatagtgtgtgtatg

SEQ ID NO: 105716 - DNA, 22 bp, Artificial Sequence
  Synthetic oligonucleotide; TTA chr11 5352845 5352866 5352862 5352867 +
atatataatagtgtgtgtatgt

SEQ ID NO: 105717 - DNA, 22 bp, Artificial Sequence
  Synthetic oligonucleotide; CTG chr11 5352872 5352893 5352889 5352894 +
tgtgtgtttatatatattatat

SEQ ID NO: 105718 - DNA, 22 bp, Artificial Sequence
  Synthetic oligonucleotide; TTT chr11 5352881 5352902 5352898 5352903 +
atatatattatataaataatat

SEQ ID NO: 105719 - DNA, 22 bp, Artificial Sequence
  Synthetic oligonucleotide; TTA chr11 5352882 5352903 5352899 5352904 +
tatatattatataaataatata

SEQ ID NO: 105720 - DNA, 22 bp, Artificial Sequence
  Synthetic oligonucleotide; TTA chr11 5352891 5352912 5352908 5352913 +
tataaataatatatatatatga

SEQ ID NO: 105721 - DNA, 22 bp, Artificial Sequence
  Synthetic oligonucleotide; TTA chr11 5352921 5352942 5352938 5352943 +
tatatataattcttgggtctat

SEQ ID NO: 105722 - DNA, 22 bp, Artificial Sequence
  Synthetic oligonucleotide; TTC chr11 5352933 5352954 5352950 5352955 +
ttgggtctatgatttgggtcac

SEQ ID NO: 105723 - DNA, 22 bp, Artificial Sequence
  Synthetic oligonucleotide; CTT chr11 5352935 5352956 5352952 5352957 +
gggtctatgatttgggtcaccg

SEQ ID NO: 105724 - DNA, 22 bp, Artificial Sequence
  Synthetic oligonucleotide; TTG chr11 5352936 5352957 5352953 5352958 +
ggtctatgatttgggtcaccgg

SEQ ID NO: 105725 - DNA, 22 bp, Artificial Sequence
  Synthetic oligonucleotide; CTA chr11 5352942 5352963 5352959 5352964 +
tgatttgggtcaccggcatttc

SEQ ID NO: 105726 - DNA, 22 bp, Artificial Sequence
  Synthetic oligonucleotide; TTT chr11 5352948 5352969 5352965 5352970 +
gggtcaccggcatttcagtcaa

SEQ ID NO: 105727 - DNA, 22 bp, Artificial Sequence
  Synthetic oligonucleotide; TTG chr11 5352949 5352970 5352966 5352971 +
ggtcaccggcatttcagtcaat

SEQ ID NO: 105728 - DNA, 22 bp, Artificial Sequence
  Synthetic oligonucleotide; TTT chr11 5352963 5352984 5352980 5352985 +
cagtcaatgcccattgctctcc

SEQ ID NO: 105729 - DNA, 22 bp, Artificial Sequence
  Synthetic oligonucleotide; TTC chr11 5352964 5352985 5352981 5352986 +
agtcaatgcccattgctctcca

SEQ ID NO: 105730 - DNA, 22 bp, Artificial Sequence
  Synthetic oligonucleotide; TTG chr11 5352979 5353000 5352996 5353001 +
ctctccatatggcttgcatata

SEQ ID NO: 105731 - DNA, 22 bp, Artificial Sequence
  Synthetic oligonucleotide; CTC chr11 5352982 5353003 5352999 5353004 +
tccatatggcttgcatatatta

SEQ ID NO: 105732 - DNA, 22 bp, Artificial Sequence
  Synthetic oligonucleotide; CTC chr11 5352984 5353005 5353001 5353006 +
catatggcttgcatatattagt

SEQ ID NO: 105733 - DNA, 22 bp, Artificial Sequence
  Synthetic oligonucleotide; CTT chr11 5352994 5353015 5353011 5353016 +
gcatatattagtcctgttatac

SEQ ID NO: 105734 - DNA, 22 bp, Artificial Sequence
  Synthetic oligonucleotide; TTG chr11 5352995 5353016 5353012 5353017 +
catatattagtcctgttataca

SEQ ID NO: 105735 - DNA, 22 bp, Artificial Sequence
  Synthetic oligonucleotide; TTA chr11 5353004 5353025 5353021 5353026 +
gtcctgttatacataggaataa

SEQ ID NO: 105736 - DNA, 22 bp, Artificial Sequence
  Synthetic oligonucleotide; CTG chr11 5353010 5353031 5353027 5353032 +
ttatacataggaataaggcatt

SEQ ID NO: 105737 - DNA, 22 bp, Artificial Sequence
  Synthetic oligonucleotide; TTA chr11 5353013 5353034 5353030 5353035 +
tacataggaataaggcattttt

SEQ ID NO: 105738 - DNA, 22 bp, Artificial Sequence
  Synthetic oligonucleotide; TTT chr11 5353033 5353054 5353050 5353055 +
ttggcttcagacatacatccag

SEQ ID NO: 105739 - DNA, 22 bp, Artificial Sequence
  Synthetic oligonucleotide; TTT chr11 5353034 5353055 5353051 5353056 +
tggcttcagacatacatccagt

SEQ ID NO: 105740 - DNA, 22 bp, Artificial Sequence
  Synthetic oligonucleotide; TTT chr11 5353035 5353056 5353052 5353057 +
ggcttcagacatacatccagtt

SEQ ID NO: 105741 - DNA, 22 bp, Artificial Sequence
  Synthetic oligonucleotide; TTG chr11 5353036 5353057 5353053 5353058 +
gcttcagacatacatccagttc

SEQ ID NO: 105742 - DNA, 22 bp, Artificial Sequence
  Synthetic oligonucleotide; CTT chr11 5353040 5353061 5353057 5353062 +
cagacatacatccagttctctt

SEQ ID NO: 105743 - DNA, 22 bp, Artificial Sequence
  Synthetic oligonucleotide; TTC chr11 5353041 5353062 5353058 5353063 +
agacatacatccagttctcttg

SEQ ID NO: 105744 - DNA, 22 bp, Artificial Sequence
  Synthetic oligonucleotide; TTC chr11 5353058 5353079 5353075 5353080 +
tcttgcatatatggagctggct

SEQ ID NO: 105745 - DNA, 22 bp, Artificial Sequence
  Synthetic oligonucleotide; CTC chr11 5353060 5353081 5353077 5353082 +
ttgcatatatggagctggctgc

SEQ ID NO: 105746 - DNA, 22 bp, Artificial Sequence
  Synthetic oligonucleotide; CTT chr11 5353062 5353083 5353079 5353084 +
gcatatatggagctggctgctg

SEQ ID NO: 105747 - DNA, 22 bp, Artificial Sequence
  Synthetic oligonucleotide; TTG chr11 5353063 5353084 5353080 5353085 +
catatatggagctggctgctgt

SEQ ID NO: 105748 - DNA, 22 bp, Artificial Sequence
  Synthetic oligonucleotide; CTG chr11 5353077 5353098 5353094 5353099 +
gctgctgtttctagaaaattgc

SEQ ID NO: 105749 - DNA, 22 bp, Artificial Sequence
  Synthetic oligonucleotide; CTG chr11 5353081 5353102 5353098 5353103 +
ctgtttctagaaaattgcacgt

SEQ ID NO: 105750 - DNA, 22 bp, Artificial Sequence
  Synthetic oligonucleotide; CTG chr11 5353084 5353105 5353101 5353106 +
tttctagaaaattgcacgtgaa

SEQ ID NO: 105751 - DNA, 22 bp, Artificial Sequence
  Synthetic oligonucleotide; TTT chr11 5353087 5353108 5353104 5353109 +
ctagaaaattgcacgtgaagaa

SEQ ID NO: 105752 - DNA, 22 bp, Artificial Sequence
  Synthetic oligonucleotide; TTC chr11 5353088 5353109 5353105 5353110 +
tagaaaattgcacgtgaagaaa

SEQ ID NO: 105753 - DNA, 22 bp, Artificial Sequence
  Synthetic oligonucleotide; CTA chr11 5353090 5353111 5353107 5353112 +
gaaaattgcacgtgaagaaatg

SEQ ID NO: 105754 - DNA, 22 bp, Artificial Sequence
  Synthetic oligonucleotide; TTG chr11 5353098 5353119 5353115 5353120 +
cacgtgaagaaatgagactttc

SEQ ID NO: 105755 - DNA, 22 bp, Artificial Sequence
  Synthetic oligonucleotide; CTT chr11 5353118 5353139 5353135 5353140 +
tcttcaatgagagtaagccatt

SEQ ID NO: 105756 - DNA, 22 bp, Artificial Sequence
  Synthetic oligonucleotide; TTT chr11 5353119 5353140 5353136 5353141 +
cttcaatgagagtaagccattt

SEQ ID NO: 105757 - DNA, 22 bp, Artificial Sequence
  Synthetic oligonucleotide; TTC chr11 5353120 5353141 5353137 5353142 +
ttcaatgagagtaagccatttc

SEQ ID NO: 105758 - DNA, 22 bp, Artificial Sequence
  Synthetic oligonucleotide; CTT chr11 5353122 5353143 5353139 5353144 +
caatgagagtaagccatttccc

SEQ ID NO: 105759 - DNA, 22 bp, Artificial Sequence
  Synthetic oligonucleotide; TTC chr11 5353123 5353144 5353140 5353145 +
aatgagagtaagccatttccct

SEQ ID NO: 105760 - DNA, 22 bp, Artificial Sequence
  Synthetic oligonucleotide; TTT chr11 5353141 5353162 5353158 5353163 +
ccctcaattactttcttcaatg

SEQ ID NO: 105761 - DNA, 22 bp, Artificial Sequence
  Synthetic oligonucleotide; TTC chr11 5353142 5353163 5353159 5353164 +
cctcaattactttcttcaatga

SEQ ID NO: 105762 - DNA, 22 bp, Artificial Sequence
  Synthetic oligonucleotide; CTC chr11 5353146 5353167 5353163 5353168 +
aattactttcttcaatgagggt

SEQ ID NO: 105763 - DNA, 22 bp, Artificial Sequence
  Synthetic oligonucleotide; TTA chr11 5353151 5353172 5353168 5353173 +
ctttcttcaatgagggtaaacc

SEQ ID NO: 105764 - DNA, 22 bp, Artificial Sequence
  Synthetic oligonucleotide; CTT chr11 5353154 5353175 5353171 5353176 +
tcttcaatgagggtaaaccatt

SEQ ID NO: 105765 - DNA, 22 bp, Artificial Sequence
  Synthetic oligonucleotide; TTT chr11 5353155 5353176 5353172 5353177 +
cttcaatgagggtaaaccattt

SEQ ID NO: 105766 - DNA, 22 bp, Artificial Sequence
  Synthetic oligonucleotide; TTC chr11 5353156 5353177 5353173 5353178 +
ttcaatgagggtaaaccatttc

SEQ ID NO: 105767 - DNA, 22 bp, Artificial Sequence
  Synthetic oligonucleotide; CTT chr11 5353158 5353179 5353175 5353180 +
caatgagggtaaaccatttccc

SEQ ID NO: 105768 - DNA, 22 bp, Artificial Sequence
  Synthetic oligonucleotide; TTC chr11 5353159 5353180 5353176 5353181 +
aatgagggtaaaccatttccct

SEQ ID NO: 105769 - DNA, 22 bp, Artificial Sequence
  Synthetic oligonucleotide; TTT chr11 5353177 5353198 5353194 5353199 +
ccctcaattcaaaatgatgagt

SEQ ID NO: 105770 - DNA, 22 bp, Artificial Sequence
  Synthetic oligonucleotide; TTC chr11 5353178 5353199 5353195 5353200 +
cctcaattcaaaatgatgagtc

SEQ ID NO: 105771 - DNA, 22 bp, Artificial Sequence
  Synthetic oligonucleotide; CTC chr11 5353182 5353203 5353199 5353204 +
aattcaaaatgatgagtctagg

SEQ ID NO: 105772 - DNA, 22 bp, Artificial Sequence
  Synthetic oligonucleotide; TTC chr11 5353187 5353208 5353204 5353209 +
aaaatgatgagtctagggaaag

SEQ ID NO: 105773 - DNA, 22 bp, Artificial Sequence
  Synthetic oligonucleotide; CTA chr11 5353202 5353223 5353219 5353224 +
gggaaagtatctctatgagaaa

SEQ ID NO: 105774 - DNA, 22 bp, Artificial Sequence
  Synthetic oligonucleotide; CTC chr11 5353215 5353236 5353232 5353237 +
tatgagaaatgtgttcagttaa

SEQ ID NO: 105775 - DNA, 22 bp, Artificial Sequence
  Synthetic oligonucleotide; CTA chr11 5353217 5353238 5353234 5353239 +
tgagaaatgtgttcagttaaaa

SEQ ID NO: 105776 - DNA, 22 bp, Artificial Sequence
  Synthetic oligonucleotide; TTC chr11 5353231 5353252 5353248 5353253 +
agttaaaactttggttaacatt

SEQ ID NO: 105777 - DNA, 22 bp, Artificial Sequence
  Synthetic oligonucleotide; TTA chr11 5353236 5353257 5353253 5353258 +
aaactttggttaacatttatca

SEQ ID NO: 105778 - DNA, 22 bp, Artificial Sequence
  Synthetic oligonucleotide; CTT chr11 5353242 5353263 5353259 5353264 +
tggttaacatttatcaaataat

SEQ ID NO: 105779 - DNA, 22 bp, Artificial Sequence
  Synthetic oligonucleotide; TTT chr11 5353243 5353264 5353260 5353265 +
ggttaacatttatcaaataata

SEQ ID NO: 105780 - DNA, 22 bp, Artificial Sequence
  Synthetic oligonucleotide; TTG chr11 5353244 5353265 5353261 5353266 +
gttaacatttatcaaataatat

SEQ ID NO: 105781 - DNA, 22 bp, Artificial Sequence
  Synthetic oligonucleotide; TTA chr11 5353248 5353269 5353265 5353270 +
acatttatcaaataatattgat

SEQ ID NO: 105782 - DNA, 22 bp, Artificial Sequence
  Synthetic oligonucleotide; TTT chr11 5353254 5353275 5353271 5353276 +
atcaaataatattgataataat

SEQ ID NO: 105783 - DNA, 22 bp, Artificial Sequence
  Synthetic oligonucleotide; TTA chr11 5353255 5353276 5353272 5353277 +
tcaaataatattgataataatt

SEQ ID NO: 105784 - DNA, 22 bp, Artificial Sequence
  Synthetic oligonucleotide; TTG chr11 5353268 5353289 5353285 5353290 +
ataataatttgaaaacagagat

SEQ ID NO: 105785 - DNA, 22 bp, Artificial Sequence
  Synthetic oligonucleotide; TTT chr11 5353278 5353299 5353295 5353300 +
gaaaacagagatataatttcta

SEQ ID NO: 105786 - DNA, 22 bp, Artificial Sequence
  Synthetic oligonucleotide; TTG chr11 5353279 5353300 5353296 5353301 +
aaaacagagatataatttctaa

SEQ ID NO: 105787 - DNA, 22 bp, Artificial Sequence
  Synthetic oligonucleotide; TTT chr11 5353297 5353318 5353314 5353319 +
ctaattcagatgaccattgtct

SEQ ID NO: 105788 - DNA, 22 bp, Artificial Sequence
  Synthetic oligonucleotide; TTC chr11 5353298 5353319 5353315 5353320 +
taattcagatgaccattgtctt

SEQ ID NO: 105789 - DNA, 22 bp, Artificial Sequence
  Synthetic oligonucleotide; CTA chr11 5353300 5353321 5353317 5353322 +
attcagatgaccattgtcttga

SEQ ID NO: 105790 - DNA, 22 bp, Artificial Sequence
  Synthetic oligonucleotide; TTC chr11 5353304 5353325 5353321 5353326 +
agatgaccattgtcttgatagt

SEQ ID NO: 105791 - DNA, 22 bp, Artificial Sequence
  Synthetic oligonucleotide; TTG chr11 5353316 5353337 5353333 5353338 +
tcttgatagttaattccagtta

SEQ ID NO: 105792 - DNA, 22 bp, Artificial Sequence
  Synthetic oligonucleotide; CTT chr11 5353320 5353341 5353337 5353342 +
gatagttaattccagttactac

SEQ ID NO: 105793 - DNA, 22 bp, Artificial Sequence
  Synthetic oligonucleotide; TTG chr11 5353321 5353342 5353338 5353343 +
atagttaattccagttactact

SEQ ID NO: 105794 - DNA, 22 bp, Artificial Sequence
  Synthetic oligonucleotide; TTA chr11 5353328 5353349 5353345 5353350 +
attccagttactactgaacaga

SEQ ID NO: 105795 - DNA, 22 bp, Artificial Sequence
  Synthetic oligonucleotide; TTC chr11 5353332 5353353 5353349 5353354 +
cagttactactgaacagagaga

SEQ ID NO: 105796 - DNA, 22 bp, Artificial Sequence
  Synthetic oligonucleotide; TTA chr11 5353338 5353359 5353355 5353360 +
ctactgaacagagagatgcatt

SEQ ID NO: 105797 - DNA, 22 bp, Artificial Sequence
  Synthetic oligonucleotide; CTA chr11 5353341 5353362 5353358 5353363 +
ctgaacagagagatgcattttc

SEQ ID NO: 105798 - DNA, 22 bp, Artificial Sequence
  Synthetic oligonucleotide; CTG chr11 5353344 5353365 5353361 5353366 +
aacagagagatgcattttcata

SEQ ID NO: 105799 - DNA, 22 bp, Artificial Sequence
  Synthetic oligonucleotide; TTT chr11 5353361 5353382 5353378 5353383 +
tcataaagtggtatgagaggtc

SEQ ID NO: 105800 - DNA, 22 bp, Artificial Sequence
  Synthetic oligonucleotide; TTT chr11 5353362 5353383 5353379 5353384 +
cataaagtggtatgagaggtct

SEQ ID NO: 105801 - DNA, 22 bp, Artificial Sequence
  Synthetic oligonucleotide; TTC chr11 5353363 5353384 5353380 5353385 +
ataaagtggtatgagaggtctg

SEQ ID NO: 105802 - DNA, 22 bp, Artificial Sequence
  Synthetic oligonucleotide; CTG chr11 5353385 5353406 5353402 5353407 +
gtttaggggaacatcagagata

SEQ ID NO: 105803 - DNA, 22 bp, Artificial Sequence
  Synthetic oligonucleotide; TTT chr11 5353389 5353410 5353406 5353411 +
aggggaacatcagagataagac

SEQ ID NO: 105804 - DNA, 22 bp, Artificial Sequence
  Synthetic oligonucleotide; TTA chr11 5353390 5353411 5353407 5353412 +
ggggaacatcagagataagact

SEQ ID NO: 105805 - DNA, 22 bp, Artificial Sequence
  Synthetic oligonucleotide; CTA chr11 5353413 5353434 5353430 5353435 +
gataggggtgtctggcatgtgc

SEQ ID NO: 105806 - DNA, 22 bp, Artificial Sequence
  Synthetic oligonucleotide; CTG chr11 5353427 5353448 5353444 5353449 +
gcatgtgcaaaatagcagagtt

SEQ ID NO: 105807 - DNA, 22 bp, Artificial Sequence
  Synthetic oligonucleotide; TTG chr11 5353450 5353471 5353467 5353472 +
aaaaacaaacagttggtcatat

SEQ ID NO: 105808 - DNA, 22 bp, Artificial Sequence
  Synthetic oligonucleotide; TTG chr11 5353465 5353486 5353482 5353487 +
gtcatatgtggagagtggggag

SEQ ID NO: 105809 - DNA, 22 bp, Artificial Sequence
  Synthetic oligonucleotide; CTC chr11 5353513 5353534 5353530 5353535 +
ataactagaagataaaatggcc

SEQ ID NO: 105810 - DNA, 22 bp, Artificial Sequence
  Synthetic oligonucleotide; CTA chr11 5353520 5353541 5353537 5353542 +
gaagataaaatggccttttctg

SEQ ID NO: 105811 - DNA, 22 bp, Artificial Sequence
  Synthetic oligonucleotide; CTT chr11 5353537 5353558 5353554 5353559 +
ttctggctccaaatacttttga

SEQ ID NO: 105812 - DNA, 22 bp, Artificial Sequence
  Synthetic oligonucleotide; TTT chr11 5353538 5353559 5353555 5353560 +
tctggctccaaatacttttgat

SEQ ID NO: 105813 - DNA, 22 bp, Artificial Sequence
  Synthetic oligonucleotide; TTT chr11 5353539 5353560 5353556 5353561 +
ctggctccaaatacttttgatt

SEQ ID NO: 105814 - DNA, 22 bp, Artificial Sequence
  Synthetic oligonucleotide; TTC chr11 5353540 5353561 5353557 5353562 +
tggctccaaatacttttgattc

SEQ ID NO: 105815 - DNA, 22 bp, Artificial Sequence
  Synthetic oligonucleotide; CTG chr11 5353542 5353563 5353559 5353564 +
gctccaaatacttttgattctt

SEQ ID NO: 105816 - DNA, 22 bp, Artificial Sequence
  Synthetic oligonucleotide; CTC chr11 5353546 5353567 5353563 5353568 +
caaatacttttgattcttttca

SEQ ID NO: 105817 - DNA, 22 bp, Artificial Sequence
  Synthetic oligonucleotide; CTT chr11 5353555 5353576 5353572 5353577 +
ttgattcttttcagagtctagg

SEQ ID NO: 105818 - DNA, 22 bp, Artificial Sequence
  Synthetic oligonucleotide; TTT chr11 5353556 5353577 5353573 5353578 +
tgattcttttcagagtctaggc

SEQ ID NO: 105819 - DNA, 22 bp, Artificial Sequence
  Synthetic oligonucleotide; TTT chr11 5353557 5353578 5353574 5353579 +
gattcttttcagagtctaggca

SEQ ID NO: 105820 - DNA, 22 bp, Artificial Sequence
  Synthetic oligonucleotide; TTG chr11 5353558 5353579 5353575 5353580 +
attcttttcagagtctaggcat

SEQ ID NO: 105821 - DNA, 22 bp, Artificial Sequence
  Synthetic oligonucleotide; TTC chr11 5353562 5353583 5353579 5353584 +
ttttcagagtctaggcatgaga

SEQ ID NO: 105822 - DNA, 22 bp, Artificial Sequence
  Synthetic oligonucleotide; CTT chr11 5353564 5353585 5353581 5353586 +
ttcagagtctaggcatgagaag

SEQ ID NO: 105823 - DNA, 22 bp, Artificial Sequence
  Synthetic oligonucleotide; TTT chr11 5353565 5353586 5353582 5353587 +
tcagagtctaggcatgagaaga

SEQ ID NO: 105824 - DNA, 22 bp, Artificial Sequence
  Synthetic oligonucleotide; TTT chr11 5353566 5353587 5353583 5353588 +
cagagtctaggcatgagaagag

SEQ ID NO: 105825 - DNA, 22 bp, Artificial Sequence
  Synthetic oligonucleotide; TTC chr11 5353567 5353588 5353584 5353589 +
agagtctaggcatgagaagagg

SEQ ID NO: 105826 - DNA, 22 bp, Artificial Sequence
  Synthetic oligonucleotide; CTA chr11 5353575 5353596 5353592 5353597 +
ggcatgagaagagggggtttgt

SEQ ID NO: 105827 - DNA, 22 bp, Artificial Sequence
  Synthetic oligonucleotide; TTT chr11 5353595 5353616 5353612 5353617 +
gtggtcctatggccaggtgaag

SEQ ID NO: 105828 - DNA, 22 bp, Artificial Sequence
  Synthetic oligonucleotide; TTG chr11 5353596 5353617 5353613 5353618 +
tggtcctatggccaggtgaaga

SEQ ID NO: 105829 - DNA, 22 bp, Artificial Sequence
  Synthetic oligonucleotide; CTA chr11 5353604 5353625 5353621 5353626 +
tggccaggtgaagagccagtat

SEQ ID NO: 105830 - DNA, 22 bp, Artificial Sequence
  Synthetic oligonucleotide; CTC chr11 5353635 5353656 5353652 5353657 +
aaatgataagttttaaattaat

SEQ ID NO: 105831 - DNA, 22 bp, Artificial Sequence
  Synthetic oligonucleotide; TTT chr11 5353648 5353669 5353665 5353670 +
taaattaattttaaaagaaaga

SEQ ID NO: 105832 - DNA, 22 bp, Artificial Sequence
  Synthetic oligonucleotide; TTT chr11 5353649 5353670 5353666 5353671 +
aaattaattttaaaagaaagat

SEQ ID NO: 105833 - DNA, 22 bp, Artificial Sequence
  Synthetic oligonucleotide; TTA chr11 5353650 5353671 5353667 5353672 +
aattaattttaaaagaaagata

SEQ ID NO: 105834 - DNA, 22 bp, Artificial Sequence
  Synthetic oligonucleotide; TTA chr11 5353655 5353676 5353672 5353677 +
attttaaaagaaagatattctt

SEQ ID NO: 105835 - DNA, 22 bp, Artificial Sequence
  Synthetic oligonucleotide; TTT chr11 5353659 5353680 5353676 5353681 +
taaaagaaagatattcttttga

SEQ ID NO: 105836 - DNA, 22 bp, Artificial Sequence
  Synthetic oligonucleotide; TTT chr11 5353660 5353681 5353677 5353682 +
aaaagaaagatattcttttgac

SEQ ID NO: 105837 - DNA, 22 bp, Artificial Sequence
  Synthetic oligonucleotide; TTA chr11 5353661 5353682 5353678 5353683 +
aaagaaagatattcttttgacc

SEQ ID NO: 105838 - DNA, 22 bp, Artificial Sequence
  Synthetic oligonucleotide; TTC chr11 5353675 5353696 5353692 5353697 +
ttttgaccaaaatacagggtat

SEQ ID NO: 105839 - DNA, 22 bp, Artificial Sequence
  Synthetic oligonucleotide; CTT chr11 5353677 5353698 5353694 5353699 +
ttgaccaaaatacagggtatga

SEQ ID NO: 105840 - DNA, 22 bp, Artificial Sequence
  Synthetic oligonucleotide; TTT chr11 5353678 5353699 5353695 5353700 +
tgaccaaaatacagggtatgat

SEQ ID NO: 105841 - DNA, 22 bp, Artificial Sequence
  Synthetic oligonucleotide; TTT chr11 5353679 5353700 5353696 5353701 +
gaccaaaatacagggtatgatg

SEQ ID NO: 105842 - DNA, 22 bp, Artificial Sequence
  Synthetic oligonucleotide; TTG chr11 5353680 5353701 5353697 5353702 +
accaaaatacagggtatgatgt

SEQ ID NO: 105843 - DNA, 22 bp, Artificial Sequence
  Synthetic oligonucleotide; CTT chr11 5353706 5353727 5353723 5353728 +
ggactacacaaggggccaccca

SEQ ID NO: 105844 - DNA, 22 bp, Artificial Sequence
  Synthetic oligonucleotide; TTG chr11 5353707 5353728 5353724 5353729 +
gactacacaaggggccacccag

SEQ ID NO: 105845 - DNA, 22 bp, Artificial Sequence
  Synthetic oligonucleotide; CTA chr11 5353712 5353733 5353729 5353734 +
cacaaggggccacccagtgacc

SEQ ID NO: 105846 - DNA, 22 bp, Artificial Sequence
  Synthetic oligonucleotide; CTG chr11 5353743 5353764 5353760 5353765 +
gatgcccctcatctctggcctc

SEQ ID NO: 105847 - DNA, 22 bp, Artificial Sequence
  Synthetic oligonucleotide; CTC chr11 5353753 5353774 5353770 5353775 +
atctctggcctctgtcatactg

SEQ ID NO: 105848 - DNA, 22 bp, Artificial Sequence
  Synthetic oligonucleotide; CTC chr11 5353758 5353779 5353775 5353780 +
tggcctctgtcatactgacact

SEQ ID NO: 105849 - DNA, 22 bp, Artificial Sequence
  Synthetic oligonucleotide; CTG chr11 5353760 5353781 5353777 5353782 +
gcctctgtcatactgacactca

SEQ ID NO: 105850 - DNA, 22 bp, Artificial Sequence
  Synthetic oligonucleotide; CTC chr11 5353765 5353786 5353782 5353787 +
tgtcatactgacactcagtgat

SEQ ID NO: 105851 - DNA, 22 bp, Artificial Sequence
  Synthetic oligonucleotide; CTG chr11 5353767 5353788 5353784 5353789 +
tcatactgacactcagtgatct

SEQ ID NO: 105852 - DNA, 22 bp, Artificial Sequence
  Synthetic oligonucleotide; CTG chr11 5353775 5353796 5353792 5353797 +
acactcagtgatctatggctgc

SEQ ID NO: 105853 - DNA, 22 bp, Artificial Sequence
  Synthetic oligonucleotide; CTC chr11 5353781 5353802 5353798 5353803 +
agtgatctatggctgcccacct

SEQ ID NO: 105854 - DNA, 22 bp, Artificial Sequence
  Synthetic oligonucleotide; CTA chr11 5353790 5353811 5353807 5353812 +
tggctgcccacctactcttcat

SEQ ID NO: 105855 - DNA, 22 bp, Artificial Sequence
  Synthetic oligonucleotide; CTG chr11 5353796 5353817 5353813 5353818 +
cccacctactcttcatcacaga

SEQ ID NO: 105856 - DNA, 22 bp, Artificial Sequence
  Synthetic oligonucleotide; CTA chr11 5353804 5353825 5353821 5353826 +
ctcttcatcacagaaaggtggg

SEQ ID NO: 105857 - DNA, 22 bp, Artificial Sequence
  Synthetic oligonucleotide; CTC chr11 5353807 5353828 5353824 5353829 +
ttcatcacagaaaggtggggat

SEQ ID NO: 105858 - DNA, 22 bp, Artificial Sequence
  Synthetic oligonucleotide; CTT chr11 5353809 5353830 5353826 5353831 +
catcacagaaaggtggggattt

SEQ ID NO: 105859 - DNA, 22 bp, Artificial Sequence
  Synthetic oligonucleotide; TTC chr11 5353810 5353831 5353827 5353832 +
atcacagaaaggtggggatttt

SEQ ID NO: 105860 - DNA, 22 bp, Artificial Sequence
  Synthetic oligonucleotide; TTT chr11 5353831 5353852 5353848 5353853 +
tttaggattcttgggatgtata

SEQ ID NO: 105861 - DNA, 22 bp, Artificial Sequence
  Synthetic oligonucleotide; TTT chr11 5353832 5353853 5353849 5353854 +
ttaggattcttgggatgtataa

SEQ ID NO: 105862 - DNA, 22 bp, Artificial Sequence
  Synthetic oligonucleotide; TTT chr11 5353833 5353854 5353850 5353855 +
taggattcttgggatgtataaa

SEQ ID NO: 105863 - DNA, 22 bp, Artificial Sequence
  Synthetic oligonucleotide; TTT chr11 5353834 5353855 5353851 5353856 +
aggattcttgggatgtataaat

SEQ ID NO: 105864 - DNA, 22 bp, Artificial Sequence
  Synthetic oligonucleotide; TTA chr11 5353835 5353856 5353852 5353857 +
ggattcttgggatgtataaata

SEQ ID NO: 105865 - DNA, 22 bp, Artificial Sequence
  Synthetic oligonucleotide; TTC chr11 5353841 5353862 5353858 5353863 +
ttgggatgtataaataacacag

SEQ ID NO: 105866 - DNA, 22 bp, Artificial Sequence
  Synthetic oligonucleotide; CTT chr11 5353843 5353864 5353860 5353865 +
gggatgtataaataacacagag

SEQ ID NO: 105867 - DNA, 22 bp, Artificial Sequence
  Synthetic oligonucleotide; TTG chr11 5353844 5353865 5353861 5353866 +
ggatgtataaataacacagaga

SEQ ID NO: 105868 - DNA, 22 bp, Artificial Sequence
  Synthetic oligonucleotide; CTT chr11 5353889 5353910 5353906 5353911 +
cacaatagtttccaggctagta

SEQ ID NO: 105869 - DNA, 22 bp, Artificial Sequence
  Synthetic oligonucleotide; TTC chr11 5353890 5353911 5353907 5353912 +
acaatagtttccaggctagtaa

SEQ ID NO: 105870 - DNA, 22 bp, Artificial Sequence
  Synthetic oligonucleotide; TTT chr11 5353900 5353921 5353917 5353922 +
ccaggctagtaaatgatcttta

SEQ ID NO: 105871 - DNA, 22 bp, Artificial Sequence
  Synthetic oligonucleotide; TTC chr11 5353901 5353922 5353918 5353923 +
caggctagtaaatgatctttat

SEQ ID NO: 105872 - DNA, 22 bp, Artificial Sequence
  Synthetic oligonucleotide; CTA chr11 5353908 5353929 5353925 5353930 +
gtaaatgatctttatctgatta

SEQ ID NO: 105873 - DNA, 22 bp, Artificial Sequence
  Synthetic oligonucleotide; CTT chr11 5353920 5353941 5353937 5353942 +
tatctgattagaccaaaagatt

SEQ ID NO: 105874 - DNA, 22 bp, Artificial Sequence
  Synthetic oligonucleotide; TTT chr11 5353921 5353942 5353938 5353943 +
atctgattagaccaaaagattt

SEQ ID NO: 105875 - DNA, 22 bp, Artificial Sequence
  Synthetic oligonucleotide; TTA chr11 5353922 5353943 5353939 5353944 +
tctgattagaccaaaagatttt

SEQ ID NO: 105876 - DNA, 22 bp, Artificial Sequence
  Synthetic oligonucleotide; CTG chr11 5353926 5353947 5353943 5353948 +
attagaccaaaagattttgttt

SEQ ID NO: 105877 - DNA, 22 bp, Artificial Sequence
  Synthetic oligonucleotide; TTA chr11 5353930 5353951 5353947 5353952 +
gaccaaaagattttgtttgttt

SEQ ID NO: 105878 - DNA, 22 bp, Artificial Sequence
  Synthetic oligonucleotide; TTT chr11 5353943 5353964 5353960 5353965 +
tgtttgttttactcaacttggc

SEQ ID NO: 105879 - DNA, 22 bp, Artificial Sequence
  Synthetic oligonucleotide; TTT chr11 5353944 5353965 5353961 5353966 +
gtttgttttactcaacttggct

SEQ ID NO: 105880 - DNA, 22 bp, Artificial Sequence
  Synthetic oligonucleotide; TTG chr11 5353945 5353966 5353962 5353967 +
tttgttttactcaacttggctg

SEQ ID NO: 105881 - DNA, 22 bp, Artificial Sequence
  Synthetic oligonucleotide; TTT chr11 5353948 5353969 5353965 5353970 +
gttttactcaacttggctgtgt

SEQ ID NO: 105882 - DNA, 22 bp, Artificial Sequence
  Synthetic oligonucleotide; TTG chr11 5353949 5353970 5353966 5353971 +
ttttactcaacttggctgtgtg

SEQ ID NO: 105883 - DNA, 22 bp, Artificial Sequence
  Synthetic oligonucleotide; TTT chr11 5353952 5353973 5353969 5353974 +
tactcaacttggctgtgtgtga

SEQ ID NO: 105884 - DNA, 22 bp, Artificial Sequence
  Synthetic oligonucleotide; TTT chr11 5353953 5353974 5353970 5353975 +
actcaacttggctgtgtgtgaa

SEQ ID NO: 105885 - DNA, 22 bp, Artificial Sequence
  Synthetic oligonucleotide; TTA chr11 5353954 5353975 5353971 5353976 +
ctcaacttggctgtgtgtgaaa

SEQ ID NO: 105886 - DNA, 22 bp, Artificial Sequence
  Synthetic oligonucleotide; CTC chr11 5353957 5353978 5353974 5353979 +
aacttggctgtgtgtgaaattt

SEQ ID NO: 105887 - DNA, 22 bp, Artificial Sequence
  Synthetic oligonucleotide; CTT chr11 5353962 5353983 5353979 5353984 +
ggctgtgtgtgaaatttgcctt

SEQ ID NO: 105888 - DNA, 22 bp, Artificial Sequence
  Synthetic oligonucleotide; TTG chr11 5353963 5353984 5353980 5353985 +
gctgtgtgtgaaatttgccttt

SEQ ID NO: 105889 - DNA, 22 bp, Artificial Sequence
  Synthetic oligonucleotide; CTG chr11 5353967 5353988 5353984 5353989 +
tgtgtgaaatttgcctttctct

SEQ ID NO: 105890 - DNA, 22 bp, Artificial Sequence
  Synthetic oligonucleotide; TTT chr11 5353979 5354000 5353996 5354001 +
gcctttctcttttgtagcttct

SEQ ID NO: 105891 - DNA, 22 bp, Artificial Sequence
  Synthetic oligonucleotide; TTG chr11 5353980 5354001 5353997 5354002 +
cctttctcttttgtagcttctt

SEQ ID NO: 105892 - DNA, 22 bp, Artificial Sequence
  Synthetic oligonucleotide; CTT chr11 5353984 5354005 5354001 5354006 +
tctcttttgtagcttcttgact

SEQ ID NO: 105893 - DNA, 22 bp, Artificial Sequence
  Synthetic oligonucleotide; TTT chr11 5353985 5354006 5354002 5354007 +
ctcttttgtagcttcttgactg

SEQ ID NO: 105894 - DNA, 22 bp, Artificial Sequence
  Synthetic oligonucleotide; TTC chr11 5353986 5354007 5354003 5354008 +
tcttttgtagcttcttgactgt

SEQ ID NO: 105895 - DNA, 22 bp, Artificial Sequence
  Synthetic oligonucleotide; CTC chr11 5353988 5354009 5354005 5354010 +
ttttgtagcttcttgactgtgt

SEQ ID NO: 105896 - DNA, 22 bp, Artificial Sequence
  Synthetic oligonucleotide; CTT chr11 5353990 5354011 5354007 5354012 +
ttgtagcttcttgactgtgtgc

SEQ ID NO: 105897 - DNA, 22 bp, Artificial Sequence
  Synthetic oligonucleotide; TTT chr11 5353991 5354012 5354008 5354013 +
tgtagcttcttgactgtgtgct

SEQ ID NO: 105898 - DNA, 22 bp, Artificial Sequence
  Synthetic oligonucleotide; TTT chr11 5353992 5354013 5354009 5354014 +
gtagcttcttgactgtgtgctc

SEQ ID NO: 105899 - DNA, 22 bp, Artificial Sequence
  Synthetic oligonucleotide; TTG chr11 5353993 5354014 5354010 5354015 +
tagcttcttgactgtgtgctcg

SEQ ID NO: 105900 - DNA, 22 bp, Artificial Sequence
  Synthetic oligonucleotide; CTT chr11 5353999 5354020 5354016 5354021 +
cttgactgtgtgctcgaggatg

SEQ ID NO: 105901 - DNA, 22 bp, Artificial Sequence
  Synthetic oligonucleotide; TTC chr11 5354000 5354021 5354017 5354022 +
ttgactgtgtgctcgaggatgg

SEQ ID NO: 105902 - DNA, 22 bp, Artificial Sequence
  Synthetic oligonucleotide; CTT chr11 5354002 5354023 5354019 5354024 +
gactgtgtgctcgaggatggta

SEQ ID NO: 105903 - DNA, 22 bp, Artificial Sequence
  Synthetic oligonucleotide; TTG chr11 5354003 5354024 5354020 5354025 +
actgtgtgctcgaggatggtaa

SEQ ID NO: 105904 - DNA, 22 bp, Artificial Sequence
  Synthetic oligonucleotide; CTG chr11 5354007 5354028 5354024 5354029 +
tgtgctcgaggatggtaaatat

SEQ ID NO: 105905 - DNA, 22 bp, Artificial Sequence
  Synthetic oligonucleotide; CTC chr11 5354014 5354035 5354031 5354036 +
gaggatggtaaatataacatag

SEQ ID NO: 105906 - DNA, 22 bp, Artificial Sequence
  Synthetic oligonucleotide; TTC chr11 5354039 5354060 5354056 5354061 +
ttattccctactgtattacaga

SEQ ID NO: 105907 - DNA, 22 bp, Artificial Sequence
  Synthetic oligonucleotide; CTT chr11 5354041 5354062 5354058 5354063 +
attccctactgtattacagaac

SEQ ID NO: 105908 - DNA, 22 bp, Artificial Sequence
  Synthetic oligonucleotide; TTA chr11 5354042 5354063 5354059 5354064 +
ttccctactgtattacagaact

SEQ ID NO: 105909 - DNA, 22 bp, Artificial Sequence
  Synthetic oligonucleotide; TTC chr11 5354045 5354066 5354062 5354067 +
cctactgtattacagaacttct

SEQ ID NO: 105910 - DNA, 22 bp, Artificial Sequence
  Synthetic oligonucleotide; CTA chr11 5354049 5354070 5354066 5354071 +
ctgtattacagaacttctcaca

SEQ ID NO: 105911 - DNA, 22 bp, Artificial Sequence
  Synthetic oligonucleotide; CTG chr11 5354052 5354073 5354069 5354074 +
tattacagaacttctcacatag

SEQ ID NO: 105912 - DNA, 22 bp, Artificial Sequence
  Synthetic oligonucleotide; TTA chr11 5354057 5354078 5354074 5354079 +
cagaacttctcacatagaccat

SEQ ID NO: 105913 - DNA, 22 bp, Artificial Sequence
  Synthetic oligonucleotide; CTT chr11 5354065 5354086 5354082 5354087 +
ctcacatagaccatttttaaca

SEQ ID NO: 105914 - DNA, 22 bp, Artificial Sequence
  Synthetic oligonucleotide; TTC chr11 5354066 5354087 5354083 5354088 +
tcacatagaccatttttaacaa

SEQ ID NO: 105915 - DNA, 22 bp, Artificial Sequence
  Synthetic oligonucleotide; CTC chr11 5354068 5354089 5354085 5354090 +
acatagaccatttttaacaaaa

SEQ ID NO: 105916 - DNA, 22 bp, Artificial Sequence
  Synthetic oligonucleotide; TTT chr11 5354081 5354102 5354098 5354103 +
ttaacaaaatataatttttcat

SEQ ID NO: 105917 - DNA, 22 bp, Artificial Sequence
  Synthetic oligonucleotide; TTT chr11 5354082 5354103 5354099 5354104 +
taacaaaatataatttttcatt

SEQ ID NO: 105918 - DNA, 22 bp, Artificial Sequence
  Synthetic oligonucleotide; TTT chr11 5354083 5354104 5354100 5354105 +
aacaaaatataatttttcatta

SEQ ID NO: 105919 - DNA, 22 bp, Artificial Sequence
  Synthetic oligonucleotide; TTA chr11 5354084 5354105 5354101 5354106 +
acaaaatataatttttcattaa

SEQ ID NO: 105920 - DNA, 22 bp, Artificial Sequence
  Synthetic oligonucleotide; TTT chr11 5354098 5354119 5354115 5354120 +
ttcattaaaatgaataaataaa

SEQ ID NO: 105921 - DNA, 22 bp, Artificial Sequence
  Synthetic oligonucleotide; TTT chr11 5354099 5354120 5354116 5354121 +
tcattaaaatgaataaataaaa

SEQ ID NO: 105922 - DNA, 22 bp, Artificial Sequence
  Synthetic oligonucleotide; TTT chr11 5354100 5354121 5354117 5354122 +
cattaaaatgaataaataaaat

SEQ ID NO: 105923 - DNA, 22 bp, Artificial Sequence
  Synthetic oligonucleotide; TTC chr11 5354101 5354122 5354118 5354123 +
attaaaatgaataaataaaatt

SEQ ID NO: 105924 - DNA, 22 bp, Artificial Sequence
  Synthetic oligonucleotide; TTA chr11 5354105 5354126 5354122 5354127 +
aaatgaataaataaaatttaaa

SEQ ID NO: 105925 - DNA, 22 bp, Artificial Sequence
  Synthetic oligonucleotide; TTT chr11 5354124 5354145 5354141 5354146 +
aaagtgacccatgtctttctgt

SEQ ID NO: 105926 - DNA, 22 bp, Artificial Sequence
  Synthetic oligonucleotide; TTA chr11 5354125 5354146 5354142 5354147 +
aagtgacccatgtctttctgtg

SEQ ID NO: 105927 - DNA, 22 bp, Artificial Sequence
  Synthetic oligonucleotide; CTT chr11 5354141 5354162 5354158 5354163 +
tctgtgtgtctgctagttcttc

SEQ ID NO: 105928 - DNA, 22 bp, Artificial Sequence
  Synthetic oligonucleotide; TTT chr11 5354142 5354163 5354159 5354164 +
ctgtgtgtctgctagttcttct

SEQ ID NO: 105929 - DNA, 22 bp, Artificial Sequence
  Synthetic oligonucleotide; TTC chr11 5354143 5354164 5354160 5354165 +
tgtgtgtctgctagttcttctg

SEQ ID NO: 105930 - DNA, 22 bp, Artificial Sequence
  Synthetic oligonucleotide; CTG chr11 5354145 5354166 5354162 5354167 +
tgtgtctgctagttcttctgtc

SEQ ID NO: 105931 - DNA, 22 bp, Artificial Sequence
  Synthetic oligonucleotide; CTG chr11 5354153 5354174 5354170 5354175 +
ctagttcttctgtctgttactg

SEQ ID NO: 105932 - DNA, 22 bp, Artificial Sequence
  Synthetic oligonucleotide; CTA chr11 5354156 5354177 5354173 5354178 +
gttcttctgtctgttactgctc

SEQ ID NO: 105933 - DNA, 22 bp, Artificial Sequence
  Synthetic oligonucleotide; TTC chr11 5354160 5354181 5354177 5354182 +
ttctgtctgttactgctctctg

SEQ ID NO: 105934 - DNA, 22 bp, Artificial Sequence
  Synthetic oligonucleotide; CTT chr11 5354162 5354183 5354179 5354184 +
ctgtctgttactgctctctgta

SEQ ID NO: 105935 - DNA, 22 bp, Artificial Sequence
  Synthetic oligonucleotide; TTC chr11 5354163 5354184 5354180 5354185 +
tgtctgttactgctctctgtat

SEQ ID NO: 105936 - DNA, 22 bp, Artificial Sequence
  Synthetic oligonucleotide; CTG chr11 5354165 5354186 5354182 5354187 +
tctgttactgctctctgtattg

SEQ ID NO: 105937 - DNA, 22 bp, Artificial Sequence
  Synthetic oligonucleotide; CTG chr11 5354169 5354190 5354186 5354191 +
ttactgctctctgtattgtctt

SEQ ID NO: 105938 - DNA, 22 bp, Artificial Sequence
  Synthetic oligonucleotide; TTA chr11 5354172 5354193 5354189 5354194 +
ctgctctctgtattgtcttcca

SEQ ID NO: 105939 - DNA, 22 bp, Artificial Sequence
  Synthetic oligonucleotide; CTG chr11 5354175 5354196 5354192 5354197 +
ctctctgtattgtcttccaaga

SEQ ID NO: 105940 - DNA, 22 bp, Artificial Sequence
  Synthetic oligonucleotide; CTC chr11 5354178 5354199 5354195 5354200 +
tctgtattgtcttccaagatat

SEQ ID NO: 105941 - DNA, 22 bp, Artificial Sequence
  Synthetic oligonucleotide; CTC chr11 5354180 5354201 5354197 5354202 +
tgtattgtcttccaagatatgg

SEQ ID NO: 105942 - DNA, 22 bp, Artificial Sequence
  Synthetic oligonucleotide; CTG chr11 5354182 5354203 5354199 5354204 +
tattgtcttccaagatatgggc

SEQ ID NO: 105943 - DNA, 22 bp, Artificial Sequence
  Synthetic oligonucleotide; TTG chr11 5354187 5354208 5354204 5354209 +
tcttccaagatatgggcaatgt

SEQ ID NO: 105944 - DNA, 22 bp, Artificial Sequence
  Synthetic oligonucleotide; CTT chr11 5354191 5354212 5354208 5354213 +
ccaagatatgggcaatgtatac

SEQ ID NO: 105945 - DNA, 22 bp, Artificial Sequence
  Synthetic oligonucleotide; TTC chr11 5354192 5354213 5354209 5354214 +
caagatatgggcaatgtatact

SEQ ID NO: 105946 - DNA, 22 bp, Artificial Sequence
  Synthetic oligonucleotide; CTT chr11 5354215 5354236 5354232 5354237 +
aatcctgttctttcttcccttg

SEQ ID NO: 105947 - DNA, 22 bp, Artificial Sequence
  Synthetic oligonucleotide; TTA chr11 5354216 5354237 5354233 5354238 +
atcctgttctttcttcccttgg

SEQ ID NO: 105948 - DNA, 22 bp, Artificial Sequence
  Synthetic oligonucleotide; CTG chr11 5354222 5354243 5354239 5354244 +
ttctttcttcccttgggctttt

SEQ ID NO: 105949 - DNA, 22 bp, Artificial Sequence
  Synthetic oligonucleotide; TTC chr11 5354225 5354246 5354242 5354247 +
tttcttcccttgggcttttggg

SEQ ID NO: 105950 - DNA, 22 bp, Artificial Sequence
  Synthetic oligonucleotide; CTT chr11 5354227 5354248 5354244 5354249 +
tcttcccttgggcttttgggaa

SEQ ID NO: 105951 - DNA, 22 bp, Artificial Sequence
  Synthetic oligonucleotide; TTT chr11 5354228 5354249 5354245 5354250 +
cttcccttgggcttttgggaat

SEQ ID NO: 105952 - DNA, 22 bp, Artificial Sequence
  Synthetic oligonucleotide; TTC chr11 5354229 5354250 5354246 5354251 +
ttcccttgggcttttgggaatg

SEQ ID NO: 105953 - DNA, 22 bp, Artificial Sequence
  Synthetic oligonucleotide; CTT chr11 5354231 5354252 5354248 5354253 +
cccttgggcttttgggaatgaa

SEQ ID NO: 105954 - DNA, 22 bp, Artificial Sequence
  Synthetic oligonucleotide; TTC chr11 5354232 5354253 5354249 5354254 +
ccttgggcttttgggaatgaat

SEQ ID NO: 105955 - DNA, 22 bp, Artificial Sequence
  Synthetic oligonucleotide; CTT chr11 5354236 5354257 5354253 5354258 +
gggcttttgggaatgaattcag

SEQ ID NO: 105956 - DNA, 22 bp, Artificial Sequence
  Synthetic oligonucleotide; TTG chr11 5354237 5354258 5354254 5354259 +
ggcttttgggaatgaattcagg

SEQ ID NO: 105957 - DNA, 22 bp, Artificial Sequence
  Synthetic oligonucleotide; CTT chr11 5354242 5354263 5354259 5354264 +
ttgggaatgaattcagggggat

SEQ ID NO: 105958 - DNA, 22 bp, Artificial Sequence
  Synthetic oligonucleotide; TTT chr11 5354243 5354264 5354260 5354265 +
tgggaatgaattcagggggatc

SEQ ID NO: 105959 - DNA, 22 bp, Artificial Sequence
  Synthetic oligonucleotide; TTT chr11 5354244 5354265 5354261 5354266 +
gggaatgaattcagggggatct

SEQ ID NO: 105960 - DNA, 22 bp, Artificial Sequence
  Synthetic oligonucleotide; TTG chr11 5354245 5354266 5354262 5354267 +
ggaatgaattcagggggatcta

SEQ ID NO: 105961 - DNA, 22 bp, Artificial Sequence
  Synthetic oligonucleotide; TTC chr11 5354256 5354277 5354273 5354278 +
agggggatctaagccacatcaa

SEQ ID NO: 105962 - DNA, 22 bp, Artificial Sequence
  Synthetic oligonucleotide; CTA chr11 5354267 5354288 5354284 5354289 +
agccacatcaaagaaaatcttt

SEQ ID NO: 105963 - DNA, 22 bp, Artificial Sequence
  Synthetic oligonucleotide; CTT chr11 5354288 5354309 5354305 5354310 +
tcttgactcaccctctaggtcc

SEQ ID NO: 105964 - DNA, 22 bp, Artificial Sequence
  Synthetic oligonucleotide; TTT chr11 5354289 5354310 5354306 5354311 +
cttgactcaccctctaggtcca

SEQ ID NO: 105965 - DNA, 22 bp, Artificial Sequence
  Synthetic oligonucleotide; TTC chr11 5354290 5354311 5354307 5354312 +
ttgactcaccctctaggtccag

SEQ ID NO: 105966 - DNA, 22 bp, Artificial Sequence
  Synthetic oligonucleotide; CTT chr11 5354292 5354313 5354309 5354314 +
gactcaccctctaggtccagtg

SEQ ID NO: 105967 - DNA, 22 bp, Artificial Sequence
  Synthetic oligonucleotide; TTG chr11 5354293 5354314 5354310 5354315 +
actcaccctctaggtccagtga

SEQ ID NO: 105968 - DNA, 22 bp, Artificial Sequence
  Synthetic oligonucleotide; CTC chr11 5354297 5354318 5354314 5354319 +
accctctaggtccagtgatcct

SEQ ID NO: 105969 - DNA, 22 bp, Artificial Sequence
  Synthetic oligonucleotide; CTC chr11 5354303 5354324 5354320 5354325 +
taggtccagtgatcctgaaacc

SEQ ID NO: 105970 - DNA, 22 bp, Artificial Sequence
  Synthetic oligonucleotide; CTA chr11 5354305 5354326 5354322 5354327 +
ggtccagtgatcctgaaacctg

SEQ ID NO: 105971 - DNA, 22 bp, Artificial Sequence
  Synthetic oligonucleotide; CTG chr11 5354320 5354341 5354337 5354342 +
aaacctgccatagcaggctagt

SEQ ID NO: 105972 - DNA, 22 bp, Artificial Sequence
  Synthetic oligonucleotide; CTG chr11 5354327 5354348 5354344 5354349 +
ccatagcaggctagtataaaga

SEQ ID NO: 105973 - DNA, 22 bp, Artificial Sequence
  Synthetic oligonucleotide; CTA chr11 5354340 5354361 5354357 5354362 +
gtataaagataactaggataac

SEQ ID NO: 105974 - DNA, 22 bp, Artificial Sequence
  Synthetic oligonucleotide; CTA chr11 5354355 5354376 5354372 5354377 +
ggataacaatacattttataaa

SEQ ID NO: 105975 - DNA, 22 bp, Artificial Sequence
  Synthetic oligonucleotide; TTT chr11 5354371 5354392 5354388 5354393 +
tataaattctgtaaatggacac

SEQ ID NO: 105976 - DNA, 22 bp, Artificial Sequence
  Synthetic oligonucleotide; TTT chr11 5354372 5354393 5354389 5354394 +
ataaattctgtaaatggacaca

SEQ ID NO: 105977 - DNA, 22 bp, Artificial Sequence
  Synthetic oligonucleotide; TTA chr11 5354373 5354394 5354390 5354395 +
taaattctgtaaatggacacat

SEQ ID NO: 105978 - DNA, 22 bp, Artificial Sequence
  Synthetic oligonucleotide; TTC chr11 5354380 5354401 5354397 5354402 +
tgtaaatggacacatttgactg

SEQ ID NO: 105979 - DNA, 22 bp, Artificial Sequence
  Synthetic oligonucleotide; CTG chr11 5354382 5354403 5354399 5354404 +
taaatggacacatttgactgac

SEQ ID NO: 105980 - DNA, 22 bp, Artificial Sequence
  Synthetic oligonucleotide; TTT chr11 5354397 5354418 5354414 5354419 +
gactgacaaccctgagtttctc

SEQ ID NO: 105981 - DNA, 22 bp, Artificial Sequence
  Synthetic oligonucleotide; TTG chr11 5354398 5354419 5354415 5354420 +
actgacaaccctgagtttctct

SEQ ID NO: 105982 - DNA, 22 bp, Artificial Sequence
  Synthetic oligonucleotide; CTG chr11 5354402 5354423 5354419 5354424 +
acaaccctgagtttctctcctc

SEQ ID NO: 105983 - DNA, 22 bp, Artificial Sequence
  Synthetic oligonucleotide; CTG chr11 5354411 5354432 5354428 5354433 +
agtttctctcctccctttctgt

SEQ ID NO: 105984 - DNA, 22 bp, Artificial Sequence
  Synthetic oligonucleotide; TTT chr11 5354416 5354437 5354433 5354438 +
ctctcctccctttctgttcttc

SEQ ID NO: 105985 - DNA, 22 bp, Artificial Sequence
  Synthetic oligonucleotide; TTC chr11 5354417 5354438 5354434 5354439 +
tctcctccctttctgttcttcc

SEQ ID NO: 105986 - DNA, 22 bp, Artificial Sequence
  Synthetic oligonucleotide; CTC chr11 5354419 5354440 5354436 5354441 +
tcctccctttctgttcttcctt

SEQ ID NO: 105987 - DNA, 22 bp, Artificial Sequence
  Synthetic oligonucleotide; CTC chr11 5354421 5354442 5354438 5354443 +
ctccctttctgttcttccttat

SEQ ID NO: 105988 - DNA, 22 bp, Artificial Sequence
  Synthetic oligonucleotide; CTC chr11 5354424 5354445 5354441 5354446 +
cctttctgttcttccttatact

SEQ ID NO: 105989 - DNA, 22 bp, Artificial Sequence
  Synthetic oligonucleotide; CTT chr11 5354428 5354449 5354445 5354450 +
tctgttcttccttatactgaag

SEQ ID NO: 105990 - DNA, 22 bp, Artificial Sequence
  Synthetic oligonucleotide; TTT chr11 5354429 5354450 5354446 5354451 +
ctgttcttccttatactgaaga

SEQ ID NO: 105991 - DNA, 22 bp, Artificial Sequence
  Synthetic oligonucleotide; TTC chr11 5354430 5354451 5354447 5354452 +
tgttcttccttatactgaagag

SEQ ID NO: 105992 - DNA, 22 bp, Artificial Sequence
  Synthetic oligonucleotide; CTG chr11 5354432 5354453 5354449 5354454 +
ttcttccttatactgaagagat

SEQ ID NO: 105993 - DNA, 22 bp, Artificial Sequence
  Synthetic oligonucleotide; TTC chr11 5354435 5354456 5354452 5354457 +
ttccttatactgaagagatgtg

SEQ ID NO: 105994 - DNA, 22 bp, Artificial Sequence
  Synthetic oligonucleotide; CTT chr11 5354437 5354458 5354454 5354459 +
ccttatactgaagagatgtgat

SEQ ID NO: 105995 - DNA, 22 bp, Artificial Sequence
  Synthetic oligonucleotide; TTC chr11 5354438 5354459 5354455 5354460 +
cttatactgaagagatgtgatg

SEQ ID NO: 105996 - DNA, 22 bp, Artificial Sequence
  Synthetic oligonucleotide; CTT chr11 5354441 5354462 5354458 5354463 +
atactgaagagatgtgatgaag

SEQ ID NO: 105997 - DNA, 22 bp, Artificial Sequence
  Synthetic oligonucleotide; TTA chr11 5354442 5354463 5354459 5354464 +
tactgaagagatgtgatgaaga

SEQ ID NO: 105998 - DNA, 22 bp, Artificial Sequence
  Synthetic oligonucleotide; CTG chr11 5354447 5354468 5354464 5354469 +
aagagatgtgatgaagagacaa

SEQ ID NO: 105999 - DNA, 22 bp, Artificial Sequence
  Synthetic oligonucleotide; CTG chr11 5354499 5354520 5354516 5354521 +
ggacttgcagttctctttgtgg

SEQ ID NO: 106000 - DNA, 22 bp, Artificial Sequence
  Synthetic oligonucleotide; CTT chr11 5354505 5354526 5354522 5354527 +
gcagttctctttgtggagtccc

SEQ ID NO: 106001 - DNA, 22 bp, Artificial Sequence
  Synthetic oligonucleotide; TTG chr11 5354506 5354527 5354523 5354528 +
cagttctctttgtggagtcccg

SEQ ID NO: 106002 - DNA, 22 bp, Artificial Sequence
  Synthetic oligonucleotide; TTC chr11 5354512 5354533 5354529 5354534 +
tctttgtggagtcccgtgaaac

SEQ ID NO: 106003 - DNA, 22 bp, Artificial Sequence
  Synthetic oligonucleotide; CTC chr11 5354514 5354535 5354531 5354536 +
tttgtggagtcccgtgaaacag

SEQ ID NO: 106004 - DNA, 22 bp, Artificial Sequence
  Synthetic oligonucleotide; CTT chr11 5354516 5354537 5354533 5354538 +
tgtggagtcccgtgaaacagag

SEQ ID NO: 106005 - DNA, 22 bp, Artificial Sequence
  Synthetic oligonucleotide; TTT chr11 5354517 5354538 5354534 5354539 +
gtggagtcccgtgaaacagagc

SEQ ID NO: 106006 - DNA, 22 bp, Artificial Sequence
  Synthetic oligonucleotide; TTG chr11 5354518 5354539 5354535 5354540 +
tggagtcccgtgaaacagagca

SEQ ID NO: 106007 - DNA, 22 bp, Artificial Sequence
  Synthetic oligonucleotide; CTC chr11 5354546 5354567 5354563 5354568 +
tgggctcccgatggtccctgaa

SEQ ID NO: 106008 - DNA, 22 bp, Artificial Sequence
  Synthetic oligonucleotide; CTG chr11 5354548 5354569 5354565 5354570 +
ggctcccgatggtccctgaaca

SEQ ID NO: 106009 - DNA, 22 bp, Artificial Sequence
  Synthetic oligonucleotide; CTC chr11 5354553 5354574 5354570 5354575 +
ccgatggtccctgaacaacata

SEQ ID NO: 106010 - DNA, 22 bp, Artificial Sequence
  Synthetic oligonucleotide; CTG chr11 5354566 5354587 5354583 5354588 +
aacaacatatcaacagtagggt

SEQ ID NO: 106011 - DNA, 22 bp, Artificial Sequence
  Synthetic oligonucleotide; CTC chr11 5354598 5354619 5354615 5354620 +
acccctcctcatgatcctcccc

SEQ ID NO: 106012 - DNA, 22 bp, Artificial Sequence
  Synthetic oligonucleotide; CTC chr11 5354605 5354626 5354622 5354627 +
ctcatgatcctccccacttcct

SEQ ID NO: 106013 - DNA, 22 bp, Artificial Sequence
  Synthetic oligonucleotide; CTC chr11 5354608 5354629 5354625 5354630 +
atgatcctccccacttcctccc

SEQ ID NO: 106014 - DNA, 22 bp, Artificial Sequence
  Synthetic oligonucleotide; CTC chr11 5354617 5354638 5354634 5354639 +
cccacttcctcccgcccctcca

SEQ ID NO: 106015 - DNA, 22 bp, Artificial Sequence
  Synthetic oligonucleotide; CTT chr11 5354624 5354645 5354641 5354646 +
cctcccgcccctccacgccacc

SEQ ID NO: 106016 - DNA, 22 bp, Artificial Sequence
  Synthetic oligonucleotide; TTC chr11 5354625 5354646 5354642 5354647 +
ctcccgcccctccacgccacca

SEQ ID NO: 106017 - DNA, 22 bp, Artificial Sequence
  Synthetic oligonucleotide; CTC chr11 5354628 5354649 5354645 5354650 +
ccgcccctccacgccaccagcc

SEQ ID NO: 106018 - DNA, 22 bp, Artificial Sequence
  Synthetic oligonucleotide; CTC chr11 5354637 5354658 5354654 5354659 +
cacgccaccagccacactgagc

SEQ ID NO: 106019 - DNA, 22 bp, Artificial Sequence
  Synthetic oligonucleotide; CTG chr11 5354656 5354677 5354673 5354678 +
agcgctcagctcctcccaggtc

SEQ ID NO: 106020 - DNA, 22 bp, Artificial Sequence
  Synthetic oligonucleotide; CTC chr11 5354663 5354684 5354680 5354685 +
agctcctcccaggtcctggacc

SEQ ID NO: 106021 - DNA, 22 bp, Artificial Sequence
  Synthetic oligonucleotide; CTC chr11 5354668 5354689 5354685 5354690 +
ctcccaggtcctggacctgcag

SEQ ID NO: 106022 - DNA, 22 bp, Artificial Sequence
  Synthetic oligonucleotide; CTC chr11 5354671 5354692 5354688 5354693 +
ccaggtcctggacctgcagccc

SEQ ID NO: 106023 - DNA, 22 bp, Artificial Sequence
  Synthetic oligonucleotide; CTG chr11 5354681 5354702 5354698 5354703 +
gacctgcagccctggccaacat

SEQ ID NO: 106024 - DNA, 22 bp, Artificial Sequence
  Synthetic oligonucleotide; CTG chr11 5354687 5354708 5354704 5354709 +
cagccctggccaacatcaagag

SEQ ID NO: 106025 - DNA, 22 bp, Artificial Sequence
  Synthetic oligonucleotide; CTG chr11 5354695 5354716 5354712 5354717 +
gccaacatcaagagggcatctt

SEQ ID NO: 106026 - DNA, 22 bp, Artificial Sequence
  Synthetic oligonucleotide; CTT chr11 5354717 5354738 5354734 5354739 +
tgccaagaatgcctggaagaga

SEQ ID NO: 106027 - DNA, 22 bp, Artificial Sequence
  Synthetic oligonucleotide; TTT chr11 5354718 5354739 5354735 5354740 +
gccaagaatgcctggaagagac

SEQ ID NO: 106028 - DNA, 22 bp, Artificial Sequence
  Synthetic oligonucleotide; TTG chr11 5354719 5354740 5354736 5354741 +
ccaagaatgcctggaagagact

SEQ ID NO: 106029 - DNA, 22 bp, Artificial Sequence
  Synthetic oligonucleotide; CTG chr11 5354732 5354753 5354749 5354754 +
gaagagactcagccactcacag

SEQ ID NO: 106030 - DNA, 22 bp, Artificial Sequence
  Synthetic oligonucleotide; CTC chr11 5354742 5354763 5354759 5354764 +
agccactcacaggaaaacgtcc

SEQ ID NO: 106031 - DNA, 22 bp, Artificial Sequence
  Synthetic oligonucleotide; CTC chr11 5354750 5354771 5354767 5354772 +
acaggaaaacgtcctccagaag

SEQ ID NO: 106032 - DNA, 22 bp, Artificial Sequence
  Synthetic oligonucleotide; CTC chr11 5354766 5354787 5354783 5354788 +
cagaagccagggaaagctgctg

SEQ ID NO: 106033 - DNA, 22 bp, Artificial Sequence
  Synthetic oligonucleotide; CTG chr11 5354785 5354806 5354802 5354807 +
ctgagacaaaagacaaacagtt

SEQ ID NO: 106034 - DNA, 22 bp, Artificial Sequence
  Synthetic oligonucleotide; CTG chr11 5354788 5354809 5354805 5354810 +
agacaaaagacaaacagtttga

SEQ ID NO: 106035 - DNA, 22 bp, Artificial Sequence
  Synthetic oligonucleotide; TTT chr11 5354808 5354829 5354825 5354830 +
gaagaatatgtccagaacttca

SEQ ID NO: 106036 - DNA, 22 bp, Artificial Sequence
  Synthetic oligonucleotide; TTG chr11 5354809 5354830 5354826 5354831 +
aagaatatgtccagaacttcaa

SEQ ID NO: 106037 - DNA, 22 bp, Artificial Sequence
  Synthetic oligonucleotide; CTT chr11 5354828 5354849 5354845 5354850 +
caagccacaagaagcagagggt

SEQ ID NO: 106038 - DNA, 22 bp, Artificial Sequence
  Synthetic oligonucleotide; TTC chr11 5354829 5354850 5354846 5354851 +
aagccacaagaagcagagggta

SEQ ID NO: 106039 - DNA, 22 bp, Artificial Sequence
  Synthetic oligonucleotide; CTG chr11 5354860 5354881 5354877 5354882 +
agagaactctgaggatgtttag

SEQ ID NO: 106040 - DNA, 22 bp, Artificial Sequence
  Synthetic oligonucleotide; CTC chr11 5354869 5354890 5354886 5354891 +
tgaggatgtttagaagcaatca

SEQ ID NO: 106041 - DNA, 22 bp, Artificial Sequence
  Synthetic oligonucleotide; CTG chr11 5354871 5354892 5354888 5354893 +
aggatgtttagaagcaatcaaa

SEQ ID NO: 106042 - DNA, 22 bp, Artificial Sequence
  Synthetic oligonucleotide; TTT chr11 5354880 5354901 5354897 5354902 +
agaagcaatcaaaggcattcaa

SEQ ID NO: 106043 - DNA, 22 bp, Artificial Sequence
  Synthetic oligonucleotide; TTA chr11 5354881 5354902 5354898 5354903 +
gaagcaatcaaaggcattcaag

SEQ ID NO: 106044 - DNA, 22 bp, Artificial Sequence
  Synthetic oligonucleotide; TTC chr11 5354900 5354921 5354917 5354922 +
aagagaccttgacgaagctgag

SEQ ID NO: 106045 - DNA, 22 bp, Artificial Sequence
  Synthetic oligonucleotide; CTT chr11 5354910 5354931 5354927 5354932 +
gacgaagctgagtcactgtgtg

SEQ ID NO: 106046 - DNA, 22 bp, Artificial Sequence
  Synthetic oligonucleotide; TTG chr11 5354911 5354932 5354928 5354933 +
acgaagctgagtcactgtgtga

SEQ ID NO: 106047 - DNA, 22 bp, Artificial Sequence
  Synthetic oligonucleotide; CTG chr11 5354920 5354941 5354937 5354942 +
agtcactgtgtgaagtctgtgc

SEQ ID NO: 106048 - DNA, 22 bp, Artificial Sequence
  Synthetic oligonucleotide; CTG chr11 5354928 5354949 5354945 5354950 +
tgtgaagtctgtgcgctggatt

SEQ ID NO: 106049 - DNA, 22 bp, Artificial Sequence
  Synthetic oligonucleotide; CTG chr11 5354939 5354960 5354956 5354961 +
tgcgctggattggtctgggcag

SEQ ID NO: 106050 - DNA, 22 bp, Artificial Sequence
  Synthetic oligonucleotide; CTG chr11 5354946 5354967 5354963 5354968 +
gattggtctgggcaggaaggtg

SEQ ID NO: 106051 - DNA, 22 bp, Artificial Sequence
  Synthetic oligonucleotide; TTG chr11 5354951 5354972 5354968 5354973 +
gtctgggcaggaaggtgtgaaa

SEQ ID NO: 106052 - DNA, 22 bp, Artificial Sequence
  Synthetic oligonucleotide; CTG chr11 5354956 5354977 5354973 5354978 +
ggcaggaaggtgtgaaaatggt

SEQ ID NO: 106053 - DNA, 22 bp, Artificial Sequence
  Synthetic oligonucleotide; TTG chr11 5354980 5355001 5354997 5355002 +
gtgagaaaggtgatgtgctctg

SEQ ID NO: 106054 - DNA, 22 bp, Artificial Sequence
  Synthetic oligonucleotide; CTC chr11 5355000 5355021 5355017 5355022 +
tgggaggatatccacaaaaaac

SEQ ID NO: 106055 - DNA, 22 bp, Artificial Sequence
  Synthetic oligonucleotide; CTG chr11 5355002 5355023 5355019 5355024 +
ggaggatatccacaaaaaactc

SEQ ID NO: 106056 - DNA, 22 bp, Artificial Sequence
  Synthetic oligonucleotide; CTC chr11 5355024 5355045 5355041 5355046 +
atggatgcatccttgctaacac

SEQ ID NO: 106057 - DNA, 22 bp, Artificial Sequence
  Synthetic oligonucleotide; CTT chr11 5355038 5355059 5355055 5355060 +
gctaacactggaaaactacctg

SEQ ID NO: 106058 - DNA, 22 bp, Artificial Sequence
  Synthetic oligonucleotide; TTG chr11 5355039 5355060 5355056 5355061 +
ctaacactggaaaactacctgg

SEQ ID NO: 106059 - DNA, 22 bp, Artificial Sequence
  Synthetic oligonucleotide; CTA chr11 5355042 5355063 5355059 5355064 +
acactggaaaactacctggacc

SEQ ID NO: 106060 - DNA, 22 bp, Artificial Sequence
  Synthetic oligonucleotide; CTG chr11 5355048 5355069 5355065 5355070 +
gaaaactacctggaccaatttc

SEQ ID NO: 106061 - DNA, 22 bp, Artificial Sequence
  Synthetic oligonucleotide; CTA chr11 5355056 5355077 5355073 5355078 +
cctggaccaatttcctgacttg

SEQ ID NO: 106062 - DNA, 22 bp, Artificial Sequence
  Synthetic oligonucleotide; CTG chr11 5355060 5355081 5355077 5355082 +
gaccaatttcctgacttgaaga

SEQ ID NO: 106063 - DNA, 22 bp, Artificial Sequence
  Synthetic oligonucleotide; TTT chr11 5355069 5355090 5355086 5355091 +
cctgacttgaagaatcacatca

SEQ ID NO: 106064 - DNA, 22 bp, Artificial Sequence
  Synthetic oligonucleotide; TTC chr11 5355070 5355091 5355087 5355092 +
ctgacttgaagaatcacatcac

SEQ ID NO: 106065 - DNA, 22 bp, Artificial Sequence
  Synthetic oligonucleotide; CTG chr11 5355073 5355094 5355090 5355095 +
acttgaagaatcacatcaccaa

SEQ ID NO: 106066 - DNA, 22 bp, Artificial Sequence
  Synthetic oligonucleotide; CTT chr11 5355077 5355098 5355094 5355099 +
gaagaatcacatcaccaagtgc

SEQ ID NO: 106067 - DNA, 22 bp, Artificial Sequence
  Synthetic oligonucleotide; TTG chr11 5355078 5355099 5355095 5355100 +
aagaatcacatcaccaagtgca

SEQ ID NO: 106068 - DNA, 22 bp, Artificial Sequence
  Synthetic oligonucleotide; CTT chr11 5355111 5355132 5355128 5355133 +
acggactatgacagtgcctgcc

SEQ ID NO: 106069 - DNA, 22 bp, Artificial Sequence
  Synthetic oligonucleotide; TTA chr11 5355112 5355133 5355129 5355134 +
cggactatgacagtgcctgccc

SEQ ID NO: 106070 - DNA, 22 bp, Artificial Sequence
  Synthetic oligonucleotide; CTA chr11 5355119 5355140 5355136 5355141 +
tgacagtgcctgcccacctcca

SEQ ID NO: 106071 - DNA, 22 bp, Artificial Sequence
  Synthetic oligonucleotide; CTG chr11 5355131 5355152 5355148 5355153 +
cccacctccatcgggctcaaca

SEQ ID NO: 106072 - DNA, 22 bp, Artificial Sequence
  Synthetic oligonucleotide; CTC chr11 5355139 5355160 5355156 5355161 +
catcgggctcaacagagcttca

SEQ ID NO: 106073 - DNA, 22 bp, Artificial Sequence
  Synthetic oligonucleotide; CTC chr11 5355149 5355170 5355166 5355171 +
aacagagcttcaggaggaagga

SEQ ID NO: 106074 - DNA, 22 bp, Artificial Sequence
  Synthetic oligonucleotide; CTT chr11 5355159 5355180 5355176 5355181 +
caggaggaaggataggagcctc

SEQ ID NO: 106075 - DNA, 22 bp, Artificial Sequence
  Synthetic oligonucleotide; TTC chr11 5355160 5355181 5355177 5355182 +
aggaggaaggataggagcctct

SEQ ID NO: 106076 - DNA, 22 bp, Artificial Sequence
  Synthetic oligonucleotide; CTC chr11 5355181 5355202 5355198 5355203 +
tgtctaaggcagaagtagaatt

SEQ ID NO: 106077 - DNA, 22 bp, Artificial Sequence
  Synthetic oligonucleotide; CTG chr11 5355183 5355204 5355200 5355205 +
tctaaggcagaagtagaatttc

SEQ ID NO: 106078 - DNA, 22 bp, Artificial Sequence
  Synthetic oligonucleotide; CTA chr11 5355187 5355208 5355204 5355209 +
aggcagaagtagaatttcagaa

SEQ ID NO: 106079 - DNA, 22 bp, Artificial Sequence
  Synthetic oligonucleotide; TTT chr11 5355204 5355225 5355221 5355226 +
cagaaagcatagagaaagtttg

SEQ ID NO: 106080 - DNA, 22 bp, Artificial Sequence
  Synthetic oligonucleotide; TTC chr11 5355205 5355226 5355222 5355227 +
agaaagcatagagaaagtttga

SEQ ID NO: 106081 - DNA, 22 bp, Artificial Sequence
  Synthetic oligonucleotide; TTT chr11 5355225 5355246 5355242 5355247 +
gaagagtttaatggtgacttac

SEQ ID NO: 106082 - DNA, 22 bp, Artificial Sequence
  Synthetic oligonucleotide; TTG chr11 5355226 5355247 5355243 5355248 +
aagagtttaatggtgacttaca

SEQ ID NO: 106083 - DNA, 22 bp, Artificial Sequence
  Synthetic oligonucleotide; TTT chr11 5355234 5355255 5355251 5355256 +
aatggtgacttacaagaaaagt

SEQ ID NO: 106084 - DNA, 22 bp, Artificial Sequence
  Synthetic oligonucleotide; TTA chr11 5355235 5355256 5355252 5355257 +
atggtgacttacaagaaaagtt

SEQ ID NO: 106085 - DNA, 22 bp, Artificial Sequence
  Synthetic oligonucleotide; CTT chr11 5355245 5355266 5355262 5355267 +
acaagaaaagttaccattatta

SEQ ID NO: 106086 - DNA, 22 bp, Artificial Sequence
  Synthetic oligonucleotide; TTA chr11 5355246 5355267 5355263 5355268 +
caagaaaagttaccattattat

SEQ ID NO: 106087 - DNA, 22 bp, Artificial Sequence
  Synthetic oligonucleotide; TTA chr11 5355258 5355279 5355275 5355280 +
ccattattatagtcaagacgaa

SEQ ID NO: 106088 - DNA, 22 bp, Artificial Sequence
  Synthetic oligonucleotide; TTA chr11 5355264 5355285 5355281 5355286 +
ttatagtcaagacgaattggat

SEQ ID NO: 106089 - DNA, 22 bp, Artificial Sequence
  Synthetic oligonucleotide; TTA chr11 5355267 5355288 5355284 5355289 +
tagtcaagacgaattggatttt

SEQ ID NO: 106090 - DNA, 22 bp, Artificial Sequence
  Synthetic oligonucleotide; TTG chr11 5355283 5355304 5355300 5355305 +
gattttatattaatactttcaa

SEQ ID NO: 106091 - DNA, 22 bp, Artificial Sequence
  Synthetic oligonucleotide; TTT chr11 5355288 5355309 5355305 5355310 +
tatattaatactttcaaaaaca

SEQ ID NO: 106092 - DNA, 22 bp, Artificial Sequence
  Synthetic oligonucleotide; TTT chr11 5355289 5355310 5355306 5355311 +
atattaatactttcaaaaacat

SEQ ID NO: 106093 - DNA, 22 bp, Artificial Sequence
  Synthetic oligonucleotide; TTA chr11 5355290 5355311 5355307 5355312 +
tattaatactttcaaaaacatc

SEQ ID NO: 106094 - DNA, 22 bp, Artificial Sequence
  Synthetic oligonucleotide; TTA chr11 5355295 5355316 5355312 5355317 +
atactttcaaaaacatctccag

SEQ ID NO: 106095 - DNA, 22 bp, Artificial Sequence
  Synthetic oligonucleotide; CTT chr11 5355301 5355322 5355318 5355323 +
tcaaaaacatctccagccttga

SEQ ID NO: 106096 - DNA, 22 bp, Artificial Sequence
  Synthetic oligonucleotide; TTT chr11 5355302 5355323 5355319 5355324 +
caaaaacatctccagccttgaa

SEQ ID NO: 106097 - DNA, 22 bp, Artificial Sequence
  Synthetic oligonucleotide; TTC chr11 5355303 5355324 5355320 5355325 +
aaaaacatctccagccttgaag

SEQ ID NO: 106098 - DNA, 22 bp, Artificial Sequence
  Synthetic oligonucleotide; CTC chr11 5355314 5355335 5355331 5355336 +
cagccttgaagctaagtttcat

SEQ ID NO: 106099 - DNA, 22 bp, Artificial Sequence
  Synthetic oligonucleotide; CTT chr11 5355321 5355342 5355338 5355343 +
gaagctaagtttcataaggaaa

SEQ ID NO: 106100 - DNA, 22 bp, Artificial Sequence
  Synthetic oligonucleotide; TTG chr11 5355322 5355343 5355339 5355344 +
aagctaagtttcataaggaaac

SEQ ID NO: 106101 - DNA, 22 bp, Artificial Sequence
  Synthetic oligonucleotide; CTA chr11 5355328 5355349 5355345 5355350 +
agtttcataaggaaactgtggt

SEQ ID NO: 106102 - DNA, 22 bp, Artificial Sequence
  Synthetic oligonucleotide; TTT chr11 5355333 5355354 5355350 5355355 +
cataaggaaactgtggtgcttt

SEQ ID NO: 106103 - DNA, 22 bp, Artificial Sequence
  Synthetic oligonucleotide; TTC chr11 5355334 5355355 5355351 5355356 +
ataaggaaactgtggtgctttg

SEQ ID NO: 106104 - DNA, 22 bp, Artificial Sequence
  Synthetic oligonucleotide; CTG chr11 5355346 5355367 5355363 5355368 +
tggtgctttggtacaaacagta

SEQ ID NO: 106105 - DNA, 22 bp, Artificial Sequence
  Synthetic oligonucleotide; CTT chr11 5355354 5355375 5355371 5355376 +
tggtacaaacagtatgaagtga

SEQ ID NO: 106106 - DNA, 22 bp, Artificial Sequence
  Synthetic oligonucleotide; TTT chr11 5355355 5355376 5355372 5355377 +
ggtacaaacagtatgaagtgat

SEQ ID NO: 106107 - DNA, 22 bp, Artificial Sequence
  Synthetic oligonucleotide; TTG chr11 5355356 5355377 5355373 5355378 +
gtacaaacagtatgaagtgatg

SEQ ID NO: 106108 - DNA, 22 bp, Artificial Sequence
  Synthetic oligonucleotide; CTG chr11 5355387 5355408 5355404 5355409 +
ggtgaccagtatgctgacaagg

SEQ ID NO: 106109 - DNA, 22 bp, Artificial Sequence
  Synthetic oligonucleotide; CTG chr11 5355403 5355424 5355420 5355425 +
acaaggccttcaacattcaaag

SEQ ID NO: 106110 - DNA, 22 bp, Artificial Sequence
  Synthetic oligonucleotide; CTT chr11 5355413 5355434 5355430 5355435 +
caacattcaaagagcaacaccc

SEQ ID NO: 106111 - DNA, 22 bp, Artificial Sequence
  Synthetic oligonucleotide; TTC chr11 5355414 5355435 5355431 5355436 +
aacattcaaagagcaacaccca

SEQ ID NO: 106112 - DNA, 22 bp, Artificial Sequence
  Synthetic oligonucleotide; TTC chr11 5355421 5355442 5355438 5355443 +
aaagagcaacacccactgattt

SEQ ID NO: 106113 - DNA, 22 bp, Artificial Sequence
  Synthetic oligonucleotide; CTG chr11 5355439 5355460 5355456 5355461 +
atttgggtcctctccacattgc

SEQ ID NO: 106114 - DNA, 22 bp, Artificial Sequence
  Synthetic oligonucleotide; TTT chr11 5355443 5355464 5355460 5355465 +
gggtcctctccacattgcaaag

SEQ ID NO: 106115 - DNA, 22 bp, Artificial Sequence
  Synthetic oligonucleotide; TTG chr11 5355444 5355465 5355461 5355466 +
ggtcctctccacattgcaaaga

SEQ ID NO: 106116 - DNA, 22 bp, Artificial Sequence
  Synthetic oligonucleotide; CTC chr11 5355451 5355472 5355468 5355473 +
tccacattgcaaagatgtcctc

SEQ ID NO: 106117 - DNA, 22 bp, Artificial Sequence
  Synthetic oligonucleotide; CTC chr11 5355453 5355474 5355470 5355475 +
cacattgcaaagatgtcctcat

SEQ ID NO: 106118 - DNA, 22 bp, Artificial Sequence
  Synthetic oligonucleotide; TTG chr11 5355460 5355481 5355477 5355482 +
caaagatgtcctcatggcctag

SEQ ID NO: 106119 - DNA, 22 bp, Artificial Sequence
  Synthetic oligonucleotide; CTC chr11 5355473 5355494 5355490 5355495 +
atggcctagggagctttcattc

SEQ ID NO: 106120 - DNA, 22 bp, Artificial Sequence
  Synthetic oligonucleotide; CTA chr11 5355481 5355502 5355498 5355503 +
gggagctttcattccaccccag

SEQ ID NO: 106121 - DNA, 22 bp, Artificial Sequence
  Synthetic oligonucleotide; CTT chr11 5355489 5355510 5355506 5355511 +
tcattccaccccagcccaacaa

SEQ ID NO: 106122 - DNA, 22 bp, Artificial Sequence
  Synthetic oligonucleotide; TTT chr11 5355490 5355511 5355507 5355512 +
cattccaccccagcccaacaac

SEQ ID NO: 106123 - DNA, 22 bp, Artificial Sequence
  Synthetic oligonucleotide; TTC chr11 5355491 5355512 5355508 5355513 +
attccaccccagcccaacaact

SEQ ID NO: 106124 - DNA, 22 bp, Artificial Sequence
  Synthetic oligonucleotide; TTC chr11 5355495 5355516 5355512 5355517 +
caccccagcccaacaactagtt

SEQ ID NO: 106125 - DNA, 22 bp, Artificial Sequence
  Synthetic oligonucleotide; CTA chr11 5355514 5355535 5355531 5355536 +
gttcaagtgaaacactagcacc

SEQ ID NO: 106126 - DNA, 22 bp, Artificial Sequence
  Synthetic oligonucleotide; TTC chr11 5355518 5355539 5355535 5355540 +
aagtgaaacactagcacctgct

SEQ ID NO: 106127 - DNA, 22 bp, Artificial Sequence
  Synthetic oligonucleotide; CTA chr11 5355531 5355552 5355548 5355553 +
gcacctgcttctcctatgccag

SEQ ID NO: 106128 - DNA, 22 bp, Artificial Sequence
  Synthetic oligonucleotide; CTG chr11 5355538 5355559 5355555 5355560 +
cttctcctatgccagcatgacc

SEQ ID NO: 106129 - DNA, 22 bp, Artificial Sequence
  Synthetic oligonucleotide; CTT chr11 5355541 5355562 5355558 5355563 +
ctcctatgccagcatgacctga

SEQ ID NO: 106130 - DNA, 22 bp, Artificial Sequence
  Synthetic oligonucleotide; TTC chr11 5355542 5355563 5355559 5355564 +
tcctatgccagcatgacctgag

SEQ ID NO: 106131 - DNA, 22 bp, Artificial Sequence
  Synthetic oligonucleotide; CTC chr11 5355544 5355565 5355561 5355566 +
ctatgccagcatgacctgagtc

SEQ ID NO: 106132 - DNA, 22 bp, Artificial Sequence
  Synthetic oligonucleotide; CTA chr11 5355547 5355568 5355564 5355569 +
tgccagcatgacctgagtcact

SEQ ID NO: 106133 - DNA, 22 bp, Artificial Sequence
  Synthetic oligonucleotide; CTG chr11 5355562 5355583 5355579 5355584 +
agtcactcttgcagtcctgtat

SEQ ID NO: 106134 - DNA, 22 bp, Artificial Sequence
  Synthetic oligonucleotide; CTC chr11 5355570 5355591 5355587 5355592 +
ttgcagtcctgtatctgtctaa

SEQ ID NO: 106135 - DNA, 22 bp, Artificial Sequence
  Synthetic oligonucleotide; CTT chr11 5355572 5355593 5355589 5355594 +
gcagtcctgtatctgtctaaag

SEQ ID NO: 106136 - DNA, 22 bp, Artificial Sequence
  Synthetic oligonucleotide; TTG chr11 5355573 5355594 5355590 5355595 +
cagtcctgtatctgtctaaagt

SEQ ID NO: 106137 - DNA, 22 bp, Artificial Sequence
  Synthetic oligonucleotide; CTG chr11 5355581 5355602 5355598 5355603 +
tatctgtctaaagtcacttgac

SEQ ID NO: 106138 - DNA, 22 bp, Artificial Sequence
  Synthetic oligonucleotide; CTG chr11 5355587 5355608 5355604 5355609 +
tctaaagtcacttgacaaagga

SEQ ID NO: 106139 - DNA, 22 bp, Artificial Sequence
  Synthetic oligonucleotide; CTA chr11 5355591 5355612 5355608 5355613 +
aagtcacttgacaaaggaactg

SEQ ID NO: 106140 - DNA, 22 bp, Artificial Sequence
  Synthetic oligonucleotide; CTT chr11 5355600 5355621 5355617 5355622 +
gacaaaggaactgcagcaggaa

SEQ ID NO: 106141 - DNA, 22 bp, Artificial Sequence
  Synthetic oligonucleotide; TTG chr11 5355601 5355622 5355618 5355623 +
acaaaggaactgcagcaggaaa

SEQ ID NO: 106142 - DNA, 22 bp, Artificial Sequence
  Synthetic oligonucleotide; CTG chr11 5355613 5355634 5355630 5355635 +
cagcaggaaaaatatcatcttc

SEQ ID NO: 106143 - DNA, 22 bp, Artificial Sequence
  Synthetic oligonucleotide; CTT chr11 5355634 5355655 5355651 5355656 +
cacagactgtcctaaagtaaga

SEQ ID NO: 106144 - DNA, 22 bp, Artificial Sequence
  Synthetic oligonucleotide; TTC chr11 5355635 5355656 5355652 5355657 +
acagactgtcctaaagtaagat

SEQ ID NO: 106145 - DNA, 22 bp, Artificial Sequence
  Synthetic oligonucleotide; CTG chr11 5355643 5355664 5355660 5355665 +
tcctaaagtaagataggtgatg

SEQ ID NO: 106146 - DNA, 22 bp, Artificial Sequence
  Synthetic oligonucleotide; CTA chr11 5355648 5355669 5355665 5355670 +
aagtaagataggtgatgtgtac

SEQ ID NO: 106147 - DNA, 22 bp, Artificial Sequence
  Synthetic oligonucleotide; CTG chr11 5355672 5355693 5355689 5355694 +
tatccacaaatcatctgtaaaa

SEQ ID NO: 106148 - DNA, 22 bp, Artificial Sequence
  Synthetic oligonucleotide; CTG chr11 5355689 5355710 5355706 5355711 +
taaaagttatgttttcagtggt

SEQ ID NO: 106149 - DNA, 22 bp, Artificial Sequence
  Synthetic oligonucleotide; TTA chr11 5355698 5355719 5355715 5355720 +
tgttttcagtggtgtgtcattt

SEQ ID NO: 106150 - DNA, 22 bp, Artificial Sequence
  Synthetic oligonucleotide; TTT chr11 5355703 5355724 5355720 5355725 +
tcagtggtgtgtcatttcaaat

SEQ ID NO: 106151 - DNA, 22 bp, Artificial Sequence
  Synthetic oligonucleotide; TTT chr11 5355704 5355725 5355721 5355726 +
cagtggtgtgtcatttcaaata

SEQ ID NO: 106152 - DNA, 22 bp, Artificial Sequence
  Synthetic oligonucleotide; TTC chr11 5355705 5355726 5355722 5355727 +
agtggtgtgtcatttcaaataa

SEQ ID NO: 106153 - DNA, 22 bp, Artificial Sequence
  Synthetic oligonucleotide; TTT chr11 5355720 5355741 5355737 5355742 +
caaataaaccttgggaaatttc

SEQ ID NO: 106154 - DNA, 22 bp, Artificial Sequence
  Synthetic oligonucleotide; TTC chr11 5355721 5355742 5355738 5355743 +
aaataaaccttgggaaatttct

SEQ ID NO: 106155 - DNA, 22 bp, Artificial Sequence
  Synthetic oligonucleotide; CTT chr11 5355732 5355753 5355749 5355754 +
gggaaatttctaacaattacct

SEQ ID NO: 106156 - DNA, 22 bp, Artificial Sequence
  Synthetic oligonucleotide; TTG chr11 5355733 5355754 5355750 5355755 +
ggaaatttctaacaattacctt

SEQ ID NO: 106157 - DNA, 22 bp, Artificial Sequence
  Synthetic oligonucleotide; TTT chr11 5355741 5355762 5355758 5355763 +
ctaacaattacctttaaaaatt

SEQ ID NO: 106158 - DNA, 22 bp, Artificial Sequence
  Synthetic oligonucleotide; TTC chr11 5355742 5355763 5355759 5355764 +
taacaattacctttaaaaatta

SEQ ID NO: 106159 - DNA, 22 bp, Artificial Sequence
  Synthetic oligonucleotide; CTA chr11 5355744 5355765 5355761 5355766 +
acaattacctttaaaaattaaa

SEQ ID NO: 106160 - DNA, 22 bp, Artificial Sequence
  Synthetic oligonucleotide; TTA chr11 5355751 5355772 5355768 5355773 +
cctttaaaaattaaaaaaaaaa

SEQ ID NO: 106161 - DNA, 22 bp, Artificial Sequence
  Synthetic oligonucleotide; CTT chr11 5355755 5355776 5355772 5355777 +
taaaaattaaaaaaaaaaaaaa

SEQ ID NO: 106162 - DNA, 22 bp, Artificial Sequence
  Synthetic oligonucleotide; TTT chr11 5355756 5355777 5355773 5355778 +
aaaaattaaaaaaaaaaaaaag

SEQ ID NO: 106163 - DNA, 22 bp, Artificial Sequence
  Synthetic oligonucleotide; TTA chr11 5355757 5355778 5355774 5355779 +
aaaattaaaaaaaaaaaaaaga

SEQ ID NO: 106164 - DNA, 22 bp, Artificial Sequence
  Synthetic oligonucleotide; TTA chr11 5355764 5355785 5355781 5355786 +
aaaaaaaaaaaaagagtagggt

SEQ ID NO: 106165 - DNA, 22 bp, Artificial Sequence
  Synthetic oligonucleotide; TTT chr11 5355811 5355832 5355828 5355833 +
tcttaaaggatcaatgtaatgc

SEQ ID NO: 106166 - DNA, 22 bp, Artificial Sequence
  Synthetic oligonucleotide; TTT chr11 5355812 5355833 5355829 5355834 +
cttaaaggatcaatgtaatgcc

SEQ ID NO: 106167 - DNA, 22 bp, Artificial Sequence
  Synthetic oligonucleotide; TTC chr11 5355813 5355834 5355830 5355835 +
ttaaaggatcaatgtaatgccc

SEQ ID NO: 106168 - DNA, 22 bp, Artificial Sequence
  Synthetic oligonucleotide; CTT chr11 5355815 5355836 5355832 5355837 +
aaaggatcaatgtaatgccctg

SEQ ID NO: 106169 - DNA, 22 bp, Artificial Sequence
  Synthetic oligonucleotide; TTA chr11 5355816 5355837 5355833 5355838 +
aaggatcaatgtaatgccctgc

SEQ ID NO: 106170 - DNA, 22 bp, Artificial Sequence
  Synthetic oligonucleotide; CTG chr11 5355837 5355858 5355854 5355859 +
ctctgattcctgtagtgacata

SEQ ID NO: 106171 - DNA, 22 bp, Artificial Sequence
  Synthetic oligonucleotide; CTC chr11 5355840 5355861 5355857 5355862 +
tgattcctgtagtgacataggc

SEQ ID NO: 106172 - DNA, 22 bp, Artificial Sequence
  Synthetic oligonucleotide; CTG chr11 5355842 5355863 5355859 5355864 +
attcctgtagtgacataggcgt

SEQ ID NO: 106173 - DNA, 22 bp, Artificial Sequence
  Synthetic oligonucleotide; TTC chr11 5355846 5355867 5355863 5355868 +
ctgtagtgacataggcgtcaat

SEQ ID NO: 106174 - DNA, 22 bp, Artificial Sequence
  Synthetic oligonucleotide; CTG chr11 5355849 5355870 5355866 5355871 +
tagtgacataggcgtcaatata

SEQ ID NO: 106175 - DNA, 22 bp, Artificial Sequence
  Synthetic oligonucleotide; CTG chr11 5355885 5355906 5355902 5355907 +
gaagttcttttaaaaatctgct

SEQ ID NO: 106176 - DNA, 22 bp, Artificial Sequence
  Synthetic oligonucleotide; TTC chr11 5355892 5355913 5355909 5355914 +
ttttaaaaatctgctgcaagct

SEQ ID NO: 106177 - DNA, 22 bp, Artificial Sequence
  Synthetic oligonucleotide; CTT chr11 5355894 5355915 5355911 5355916 +
ttaaaaatctgctgcaagctga

SEQ ID NO: 106178 - DNA, 22 bp, Artificial Sequence
  Synthetic oligonucleotide; TTT chr11 5355895 5355916 5355912 5355917 +
taaaaatctgctgcaagctgag

SEQ ID NO: 106179 - DNA, 22 bp, Artificial Sequence
  Synthetic oligonucleotide; TTT chr11 5355896 5355917 5355913 5355918 +
aaaaatctgctgcaagctgagg

SEQ ID NO: 106180 - DNA, 22 bp, Artificial Sequence
  Synthetic oligonucleotide; TTA chr11 5355897 5355918 5355914 5355919 +
aaaatctgctgcaagctgaggg

SEQ ID NO: 106181 - DNA, 22 bp, Artificial Sequence
  Synthetic oligonucleotide; CTG chr11 5355905 5355926 5355922 5355927 +
ctgcaagctgagggtcctgtta

SEQ ID NO: 106182 - DNA, 22 bp, Artificial Sequence
  Synthetic oligonucleotide; CTG chr11 5355908 5355929 5355925 5355930 +
caagctgagggtcctgttagaa

SEQ ID NO: 106183 - DNA, 22 bp, Artificial Sequence
  Synthetic oligonucleotide; CTG chr11 5355915 5355936 5355932 5355937 +
agggtcctgttagaaggaaaac

SEQ ID NO: 106184 - DNA, 22 bp, Artificial Sequence
  Synthetic oligonucleotide; CTG chr11 5355924 5355945 5355941 5355946 +
ttagaaggaaaactaacaaaca

SEQ ID NO: 106185 - DNA, 22 bp, Artificial Sequence
  Synthetic oligonucleotide; TTA chr11 5355927 5355948 5355944 5355949 +
gaaggaaaactaacaaacagaa

SEQ ID NO: 106186 - DNA, 22 bp, Artificial Sequence
  Synthetic oligonucleotide; CTA chr11 5355939 5355960 5355956 5355961 +
acaaacagaaaggacatccaca

SEQ ID NO: 106187 - DNA, 22 bp, Artificial Sequence
  Synthetic oligonucleotide; CTG chr11 5355976 5355997 5355993 5355998 +
tacgtcaccatcatcaaagacc

SEQ ID NO: 106188 - DNA, 22 bp, Artificial Sequence
  Synthetic oligonucleotide; CTG chr11 5356047 5356068 5356064 5356069 +
gaaactctaaaaatcagagtgc

SEQ ID NO: 106189 - DNA, 22 bp, Artificial Sequence
  Synthetic oligonucleotide; CTC chr11 5356054 5356075 5356071 5356076 +
taaaaatcagagtgcctctcct

SEQ ID NO: 106190 - DNA, 22 bp, Artificial Sequence
  Synthetic oligonucleotide; CTA chr11 5356056 5356077 5356073 5356078 +
aaaatcagagtgcctctcctcc

SEQ ID NO: 106191 - DNA, 22 bp, Artificial Sequence
  Synthetic oligonucleotide; CTC chr11 5356072 5356093 5356089 5356094 +
tcctcctccaaaggaatgcagc

SEQ ID NO: 106192 - DNA, 22 bp, Artificial Sequence
  Synthetic oligonucleotide; CTC chr11 5356074 5356095 5356091 5356096 +
ctcctccaaaggaatgcagctc

SEQ ID NO: 106193 - DNA, 22 bp, Artificial Sequence
  Synthetic oligonucleotide; CTC chr11 5356077 5356098 5356094 5356099 +
ctccaaaggaatgcagctcctc

SEQ ID NO: 106194 - DNA, 22 bp, Artificial Sequence
  Synthetic oligonucleotide; CTC chr11 5356080 5356101 5356097 5356102 +
caaaggaatgcagctcctcacc

SEQ ID NO: 106195 - DNA, 22 bp, Artificial Sequence
  Synthetic oligonucleotide; CTC chr11 5356096 5356117 5356113 5356118 +
ctcaccagcaacggtacaaagc

SEQ ID NO: 106196 - DNA, 22 bp, Artificial Sequence
  Synthetic oligonucleotide; CTC chr11 5356099 5356120 5356116 5356121 +
accagcaacggtacaaagctgg

SEQ ID NO: 106197 - DNA, 22 bp, Artificial Sequence
  Synthetic oligonucleotide; CTG chr11 5356120 5356141 5356137 5356142 +
gacagagaatgactttgacaag

SEQ ID NO: 106198 - DNA, 22 bp, Artificial Sequence
  Synthetic oligonucleotide; CTT chr11 5356135 5356156 5356152 5356157 +
tgacaagttgagagaagaaggc

SEQ ID NO: 106199 - DNA, 22 bp, Artificial Sequence
  Synthetic oligonucleotide; TTT chr11 5356136 5356157 5356153 5356158 +
gacaagttgagagaagaaggct

SEQ ID NO: 106200 - DNA, 22 bp, Artificial Sequence
  Synthetic oligonucleotide; TTG chr11 5356137 5356158 5356154 5356159 +
acaagttgagagaagaaggctt

SEQ ID NO: 106201 - DNA, 22 bp, Artificial Sequence
  Synthetic oligonucleotide; TTG chr11 5356145 5356166 5356162 5356167 +
agagaagaaggcttcagacgat

SEQ ID NO: 106202 - DNA, 22 bp, Artificial Sequence
  Synthetic oligonucleotide; CTT chr11 5356159 5356180 5356176 5356181 +
cagacgatcaaactactccgag

SEQ ID NO: 106203 - DNA, 22 bp, Artificial Sequence
  Synthetic oligonucleotide; TTC chr11 5356160 5356181 5356177 5356182 +
agacgatcaaactactccgagc

SEQ ID NO: 106204 - DNA, 22 bp, Artificial Sequence
  Synthetic oligonucleotide; CTA chr11 5356174 5356195 5356191 5356196 +
ctccgagctaaaggaggaagct

SEQ ID NO: 106205 - DNA, 22 bp, Artificial Sequence
  Synthetic oligonucleotide; CTC chr11 5356177 5356198 5356194 5356199 +
cgagctaaaggaggaagctcga

SEQ ID NO: 106206 - DNA, 22 bp, Artificial Sequence
  Synthetic oligonucleotide; CTA chr11 5356184 5356205 5356201 5356206 +
aaggaggaagctcgaacccatg

SEQ ID NO: 106207 - DNA, 22 bp, Artificial Sequence
  Synthetic oligonucleotide; CTC chr11 5356197 5356218 5356214 5356219 +
gaacccatggcaaaaaagttaa

SEQ ID NO: 106208 - DNA, 22 bp, Artificial Sequence
  Synthetic oligonucleotide; TTA chr11 5356218 5356239 5356235 5356240 +
aaaaccttgaaaataaattaga

SEQ ID NO: 106209 - DNA, 22 bp, Artificial Sequence
  Synthetic oligonucleotide; CTT chr11 5356226 5356247 5356243 5356248 +
gaaaataaattagactaatggc

SEQ ID NO: 106210 - DNA, 22 bp, Artificial Sequence
  Synthetic oligonucleotide; TTG chr11 5356227 5356248 5356244 5356249 +
aaaataaattagactaatggct

SEQ ID NO: 106211 - DNA, 22 bp, Artificial Sequence
  Synthetic oligonucleotide; TTA chr11 5356238 5356259 5356255 5356260 +
gactaatggctaactagaataa

SEQ ID NO: 106212 - DNA, 22 bp, Artificial Sequence
  Synthetic oligonucleotide; CTA chr11 5356243 5356264 5356260 5356265 +
atggctaactagaataaccaat

SEQ ID NO: 106213 - DNA, 22 bp, Artificial Sequence
  Synthetic oligonucleotide; CTA chr11 5356250 5356271 5356267 5356272 +
actagaataaccaatacagaga

SEQ ID NO: 106214 - DNA, 22 bp, Artificial Sequence
  Synthetic oligonucleotide; CTA chr11 5356254 5356275 5356271 5356276 +
gaataaccaatacagagaagtc

SEQ ID NO: 106215 - DNA, 22 bp, Artificial Sequence
  Synthetic oligonucleotide; CTT chr11 5356279 5356300 5356296 5356301 +
aaaggacctgatggagctgaaa

SEQ ID NO: 106216 - DNA, 22 bp, Artificial Sequence
  Synthetic oligonucleotide; TTA chr11 5356280 5356301 5356297 5356302 +
aaggacctgatggagctgaaaa

SEQ ID NO: 106217 - DNA, 22 bp, Artificial Sequence
  Synthetic oligonucleotide; CTG chr11 5356289 5356310 5356306 5356311 +
atggagctgaaaaccaaggcat

SEQ ID NO: 106218 - DNA, 22 bp, Artificial Sequence
  Synthetic oligonucleotide; CTG chr11 5356298 5356319 5356315 5356320 +
aaaaccaaggcatgagaactac

SEQ ID NO: 106219 - DNA, 22 bp, Artificial Sequence
  Synthetic oligonucleotide; CTA chr11 5356319 5356340 5356336 5356341 +
catgatgaatgcacaagactca

SEQ ID NO: 106220 - DNA, 22 bp, Artificial Sequence
  Synthetic oligonucleotide; CTC chr11 5356340 5356361 5356357 5356362 +
agtagctgattcgatcaactgg

SEQ ID NO: 106221 - DNA, 22 bp, Artificial Sequence
  Synthetic oligonucleotide; CTG chr11 5356348 5356369 5356365 5356370 +
attcgatcaactggaagaaagg

SEQ ID NO: 106222 - DNA, 22 bp, Artificial Sequence
  Synthetic oligonucleotide; TTC chr11 5356352 5356373 5356369 5356374 +
gatcaactggaagaaagggtat

SEQ ID NO: 106223 - DNA, 22 bp, Artificial Sequence
  Synthetic oligonucleotide; CTG chr11 5356361 5356382 5356378 5356383 +
gaagaaagggtatcagtgatgg

SEQ ID NO: 106224 - DNA, 22 bp, Artificial Sequence
  Synthetic oligonucleotide; TTT chr11 5356421 5356442 5356438 5356443 +
agagaaaaaagaataaaaagaa

SEQ ID NO: 106225 - DNA, 22 bp, Artificial Sequence
  Synthetic oligonucleotide; TTA chr11 5356422 5356443 5356439 5356444 +
gagaaaaaagaataaaaagaaa

SEQ ID NO: 106226 - DNA, 22 bp, Artificial Sequence
  Synthetic oligonucleotide; CTC chr11 5356457 5356478 5356474 5356479 +
caagaaatatgggactatgtga

SEQ ID NO: 106227 - DNA, 22 bp, Artificial Sequence
  Synthetic oligonucleotide; CTA chr11 5356474 5356495 5356491 5356496 +
tgtgaaaagaccaaatctatat

SEQ ID NO: 106228 - DNA, 22 bp, Artificial Sequence
  Synthetic oligonucleotide; CTA chr11 5356493 5356514 5356510 5356515 +
tatctgattggtgtacctgaaa

SEQ ID NO: 106229 - DNA, 22 bp, Artificial Sequence
  Synthetic oligonucleotide; CTG chr11 5356499 5356520 5356516 5356521 +
attggtgtacctgaaagtgacg

SEQ ID NO: 106230 - DNA, 22 bp, Artificial Sequence
  Synthetic oligonucleotide; TTG chr11 5356503 5356524 5356520 5356525 +
gtgtacctgaaagtgacgggca

SEQ ID NO: 106231 - DNA, 22 bp, Artificial Sequence
  Synthetic oligonucleotide; CTG chr11 5356512 5356533 5356529 5356534 +
aaagtgacgggcagaatggaac

SEQ ID NO: 106232 - DNA, 22 bp, Artificial Sequence
  Synthetic oligonucleotide; TTG chr11 5356541 5356562 5356558 5356563 +
gaaaacactctgcaggatatta

SEQ ID NO: 106233 - DNA, 22 bp, Artificial Sequence
  Synthetic oligonucleotide; CTC chr11 5356551 5356572 5356568 5356573 +
tgcaggatattatccaggagaa

SEQ ID NO: 106234 - DNA, 22 bp, Artificial Sequence
  Synthetic oligonucleotide; CTG chr11 5356553 5356574 5356570 5356575 +
caggatattatccaggagaact

SEQ ID NO: 106235 - DNA, 22 bp, Artificial Sequence
  Synthetic oligonucleotide; TTA chr11 5356563 5356584 5356580 5356585 +
tccaggagaacttccccaatct

SEQ ID NO: 106236 - DNA, 22 bp, Artificial Sequence
  Synthetic oligonucleotide; CTT chr11 5356576 5356597 5356593 5356598 +
ccccaatctagcaaggcaggtc

SEQ ID NO: 106237 - DNA, 22 bp, Artificial Sequence
  Synthetic oligonucleotide; TTC chr11 5356577 5356598 5356594 5356599 +
cccaatctagcaaggcaggtca

SEQ ID NO: 106238 - DNA, 22 bp, Artificial Sequence
  Synthetic oligonucleotide; CTA chr11 5356586 5356607 5356603 5356608 +
gcaaggcaggtcaacattcaaa

SEQ ID NO: 106239 - DNA, 22 bp, Artificial Sequence
  Synthetic oligonucleotide; TTC chr11 5356605 5356626 5356622 5356627 +
aaattcaggaaatacagagaac

SEQ ID NO: 106240 - DNA, 22 bp, Artificial Sequence
  Synthetic oligonucleotide; TTC chr11 5356611 5356632 5356628 5356633 +
aggaaatacagagaacgccaca

SEQ ID NO: 106241 - DNA, 22 bp, Artificial Sequence
  Synthetic oligonucleotide; CTC chr11 5356642 5356663 5356659 5356664 +
cttgagaagagcaactacaagg

SEQ ID NO: 106242 - DNA, 22 bp, Artificial Sequence
  Synthetic oligonucleotide; CTT chr11 5356645 5356666 5356662 5356667 +
gagaagagcaactacaaggcac

SEQ ID NO: 106243 - DNA, 22 bp, Artificial Sequence
  Synthetic oligonucleotide; TTG chr11 5356646 5356667 5356663 5356668 +
agaagagcaactacaaggcaca

SEQ ID NO: 106244 - DNA, 22 bp, Artificial Sequence
  Synthetic oligonucleotide; CTA chr11 5356659 5356680 5356676 5356681 +
caaggcacataattgtcagatt

SEQ ID NO: 106245 - DNA, 22 bp, Artificial Sequence
  Synthetic oligonucleotide; TTG chr11 5356674 5356695 5356691 5356696 +
tcagattcaccaaagttgaaat

SEQ ID NO: 106246 - DNA, 22 bp, Artificial Sequence
  Synthetic oligonucleotide; TTC chr11 5356682 5356703 5356699 5356704 +
accaaagttgaaatgaagggaa

SEQ ID NO: 106247 - DNA, 22 bp, Artificial Sequence
  Synthetic oligonucleotide; TTG chr11 5356692 5356713 5356709 5356714 +
aaatgaagggaaaaatgttaag

SEQ ID NO: 106248 - DNA, 22 bp, Artificial Sequence
  Synthetic oligonucleotide; TTA chr11 5356712 5356733 5356729 5356734 +
agggtagccagagagaaaggtc

SEQ ID NO: 106249 - DNA, 22 bp, Artificial Sequence
  Synthetic oligonucleotide; TTA chr11 5356740 5356761 5356757 5356762 +
cccacaaagggaagcccatcag

SEQ ID NO: 106250 - DNA, 22 bp, Artificial Sequence
  Synthetic oligonucleotide; CTC chr11 5356778 5356799 5356795 5356800 +
tcagcagaaactctacaagcca

SEQ ID NO: 106251 - DNA, 22 bp, Artificial Sequence
  Synthetic oligonucleotide; CTC chr11 5356780 5356801 5356797 5356802 +
agcagaaactctacaagccaga

SEQ ID NO: 106252 - DNA, 22 bp, Artificial Sequence
  Synthetic oligonucleotide; CTC chr11 5356791 5356812 5356808 5356813 +
tacaagccagaagagagtgggg

SEQ ID NO: 106253 - DNA, 22 bp, Artificial Sequence
  Synthetic oligonucleotide; CTA chr11 5356793 5356814 5356810 5356815 +
caagccagaagagagtgggggc

SEQ ID NO: 106254 - DNA, 22 bp, Artificial Sequence
  Synthetic oligonucleotide; TTC chr11 5356823 5356844 5356840 5356845 +
aacatccttaaaggaaagaatt

SEQ ID NO: 106255 - DNA, 22 bp, Artificial Sequence
  Synthetic oligonucleotide; CTT chr11 5356832 5356853 5356849 5356854 +
aaaggaaagaattttcaacaca

SEQ ID NO: 106256 - DNA, 22 bp, Artificial Sequence
  Synthetic oligonucleotide; TTA chr11 5356833 5356854 5356850 5356855 +
aaggaaagaattttcaacacag

SEQ ID NO: 106257 - DNA, 22 bp, Artificial Sequence
  Synthetic oligonucleotide; TTT chr11 5356846 5356867 5356863 5356868 +
tcaacacagaatttcatatcca

SEQ ID NO: 106258 - DNA, 22 bp, Artificial Sequence
  Synthetic oligonucleotide; TTT chr11 5356847 5356868 5356864 5356869 +
caacacagaatttcatatccag

SEQ ID NO: 106259 - DNA, 22 bp, Artificial Sequence
  Synthetic oligonucleotide; TTC chr11 5356848 5356869 5356865 5356870 +
aacacagaatttcatatccagc

SEQ ID NO: 106260 - DNA, 22 bp, Artificial Sequence
  Synthetic oligonucleotide; TTT chr11 5356860 5356881 5356877 5356882 +
catatccagccaaactaagctt

SEQ ID NO: 106261 - DNA, 22 bp, Artificial Sequence
  Synthetic oligonucleotide; TTC chr11 5356861 5356882 5356878 5356883 +
atatccagccaaactaagcttc

SEQ ID NO: 106262 - DNA, 22 bp, Artificial Sequence
  Synthetic oligonucleotide; CTA chr11 5356877 5356898 5356894 5356899 +
agcttcataagtgaaggagaaa

SEQ ID NO: 106263 - DNA, 22 bp, Artificial Sequence
  Synthetic oligonucleotide; CTT chr11 5356882 5356903 5356899 5356904 +
cataagtgaaggagaaataaaa

SEQ ID NO: 106264 - DNA, 22 bp, Artificial Sequence
  Synthetic oligonucleotide; TTC chr11 5356883 5356904 5356900 5356905 +
ataagtgaaggagaaataaaat

SEQ ID NO: 106265 - DNA, 22 bp, Artificial Sequence
  Synthetic oligonucleotide; CTT chr11 5356909 5356930 5356926 5356931 +
tacagacaagcaaatgctgaga

SEQ ID NO: 106266 - DNA, 22 bp, Artificial Sequence
  Synthetic oligonucleotide; TTT chr11 5356910 5356931 5356927 5356932 +
acagacaagcaaatgctgagag

SEQ ID NO: 106267 - DNA, 22 bp, Artificial Sequence
  Synthetic oligonucleotide; TTA chr11 5356911 5356932 5356928 5356933 +
cagacaagcaaatgctgagaga

SEQ ID NO: 106268 - DNA, 22 bp, Artificial Sequence
  Synthetic oligonucleotide; CTG chr11 5356928 5356949 5356945 5356950 +
agagattttgtcatcaccaggc

SEQ ID NO: 106269 - DNA, 22 bp, Artificial Sequence
  Synthetic oligonucleotide; TTT chr11 5356936 5356957 5356953 5356958 +
tgtcatcaccaggcctgaccta

SEQ ID NO: 106270 - DNA, 22 bp, Artificial Sequence
  Synthetic oligonucleotide; TTT chr11 5356937 5356958 5356954 5356959 +
gtcatcaccaggcctgacctaa

SEQ ID NO: 106271 - DNA, 22 bp, Artificial Sequence
  Synthetic oligonucleotide; TTG chr11 5356938 5356959 5356955 5356960 +
tcatcaccaggcctgacctaaa

SEQ ID NO: 106272 - DNA, 22 bp, Artificial Sequence
  Synthetic oligonucleotide; CTG chr11 5356953 5356974 5356970 5356975 +
acctaaaagagctcctgaagga

SEQ ID NO: 106273 - DNA, 22 bp, Artificial Sequence
  Synthetic oligonucleotide; CTA chr11 5356958 5356979 5356975 5356980 +
aaagagctcctgaaggaagcac

SEQ ID NO: 106274 - DNA, 22 bp, Artificial Sequence
  Synthetic oligonucleotide; CTC chr11 5356967 5356988 5356984 5356989 +
ctgaaggaagcactaaatatgg

SEQ ID NO: 106275 - DNA, 22 bp, Artificial Sequence
  Synthetic oligonucleotide; CTG chr11 5356970 5356991 5356987 5356992 +
aaggaagcactaaatatggaaa

SEQ ID NO: 106276 - DNA, 22 bp, Artificial Sequence
  Synthetic oligonucleotide; CTA chr11 5356982 5357003 5356999 5357004 +
aatatggaaaggcacaaccggt

SEQ ID NO: 106277 - DNA, 22 bp, Artificial Sequence
  Synthetic oligonucleotide; CTG chr11 5357015 5357036 5357032 5357037 +
caaaaacatgccaaattgtaaa

SEQ ID NO: 106278 - DNA, 22 bp, Artificial Sequence
  Synthetic oligonucleotide; TTG chr11 5357033 5357054 5357050 5357055 +
taaagaccattgaggctaggaa

SEQ ID NO: 106279 - DNA, 22 bp, Artificial Sequence
  Synthetic oligonucleotide; TTG chr11 5357045 5357066 5357062 5357067 +
aggctaggaagaaactgcatca

SEQ ID NO: 106280 - DNA, 22 bp, Artificial Sequence
  Synthetic oligonucleotide; CTA chr11 5357051 5357072 5357068 5357073 +
ggaagaaactgcatcaactaat

SEQ ID NO: 106281 - DNA, 22 bp, Artificial Sequence
  Synthetic oligonucleotide; CTG chr11 5357062 5357083 5357079 5357084 +
catcaactaatgagcaaaataa

SEQ ID NO: 106282 - DNA, 22 bp, Artificial Sequence
  Synthetic oligonucleotide; CTA chr11 5357071 5357092 5357088 5357093 +
atgagcaaaataaccagctaac

SEQ ID NO: 106283 - DNA, 22 bp, Artificial Sequence
  Synthetic oligonucleotide; CTA chr11 5357091 5357112 5357108 5357113 +
acatcataatgacaggatcaaa

SEQ ID NO: 106284 - DNA, 22 bp, Artificial Sequence
  Synthetic oligonucleotide; TTC chr11 5357116 5357137 5357133 5357138 +
acacataacaatattaacctta

SEQ ID NO: 106285 - DNA, 22 bp, Artificial Sequence
  Synthetic oligonucleotide; TTA chr11 5357132 5357153 5357149 5357154 +
accttaatgtaaatgggctaaa

SEQ ID NO: 106286 - DNA, 22 bp, Artificial Sequence
  Synthetic oligonucleotide; CTT chr11 5357137 5357158 5357154 5357159 +
aatgtaaatgggctaaatgctc

SEQ ID NO: 106287 - DNA, 22 bp, Artificial Sequence
  Synthetic oligonucleotide; TTA chr11 5357138 5357159 5357155 5357160 +
atgtaaatgggctaaatgctcc

SEQ ID NO: 106288 - DNA, 22 bp, Artificial Sequence
  Synthetic oligonucleotide; CTA chr11 5357152 5357173 5357169 5357174 +
aatgctccagtaaaaagacaca

SEQ ID NO: 106289 - DNA, 22 bp, Artificial Sequence
  Synthetic oligonucleotide; CTC chr11 5357159 5357180 5357176 5357181 +
cagtaaaaagacacagacgggc

SEQ ID NO: 106290 - DNA, 22 bp, Artificial Sequence
  Synthetic oligonucleotide; TTA chr11 5357187 5357208 5357204 5357209 +
gataaagagtcaagacccatca

SEQ ID NO: 106291 - DNA, 22 bp, Artificial Sequence
  Synthetic oligonucleotide; CTG chr11 5357217 5357238 5357234 5357239 +
tattcaggaaacccatctcatg

SEQ ID NO: 106292 - DNA, 22 bp, Artificial Sequence
  Synthetic oligonucleotide; TTC chr11 5357222 5357243 5357239 5357244 +
aggaaacccatctcatgtgcac

SEQ ID NO: 106293 - DNA, 22 bp, Artificial Sequence
  Synthetic oligonucleotide; CTC chr11 5357236 5357257 5357253 5357258 +
atgtgcacacacacacataggc

SEQ ID NO: 106294 - DNA, 22 bp, Artificial Sequence
  Synthetic oligonucleotide; CTC chr11 5357260 5357281 5357277 5357282 +
aaaataaagggatggaggaaga

SEQ ID NO: 106295 - DNA, 22 bp, Artificial Sequence
  Synthetic oligonucleotide; CTA chr11 5357286 5357307 5357303 5357308 +
ccaagaaaatggaaaacaaaaa

SEQ ID NO: 106296 - DNA, 22 bp, Artificial Sequence
  Synthetic oligonucleotide; TTG chr11 5357321 5357342 5357338 5357343 +
caatcctcatctctgataaaac

SEQ ID NO: 106297 - DNA, 22 bp, Artificial Sequence
  Synthetic oligonucleotide; CTC chr11 5357329 5357350 5357346 5357351 +
atctctgataaaacaggcttta

SEQ ID NO: 106298 - DNA, 22 bp, Artificial Sequence
  Synthetic oligonucleotide; CTC chr11 5357334 5357355 5357351 5357356 +
tgataaaacaggctttaaacca

SEQ ID NO: 106299 - DNA, 22 bp, Artificial Sequence
  Synthetic oligonucleotide; CTG chr11 5357336 5357357 5357353 5357358 +
ataaaacaggctttaaaccaac

SEQ ID NO: 106300 - DNA, 22 bp, Artificial Sequence
  Synthetic oligonucleotide; CTT chr11 5357349 5357370 5357366 5357371 +
taaaccaacaaagatcaaaaga

SEQ ID NO: 106301 - DNA, 22 bp, Artificial Sequence
  Synthetic oligonucleotide; TTT chr11 5357350 5357371 5357367 5357372 +
aaaccaacaaagatcaaaagag

SEQ ID NO: 106302 - DNA, 22 bp, Artificial Sequence
  Synthetic oligonucleotide; TTA chr11 5357351 5357372 5357368 5357373 +
aaccaacaaagatcaaaagaga

SEQ ID NO: 106303 - DNA, 22 bp, Artificial Sequence
  Synthetic oligonucleotide; TTA chr11 5357388 5357409 5357405 5357410 +
cataatggtaaagggatcaatt

SEQ ID NO: 106304 - DNA, 22 bp, Artificial Sequence
  Synthetic oligonucleotide; TTC chr11 5357411 5357432 5357428 5357433 +
aacaagaagagctaactatcct

SEQ ID NO: 106305 - DNA, 22 bp, Artificial Sequence
  Synthetic oligonucleotide; CTA chr11 5357425 5357446 5357442 5357447 +
actatcctaaacatatatgcac

SEQ ID NO: 106306 - DNA, 22 bp, Artificial Sequence
  Synthetic oligonucleotide; CTA chr11 5357429 5357450 5357446 5357451 +
tcctaaacatatatgcacccaa

SEQ ID NO: 106307 - DNA, 22 bp, Artificial Sequence
  Synthetic oligonucleotide; CTA chr11 5357434 5357455 5357451 5357456 +
aacatatatgcacccaatacag

SEQ ID NO: 106308 - DNA, 22 bp, Artificial Sequence
  Synthetic oligonucleotide; TTC chr11 5357470 5357491 5357487 5357492 +
ataaagcaagtccttagagacc

SEQ ID NO: 106309 - DNA, 22 bp, Artificial Sequence
  Synthetic oligonucleotide; CTT chr11 5357485 5357506 5357502 5357507 +
agagacctacaaagagacttag

SEQ ID NO: 106310 - DNA, 22 bp, Artificial Sequence
  Synthetic oligonucleotide; TTA chr11 5357486 5357507 5357503 5357508 +
gagacctacaaagagacttaga

SEQ ID NO: 106311 - DNA, 22 bp, Artificial Sequence
  Synthetic oligonucleotide; CTA chr11 5357494 5357515 5357511 5357516 +
caaagagacttagactctcaca

SEQ ID NO: 106312 - DNA, 22 bp, Artificial Sequence
  Synthetic oligonucleotide; CTT chr11 5357505 5357526 5357522 5357527 +
agactctcacacaataacaatg

SEQ ID NO: 106313 - DNA, 22 bp, Artificial Sequence
  Synthetic oligonucleotide; TTA chr11 5357506 5357527 5357523 5357528 +
gactctcacacaataacaatgg

SEQ ID NO: 106314 - DNA, 22 bp, Artificial Sequence
  Synthetic oligonucleotide; CTC chr11 5357511 5357532 5357528 5357533 +
tcacacaataacaatgggagac

SEQ ID NO: 106315 - DNA, 22 bp, Artificial Sequence
  Synthetic oligonucleotide; CTC chr11 5357513 5357534 5357530 5357535 +
acacaataacaatgggagactt

SEQ ID NO: 106316 - DNA, 22 bp, Artificial Sequence
  Synthetic oligonucleotide; CTT chr11 5357535 5357556 5357552 5357557 +
taacaccccactgtcaacatta

SEQ ID NO: 106317 - DNA, 22 bp, Artificial Sequence
  Synthetic oligonucleotide; TTT chr11 5357536 5357557 5357553 5357558 +
aacaccccactgtcaacattag

SEQ ID NO: 106318 - DNA, 22 bp, Artificial Sequence
  Synthetic oligonucleotide; TTA chr11 5357537 5357558 5357554 5357559 +
acaccccactgtcaacattaga

SEQ ID NO: 106319 - DNA, 22 bp, Artificial Sequence
  Synthetic oligonucleotide; CTG chr11 5357548 5357569 5357565 5357570 +
tcaacattagacagatcaacat

SEQ ID NO: 106320 - DNA, 22 bp, Artificial Sequence
  Synthetic oligonucleotide; TTA chr11 5357557 5357578 5357574 5357579 +
gacagatcaacattagacagat

SEQ ID NO: 106321 - DNA, 22 bp, Artificial Sequence
  Synthetic oligonucleotide; TTA chr11 5357572 5357593 5357589 5357594 +
gacagatcaacgagacagaaag

SEQ ID NO: 106322 - DNA, 22 bp, Artificial Sequence
  Synthetic oligonucleotide; TTA chr11 5357597 5357618 5357614 5357619 +
acaaggatatccaggaattgaa

SEQ ID NO: 106323 - DNA, 22 bp, Artificial Sequence
  Synthetic oligonucleotide; TTG chr11 5357617 5357638 5357634 5357639 +
aactcagctctgcaccaagcgg

SEQ ID NO: 106324 - DNA, 22 bp, Artificial Sequence
  Synthetic oligonucleotide; CTC chr11 5357622 5357643 5357639 5357644 +
agctctgcaccaagcggaccta

SEQ ID NO: 106325 - DNA, 22 bp, Artificial Sequence
  Synthetic oligonucleotide; CTC chr11 5357627 5357648 5357644 5357649 +
tgcaccaagcggacctaataga

SEQ ID NO: 106326 - DNA, 22 bp, Artificial Sequence
  Synthetic oligonucleotide; CTG chr11 5357629 5357650 5357646 5357651 +
caccaagcggacctaatagaca

SEQ ID NO: 106327 - DNA, 22 bp, Artificial Sequence
  Synthetic oligonucleotide; CTA chr11 5357644 5357665 5357661 5357666 +
atagacatctacagaactctcc

SEQ ID NO: 106328 - DNA, 22 bp, Artificial Sequence
  Synthetic oligonucleotide; CTA chr11 5357655 5357676 5357672 5357677 +
cagaactctccaccccaaatca

SEQ ID NO: 106329 - DNA, 22 bp, Artificial Sequence
  Synthetic oligonucleotide; CTC chr11 5357663 5357684 5357680 5357685 +
tccaccccaaatcaacagaata

SEQ ID NO: 106330 - DNA, 22 bp, Artificial Sequence
  Synthetic oligonucleotide; CTC chr11 5357665 5357686 5357682 5357687 +
caccccaaatcaacagaatata

SEQ ID NO: 106331 - DNA, 22 bp, Artificial Sequence
  Synthetic oligonucleotide; TTC chr11 5357692 5357713 5357709 5357714 +
ttttcagcaccacaccacacct

SEQ ID NO: 106332 - DNA, 22 bp, Artificial Sequence
  Synthetic oligonucleotide; CTT chr11 5357694 5357715 5357711 5357716 +
ttcagcaccacaccacacctat

SEQ ID NO: 106333 - DNA, 22 bp, Artificial Sequence
  Synthetic oligonucleotide; TTT chr11 5357695 5357716 5357712 5357717 +
tcagcaccacaccacacctatt

SEQ ID NO: 106334 - DNA, 22 bp, Artificial Sequence
  Synthetic oligonucleotide; TTT chr11 5357696 5357717 5357713 5357718 +
cagcaccacaccacacctattc

SEQ ID NO: 106335 - DNA, 22 bp, Artificial Sequence
  Synthetic oligonucleotide; TTC chr11 5357697 5357718 5357714 5357719 +
agcaccacaccacacctattcc

SEQ ID NO: 106336 - DNA, 22 bp, Artificial Sequence
  Synthetic oligonucleotide; CTA chr11 5357715 5357736 5357732 5357737 +
ttccaaaattgaccacatagtt

SEQ ID NO: 106337 - DNA, 22 bp, Artificial Sequence
  Synthetic oligonucleotide; TTC chr11 5357718 5357739 5357735 5357740 +
caaaattgaccacatagttgga

SEQ ID NO: 106338 - DNA, 22 bp, Artificial Sequence
  Synthetic oligonucleotide; TTG chr11 5357726 5357747 5357743 5357748 +
accacatagttggaagtaaagc

SEQ ID NO: 106339 - DNA, 22 bp, Artificial Sequence
  Synthetic oligonucleotide; TTG chr11 5357738 5357759 5357755 5357760 +
gaagtaaagcactcctcagcaa

SEQ ID NO: 106340 - DNA, 22 bp, Artificial Sequence
  Synthetic oligonucleotide; CTC chr11 5357752 5357773 5357769 5357774 +
ctcagcaaatgtaaaagaacag

SEQ ID NO: 106341 - DNA, 22 bp, Artificial Sequence
  Synthetic oligonucleotide; CTC chr11 5357755 5357776 5357772 5357777 +
agcaaatgtaaaagaacagaaa

SEQ ID NO: 106342 - DNA, 22 bp, Artificial Sequence
  Synthetic oligonucleotide; TTA chr11 5357780 5357801 5357797 5357802 +
taacaaactgtctctcagacca

SEQ ID NO: 106343 - DNA, 22 bp, Artificial Sequence
  Synthetic oligonucleotide; CTG chr11 5357790 5357811 5357807 5357812 +
tctctcagaccacagtgcaatc

SEQ ID NO: 106344 - DNA, 22 bp, Artificial Sequence
  Synthetic oligonucleotide; CTC chr11 5357794 5357815 5357811 5357816 +
tcagaccacagtgcaatcaaac

SEQ ID NO: 106345 - DNA, 22 bp, Artificial Sequence
  Synthetic oligonucleotide; CTC chr11 5357796 5357817 5357813 5357818 +
agaccacagtgcaatcaaacta

SEQ ID NO: 106346 - DNA, 22 bp, Artificial Sequence
  Synthetic oligonucleotide; CTA chr11 5357818 5357839 5357835 5357840 +
gaactcaggattaagaaactca

SEQ ID NO: 106347 - DNA, 22 bp, Artificial Sequence
  Synthetic oligonucleotide; CTC chr11 5357824 5357845 5357841 5357846 +
aggattaagaaactcactcaaa

SEQ ID NO: 106348 - DNA, 22 bp, Artificial Sequence
  Synthetic oligonucleotide; TTA chr11 5357831 5357852 5357848 5357853 +
agaaactcactcaaaaccgctc

SEQ ID NO: 106349 - DNA, 22 bp, Artificial Sequence
  Synthetic oligonucleotide; CTC chr11 5357839 5357860 5357856 5357861 +
actcaaaaccgctcaactacat

SEQ ID NO: 106350 - DNA, 22 bp, Artificial Sequence
  Synthetic oligonucleotide; CTC chr11 5357843 5357864 5357860 5357865 +
aaaaccgctcaactacatggaa

SEQ ID NO: 106351 - DNA, 22 bp, Artificial Sequence
  Synthetic oligonucleotide; CTC chr11 5357853 5357874 5357870 5357875 +
aactacatggaaaccgaacaaa

SEQ ID NO: 106352 - DNA, 22 bp, Artificial Sequence
  Synthetic oligonucleotide; CTA chr11 5357858 5357879 5357875 5357880 +
catggaaaccgaacaaattgct

SEQ ID NO: 106353 - DNA, 22 bp, Artificial Sequence
  Synthetic oligonucleotide; TTG chr11 5357878 5357899 5357895 5357900 +
ctcctgaatgactactgggttc

SEQ ID NO: 106354 - DNA, 22 bp, Artificial Sequence
  Synthetic oligonucleotide; CTC chr11 5357881 5357902 5357898 5357903 +
ctgaatgactactgggttcata

SEQ ID NO: 106355 - DNA, 22 bp, Artificial Sequence
  Synthetic oligonucleotide; CTG chr11 5357884 5357905 5357901 5357906 +
aatgactactgggttcataaca

SEQ ID NO: 106356 - DNA, 22 bp, Artificial Sequence
  Synthetic oligonucleotide; CTA chr11 5357892 5357913 5357909 5357914 +
ctgggttcataacaaaatgaag

SEQ ID NO: 106357 - DNA, 22 bp, Artificial Sequence
  Synthetic oligonucleotide; CTG chr11 5357895 5357916 5357912 5357917 +
ggttcataacaaaatgaaggca

SEQ ID NO: 106358 - DNA, 22 bp, Artificial Sequence
  Synthetic oligonucleotide; TTC chr11 5357900 5357921 5357917 5357922 +
ataacaaaatgaaggcagaaat

SEQ ID NO: 106359 - DNA, 22 bp, Artificial Sequence
  Synthetic oligonucleotide; TTC chr11 5357932 5357953 5357949 5357954 +
tttggaaccaaagagaacaaag

SEQ ID NO: 106360 - DNA, 22 bp, Artificial Sequence
  Synthetic oligonucleotide; CTT chr11 5357934 5357955 5357951 5357956 +
tggaaccaaagagaacaaagac

SEQ ID NO: 106361 - DNA, 22 bp, Artificial Sequence
  Synthetic oligonucleotide; TTT chr11 5357935 5357956 5357952 5357957 +
ggaaccaaagagaacaaagaca

SEQ ID NO: 106362 - DNA, 22 bp, Artificial Sequence
  Synthetic oligonucleotide; TTG chr11 5357936 5357957 5357953 5357958 +
gaaccaaagagaacaaagacac

SEQ ID NO: 106363 - DNA, 22 bp, Artificial Sequence
  Synthetic oligonucleotide; CTC chr11 5357974 5357995 5357991 5357996 +
tgggacacattcaaagcagtgt

SEQ ID NO: 106364 - DNA, 22 bp, Artificial Sequence
  Synthetic oligonucleotide; CTG chr11 5357976 5357997 5357993 5357998 +
ggacacattcaaagcagtgtgt

SEQ ID NO: 106365 - DNA, 22 bp, Artificial Sequence
  Synthetic oligonucleotide; TTC chr11 5357986 5358007 5358003 5358008 +
aaagcagtgtgtagagggaaat

SEQ ID NO: 106366 - DNA, 22 bp, Artificial Sequence
  Synthetic oligonucleotide; TTT chr11 5358010 5358031 5358027 5358032 +
atagcactaaacgcccagaaga

SEQ ID NO: 106367 - DNA, 22 bp, Artificial Sequence
  Synthetic oligonucleotide; TTA chr11 5358011 5358032 5358028 5358033 +
tagcactaaacgcccagaagag

SEQ ID NO: 106368 - DNA, 22 bp, Artificial Sequence
  Synthetic oligonucleotide; CTA chr11 5358019 5358040 5358036 5358041 +
aacgcccagaagagaaagcagg

SEQ ID NO: 106369 - DNA, 22 bp, Artificial Sequence
  Synthetic oligonucleotide; CTA chr11 5358050 5358071 5358067 5358072 +
aaattgacaccctaacatcaca

SEQ ID NO: 106370 - DNA, 22 bp, Artificial Sequence
  Synthetic oligonucleotide; TTG chr11 5358056 5358077 5358073 5358078 +
acaccctaacatcacaattaaa

SEQ ID NO: 106371 - DNA, 22 bp, Artificial Sequence
  Synthetic oligonucleotide; CTA chr11 5358064 5358085 5358081 5358086 +
acatcacaattaaaagaactag

SEQ ID NO: 106372 - DNA, 22 bp, Artificial Sequence
  Synthetic oligonucleotide; TTA chr11 5358076 5358097 5358093 5358098 +
aaagaactagagaagcaagagc

SEQ ID NO: 106373 - DNA, 22 bp, Artificial Sequence
  Synthetic oligonucleotide; CTA chr11 5358085 5358106 5358102 5358107 +
gagaagcaagagcaaacacatt

SEQ ID NO: 106374 - DNA, 22 bp, Artificial Sequence
  Synthetic oligonucleotide; TTC chr11 5358108 5358129 5358125 5358130 +
aaatgctagcagaaggcaagaa

SEQ ID NO: 106375 - DNA, 22 bp, Artificial Sequence
  Synthetic oligonucleotide; CTA chr11 5358116 5358137 5358133 5358138 +
gcagaaggcaagaaataactaa

SEQ ID NO: 106376 - DNA, 22 bp, Artificial Sequence
  Synthetic oligonucleotide; CTA chr11 5358137 5358158 5358154 5358159 +
aaatcagagcagaactgaagga

SEQ ID NO: 106377 - DNA, 22 bp, Artificial Sequence
  Synthetic oligonucleotide; CTG chr11 5358154 5358175 5358171 5358176 +
aaggaaatagagacacaaaaaa

SEQ ID NO: 106378 - DNA, 22 bp, Artificial Sequence
  Synthetic oligonucleotide; CTT chr11 5358182 5358203 5358199 5358204 +
caaaaaatcaatgaatccagaa

SEQ ID NO: 106379 - DNA, 22 bp, Artificial Sequence
  Synthetic oligonucleotide; TTC chr11 5358183 5358204 5358200 5358205 +
aaaaaatcaatgaatccagaag

SEQ ID NO: 106380 - DNA, 22 bp, Artificial Sequence
  Synthetic oligonucleotide; CTG chr11 5358208 5358229 5358225 5358230 +
gtttttcaaaaagatcaacaaa

SEQ ID NO: 106381 - DNA, 22 bp, Artificial Sequence
  Synthetic oligonucleotide; TTT chr11 5358212 5358233 5358229 5358234 +
ttcaaaaagatcaacaaaattg

SEQ ID NO: 106382 - DNA, 22 bp, Artificial Sequence
  Synthetic oligonucleotide; TTT chr11 5358213 5358234 5358230 5358235 +
tcaaaaagatcaacaaaattga

SEQ ID NO: 106383 - DNA, 22 bp, Artificial Sequence
  Synthetic oligonucleotide; TTT chr11 5358214 5358235 5358231 5358236 +
caaaaagatcaacaaaattgat

SEQ ID NO: 106384 - DNA, 22 bp, Artificial Sequence
  Synthetic oligonucleotide; TTC chr11 5358215 5358236 5358232 5358237 +
aaaaagatcaacaaaattgata

SEQ ID NO: 106385 - DNA, 22 bp, Artificial Sequence
  Synthetic oligonucleotide; TTG chr11 5358234 5358255 5358251 5358256 +
atagactgctagcaagactaat

SEQ ID NO: 106386 - DNA, 22 bp, Artificial Sequence
  Synthetic oligonucleotide; CTG chr11 5358242 5358263 5358259 5358264 +
ctagcaagactaataaagaaga

SEQ ID NO: 106387 - DNA, 22 bp, Artificial Sequence
  Synthetic oligonucleotide; CTA chr11 5358245 5358266 5358262 5358267 +
gcaagactaataaagaagaaaa

SEQ ID NO: 106388 - DNA, 22 bp, Artificial Sequence
  Synthetic oligonucleotide; CTA chr11 5358254 5358275 5358271 5358276 +
ataaagaagaaaagagagaaga

SEQ ID NO: 106389 - DNA, 22 bp, Artificial Sequence
  Synthetic oligonucleotide; CTA chr11 5358358 5358379 5358375 5358380 +
taaacacctctacacaaataaa

SEQ ID NO: 106390 - DNA, 22 bp, Artificial Sequence
  Synthetic oligonucleotide; CTC chr11 5358368 5358389 5358385 5358390 +
tacacaaataaactagaaaatc

SEQ ID NO: 106391 - DNA, 22 bp, Artificial Sequence
  Synthetic oligonucleotide; CTA chr11 5358370 5358391 5358387 5358392 +
cacaaataaactagaaaatcta

SEQ ID NO: 106392 - DNA, 22 bp, Artificial Sequence
  Synthetic oligonucleotide; CTA chr11 5358383 5358404 5358400 5358405 +
gaaaatctagaagaaatggata

SEQ ID NO: 106393 - DNA, 22 bp, Artificial Sequence
  Synthetic oligonucleotide; CTA chr11 5358392 5358413 5358409 5358414 +
gaagaaatggataaattccttg

SEQ ID NO: 106394 - DNA, 22 bp, Artificial Sequence
  Synthetic oligonucleotide; TTC chr11 5358410 5358431 5358427 5358432 +
cttgacacatacaccctcccaa

SEQ ID NO: 106395 - DNA, 22 bp, Artificial Sequence
  Synthetic oligonucleotide; CTT chr11 5358413 5358434 5358430 5358435 +
gacacatacaccctcccaagac

SEQ ID NO: 106396 - DNA, 22 bp, Artificial Sequence
  Synthetic oligonucleotide; TTG chr11 5358414 5358435 5358431 5358436 +
acacatacaccctcccaagact

SEQ ID NO: 106397 - DNA, 22 bp, Artificial Sequence
  Synthetic oligonucleotide; CTC chr11 5358428 5358449 5358445 5358450 +
ccaagactaaaccaggaagaag

SEQ ID NO: 106398 - DNA, 22 bp, Artificial Sequence
  Synthetic oligonucleotide; CTA chr11 5358437 5358458 5358454 5358459 +
aaccaggaagaagttgaatctc

SEQ ID NO: 106399 - DNA, 22 bp, Artificial Sequence
  Synthetic oligonucleotide; TTG chr11 5358453 5358474 5358470 5358475 +
aatctctgaatagaccaataac

SEQ ID NO: 106400 - DNA, 22 bp, Artificial Sequence
  Synthetic oligonucleotide; CTC chr11 5358459 5358480 5358476 5358481 +
tgaatagaccaataacaggatc

SEQ ID NO: 106401 - DNA, 22 bp, Artificial Sequence
  Synthetic oligonucleotide; CTG chr11 5358461 5358482 5358478 5358483 +
aatagaccaataacaggatctg

SEQ ID NO: 106402 - DNA, 22 bp, Artificial Sequence
  Synthetic oligonucleotide; CTG chr11 5358483 5358504 5358500 5358505 +
aaattgaggcaataattaatag

SEQ ID NO: 106403 - DNA, 22 bp, Artificial Sequence
  Synthetic oligonucleotide; TTG chr11 5358489 5358510 5358506 5358511 +
aggcaataattaatagcttacc

SEQ ID NO: 106404 - DNA, 22 bp, Artificial Sequence
  Synthetic oligonucleotide; TTA chr11 5358501 5358522 5358518 5358523 +
atagcttaccaaccaaaaacag

SEQ ID NO: 106405 - DNA, 22 bp, Artificial Sequence
  Synthetic oligonucleotide; CTT chr11 5358508 5358529 5358525 5358530 +
accaaccaaaaacagtccagga

SEQ ID NO: 106406 - DNA, 22 bp, Artificial Sequence
  Synthetic oligonucleotide; TTA chr11 5358509 5358530 5358526 5358531 +
ccaaccaaaaacagtccaggac

SEQ ID NO: 106407 - DNA, 22 bp, Artificial Sequence
  Synthetic oligonucleotide; TTC chr11 5358554 5358575 5358571 5358576 +
taccagaggtacaaggaggagc

SEQ ID NO: 106408 - DNA, 22 bp, Artificial Sequence
  Synthetic oligonucleotide; CTA chr11 5358556 5358577 5358573 5358578 +
ccagaggtacaaggaggagctg

SEQ ID NO: 106409 - DNA, 22 bp, Artificial Sequence
  Synthetic oligonucleotide; CTG chr11 5358578 5358599 5358595 5358600 +
gtaccattccctctgaaactat

SEQ ID NO: 106410 - DNA, 22 bp, Artificial Sequence
  Synthetic oligonucleotide; TTC chr11 5358587 5358608 5358604 5358609 +
cctctgaaactattcgaatcaa

SEQ ID NO: 106411 - DNA, 22 bp, Artificial Sequence
  Synthetic oligonucleotide; CTC chr11 5358591 5358612 5358608 5358613 +
tgaaactattcgaatcaatagt

SEQ ID NO: 106412 - DNA, 22 bp, Artificial Sequence
  Synthetic oligonucleotide; CTG chr11 5358593 5358614 5358610 5358615 +
aaactattcgaatcaatagtaa

SEQ ID NO: 106413 - DNA, 22 bp, Artificial Sequence
  Synthetic oligonucleotide; CTA chr11 5358599 5358620 5358616 5358621 +
ttcgaatcaatagtaaaagagg

SEQ ID NO: 106414 - DNA, 22 bp, Artificial Sequence
  Synthetic oligonucleotide; TTC chr11 5358602 5358623 5358619 5358624 +
gaatcaatagtaaaagagggaa

SEQ ID NO: 106415 - DNA, 22 bp, Artificial Sequence
  Synthetic oligonucleotide; CTC chr11 5358629 5358650 5358646 5358651 +
cctaactcattttatgaggcca

SEQ ID NO: 106416 - DNA, 22 bp, Artificial Sequence
  Synthetic oligonucleotide; CTA chr11 5358633 5358654 5358650 5358655 +
actcattttatgaggccagcat

SEQ ID NO: 106417 - DNA, 22 bp, Artificial Sequence
  Synthetic oligonucleotide; CTC chr11 5358637 5358658 5358654 5358659 +
attttatgaggccagcatcatc

SEQ ID NO: 106418 - DNA, 22 bp, Artificial Sequence
  Synthetic oligonucleotide; TTT chr11 5358641 5358662 5358658 5358663 +
tatgaggccagcatcatcctga

SEQ ID NO: 106419 - DNA, 22 bp, Artificial Sequence
  Synthetic oligonucleotide; TTT chr11 5358642 5358663 5358659 5358664 +
atgaggccagcatcatcctgat

SEQ ID NO: 106420 - DNA, 22 bp, Artificial Sequence
  Synthetic oligonucleotide; TTA chr11 5358643 5358664 5358660 5358665 +
tgaggccagcatcatcctgata

SEQ ID NO: 106421 - DNA, 22 bp, Artificial Sequence
  Synthetic oligonucleotide; CTG chr11 5358662 5358683 5358679 5358684 +
ataccaaagccgggcagagaca

SEQ ID NO: 106422 - DNA, 22 bp, Artificial Sequence
  Synthetic oligonucleotide; TTT chr11 5358703 5358724 5358720 5358725 +
tagaccaatatccctgatggac

SEQ ID NO: 106423 - DNA, 22 bp, Artificial Sequence
  Synthetic oligonucleotide; TTT chr11 5358704 5358725 5358721 5358726 +
agaccaatatccctgatggaca

SEQ ID NO: 106424 - DNA, 22 bp, Artificial Sequence
  Synthetic oligonucleotide; TTA chr11 5358705 5358726 5358722 5358727 +
gaccaatatccctgatggacat

SEQ ID NO: 106425 - DNA, 22 bp, Artificial Sequence
  Synthetic oligonucleotide; CTG chr11 5358719 5358740 5358736 5358741 +
atggacatcgatgcaaaaaacc

SEQ ID NO: 106426 - DNA, 22 bp, Artificial Sequence
  Synthetic oligonucleotide; CTC chr11 5358743 5358764 5358760 5358765 +
aataaaatactggcaaagcaaa

SEQ ID NO: 106427 - DNA, 22 bp, Artificial Sequence
  Synthetic oligonucleotide; CTG chr11 5358755 5358776 5358772 5358777 +
gcaaagcaaatccagcagcaca

SEQ ID NO: 106428 - DNA, 22 bp, Artificial Sequence
  Synthetic oligonucleotide; CTT chr11 5358788 5358809 5358805 5358810 +
atccaccatgatcaagtgggct

SEQ ID NO: 106429 - DNA, 22 bp, Artificial Sequence
  Synthetic oligonucleotide; TTA chr11 5358789 5358810 5358806 5358811 +
tccaccatgatcaagtgggctt

SEQ ID NO: 106430 - DNA, 22 bp, Artificial Sequence
  Synthetic oligonucleotide; CTT chr11 5358811 5358832 5358828 5358833 +
catccctgggatgcaaggctgg

SEQ ID NO: 106431 - DNA, 22 bp, Artificial Sequence
  Synthetic oligonucleotide; TTC chr11 5358812 5358833 5358829 5358834 +
atccctgggatgcaaggctggt

SEQ ID NO: 106432 - DNA, 22 bp, Artificial Sequence
  Synthetic oligonucleotide; CTG chr11 5358819 5358840 5358836 5358841 +
ggatgcaaggctggttcaacat

SEQ ID NO: 106433 - DNA, 22 bp, Artificial Sequence
  Synthetic oligonucleotide; CTG chr11 5358832 5358853 5358849 5358854 +
gttcaacatatgcaaatcaata

SEQ ID NO: 106434 - DNA, 22 bp, Artificial Sequence
  Synthetic oligonucleotide; TTC chr11 5358836 5358857 5358853 5358858 +
aacatatgcaaatcaataaatg

SEQ ID NO: 106435 - DNA, 22 bp, Artificial Sequence
  Synthetic oligonucleotide; TTA chr11 5358903 5358924 5358920 5358925 +
tctcaatagatgcagaaaaggc

SEQ ID NO: 106436 - DNA, 22 bp, Artificial Sequence
  Synthetic oligonucleotide; CTC chr11 5358907 5358928 5358924 5358929 +
aatagatgcagaaaaggccttt

SEQ ID NO: 106437 - DNA, 22 bp, Artificial Sequence
  Synthetic oligonucleotide; CTT chr11 5358928 5358949 5358945 5358950 +
tgacaaaattcaacaacccttc

SEQ ID NO: 106438 - DNA, 22 bp, Artificial Sequence
  Synthetic oligonucleotide; TTT chr11 5358929 5358950 5358946 5358951 +
gacaaaattcaacaacccttca

SEQ ID NO: 106439 - DNA, 22 bp, Artificial Sequence
  Synthetic oligonucleotide; TTG chr11 5358930 5358951 5358947 5358952 +
acaaaattcaacaacccttcat

SEQ ID NO: 106440 - DNA, 22 bp, Artificial Sequence
  Synthetic oligonucleotide; TTC chr11 5358939 5358960 5358956 5358961 +
aacaacccttcatgctaaaaac

SEQ ID NO: 106441 - DNA, 22 bp, Artificial Sequence
  Synthetic oligonucleotide; CTT chr11 5358949 5358970 5358966 5358971 +
catgctaaaaactctcaataaa

SEQ ID NO: 106442 - DNA, 22 bp, Artificial Sequence
  Synthetic oligonucleotide; TTC chr11 5358950 5358971 5358967 5358972 +
atgctaaaaactctcaataaat

SEQ ID NO: 106443 - DNA, 22 bp, Artificial Sequence
  Synthetic oligonucleotide; CTA chr11 5358956 5358977 5358973 5358978 +
aaaactctcaataaattaggta

SEQ ID NO: 106444 - DNA, 22 bp, Artificial Sequence
  Synthetic oligonucleotide; CTC chr11 5358963 5358984 5358980 5358985 +
tcaataaattaggtattgatgg

SEQ ID NO: 106445 - DNA, 22 bp, Artificial Sequence
  Synthetic oligonucleotide; CTC chr11 5358965 5358986 5358982 5358987 +
aataaattaggtattgatggga

SEQ ID NO: 106446 - DNA, 22 bp, Artificial Sequence
  Synthetic oligonucleotide; TTA chr11 5358974 5358995 5358991 5358996 +
ggtattgatgggacgtatctca

SEQ ID NO: 106447 - DNA, 22 bp, Artificial Sequence
  Synthetic oligonucleotide; TTG chr11 5358981 5359002 5358998 5359003 +
atgggacgtatctcaaaataat

SEQ ID NO: 106448 - DNA, 22 bp, Artificial Sequence
  Synthetic oligonucleotide; CTC chr11 5358995 5359016 5359012 5359017 +
aaaataataagagccatctatg

SEQ ID NO: 106449 - DNA, 22 bp, Artificial Sequence
  Synthetic oligonucleotide; CTA chr11 5359015 5359036 5359032 5359037 +
tgacaaacccacagccaatatc

SEQ ID NO: 106450 - DNA, 22 bp, Artificial Sequence
  Synthetic oligonucleotide; CTG chr11 5359043 5359064 5359060 5359065 +
aatggacaaaaactggaagcat

SEQ ID NO: 106451 - DNA, 22 bp, Artificial Sequence
  Synthetic oligonucleotide; CTG chr11 5359058 5359079 5359075 5359080 +
gaagcattccctttgaaaactg

SEQ ID NO: 106452 - DNA, 22 bp, Artificial Sequence
  Synthetic oligonucleotide; TTC chr11 5359067 5359088 5359084 5359089 +
cctttgaaaactggcacaagac

SEQ ID NO: 106453 - DNA, 22 bp, Artificial Sequence
  Synthetic oligonucleotide; CTT chr11 5359071 5359092 5359088 5359093 +
tgaaaactggcacaagacaggg

SEQ ID NO: 106454 - DNA, 22 bp, Artificial Sequence
  Synthetic oligonucleotide; TTT chr11 5359072 5359093 5359089 5359094 +
gaaaactggcacaagacaggga

SEQ ID NO: 106455 - DNA, 22 bp, Artificial Sequence
  Synthetic oligonucleotide; TTG chr11 5359073 5359094 5359090 5359095 +
aaaactggcacaagacagggat

SEQ ID NO: 106456 - DNA, 22 bp, Artificial Sequence
  Synthetic oligonucleotide; CTG chr11 5359080 5359101 5359097 5359102 +
gcacaagacagggatgccctct

SEQ ID NO: 106457 - DNA, 22 bp, Artificial Sequence
  Synthetic oligonucleotide; CTC chr11 5359101 5359122 5359118 5359123 +
tctcactactcctattcaacat

SEQ ID NO: 106458 - DNA, 22 bp, Artificial Sequence
  Synthetic oligonucleotide; CTC chr11 5359103 5359124 5359120 5359125 +
tcactactcctattcaacatag

SEQ ID NO: 106459 - DNA, 22 bp, Artificial Sequence
  Synthetic oligonucleotide; CTC chr11 5359105 5359126 5359122 5359127 +
actactcctattcaacatagtg

SEQ ID NO: 106460 - DNA, 22 bp, Artificial Sequence
  Synthetic oligonucleotide; CTA chr11 5359109 5359130 5359126 5359131 +
ctcctattcaacatagtgttgg

SEQ ID NO: 106461 - DNA, 22 bp, Artificial Sequence
  Synthetic oligonucleotide; CTC chr11 5359112 5359133 5359129 5359134 +
ctattcaacatagtgttggaat

SEQ ID NO: 106462 - DNA, 22 bp, Artificial Sequence
  Synthetic oligonucleotide; CTA chr11 5359115 5359136 5359132 5359137 +
ttcaacatagtgttggaatttc

SEQ ID NO: 106463 - DNA, 22 bp, Artificial Sequence
  Synthetic oligonucleotide; TTC chr11 5359118 5359139 5359135 5359140 +
aacatagtgttggaatttctgg

SEQ ID NO: 106464 - DNA, 22 bp, Artificial Sequence
  Synthetic oligonucleotide; TTG chr11 5359130 5359151 5359147 5359152 +
gaatttctggccagggcaatta

SEQ ID NO: 106465 - DNA, 22 bp, Artificial Sequence
  Synthetic oligonucleotide; TTT chr11 5359136 5359157 5359153 5359158 +
ctggccagggcaattaggcagg

SEQ ID NO: 106466 - DNA, 22 bp, Artificial Sequence
  Synthetic oligonucleotide; TTC chr11 5359137 5359158 5359154 5359159 +
tggccagggcaattaggcagga

SEQ ID NO: 106467 - DNA, 22 bp, Artificial Sequence
  Synthetic oligonucleotide; CTG chr11 5359139 5359160 5359156 5359161 +
gccagggcaattaggcaggaga

SEQ ID NO: 106468 - DNA, 22 bp, Artificial Sequence
  Synthetic oligonucleotide; TTA chr11 5359152 5359173 5359169 5359174 +
ggcaggagaaggaaaaaaaggt

SEQ ID NO: 106469 - DNA, 22 bp, Artificial Sequence
  Synthetic oligonucleotide; TTC chr11 5359178 5359199 5359195 5359200 +
aattaggaaaagaggaagtcaa

SEQ ID NO: 106470 - DNA, 22 bp, Artificial Sequence
  Synthetic oligonucleotide; TTA chr11 5359183 5359204 5359200 5359205 +
ggaaaagaggaagtcaaattgt

SEQ ID NO: 106471 - DNA, 22 bp, Artificial Sequence
  Synthetic oligonucleotide; TTG chr11 5359204 5359225 5359221 5359226 +
tccctgtttgcagatgacacga

SEQ ID NO: 106472 - DNA, 22 bp, Artificial Sequence
  Synthetic oligonucleotide; CTG chr11 5359210 5359231 5359227 5359232 +
tttgcagatgacacgattgtat

SEQ ID NO: 106473 - DNA, 22 bp, Artificial Sequence
  Synthetic oligonucleotide; TTT chr11 5359213 5359234 5359230 5359235 +
gcagatgacacgattgtatatc

SEQ ID NO: 106474 - DNA, 22 bp, Artificial Sequence
  Synthetic oligonucleotide; TTG chr11 5359214 5359235 5359231 5359236 +
cagatgacacgattgtatatct

SEQ ID NO: 106475 - DNA, 22 bp, Artificial Sequence
  Synthetic oligonucleotide; TTG chr11 5359229 5359250 5359246 5359251 +
tatatctagaaaaccccactgt

SEQ ID NO: 106476 - DNA, 22 bp, Artificial Sequence
  Synthetic oligonucleotide; CTA chr11 5359237 5359258 5359254 5359259 +
gaaaaccccactgtctcagccc

SEQ ID NO: 106477 - DNA, 22 bp, Artificial Sequence
  Synthetic oligonucleotide; CTG chr11 5359250 5359271 5359267 5359272 +
tctcagcccaaaatgtccttaa

SEQ ID NO: 106478 - DNA, 22 bp, Artificial Sequence
  Synthetic oligonucleotide; CTC chr11 5359254 5359275 5359271 5359276 +
agcccaaaatgtccttaaactg

SEQ ID NO: 106479 - DNA, 22 bp, Artificial Sequence
  Synthetic oligonucleotide; CTT chr11 5359270 5359291 5359287 5359292 +
aaactgataggcaacttcagca

SEQ ID NO: 106480 - DNA, 22 bp, Artificial Sequence
  Synthetic oligonucleotide; TTA chr11 5359271 5359292 5359288 5359293 +
aactgataggcaacttcagcaa

SEQ ID NO: 106481 - DNA, 22 bp, Artificial Sequence
  Synthetic oligonucleotide; CTG chr11 5359276 5359297 5359293 5359298 +
ataggcaacttcagcaaagtct

SEQ ID NO: 106482 - DNA, 22 bp, Artificial Sequence
  Synthetic oligonucleotide; CTT chr11 5359287 5359308 5359304 5359309 +
cagcaaagtctcaggatacaaa

SEQ ID NO: 106483 - DNA, 22 bp, Artificial Sequence
  Synthetic oligonucleotide; TTC chr11 5359288 5359309 5359305 5359310 +
agcaaagtctcaggatacaaaa

SEQ ID NO: 106484 - DNA, 22 bp, Artificial Sequence
  Synthetic oligonucleotide; CTC chr11 5359299 5359320 5359316 5359321 +
aggatacaaaatcaatgtgcaa

SEQ ID NO: 106485 - DNA, 22 bp, Artificial Sequence
  Synthetic oligonucleotide; TTC chr11 5359336 5359357 5359353 5359358 +
ttatacaccaataacagacaaa

SEQ ID NO: 106486 - DNA, 22 bp, Artificial Sequence
  Synthetic oligonucleotide; CTT chr11 5359338 5359359 5359355 5359360 +
atacaccaataacagacaaaca

SEQ ID NO: 106487 - DNA, 22 bp, Artificial Sequence
  Synthetic oligonucleotide; TTA chr11 5359339 5359360 5359356 5359361 +
tacaccaataacagacaaacag

SEQ ID NO: 106488 - DNA, 22 bp, Artificial Sequence
  Synthetic oligonucleotide; CTC chr11 5359384 5359405 5359401 5359406 +
ccattcacaattgcttcaaaga

SEQ ID NO: 106489 - DNA, 22 bp, Artificial Sequence
  Synthetic oligonucleotide; TTC chr11 5359390 5359411 5359407 5359412 +
acaattgcttcaaagagaataa

SEQ ID NO: 106490 - DNA, 22 bp, Artificial Sequence
  Synthetic oligonucleotide; TTG chr11 5359397 5359418 5359414 5359419 +
cttcaaagagaataaaatacct

SEQ ID NO: 106491 - DNA, 22 bp, Artificial Sequence
  Synthetic oligonucleotide; CTT chr11 5359400 5359421 5359417 5359422 +
caaagagaataaaatacctagg

SEQ ID NO: 106492 - DNA, 22 bp, Artificial Sequence
  Synthetic oligonucleotide; TTC chr11 5359401 5359422 5359418 5359423 +
aaagagaataaaatacctagga

SEQ ID NO: 106493 - DNA, 22 bp, Artificial Sequence
  Synthetic oligonucleotide; CTA chr11 5359420 5359441 5359437 5359442 +
ggaatccaacttacaagagagg

SEQ ID NO: 106494 - DNA, 22 bp, Artificial Sequence
  Synthetic oligonucleotide; CTT chr11 5359432 5359453 5359449 5359454 +
acaagagaggtgaaggacctct

SEQ ID NO: 106495 - DNA, 22 bp, Artificial Sequence
  Synthetic oligonucleotide; TTA chr11 5359433 5359454 5359450 5359455 +
caagagaggtgaaggacctctt

SEQ ID NO: 106496 - DNA, 22 bp, Artificial Sequence
  Synthetic oligonucleotide; CTC chr11 5359453 5359474 5359470 5359475 +
ttcaaggagaactacaaaccac

SEQ ID NO: 106497 - DNA, 22 bp, Artificial Sequence
  Synthetic oligonucleotide; CTT chr11 5359455 5359476 5359472 5359477 +
caaggagaactacaaaccactg

SEQ ID NO: 106498 - DNA, 22 bp, Artificial Sequence
  Synthetic oligonucleotide; TTC chr11 5359456 5359477 5359473 5359478 +
aaggagaactacaaaccactgc

SEQ ID NO: 106499 - DNA, 22 bp, Artificial Sequence
  Synthetic oligonucleotide; CTA chr11 5359467 5359488 5359484 5359489 +
caaaccactgctgaatgaaata

SEQ ID NO: 106500 - DNA, 22 bp, Artificial Sequence
  Synthetic oligonucleotide; CTG chr11 5359477 5359498 5359494 5359499 +
ctgaatgaaataaaagaagata

SEQ ID NO: 106501 - DNA, 22 bp, Artificial Sequence
  Synthetic oligonucleotide; CTG chr11 5359480 5359501 5359497 5359502 +
aatgaaataaaagaagatacaa

SEQ ID NO: 106502 - DNA, 22 bp, Artificial Sequence
  Synthetic oligonucleotide; TTC chr11 5359520 5359541 5359537 5359542 +
catgctcatgggtaggaagaat

SEQ ID NO: 106503 - DNA, 22 bp, Artificial Sequence
  Synthetic oligonucleotide; CTC chr11 5359527 5359548 5359544 5359549 +
atgggtaggaagaatcaatatc

SEQ ID NO: 106504 - DNA, 22 bp, Artificial Sequence
  Synthetic oligonucleotide; TTT chr11 5359580 5359601 5359597 5359602 +
atagattcaatgccatccccat

SEQ ID NO: 106505 - DNA, 22 bp, Artificial Sequence
  Synthetic oligonucleotide; TTA chr11 5359581 5359602 5359598 5359603 +
tagattcaatgccatccccatc

SEQ ID NO: 106506 - DNA, 22 bp, Artificial Sequence
  Synthetic oligonucleotide; TTC chr11 5359588 5359609 5359605 5359610 +
aatgccatccccatcaagctac

SEQ ID NO: 106507 - DNA, 22 bp, Artificial Sequence
  Synthetic oligonucleotide; CTA chr11 5359609 5359630 5359626 5359631 +
ccaatgactttcttcacagaat

SEQ ID NO: 106508 - DNA, 22 bp, Artificial Sequence
  Synthetic oligonucleotide; CTT chr11 5359619 5359640 5359636 5359641 +
tcttcacagaattggaaaaaac

SEQ ID NO: 106509 - DNA, 22 bp, Artificial Sequence
  Synthetic oligonucleotide; TTT chr11 5359620 5359641 5359637 5359642 +
cttcacagaattggaaaaaact

SEQ ID NO: 106510 - DNA, 22 bp, Artificial Sequence
  Synthetic oligonucleotide; TTC chr11 5359621 5359642 5359638 5359643 +
ttcacagaattggaaaaaacta

SEQ ID NO: 106511 - DNA, 22 bp, Artificial Sequence
  Synthetic oligonucleotide; CTT chr11 5359623 5359644 5359640 5359645 +
cacagaattggaaaaaactact

SEQ ID NO: 106512 - DNA, 22 bp, Artificial Sequence
  Synthetic oligonucleotide; TTC chr11 5359624 5359645 5359641 5359646 +
acagaattggaaaaaactactt

SEQ ID NO: 106513 - DNA, 22 bp, Artificial Sequence
  Synthetic oligonucleotide; TTG chr11 5359633 5359654 5359650 5359655 +
gaaaaaactactttaaagttca

SEQ ID NO: 106514 - DNA, 22 bp, Artificial Sequence
  Synthetic oligonucleotide; CTA chr11 5359643 5359664 5359660 5359665 +
ctttaaagttcatatggaacca

SEQ ID NO: 106515 - DNA, 22 bp, Artificial Sequence
  Synthetic oligonucleotide; CTT chr11 5359646 5359667 5359663 5359668 +
taaagttcatatggaaccaaaa

SEQ ID NO: 106516 - DNA, 22 bp, Artificial Sequence
  Synthetic oligonucleotide; TTT chr11 5359647 5359668 5359664 5359669 +
aaagttcatatggaaccaaaaa

SEQ ID NO: 106517 - DNA, 22 bp, Artificial Sequence
  Synthetic oligonucleotide; TTA chr11 5359648 5359669 5359665 5359670 +
aagttcatatggaaccaaaaaa

SEQ ID NO: 106518 - DNA, 22 bp, Artificial Sequence
  Synthetic oligonucleotide; TTC chr11 5359654 5359675 5359671 5359676 +
atatggaaccaaaaaagagccc

SEQ ID NO: 106519 - DNA, 22 bp, Artificial Sequence
  Synthetic oligonucleotide; TTG chr11 5359682 5359703 5359699 5359704 +
acatgccaatcctaagccaaaa

SEQ ID NO: 106520 - DNA, 22 bp, Artificial Sequence
  Synthetic oligonucleotide; CTA chr11 5359696 5359717 5359713 5359718 +
agccaaaagaacaaagctggag

SEQ ID NO: 106521 - DNA, 22 bp, Artificial Sequence
  Synthetic oligonucleotide; CTG chr11 5359715 5359736 5359732 5359737 +
gaggcatcacgctacctgactt

SEQ ID NO: 106522 - DNA, 22 bp, Artificial Sequence
  Synthetic oligonucleotide; CTA chr11 5359729 5359750 5359746 5359751 +
cctgacttcaaactatactaca

SEQ ID NO: 106523 - DNA, 22 bp, Artificial Sequence
  Synthetic oligonucleotide; CTG chr11 5359733 5359754 5359750 5359755 +
acttcaaactatactacaaggc

SEQ ID NO: 106524 - DNA, 22 bp, Artificial Sequence
  Synthetic oligonucleotide; CTT chr11 5359737 5359758 5359754 5359759 +
caaactatactacaaggctaca

SEQ ID NO: 106525 - DNA, 22 bp, Artificial Sequence
  Synthetic oligonucleotide; TTC chr11 5359738 5359759 5359755 5359760 +
aaactatactacaaggctacag

SEQ ID NO: 106526 - DNA, 22 bp, Artificial Sequence
  Synthetic oligonucleotide; CTA chr11 5359744 5359765 5359761 5359766 +
tactacaaggctacagtaacca

SEQ ID NO: 106527 - DNA, 22 bp, Artificial Sequence
  Synthetic oligonucleotide; CTA chr11 5359749 5359770 5359766 5359771 +
caaggctacagtaaccaaaaca

SEQ ID NO: 106528 - DNA, 22 bp, Artificial Sequence
  Synthetic oligonucleotide; CTA chr11 5359757 5359778 5359774 5359779 +
cagtaaccaaaacagcatggta

SEQ ID NO: 106529 - DNA, 22 bp, Artificial Sequence
  Synthetic oligonucleotide; CTG chr11 5359782 5359803 5359799 5359804 +
gtaccaaaacagagatatagac

SEQ ID NO: 106530 - DNA, 22 bp, Artificial Sequence
  Synthetic oligonucleotide; CTC chr11 5359827 5359848 5359844 5359849 +
agaaataatgccgcatgtctac

SEQ ID NO: 106531 - DNA, 22 bp, Artificial Sequence
  Synthetic oligonucleotide; CTA chr11 5359848 5359869 5359865 5359870 +
caaccatctgatctttgacaaa

SEQ ID NO: 106532 - DNA, 22 bp, Artificial Sequence
  Synthetic oligonucleotide; CTG chr11 5359858 5359879 5359875 5359880 +
atctttgacaaacctgacaaaa

SEQ ID NO: 106533 - DNA, 22 bp, Artificial Sequence
  Synthetic oligonucleotide; CTT chr11 5359863 5359884 5359880 5359885 +
tgacaaacctgacaaaaaaaac

SEQ ID NO: 106534 - DNA, 22 bp, Artificial Sequence
  Synthetic oligonucleotide; TTT chr11 5359864 5359885 5359881 5359886 +
gacaaacctgacaaaaaaaaca

SEQ ID NO: 106535 - DNA, 22 bp, Artificial Sequence
  Synthetic oligonucleotide; TTG chr11 5359865 5359886 5359882 5359887 +
acaaacctgacaaaaaaaacaa

SEQ ID NO: 106536 - DNA, 22 bp, Artificial Sequence
  Synthetic oligonucleotide; CTG chr11 5359874 5359895 5359891 5359896 +
acaaaaaaaacaaatggggaaa

SEQ ID NO: 106537 - DNA, 22 bp, Artificial Sequence
  Synthetic oligonucleotide; TTC chr11 5359902 5359923 5359919 5359924 +
cctatttaataaatggtgctgg

SEQ ID NO: 106538 - DNA, 22 bp, Artificial Sequence
  Synthetic oligonucleotide; CTA chr11 5359906 5359927 5359923 5359928 +
tttaataaatggtgctgggaaa

SEQ ID NO: 106539 - DNA, 22 bp, Artificial Sequence
  Synthetic oligonucleotide; TTT chr11 5359909 5359930 5359926 5359931 +
aataaatggtgctgggaaaact

SEQ ID NO: 106540 - DNA, 22 bp, Artificial Sequence
  Synthetic oligonucleotide; TTA chr11 5359910 5359931 5359927 5359932 +
ataaatggtgctgggaaaactg

SEQ ID NO: 106541 - DNA, 22 bp, Artificial Sequence
  Synthetic oligonucleotide; CTG chr11 5359923 5359944 5359940 5359945 +
ggaaaactggctaaccatacgc

SEQ ID NO: 106542 - DNA, 22 bp, Artificial Sequence
  Synthetic oligonucleotide; CTG chr11 5359932 5359953 5359949 5359954 +
gctaaccatacgcagaaagctg

SEQ ID NO: 106543 - DNA, 22 bp, Artificial Sequence
  Synthetic oligonucleotide; CTA chr11 5359936 5359957 5359953 5359958 +
accatacgcagaaagctgaaac

SEQ ID NO: 106544 - DNA, 22 bp, Artificial Sequence
  Synthetic oligonucleotide; CTG chr11 5359954 5359975 5359971 5359976 +
aaactggatccctttcttacac

SEQ ID NO: 106545 - DNA, 22 bp, Artificial Sequence
  Synthetic oligonucleotide; CTG chr11 5359960 5359981 5359977 5359982 +
gatccctttcttacaccttata

SEQ ID NO: 106546 - DNA, 22 bp, Artificial Sequence
  Synthetic oligonucleotide; CTT chr11 5359968 5359989 5359985 5359990 +
tcttacaccttatacaaaaatt

SEQ ID NO: 106547 - DNA, 22 bp, Artificial Sequence
  Synthetic oligonucleotide; TTT chr11 5359969 5359990 5359986 5359991 +
cttacaccttatacaaaaatta

SEQ ID NO: 106548 - DNA, 22 bp, Artificial Sequence
  Synthetic oligonucleotide; TTC chr11 5359970 5359991 5359987 5359992 +
ttacaccttatacaaaaattaa

SEQ ID NO: 106549 - DNA, 22 bp, Artificial Sequence
  Synthetic oligonucleotide; CTT chr11 5359972 5359993 5359989 5359994 +
acaccttatacaaaaattaatt

SEQ ID NO: 106550 - DNA, 22 bp, Artificial Sequence
  Synthetic oligonucleotide; TTA chr11 5359973 5359994 5359990 5359995 +
caccttatacaaaaattaattc

SEQ ID NO: 106551 - DNA, 22 bp, Artificial Sequence
  Synthetic oligonucleotide; CTT chr11 5359979 5360000 5359996 5360001 +
atacaaaaattaattcaagatg

SEQ ID NO: 106552 - DNA, 22 bp, Artificial Sequence
  Synthetic oligonucleotide; TTA chr11 5359980 5360001 5359997 5360002 +
tacaaaaattaattcaagatgg

SEQ ID NO: 106553 - DNA, 22 bp, Artificial Sequence
  Synthetic oligonucleotide; TTA chr11 5359991 5360012 5360008 5360013 +
attcaagatggattacagactt

SEQ ID NO: 106554 - DNA, 22 bp, Artificial Sequence
  Synthetic oligonucleotide; TTC chr11 5359995 5360016 5360012 5360017 +
aagatggattacagacttaaat

SEQ ID NO: 106555 - DNA, 22 bp, Artificial Sequence
  Synthetic oligonucleotide; TTA chr11 5360006 5360027 5360023 5360028 +
cagacttaaatgttagactgaa

SEQ ID NO: 106556 - DNA, 22 bp, Artificial Sequence
  Synthetic oligonucleotide; CTT chr11 5360013 5360034 5360030 5360035 +
aaatgttagactgaaaaccata

SEQ ID NO: 106557 - DNA, 22 bp, Artificial Sequence
  Synthetic oligonucleotide; TTA chr11 5360014 5360035 5360031 5360036 +
aatgttagactgaaaaccataa

SEQ ID NO: 106558 - DNA, 22 bp, Artificial Sequence
  Synthetic oligonucleotide; TTA chr11 5360021 5360042 5360038 5360043 +
gactgaaaaccataaaaactct

SEQ ID NO: 106559 - DNA, 22 bp, Artificial Sequence
  Synthetic oligonucleotide; CTG chr11 5360026 5360047 5360043 5360048 +
aaaaccataaaaactctggaag

SEQ ID NO: 106560 - DNA, 22 bp, Artificial Sequence
  Synthetic oligonucleotide; CTC chr11 5360042 5360063 5360059 5360064 +
tggaagaaaacctaggcaatac

SEQ ID NO: 106561 - DNA, 22 bp, Artificial Sequence
  Synthetic oligonucleotide; CTG chr11 5360044 5360065 5360061 5360066 +
gaagaaaacctaggcaatacca

SEQ ID NO: 106562 - DNA, 22 bp, Artificial Sequence
  Synthetic oligonucleotide; CTA chr11 5360056 5360077 5360073 5360078 +
ggcaataccattcaggacatag

SEQ ID NO: 106563 - DNA, 22 bp, Artificial Sequence
  Synthetic oligonucleotide; TTC chr11 5360069 5360090 5360086 5360091 +
aggacataggcatgggcaagga

SEQ ID NO: 106564 - DNA, 22 bp, Artificial Sequence
  Synthetic oligonucleotide; CTT chr11 5360094 5360115 5360111 5360116 +
catgtctaaaacaccaaaagca

SEQ ID NO: 106565 - DNA, 22 bp, Artificial Sequence
  Synthetic oligonucleotide; TTC chr11 5360095 5360116 5360112 5360117 +
atgtctaaaacaccaaaagcaa

SEQ ID NO: 106566 - DNA, 22 bp, Artificial Sequence
  Synthetic oligonucleotide; CTA chr11 5360102 5360123 5360119 5360124 +
aaacaccaaaagcaatggcaac

SEQ ID NO: 106567 - DNA, 22 bp, Artificial Sequence
  Synthetic oligonucleotide; CTA chr11 5360152 5360173 5360169 5360174 +
attaaactaaagagcttctgca

SEQ ID NO: 106568 - DNA, 22 bp, Artificial Sequence
  Synthetic oligonucleotide; TTA chr11 5360156 5360177 5360173 5360178 +
aactaaagagcttctgcacagc

SEQ ID NO: 106569 - DNA, 22 bp, Artificial Sequence
  Synthetic oligonucleotide; CTA chr11 5360161 5360182 5360178 5360183 +
aagagcttctgcacagcaaaag

SEQ ID NO: 106570 - DNA, 22 bp, Artificial Sequence
  Synthetic oligonucleotide; CTT chr11 5360169 5360190 5360186 5360191 +
ctgcacagcaaaagaaactacc

SEQ ID NO: 106571 - DNA, 22 bp, Artificial Sequence
  Synthetic oligonucleotide; TTC chr11 5360170 5360191 5360187 5360192 +
tgcacagcaaaagaaactacca

SEQ ID NO: 106572 - DNA, 22 bp, Artificial Sequence
  Synthetic oligonucleotide; CTG chr11 5360172 5360193 5360189 5360194 +
cacagcaaaagaaactaccatc

SEQ ID NO: 106573 - DNA, 22 bp, Artificial Sequence
  Synthetic oligonucleotide; CTA chr11 5360189 5360210 5360206 5360211 +
ccatcagagtgaacaggcaaca

SEQ ID NO: 106574 - DNA, 22 bp, Artificial Sequence
  Synthetic oligonucleotide; TTT chr11 5360231 5360252 5360248 5360253 +
ttgcaatctactcatccgacaa

SEQ ID NO: 106575 - DNA, 22 bp, Artificial Sequence
  Synthetic oligonucleotide; TTT chr11 5360232 5360253 5360249 5360254 +
tgcaatctactcatccgacaaa

SEQ ID NO: 106576 - DNA, 22 bp, Artificial Sequence
  Synthetic oligonucleotide; TTT chr11 5360233 5360254 5360250 5360255 +
gcaatctactcatccgacaaag

SEQ ID NO: 106577 - DNA, 22 bp, Artificial Sequence
  Synthetic oligonucleotide; TTG chr11 5360234 5360255 5360251 5360256 +
caatctactcatccgacaaagg

SEQ ID NO: 106578 - DNA, 22 bp, Artificial Sequence
  Synthetic oligonucleotide; CTA chr11 5360241 5360262 5360258 5360263 +
ctcatccgacaaagggctaata

SEQ ID NO: 106579 - DNA, 22 bp, Artificial Sequence
  Synthetic oligonucleotide; CTC chr11 5360244 5360265 5360261 5360266 +
atccgacaaagggctaatatcc

SEQ ID NO: 106580 - DNA, 22 bp, Artificial Sequence
  Synthetic oligonucleotide; CTA chr11 5360260 5360281 5360277 5360282 +
atatccagaatctatgatgaac

SEQ ID NO: 106581 - DNA, 22 bp, Artificial Sequence
  Synthetic oligonucleotide; CTA chr11 5360274 5360295 5360291 5360296 +
tgatgaactcaaacaaatttac

SEQ ID NO: 106582 - DNA, 22 bp, Artificial Sequence
  Synthetic oligonucleotide; CTC chr11 5360284 5360305 5360301 5360306 +
aaacaaatttacaagaaaaaaa

SEQ ID NO: 106583 - DNA, 22 bp, Artificial Sequence
  Synthetic oligonucleotide; TTT chr11 5360294 5360315 5360311 5360316 +
acaagaaaaaaacaaccccatc

SEQ ID NO: 106584 - DNA, 22 bp, Artificial Sequence
  Synthetic oligonucleotide; TTA chr11 5360295 5360316 5360312 5360317 +
caagaaaaaaacaaccccatca

SEQ ID NO: 106585 - DNA, 22 bp, Artificial Sequence
  Synthetic oligonucleotide; CTT chr11 5360348 5360369 5360365 5360370 +
ctcaaaagaagacatttatgca

SEQ ID NO: 106586 - DNA, 22 bp, Artificial Sequence
  Synthetic oligonucleotide; TTC chr11 5360349 5360370 5360366 5360371 +
tcaaaagaagacatttatgcag

SEQ ID NO: 106587 - DNA, 22 bp, Artificial Sequence
  Synthetic oligonucleotide; CTC chr11 5360351 5360372 5360368 5360373 +
aaaagaagacatttatgcagtc

SEQ ID NO: 106588 - DNA, 22 bp, Artificial Sequence
  Synthetic oligonucleotide; TTT chr11 5360365 5360386 5360382 5360387 +
atgcagtcaacagacacatgaa

SEQ ID NO: 106589 - DNA, 22 bp, Artificial Sequence
  Synthetic oligonucleotide; TTA chr11 5360366 5360387 5360383 5360388 +
tgcagtcaacagacacatgaaa

SEQ ID NO: 106590 - DNA, 22 bp, Artificial Sequence
  Synthetic oligonucleotide; CTC chr11 5360396 5360417 5360413 5360418 +
atcatcactggccatcagagaa

SEQ ID NO: 106591 - DNA, 22 bp, Artificial Sequence
  Synthetic oligonucleotide; CTG chr11 5360406 5360427 5360423 5360428 +
gccatcagagaaatacaaatca

SEQ ID NO: 106592 - DNA, 22 bp, Artificial Sequence
  Synthetic oligonucleotide; CTC chr11 5360451 5360472 5360468 5360473 +
acaccagttagaatggcgatca

SEQ ID NO: 106593 - DNA, 22 bp, Artificial Sequence
  Synthetic oligonucleotide; TTA chr11 5360461 5360482 5360478 5360483 +
gaatggcgatcattaaaaagtc

SEQ ID NO: 106594 - DNA, 22 bp, Artificial Sequence
  Synthetic oligonucleotide; TTA chr11 5360476 5360497 5360493 5360498 +
aaaagtcaggaaacaacaggtg

SEQ ID NO: 106595 - DNA, 22 bp, Artificial Sequence
  Synthetic oligonucleotide; CTG chr11 5360501 5360522 5360518 5360523 +
gagaggatgtgaagaagtagga

SEQ ID NO: 106596 - DNA, 22 bp, Artificial Sequence
  Synthetic oligonucleotide; CTT chr11 5360529 5360550 5360546 5360551 +
ttacactgttggtgagactgta

SEQ ID NO: 106597 - DNA, 22 bp, Artificial Sequence
  Synthetic oligonucleotide; TTT chr11 5360530 5360551 5360547 5360552 +
tacactgttggtgagactgtaa

SEQ ID NO: 106598 - DNA, 22 bp, Artificial Sequence
  Synthetic oligonucleotide; TTT chr11 5360531 5360552 5360548 5360553 +
acactgttggtgagactgtaaa

SEQ ID NO: 106599 - DNA, 22 bp, Artificial Sequence
  Synthetic oligonucleotide; TTA chr11 5360532 5360553 5360549 5360554 +
cactgttggtgagactgtaaac

SEQ ID NO: 106600 - DNA, 22 bp, Artificial Sequence
  Synthetic oligonucleotide; CTG chr11 5360537 5360558 5360554 5360559 +
ttggtgagactgtaaactagtt

SEQ ID NO: 106601 - DNA, 22 bp, Artificial Sequence
  Synthetic oligonucleotide; TTG chr11 5360540 5360561 5360557 5360562 +
gtgagactgtaaactagttcaa

SEQ ID NO: 106602 - DNA, 22 bp, Artificial Sequence
  Synthetic oligonucleotide; CTG chr11 5360549 5360570 5360566 5360571 +
taaactagttcaaccattgtgg

SEQ ID NO: 106603 - DNA, 22 bp, Artificial Sequence
  Synthetic oligonucleotide; CTA chr11 5360556 5360577 5360573 5360578 +
gttcaaccattgtggaagtcag

SEQ ID NO: 106604 - DNA, 22 bp, Artificial Sequence
  Synthetic oligonucleotide; TTC chr11 5360560 5360581 5360577 5360582 +
aaccattgtggaagtcagtgtg

SEQ ID NO: 106605 - DNA, 22 bp, Artificial Sequence
  Synthetic oligonucleotide; TTG chr11 5360568 5360589 5360585 5360590 +
tggaagtcagtgtggcgattcc

SEQ ID NO: 106606 - DNA, 22 bp, Artificial Sequence
  Synthetic oligonucleotide; TTC chr11 5360589 5360610 5360606 5360611 +
ctcagggatctagaactagaaa

SEQ ID NO: 106607 - DNA, 22 bp, Artificial Sequence
  Synthetic oligonucleotide; CTC chr11 5360592 5360613 5360609 5360614 +
agggatctagaactagaaatac

SEQ ID NO: 106608 - DNA, 22 bp, Artificial Sequence
  Synthetic oligonucleotide; CTA chr11 5360601 5360622 5360618 5360623 +
gaactagaaataccatttgacc

SEQ ID NO: 106609 - DNA, 22 bp, Artificial Sequence
  Synthetic oligonucleotide; CTA chr11 5360607 5360628 5360624 5360629 +
gaaataccatttgacccagcca

SEQ ID NO: 106610 - DNA, 22 bp, Artificial Sequence
  Synthetic oligonucleotide; TTT chr11 5360619 5360640 5360636 5360641 +
gacccagccatcccattactgg

SEQ ID NO: 106611 - DNA, 22 bp, Artificial Sequence
  Synthetic oligonucleotide; TTG chr11 5360620 5360641 5360637 5360642 +
acccagccatcccattactggg

SEQ ID NO: 106612 - DNA, 22 bp, Artificial Sequence
  Synthetic oligonucleotide; TTA chr11 5360637 5360658 5360654 5360659 +
ctgggtacatactcaaaggatt

SEQ ID NO: 106613 - DNA, 22 bp, Artificial Sequence
  Synthetic oligonucleotide; CTG chr11 5360640 5360661 5360657 5360662 +
ggtacatactcaaaggattata

SEQ ID NO: 106614 - DNA, 22 bp, Artificial Sequence
  Synthetic oligonucleotide; CTC chr11 5360651 5360672 5360668 5360673 +
aaaggattataaatcatgctgc

SEQ ID NO: 106615 - DNA, 22 bp, Artificial Sequence
  Synthetic oligonucleotide; TTA chr11 5360660 5360681 5360677 5360682 +
taaatcatgctgctataaagac

SEQ ID NO: 106616 - DNA, 22 bp, Artificial Sequence
  Synthetic oligonucleotide; CTG chr11 5360672 5360693 5360689 5360694 +
ctataaagacacatgcacatgt

SEQ ID NO: 106617 - DNA, 22 bp, Artificial Sequence
  Synthetic oligonucleotide; CTA chr11 5360675 5360696 5360692 5360697 +
taaagacacatgcacatgtatg

SEQ ID NO: 106618 - DNA, 22 bp, Artificial Sequence
  Synthetic oligonucleotide; TTT chr11 5360700 5360721 5360717 5360722 +
attgtggcactattcacaatag

SEQ ID NO: 106619 - DNA, 22 bp, Artificial Sequence
  Synthetic oligonucleotide; TTA chr11 5360701 5360722 5360718 5360723 +
ttgtggcactattcacaatagc

SEQ ID NO: 106620 - DNA, 22 bp, Artificial Sequence
  Synthetic oligonucleotide; TTG chr11 5360704 5360725 5360721 5360726 +
tggcactattcacaatagcaaa

SEQ ID NO: 106621 - DNA, 22 bp, Artificial Sequence
  Synthetic oligonucleotide; CTA chr11 5360712 5360733 5360729 5360734 +
ttcacaatagcaaagacttgga

SEQ ID NO: 106622 - DNA, 22 bp, Artificial Sequence
  Synthetic oligonucleotide; TTC chr11 5360715 5360736 5360732 5360737 +
acaatagcaaagacttggaacc

SEQ ID NO: 106623 - DNA, 22 bp, Artificial Sequence
  Synthetic oligonucleotide; CTT chr11 5360731 5360752 5360748 5360753 +
ggaaccaacccaaatgtccaac

SEQ ID NO: 106624 - DNA, 22 bp, Artificial Sequence
  Synthetic oligonucleotide; TTG chr11 5360732 5360753 5360749 5360754 +
gaaccaacccaaatgtccaaca

SEQ ID NO: 106625 - DNA, 22 bp, Artificial Sequence
  Synthetic oligonucleotide; CTG chr11 5360765 5360786 5360782 5360787 +
gattaagaaaacgtggcacata

SEQ ID NO: 106626 - DNA, 22 bp, Artificial Sequence
  Synthetic oligonucleotide; TTA chr11 5360770 5360791 5360787 5360792 +
agaaaacgtggcacatatacac

SEQ ID NO: 106627 - DNA, 22 bp, Artificial Sequence
  Synthetic oligonucleotide; CTA chr11 5360804 5360825 5360821 5360826 +
tgcagccataaaaaatgaagag

SEQ ID NO: 106628 - DNA, 22 bp, Artificial Sequence
  Synthetic oligonucleotide; TTC chr11 5360829 5360850 5360846 5360851 +
atgtcctttgtagggacatgga

SEQ ID NO: 106629 - DNA, 22 bp, Artificial Sequence
  Synthetic oligonucleotide; CTT chr11 5360837 5360858 5360854 5360859 +
tgtagggacatggatgaagctg

SEQ ID NO: 106630 - DNA, 22 bp, Artificial Sequence
  Synthetic oligonucleotide; TTT chr11 5360838 5360859 5360855 5360860 +
gtagggacatggatgaagctgg

SEQ ID NO: 106631 - DNA, 22 bp, Artificial Sequence
  Synthetic oligonucleotide; TTG chr11 5360839 5360860 5360856 5360861 +
tagggacatggatgaagctgga

SEQ ID NO: 106632 - DNA, 22 bp, Artificial Sequence
  Synthetic oligonucleotide; CTG chr11 5360859 5360880 5360876 5360881 +
gaaaccatcattctcagcaaac

SEQ ID NO: 106633 - DNA, 22 bp, Artificial Sequence
  Synthetic oligonucleotide; TTC chr11 5360872 5360893 5360889 5360894 +
tcagcaaactatcgcaaggaca

SEQ ID NO: 106634 - DNA, 22 bp, Artificial Sequence
  Synthetic oligonucleotide; CTC chr11 5360874 5360895 5360891 5360896 +
agcaaactatcgcaaggacaaa

SEQ ID NO: 106635 - DNA, 22 bp, Artificial Sequence
  Synthetic oligonucleotide; CTA chr11 5360883 5360904 5360900 5360905 +
tcgcaaggacaaaaaccaaaca

SEQ ID NO: 106636 - DNA, 22 bp, Artificial Sequence
  Synthetic oligonucleotide; CTG chr11 5360908 5360929 5360925 5360930 +
catgttctcactcataggtggg

SEQ ID NO: 106637 - DNA, 22 bp, Artificial Sequence
  Synthetic oligonucleotide; TTC chr11 5360915 5360936 5360932 5360937 +
tcactcataggtgggaattgaa

SEQ ID NO: 106638 - DNA, 22 bp, Artificial Sequence
  Synthetic oligonucleotide; CTC chr11 5360917 5360938 5360934 5360939 +
actcataggtgggaattgaaca

SEQ ID NO: 106639 - DNA, 22 bp, Artificial Sequence
  Synthetic oligonucleotide; CTC chr11 5360921 5360942 5360938 5360943 +
ataggtgggaattgaacaatga

SEQ ID NO: 106640 - DNA, 22 bp, Artificial Sequence
  Synthetic oligonucleotide; TTG chr11 5360935 5360956 5360952 5360957 +
aacaatgagaacacatggacac

SEQ ID NO: 106641 - DNA, 22 bp, Artificial Sequence
  Synthetic oligonucleotide; CTG chr11 5360987 5361008 5361004 5361009 +
cagtggggtgggggtcgggggg

SEQ ID NO: 106642 - DNA, 22 bp, Artificial Sequence
  Synthetic oligonucleotide; TTA chr11 5361022 5361043 5361039 5361044 +
ggagatatacctaatgctaagt

SEQ ID NO: 106643 - DNA, 22 bp, Artificial Sequence
  Synthetic oligonucleotide; CTA chr11 5361035 5361056 5361052 5361057 +
atgctaagtgacgagttaatgg

SEQ ID NO: 106644 - DNA, 22 bp, Artificial Sequence
  Synthetic oligonucleotide; CTA chr11 5361041 5361062 5361058 5361063 +
agtgacgagttaatgggtgcag

SEQ ID NO: 106645 - DNA, 22 bp, Artificial Sequence
  Synthetic oligonucleotide; TTA chr11 5361053 5361074 5361070 5361075 +
atgggtgcagcacaccaacatg

SEQ ID NO: 106646 - DNA, 22 bp, Artificial Sequence
  Synthetic oligonucleotide; CTG chr11 5361103 5361124 5361120 5361125 +
cacgttgtgcaaatgtacccta

SEQ ID NO: 106647 - DNA, 22 bp, Artificial Sequence
  Synthetic oligonucleotide; TTG chr11 5361110 5361131 5361127 5361132 +
tgcaaatgtaccctaaaactta

SEQ ID NO: 106648 - DNA, 22 bp, Artificial Sequence
  Synthetic oligonucleotide; CTA chr11 5361125 5361146 5361142 5361147 +
aaacttaaagtataataataaa

SEQ ID NO: 106649 - DNA, 22 bp, Artificial Sequence
  Synthetic oligonucleotide; CTT chr11 5361131 5361152 5361148 5361153 +
aaagtataataataaaagaaag

SEQ ID NO: 106650 - DNA, 22 bp, Artificial Sequence
  Synthetic oligonucleotide; TTA chr11 5361132 5361153 5361149 5361154 +
aagtataataataaaagaaaga

SEQ ID NO: 106651 - DNA, 22 bp, Artificial Sequence
  Synthetic oligonucleotide; CTG chr11 5361168 5361189 5361185 5361190 +
ctgcaaaaaggccatcctccct

SEQ ID NO: 106652 - DNA, 22 bp, Artificial Sequence
  Synthetic oligonucleotide; CTG chr11 5361171 5361192 5361188 5361193 +
caaaaaggccatcctccctaca

SEQ ID NO: 106653 - DNA, 22 bp, Artificial Sequence
  Synthetic oligonucleotide; CTC chr11 5361187 5361208 5361204 5361209 +
cctacattttcttttctacccc

SEQ ID NO: 106654 - DNA, 22 bp, Artificial Sequence
  Synthetic oligonucleotide; CTA chr11 5361191 5361212 5361208 5361213 +
cattttcttttctacccctatg

SEQ ID NO: 106655 - DNA, 22 bp, Artificial Sequence
  Synthetic oligonucleotide; TTT chr11 5361196 5361217 5361213 5361218 +
tcttttctacccctatgtgatg

SEQ ID NO: 106656 - DNA, 22 bp, Artificial Sequence
  Synthetic oligonucleotide; TTT chr11 5361197 5361218 5361214 5361219 +
cttttctacccctatgtgatgc

SEQ ID NO: 106657 - DNA, 22 bp, Artificial Sequence
  Synthetic oligonucleotide; TTC chr11 5361198 5361219 5361215 5361220 +
ttttctacccctatgtgatgct

SEQ ID NO: 106658 - DNA, 22 bp, Artificial Sequence
  Synthetic oligonucleotide; CTT chr11 5361200 5361221 5361217 5361222 +
ttctacccctatgtgatgctta

SEQ ID NO: 106659 - DNA, 22 bp, Artificial Sequence
  Synthetic oligonucleotide; TTT chr11 5361201 5361222 5361218 5361223 +
tctacccctatgtgatgcttaa

SEQ ID NO: 106660 - DNA, 22 bp, Artificial Sequence
  Synthetic oligonucleotide; TTT chr11 5361202 5361223 5361219 5361224 +
ctacccctatgtgatgcttaaa

SEQ ID NO: 106661 - DNA, 22 bp, Artificial Sequence
  Synthetic oligonucleotide; TTC chr11 5361203 5361224 5361220 5361225 +
tacccctatgtgatgcttaaaa

SEQ ID NO: 106662 - DNA, 22 bp, Artificial Sequence
  Synthetic oligonucleotide; CTA chr11 5361205 5361226 5361222 5361227 +
cccctatgtgatgcttaaaata

SEQ ID NO: 106663 - DNA, 22 bp, Artificial Sequence
  Synthetic oligonucleotide; CTA chr11 5361211 5361232 5361228 5361233 +
tgtgatgcttaaaataaatctt

SEQ ID NO: 106664 - DNA, 22 bp, Artificial Sequence
  Synthetic oligonucleotide; CTT chr11 5361221 5361242 5361238 5361243 +
aaaataaatcttatttctggag

SEQ ID NO: 106665 - DNA, 22 bp, Artificial Sequence
  Synthetic oligonucleotide; TTA chr11 5361222 5361243 5361239 5361244 +
aaataaatcttatttctggaga

SEQ ID NO: 106666 - DNA, 22 bp, Artificial Sequence
  Synthetic oligonucleotide; CTT chr11 5361233 5361254 5361250 5361255 +
atttctggagatgtggctaatt

SEQ ID NO: 106667 - DNA, 22 bp, Artificial Sequence
  Synthetic oligonucleotide; TTA chr11 5361234 5361255 5361251 5361256 +
tttctggagatgtggctaattc

SEQ ID NO: 106668 - DNA, 22 bp, Artificial Sequence
  Synthetic oligonucleotide; TTT chr11 5361237 5361258 5361254 5361259 +
ctggagatgtggctaattccct

SEQ ID NO: 106669 - DNA, 22 bp, Artificial Sequence
  Synthetic oligonucleotide; TTC chr11 5361238 5361259 5361255 5361260 +
tggagatgtggctaattcccta

SEQ ID NO: 106670 - DNA, 22 bp, Artificial Sequence
  Synthetic oligonucleotide; CTG chr11 5361240 5361261 5361257 5361262 +
gagatgtggctaattccctaac

SEQ ID NO: 106671 - DNA, 22 bp, Artificial Sequence
  Synthetic oligonucleotide; CTA chr11 5361252 5361273 5361269 5361274 +
attccctaacctagatgcagga

SEQ ID NO: 106672 - DNA, 22 bp, Artificial Sequence
  Synthetic oligonucleotide; TTC chr11 5361256 5361277 5361273 5361278 +
cctaacctagatgcaggaagaa

SEQ ID NO: 106673 - DNA, 22 bp, Artificial Sequence
  Synthetic oligonucleotide; CTA chr11 5361260 5361281 5361277 5361282 +
acctagatgcaggaagaaacct

SEQ ID NO: 106674 - DNA, 22 bp, Artificial Sequence
  Synthetic oligonucleotide; CTA chr11 5361265 5361286 5361282 5361287 +
gatgcaggaagaaaccttagcg

SEQ ID NO: 106675 - DNA, 22 bp, Artificial Sequence
  Synthetic oligonucleotide; CTT chr11 5361283 5361304 5361300 5361305 +
agcgactcctgttccaaagttc

SEQ ID NO: 106676 - DNA, 22 bp, Artificial Sequence
  Synthetic oligonucleotide; TTA chr11 5361284 5361305 5361301 5361306 +
gcgactcctgttccaaagttct

SEQ ID NO: 106677 - DNA, 22 bp, Artificial Sequence
  Synthetic oligonucleotide; CTC chr11 5361291 5361312 5361308 5361313 +
ctgttccaaagttctaaatccc

SEQ ID NO: 106678 - DNA, 22 bp, Artificial Sequence
  Synthetic oligonucleotide; CTG chr11 5361294 5361315 5361311 5361316 +
ttccaaagttctaaatccctca

SEQ ID NO: 106679 - DNA, 22 bp, Artificial Sequence
  Synthetic oligonucleotide; TTC chr11 5361297 5361318 5361314 5361319 +
caaagttctaaatccctcaggc

SEQ ID NO: 106680 - DNA, 22 bp, Artificial Sequence
  Synthetic oligonucleotide; TTC chr11 5361305 5361326 5361322 5361327 +
taaatccctcaggctgggagaa

SEQ ID NO: 106681 - DNA, 22 bp, Artificial Sequence
  Synthetic oligonucleotide; CTA chr11 5361307 5361328 5361324 5361329 +
aatccctcaggctgggagaata

SEQ ID NO: 106682 - DNA, 22 bp, Artificial Sequence
  Synthetic oligonucleotide; CTC chr11 5361315 5361336 5361332 5361337 +
aggctgggagaataaagaagga

SEQ ID NO: 106683 - DNA, 22 bp, Artificial Sequence
  Synthetic oligonucleotide; CTG chr11 5361321 5361342 5361338 5361343 +
ggagaataaagaaggagggagg

SEQ ID NO: 106684 - DNA, 22 bp, Artificial Sequence
  Synthetic oligonucleotide; TTT chr11 5361372 5361393 5361389 5361394 +
ctgaaactaattttctttgcag

SEQ ID NO: 106685 - DNA, 22 bp, Artificial Sequence
  Synthetic oligonucleotide; TTC chr11 5361373 5361394 5361390 5361395 +
tgaaactaattttctttgcagc

SEQ ID NO: 106686 - DNA, 22 bp, Artificial Sequence
  Synthetic oligonucleotide; CTG chr11 5361375 5361396 5361392 5361397 +
aaactaattttctttgcagctt

SEQ ID NO: 106687 - DNA, 22 bp, Artificial Sequence
  Synthetic oligonucleotide; CTA chr11 5361381 5361402 5361398 5361403 +
attttctttgcagcttggcttc

SEQ ID NO: 106688 - DNA, 22 bp, Artificial Sequence
  Synthetic oligonucleotide; TTT chr11 5361385 5361406 5361402 5361407 +
tctttgcagcttggcttctgag

SEQ ID NO: 106689 - DNA, 22 bp, Artificial Sequence
  Synthetic oligonucleotide; TTT chr11 5361386 5361407 5361403 5361408 +
ctttgcagcttggcttctgagt

SEQ ID NO: 106690 - DNA, 22 bp, Artificial Sequence
  Synthetic oligonucleotide; TTC chr11 5361387 5361408 5361404 5361409 +
tttgcagcttggcttctgagta

SEQ ID NO: 106691 - DNA, 22 bp, Artificial Sequence
  Synthetic oligonucleotide; CTT chr11 5361389 5361410 5361406 5361411 +
tgcagcttggcttctgagtata

SEQ ID NO: 106692 - DNA, 22 bp, Artificial Sequence
  Synthetic oligonucleotide; TTT chr11 5361390 5361411 5361407 5361412 +
gcagcttggcttctgagtatag

SEQ ID NO: 106693 - DNA, 22 bp, Artificial Sequence
  Synthetic oligonucleotide; TTG chr11 5361391 5361412 5361408 5361413 +
cagcttggcttctgagtatagt

SEQ ID NO: 106694 - DNA, 22 bp, Artificial Sequence
  Synthetic oligonucleotide; CTT chr11 5361397 5361418 5361414 5361419 +
ggcttctgagtatagtctaaaa

SEQ ID NO: 106695 - DNA, 22 bp, Artificial Sequence
  Synthetic oligonucleotide; TTG chr11 5361398 5361419 5361415 5361420 +
gcttctgagtatagtctaaaaa

SEQ ID NO: 106696 - DNA, 22 bp, Artificial Sequence
  Synthetic oligonucleotide; CTT chr11 5361402 5361423 5361419 5361424 +
ctgagtatagtctaaaaagttg

SEQ ID NO: 106697 - DNA, 22 bp, Artificial Sequence
  Synthetic oligonucleotide; TTC chr11 5361403 5361424 5361420 5361425 +
tgagtatagtctaaaaagttgg

SEQ ID NO: 106698 - DNA, 22 bp, Artificial Sequence
  Synthetic oligonucleotide; CTG chr11 5361405 5361426 5361422 5361427 +
agtatagtctaaaaagttggtg

SEQ ID NO: 106699 - DNA, 22 bp, Artificial Sequence
  Synthetic oligonucleotide; CTA chr11 5361416 5361437 5361433 5361438 +
aaaagttggtgttggatccaat

SEQ ID NO: 106700 - DNA, 22 bp, Artificial Sequence
  Synthetic oligonucleotide; TTG chr11 5361424 5361445 5361441 5361446 +
gtgttggatccaatatcttgac

SEQ ID NO: 106701 - DNA, 22 bp, Artificial Sequence
  Synthetic oligonucleotide; TTG chr11 5361430 5361451 5361447 5361452 +
gatccaatatcttgaccaggct

SEQ ID NO: 106702 - DNA, 22 bp, Artificial Sequence
  Synthetic oligonucleotide; CTT chr11 5361443 5361464 5361460 5361465 +
gaccaggcttaggggttcatag

SEQ ID NO: 106703 - DNA, 22 bp, Artificial Sequence
  Synthetic oligonucleotide; TTG chr11 5361444 5361465 5361461 5361466 +
accaggcttaggggttcatagt

SEQ ID NO: 106704 - DNA, 22 bp, Artificial Sequence
  Synthetic oligonucleotide; CTT chr11 5361453 5361474 5361470 5361475 +
aggggttcatagtcacatctgt

SEQ ID NO: 106705 - DNA, 22 bp, Artificial Sequence
  Synthetic oligonucleotide; TTA chr11 5361454 5361475 5361471 5361476 +
ggggttcatagtcacatctgtg

SEQ ID NO: 106706 - DNA, 22 bp, Artificial Sequence
  Synthetic oligonucleotide; TTC chr11 5361461 5361482 5361478 5361483 +
atagtcacatctgtggcaacaa

SEQ ID NO: 106707 - DNA, 22 bp, Artificial Sequence
  Synthetic oligonucleotide; CTG chr11 5361474 5361495 5361491 5361496 +
tggcaacaatgaacagacttat

SEQ ID NO: 106708 - DNA, 22 bp, Artificial Sequence
  Synthetic oligonucleotide; CTT chr11 5361494 5361515 5361511 5361516 +
atgaacaggtcggtaaagaact

SEQ ID NO: 106709 - DNA, 22 bp, Artificial Sequence
  Synthetic oligonucleotide; TTA chr11 5361495 5361516 5361512 5361517 +
tgaacaggtcggtaaagaactc

SEQ ID NO: 106710 - DNA, 22 bp, Artificial Sequence
  Synthetic oligonucleotide; CTC chr11 5361517 5361538 5361534 5361539 +
cagtgtgtcttggcctagaggc

SEQ ID NO: 106711 - DNA, 22 bp, Artificial Sequence
  Synthetic oligonucleotide; CTT chr11 5361528 5361549 5361545 5361550 +
ggcctagaggctccgcatagga

SEQ ID NO: 106712 - DNA, 22 bp, Artificial Sequence
  Synthetic oligonucleotide; TTG chr11 5361529 5361550 5361546 5361551 +
gcctagaggctccgcataggaa

SEQ ID NO: 106713 - DNA, 22 bp, Artificial Sequence
  Synthetic oligonucleotide; CTA chr11 5361534 5361555 5361551 5361556 +
gaggctccgcataggaatgagc

SEQ ID NO: 106714 - DNA, 22 bp, Artificial Sequence
  Synthetic oligonucleotide; CTC chr11 5361541 5361562 5361558 5361563 +
cgcataggaatgagcagtagac

SEQ ID NO: 106715 - DNA, 22 bp, Artificial Sequence
  Synthetic oligonucleotide; TTG chr11 5361568 5361589 5361585 5361590 +
gcttatcagagattgcagagag

SEQ ID NO: 106716 - DNA, 22 bp, Artificial Sequence
  Synthetic oligonucleotide; CTT chr11 5361572 5361593 5361589 5361594 +
atcagagattgcagagagggaa

SEQ ID NO: 106717 - DNA, 22 bp, Artificial Sequence
  Synthetic oligonucleotide; TTA chr11 5361573 5361594 5361590 5361595 +
tcagagattgcagagagggaaa

SEQ ID NO: 106718 - DNA, 22 bp, Artificial Sequence
  Synthetic oligonucleotide; TTG chr11 5361583 5361604 5361600 5361605 +
cagagagggaaatgcagtaatg

SEQ ID NO: 106719 - DNA, 22 bp, Artificial Sequence
  Synthetic oligonucleotide; CTA chr11 5361639 5361660 5361656 5361661 +
tcatcccaaagactccctaaaa

SEQ ID NO: 106720 - DNA, 22 bp, Artificial Sequence
  Synthetic oligonucleotide; CTC chr11 5361654 5361675 5361671 5361676 +
cctaaaatctttagaacttggc

SEQ ID NO: 106721 - DNA, 22 bp, Artificial Sequence
  Synthetic oligonucleotide; CTA chr11 5361658 5361679 5361675 5361680 +
aaatctttagaacttggcttct

SEQ ID NO: 106722 - DNA, 22 bp, Artificial Sequence
  Synthetic oligonucleotide; CTT chr11 5361665 5361686 5361682 5361687 +
tagaacttggcttctgaataat

SEQ ID NO: 106723 - DNA, 22 bp, Artificial Sequence
  Synthetic oligonucleotide; TTT chr11 5361666 5361687 5361683 5361688 +
agaacttggcttctgaataatc

SEQ ID NO: 106724 - DNA, 22 bp, Artificial Sequence
  Synthetic oligonucleotide; TTA chr11 5361667 5361688 5361684 5361689 +
gaacttggcttctgaataatct

SEQ ID NO: 106725 - DNA, 22 bp, Artificial Sequence
  Synthetic oligonucleotide; CTT chr11 5361673 5361694 5361690 5361695 +
ggcttctgaataatctcttttg

SEQ ID NO: 106726 - DNA, 22 bp, Artificial Sequence
  Synthetic oligonucleotide; TTG chr11 5361674 5361695 5361691 5361696 +
gcttctgaataatctcttttgc

SEQ ID NO: 106727 - DNA, 22 bp, Artificial Sequence
  Synthetic oligonucleotide; CTT chr11 5361678 5361699 5361695 5361700 +
ctgaataatctcttttgcaaat

SEQ ID NO: 106728 - DNA, 22 bp, Artificial Sequence
  Synthetic oligonucleotide; TTC chr11 5361679 5361700 5361696 5361701 +
tgaataatctcttttgcaaatt

SEQ ID NO: 106729 - DNA, 22 bp, Artificial Sequence
  Synthetic oligonucleotide; CTG chr11 5361681 5361702 5361698 5361703 +
aataatctcttttgcaaattcc

SEQ ID NO: 106730 - DNA, 22 bp, Artificial Sequence
  Synthetic oligonucleotide; CTC chr11 5361690 5361711 5361707 5361712 +
ttttgcaaattcctagaagagg

SEQ ID NO: 106731 - DNA, 22 bp, Artificial Sequence
  Synthetic oligonucleotide; CTT chr11 5361692 5361713 5361709 5361714 +
ttgcaaattcctagaagaggga

SEQ ID NO: 106732 - DNA, 22 bp, Artificial Sequence
  Synthetic oligonucleotide; TTT chr11 5361693 5361714 5361710 5361715 +
tgcaaattcctagaagagggaa

SEQ ID NO: 106733 - DNA, 22 bp, Artificial Sequence
  Synthetic oligonucleotide; TTT chr11 5361694 5361715 5361711 5361716 +
gcaaattcctagaagagggaaa

SEQ ID NO: 106734 - DNA, 22 bp, Artificial Sequence
  Synthetic oligonucleotide; TTG chr11 5361695 5361716 5361712 5361717 +
caaattcctagaagagggaaaa

SEQ ID NO: 106735 - DNA, 22 bp, Artificial Sequence
  Synthetic oligonucleotide; TTC chr11 5361702 5361723 5361719 5361724 +
ctagaagagggaaaatcctaga

SEQ ID NO: 106736 - DNA, 22 bp, Artificial Sequence
  Synthetic oligonucleotide; CTA chr11 5361705 5361726 5361722 5361727 +
gaagagggaaaatcctagatct

SEQ ID NO: 106737 - DNA, 22 bp, Artificial Sequence
  Synthetic oligonucleotide; CTA chr11 5361722 5361743 5361739 5361744 +
gatctcctttttcattccctag

SEQ ID NO: 106738 - DNA, 22 bp, Artificial Sequence
  Synthetic oligonucleotide; CTC chr11 5361728 5361749 5361745 5361750 +
ctttttcattccctagcagagt

SEQ ID NO: 106739 - DNA, 22 bp, Artificial Sequence
  Synthetic oligonucleotide; CTT chr11 5361731 5361752 5361748 5361753 +
tttcattccctagcagagtgat

SEQ ID NO: 106740 - DNA, 22 bp, Artificial Sequence
  Synthetic oligonucleotide; TTT chr11 5361732 5361753 5361749 5361754 +
ttcattccctagcagagtgatc

SEQ ID NO: 106741 - DNA, 22 bp, Artificial Sequence
  Synthetic oligonucleotide; TTT chr11 5361733 5361754 5361750 5361755 +
tcattccctagcagagtgatct

SEQ ID NO: 106742 - DNA, 22 bp, Artificial Sequence
  Synthetic oligonucleotide; TTT chr11 5361734 5361755 5361751 5361756 +
cattccctagcagagtgatcta

SEQ ID NO: 106743 - DNA, 22 bp, Artificial Sequence
  Synthetic oligonucleotide; TTC chr11 5361735 5361756 5361752 5361757 +
attccctagcagagtgatctag

SEQ ID NO: 106744 - DNA, 22 bp, Artificial Sequence
  Synthetic oligonucleotide; TTC chr11 5361739 5361760 5361756 5361761 +
cctagcagagtgatctagttag

SEQ ID NO: 106745 - DNA, 22 bp, Artificial Sequence
  Synthetic oligonucleotide; CTA chr11 5361743 5361764 5361760 5361765 +
gcagagtgatctagttaggaaa

SEQ ID NO: 106746 - DNA, 22 bp, Artificial Sequence
  Synthetic oligonucleotide; CTA chr11 5361756 5361777 5361773 5361778 +
gttaggaaaaaatcaagttgaa

SEQ ID NO: 106747 - DNA, 22 bp, Artificial Sequence
  Synthetic oligonucleotide; TTA chr11 5361760 5361781 5361777 5361782 +
ggaaaaaatcaagttgaaaatc

SEQ ID NO: 106748 - DNA, 22 bp, Artificial Sequence
  Synthetic oligonucleotide; TTG chr11 5361776 5361797 5361793 5361798 +
aaaatccacgggaatacagaat

SEQ ID NO: 106749 - DNA, 22 bp, Artificial Sequence
  Synthetic oligonucleotide; CTC chr11 5361806 5361827 5361823 5361828 +
tggtgtagttccagactctggt

SEQ ID NO: 106750 - DNA, 22 bp, Artificial Sequence
  Synthetic oligonucleotide; CTG chr11 5361808 5361829 5361825 5361830 +
gtgtagttccagactctggttt

SEQ ID NO: 106751 - DNA, 22 bp, Artificial Sequence
  Synthetic oligonucleotide; TTC chr11 5361817 5361838 5361834 5361839 +
cagactctggtttggattatct

SEQ ID NO: 106752 - DNA, 22 bp, Artificial Sequence
  Synthetic oligonucleotide; CTC chr11 5361824 5361845 5361841 5361846 +
tggtttggattatctatttcct

SEQ ID NO: 106753 - DNA, 22 bp, Artificial Sequence
  Synthetic oligonucleotide; CTG chr11 5361826 5361847 5361843 5361848 +
gtttggattatctatttccttt

SEQ ID NO: 106754 - DNA, 22 bp, Artificial Sequence
  Synthetic oligonucleotide; TTT chr11 5361830 5361851 5361847 5361852 +
ggattatctatttcctttgttg

SEQ ID NO: 106755 - DNA, 22 bp, Artificial Sequence
  Synthetic oligonucleotide; TTG chr11 5361831 5361852 5361848 5361853 +
gattatctatttcctttgttgc

SEQ ID NO: 106756 - DNA, 22 bp, Artificial Sequence
  Synthetic oligonucleotide; TTA chr11 5361836 5361857 5361853 5361858 +
tctatttcctttgttgctctct

SEQ ID NO: 106757 - DNA, 22 bp, Artificial Sequence
  Synthetic oligonucleotide; CTA chr11 5361840 5361861 5361857 5361862 +
tttcctttgttgctctcttcgg

SEQ ID NO: 106758 - DNA, 22 bp, Artificial Sequence
  Synthetic oligonucleotide; TTT chr11 5361843 5361864 5361860 5361865 +
cctttgttgctctcttcgggct

SEQ ID NO: 106759 - DNA, 22 bp, Artificial Sequence
  Synthetic oligonucleotide; TTC chr11 5361844 5361865 5361861 5361866 +
ctttgttgctctcttcgggctg

SEQ ID NO: 106760 - DNA, 22 bp, Artificial Sequence
  Synthetic oligonucleotide; CTT chr11 5361847 5361868 5361864 5361869 +
tgttgctctcttcgggctgcat

SEQ ID NO: 106761 - DNA, 22 bp, Artificial Sequence
  Synthetic oligonucleotide; TTT chr11 5361848 5361869 5361865 5361870 +
gttgctctcttcgggctgcata

SEQ ID NO: 106762 - DNA, 22 bp, Artificial Sequence
  Synthetic oligonucleotide; TTG chr11 5361849 5361870 5361866 5361871 +
ttgctctcttcgggctgcataa

SEQ ID NO: 106763 - DNA, 22 bp, Artificial Sequence
  Synthetic oligonucleotide; TTG chr11 5361852 5361873 5361869 5361874 +
ctctcttcgggctgcataaacc

SEQ ID NO: 106764 - DNA, 22 bp, Artificial Sequence
  Synthetic oligonucleotide; CTC chr11 5361855 5361876 5361872 5361877 +
tcttcgggctgcataaaccagc

SEQ ID NO: 106765 - DNA, 22 bp, Artificial Sequence
  Synthetic oligonucleotide; CTC chr11 5361857 5361878 5361874 5361879 +
ttcgggctgcataaaccagctt

SEQ ID NO: 106766 - DNA, 22 bp, Artificial Sequence
  Synthetic oligonucleotide; CTT chr11 5361859 5361880 5361876 5361881 +
cgggctgcataaaccagcttcc

SEQ ID NO: 106767 - DNA, 22 bp, Artificial Sequence
  Synthetic oligonucleotide; TTC chr11 5361860 5361881 5361877 5361882 +
gggctgcataaaccagcttcct

SEQ ID NO: 106768 - DNA, 22 bp, Artificial Sequence
  Synthetic oligonucleotide; CTG chr11 5361866 5361887 5361883 5361888 +
cataaaccagcttcctctttgc

SEQ ID NO: 106769 - DNA, 22 bp, Artificial Sequence
  Synthetic oligonucleotide; CTT chr11 5361879 5361900 5361896 5361901 +
cctctttgcctctatgtgttct

SEQ ID NO: 106770 - DNA, 22 bp, Artificial Sequence
  Synthetic oligonucleotide; TTC chr11 5361880 5361901 5361897 5361902 +
ctctttgcctctatgtgttcta

SEQ ID NO: 106771 - DNA, 22 bp, Artificial Sequence
  Synthetic oligonucleotide; CTC chr11 5361883 5361904 5361900 5361905 +
tttgcctctatgtgttctacca

SEQ ID NO: 106772 - DNA, 22 bp, Artificial Sequence
  Synthetic oligonucleotide; CTT chr11 5361885 5361906 5361902 5361907 +
tgcctctatgtgttctaccaag

SEQ ID NO: 106773 - DNA, 22 bp, Artificial Sequence
  Synthetic oligonucleotide; TTT chr11 5361886 5361907 5361903 5361908 +
gcctctatgtgttctaccaagt

SEQ ID NO: 106774 - DNA, 22 bp, Artificial Sequence
  Synthetic oligonucleotide; TTG chr11 5361887 5361908 5361904 5361909 +
cctctatgtgttctaccaagta

SEQ ID NO: 106775 - DNA, 22 bp, Artificial Sequence
  Synthetic oligonucleotide; CTC chr11 5361891 5361912 5361908 5361913 +
tatgtgttctaccaagtactta

SEQ ID NO: 106776 - DNA, 22 bp, Artificial Sequence
  Synthetic oligonucleotide; CTA chr11 5361893 5361914 5361910 5361915 +
tgtgttctaccaagtacttact

SEQ ID NO: 106777 - DNA, 22 bp, Artificial Sequence
  Synthetic oligonucleotide; TTC chr11 5361900 5361921 5361917 5361922 +
taccaagtacttactcccaaaa

SEQ ID NO: 106778 - DNA, 22 bp, Artificial Sequence
  Synthetic oligonucleotide; CTA chr11 5361902 5361923 5361919 5361924 +
ccaagtacttactcccaaaaaa

SEQ ID NO: 106779 - DNA, 22 bp, Artificial Sequence
  Synthetic oligonucleotide; CTT chr11 5361912 5361933 5361929 5361934 +
actcccaaaaaagatgaagtta

SEQ ID NO: 106780 - DNA, 22 bp, Artificial Sequence
  Synthetic oligonucleotide; TTA chr11 5361913 5361934 5361930 5361935 +
ctcccaaaaaagatgaagttag

SEQ ID NO: 106781 - DNA, 22 bp, Artificial Sequence
  Synthetic oligonucleotide; CTC chr11 5361916 5361937 5361933 5361938 +
ccaaaaaagatgaagttagagt

SEQ ID NO: 106782 - DNA, 22 bp, Artificial Sequence
  Synthetic oligonucleotide; TTA chr11 5361934 5361955 5361951 5361956 +
gagtgaggataggggacactgt

SEQ ID NO: 106783 - DNA, 22 bp, Artificial Sequence
  Synthetic oligonucleotide; CTG chr11 5361955 5361976 5361972 5361977 +
taatgacaagggtatagactaa

SEQ ID NO: 106784 - DNA, 22 bp, Artificial Sequence
  Synthetic oligonucleotide; CTA chr11 5361976 5361997 5361993 5361998 +
acagaaagaaaaacttaccaaa

SEQ ID NO: 106785 - DNA, 22 bp, Artificial Sequence
  Synthetic oligonucleotide; CTT chr11 5361992 5362013 5362009 5362014 +
accaaatagattagtgtcagat

SEQ ID NO: 106786 - DNA, 22 bp, Artificial Sequence
  Synthetic oligonucleotide; TTA chr11 5361993 5362014 5362010 5362015 +
ccaaatagattagtgtcagatt

SEQ ID NO: 106787 - DNA, 22 bp, Artificial Sequence
  Synthetic oligonucleotide; TTA chr11 5362005 5362026 5362022 5362027 +
gtgtcagattgagtaaagcaaa

SEQ ID NO: 106788 - DNA, 22 bp, Artificial Sequence
  Synthetic oligonucleotide; TTG chr11 5362016 5362037 5362033 5362038 +
agtaaagcaaactttgacatga

SEQ ID NO: 106789 - DNA, 22 bp, Artificial Sequence
  Synthetic oligonucleotide; CTT chr11 5362030 5362051 5362047 5362052 +
tgacatgaggcacaatgcttta

SEQ ID NO: 106790 - DNA, 22 bp, Artificial Sequence
  Synthetic oligonucleotide; TTT chr11 5362031 5362052 5362048 5362053 +
gacatgaggcacaatgctttaa

SEQ ID NO: 106791 - DNA, 22 bp, Artificial Sequence
  Synthetic oligonucleotide; TTG chr11 5362032 5362053 5362049 5362054 +
acatgaggcacaatgctttaaa

SEQ ID NO: 106792 - DNA, 22 bp, Artificial Sequence
  Synthetic oligonucleotide; CTT chr11 5362050 5362071 5362067 5362072 +
taaattgctgcatattcccaga

SEQ ID NO: 106793 - DNA, 22 bp, Artificial Sequence
  Synthetic oligonucleotide; TTT chr11 5362051 5362072 5362068 5362073 +
aaattgctgcatattcccagaa

SEQ ID NO: 106794 - DNA, 22 bp, Artificial Sequence
  Synthetic oligonucleotide; TTA chr11 5362052 5362073 5362069 5362074 +
aattgctgcatattcccagaaa

SEQ ID NO: 106795 - DNA, 22 bp, Artificial Sequence
  Synthetic oligonucleotide; TTG chr11 5362057 5362078 5362074 5362079 +
ctgcatattcccagaaatgagc

SEQ ID NO: 106796 - DNA, 22 bp, Artificial Sequence
  Synthetic oligonucleotide; CTG chr11 5362060 5362081 5362077 5362082 +
catattcccagaaatgagccta

SEQ ID NO: 106797 - DNA, 22 bp, Artificial Sequence
  Synthetic oligonucleotide; TTC chr11 5362067 5362088 5362084 5362089 +
ccagaaatgagcctagtatcca

SEQ ID NO: 106798 - DNA, 22 bp, Artificial Sequence
  Synthetic oligonucleotide; CTA chr11 5362082 5362103 5362099 5362104 +
gtatccatcagaaaatgtatgc

SEQ ID NO: 106799 - DNA, 22 bp, Artificial Sequence
  Synthetic oligonucleotide; CTT chr11 5362112 5362133 5362129 5362134 +
ataaaccaaagtcagagagagc

SEQ ID NO: 106800 - DNA, 22 bp, Artificial Sequence
  Synthetic oligonucleotide; TTA chr11 5362113 5362134 5362130 5362135 +
taaaccaaagtcagagagagct

SEQ ID NO: 106801 - DNA, 22 bp, Artificial Sequence
  Synthetic oligonucleotide; CTT chr11 5362136 5362157 5362153 5362158 +
gttggttcacttcattccatgc

SEQ ID NO: 106802 - DNA, 22 bp, Artificial Sequence
  Synthetic oligonucleotide; TTG chr11 5362137 5362158 5362154 5362159 +
ttggttcacttcattccatgct

SEQ ID NO: 106803 - DNA, 22 bp, Artificial Sequence
  Synthetic oligonucleotide; TTG chr11 5362140 5362161 5362157 5362162 +
gttcacttcattccatgctgag

SEQ ID NO: 106804 - DNA, 22 bp, Artificial Sequence
  Synthetic oligonucleotide; TTC chr11 5362144 5362165 5362161 5362166 +
acttcattccatgctgagctat

SEQ ID NO: 106805 - DNA, 22 bp, Artificial Sequence
  Synthetic oligonucleotide; CTT chr11 5362148 5362169 5362165 5362170 +
cattccatgctgagctatcagc

SEQ ID NO: 106806 - DNA, 22 bp, Artificial Sequence
  Synthetic oligonucleotide; TTC chr11 5362149 5362170 5362166 5362171 +
attccatgctgagctatcagca

SEQ ID NO: 106807 - DNA, 22 bp, Artificial Sequence
  Synthetic oligonucleotide; TTC chr11 5362153 5362174 5362170 5362175 +
catgctgagctatcagcactgc

SEQ ID NO: 106808 - DNA, 22 bp, Artificial Sequence
  Synthetic oligonucleotide; CTG chr11 5362160 5362181 5362177 5362182 +
agctatcagcactgcagatttt

SEQ ID NO: 106809 - DNA, 22 bp, Artificial Sequence
  Synthetic oligonucleotide; CTA chr11 5362165 5362186 5362182 5362187 +
tcagcactgcagattttgaaga

SEQ ID NO: 106810 - DNA, 22 bp, Artificial Sequence
  Synthetic oligonucleotide; CTG chr11 5362174 5362195 5362191 5362196 +
cagattttgaagatctcaacca

SEQ ID NO: 106811 - DNA, 22 bp, Artificial Sequence
  Synthetic oligonucleotide; TTT chr11 5362181 5362202 5362198 5362203 +
tgaagatctcaaccacacccag

SEQ ID NO: 106812 - DNA, 22 bp, Artificial Sequence
  Synthetic oligonucleotide; TTT chr11 5362182 5362203 5362199 5362204 +
gaagatctcaaccacacccaga

SEQ ID NO: 106813 - DNA, 22 bp, Artificial Sequence
  Synthetic oligonucleotide; TTG chr11 5362183 5362204 5362200 5362205 +
aagatctcaaccacacccagat

SEQ ID NO: 106814 - DNA, 22 bp, Artificial Sequence
  Synthetic oligonucleotide; CTC chr11 5362191 5362212 5362208 5362213 +
aaccacacccagatagagagtg

SEQ ID NO: 106815 - DNA, 22 bp, Artificial Sequence
  Synthetic oligonucleotide; TTT chr11 5362231 5362252 5362248 5362253 +
ctgtcgggggatgggagtagat

SEQ ID NO: 106816 - DNA, 22 bp, Artificial Sequence
  Synthetic oligonucleotide; TTC chr11 5362232 5362253 5362249 5362254 +
tgtcgggggatgggagtagata

SEQ ID NO: 106817 - DNA, 22 bp, Artificial Sequence
  Synthetic oligonucleotide; CTG chr11 5362234 5362255 5362251 5362256 +
tcgggggatgggagtagataag

SEQ ID NO: 106818 - DNA, 22 bp, Artificial Sequence
  Synthetic oligonucleotide; TTT chr11 5362267 5362288 5362284 5362289 +
actatttttaccagcaggggaa

SEQ ID NO: 106819 - DNA, 22 bp, Artificial Sequence
  Synthetic oligonucleotide; TTA chr11 5362268 5362289 5362285 5362290 +
ctatttttaccagcaggggaaa

SEQ ID NO: 106820 - DNA, 22 bp, Artificial Sequence
  Synthetic oligonucleotide; CTA chr11 5362271 5362292 5362288 5362293 +
tttttaccagcaggggaaacta

SEQ ID NO: 106821 - DNA, 22 bp, Artificial Sequence
  Synthetic oligonucleotide; TTT chr11 5362274 5362295 5362291 5362296 +
ttaccagcaggggaaactaccc

SEQ ID NO: 106822 - DNA, 22 bp, Artificial Sequence
  Synthetic oligonucleotide; TTT chr11 5362275 5362296 5362292 5362297 +
taccagcaggggaaactaccca

SEQ ID NO: 106823 - DNA, 22 bp, Artificial Sequence
  Synthetic oligonucleotide; TTT chr11 5362276 5362297 5362293 5362298 +
accagcaggggaaactacccag

SEQ ID NO: 106824 - DNA, 22 bp, Artificial Sequence
  Synthetic oligonucleotide; TTA chr11 5362277 5362298 5362294 5362299 +
ccagcaggggaaactacccaga

SEQ ID NO: 106825 - DNA, 22 bp, Artificial Sequence
  Synthetic oligonucleotide; CTA chr11 5362293 5362314 5362310 5362315 +
cccagatgaaaatggtgctgga

SEQ ID NO: 106826 - DNA, 22 bp, Artificial Sequence
  Synthetic oligonucleotide; CTG chr11 5362313 5362334 5362330 5362335 +
gatgctttgggcaaaaagccat

SEQ ID NO: 106827 - DNA, 22 bp, Artificial Sequence
  Synthetic oligonucleotide; CTT chr11 5362320 5362341 5362337 5362342 +
tgggcaaaaagccattcagagc

SEQ ID NO: 106828 - DNA, 22 bp, Artificial Sequence
  Synthetic oligonucleotide; TTT chr11 5362321 5362342 5362338 5362343 +
gggcaaaaagccattcagagcc

SEQ ID NO: 106829 - DNA, 22 bp, Artificial Sequence
  Synthetic oligonucleotide; TTG chr11 5362322 5362343 5362339 5362344 +
ggcaaaaagccattcagagcca

SEQ ID NO: 106830 - DNA, 22 bp, Artificial Sequence
  Synthetic oligonucleotide; TTC chr11 5362337 5362358 5362354 5362359 +
agagccataatcaactacgaag

SEQ ID NO: 106831 - DNA, 22 bp, Artificial Sequence
  Synthetic oligonucleotide; CTA chr11 5362354 5362375 5362371 5362376 +
cgaagatggtcaggaatttagt

SEQ ID NO: 106832 - DNA, 22 bp, Artificial Sequence
  Synthetic oligonucleotide; TTT chr11 5362373 5362394 5362390 5362395 +
agtgtatttgtagatcagatga

SEQ ID NO: 106833 - DNA, 22 bp, Artificial Sequence
  Synthetic oligonucleotide; TTA chr11 5362374 5362395 5362391 5362396 +
gtgtatttgtagatcagatgat

SEQ ID NO: 106834 - DNA, 22 bp, Artificial Sequence
  Synthetic oligonucleotide; TTT chr11 5362382 5362403 5362399 5362404 +
gtagatcagatgatcagtctat

SEQ ID NO: 106835 - DNA, 22 bp, Artificial Sequence
  Synthetic oligonucleotide; TTG chr11 5362383 5362404 5362400 5362405 +
tagatcagatgatcagtctatg

SEQ ID NO: 106836 - DNA, 22 bp, Artificial Sequence
  Synthetic oligonucleotide; CTA chr11 5362403 5362424 5362420 5362425 +
tggctttggaaaattgtgaaca

SEQ ID NO: 106837 - DNA, 22 bp, Artificial Sequence
  Synthetic oligonucleotide; CTT chr11 5362409 5362430 5362426 5362431 +
tggaaaattgtgaacattagtt

SEQ ID NO: 106838 - DNA, 22 bp, Artificial Sequence
  Synthetic oligonucleotide; TTT chr11 5362410 5362431 5362427 5362432 +
ggaaaattgtgaacattagttg

SEQ ID NO: 106839 - DNA, 22 bp, Artificial Sequence
  Synthetic oligonucleotide; TTG chr11 5362411 5362432 5362428 5362433 +
gaaaattgtgaacattagttgt

SEQ ID NO: 106840 - DNA, 22 bp, Artificial Sequence
  Synthetic oligonucleotide; TTG chr11 5362419 5362440 5362436 5362441 +
tgaacattagttgttgagcctt

SEQ ID NO: 106841 - DNA, 22 bp, Artificial Sequence
  Synthetic oligonucleotide; TTA chr11 5362428 5362449 5362445 5362450 +
gttgttgagccttataatgaga

SEQ ID NO: 106842 - DNA, 22 bp, Artificial Sequence
  Synthetic oligonucleotide; TTG chr11 5362432 5362453 5362449 5362454 +
ttgagccttataatgagaatgt

SEQ ID NO: 106843 - DNA, 22 bp, Artificial Sequence
  Synthetic oligonucleotide; TTG chr11 5362435 5362456 5362452 5362457 +
agccttataatgagaatgtgat

SEQ ID NO: 106844 - DNA, 22 bp, Artificial Sequence
  Synthetic oligonucleotide; CTT chr11 5362441 5362462 5362458 5362463 +
ataatgagaatgtgatgattaa

SEQ ID NO: 106845 - DNA, 22 bp, Artificial Sequence
  Synthetic oligonucleotide; TTA chr11 5362442 5362463 5362459 5362464 +
taatgagaatgtgatgattaaa

SEQ ID NO: 106846 - DNA, 22 bp, Artificial Sequence
  Synthetic oligonucleotide; TTA chr11 5362462 5362483 5362479 5362484 +
aatcaggtctactggatactat

SEQ ID NO: 106847 - DNA, 22 bp, Artificial Sequence
  Synthetic oligonucleotide; CTA chr11 5362473 5362494 5362490 5362495 +
ctggatactatgaatcagaata

SEQ ID NO: 106848 - DNA, 22 bp, Artificial Sequence
  Synthetic oligonucleotide; CTG chr11 5362476 5362497 5362493 5362498 +
gatactatgaatcagaatagat

SEQ ID NO: 106849 - DNA, 22 bp, Artificial Sequence
  Synthetic oligonucleotide; CTA chr11 5362483 5362504 5362500 5362505 +
tgaatcagaatagataacattg

SEQ ID NO: 106850 - DNA, 22 bp, Artificial Sequence
  Synthetic oligonucleotide; TTG chr11 5362505 5362526 5362522 5362527 +
ttagatataattacctagtcag

SEQ ID NO: 106851 - DNA, 22 bp, Artificial Sequence
  Synthetic oligonucleotide; TTA chr11 5362508 5362529 5362525 5362530 +
gatataattacctagtcagaga

SEQ ID NO: 106852 - DNA, 22 bp, Artificial Sequence
  Synthetic oligonucleotide; TTA chr11 5362518 5362539 5362535 5362540 +
cctagtcagagagcagagatga

SEQ ID NO: 106853 - DNA, 22 bp, Artificial Sequence
  Synthetic oligonucleotide; CTA chr11 5362522 5362543 5362539 5362544 +
gtcagagagcagagatgaagtc

SEQ ID NO: 106854 - DNA, 22 bp, Artificial Sequence
  Synthetic oligonucleotide; CTT chr11 5362578 5362599 5362595 5362600 +
ctggtggcagagtggtggctta

SEQ ID NO: 106855 - DNA, 22 bp, Artificial Sequence
  Synthetic oligonucleotide; TTC chr11 5362579 5362600 5362596 5362601 +
tggtggcagagtggtggcttag

SEQ ID NO: 106856 - DNA, 22 bp, Artificial Sequence
  Synthetic oligonucleotide; CTG chr11 5362581 5362602 5362598 5362603 +
gtggcagagtggtggcttagcc

SEQ ID NO: 106857 - DNA, 22 bp, Artificial Sequence
  Synthetic oligonucleotide; CTT chr11 5362599 5362620 5362616 5362621 +
agcctgctggggcaaaatggag

SEQ ID NO: 106858 - DNA, 22 bp, Artificial Sequence
  Synthetic oligonucleotide; TTA chr11 5362600 5362621 5362617 5362622 +
gcctgctggggcaaaatggagc

SEQ ID NO: 106859 - DNA, 22 bp, Artificial Sequence
  Synthetic oligonucleotide; CTG chr11 5362605 5362626 5362622 5362627 +
ctggggcaaaatggagctcaag

SEQ ID NO: 106860 - DNA, 22 bp, Artificial Sequence
  Synthetic oligonucleotide; CTG chr11 5362608 5362629 5362625 5362630 +
gggcaaaatggagctcaaggcc

SEQ ID NO: 106861 - DNA, 22 bp, Artificial Sequence
  Synthetic oligonucleotide; CTC chr11 5362624 5362645 5362641 5362646 +
aaggccatgagcagatacaaca

SEQ ID NO: 106862 - DNA, 22 bp, Artificial Sequence
  Synthetic oligonucleotide; CTG chr11 5362664 5362685 5362681 5362686 +
tcttcccccatctgattgtaga

SEQ ID NO: 106863 - DNA, 22 bp, Artificial Sequence
  Synthetic oligonucleotide; CTT chr11 5362668 5362689 5362685 5362690 +
cccccatctgattgtagagctt

SEQ ID NO: 106864 - DNA, 22 bp, Artificial Sequence
  Synthetic oligonucleotide; TTC chr11 5362669 5362690 5362686 5362691 +
ccccatctgattgtagagcttt

SEQ ID NO: 106865 - DNA, 22 bp, Artificial Sequence
  Synthetic oligonucleotide; CTG chr11 5362678 5362699 5362695 5362700 +
attgtagagcttttggccatcg

SEQ ID NO: 106866 - DNA, 22 bp, Artificial Sequence
  Synthetic oligonucleotide; TTG chr11 5362682 5362703 5362699 5362704 +
tagagcttttggccatcgacat

SEQ ID NO: 106867 - DNA, 22 bp, Artificial Sequence
  Synthetic oligonucleotide; CTT chr11 5362690 5362711 5362707 5362712 +
ttggccatcgacatgttcttca

SEQ ID NO: 106868 - DNA, 22 bp, Artificial Sequence
  Synthetic oligonucleotide; TTT chr11 5362691 5362712 5362708 5362713 +
tggccatcgacatgttcttcac

SEQ ID NO: 106869 - DNA, 22 bp, Artificial Sequence
  Synthetic oligonucleotide; TTT chr11 5362692 5362713 5362709 5362714 +
ggccatcgacatgttcttcacc

SEQ ID NO: 106870 - DNA, 22 bp, Artificial Sequence
  Synthetic oligonucleotide; TTG chr11 5362693 5362714 5362710 5362715 +
gccatcgacatgttcttcacca

SEQ ID NO: 106871 - DNA, 22 bp, Artificial Sequence
  Synthetic oligonucleotide; TTC chr11 5362708 5362729 5362725 5362730 +
ttcaccacctggttctttgttt

SEQ ID NO: 106872 - DNA, 22 bp, Artificial Sequence
  Synthetic oligonucleotide; CTT chr11 5362710 5362731 5362727 5362732 +
caccacctggttctttgtttac

SEQ ID NO: 106873 - DNA, 22 bp, Artificial Sequence
  Synthetic oligonucleotide; TTC chr11 5362711 5362732 5362728 5362733 +
accacctggttctttgtttacg

SEQ ID NO: 106874 - DNA, 22 bp, Artificial Sequence
  Synthetic oligonucleotide; CTG chr11 5362719 5362740 5362736 5362741 +
gttctttgtttacgaggtcacc

SEQ ID NO: 106875 - DNA, 22 bp, Artificial Sequence
  Synthetic oligonucleotide; TTC chr11 5362723 5362744 5362740 5362745 +
tttgtttacgaggtcacctcta

SEQ ID NO: 106876 - DNA, 22 bp, Artificial Sequence
  Synthetic oligonucleotide; CTT chr11 5362725 5362746 5362742 5362747 +
tgtttacgaggtcacctctacc

SEQ ID NO: 106877 - DNA, 22 bp, Artificial Sequence
  Synthetic oligonucleotide; TTT chr11 5362726 5362747 5362743 5362748 +
gtttacgaggtcacctctacca

SEQ ID NO: 106878 - DNA, 22 bp, Artificial Sequence
  Synthetic oligonucleotide; TTG chr11 5362727 5362748 5362744 5362749 +
tttacgaggtcacctctaccaa

SEQ ID NO: 106879 - DNA, 22 bp, Artificial Sequence
  Synthetic oligonucleotide; TTT chr11 5362730 5362751 5362747 5362752 +
acgaggtcacctctaccaagta

SEQ ID NO: 106880 - DNA, 22 bp, Artificial Sequence
  Synthetic oligonucleotide; TTA chr11 5362731 5362752 5362748 5362753 +
cgaggtcacctctaccaagtac

SEQ ID NO: 106881 - DNA, 22 bp, Artificial Sequence
  Synthetic oligonucleotide; CTC chr11 5362743 5362764 5362760 5362765 +
taccaagtacacttgtgatatc

SEQ ID NO: 106882 - DNA, 22 bp, Artificial Sequence
  Synthetic oligonucleotide; CTA chr11 5362745 5362766 5362762 5362767 +
ccaagtacacttgtgatatcta

SEQ ID NO: 106883 - DNA, 22 bp, Artificial Sequence
  Synthetic oligonucleotide; CTT chr11 5362757 5362778 5362774 5362779 +
gtgatatctataaagagtatct

SEQ ID NO: 106884 - DNA, 22 bp, Artificial Sequence
  Synthetic oligonucleotide; TTG chr11 5362758 5362779 5362775 5362780 +
tgatatctataaagagtatctc

SEQ ID NO: 106885 - DNA, 22 bp, Artificial Sequence
  Synthetic oligonucleotide; CTA chr11 5362767 5362788 5362784 5362789 +
taaagagtatctccttggtggc

SEQ ID NO: 106886 - DNA, 22 bp, Artificial Sequence
  Synthetic oligonucleotide; CTC chr11 5362780 5362801 5362797 5362802 +
cttggtggcctcactcttcatg

SEQ ID NO: 106887 - DNA, 22 bp, Artificial Sequence
  Synthetic oligonucleotide; CTT chr11 5362783 5362804 5362800 5362805 +
ggtggcctcactcttcatgggc

SEQ ID NO: 106888 - DNA, 22 bp, Artificial Sequence
  Synthetic oligonucleotide; TTG chr11 5362784 5362805 5362801 5362806 +
gtggcctcactcttcatgggct

SEQ ID NO: 106889 - DNA, 22 bp, Artificial Sequence
  Synthetic oligonucleotide; CTC chr11 5362792 5362813 5362809 5362814 +
actcttcatgggctttgaagtc

SEQ ID NO: 106890 - DNA, 22 bp, Artificial Sequence
  Synthetic oligonucleotide; CTC chr11 5362796 5362817 5362813 5362818 +
ttcatgggctttgaagtcctct

SEQ ID NO: 106891 - DNA, 22 bp, Artificial Sequence
  Synthetic oligonucleotide; CTT chr11 5362798 5362819 5362815 5362820 +
catgggctttgaagtcctcttc

SEQ ID NO: 106892 - DNA, 22 bp, Artificial Sequence
  Synthetic oligonucleotide; TTC chr11 5362799 5362820 5362816 5362821 +
atgggctttgaagtcctcttcc

SEQ ID NO: 106893 - DNA, 22 bp, Artificial Sequence
  Synthetic oligonucleotide; CTT chr11 5362807 5362828 5362824 5362829 +
tgaagtcctcttcctgatgctc

SEQ ID NO: 106894 - DNA, 22 bp, Artificial Sequence
  Synthetic oligonucleotide; TTT chr11 5362808 5362829 5362825 5362830 +
gaagtcctcttcctgatgctct

SEQ ID NO: 106895 - DNA, 22 bp, Artificial Sequence
  Synthetic oligonucleotide; TTG chr11 5362809 5362830 5362826 5362831 +
aagtcctcttcctgatgctctg

SEQ ID NO: 106896 - DNA, 22 bp, Artificial Sequence
  Synthetic oligonucleotide; CTC chr11 5362817 5362838 5362834 5362839 +
ttcctgatgctctgggttggca

SEQ ID NO: 106897 - DNA, 22 bp, Artificial Sequence
  Synthetic oligonucleotide; CTT chr11 5362819 5362840 5362836 5362841 +
cctgatgctctgggttggcatc

SEQ ID NO: 106898 - DNA, 22 bp, Artificial Sequence
  Synthetic oligonucleotide; TTC chr11 5362820 5362841 5362837 5362842 +
ctgatgctctgggttggcatct

SEQ ID NO: 106899 - DNA, 22 bp, Artificial Sequence
  Synthetic oligonucleotide; CTG chr11 5362823 5362844 5362840 5362845 +
atgctctgggttggcatctaca

SEQ ID NO: 106900 - DNA, 22 bp, Artificial Sequence
  Synthetic oligonucleotide; CTC chr11 5362829 5362850 5362846 5362851 +
tgggttggcatctacatgtgag

SEQ ID NO: 106901 - DNA, 22 bp, Artificial Sequence
  Synthetic oligonucleotide; CTG chr11 5362831 5362852 5362848 5362853 +
ggttggcatctacatgtgagtg

SEQ ID NO: 106902 - DNA, 22 bp, Artificial Sequence
  Synthetic oligonucleotide; TTG chr11 5362836 5362857 5362853 5362858 +
gcatctacatgtgagtgcccaa

SEQ ID NO: 106903 - DNA, 22 bp, Artificial Sequence
  Synthetic oligonucleotide; CTA chr11 5362843 5362864 5362860 5362865 +
catgtgagtgcccaagagtaac

SEQ ID NO: 106904 - DNA, 22 bp, Artificial Sequence
  Synthetic oligonucleotide; CTT chr11 5362878 5362899 5362895 5362900 +
cactgaatccctgcttttgtaa

SEQ ID NO: 106905 - DNA, 22 bp, Artificial Sequence
  Synthetic oligonucleotide; TTC chr11 5362879 5362900 5362896 5362901 +
actgaatccctgcttttgtaaa

SEQ ID NO: 106906 - DNA, 22 bp, Artificial Sequence
  Synthetic oligonucleotide; CTG chr11 5362883 5362904 5362900 5362905 +
aatccctgcttttgtaaattaa

SEQ ID NO: 106907 - DNA, 22 bp, Artificial Sequence
  Synthetic oligonucleotide; CTG chr11 5362891 5362912 5362908 5362913 +
cttttgtaaattaagttttctt

SEQ ID NO: 106908 - DNA, 22 bp, Artificial Sequence
  Synthetic oligonucleotide; CTT chr11 5362894 5362915 5362911 5362916 +
ttgtaaattaagttttctttct

SEQ ID NO: 106909 - DNA, 22 bp, Artificial Sequence
  Synthetic oligonucleotide; TTT chr11 5362895 5362916 5362912 5362917 +
tgtaaattaagttttctttcta

SEQ ID NO: 106910 - DNA, 22 bp, Artificial Sequence
  Synthetic oligonucleotide; TTT chr11 5362896 5362917 5362913 5362918 +
gtaaattaagttttctttctat

SEQ ID NO: 106911 - DNA, 22 bp, Artificial Sequence
  Synthetic oligonucleotide; TTG chr11 5362897 5362918 5362914 5362919 +
taaattaagttttctttctatt

SEQ ID NO: 106912 - DNA, 22 bp, Artificial Sequence
  Synthetic oligonucleotide; TTA chr11 5362904 5362925 5362921 5362926 +
agttttctttctattgctggaa

SEQ ID NO: 106913 - DNA, 22 bp, Artificial Sequence
  Synthetic oligonucleotide; TTT chr11 5362909 5362930 5362926 5362931 +
tctttctattgctggaagtgtc

SEQ ID NO: 106914 - DNA, 22 bp, Artificial Sequence
  Synthetic oligonucleotide; TTT chr11 5362910 5362931 5362927 5362932 +
ctttctattgctggaagtgtcc

SEQ ID NO: 106915 - DNA, 22 bp, Artificial Sequence
  Synthetic oligonucleotide; TTC chr11 5362911 5362932 5362928 5362933 +
tttctattgctggaagtgtccc

SEQ ID NO: 106916 - DNA, 22 bp, Artificial Sequence
  Synthetic oligonucleotide; CTT chr11 5362913 5362934 5362930 5362935 +
tctattgctggaagtgtcccgc

SEQ ID NO: 106917 - DNA, 22 bp, Artificial Sequence
  Synthetic oligonucleotide; TTT chr11 5362914 5362935 5362931 5362936 +
ctattgctggaagtgtcccgcc

SEQ ID NO: 106918 - DNA, 22 bp, Artificial Sequence
  Synthetic oligonucleotide; TTC chr11 5362915 5362936 5362932 5362937 +
tattgctggaagtgtcccgcct

SEQ ID NO: 106919 - DNA, 22 bp, Artificial Sequence
  Synthetic oligonucleotide; CTA chr11 5362917 5362938 5362934 5362939 +
ttgctggaagtgtcccgcctgt

SEQ ID NO: 106920 - DNA, 22 bp, Artificial Sequence
  Synthetic oligonucleotide; TTG chr11 5362920 5362941 5362937 5362942 +
ctggaagtgtcccgcctgttgc

SEQ ID NO: 106921 - DNA, 22 bp, Artificial Sequence
  Synthetic oligonucleotide; CTG chr11 5362923 5362944 5362940 5362945 +
gaagtgtcccgcctgttgctta

SEQ ID NO: 106922 - DNA, 22 bp, Artificial Sequence
  Synthetic oligonucleotide; CTG chr11 5362938 5362959 5362955 5362960 +
ttgcttataataaatgcagatg

SEQ ID NO: 106923 - DNA, 22 bp, Artificial Sequence
  Synthetic oligonucleotide; TTG chr11 5362941 5362962 5362958 5362963 +
cttataataaatgcagatgtat

SEQ ID NO: 106924 - DNA, 22 bp, Artificial Sequence
  Synthetic oligonucleotide; CTT chr11 5362944 5362965 5362961 5362966 +
ataataaatgcagatgtatggc

SEQ ID NO: 106925 - DNA, 22 bp, Artificial Sequence
  Synthetic oligonucleotide; TTA chr11 5362945 5362966 5362962 5362967 +
taataaatgcagatgtatggca

SEQ ID NO: 106926 - DNA, 22 bp, Artificial Sequence
  Synthetic oligonucleotide; TTA chr11 5362970 5362991 5362987 5362992 +
aaaaaaaaaaagaaataataga

SEQ ID NO: 106927 - DNA, 22 bp, Artificial Sequence
  Synthetic oligonucleotide; TTA chr11 5362997 5363018 5363014 5363019 +
ggcagggattggggcatgaagg

SEQ ID NO: 106928 - DNA, 22 bp, Artificial Sequence
  Synthetic oligonucleotide; TTG chr11 5363008 5363029 5363025 5363030 +
gggcatgaaggttgaaaacaag

SEQ ID NO: 106929 - DNA, 22 bp, Artificial Sequence
  Synthetic oligonucleotide; TTG chr11 5363022 5363043 5363039 5363044 +
aaaacaaggaaaaggagcccaa

SEQ ID NO: 106930 - DNA, 22 bp, Artificial Sequence
  Synthetic oligonucleotide; TTG chr11 5363060 5363081 5363077 5363082 +
taaaatgtgctaagtagatgtc

SEQ ID NO: 106931 - DNA, 22 bp, Artificial Sequence
  Synthetic oligonucleotide; CTA chr11 5363072 5363093 5363089 5363094 +
agtagatgtctgagtggcattc

SEQ ID NO: 106932 - DNA, 22 bp, Artificial Sequence
  Synthetic oligonucleotide; CTG chr11 5363084 5363105 5363101 5363106 +
agtggcattcctccatgagaga

SEQ ID NO: 106933 - DNA, 22 bp, Artificial Sequence
  Synthetic oligonucleotide; TTC chr11 5363094 5363115 5363111 5363116 +
ctccatgagagaaagcttaagg

SEQ ID NO: 106934 - DNA, 22 bp, Artificial Sequence
  Synthetic oligonucleotide; CTC chr11 5363097 5363118 5363114 5363119 +
catgagagaaagcttaagggaa

SEQ ID NO: 106935 - DNA, 22 bp, Artificial Sequence
  Synthetic oligonucleotide; CTT chr11 5363112 5363133 5363129 5363134 +
aagggaagaaagagaccctgag

SEQ ID NO: 106936 - DNA, 22 bp, Artificial Sequence
  Synthetic oligonucleotide; TTA chr11 5363113 5363134 5363130 5363135 +
agggaagaaagagaccctgagt

SEQ ID NO: 106937 - DNA, 22 bp, Artificial Sequence
  Synthetic oligonucleotide; CTG chr11 5363132 5363153 5363149 5363154 +
agtgtcttcaaaactcaaagtt

SEQ ID NO: 106938 - DNA, 22 bp, Artificial Sequence
  Synthetic oligonucleotide; CTT chr11 5363140 5363161 5363157 5363162 +
caaaactcaaagttttacgaac

SEQ ID NO: 106939 - DNA, 22 bp, Artificial Sequence
  Synthetic oligonucleotide; TTC chr11 5363141 5363162 5363158 5363163 +
aaaactcaaagttttacgaaca

SEQ ID NO: 106940 - DNA, 22 bp, Artificial Sequence
  Synthetic oligonucleotide; CTC chr11 5363148 5363169 5363165 5363170 +
aaagttttacgaacagaatgat

SEQ ID NO: 106941 - DNA, 22 bp, Artificial Sequence
  Synthetic oligonucleotide; TTT chr11 5363155 5363176 5363172 5363177 +
tacgaacagaatgattagtctg

SEQ ID NO: 106942 - DNA, 22 bp, Artificial Sequence
  Synthetic oligonucleotide; TTT chr11 5363156 5363177 5363173 5363178 +
acgaacagaatgattagtctgg

SEQ ID NO: 106943 - DNA, 22 bp, Artificial Sequence
  Synthetic oligonucleotide; TTA chr11 5363157 5363178 5363174 5363179 +
cgaacagaatgattagtctgga

SEQ ID NO: 106944 - DNA, 22 bp, Artificial Sequence
  Synthetic oligonucleotide; TTA chr11 5363172 5363193 5363189 5363194 +
gtctggagaaatcatttttcat

SEQ ID NO: 106945 - DNA, 22 bp, Artificial Sequence
  Synthetic oligonucleotide; CTG chr11 5363177 5363198 5363194 5363199 +
gagaaatcatttttcatcaata

SEQ ID NO: 106946 - DNA, 22 bp, Artificial Sequence
  Synthetic oligonucleotide; TTT chr11 5363189 5363210 5363206 5363211 +
ttcatcaatacaggatctcaag

SEQ ID NO: 106947 - DNA, 22 bp, Artificial Sequence
  Synthetic oligonucleotide; TTT chr11 5363190 5363211 5363207 5363212 +
tcatcaatacaggatctcaagt

SEQ ID NO: 106948 - DNA, 22 bp, Artificial Sequence
  Synthetic oligonucleotide; TTT chr11 5363191 5363212 5363208 5363213 +
catcaatacaggatctcaagtg

SEQ ID NO: 106949 - DNA, 22 bp, Artificial Sequence
  Synthetic oligonucleotide; TTC chr11 5363192 5363213 5363209 5363214 +
atcaatacaggatctcaagtgt

SEQ ID NO: 106950 - DNA, 22 bp, Artificial Sequence
  Synthetic oligonucleotide; CTC chr11 5363208 5363229 5363225 5363230 +
aagtgtttccccacaacgaacc

SEQ ID NO: 106951 - DNA, 22 bp, Artificial Sequence
  Synthetic oligonucleotide; TTT chr11 5363216 5363237 5363233 5363238 +
ccccacaacgaacccaacccct

SEQ ID NO: 106952 - DNA, 22 bp, Artificial Sequence
  Synthetic oligonucleotide; TTC chr11 5363217 5363238 5363234 5363239 +
cccacaacgaacccaacccctc

SEQ ID NO: 106953 - DNA, 22 bp, Artificial Sequence
  Synthetic oligonucleotide; CTC chr11 5363239 5363260 5363256 5363261 +
acacacacacacacacacacac

SEQ ID NO: 106954 - DNA, 22 bp, Artificial Sequence
  Synthetic oligonucleotide; TTT chr11 5363310 5363331 5363327 5363332 +
ttcaagtcatgatgcagcagta

SEQ ID NO: 106955 - DNA, 22 bp, Artificial Sequence
  Synthetic oligonucleotide; TTT chr11 5363311 5363332 5363328 5363333 +
tcaagtcatgatgcagcagtat

SEQ ID NO: 106956 - DNA, 22 bp, Artificial Sequence
  Synthetic oligonucleotide; TTT chr11 5363312 5363333 5363329 5363334 +
caagtcatgatgcagcagtatt

SEQ ID NO: 106957 - DNA, 22 bp, Artificial Sequence
  Synthetic oligonucleotide; TTC chr11 5363313 5363334 5363330 5363335 +
aagtcatgatgcagcagtattg

SEQ ID NO: 106958 - DNA, 22 bp, Artificial Sequence
  Synthetic oligonucleotide; TTG chr11 5363335 5363356 5363352 5363357 +
gaattacagttttttttggttt

SEQ ID NO: 106959 - DNA, 22 bp, Artificial Sequence
  Synthetic oligonucleotide; TTA chr11 5363341 5363362 5363358 5363363 +
cagttttttttggtttttgttt

SEQ ID NO: 106960 - DNA, 22 bp, Artificial Sequence
  Synthetic oligonucleotide; TTT chr11 5363347 5363368 5363364 5363369 +
tttttggtttttgttttttttt

SEQ ID NO: 106961 - DNA, 22 bp, Artificial Sequence
  Synthetic oligonucleotide; TTT chr11 5363348 5363369 5363365 5363370 +
ttttggtttttgttttttttta

SEQ ID NO: 106962 - DNA, 22 bp, Artificial Sequence
  Synthetic oligonucleotide; TTT chr11 5363349 5363370 5363366 5363371 +
tttggtttttgtttttttttac

SEQ ID NO: 106963 - DNA, 22 bp, Artificial Sequence
  Synthetic oligonucleotide; TTT chr11 5363350 5363371 5363367 5363372 +
ttggtttttgtttttttttact

SEQ ID NO: 106964 - DNA, 22 bp, Artificial Sequence
  Synthetic oligonucleotide; TTT chr11 5363351 5363372 5363368 5363373 +
tggtttttgtttttttttactt

SEQ ID NO: 106965 - DNA, 22 bp, Artificial Sequence
  Synthetic oligonucleotide; TTT chr11 5363352 5363373 5363369 5363374 +
ggtttttgtttttttttacttc

SEQ ID NO: 106966 - DNA, 22 bp, Artificial Sequence
  Synthetic oligonucleotide; TTG chr11 5363353 5363374 5363370 5363375 +
gtttttgtttttttttacttca

SEQ ID NO: 106967 - DNA, 22 bp, Artificial Sequence
  Synthetic oligonucleotide; TTT chr11 5363357 5363378 5363374 5363379 +
ttgtttttttttacttcaagct

SEQ ID NO: 106968 - DNA, 22 bp, Artificial Sequence
  Synthetic oligonucleotide; TTT chr11 5363358 5363379 5363375 5363380 +
tgtttttttttacttcaagcta

SEQ ID NO: 106969 - DNA, 22 bp, Artificial Sequence
  Synthetic oligonucleotide; TTT chr11 5363359 5363380 5363376 5363381 +
gtttttttttacttcaagctat

SEQ ID NO: 106970 - DNA, 22 bp, Artificial Sequence
  Synthetic oligonucleotide; TTG chr11 5363360 5363381 5363377 5363382 +
tttttttttacttcaagctatg

SEQ ID NO: 106971 - DNA, 22 bp, Artificial Sequence
  Synthetic oligonucleotide; TTT chr11 5363363 5363384 5363380 5363385 +
ttttttacttcaagctatggtg

SEQ ID NO: 106972 - DNA, 22 bp, Artificial Sequence
  Synthetic oligonucleotide; TTT chr11 5363364 5363385 5363381 5363386 +
tttttacttcaagctatggtgt

SEQ ID NO: 106973 - DNA, 22 bp, Artificial Sequence
  Synthetic oligonucleotide; TTT chr11 5363365 5363386 5363382 5363387 +
ttttacttcaagctatggtgtt

SEQ ID NO: 106974 - DNA, 22 bp, Artificial Sequence
  Synthetic oligonucleotide; TTT chr11 5363366 5363387 5363383 5363388 +
tttacttcaagctatggtgttg

SEQ ID NO: 106975 - DNA, 22 bp, Artificial Sequence
  Synthetic oligonucleotide; TTT chr11 5363367 5363388 5363384 5363389 +
ttacttcaagctatggtgttga

SEQ ID NO: 106976 - DNA, 22 bp, Artificial Sequence
  Synthetic oligonucleotide; TTT chr11 5363368 5363389 5363385 5363390 +
tacttcaagctatggtgttgag

SEQ ID NO: 106977 - DNA, 22 bp, Artificial Sequence
  Synthetic oligonucleotide; TTT chr11 5363369 5363390 5363386 5363391 +
acttcaagctatggtgttgagt

SEQ ID NO: 106978 - DNA, 22 bp, Artificial Sequence
  Synthetic oligonucleotide; TTA chr11 5363370 5363391 5363387 5363392 +
cttcaagctatggtgttgagta

SEQ ID NO: 106979 - DNA, 22 bp, Artificial Sequence
  Synthetic oligonucleotide; CTT chr11 5363373 5363394 5363390 5363395 +
caagctatggtgttgagtacat

SEQ ID NO: 106980 - DNA, 22 bp, Artificial Sequence
  Synthetic oligonucleotide; TTC chr11 5363374 5363395 5363391 5363396 +
aagctatggtgttgagtacatg

SEQ ID NO: 106981 - DNA, 22 bp, Artificial Sequence
  Synthetic oligonucleotide; CTA chr11 5363380 5363401 5363397 5363402 +
tggtgttgagtacatgatccta

SEQ ID NO: 106982 - DNA, 22 bp, Artificial Sequence
  Synthetic oligonucleotide; TTG chr11 5363388 5363409 5363405 5363410 +
agtacatgatcctaatcaccaa

SEQ ID NO: 106983 - DNA, 22 bp, Artificial Sequence
  Synthetic oligonucleotide; CTA chr11 5363402 5363423 5363419 5363424 +
atcaccaattaattgttccttt

SEQ ID NO: 106984 - DNA, 22 bp, Artificial Sequence
  Synthetic oligonucleotide; TTA chr11 5363413 5363434 5363430 5363435 +
attgttcctttaagcccttaac

SEQ ID NO: 106985 - DNA, 22 bp, Artificial Sequence
  Synthetic oligonucleotide; TTG chr11 5363417 5363438 5363434 5363439 +
ttcctttaagcccttaacctct

SEQ ID NO: 106986 - DNA, 22 bp, Artificial Sequence
  Synthetic oligonucleotide; TTC chr11 5363420 5363441 5363437 5363442 +
ctttaagcccttaacctcttga

SEQ ID NO: 106987 - DNA, 22 bp, Artificial Sequence
  Synthetic oligonucleotide; CTT chr11 5363423 5363444 5363440 5363445 +
taagcccttaacctcttgacac

SEQ ID NO: 106988 - DNA, 22 bp, Artificial Sequence
  Synthetic oligonucleotide; TTT chr11 5363424 5363445 5363441 5363446 +
aagcccttaacctcttgacaca

SEQ ID NO: 106989 - DNA, 22 bp, Artificial Sequence
  Synthetic oligonucleotide; TTA chr11 5363425 5363446 5363442 5363447 +
agcccttaacctcttgacacac

SEQ ID NO: 106990 - DNA, 22 bp, Artificial Sequence
  Synthetic oligonucleotide; CTT chr11 5363432 5363453 5363449 5363454 +
aacctcttgacacacatacaca

SEQ ID NO: 106991 - DNA, 22 bp, Artificial Sequence
  Synthetic oligonucleotide; TTA chr11 5363433 5363454 5363450 5363455 +
acctcttgacacacatacacac

SEQ ID NO: 106992 - DNA, 22 bp, Artificial Sequence
  Synthetic oligonucleotide; CTC chr11 5363438 5363459 5363455 5363460 +
ttgacacacatacacacacact

SEQ ID NO: 106993 - DNA, 22 bp, Artificial Sequence
  Synthetic oligonucleotide; CTT chr11 5363440 5363461 5363457 5363462 +
gacacacatacacacacactct

SEQ ID NO: 106994 - DNA, 22 bp, Artificial Sequence
  Synthetic oligonucleotide; TTG chr11 5363441 5363462 5363458 5363463 +
acacacatacacacacactctc

SEQ ID NO: 106995 - DNA, 22 bp, Artificial Sequence
  Synthetic oligonucleotide; CTC chr11 5363461 5363482 5363478 5363483 +
tctctctcacacaaaagcgcca

SEQ ID NO: 106996 - DNA, 22 bp, Artificial Sequence
  Synthetic oligonucleotide; CTC chr11 5363463 5363484 5363480 5363485 +
tctctcacacaaaagcgccaca

SEQ ID NO: 106997 - DNA, 22 bp, Artificial Sequence
  Synthetic oligonucleotide; CTC chr11 5363465 5363486 5363482 5363487 +
tctcacacaaaagcgccacaca

SEQ ID NO: 106998 - DNA, 22 bp, Artificial Sequence
  Synthetic oligonucleotide; CTC chr11 5363467 5363488 5363484 5363489 +
tcacacaaaagcgccacacaca

SEQ ID NO: 106999 - DNA, 22 bp, Artificial Sequence
  Synthetic oligonucleotide; CTC chr11 5363469 5363490 5363486 5363491 +
acacaaaagcgccacacacaca

SEQ ID NO: 107000 - DNA, 22 bp, Artificial Sequence
  Synthetic oligonucleotide; CTC chr11 5363517 5363538 5363534 5363539 +
agctccatgaggtacactcact

SEQ ID NO: 107001 - DNA, 22 bp, Artificial Sequence
  Synthetic oligonucleotide; CTC chr11 5363522 5363543 5363539 5363544 +
catgaggtacactcactacttt

SEQ ID NO: 107002 - DNA, 22 bp, Artificial Sequence
  Synthetic oligonucleotide; CTC chr11 5363536 5363557 5363553 5363558 +
actacttttattaaaccaagca

SEQ ID NO: 107003 - DNA, 22 bp, Artificial Sequence
  Synthetic oligonucleotide; CTA chr11 5363540 5363561 5363557 5363562 +
cttttattaaaccaagcacaga

SEQ ID NO: 107004 - DNA, 22 bp, Artificial Sequence
  Synthetic oligonucleotide; CTT chr11 5363543 5363564 5363560 5363565 +
ttattaaaccaagcacagatac

SEQ ID NO: 107005 - DNA, 22 bp, Artificial Sequence
  Synthetic oligonucleotide; TTT chr11 5363544 5363565 5363561 5363566 +
tattaaaccaagcacagatacc

SEQ ID NO: 107006 - DNA, 22 bp, Artificial Sequence
  Synthetic oligonucleotide; TTT chr11 5363545 5363566 5363562 5363567 +
attaaaccaagcacagatacca

SEQ ID NO: 107007 - DNA, 22 bp, Artificial Sequence
  Synthetic oligonucleotide; TTA chr11 5363546 5363567 5363563 5363568 +
ttaaaccaagcacagataccaa

SEQ ID NO: 107008 - DNA, 22 bp, Artificial Sequence
  Synthetic oligonucleotide; TTA chr11 5363549 5363570 5363566 5363571 +
aaccaagcacagataccaagtt

SEQ ID NO: 107009 - DNA, 22 bp, Artificial Sequence
  Synthetic oligonucleotide; TTT chr11 5363572 5363593 5363589 5363594 +
ttgagtgtgaatgcagaaagaa

SEQ ID NO: 107010 - DNA, 22 bp, Artificial Sequence
  Synthetic oligonucleotide; TTT chr11 5363573 5363594 5363590 5363595 +
tgagtgtgaatgcagaaagaag

SEQ ID NO: 107011 - DNA, 22 bp, Artificial Sequence
  Synthetic oligonucleotide; TTT chr11 5363574 5363595 5363591 5363596 +
gagtgtgaatgcagaaagaaga

SEQ ID NO: 107012 - DNA, 22 bp, Artificial Sequence
  Synthetic oligonucleotide; TTG chr11 5363575 5363596 5363592 5363597 +
agtgtgaatgcagaaagaagat

SEQ ID NO: 107013 - DNA, 22 bp, Artificial Sequence
  Synthetic oligonucleotide; TTG chr11 5363603 5363624 5363620 5363625 +
aggtagatttttctcatagata

SEQ ID NO: 107014 - DNA, 22 bp, Artificial Sequence
  Synthetic oligonucleotide; TTT chr11 5363613 5363634 5363630 5363635 +
ttctcatagatactactaagat

SEQ ID NO: 107015 - DNA, 22 bp, Artificial Sequence
  Synthetic oligonucleotide; TTT chr11 5363614 5363635 5363631 5363636 +
tctcatagatactactaagatt

SEQ ID NO: 107016 - DNA, 22 bp, Artificial Sequence
  Synthetic oligonucleotide; TTT chr11 5363615 5363636 5363632 5363637 +
ctcatagatactactaagatta

SEQ ID NO: 107017 - DNA, 22 bp, Artificial Sequence
  Synthetic oligonucleotide; TTC chr11 5363616 5363637 5363633 5363638 +
tcatagatactactaagattat

SEQ ID NO: 107018 - DNA, 22 bp, Artificial Sequence
  Synthetic oligonucleotide; CTC chr11 5363618 5363639 5363635 5363640 +
atagatactactaagattatat

SEQ ID NO: 107019 - DNA, 22 bp, Artificial Sequence
  Synthetic oligonucleotide; CTA chr11 5363628 5363649 5363645 5363650 +
ctaagattatattgtctggaat

SEQ ID NO: 107020 - DNA, 22 bp, Artificial Sequence
  Synthetic oligonucleotide; CTA chr11 5363631 5363652 5363648 5363653 +
agattatattgtctggaatctt

SEQ ID NO: 107021 - DNA, 22 bp, Artificial Sequence
  Synthetic oligonucleotide; TTA chr11 5363637 5363658 5363654 5363659 +
tattgtctggaatcttatgtga

SEQ ID NO: 107022 - DNA, 22 bp, Artificial Sequence
  Synthetic oligonucleotide; TTG chr11 5363642 5363663 5363659 5363664 +
tctggaatcttatgtgacacag

SEQ ID NO: 107023 - DNA, 22 bp, Artificial Sequence
  Synthetic oligonucleotide; CTG chr11 5363646 5363667 5363663 5363668 +
gaatcttatgtgacacagaaaa

SEQ ID NO: 107024 - DNA, 22 bp, Artificial Sequence
  Synthetic oligonucleotide; CTT chr11 5363653 5363674 5363670 5363675 +
atgtgacacagaaaaagaacaa

SEQ ID NO: 107025 - DNA, 22 bp, Artificial Sequence
  Synthetic oligonucleotide; TTA chr11 5363654 5363675 5363671 5363676 +
tgtgacacagaaaaagaacaac

SEQ ID NO: 107026 - DNA, 22 bp, Artificial Sequence
  Synthetic oligonucleotide; CTC chr11 5363678 5363699 5363695 5363700 +
tgccatttggccatttgcttgt

SEQ ID NO: 107027 - DNA, 22 bp, Artificial Sequence
  Synthetic oligonucleotide; CTG chr11 5363680 5363701 5363697 5363702 +
ccatttggccatttgcttgtgt

SEQ ID NO: 107028 - DNA, 22 bp, Artificial Sequence
  Synthetic oligonucleotide; TTT chr11 5363686 5363707 5363703 5363708 +
ggccatttgcttgtgtttggac

SEQ ID NO: 107029 - DNA, 22 bp, Artificial Sequence
  Synthetic oligonucleotide; TTG chr11 5363687 5363708 5363704 5363709 +
gccatttgcttgtgtttggact

SEQ ID NO: 107030 - DNA, 22 bp, Artificial Sequence
  Synthetic oligonucleotide; TTT chr11 5363694 5363715 5363711 5363716 +
gcttgtgtttggacttgtgaag

SEQ ID NO: 107031 - DNA, 22 bp, Artificial Sequence
  Synthetic oligonucleotide; TTG chr11 5363695 5363716 5363712 5363717 +
cttgtgtttggacttgtgaagg

SEQ ID NO: 107032 - DNA, 22 bp, Artificial Sequence
  Synthetic oligonucleotide; CTT chr11 5363698 5363719 5363715 5363720 +
gtgtttggacttgtgaaggtct

SEQ ID NO: 107033 - DNA, 22 bp, Artificial Sequence
  Synthetic oligonucleotide; TTG chr11 5363699 5363720 5363716 5363721 +
tgtttggacttgtgaaggtctt

SEQ ID NO: 107034 - DNA, 22 bp, Artificial Sequence
  Synthetic oligonucleotide; TTT chr11 5363704 5363725 5363721 5363726 +
ggacttgtgaaggtctttccat

SEQ ID NO: 107035 - DNA, 22 bp, Artificial Sequence
  Synthetic oligonucleotide; TTG chr11 5363705 5363726 5363722 5363727 +
gacttgtgaaggtctttccatc

SEQ ID NO: 107036 - DNA, 22 bp, Artificial Sequence
  Synthetic oligonucleotide; CTT chr11 5363710 5363731 5363727 5363732 +
gtgaaggtctttccatcattct

SEQ ID NO: 107037 - DNA, 22 bp, Artificial Sequence
  Synthetic oligonucleotide; TTG chr11 5363711 5363732 5363728 5363733 +
tgaaggtctttccatcattctg

SEQ ID NO: 107038 - DNA, 22 bp, Artificial Sequence
  Synthetic oligonucleotide; CTT chr11 5363721 5363742 5363738 5363743 +
tccatcattctgttattggaaa

SEQ ID NO: 107039 - DNA, 22 bp, Artificial Sequence
  Synthetic oligonucleotide; TTT chr11 5363722 5363743 5363739 5363744 +
ccatcattctgttattggaaag

SEQ ID NO: 107040 - DNA, 22 bp, Artificial Sequence
  Synthetic oligonucleotide; TTC chr11 5363723 5363744 5363740 5363745 +
catcattctgttattggaaagc

SEQ ID NO: 107041 - DNA, 22 bp, Artificial Sequence
  Synthetic oligonucleotide; TTC chr11 5363731 5363752 5363748 5363753 +
tgttattggaaagcgggaaagt

SEQ ID NO: 107042 - DNA, 22 bp, Artificial Sequence
  Synthetic oligonucleotide; CTG chr11 5363733 5363754 5363750 5363755 +
ttattggaaagcgggaaagtag

SEQ ID NO: 107043 - DNA, 22 bp, Artificial Sequence
  Synthetic oligonucleotide; TTA chr11 5363736 5363757 5363753 5363758 +
ttggaaagcgggaaagtagcat

SEQ ID NO: 107044 - DNA, 22 bp, Artificial Sequence
  Synthetic oligonucleotide; TTG chr11 5363739 5363760 5363756 5363761 +
gaaagcgggaaagtagcatttt

SEQ ID NO: 107045 - DNA, 22 bp, Artificial Sequence
  Synthetic oligonucleotide; TTT chr11 5363760 5363781 5363777 5363782 +
tcatgaggattctattaaaaac

SEQ ID NO: 107046 - DNA, 22 bp, Artificial Sequence
  Synthetic oligonucleotide; TTT chr11 5363761 5363782 5363778 5363783 +
catgaggattctattaaaaact

SEQ ID NO: 107047 - DNA, 22 bp, Artificial Sequence
  Synthetic oligonucleotide; TTC chr11 5363762 5363783 5363779 5363784 +
atgaggattctattaaaaacta

SEQ ID NO: 107048 - DNA, 22 bp, Artificial Sequence
  Synthetic oligonucleotide; TTC chr11 5363772 5363793 5363789 5363794 +
tattaaaaactagggaccatat

SEQ ID NO: 107049 - DNA, 22 bp, Artificial Sequence
  Synthetic oligonucleotide; CTA chr11 5363774 5363795 5363791 5363796 +
ttaaaaactagggaccatatgc

SEQ ID NO: 107050 - DNA, 22 bp, Artificial Sequence
  Synthetic oligonucleotide; TTA chr11 5363777 5363798 5363794 5363799 +
aaaactagggaccatatgcaat

SEQ ID NO: 107051 - DNA, 22 bp, Artificial Sequence
  Synthetic oligonucleotide; CTA chr11 5363784 5363805 5363801 5363806 +
gggaccatatgcaatacatcca

SEQ ID NO: 107052 - DNA, 22 bp, Artificial Sequence
  Synthetic oligonucleotide; CTA chr11 5363811 5363832 5363828 5363833 +
tatttagtgtacaatagaaagc

SEQ ID NO: 107053 - DNA, 22 bp, Artificial Sequence
  Synthetic oligonucleotide; TTT chr11 5363816 5363837 5363833 5363838 +
agtgtacaatagaaagcaatta

SEQ ID NO: 107054 - DNA, 22 bp, Artificial Sequence
  Synthetic oligonucleotide; TTA chr11 5363817 5363838 5363834 5363839 +
gtgtacaatagaaagcaattac

SEQ ID NO: 107055 - DNA, 22 bp, Artificial Sequence
  Synthetic oligonucleotide; TTA chr11 5363838 5363859 5363855 5363860 +
ccatagcaattatgttccctag

SEQ ID NO: 107056 - DNA, 22 bp, Artificial Sequence
  Synthetic oligonucleotide; TTA chr11 5363850 5363871 5363867 5363872 +
tgttccctagctgtcttctctc

SEQ ID NO: 107057 - DNA, 22 bp, Artificial Sequence
  Synthetic oligonucleotide; TTC chr11 5363855 5363876 5363872 5363877 +
cctagctgtcttctctctttgc

SEQ ID NO: 107058 - DNA, 22 bp, Artificial Sequence
  Synthetic oligonucleotide; CTA chr11 5363859 5363880 5363876 5363881 +
gctgtcttctctctttgcaaac

SEQ ID NO: 107059 - DNA, 22 bp, Artificial Sequence
  Synthetic oligonucleotide; CTG chr11 5363863 5363884 5363880 5363885 +
tcttctctctttgcaaacccca

SEQ ID NO: 107060 - DNA, 22 bp, Artificial Sequence
  Synthetic oligonucleotide; CTT chr11 5363867 5363888 5363884 5363889 +
ctctctttgcaaaccccagccc

SEQ ID NO: 107061 - DNA, 22 bp, Artificial Sequence
  Synthetic oligonucleotide; TTC chr11 5363868 5363889 5363885 5363890 +
tctctttgcaaaccccagcccc

SEQ ID NO: 107062 - DNA, 22 bp, Artificial Sequence
  Synthetic oligonucleotide; CTC chr11 5363870 5363891 5363887 5363892 +
tctttgcaaaccccagccccca

SEQ ID NO: 107063 - DNA, 22 bp, Artificial Sequence
  Synthetic oligonucleotide; CTC chr11 5363872 5363893 5363889 5363894 +
tttgcaaaccccagcccccact

SEQ ID NO: 107064 - DNA, 22 bp, Artificial Sequence
  Synthetic oligonucleotide; CTT chr11 5363874 5363895 5363891 5363896 +
tgcaaaccccagcccccactca

SEQ ID NO: 107065 - DNA, 22 bp, Artificial Sequence
  Synthetic oligonucleotide; TTT chr11 5363875 5363896 5363892 5363897 +
gcaaaccccagcccccactcag

SEQ ID NO: 107066 - DNA, 22 bp, Artificial Sequence
  Synthetic oligonucleotide; TTG chr11 5363876 5363897 5363893 5363898 +
caaaccccagcccccactcagc

SEQ ID NO: 107067 - DNA, 22 bp, Artificial Sequence
  Synthetic oligonucleotide; CTC chr11 5363895 5363916 5363912 5363917 +
agcatgacatggcaggtataaa

SEQ ID NO: 107068 - DNA, 22 bp, Artificial Sequence
  Synthetic oligonucleotide; CTC chr11 5363929 5363950 5363946 5363951 +
agacccatttctgtaaaggagg

SEQ ID NO: 107069 - DNA, 22 bp, Artificial Sequence
  Synthetic oligonucleotide; TTT chr11 5363939 5363960 5363956 5363961 +
ctgtaaaggaggagaagcttgt

SEQ ID NO: 107070 - DNA, 22 bp, Artificial Sequence
  Synthetic oligonucleotide; TTC chr11 5363940 5363961 5363957 5363962 +
tgtaaaggaggagaagcttgtg

SEQ ID NO: 107071 - DNA, 22 bp, Artificial Sequence
  Synthetic oligonucleotide; CTG chr11 5363942 5363963 5363959 5363964 +
taaaggaggagaagcttgtgtt

SEQ ID NO: 107072 - DNA, 22 bp, Artificial Sequence
  Synthetic oligonucleotide; CTT chr11 5363959 5363980 5363976 5363981 +
gtgttaggaatggaagaatgcc

SEQ ID NO: 107073 - DNA, 22 bp, Artificial Sequence
  Synthetic oligonucleotide; TTG chr11 5363960 5363981 5363977 5363982 +
tgttaggaatggaagaatgcct

SEQ ID NO: 107074 - DNA, 22 bp, Artificial Sequence
  Synthetic oligonucleotide; TTA chr11 5363965 5363986 5363982 5363987 +
ggaatggaagaatgcctgggct

SEQ ID NO: 107075 - DNA, 22 bp, Artificial Sequence
  Synthetic oligonucleotide; CTG chr11 5363983 5364004 5364000 5364005 +
ggctggagaacagggcttcaca

SEQ ID NO: 107076 - DNA, 22 bp, Artificial Sequence
  Synthetic oligonucleotide; CTG chr11 5363988 5364009 5364005 5364010 +
gagaacagggcttcacaacagt

SEQ ID NO: 107077 - DNA, 22 bp, Artificial Sequence
  Synthetic oligonucleotide; CTT chr11 5364001 5364022 5364018 5364023 +
cacaacagtgtagtgatagatt

SEQ ID NO: 107078 - DNA, 22 bp, Artificial Sequence
  Synthetic oligonucleotide; TTC chr11 5364002 5364023 5364019 5364024 +
acaacagtgtagtgatagattc

SEQ ID NO: 107079 - DNA, 22 bp, Artificial Sequence
  Synthetic oligonucleotide; TTC chr11 5364024 5364045 5364041 5364046 +
acccacatattatgtgatgtgg

SEQ ID NO: 107080 - DNA, 22 bp, Artificial Sequence
  Synthetic oligonucleotide; TTA chr11 5364036 5364057 5364053 5364058 +
tgtgatgtggacctctgagcca

SEQ ID NO: 107081 - DNA, 22 bp, Artificial Sequence
  Synthetic oligonucleotide; CTC chr11 5364051 5364072 5364068 5364073 +
tgagccaggtactatctcattc

SEQ ID NO: 107082 - DNA, 22 bp, Artificial Sequence
  Synthetic oligonucleotide; CTG chr11 5364053 5364074 5364070 5364075 +
agccaggtactatctcattctc

SEQ ID NO: 107083 - DNA, 22 bp, Artificial Sequence
  Synthetic oligonucleotide; CTA chr11 5364065 5364086 5364082 5364087 +
tctcattctccatggttgcaat

SEQ ID NO: 107084 - DNA, 22 bp, Artificial Sequence
  Synthetic oligonucleotide; CTC chr11 5364069 5364090 5364086 5364091 +
attctccatggttgcaataagg

SEQ ID NO: 107085 - DNA, 22 bp, Artificial Sequence
  Synthetic oligonucleotide; TTC chr11 5364073 5364094 5364090 5364095 +
tccatggttgcaataaggtcga

SEQ ID NO: 107086 - DNA, 22 bp, Artificial Sequence
  Synthetic oligonucleotide; CTC chr11 5364075 5364096 5364092 5364097 +
catggttgcaataaggtcgatt

SEQ ID NO: 107087 - DNA, 22 bp, Artificial Sequence
  Synthetic oligonucleotide; TTG chr11 5364083 5364104 5364100 5364105 +
caataaggtcgattatagattc

SEQ ID NO: 107088 - DNA, 22 bp, Artificial Sequence
  Synthetic oligonucleotide; TTA chr11 5364098 5364119 5364115 5364120 +
tagattcaataaaggaagaggt

SEQ ID NO: 107089 - DNA, 22 bp, Artificial Sequence
  Synthetic oligonucleotide; TTC chr11 5364105 5364126 5364122 5364127 +
aataaaggaagaggtatctcaa

SEQ ID NO: 107090 - DNA, 22 bp, Artificial Sequence
  Synthetic oligonucleotide; CTC chr11 5364125 5364146 5364142 5364147 +
aacactaaagaaagagtaaaat

SEQ ID NO: 107091 - DNA, 22 bp, Artificial Sequence
  Synthetic oligonucleotide; CTA chr11 5364132 5364153 5364149 5364154 +
aagaaagagtaaaattttcagg

SEQ ID NO: 107092 - DNA, 22 bp, Artificial Sequence
  Synthetic oligonucleotide; TTT chr11 5364149 5364170 5364166 5364171 +
tcagggttcaacaagcgaccac

SEQ ID NO: 107093 - DNA, 22 bp, Artificial Sequence
  Synthetic oligonucleotide; TTT chr11 5364150 5364171 5364167 5364172 +
cagggttcaacaagcgaccacc

SEQ ID NO: 107094 - DNA, 22 bp, Artificial Sequence
  Synthetic oligonucleotide; TTC chr11 5364151 5364172 5364168 5364173 +
agggttcaacaagcgaccacct

SEQ ID NO: 107095 - DNA, 22 bp, Artificial Sequence
  Synthetic oligonucleotide; TTC chr11 5364158 5364179 5364175 5364180 +
aacaagcgaccacctaagggca

SEQ ID NO: 107096 - DNA, 22 bp, Artificial Sequence
  Synthetic oligonucleotide; CTA chr11 5364174 5364195 5364191 5364196 +
agggcaaaatattttcctaaat

SEQ ID NO: 107097 - DNA, 22 bp, Artificial Sequence
  Synthetic oligonucleotide; TTT chr11 5364188 5364209 5364205 5364210 +
tcctaaattttgacaaacttta

SEQ ID NO: 107098 - DNA, 22 bp, Artificial Sequence
  Synthetic oligonucleotide; TTT chr11 5364189 5364210 5364206 5364211 +
cctaaattttgacaaactttaa

SEQ ID NO: 107099 - DNA, 22 bp, Artificial Sequence
  Synthetic oligonucleotide; TTC chr11 5364190 5364211 5364207 5364212 +
ctaaattttgacaaactttaag

SEQ ID NO: 107100 - DNA, 22 bp, Artificial Sequence
  Synthetic oligonucleotide; CTA chr11 5364193 5364214 5364210 5364215 +
aattttgacaaactttaagttc

SEQ ID NO: 107101 - DNA, 22 bp, Artificial Sequence
  Synthetic oligonucleotide; TTT chr11 5364198 5364219 5364215 5364220 +
tgacaaactttaagttcaaaaa

SEQ ID NO: 107102 - DNA, 22 bp, Artificial Sequence
  Synthetic oligonucleotide; TTT chr11 5364199 5364220 5364216 5364221 +
gacaaactttaagttcaaaaag

SEQ ID NO: 107103 - DNA, 22 bp, Artificial Sequence
  Synthetic oligonucleotide; TTG chr11 5364200 5364221 5364217 5364222 +
acaaactttaagttcaaaaagc

SEQ ID NO: 107104 - DNA, 22 bp, Artificial Sequence
  Synthetic oligonucleotide; CTT chr11 5364208 5364229 5364225 5364230 +
taagttcaaaaagctcatctag

SEQ ID NO: 107105 - DNA, 22 bp, Artificial Sequence
  Synthetic oligonucleotide; TTT chr11 5364209 5364230 5364226 5364231 +
aagttcaaaaagctcatctagc

SEQ ID NO: 107106 - DNA, 22 bp, Artificial Sequence
  Synthetic oligonucleotide; TTA chr11 5364210 5364231 5364227 5364232 +
agttcaaaaagctcatctagct

SEQ ID NO: 107107 - DNA, 22 bp, Artificial Sequence
  Synthetic oligonucleotide; TTC chr11 5364215 5364236 5364232 5364237 +
aaaaagctcatctagctatgac

SEQ ID NO: 107108 - DNA, 22 bp, Artificial Sequence
  Synthetic oligonucleotide; CTC chr11 5364224 5364245 5364241 5364246 +
atctagctatgacaaagtttga

SEQ ID NO: 107109 - DNA, 22 bp, Artificial Sequence
  Synthetic oligonucleotide; CTA chr11 5364229 5364250 5364246 5364251 +
gctatgacaaagtttgacatag

SEQ ID NO: 107110 - DNA, 22 bp, Artificial Sequence
  Synthetic oligonucleotide; CTA chr11 5364233 5364254 5364250 5364255 +
tgacaaagtttgacatagttag

SEQ ID NO: 107111 - DNA, 22 bp, Artificial Sequence
  Synthetic oligonucleotide; TTT chr11 5364244 5364265 5364261 5364266 +
gacatagttagatgagcttttg

SEQ ID NO: 107112 - DNA, 22 bp, Artificial Sequence
  Synthetic oligonucleotide; TTG chr11 5364245 5364266 5364262 5364267 +
acatagttagatgagcttttga

SEQ ID NO: 107113 - DNA, 22 bp, Artificial Sequence
  Synthetic oligonucleotide; TTA chr11 5364254 5364275 5364271 5364276 +
gatgagcttttgatctgtgcac

SEQ ID NO: 107114 - DNA, 22 bp, Artificial Sequence
  Synthetic oligonucleotide; CTT chr11 5364263 5364284 5364280 5364285 +
ttgatctgtgcactttccctcg

SEQ ID NO: 107115 - DNA, 22 bp, Artificial Sequence
  Synthetic oligonucleotide; TTT chr11 5364264 5364285 5364281 5364286 +
tgatctgtgcactttccctcga

SEQ ID NO: 107116 - DNA, 22 bp, Artificial Sequence
  Synthetic oligonucleotide; TTT chr11 5364265 5364286 5364282 5364287 +
gatctgtgcactttccctcgac

SEQ ID NO: 107117 - DNA, 22 bp, Artificial Sequence
  Synthetic oligonucleotide; TTG chr11 5364266 5364287 5364283 5364288 +
atctgtgcactttccctcgacc

SEQ ID NO: 107118 - DNA, 22 bp, Artificial Sequence
  Synthetic oligonucleotide; CTG chr11 5364271 5364292 5364288 5364293 +
tgcactttccctcgaccttgac

SEQ ID NO: 107119 - DNA, 22 bp, Artificial Sequence
  Synthetic oligonucleotide; CTT chr11 5364278 5364299 5364295 5364300 +
tccctcgaccttgaccaccaat

SEQ ID NO: 107120 - DNA, 22 bp, Artificial Sequence
  Synthetic oligonucleotide; TTT chr11 5364279 5364300 5364296 5364301 +
ccctcgaccttgaccaccaatc

SEQ ID NO: 107121 - DNA, 22 bp, Artificial Sequence
  Synthetic oligonucleotide; TTC chr11 5364280 5364301 5364297 5364302 +
cctcgaccttgaccaccaatct

SEQ ID NO: 107122 - DNA, 22 bp, Artificial Sequence
  Synthetic oligonucleotide; CTC chr11 5364284 5364305 5364301 5364306 +
gaccttgaccaccaatcttgac

SEQ ID NO: 107123 - DNA, 22 bp, Artificial Sequence
  Synthetic oligonucleotide; CTT chr11 5364290 5364311 5364307 5364312 +
gaccaccaatcttgacttcaca

SEQ ID NO: 107124 - DNA, 22 bp, Artificial Sequence
  Synthetic oligonucleotide; TTG chr11 5364291 5364312 5364308 5364313 +
accaccaatcttgacttcacaa

SEQ ID NO: 107125 - DNA, 22 bp, Artificial Sequence
  Synthetic oligonucleotide; CTT chr11 5364303 5364324 5364320 5364325 +
gacttcacaaaaccattggaat

SEQ ID NO: 107126 - DNA, 22 bp, Artificial Sequence
  Synthetic oligonucleotide; TTG chr11 5364304 5364325 5364321 5364326 +
acttcacaaaaccattggaatt

SEQ ID NO: 107127 - DNA, 22 bp, Artificial Sequence
  Synthetic oligonucleotide; CTT chr11 5364308 5364329 5364325 5364330 +
cacaaaaccattggaatttggg

SEQ ID NO: 107128 - DNA, 22 bp, Artificial Sequence
  Synthetic oligonucleotide; TTC chr11 5364309 5364330 5364326 5364331 +
acaaaaccattggaatttgggg

SEQ ID NO: 107129 - DNA, 22 bp, Artificial Sequence
  Synthetic oligonucleotide; TTG chr11 5364321 5364342 5364338 5364343 +
gaatttggggtgatatggaggc

SEQ ID NO: 107130 - DNA, 22 bp, Artificial Sequence
  Synthetic oligonucleotide; TTT chr11 5364327 5364348 5364344 5364349 +
ggggtgatatggaggcaagcca

SEQ ID NO: 107131 - DNA, 22 bp, Artificial Sequence
  Synthetic oligonucleotide; TTG chr11 5364328 5364349 5364345 5364350 +
gggtgatatggaggcaagccaa

SEQ ID NO: 107132 - DNA, 22 bp, Artificial Sequence
  Synthetic oligonucleotide; CTA chr11 5364380 5364401 5364397 5364402 +
tgatgcagtttaggagctatgt

SEQ ID NO: 107133 - DNA, 22 bp, Artificial Sequence
  Synthetic oligonucleotide; TTT chr11 5364391 5364412 5364408 5364413 +
aggagctatgtgatgtgtcatt

SEQ ID NO: 107134 - DNA, 22 bp, Artificial Sequence
  Synthetic oligonucleotide; TTA chr11 5364392 5364413 5364409 5364414 +
ggagctatgtgatgtgtcattt

SEQ ID NO: 107135 - DNA, 22 bp, Artificial Sequence
  Synthetic oligonucleotide; CTA chr11 5364399 5364420 5364416 5364421 +
tgtgatgtgtcatttctgtgac

SEQ ID NO: 107136 - DNA, 22 bp, Artificial Sequence
  Synthetic oligonucleotide; TTT chr11 5364414 5364435 5364431 5364436 +
ctgtgacaggatatgagagctg

SEQ ID NO: 107137 - DNA, 22 bp, Artificial Sequence
  Synthetic oligonucleotide; TTC chr11 5364415 5364436 5364432 5364437 +
tgtgacaggatatgagagctgc

SEQ ID NO: 107138 - DNA, 22 bp, Artificial Sequence
  Synthetic oligonucleotide; CTG chr11 5364417 5364438 5364434 5364439 +
tgacaggatatgagagctgcac

SEQ ID NO: 107139 - DNA, 22 bp, Artificial Sequence
  Synthetic oligonucleotide; CTG chr11 5364436 5364457 5364453 5364458 +
cacatctttctgtttagaaatt

SEQ ID NO: 107140 - DNA, 22 bp, Artificial Sequence
  Synthetic oligonucleotide; CTT chr11 5364444 5364465 5364461 5364466 +
tctgtttagaaattcctgccat

SEQ ID NO: 107141 - DNA, 22 bp, Artificial Sequence
  Synthetic oligonucleotide; TTT chr11 5364445 5364466 5364462 5364467 +
ctgtttagaaattcctgccata

SEQ ID NO: 107142 - DNA, 22 bp, Artificial Sequence
  Synthetic oligonucleotide; TTC chr11 5364446 5364467 5364463 5364468 +
tgtttagaaattcctgccatat

SEQ ID NO: 107143 - DNA, 22 bp, Artificial Sequence
  Synthetic oligonucleotide; CTG chr11 5364448 5364469 5364465 5364470 +
tttagaaattcctgccatattt

SEQ ID NO: 107144 - DNA, 22 bp, Artificial Sequence
  Synthetic oligonucleotide; TTT chr11 5364451 5364472 5364468 5364473 +
agaaattcctgccatatttgta

SEQ ID NO: 107145 - DNA, 22 bp, Artificial Sequence
  Synthetic oligonucleotide; TTA chr11 5364452 5364473 5364469 5364474 +
gaaattcctgccatatttgtaa

SEQ ID NO: 107146 - DNA, 22 bp, Artificial Sequence
  Synthetic oligonucleotide; TTC chr11 5364459 5364480 5364476 5364481 +
ctgccatatttgtaattctcaa

SEQ ID NO: 107147 - DNA, 22 bp, Artificial Sequence
  Synthetic oligonucleotide; CTG chr11 5364462 5364483 5364479 5364484 +
ccatatttgtaattctcaatgg

SEQ ID NO: 107148 - DNA, 22 bp, Artificial Sequence
  Synthetic oligonucleotide; TTT chr11 5364470 5364491 5364487 5364492 +
gtaattctcaatggtcagtctc

SEQ ID NO: 107149 - DNA, 22 bp, Artificial Sequence
  Synthetic oligonucleotide; TTG chr11 5364471 5364492 5364488 5364493 +
taattctcaatggtcagtctcc

SEQ ID NO: 107150 - DNA, 22 bp, Artificial Sequence
  Synthetic oligonucleotide; TTC chr11 5364477 5364498 5364494 5364499 +
tcaatggtcagtctccttgctg

SEQ ID NO: 107151 - DNA, 22 bp, Artificial Sequence
  Synthetic oligonucleotide; CTC chr11 5364479 5364500 5364496 5364501 +
aatggtcagtctccttgctgga

SEQ ID NO: 107152 - DNA, 22 bp, Artificial Sequence
  Synthetic oligonucleotide; CTC chr11 5364492 5364513 5364509 5364514 +
cttgctggactataaattcaac

SEQ ID NO: 107153 - DNA, 22 bp, Artificial Sequence
  Synthetic oligonucleotide; CTT chr11 5364495 5364516 5364512 5364517 +
gctggactataaattcaactac

SEQ ID NO: 107154 - DNA, 22 bp, Artificial Sequence
  Synthetic oligonucleotide; TTG chr11 5364496 5364517 5364513 5364518 +
ctggactataaattcaactaca

SEQ ID NO: 107155 - DNA, 22 bp, Artificial Sequence
  Synthetic oligonucleotide; CTG chr11 5364499 5364520 5364516 5364521 +
gactataaattcaactacatgc

SEQ ID NO: 107156 - DNA, 22 bp, Artificial Sequence
  Synthetic oligonucleotide; CTA chr11 5364504 5364525 5364521 5364526 +
taaattcaactacatgccagct

SEQ ID NO: 107157 - DNA, 22 bp, Artificial Sequence
  Synthetic oligonucleotide; TTC chr11 5364511 5364532 5364528 5364533 +
aactacatgccagctttaagca

SEQ ID NO: 107158 - DNA, 22 bp, Artificial Sequence
  Synthetic oligonucleotide; CTA chr11 5364516 5364537 5364533 5364538 +
catgccagctttaagcacagtg

SEQ ID NO: 107159 - DNA, 22 bp, Artificial Sequence
  Synthetic oligonucleotide; CTT chr11 5364527 5364548 5364544 5364549 +
taagcacagtgctttgaagaga

SEQ ID NO: 107160 - DNA, 22 bp, Artificial Sequence
  Synthetic oligonucleotide; TTT chr11 5364528 5364549 5364545 5364550 +
aagcacagtgctttgaagagag

SEQ ID NO: 107161 - DNA, 22 bp, Artificial Sequence
  Synthetic oligonucleotide; TTA chr11 5364529 5364550 5364546 5364551 +
agcacagtgctttgaagagagt

SEQ ID NO: 107162 - DNA, 22 bp, Artificial Sequence
  Synthetic oligonucleotide; CTT chr11 5364541 5364562 5364558 5364563 +
tgaagagagtaggagcttaaaa

SEQ ID NO: 107163 - DNA, 22 bp, Artificial Sequence
  Synthetic oligonucleotide; TTT chr11 5364542 5364563 5364559 5364564 +
gaagagagtaggagcttaaaaa

SEQ ID NO: 107164 - DNA, 22 bp, Artificial Sequence
  Synthetic oligonucleotide; TTG chr11 5364543 5364564 5364560 5364565 +
aagagagtaggagcttaaaaaa

SEQ ID NO: 107165 - DNA, 22 bp, Artificial Sequence
  Synthetic oligonucleotide; CTT chr11 5364559 5364580 5364576 5364581 +
aaaaaatattctgtattaaatg

SEQ ID NO: 107166 - DNA, 22 bp, Artificial Sequence
  Synthetic oligonucleotide; TTA chr11 5364560 5364581 5364577 5364582 +
aaaaatattctgtattaaatga

SEQ ID NO: 107167 - DNA, 22 bp, Artificial Sequence
  Synthetic oligonucleotide; TTC chr11 5364570 5364591 5364587 5364592 +
tgtattaaatgaaaaaataaac

SEQ ID NO: 107168 - DNA, 22 bp, Artificial Sequence
  Synthetic oligonucleotide; CTG chr11 5364572 5364593 5364589 5364594 +
tattaaatgaaaaaataaacta

SEQ ID NO: 107169 - DNA, 22 bp, Artificial Sequence
  Synthetic oligonucleotide; TTA chr11 5364577 5364598 5364594 5364599 +
aatgaaaaaataaactaagcgt

SEQ ID NO: 107170 - DNA, 22 bp, Artificial Sequence
  Synthetic oligonucleotide; CTA chr11 5364594 5364615 5364611 5364616 +
agcgtgagaggtatttatgtgt

SEQ ID NO: 107171 - DNA, 22 bp, Artificial Sequence
  Synthetic oligonucleotide; TTT chr11 5364610 5364631 5364627 5364632 +
atgtgtctctctcttcctcttc

SEQ ID NO: 107172 - DNA, 22 bp, Artificial Sequence
  Synthetic oligonucleotide; TTA chr11 5364611 5364632 5364628 5364633 +
tgtgtctctctcttcctcttct

SEQ ID NO: 107173 - DNA, 22 bp, Artificial Sequence
  Synthetic oligonucleotide; CTC chr11 5364619 5364640 5364636 5364641 +
tctcttcctcttctcactccat

SEQ ID NO: 107174 - DNA, 22 bp, Artificial Sequence
  Synthetic oligonucleotide; CTC chr11 5364621 5364642 5364638 5364643 +
tcttcctcttctcactccatcc

SEQ ID NO: 107175 - DNA, 22 bp, Artificial Sequence
  Synthetic oligonucleotide; CTC chr11 5364623 5364644 5364640 5364645 +
ttcctcttctcactccatcctc

SEQ ID NO: 107176 - DNA, 22 bp, Artificial Sequence
  Synthetic oligonucleotide; CTT chr11 5364625 5364646 5364642 5364647 +
cctcttctcactccatcctcat

SEQ ID NO: 107177 - DNA, 22 bp, Artificial Sequence
  Synthetic oligonucleotide; TTC chr11 5364626 5364647 5364643 5364648 +
ctcttctcactccatcctcatg

SEQ ID NO: 107178 - DNA, 22 bp, Artificial Sequence
  Synthetic oligonucleotide; CTC chr11 5364629 5364650 5364646 5364651 +
ttctcactccatcctcatgtgc

SEQ ID NO: 107179 - DNA, 22 bp, Artificial Sequence
  Synthetic oligonucleotide; CTT chr11 5364631 5364652 5364648 5364653 +
ctcactccatcctcatgtgcat

SEQ ID NO: 107180 - DNA, 22 bp, Artificial Sequence
  Synthetic oligonucleotide; TTC chr11 5364632 5364653 5364649 5364654 +
tcactccatcctcatgtgcatc

SEQ ID NO: 107181 - DNA, 22 bp, Artificial Sequence
  Synthetic oligonucleotide; CTC chr11 5364634 5364655 5364651 5364656 +
actccatcctcatgtgcatctc

SEQ ID NO: 107182 - DNA, 22 bp, Artificial Sequence
  Synthetic oligonucleotide; CTC chr11 5364638 5364659 5364655 5364660 +
catcctcatgtgcatctctgaa

SEQ ID NO: 107183 - DNA, 22 bp, Artificial Sequence
  Synthetic oligonucleotide; CTC chr11 5364645 5364666 5364662 5364667 +
atgtgcatctctgaatatctct

SEQ ID NO: 107184 - DNA, 22 bp, Artificial Sequence
  Synthetic oligonucleotide; CTC chr11 5364656 5364677 5364673 5364678 +
tgaatatctctgattttgtgca

SEQ ID NO: 107185 - DNA, 22 bp, Artificial Sequence
  Synthetic oligonucleotide; CTG chr11 5364658 5364679 5364675 5364680 +
aatatctctgattttgtgcact

SEQ ID NO: 107186 - DNA, 22 bp, Artificial Sequence
  Synthetic oligonucleotide; CTC chr11 5364666 5364687 5364683 5364688 +
tgattttgtgcactctaaggca

SEQ ID NO: 107187 - DNA, 22 bp, Artificial Sequence
  Synthetic oligonucleotide; CTG chr11 5364668 5364689 5364685 5364690 +
attttgtgcactctaaggcagc

SEQ ID NO: 107188 - DNA, 22 bp, Artificial Sequence
  Synthetic oligonucleotide; TTT chr11 5364672 5364693 5364689 5364694 +
tgtgcactctaaggcagccctc

SEQ ID NO: 107189 - DNA, 22 bp, Artificial Sequence
  Synthetic oligonucleotide; TTT chr11 5364673 5364694 5364690 5364695 +
gtgcactctaaggcagccctct

SEQ ID NO: 107190 - DNA, 22 bp, Artificial Sequence
  Synthetic oligonucleotide; TTG chr11 5364674 5364695 5364691 5364696 +
tgcactctaaggcagccctcta

SEQ ID NO: 107191 - DNA, 22 bp, Artificial Sequence
  Synthetic oligonucleotide; CTC chr11 5364681 5364702 5364698 5364703 +
taaggcagccctctaagctgtt

SEQ ID NO: 107192 - DNA, 22 bp, Artificial Sequence
  Synthetic oligonucleotide; CTA chr11 5364683 5364704 5364700 5364705 +
aggcagccctctaagctgtttg

SEQ ID NO: 107193 - DNA, 22 bp, Artificial Sequence
  Synthetic oligonucleotide; CTC chr11 5364694 5364715 5364711 5364716 +
taagctgtttgcccatccagca

SEQ ID NO: 107194 - DNA, 22 bp, Artificial Sequence
  Synthetic oligonucleotide; CTA chr11 5364696 5364717 5364713 5364718 +
agctgtttgcccatccagcata

SEQ ID NO: 107195 - DNA, 22 bp, Artificial Sequence
  Synthetic oligonucleotide; CTG chr11 5364701 5364722 5364718 5364723 +
tttgcccatccagcatatgaca

SEQ ID NO: 107196 - DNA, 22 bp, Artificial Sequence
  Synthetic oligonucleotide; TTT chr11 5364704 5364725 5364721 5364726 +
gcccatccagcatatgacagaa

SEQ ID NO: 107197 - DNA, 22 bp, Artificial Sequence
  Synthetic oligonucleotide; TTG chr11 5364705 5364726 5364722 5364727 +
cccatccagcatatgacagaag

SEQ ID NO: 107198 - DNA, 22 bp, Artificial Sequence
  Synthetic oligonucleotide; CTC chr11 5364731 5364752 5364748 5364753 +
ttcaaagtgaatgatcaaagtc

SEQ ID NO: 107199 - DNA, 22 bp, Artificial Sequence
  Synthetic oligonucleotide; CTT chr11 5364733 5364754 5364750 5364755 +
caaagtgaatgatcaaagtccc

SEQ ID NO: 107200 - DNA, 22 bp, Artificial Sequence
  Synthetic oligonucleotide; TTC chr11 5364734 5364755 5364751 5364756 +
aaagtgaatgatcaaagtccct

SEQ ID NO: 107201 - DNA, 22 bp, Artificial Sequence
  Synthetic oligonucleotide; CTT chr11 5364757 5364778 5364774 5364779 +
gtttacagggtccccccaccct

SEQ ID NO: 107202 - DNA, 22 bp, Artificial Sequence
  Synthetic oligonucleotide; TTG chr11 5364758 5364779 5364775 5364780 +
tttacagggtccccccaccctc

SEQ ID NO: 107203 - DNA, 22 bp, Artificial Sequence
  Synthetic oligonucleotide; TTT chr11 5364761 5364782 5364778 5364783 +
acagggtccccccaccctcttc

SEQ ID NO: 107204 - DNA, 22 bp, Artificial Sequence
  Synthetic oligonucleotide; TTA chr11 5364762 5364783 5364779 5364784 +
cagggtccccccaccctcttcc

SEQ ID NO: 107205 - DNA, 22 bp, Artificial Sequence
  Synthetic oligonucleotide; CTC chr11 5364780 5364801 5364797 5364802 +
ttccttcctgagcatgtgttct

SEQ ID NO: 107206 - DNA, 22 bp, Artificial Sequence
  Synthetic oligonucleotide; CTT chr11 5364782 5364803 5364799 5364804 +
ccttcctgagcatgtgttctgg

SEQ ID NO: 107207 - DNA, 22 bp, Artificial Sequence
  Synthetic oligonucleotide; TTC chr11 5364783 5364804 5364800 5364805 +
cttcctgagcatgtgttctgga

SEQ ID NO: 107208 - DNA, 22 bp, Artificial Sequence
  Synthetic oligonucleotide; CTT chr11 5364786 5364807 5364803 5364808 +
cctgagcatgtgttctggatat

SEQ ID NO: 107209 - DNA, 22 bp, Artificial Sequence
  Synthetic oligonucleotide; TTC chr11 5364787 5364808 5364804 5364809 +
ctgagcatgtgttctggatatg

SEQ ID NO: 107210 - DNA, 22 bp, Artificial Sequence
  Synthetic oligonucleotide; CTG chr11 5364790 5364811 5364807 5364812 +
agcatgtgttctggatatgctg

SEQ ID NO: 107211 - DNA, 22 bp, Artificial Sequence
  Synthetic oligonucleotide; TTC chr11 5364801 5364822 5364818 5364823 +
tggatatgctgaagccaacctc

SEQ ID NO: 107212 - DNA, 22 bp, Artificial Sequence
  Synthetic oligonucleotide; CTG chr11 5364803 5364824 5364820 5364825 +
gatatgctgaagccaacctcac

SEQ ID NO: 107213 - DNA, 22 bp, Artificial Sequence
  Synthetic oligonucleotide; CTG chr11 5364812 5364833 5364829 5364834 +
aagccaacctcacaggactttg

SEQ ID NO: 107214 - DNA, 22 bp, Artificial Sequence
  Synthetic oligonucleotide; CTC chr11 5364823 5364844 5364840 5364845 +
acaggactttgttacctttcct

SEQ ID NO: 107215 - DNA, 22 bp, Artificial Sequence
  Synthetic oligonucleotide; CTT chr11 5364832 5364853 5364849 5364854 +
tgttacctttcctaagtttcta

SEQ ID NO: 107216 - DNA, 22 bp, Artificial Sequence
  Synthetic oligonucleotide; TTT chr11 5364833 5364854 5364850 5364855 +
gttacctttcctaagtttctat

SEQ ID NO: 107217 - DNA, 22 bp, Artificial Sequence
  Synthetic oligonucleotide; TTG chr11 5364834 5364855 5364851 5364856 +
ttacctttcctaagtttctatt

SEQ ID NO: 107218 - DNA, 22 bp, Artificial Sequence
  Synthetic oligonucleotide; TTA chr11 5364837 5364858 5364854 5364859 +
cctttcctaagtttctattggt

SEQ ID NO: 107219 - DNA, 22 bp, Artificial Sequence
  Synthetic oligonucleotide; CTT chr11 5364841 5364862 5364858 5364863 +
tcctaagtttctattggtgaat

SEQ ID NO: 107220 - DNA, 22 bp, Artificial Sequence
  Synthetic oligonucleotide; TTT chr11 5364842 5364863 5364859 5364864 +
cctaagtttctattggtgaatt

SEQ ID NO: 107221 - DNA, 22 bp, Artificial Sequence
  Synthetic oligonucleotide; TTC chr11 5364843 5364864 5364860 5364865 +
ctaagtttctattggtgaattt

SEQ ID NO: 107222 - DNA, 22 bp, Artificial Sequence
  Synthetic oligonucleotide; CTA chr11 5364846 5364867 5364863 5364868 +
agtttctattggtgaatttcca

SEQ ID NO: 107223 - DNA, 22 bp, Artificial Sequence
  Synthetic oligonucleotide; TTT chr11 5364851 5364872 5364868 5364873 +
ctattggtgaatttccatttaa

SEQ ID NO: 107224 - DNA, 22 bp, Artificial Sequence
  Synthetic oligonucleotide; TTC chr11 5364852 5364873 5364869 5364874 +
tattggtgaatttccatttaat

SEQ ID NO: 107225 - DNA, 22 bp, Artificial Sequence
  Synthetic oligonucleotide; CTA chr11 5364854 5364875 5364871 5364876 +
ttggtgaatttccatttaatat

SEQ ID NO: 107226 - DNA, 22 bp, Artificial Sequence
  Synthetic oligonucleotide; TTG chr11 5364857 5364878 5364874 5364879 +
gtgaatttccatttaatatagt

SEQ ID NO: 107227 - DNA, 22 bp, Artificial Sequence
  Synthetic oligonucleotide; TTT chr11 5364865 5364886 5364882 5364887 +
ccatttaatatagttttattaa

SEQ ID NO: 107228 - DNA, 22 bp, Artificial Sequence
  Synthetic oligonucleotide; TTC chr11 5364866 5364887 5364883 5364888 +
catttaatatagttttattaaa

SEQ ID NO: 107229 - DNA, 22 bp, Artificial Sequence
  Synthetic oligonucleotide; TTT chr11 5364871 5364892 5364888 5364893 +
aatatagttttattaaatgatt

SEQ ID NO: 107230 - DNA, 22 bp, Artificial Sequence
  Synthetic oligonucleotide; TTA chr11 5364872 5364893 5364889 5364894 +
atatagttttattaaatgattt

SEQ ID NO: 107231 - DNA, 22 bp, Artificial Sequence
  Synthetic oligonucleotide; TTT chr11 5364881 5364902 5364898 5364903 +
tattaaatgattttagtaaata

SEQ ID NO: 107232 - DNA, 22 bp, Artificial Sequence
  Synthetic oligonucleotide; TTT chr11 5364882 5364903 5364899 5364904 +
attaaatgattttagtaaataa

SEQ ID NO: 107233 - DNA, 22 bp, Artificial Sequence
  Synthetic oligonucleotide; TTA chr11 5364883 5364904 5364900 5364905 +
ttaaatgattttagtaaataat

SEQ ID NO: 107234 - DNA, 22 bp, Artificial Sequence
  Synthetic oligonucleotide; TTA chr11 5364886 5364907 5364903 5364908 +
aatgattttagtaaataatttt

SEQ ID NO: 107235 - DNA, 22 bp, Artificial Sequence
  Synthetic oligonucleotide; TTT chr11 5364894 5364915 5364911 5364916 +
tagtaaataatttttaatcatt

SEQ ID NO: 107236 - DNA, 22 bp, Artificial Sequence
  Synthetic oligonucleotide; TTT chr11 5364895 5364916 5364912 5364917 +
agtaaataatttttaatcattg

SEQ ID NO: 107237 - DNA, 22 bp, Artificial Sequence
  Synthetic oligonucleotide; TTA chr11 5364896 5364917 5364913 5364918 +
gtaaataatttttaatcattgt

SEQ ID NO: 107238 - DNA, 22 bp, Artificial Sequence
  Synthetic oligonucleotide; TTT chr11 5364907 5364928 5364924 5364929 +
ttaatcattgtagcttctatgg

SEQ ID NO: 107239 - DNA, 22 bp, Artificial Sequence
  Synthetic oligonucleotide; TTT chr11 5364908 5364929 5364925 5364930 +
taatcattgtagcttctatggt

SEQ ID NO: 107240 - DNA, 22 bp, Artificial Sequence
  Synthetic oligonucleotide; TTT chr11 5364909 5364930 5364926 5364931 +
aatcattgtagcttctatggtg

SEQ ID NO: 107241 - DNA, 22 bp, Artificial Sequence
  Synthetic oligonucleotide; TTA chr11 5364910 5364931 5364927 5364932 +
atcattgtagcttctatggtgg

SEQ ID NO: 107242 - DNA, 22 bp, Artificial Sequence
  Synthetic oligonucleotide; TTG chr11 5364917 5364938 5364934 5364939 +
tagcttctatggtggatacaca

SEQ ID NO: 107243 - DNA, 22 bp, Artificial Sequence
  Synthetic oligonucleotide; CTT chr11 5364923 5364944 5364940 5364945 +
ctatggtggatacacaaggaga

SEQ ID NO: 107244 - DNA, 22 bp, Artificial Sequence
  Synthetic oligonucleotide; TTC chr11 5364924 5364945 5364941 5364946 +
tatggtggatacacaaggagaa

SEQ ID NO: 107245 - DNA, 22 bp, Artificial Sequence
  Synthetic oligonucleotide; CTA chr11 5364926 5364947 5364943 5364948 +
tggtggatacacaaggagaagc

SEQ ID NO: 107246 - DNA, 22 bp, Artificial Sequence
  Synthetic oligonucleotide; CTA chr11 5364985 5365006 5365002 5365007 +
caaggggatttctcaagtaact

SEQ ID NO: 107247 - DNA, 22 bp, Artificial Sequence
  Synthetic oligonucleotide; TTT chr11 5364996 5365017 5365013 5365018 +
ctcaagtaactgcttcttcttg

SEQ ID NO: 107248 - DNA, 22 bp, Artificial Sequence
  Synthetic oligonucleotide; TTC chr11 5364997 5365018 5365014 5365019 +
tcaagtaactgcttcttcttgt

SEQ ID NO: 107249 - DNA, 22 bp, Artificial Sequence
  Synthetic oligonucleotide; CTC chr11 5364999 5365020 5365016 5365021 +
aagtaactgcttcttcttgtca

SEQ ID NO: 107250 - DNA, 22 bp, Artificial Sequence
  Synthetic oligonucleotide; CTG chr11 5365008 5365029 5365025 5365030 +
cttcttcttgtcattcttgtca

SEQ ID NO: 107251 - DNA, 22 bp, Artificial Sequence
  Synthetic oligonucleotide; CTT chr11 5365011 5365032 5365028 5365033 +
cttcttgtcattcttgtcacag

SEQ ID NO: 107252 - DNA, 22 bp, Artificial Sequence
  Synthetic oligonucleotide; TTC chr11 5365012 5365033 5365029 5365034 +
ttcttgtcattcttgtcacagc

SEQ ID NO: 107253 - DNA, 22 bp, Artificial Sequence
  Synthetic oligonucleotide; CTT chr11 5365014 5365035 5365031 5365036 +
cttgtcattcttgtcacagcaa

SEQ ID NO: 107254 - DNA, 22 bp, Artificial Sequence
  Synthetic oligonucleotide; TTC chr11 5365015 5365036 5365032 5365037 +
ttgtcattcttgtcacagcaat

SEQ ID NO: 107255 - DNA, 22 bp, Artificial Sequence
  Synthetic oligonucleotide; CTT chr11 5365017 5365038 5365034 5365039 +
gtcattcttgtcacagcaatga

SEQ ID NO: 107256 - DNA, 22 bp, Artificial Sequence
  Synthetic oligonucleotide; TTG chr11 5365018 5365039 5365035 5365040 +
tcattcttgtcacagcaatgaa

SEQ ID NO: 107257 - DNA, 22 bp, Artificial Sequence
  Synthetic oligonucleotide; TTC chr11 5365024 5365045 5365041 5365046 +
ttgtcacagcaatgaatcttgg

SEQ ID NO: 107258 - DNA, 22 bp, Artificial Sequence
  Synthetic oligonucleotide; CTT chr11 5365026 5365047 5365043 5365048 +
gtcacagcaatgaatcttgggc

SEQ ID NO: 107259 - DNA, 22 bp, Artificial Sequence
  Synthetic oligonucleotide; TTG chr11 5365027 5365048 5365044 5365049 +
tcacagcaatgaatcttgggca

SEQ ID NO: 107260 - DNA, 22 bp, Artificial Sequence
  Synthetic oligonucleotide; CTT chr11 5365044 5365065 5365061 5365066 +
gggcaaataagggacactcaat

SEQ ID NO: 107261 - DNA, 22 bp, Artificial Sequence
  Synthetic oligonucleotide; TTG chr11 5365045 5365066 5365062 5365067 +
ggcaaataagggacactcaata

SEQ ID NO: 107262 - DNA, 22 bp, Artificial Sequence
  Synthetic oligonucleotide; CTC chr11 5365063 5365084 5365080 5365085 +
aataaaaccaaatgtgtcaata

SEQ ID NO: 107263 - DNA, 22 bp, Artificial Sequence
  Synthetic oligonucleotide; CTT chr11 5365094 5365115 5365111 5365116 +
gtaataaccttgaattcaagtg

SEQ ID NO: 107264 - DNA, 22 bp, Artificial Sequence
  Synthetic oligonucleotide; TTG chr11 5365095 5365116 5365112 5365117 +
taataaccttgaattcaagtgg

SEQ ID NO: 107265 - DNA, 22 bp, Artificial Sequence
  Synthetic oligonucleotide; CTT chr11 5365105 5365126 5365122 5365127 +
gaattcaagtggtagcttatca

SEQ ID NO: 107266 - DNA, 22 bp, Artificial Sequence
  Synthetic oligonucleotide; TTG chr11 5365106 5365127 5365123 5365128 +
aattcaagtggtagcttatcac

SEQ ID NO: 107267 - DNA, 22 bp, Artificial Sequence
  Synthetic oligonucleotide; TTC chr11 5365111 5365132 5365128 5365133 +
aagtggtagcttatcacaactg

SEQ ID NO: 107268 - DNA, 22 bp, Artificial Sequence
  Synthetic oligonucleotide; CTT chr11 5365123 5365144 5365140 5365145 +
atcacaactgctaaataacttt

SEQ ID NO: 107269 - DNA, 22 bp, Artificial Sequence
  Synthetic oligonucleotide; TTA chr11 5365124 5365145 5365141 5365146 +
tcacaactgctaaataactttt

SEQ ID NO: 107270 - DNA, 22 bp, Artificial Sequence
  Synthetic oligonucleotide; CTG chr11 5365133 5365154 5365150 5365155 +
ctaaataacttttcttctttgt

SEQ ID NO: 107271 - DNA, 22 bp, Artificial Sequence
  Synthetic oligonucleotide; CTA chr11 5365136 5365157 5365153 5365158 +
aataacttttcttctttgtctg

SEQ ID NO: 107272 - DNA, 22 bp, Artificial Sequence
  Synthetic oligonucleotide; CTT chr11 5365144 5365165 5365161 5365166 +
ttcttctttgtctggtgagttc

SEQ ID NO: 107273 - DNA, 22 bp, Artificial Sequence
  Synthetic oligonucleotide; TTT chr11 5365145 5365166 5365162 5365167 +
tcttctttgtctggtgagttct

SEQ ID NO: 107274 - DNA, 22 bp, Artificial Sequence
  Synthetic oligonucleotide; TTT chr11 5365146 5365167 5365163 5365168 +
cttctttgtctggtgagttctg

SEQ ID NO: 107275 - DNA, 22 bp, Artificial Sequence
  Synthetic oligonucleotide; TTC chr11 5365147 5365168 5365164 5365169 +
ttctttgtctggtgagttctgt

SEQ ID NO: 107276 - DNA, 22 bp, Artificial Sequence
  Synthetic oligonucleotide; CTT chr11 5365149 5365170 5365166 5365171 +
ctttgtctggtgagttctgtag

SEQ ID NO: 107277 - DNA, 22 bp, Artificial Sequence
  Synthetic oligonucleotide; TTC chr11 5365150 5365171 5365167 5365172 +
tttgtctggtgagttctgtaga

SEQ ID NO: 107278 - DNA, 22 bp, Artificial Sequence
  Synthetic oligonucleotide; CTT chr11 5365152 5365173 5365169 5365174 +
tgtctggtgagttctgtagaca

SEQ ID NO: 107279 - DNA, 22 bp, Artificial Sequence
  Synthetic oligonucleotide; TTT chr11 5365153 5365174 5365170 5365175 +
gtctggtgagttctgtagacat

SEQ ID NO: 107280 - DNA, 22 bp, Artificial Sequence
  Synthetic oligonucleotide; TTG chr11 5365154 5365175 5365171 5365176 +
tctggtgagttctgtagacatt

SEQ ID NO: 107281 - DNA, 22 bp, Artificial Sequence
  Synthetic oligonucleotide; CTG chr11 5365158 5365179 5365175 5365180 +
gtgagttctgtagacatttaga

SEQ ID NO: 107282 - DNA, 22 bp, Artificial Sequence
  Synthetic oligonucleotide; TTC chr11 5365166 5365187 5365183 5365188 +
tgtagacatttagagtgtaggg

SEQ ID NO: 107283 - DNA, 22 bp, Artificial Sequence
  Synthetic oligonucleotide; CTG chr11 5365168 5365189 5365185 5365190 +
tagacatttagagtgtagggct

SEQ ID NO: 107284 - DNA, 22 bp, Artificial Sequence
  Synthetic oligonucleotide; TTT chr11 5365177 5365198 5365194 5365199 +
agagtgtagggctggcaactgt

SEQ ID NO: 107285 - DNA, 22 bp, Artificial Sequence
  Synthetic oligonucleotide; TTA chr11 5365178 5365199 5365195 5365200 +
gagtgtagggctggcaactgtg

SEQ ID NO: 107286 - DNA, 22 bp, Artificial Sequence
  Synthetic oligonucleotide; CTG chr11 5365191 5365212 5365208 5365213 +
gcaactgtgtttaaaataagtt

SEQ ID NO: 107287 - DNA, 22 bp, Artificial Sequence
  Synthetic oligonucleotide; CTG chr11 5365198 5365219 5365215 5365220 +
tgtttaaaataagttgtctatt

SEQ ID NO: 107288 - DNA, 22 bp, Artificial Sequence
  Synthetic oligonucleotide; TTT chr11 5365203 5365224 5365220 5365225 +
aaaataagttgtctattatatc

SEQ ID NO: 107289 - DNA, 22 bp, Artificial Sequence
  Synthetic oligonucleotide; TTA chr11 5365204 5365225 5365221 5365226 +
aaataagttgtctattatatca

SEQ ID NO: 107290 - DNA, 22 bp, Artificial Sequence
  Synthetic oligonucleotide; TTG chr11 5365214 5365235 5365231 5365236 +
tctattatatcaggactccatg

SEQ ID NO: 107291 - DNA, 22 bp, Artificial Sequence
  Synthetic oligonucleotide; CTA chr11 5365218 5365239 5365235 5365240 +
ttatatcaggactccatggaaa

SEQ ID NO: 107292 - DNA, 22 bp, Artificial Sequence
  Synthetic oligonucleotide; TTA chr11 5365221 5365242 5365238 5365243 +
tatcaggactccatggaaacat

SEQ ID NO: 107293 - DNA, 22 bp, Artificial Sequence
  Synthetic oligonucleotide; CTC chr11 5365232 5365253 5365249 5365254 +
catggaaacatctagtgaacca

SEQ ID NO: 107294 - DNA, 22 bp, Artificial Sequence
  Synthetic oligonucleotide; CTA chr11 5365246 5365267 5365263 5365268 +
gtgaaccagaagggctggtggt

SEQ ID NO: 107295 - DNA, 22 bp, Artificial Sequence
  Synthetic oligonucleotide; CTG chr11 5365263 5365284 5365280 5365285 +
gtggtgagaacagtgttattag

SEQ ID NO: 107296 - DNA, 22 bp, Artificial Sequence
  Synthetic oligonucleotide; TTA chr11 5365281 5365302 5365298 5365303 +
ttagaataccactggtgtttgc

SEQ ID NO: 107297 - DNA, 22 bp, Artificial Sequence
  Synthetic oligonucleotide; TTA chr11 5365284 5365305 5365301 5365306 +
gaataccactggtgtttgccag

SEQ ID NO: 107298 - DNA, 22 bp, Artificial Sequence
  Synthetic oligonucleotide; CTG chr11 5365295 5365316 5365312 5365317 +
gtgtttgccagctgtggaaaac

SEQ ID NO: 107299 - DNA, 22 bp, Artificial Sequence
  Synthetic oligonucleotide; TTT chr11 5365301 5365322 5365318 5365323 +
gccagctgtggaaaacatgggt

SEQ ID NO: 107300 - DNA, 22 bp, Artificial Sequence
  Synthetic oligonucleotide; TTG chr11 5365302 5365323 5365319 5365324 +
ccagctgtggaaaacatgggta

SEQ ID NO: 107301 - DNA, 22 bp, Artificial Sequence
  Synthetic oligonucleotide; CTG chr11 5365309 5365330 5365326 5365331 +
tggaaaacatgggtatagagca

SEQ ID NO: 107302 - DNA, 22 bp, Artificial Sequence
  Synthetic oligonucleotide; CTG chr11 5365338 5365359 5365355 5365360 +
atgccaaaggcaaaccaatgca

SEQ ID NO: 107303 - DNA, 22 bp, Artificial Sequence
  Synthetic oligonucleotide; CTG chr11 5365366 5365387 5365383 5365388 +
gtcccggcatggcaacaagtaa

SEQ ID NO: 107304 - DNA, 22 bp, Artificial Sequence
  Synthetic oligonucleotide; CTG chr11 5365424 5365445 5365441 5365446 +
tagaaatcgctgtggagagatg

SEQ ID NO: 107305 - DNA, 22 bp, Artificial Sequence
  Synthetic oligonucleotide; CTG chr11 5365436 5365457 5365453 5365458 +
tggagagatgcatttagatgaa

SEQ ID NO: 107306 - DNA, 22 bp, Artificial Sequence
  Synthetic oligonucleotide; TTT chr11 5365451 5365472 5365468 5365473 +
agatgaaaaggtaacccaattc

SEQ ID NO: 107307 - DNA, 22 bp, Artificial Sequence
  Synthetic oligonucleotide; TTA chr11 5365452 5365473 5365469 5365474 +
gatgaaaaggtaacccaattct

SEQ ID NO: 107308 - DNA, 22 bp, Artificial Sequence
  Synthetic oligonucleotide; TTC chr11 5365473 5365494 5365490 5365495 +
tggtctgccagtcagcaaccat

SEQ ID NO: 107309 - DNA, 22 bp, Artificial Sequence
  Synthetic oligonucleotide; CTG chr11 5365475 5365496 5365492 5365497 +
gtctgccagtcagcaaccattt

SEQ ID NO: 107310 - DNA, 22 bp, Artificial Sequence
  Synthetic oligonucleotide; CTG chr11 5365480 5365501 5365497 5365502 +
ccagtcagcaaccattttcctg

SEQ ID NO: 107311 - DNA, 22 bp, Artificial Sequence
  Synthetic oligonucleotide; TTT chr11 5365497 5365518 5365514 5365519 +
tcctgtctatgcacaggatagg

SEQ ID NO: 107312 - DNA, 22 bp, Artificial Sequence
  Synthetic oligonucleotide; TTT chr11 5365498 5365519 5365515 5365520 +
cctgtctatgcacaggatagga

SEQ ID NO: 107313 - DNA, 22 bp, Artificial Sequence
  Synthetic oligonucleotide; TTC chr11 5365499 5365520 5365516 5365521 +
ctgtctatgcacaggataggat

SEQ ID NO: 107314 - DNA, 22 bp, Artificial Sequence
  Synthetic oligonucleotide; CTG chr11 5365502 5365523 5365519 5365524 +
tctatgcacaggataggatatg

SEQ ID NO: 107315 - DNA, 22 bp, Artificial Sequence
  Synthetic oligonucleotide; CTA chr11 5365506 5365527 5365523 5365528 +
tgcacaggataggatatggctg

SEQ ID NO: 107316 - DNA, 22 bp, Artificial Sequence
  Synthetic oligonucleotide; CTG chr11 5365528 5365549 5365545 5365550 +
tactacctcgaagttttttcac

SEQ ID NO: 107317 - DNA, 22 bp, Artificial Sequence
  Synthetic oligonucleotide; CTA chr11 5365533 5365554 5365550 5365555 +
cctcgaagttttttcacaaagc

SEQ ID NO: 107318 - DNA, 22 bp, Artificial Sequence
  Synthetic oligonucleotide; CTC chr11 5365537 5365558 5365554 5365559 +
gaagttttttcacaaagcatat

SEQ ID NO: 107319 - DNA, 22 bp, Artificial Sequence
  Synthetic oligonucleotide; TTT chr11 5365544 5365565 5365561 5365566 +
tttcacaaagcatattgataca

SEQ ID NO: 107320 - DNA, 22 bp, Artificial Sequence
  Synthetic oligonucleotide; TTT chr11 5365545 5365566 5365562 5365567 +
ttcacaaagcatattgatacac

SEQ ID NO: 107321 - DNA, 22 bp, Artificial Sequence
  Synthetic oligonucleotide; TTT chr11 5365546 5365567 5365563 5365568 +
tcacaaagcatattgatacaca

SEQ ID NO: 107322 - DNA, 22 bp, Artificial Sequence
  Synthetic oligonucleotide; TTT chr11 5365547 5365568 5365564 5365569 +
cacaaagcatattgatacacaa

SEQ ID NO: 107323 - DNA, 22 bp, Artificial Sequence
  Synthetic oligonucleotide; TTC chr11 5365548 5365569 5365565 5365570 +
acaaagcatattgatacacaaa

SEQ ID NO: 107324 - DNA, 22 bp, Artificial Sequence
  Synthetic oligonucleotide; TTG chr11 5365561 5365582 5365578 5365583 +
atacacaaaaacattatcgaga

SEQ ID NO: 107325 - DNA, 22 bp, Artificial Sequence
  Synthetic oligonucleotide; TTA chr11 5365577 5365598 5365594 5365599 +
tcgagatgcacatgacatcggt

SEQ ID NO: 107326 - DNA, 22 bp, Artificial Sequence
  Synthetic oligonucleotide; TTT chr11 5365601 5365622 5365618 5365623 +
gccatgacagggctcttggtgt

SEQ ID NO: 107327 - DNA, 22 bp, Artificial Sequence
  Synthetic oligonucleotide; TTG chr11 5365602 5365623 5365619 5365624 +
ccatgacagggctcttggtgtg

SEQ ID NO: 107328 - DNA, 22 bp, Artificial Sequence
  Synthetic oligonucleotide; CTC chr11 5365616 5365637 5365633 5365638 +
ttggtgtgaatctgactactgt

SEQ ID NO: 107329 - DNA, 22 bp, Artificial Sequence
  Synthetic oligonucleotide; CTT chr11 5365618 5365639 5365635 5365640 +
ggtgtgaatctgactactgtct

SEQ ID NO: 107330 - DNA, 22 bp, Artificial Sequence
  Synthetic oligonucleotide; TTG chr11 5365619 5365640 5365636 5365641 +
gtgtgaatctgactactgtctt

SEQ ID NO: 107331 - DNA, 22 bp, Artificial Sequence
  Synthetic oligonucleotide; CTG chr11 5365630 5365651 5365647 5365652 +
actactgtcttaacacacctcc

SEQ ID NO: 107332 - DNA, 22 bp, Artificial Sequence
  Synthetic oligonucleotide; CTA chr11 5365634 5365655 5365651 5365656 +
ctgtcttaacacacctccaaat

SEQ ID NO: 107333 - DNA, 22 bp, Artificial Sequence
  Synthetic oligonucleotide; CTG chr11 5365637 5365658 5365654 5365659 +
tcttaacacacctccaaatgtg

SEQ ID NO: 107334 - DNA, 22 bp, Artificial Sequence
  Synthetic oligonucleotide; CTT chr11 5365641 5365662 5365658 5365663 +
aacacacctccaaatgtgttga

SEQ ID NO: 107335 - DNA, 22 bp, Artificial Sequence
  Synthetic oligonucleotide; TTA chr11 5365642 5365663 5365659 5365664 +
acacacctccaaatgtgttgag

SEQ ID NO: 107336 - DNA, 22 bp, Artificial Sequence
  Synthetic oligonucleotide; CTC chr11 5365651 5365672 5365668 5365673 +
caaatgtgttgaggccctaatg

SEQ ID NO: 107337 - DNA, 22 bp, Artificial Sequence
  Synthetic oligonucleotide; TTG chr11 5365662 5365683 5365679 5365684 +
aggccctaatgagaaacatccc

SEQ ID NO: 107338 - DNA, 22 bp, Artificial Sequence
  Synthetic oligonucleotide; CTA chr11 5365670 5365691 5365687 5365692 +
atgagaaacatccctgatttta

SEQ ID NO: 107339 - DNA, 22 bp, Artificial Sequence
  Synthetic oligonucleotide; CTG chr11 5365686 5365707 5365703 5365708 +
attttattcaacccaaactgat

SEQ ID NO: 107340 - DNA, 22 bp, Artificial Sequence
  Synthetic oligonucleotide; TTT chr11 5365690 5365711 5365707 5365712 +
tattcaacccaaactgatacat

SEQ ID NO: 107341 - DNA, 22 bp, Artificial Sequence
  Synthetic oligonucleotide; TTT chr11 5365691 5365712 5365708 5365713 +
attcaacccaaactgatacatt

SEQ ID NO: 107342 - DNA, 22 bp, Artificial Sequence
  Synthetic oligonucleotide; TTA chr11 5365692 5365713 5365709 5365714 +
ttcaacccaaactgatacattt

SEQ ID NO: 107343 - DNA, 22 bp, Artificial Sequence
  Synthetic oligonucleotide; TTC chr11 5365695 5365716 5365712 5365717 +
aacccaaactgatacatttaaa

SEQ ID NO: 107344 - DNA, 22 bp, Artificial Sequence
  Synthetic oligonucleotide; CTG chr11 5365706 5365727 5365723 5365728 +
atacatttaaattgtcctgtaa

SEQ ID NO: 107345 - DNA, 22 bp, Artificial Sequence
  Synthetic oligonucleotide; TTT chr11 5365714 5365735 5365731 5365736 +
aaattgtcctgtaattatttaa

SEQ ID NO: 107346 - DNA, 22 bp, Artificial Sequence
  Synthetic oligonucleotide; TTA chr11 5365715 5365736 5365732 5365737 +
aattgtcctgtaattatttaaa

SEQ ID NO: 107347 - DNA, 22 bp, Artificial Sequence
  Synthetic oligonucleotide; TTG chr11 5365720 5365741 5365737 5365742 +
tcctgtaattatttaaaaaata

SEQ ID NO: 107348 - DNA, 22 bp, Artificial Sequence
  Synthetic oligonucleotide; CTG chr11 5365725 5365746 5365742 5365747 +
taattatttaaaaaatagatat

SEQ ID NO: 107349 - DNA, 22 bp, Artificial Sequence
  Synthetic oligonucleotide; TTA chr11 5365731 5365752 5365748 5365753 +
tttaaaaaatagatataagctt

SEQ ID NO: 107350 - DNA, 22 bp, Artificial Sequence
  Synthetic oligonucleotide; TTT chr11 5365734 5365755 5365751 5365756 +
aaaaaatagatataagcttttg

SEQ ID NO: 107351 - DNA, 22 bp, Artificial Sequence
  Synthetic oligonucleotide; TTA chr11 5365735 5365756 5365752 5365757 +
aaaaatagatataagcttttga

SEQ ID NO: 107352 - DNA, 22 bp, Artificial Sequence
  Synthetic oligonucleotide; CTT chr11 5365753 5365774 5365770 5365775 +
ttgagggcagatattataatcc

SEQ ID NO: 107353 - DNA, 22 bp, Artificial Sequence
  Synthetic oligonucleotide; TTT chr11 5365754 5365775 5365771 5365776 +
tgagggcagatattataatcca

SEQ ID NO: 107354 - DNA, 22 bp, Artificial Sequence
  Synthetic oligonucleotide; TTT chr11 5365755 5365776 5365772 5365777 +
gagggcagatattataatccag

SEQ ID NO: 107355 - DNA, 22 bp, Artificial Sequence
  Synthetic oligonucleotide; TTG chr11 5365756 5365777 5365773 5365778 +
agggcagatattataatccagg

SEQ ID NO: 107356 - DNA, 22 bp, Artificial Sequence
  Synthetic oligonucleotide; TTA chr11 5365769 5365790 5365786 5365791 +
taatccaggcatcacctccatt

SEQ ID NO: 107357 - DNA, 22 bp, Artificial Sequence
  Synthetic oligonucleotide; CTC chr11 5365787 5365808 5365804 5365809 +
cattacccacattgtctagcac

SEQ ID NO: 107358 - DNA, 22 bp, Artificial Sequence
  Synthetic oligonucleotide; TTA chr11 5365792 5365813 5365809 5365814 +
cccacattgtctagcacattat

SEQ ID NO: 107359 - DNA, 22 bp, Artificial Sequence
  Synthetic oligonucleotide; TTG chr11 5365801 5365822 5365818 5365823 +
tctagcacattatagatgctta

SEQ ID NO: 107360 - DNA, 22 bp, Artificial Sequence
  Synthetic oligonucleotide; CTA chr11 5365805 5365826 5365822 5365827 +
gcacattatagatgcttagtat

SEQ ID NO: 107361 - DNA, 22 bp, Artificial Sequence
  Synthetic oligonucleotide; TTA chr11 5365813 5365834 5365830 5365835 +
tagatgcttagtatgtgctggc

SEQ ID NO: 107362 - DNA, 22 bp, Artificial Sequence
  Synthetic oligonucleotide; CTT chr11 5365822 5365843 5365839 5365844 +
agtatgtgctggcttgatgaca

SEQ ID NO: 107363 - DNA, 22 bp, Artificial Sequence
  Synthetic oligonucleotide; TTA chr11 5365823 5365844 5365840 5365845 +
gtatgtgctggcttgatgacag

SEQ ID NO: 107364 - DNA, 22 bp, Artificial Sequence
  Synthetic oligonucleotide; CTG chr11 5365833 5365854 5365850 5365855 +
gcttgatgacaggatgaagttt

SEQ ID NO: 107365 - DNA, 22 bp, Artificial Sequence
  Synthetic oligonucleotide; CTT chr11 5365837 5365858 5365854 5365859 +
gatgacaggatgaagtttaagt

SEQ ID NO: 107366 - DNA, 22 bp, Artificial Sequence
  Synthetic oligonucleotide; TTG chr11 5365838 5365859 5365855 5365860 +
atgacaggatgaagtttaagtt

SEQ ID NO: 107367 - DNA, 22 bp, Artificial Sequence
  Synthetic oligonucleotide; TTT chr11 5365855 5365876 5365872 5365877 +
aagttgctaaccattcttagag

SEQ ID NO: 107368 - DNA, 22 bp, Artificial Sequence
  Synthetic oligonucleotide; TTA chr11 5365856 5365877 5365873 5365878 +
agttgctaaccattcttagagg

SEQ ID NO: 107369 - DNA, 22 bp, Artificial Sequence
  Synthetic oligonucleotide; TTG chr11 5365861 5365882 5365878 5365883 +
ctaaccattcttagaggaactc

SEQ ID NO: 107370 - DNA, 22 bp, Artificial Sequence
  Synthetic oligonucleotide; CTA chr11 5365864 5365885 5365881 5365886 +
accattcttagaggaactctgc

SEQ ID NO: 107371 - DNA, 22 bp, Artificial Sequence
  Synthetic oligonucleotide; TTC chr11 5365871 5365892 5365888 5365893 +
ttagaggaactctgcttacctc

SEQ ID NO: 107372 - DNA, 22 bp, Artificial Sequence
  Synthetic oligonucleotide; CTT chr11 5365873 5365894 5365890 5365895 +
agaggaactctgcttacctctt

SEQ ID NO: 107373 - DNA, 22 bp, Artificial Sequence
  Synthetic oligonucleotide; TTA chr11 5365874 5365895 5365891 5365896 +
gaggaactctgcttacctcttg

SEQ ID NO: 107374 - DNA, 22 bp, Artificial Sequence
  Synthetic oligonucleotide; CTC chr11 5365883 5365904 5365900 5365905 +
tgcttacctcttgggttctgaa

SEQ ID NO: 107375 - DNA, 22 bp, Artificial Sequence
  Synthetic oligonucleotide; CTG chr11 5365885 5365906 5365902 5365907 +
cttacctcttgggttctgaagg

SEQ ID NO: 107376 - DNA, 22 bp, Artificial Sequence
  Synthetic oligonucleotide; CTT chr11 5365888 5365909 5365905 5365910 +
acctcttgggttctgaagggtc

SEQ ID NO: 107377 - DNA, 22 bp, Artificial Sequence
  Synthetic oligonucleotide; TTA chr11 5365889 5365910 5365906 5365911 +
cctcttgggttctgaagggtct

SEQ ID NO: 107378 - DNA, 22 bp, Artificial Sequence
  Synthetic oligonucleotide; CTC chr11 5365893 5365914 5365910 5365915 +
ttgggttctgaagggtctgact

SEQ ID NO: 107379 - DNA, 22 bp, Artificial Sequence
  Synthetic oligonucleotide; CTT chr11 5365895 5365916 5365912 5365917 +
gggttctgaagggtctgactga

SEQ ID NO: 107380 - DNA, 22 bp, Artificial Sequence
  Synthetic oligonucleotide; TTG chr11 5365896 5365917 5365913 5365918 +
ggttctgaagggtctgactgac

SEQ ID NO: 107381 - DNA, 22 bp, Artificial Sequence
  Synthetic oligonucleotide; TTC chr11 5365901 5365922 5365918 5365923 +
tgaagggtctgactgaccagag

SEQ ID NO: 107382 - DNA, 22 bp, Artificial Sequence
  Synthetic oligonucleotide; CTG chr11 5365903 5365924 5365920 5365925 +
aagggtctgactgaccagagag

SEQ ID NO: 107383 - DNA, 22 bp, Artificial Sequence
  Synthetic oligonucleotide; CTG chr11 5365912 5365933 5365929 5365934 +
actgaccagagaggcatgaagg

SEQ ID NO: 107384 - DNA, 22 bp, Artificial Sequence
  Synthetic oligonucleotide; CTG chr11 5365916 5365937 5365933 5365938 +
accagagaggcatgaagggggc

SEQ ID NO: 107385 - DNA, 22 bp, Artificial Sequence
  Synthetic oligonucleotide; CTC chr11 5365944 5365965 5365961 5365966 +
agcatgatcaccagcactgaga

SEQ ID NO: 107386 - DNA, 22 bp, Artificial Sequence
  Synthetic oligonucleotide; CTG chr11 5365963 5365984 5365980 5365985 +
agaaccacacaaactgaagaac

SEQ ID NO: 107387 - DNA, 22 bp, Artificial Sequence
  Synthetic oligonucleotide; CTG chr11 5365979 5366000 5365996 5366001 +
aagaactgctaggtgctggcta

SEQ ID NO: 107388 - DNA, 22 bp, Artificial Sequence
  Synthetic oligonucleotide; CTG chr11 5365987 5366008 5366004 5366009 +
ctaggtgctggctagtgggaga

SEQ ID NO: 107389 - DNA, 22 bp, Artificial Sequence
  Synthetic oligonucleotide; CTA chr11 5365990 5366011 5366007 5366012 +
ggtgctggctagtgggagactt

SEQ ID NO: 107390 - DNA, 22 bp, Artificial Sequence
  Synthetic oligonucleotide; CTG chr11 5365997 5366018 5366014 5366019 +
gctagtgggagacttaagacca

SEQ ID NO: 107391 - DNA, 22 bp, Artificial Sequence
  Synthetic oligonucleotide; CTA chr11 5366001 5366022 5366018 5366023 +
gtgggagacttaagaccaacca

SEQ ID NO: 107392 - DNA, 22 bp, Artificial Sequence
  Synthetic oligonucleotide; CTT chr11 5366012 5366033 5366029 5366034 +
aagaccaaccaaccaccctatg

SEQ ID NO: 107393 - DNA, 22 bp, Artificial Sequence
  Synthetic oligonucleotide; TTA chr11 5366013 5366034 5366030 5366035 +
agaccaaccaaccaccctatgg

SEQ ID NO: 107394 - DNA, 22 bp, Artificial Sequence
  Synthetic oligonucleotide; CTA chr11 5366032 5366053 5366049 5366054 +
tggagcagccaggtaatcagca

SEQ ID NO: 107395 - DNA, 22 bp, Artificial Sequence
  Synthetic oligonucleotide; TTT chr11 5366059 5366080 5366076 5366081 +
gggggctgttaatggaagagtt

SEQ ID NO: 107396 - DNA, 22 bp, Artificial Sequence
  Synthetic oligonucleotide; TTG chr11 5366060 5366081 5366077 5366082 +
ggggctgttaatggaagagttg

SEQ ID NO: 107397 - DNA, 22 bp, Artificial Sequence
  Synthetic oligonucleotide; CTG chr11 5366067 5366088 5366084 5366089 +
ttaatggaagagttgctgaggg

SEQ ID NO: 107398 - DNA, 22 bp, Artificial Sequence
  Synthetic oligonucleotide; TTA chr11 5366070 5366091 5366087 5366092 +
atggaagagttgctgaggggta

SEQ ID NO: 107399 - DNA, 22 bp, Artificial Sequence
  Synthetic oligonucleotide; TTG chr11 5366082 5366103 5366099 5366104 +
ctgaggggtatgcttacttgtc

SEQ ID NO: 107400 - DNA, 22 bp, Artificial Sequence
  Synthetic oligonucleotide; CTG chr11 5366085 5366106 5366102 5366107 +
aggggtatgcttacttgtccag

SEQ ID NO: 107401 - DNA, 22 bp, Artificial Sequence
  Synthetic oligonucleotide; CTT chr11 5366097 5366118 5366114 5366119 +
acttgtccagttgtgtgtgact

SEQ ID NO: 107402 - DNA, 22 bp, Artificial Sequence
  Synthetic oligonucleotide; TTA chr11 5366098 5366119 5366115 5366120 +
cttgtccagttgtgtgtgactt

SEQ ID NO: 107403 - DNA, 22 bp, Artificial Sequence
  Synthetic oligonucleotide; CTT chr11 5366101 5366122 5366118 5366123 +
gtccagttgtgtgtgacttaga

SEQ ID NO: 107404 - DNA, 22 bp, Artificial Sequence
  Synthetic oligonucleotide; TTG chr11 5366102 5366123 5366119 5366124 +
tccagttgtgtgtgacttagag

SEQ ID NO: 107405 - DNA, 22 bp, Artificial Sequence
  Synthetic oligonucleotide; TTG chr11 5366110 5366131 5366127 5366132 +
tgtgtgacttagaggtgaaccc

SEQ ID NO: 107406 - DNA, 22 bp, Artificial Sequence
  Synthetic oligonucleotide; CTT chr11 5366120 5366141 5366137 5366142 +
agaggtgaacccagtgggcaaa

SEQ ID NO: 107407 - DNA, 22 bp, Artificial Sequence
  Synthetic oligonucleotide; TTA chr11 5366121 5366142 5366138 5366143 +
gaggtgaacccagtgggcaaaa

SEQ ID NO: 107408 - DNA, 22 bp, Artificial Sequence
  Synthetic oligonucleotide; CTT chr11 5366179 5366200 5366196 5366201 +
aagtaggaagttaaggatgagg

SEQ ID NO: 107409 - DNA, 22 bp, Artificial Sequence
  Synthetic oligonucleotide; TTA chr11 5366180 5366201 5366197 5366202 +
agtaggaagttaaggatgaggg

SEQ ID NO: 107410 - DNA, 22 bp, Artificial Sequence
  Synthetic oligonucleotide; TTA chr11 5366192 5366213 5366209 5366214 +
aggatgagggaaacaggaagga

SEQ ID NO: 107411 - DNA, 22 bp, Artificial Sequence
  Synthetic oligonucleotide; CTG chr11 5366277 5366298 5366294 5366299 +
aaaaggagctcaagggaaggtt

SEQ ID NO: 107412 - DNA, 22 bp, Artificial Sequence
  Synthetic oligonucleotide; CTC chr11 5366288 5366309 5366305 5366310 +
aagggaaggttcctctgtgggt

SEQ ID NO: 107413 - DNA, 22 bp, Artificial Sequence
  Synthetic oligonucleotide; TTC chr11 5366300 5366321 5366317 5366322 +
ctctgtgggtagcctgttaaag

SEQ ID NO: 107414 - DNA, 22 bp, Artificial Sequence
  Synthetic oligonucleotide; CTC chr11 5366303 5366324 5366320 5366325 +
tgtgggtagcctgttaaagaaa

SEQ ID NO: 107415 - DNA, 22 bp, Artificial Sequence
  Synthetic oligonucleotide; CTG chr11 5366305 5366326 5366322 5366327 +
tgggtagcctgttaaagaaaag

SEQ ID NO: 107416 - DNA, 22 bp, Artificial Sequence
  Synthetic oligonucleotide; CTG chr11 5366316 5366337 5366333 5366338 +
ttaaagaaaaggctacattaca

SEQ ID NO: 107417 - DNA, 22 bp, Artificial Sequence
  Synthetic oligonucleotide; TTA chr11 5366319 5366340 5366336 5366341 +
aagaaaaggctacattacagac

SEQ ID NO: 107418 - DNA, 22 bp, Artificial Sequence
  Synthetic oligonucleotide; CTA chr11 5366331 5366352 5366348 5366353 +
cattacagactcatgcctgtaa

SEQ ID NO: 107419 - DNA, 22 bp, Artificial Sequence
  Synthetic oligonucleotide; TTA chr11 5366336 5366357 5366353 5366358 +
cagactcatgcctgtaatccca

SEQ ID NO: 107420 - DNA, 22 bp, Artificial Sequence
  Synthetic oligonucleotide; CTC chr11 5366343 5366364 5366360 5366365 +
atgcctgtaatcccagcacttt

SEQ ID NO: 107421 - DNA, 22 bp, Artificial Sequence
  Synthetic oligonucleotide; CTG chr11 5366350 5366371 5366367 5366372 +
taatcccagcactttgggtggc

SEQ ID NO: 107422 - DNA, 22 bp, Artificial Sequence
  Synthetic oligonucleotide; CTT chr11 5366364 5366385 5366381 5366386 +
tgggtggctgaggcaggaggat

SEQ ID NO: 107423 - DNA, 22 bp, Artificial Sequence
  Synthetic oligonucleotide; TTT chr11 5366365 5366386 5366382 5366387 +
gggtggctgaggcaggaggatc

SEQ ID NO: 107424 - DNA, 22 bp, Artificial Sequence
  Synthetic oligonucleotide; TTG chr11 5366366 5366387 5366383 5366388 +
ggtggctgaggcaggaggatca

SEQ ID NO: 107425 - DNA, 22 bp, Artificial Sequence
  Synthetic oligonucleotide; CTG chr11 5366374 5366395 5366391 5366396 +
aggcaggaggatcacctgaggg

SEQ ID NO: 107426 - DNA, 22 bp, Artificial Sequence
  Synthetic oligonucleotide; CTG chr11 5366392 5366413 5366409 5366414 +
agggcaagagttcgagaccagc

SEQ ID NO: 107427 - DNA, 22 bp, Artificial Sequence
  Synthetic oligonucleotide; TTC chr11 5366405 5366426 5366422 5366427 +
gagaccagcctgaccaacatgg

SEQ ID NO: 107428 - DNA, 22 bp, Artificial Sequence
  Synthetic oligonucleotide; CTG chr11 5366417 5366438 5366434 5366439 +
accaacatggtgaaaccctgtc

SEQ ID NO: 107429 - DNA, 22 bp, Artificial Sequence
  Synthetic oligonucleotide; CTG chr11 5366437 5366458 5366454 5366459 +
tctctaataaaaatacaaaaaa

SEQ ID NO: 107430 - DNA, 22 bp, Artificial Sequence
  Synthetic oligonucleotide; CTC chr11 5366441 5366462 5366458 5366463 +
taataaaaatacaaaaaaatta

SEQ ID NO: 107431 - DNA, 22 bp, Artificial Sequence
  Synthetic oligonucleotide; CTA chr11 5366443 5366464 5366460 5366465 +
ataaaaatacaaaaaaattagc

SEQ ID NO: 107432 - DNA, 22 bp, Artificial Sequence
  Synthetic oligonucleotide; TTA chr11 5366463 5366484 5366480 5366485 +
gcagggcctggtggcagatgcc

SEQ ID NO: 107433 - DNA, 22 bp, Artificial Sequence
  Synthetic oligonucleotide; CTG chr11 5366473 5366494 5366490 5366495 +
gtggcagatgcctgtaattgca

SEQ ID NO: 107434 - DNA, 22 bp, Artificial Sequence
  Synthetic oligonucleotide; CTG chr11 5366487 5366508 5366504 5366509 +
taattgcagctacacaggaggc

SEQ ID NO: 107435 - DNA, 22 bp, Artificial Sequence
  Synthetic oligonucleotide; TTG chr11 5366493 5366514 5366510 5366515 +
cagctacacaggaggctgaggt

SEQ ID NO: 107436 - DNA, 22 bp, Artificial Sequence
  Synthetic oligonucleotide; CTA chr11 5366499 5366520 5366516 5366521 +
cacaggaggctgaggtaggaga

SEQ ID NO: 107437 - DNA, 22 bp, Artificial Sequence
  Synthetic oligonucleotide; CTG chr11 5366511 5366532 5366528 5366533 +
aggtaggagaatcgcttgaacc

SEQ ID NO: 107438 - DNA, 22 bp, Artificial Sequence
  Synthetic oligonucleotide; CTT chr11 5366528 5366549 5366545 5366550 +
gaacctgggaggcggaggttgc

SEQ ID NO: 107439 - DNA, 22 bp, Artificial Sequence
  Synthetic oligonucleotide; TTG chr11 5366529 5366550 5366546 5366551 +
aacctgggaggcggaggttgca

SEQ ID NO: 107440 - DNA, 22 bp, Artificial Sequence
  Synthetic oligonucleotide; CTG chr11 5366535 5366556 5366552 5366557 +
ggaggcggaggttgcagtgagc

SEQ ID NO: 107441 - DNA, 22 bp, Artificial Sequence
  Synthetic oligonucleotide; TTG chr11 5366549 5366570 5366566 5366571 +
cagtgagccgagatcgcgccat

SEQ ID NO: 107442 - DNA, 22 bp, Artificial Sequence
  Synthetic oligonucleotide; TTG chr11 5366573 5366594 5366590 5366595 +
cactccagcagcctggaaggca

SEQ ID NO: 107443 - DNA, 22 bp, Artificial Sequence
  Synthetic oligonucleotide; CTC chr11 5366578 5366599 5366595 5366600 +
cagcagcctggaaggcaaaagc

SEQ ID NO: 107444 - DNA, 22 bp, Artificial Sequence
  Synthetic oligonucleotide; CTG chr11 5366588 5366609 5366605 5366610 +
gaaggcaaaagcaagatgagaa

SEQ ID NO: 107445 - DNA, 22 bp, Artificial Sequence
  Synthetic oligonucleotide; TTC chr11 5366757 5366778 5366774 5366779 +
acttgagattcaaagtctttag

SEQ ID NO: 107446 - DNA, 22 bp, Artificial Sequence
  Synthetic oligonucleotide; CTT chr11 5366761 5366782 5366778 5366783 +
gagattcaaagtctttagaata

SEQ ID NO: 107447 - DNA, 22 bp, Artificial Sequence
  Synthetic oligonucleotide; TTG chr11 5366762 5366783 5366779 5366784 +
agattcaaagtctttagaataa

SEQ ID NO: 107448 - DNA, 22 bp, Artificial Sequence
  Synthetic oligonucleotide; TTC chr11 5366768 5366789 5366785 5366790 +
aaagtctttagaataaaaatta

SEQ ID NO: 107449 - DNA, 22 bp, Artificial Sequence
  Synthetic oligonucleotide; CTT chr11 5366776 5366797 5366793 5366798 +
tagaataaaaattaaaatttgg

SEQ ID NO: 107450 - DNA, 22 bp, Artificial Sequence
  Synthetic oligonucleotide; TTT chr11 5366777 5366798 5366794 5366799 +
agaataaaaattaaaatttggg

SEQ ID NO: 107451 - DNA, 22 bp, Artificial Sequence
  Synthetic oligonucleotide; TTA chr11 5366778 5366799 5366795 5366800 +
gaataaaaattaaaatttggga

SEQ ID NO: 107452 - DNA, 22 bp, Artificial Sequence
  Synthetic oligonucleotide; TTA chr11 5366790 5366811 5366807 5366812 +
aaatttgggaaaataagtttgt

SEQ ID NO: 107453 - DNA, 22 bp, Artificial Sequence
  Synthetic oligonucleotide; TTT chr11 5366796 5366817 5366813 5366818 +
gggaaaataagtttgtattgat

SEQ ID NO: 107454 - DNA, 22 bp, Artificial Sequence
  Synthetic oligonucleotide; TTG chr11 5366797 5366818 5366814 5366819 +
ggaaaataagtttgtattgatg

SEQ ID NO: 107455 - DNA, 22 bp, Artificial Sequence
  Synthetic oligonucleotide; TTT chr11 5366810 5366831 5366827 5366832 +
gtattgatgactaattccaatc

SEQ ID NO: 107456 - DNA, 22 bp, Artificial Sequence
  Synthetic oligonucleotide; TTG chr11 5366811 5366832 5366828 5366833 +
tattgatgactaattccaatcc

SEQ ID NO: 107457 - DNA, 22 bp, Artificial Sequence
  Synthetic oligonucleotide; TTG chr11 5366816 5366837 5366833 5366838 +
atgactaattccaatcccaagc

SEQ ID NO: 107458 - DNA, 22 bp, Artificial Sequence
  Synthetic oligonucleotide; CTA chr11 5366823 5366844 5366840 5366845 +
attccaatcccaagcacgggtc

SEQ ID NO: 107459 - DNA, 22 bp, Artificial Sequence
  Synthetic oligonucleotide; TTC chr11 5366827 5366848 5366844 5366849 +
caatcccaagcacgggtctctg

SEQ ID NO: 107460 - DNA, 22 bp, Artificial Sequence
  Synthetic oligonucleotide; CTC chr11 5366847 5366868 5366864 5366869 +
tgtgcaatgcaggactgggaag

SEQ ID NO: 107461 - DNA, 22 bp, Artificial Sequence
  Synthetic oligonucleotide; CTG chr11 5366849 5366870 5366866 5366871 +
tgcaatgcaggactgggaaggt

SEQ ID NO: 107462 - DNA, 22 bp, Artificial Sequence
  Synthetic oligonucleotide; CTG chr11 5366864 5366885 5366881 5366886 +
ggaaggtttaggcaggggtgct

SEQ ID NO: 107463 - DNA, 22 bp, Artificial Sequence
  Synthetic oligonucleotide; TTT chr11 5366873 5366894 5366890 5366895 +
aggcaggggtgctatctgattc

SEQ ID NO: 107464 - DNA, 22 bp, Artificial Sequence
  Synthetic oligonucleotide; TTA chr11 5366874 5366895 5366891 5366896 +
ggcaggggtgctatctgattca

SEQ ID NO: 107465 - DNA, 22 bp, Artificial Sequence
  Synthetic oligonucleotide; CTA chr11 5366887 5366908 5366904 5366909 +
tctgattcatgagacaacaggc

SEQ ID NO: 107466 - DNA, 22 bp, Artificial Sequence
  Synthetic oligonucleotide; CTG chr11 5366891 5366912 5366908 5366913 +
attcatgagacaacaggcacaa

SEQ ID NO: 107467 - DNA, 22 bp, Artificial Sequence
  Synthetic oligonucleotide; TTC chr11 5366895 5366916 5366912 5366917 +
atgagacaacaggcacaaagtt

SEQ ID NO: 107468 - DNA, 22 bp, Artificial Sequence
  Synthetic oligonucleotide; TTT chr11 5366918 5366939 5366935 5366940 +
tagtccctgcctggacttggtg

SEQ ID NO: 107469 - DNA, 22 bp, Artificial Sequence
  Synthetic oligonucleotide; TTT chr11 5366919 5366940 5366936 5366941 +
agtccctgcctggacttggtgt

SEQ ID NO: 107470 - DNA, 22 bp, Artificial Sequence
  Synthetic oligonucleotide; TTA chr11 5366920 5366941 5366937 5366942 +
gtccctgcctggacttggtgtc

SEQ ID NO: 107471 - DNA, 22 bp, Artificial Sequence
  Synthetic oligonucleotide; CTG chr11 5366927 5366948 5366944 5366949 +
cctggacttggtgtcatctctt

SEQ ID NO: 107472 - DNA, 22 bp, Artificial Sequence
  Synthetic oligonucleotide; CTG chr11 5366931 5366952 5366948 5366953 +
gacttggtgtcatctcttgagc

SEQ ID NO: 107473 - DNA, 22 bp, Artificial Sequence
  Synthetic oligonucleotide; CTT chr11 5366936 5366957 5366953 5366958 +
ggtgtcatctcttgagcacatg

SEQ ID NO: 107474 - DNA, 22 bp, Artificial Sequence
  Synthetic oligonucleotide; TTG chr11 5366937 5366958 5366954 5366959 +
gtgtcatctcttgagcacatgc

SEQ ID NO: 107475 - DNA, 22 bp, Artificial Sequence
  Synthetic oligonucleotide; CTC chr11 5366947 5366968 5366964 5366969 +
ttgagcacatgcctaatggtct

SEQ ID NO: 107476 - DNA, 22 bp, Artificial Sequence
  Synthetic oligonucleotide; CTT chr11 5366949 5366970 5366966 5366971 +
gagcacatgcctaatggtctcc

SEQ ID NO: 107477 - DNA, 22 bp, Artificial Sequence
  Synthetic oligonucleotide; TTG chr11 5366950 5366971 5366967 5366972 +
agcacatgcctaatggtctcct

SEQ ID NO: 107478 - DNA, 22 bp, Artificial Sequence
  Synthetic oligonucleotide; CTA chr11 5366962 5366983 5366979 5366984 +
atggtctcctaacattcccctc

SEQ ID NO: 107479 - DNA, 22 bp, Artificial Sequence
  Synthetic oligonucleotide; CTC chr11 5366970 5366991 5366987 5366992 +
ctaacattcccctcccaaagtt

SEQ ID NO: 107480 - DNA, 22 bp, Artificial Sequence
  Synthetic oligonucleotide; CTA chr11 5366973 5366994 5366990 5366995 +
acattcccctcccaaagtttga

SEQ ID NO: 107481 - DNA, 22 bp, Artificial Sequence
  Synthetic oligonucleotide; TTC chr11 5366979 5367000 5366996 5367001 +
ccctcccaaagtttgaaaatgc

SEQ ID NO: 107482 - DNA, 22 bp, Artificial Sequence
  Synthetic oligonucleotide; CTC chr11 5366984 5367005 5367001 5367006 +
ccaaagtttgaaaatgcttcca

SEQ ID NO: 107483 - DNA, 22 bp, Artificial Sequence
  Synthetic oligonucleotide; TTT chr11 5366993 5367014 5367010 5367015 +
gaaaatgcttccacctcccgct

SEQ ID NO: 107484 - DNA, 22 bp, Artificial Sequence
  Synthetic oligonucleotide; TTG chr11 5366994 5367015 5367011 5367016 +
aaaatgcttccacctcccgctg

SEQ ID NO: 107485 - DNA, 22 bp, Artificial Sequence
  Synthetic oligonucleotide; CTT chr11 5367003 5367024 5367020 5367025 +
ccacctcccgctgcagtccatg

SEQ ID NO: 107486 - DNA, 22 bp, Artificial Sequence
  Synthetic oligonucleotide; TTC chr11 5367004 5367025 5367021 5367026 +
cacctcccgctgcagtccatga

SEQ ID NO: 107487 - DNA, 22 bp, Artificial Sequence
  Synthetic oligonucleotide; CTC chr11 5367010 5367031 5367027 5367032 +
ccgctgcagtccatgaaccagg

SEQ ID NO: 107488 - DNA, 22 bp, Artificial Sequence
  Synthetic oligonucleotide; CTG chr11 5367016 5367037 5367033 5367038 +
cagtccatgaaccaggataaaa

SEQ ID NO: 107489 - DNA, 22 bp, Artificial Sequence
  Synthetic oligonucleotide; TTC chr11 5367041 5367062 5367058 5367063 +
tctagcagcagagaccaaagac

SEQ ID NO: 107490 - DNA, 22 bp, Artificial Sequence
  Synthetic oligonucleotide; CTC chr11 5367043 5367064 5367060 5367065 +
tagcagcagagaccaaagacat

SEQ ID NO: 107491 - DNA, 22 bp, Artificial Sequence
  Synthetic oligonucleotide; CTA chr11 5367045 5367066 5367062 5367067 +
gcagcagagaccaaagacattc

SEQ ID NO: 107492 - DNA, 22 bp, Artificial Sequence
  Synthetic oligonucleotide; TTC chr11 5367067 5367088 5367084 5367089 +
tctcaagtctcaggaatgtggt

SEQ ID NO: 107493 - DNA, 22 bp, Artificial Sequence
  Synthetic oligonucleotide; CTC chr11 5367069 5367090 5367086 5367091 +
tcaagtctcaggaatgtggttc

SEQ ID NO: 107494 - DNA, 22 bp, Artificial Sequence
  Synthetic oligonucleotide; CTC chr11 5367071 5367092 5367088 5367093 +
aagtctcaggaatgtggttctg

SEQ ID NO: 107495 - DNA, 22 bp, Artificial Sequence
  Synthetic oligonucleotide; CTC chr11 5367078 5367099 5367095 5367100 +
aggaatgtggttctgaaggaag

SEQ ID NO: 107496 - DNA, 22 bp, Artificial Sequence
  Synthetic oligonucleotide; TTC chr11 5367091 5367112 5367108 5367113 +
tgaaggaagagaagctctgcca

SEQ ID NO: 107497 - DNA, 22 bp, Artificial Sequence
  Synthetic oligonucleotide; CTG chr11 5367093 5367114 5367110 5367115 +
aaggaagagaagctctgccaca

SEQ ID NO: 107498 - DNA, 22 bp, Artificial Sequence
  Synthetic oligonucleotide; CTC chr11 5367108 5367129 5367125 5367130 +
tgccacacatacacatgccacc

SEQ ID NO: 107499 - DNA, 22 bp, Artificial Sequence
  Synthetic oligonucleotide; CTG chr11 5367110 5367131 5367127 5367132 +
ccacacatacacatgccacctt

SEQ ID NO: 107500 - DNA, 22 bp, Artificial Sequence
  Synthetic oligonucleotide; CTT chr11 5367132 5367153 5367149 5367154 +
gcaaagccacttagtgacacag

SEQ ID NO: 107501 - DNA, 22 bp, Artificial Sequence
  Synthetic oligonucleotide; TTG chr11 5367133 5367154 5367150 5367155 +
caaagccacttagtgacacaga

SEQ ID NO: 107502 - DNA, 22 bp, Artificial Sequence
  Synthetic oligonucleotide; CTT chr11 5367144 5367165 5367161 5367166 +
agtgacacagagttttagttat

SEQ ID NO: 107503 - DNA, 22 bp, Artificial Sequence
  Synthetic oligonucleotide; TTA chr11 5367145 5367166 5367162 5367167 +
gtgacacagagttttagttatt

SEQ ID NO: 107504 - DNA, 22 bp, Artificial Sequence
  Synthetic oligonucleotide; TTT chr11 5367159 5367180 5367176 5367181 +
tagttatttcattgtgaactgg

SEQ ID NO: 107505 - DNA, 22 bp, Artificial Sequence
  Synthetic oligonucleotide; TTT chr11 5367160 5367181 5367177 5367182 +
agttatttcattgtgaactgga

SEQ ID NO: 107506 - DNA, 22 bp, Artificial Sequence
  Synthetic oligonucleotide; TTA chr11 5367161 5367182 5367178 5367183 +
gttatttcattgtgaactggaa

SEQ ID NO: 107507 - DNA, 22 bp, Artificial Sequence
  Synthetic oligonucleotide; TTA chr11 5367165 5367186 5367182 5367187 +
tttcattgtgaactggaataaa

SEQ ID NO: 107508 - DNA, 22 bp, Artificial Sequence
  Synthetic oligonucleotide; TTT chr11 5367168 5367189 5367185 5367190 +
cattgtgaactggaataaaatc

SEQ ID NO: 107509 - DNA, 22 bp, Artificial Sequence
  Synthetic oligonucleotide; TTC chr11 5367169 5367190 5367186 5367191 +
attgtgaactggaataaaatca

SEQ ID NO: 107510 - DNA, 22 bp, Artificial Sequence
  Synthetic oligonucleotide; TTG chr11 5367173 5367194 5367190 5367195 +
tgaactggaataaaatcatttt

SEQ ID NO: 107511 - DNA, 22 bp, Artificial Sequence
  Synthetic oligonucleotide; CTG chr11 5367180 5367201 5367197 5367202 +
gaataaaatcattttgaaagga

SEQ ID NO: 107512 - DNA, 22 bp, Artificial Sequence
  Synthetic oligonucleotide; TTT chr11 5367194 5367215 5367211 5367216 +
tgaaaggagatttttgaagtta

SEQ ID NO: 107513 - DNA, 22 bp, Artificial Sequence
  Synthetic oligonucleotide; TTT chr11 5367195 5367216 5367212 5367217 +
gaaaggagatttttgaagttaa

SEQ ID NO: 107514 - DNA, 22 bp, Artificial Sequence
  Synthetic oligonucleotide; TTG chr11 5367196 5367217 5367213 5367218 +
aaaggagatttttgaagttaaa

SEQ ID NO: 107515 - DNA, 22 bp, Artificial Sequence
  Synthetic oligonucleotide; TTT chr11 5367207 5367228 5367224 5367229 +
ttgaagttaaaagcattgccag

SEQ ID NO: 107516 - DNA, 22 bp, Artificial Sequence
  Synthetic oligonucleotide; TTT chr11 5367208 5367229 5367225 5367230 +
tgaagttaaaagcattgccaga

SEQ ID NO: 107517 - DNA, 22 bp, Artificial Sequence
  Synthetic oligonucleotide; TTT chr11 5367209 5367230 5367226 5367231 +
gaagttaaaagcattgccagaa

SEQ ID NO: 107518 - DNA, 22 bp, Artificial Sequence
  Synthetic oligonucleotide; TTG chr11 5367210 5367231 5367227 5367232 +
aagttaaaagcattgccagaaa

SEQ ID NO: 107519 - DNA, 22 bp, Artificial Sequence
  Synthetic oligonucleotide; TTA chr11 5367216 5367237 5367233 5367238 +
aaagcattgccagaaaggagtc

SEQ ID NO: 107520 - DNA, 22 bp, Artificial Sequence
  Synthetic oligonucleotide; TTG chr11 5367225 5367246 5367242 5367247 +
ccagaaaggagtcacaatccag

SEQ ID NO: 107521 - DNA, 22 bp, Artificial Sequence
  Synthetic oligonucleotide; CTA chr11 5367253 5367274 5367270 5367275 +
agagagggttcttggatttcgt

SEQ ID NO: 107522 - DNA, 22 bp, Artificial Sequence
  Synthetic oligonucleotide; TTC chr11 5367264 5367285 5367281 5367286 +
ttggatttcgtgcccaagaaag

SEQ ID NO: 107523 - DNA, 22 bp, Artificial Sequence
  Synthetic oligonucleotide; CTT chr11 5367266 5367287 5367283 5367288 +
ggatttcgtgcccaagaaagaa

SEQ ID NO: 107524 - DNA, 22 bp, Artificial Sequence
  Synthetic oligonucleotide; TTG chr11 5367267 5367288 5367284 5367289 +
gatttcgtgcccaagaaagaat

SEQ ID NO: 107525 - DNA, 22 bp, Artificial Sequence
  Synthetic oligonucleotide; TTT chr11 5367272 5367293 5367289 5367294 +
cgtgcccaagaaagaatttggg

SEQ ID NO: 107526 - DNA, 22 bp, Artificial Sequence
  Synthetic oligonucleotide; TTC chr11 5367273 5367294 5367290 5367295 +
gtgcccaagaaagaatttgggg

SEQ ID NO: 107527 - DNA, 22 bp, Artificial Sequence
  Synthetic oligonucleotide; TTT chr11 5367291 5367312 5367308 5367313 +
ggggcaaatccatacagaaaag

SEQ ID NO: 107528 - DNA, 22 bp, Artificial Sequence
  Synthetic oligonucleotide; TTG chr11 5367292 5367313 5367309 5367314 +
gggcaaatccatacagaaaagt

SEQ ID NO: 107529 - DNA, 22 bp, Artificial Sequence
  Synthetic oligonucleotide; TTA chr11 5367326 5367347 5367343 5367348 +
attaagaaagtaaaggagtaaa

SEQ ID NO: 107530 - DNA, 22 bp, Artificial Sequence
  Synthetic oligonucleotide; TTA chr11 5367330 5367351 5367347 5367352 +
agaaagtaaaggagtaaaataa

SEQ ID NO: 107531 - DNA, 22 bp, Artificial Sequence
  Synthetic oligonucleotide; CTA chr11 5367358 5367379 5367375 5367380 +
ccctataggcagaacagtcctg

SEQ ID NO: 107532 - DNA, 22 bp, Artificial Sequence
  Synthetic oligonucleotide; CTA chr11 5367363 5367384 5367380 5367385 +
taggcagaacagtcctgaggac

SEQ ID NO: 107533 - DNA, 22 bp, Artificial Sequence
  Synthetic oligonucleotide; CTG chr11 5367380 5367401 5367397 5367402 +
aggactgctggttgcccatttt

SEQ ID NO: 107534 - DNA, 22 bp, Artificial Sequence
  Synthetic oligonucleotide; CTG chr11 5367387 5367408 5367404 5367409 +
ctggttgcccatttttatggtt

SEQ ID NO: 107535 - DNA, 22 bp, Artificial Sequence
  Synthetic oligonucleotide; CTG chr11 5367390 5367411 5367407 5367412 +
gttgcccatttttatggttatt

SEQ ID NO: 107536 - DNA, 22 bp, Artificial Sequence
  Synthetic oligonucleotide; TTG chr11 5367394 5367415 5367411 5367416 +
cccatttttatggttatttatt

SEQ ID NO: 107537 - DNA, 22 bp, Artificial Sequence
  Synthetic oligonucleotide; TTT chr11 5367401 5367422 5367418 5367423 +
ttatggttatttattgatgata

SEQ ID NO: 107538 - DNA, 22 bp, Artificial Sequence
  Synthetic oligonucleotide; TTT chr11 5367402 5367423 5367419 5367424 +
tatggttatttattgatgatat

SEQ ID NO: 107539 - DNA, 22 bp, Artificial Sequence
  Synthetic oligonucleotide; TTT chr11 5367403 5367424 5367420 5367425 +
atggttatttattgatgatatg

SEQ ID NO: 107540 - DNA, 22 bp, Artificial Sequence
  Synthetic oligonucleotide; TTA chr11 5367404 5367425 5367421 5367426 +
tggttatttattgatgatatgc

SEQ ID NO: 107541 - DNA, 22 bp, Artificial Sequence
  Synthetic oligonucleotide; TTA chr11 5367410 5367431 5367427 5367432 +
tttattgatgatatgctaaaca

SEQ ID NO: 107542 - DNA, 22 bp, Artificial Sequence
  Synthetic oligonucleotide; TTT chr11 5367413 5367434 5367430 5367435 +
attgatgatatgctaaacaagg

SEQ ID NO: 107543 - DNA, 22 bp, Artificial Sequence
  Synthetic oligonucleotide; TTA chr11 5367414 5367435 5367431 5367436 +
ttgatgatatgctaaacaaggg

SEQ ID NO: 107544 - DNA, 22 bp, Artificial Sequence
  Synthetic oligonucleotide; TTG chr11 5367417 5367438 5367434 5367439 +
atgatatgctaaacaaggggtg

SEQ ID NO: 107545 - DNA, 22 bp, Artificial Sequence
  Synthetic oligonucleotide; CTA chr11 5367428 5367449 5367445 5367450 +
aacaaggggtggattattcatg

SEQ ID NO: 107546 - DNA, 22 bp, Artificial Sequence
  Synthetic oligonucleotide; TTA chr11 5367444 5367465 5367461 5367466 +
ttcatgcctccccttttcagac

SEQ ID NO: 107547 - DNA, 22 bp, Artificial Sequence
  Synthetic oligonucleotide; TTC chr11 5367447 5367468 5367464 5367469 +
atgcctccccttttcagaccgc

SEQ ID NO: 107548 - DNA, 22 bp, Artificial Sequence
  Synthetic oligonucleotide; CTC chr11 5367454 5367475 5367471 5367476 +
cccttttcagaccgcttagcgt

SEQ ID NO: 107549 - DNA, 22 bp, Artificial Sequence
  Synthetic oligonucleotide; CTT chr11 5367459 5367480 5367476 5367481 +
ttcagaccgcttagcgtaactt

SEQ ID NO: 107550 - DNA, 22 bp, Artificial Sequence
  Synthetic oligonucleotide; TTT chr11 5367460 5367481 5367477 5367482 +
tcagaccgcttagcgtaacttc

SEQ ID NO: 107551 - DNA, 22 bp, Artificial Sequence
  Synthetic oligonucleotide; TTT chr11 5367461 5367482 5367478 5367483 +
cagaccgcttagcgtaacttcc

SEQ ID NO: 107552 - DNA, 22 bp, Artificial Sequence
  Synthetic oligonucleotide; TTC chr11 5367462 5367483 5367479 5367484 +
agaccgcttagcgtaacttcct

SEQ ID NO: 107553 - DNA, 22 bp, Artificial Sequence
  Synthetic oligonucleotide; CTT chr11 5367471 5367492 5367488 5367493 +
agcgtaacttcctgatgttgcc

SEQ ID NO: 107554 - DNA, 22 bp, Artificial Sequence
  Synthetic oligonucleotide; TTA chr11 5367472 5367493 5367489 5367494 +
gcgtaacttcctgatgttgcca

SEQ ID NO: 107555 - DNA, 22 bp, Artificial Sequence
  Synthetic oligonucleotide; CTT chr11 5367481 5367502 5367498 5367503 +
cctgatgttgccatggcatttc

SEQ ID NO: 107556 - DNA, 22 bp, Artificial Sequence
  Synthetic oligonucleotide; TTC chr11 5367482 5367503 5367499 5367504 +
ctgatgttgccatggcatttct

SEQ ID NO: 107557 - DNA, 22 bp, Artificial Sequence
  Synthetic oligonucleotide; CTG chr11 5367485 5367506 5367502 5367507 +
atgttgccatggcatttctaaa

SEQ ID NO: 107558 - DNA, 22 bp, Artificial Sequence
  Synthetic oligonucleotide; TTG chr11 5367491 5367512 5367508 5367513 +
ccatggcatttctaaacagtca

SEQ ID NO: 107559 - DNA, 22 bp, Artificial Sequence
  Synthetic oligonucleotide; TTT chr11 5367502 5367523 5367519 5367524 +
ctaaacagtcatagtgctggtg

SEQ ID NO: 107560 - DNA, 22 bp, Artificial Sequence
  Synthetic oligonucleotide; TTC chr11 5367503 5367524 5367520 5367525 +
taaacagtcatagtgctggtgg

SEQ ID NO: 107561 - DNA, 22 bp, Artificial Sequence
  Synthetic oligonucleotide; CTA chr11 5367505 5367526 5367522 5367527 +
aacagtcatagtgctggtggga

SEQ ID NO: 107562 - DNA, 22 bp, Artificial Sequence
  Synthetic oligonucleotide; CTG chr11 5367521 5367542 5367538 5367543 +
gtgggagagtagcagtgaggac

SEQ ID NO: 107563 - DNA, 22 bp, Artificial Sequence
  Synthetic oligonucleotide; CTA chr11 5367545 5367566 5367562 5367567 +
ccagaggtcactctcatcacaa

SEQ ID NO: 107564 - DNA, 22 bp, Artificial Sequence
  Synthetic oligonucleotide; CTC chr11 5367558 5367579 5367575 5367580 +
tcatcacaatcttggtttggtg

SEQ ID NO: 107565 - DNA, 22 bp, Artificial Sequence
  Synthetic oligonucleotide; CTC chr11 5367560 5367581 5367577 5367582 +
atcacaatcttggtttggtggg

SEQ ID NO: 107566 - DNA, 22 bp, Artificial Sequence
  Synthetic oligonucleotide; CTT chr11 5367571 5367592 5367588 5367593 +
ggtttggtgggtttcagccagc

SEQ ID NO: 107567 - DNA, 22 bp, Artificial Sequence
  Synthetic oligonucleotide; TTG chr11 5367572 5367593 5367589 5367594 +
gtttggtgggtttcagccagct

SEQ ID NO: 107568 - DNA, 22 bp, Artificial Sequence
  Synthetic oligonucleotide; TTT chr11 5367576 5367597 5367593 5367598 +
ggtgggtttcagccagcttctt

SEQ ID NO: 107569 - DNA, 22 bp, Artificial Sequence
  Synthetic oligonucleotide; TTG chr11 5367577 5367598 5367594 5367599 +
gtgggtttcagccagcttcttt

SEQ ID NO: 107570 - DNA, 22 bp, Artificial Sequence
  Synthetic oligonucleotide; TTT chr11 5367585 5367606 5367602 5367607 +
cagccagcttctttactgcaaa

SEQ ID NO: 107571 - DNA, 22 bp, Artificial Sequence
  Synthetic oligonucleotide; TTC chr11 5367586 5367607 5367603 5367608 +
agccagcttctttactgcaaac

SEQ ID NO: 107572 - DNA, 22 bp, Artificial Sequence
  Synthetic oligonucleotide; CTT chr11 5367595 5367616 5367612 5367617 +
ctttactgcaaactgttttttc

SEQ ID NO: 107573 - DNA, 22 bp, Artificial Sequence
  Synthetic oligonucleotide; TTC chr11 5367596 5367617 5367613 5367618 +
tttactgcaaactgttttttca

SEQ ID NO: 107574 - DNA, 22 bp, Artificial Sequence
  Synthetic oligonucleotide; CTT chr11 5367598 5367619 5367615 5367620 +
tactgcaaactgttttttcagc

SEQ ID NO: 107575 - DNA, 22 bp, Artificial Sequence
  Synthetic oligonucleotide; TTT chr11 5367599 5367620 5367616 5367621 +
actgcaaactgttttttcagca

SEQ ID NO: 107576 - DNA, 22 bp, Artificial Sequence
  Synthetic oligonucleotide; TTA chr11 5367600 5367621 5367617 5367622 +
ctgcaaactgttttttcagcaa

SEQ ID NO: 107577 - DNA, 22 bp, Artificial Sequence
  Synthetic oligonucleotide; CTG chr11 5367603 5367624 5367620 5367625 +
caaactgttttttcagcaaggt

SEQ ID NO: 107578 - DNA, 22 bp, Artificial Sequence
  Synthetic oligonucleotide; CTG chr11 5367610 5367631 5367627 5367632 +
ttttttcagcaaggtctttatg

SEQ ID NO: 107579 - DNA, 22 bp, Artificial Sequence
  Synthetic oligonucleotide; TTT chr11 5367613 5367634 5367630 5367635 +
tttcagcaaggtctttatgacc

SEQ ID NO: 107580 - DNA, 22 bp, Artificial Sequence
  Synthetic oligonucleotide; TTT chr11 5367614 5367635 5367631 5367636 +
ttcagcaaggtctttatgacct

SEQ ID NO: 107581 - DNA, 22 bp, Artificial Sequence
  Synthetic oligonucleotide; TTT chr11 5367615 5367636 5367632 5367637 +
tcagcaaggtctttatgacctg

SEQ ID NO: 107582 - DNA, 22 bp, Artificial Sequence
  Synthetic oligonucleotide; TTT chr11 5367616 5367637 5367633 5367638 +
cagcaaggtctttatgacctgt

SEQ ID NO: 107583 - DNA, 22 bp, Artificial Sequence
  Synthetic oligonucleotide; TTC chr11 5367617 5367638 5367634 5367639 +
agcaaggtctttatgacctgta

SEQ ID NO: 107584 - DNA, 22 bp, Artificial Sequence
  Synthetic oligonucleotide; CTT chr11 5367628 5367649 5367645 5367650 +
tatgacctgtatcttgtgccaa

SEQ ID NO: 107585 - DNA, 22 bp, Artificial Sequence
  Synthetic oligonucleotide; TTT chr11 5367629 5367650 5367646 5367651 +
atgacctgtatcttgtgccaac

SEQ ID NO: 107586 - DNA, 22 bp, Artificial Sequence
  Synthetic oligonucleotide; TTA chr11 5367630 5367651 5367647 5367652 +
tgacctgtatcttgtgccaacc

SEQ ID NO: 107587 - DNA, 22 bp, Artificial Sequence
  Synthetic oligonucleotide; CTG chr11 5367637 5367658 5367654 5367659 +
tatcttgtgccaacctcttatc

SEQ ID NO: 107588 - DNA, 22 bp, Artificial Sequence
  Synthetic oligonucleotide; CTT chr11 5367643 5367664 5367660 5367665 +
gtgccaacctcttatctcatcc

SEQ ID NO: 107589 - DNA, 22 bp, Artificial Sequence
  Synthetic oligonucleotide; TTG chr11 5367644 5367665 5367661 5367666 +
tgccaacctcttatctcatcct

SEQ ID NO: 107590 - DNA, 22 bp, Artificial Sequence
  Synthetic oligonucleotide; CTC chr11 5367654 5367675 5367671 5367676 +
ttatctcatcctgtgactgaga

SEQ ID NO: 107591 - DNA, 22 bp, Artificial Sequence
  Synthetic oligonucleotide; CTT chr11 5367656 5367677 5367673 5367678 +
atctcatcctgtgactgagaat

SEQ ID NO: 107592 - DNA, 22 bp, Artificial Sequence
  Synthetic oligonucleotide; TTA chr11 5367657 5367678 5367674 5367679 +
tctcatcctgtgactgagaatg

SEQ ID NO: 107593 - DNA, 22 bp, Artificial Sequence
  Synthetic oligonucleotide; CTC chr11 5367661 5367682 5367678 5367683 +
atcctgtgactgagaatgccta

SEQ ID NO: 107594 - DNA, 22 bp, Artificial Sequence
  Synthetic oligonucleotide; CTG chr11 5367667 5367688 5367684 5367689 +
tgactgagaatgcctaactttc

SEQ ID NO: 107595 - DNA, 22 bp, Artificial Sequence
  Synthetic oligonucleotide; CTG chr11 5367673 5367694 5367690 5367695 +
agaatgcctaactttctgggaa

SEQ ID NO: 107596 - DNA, 22 bp, Artificial Sequence
  Synthetic oligonucleotide; CTA chr11 5367683 5367704 5367700 5367705 +
actttctgggaatacagcccag

SEQ ID NO: 107597 - DNA, 22 bp, Artificial Sequence
  Synthetic oligonucleotide; CTT chr11 5367687 5367708 5367704 5367709 +
tctgggaatacagcccagtagg

SEQ ID NO: 107598 - DNA, 22 bp, Artificial Sequence
  Synthetic oligonucleotide; TTT chr11 5367688 5367709 5367705 5367710 +
ctgggaatacagcccagtaggt

SEQ ID NO: 107599 - DNA, 22 bp, Artificial Sequence
  Synthetic oligonucleotide; TTC chr11 5367689 5367710 5367706 5367711 +
tgggaatacagcccagtaggtc

SEQ ID NO: 107600 - DNA, 22 bp, Artificial Sequence
  Synthetic oligonucleotide; CTG chr11 5367691 5367712 5367708 5367713 +
ggaatacagcccagtaggtctc

SEQ ID NO: 107601 - DNA, 22 bp, Artificial Sequence
  Synthetic oligonucleotide; CTC chr11 5367713 5367734 5367730 5367735 +
agccttattgtacccagctcct

SEQ ID NO: 107602 - DNA, 22 bp, Artificial Sequence
  Synthetic oligonucleotide; CTT chr11 5367719 5367740 5367736 5367741 +
attgtacccagctcctatttaa

SEQ ID NO: 107603 - DNA, 22 bp, Artificial Sequence
  Synthetic oligonucleotide; TTA chr11 5367720 5367741 5367737 5367742 +
ttgtacccagctcctatttaag

SEQ ID NO: 107604 - DNA, 22 bp, Artificial Sequence
  Synthetic oligonucleotide; TTG chr11 5367723 5367744 5367740 5367745 +
tacccagctcctatttaagatg

SEQ ID NO: 107605 - DNA, 22 bp, Artificial Sequence
  Synthetic oligonucleotide; CTC chr11 5367733 5367754 5367750 5367755 +
ctatttaagatggagttgctct

SEQ ID NO: 107606 - DNA, 22 bp, Artificial Sequence
  Synthetic oligonucleotide; CTA chr11 5367736 5367757 5367753 5367758 +
tttaagatggagttgctctggt

SEQ ID NO: 107607 - DNA, 22 bp, Artificial Sequence
  Synthetic oligonucleotide; TTT chr11 5367739 5367760 5367756 5367761 +
aagatggagttgctctggttca

SEQ ID NO: 107608 - DNA, 22 bp, Artificial Sequence
  Synthetic oligonucleotide; TTA chr11 5367740 5367761 5367757 5367762 +
agatggagttgctctggttcaa

SEQ ID NO: 107609 - DNA, 22 bp, Artificial Sequence
  Synthetic oligonucleotide; TTG chr11 5367751 5367772 5367768 5367773 +
ctctggttcaaatgcctctgac

SEQ ID NO: 107610 - DNA, 22 bp, Artificial Sequence
  Synthetic oligonucleotide; CTC chr11 5367754 5367775 5367771 5367776 +
tggttcaaatgcctctgacaaa

SEQ ID NO: 107611 - DNA, 22 bp, Artificial Sequence
  Synthetic oligonucleotide; CTG chr11 5367756 5367777 5367773 5367778 +
gttcaaatgcctctgacaaaag

SEQ ID NO: 107612 - DNA, 22 bp, Artificial Sequence
  Synthetic oligonucleotide; TTC chr11 5367760 5367781 5367777 5367782 +
aaatgcctctgacaaaaggaac

SEQ ID NO: 107613 - DNA, 22 bp, Artificial Sequence
  Synthetic oligonucleotide; CTC chr11 5367769 5367790 5367786 5367791 +
tgacaaaaggaacaaaaatgtt

SEQ ID NO: 107614 - DNA, 22 bp, Artificial Sequence
  Synthetic oligonucleotide; CTG chr11 5367771 5367792 5367788 5367793 +
acaaaaggaacaaaaatgttgt

SEQ ID NO: 107615 - DNA, 22 bp, Artificial Sequence
  Synthetic oligonucleotide; TTG chr11 5367792 5367813 5367809 5367814 +
tttctggtatgctagcacccag

SEQ ID NO: 107616 - DNA, 22 bp, Artificial Sequence
  Synthetic oligonucleotide; TTT chr11 5367795 5367816 5367812 5367817 +
ctggtatgctagcacccagaat

SEQ ID NO: 107617 - DNA, 22 bp, Artificial Sequence
  Synthetic oligonucleotide; TTC chr11 5367796 5367817 5367813 5367818 +
tggtatgctagcacccagaata

SEQ ID NO: 107618 - DNA, 22 bp, Artificial Sequence
  Synthetic oligonucleotide; CTG chr11 5367798 5367819 5367815 5367820 +
gtatgctagcacccagaataga

SEQ ID NO: 107619 - DNA, 22 bp, Artificial Sequence
  Synthetic oligonucleotide; CTA chr11 5367806 5367827 5367823 5367828 +
gcacccagaatagaggcacttg

SEQ ID NO: 107620 - DNA, 22 bp, Artificial Sequence
  Synthetic oligonucleotide; CTT chr11 5367827 5367848 5367844 5367849 +
gcacaatatatgcattcaaaaa

SEQ ID NO: 107621 - DNA, 22 bp, Artificial Sequence
  Synthetic oligonucleotide; TTG chr11 5367828 5367849 5367845 5367850 +
cacaatatatgcattcaaaaat

SEQ ID NO: 107622 - DNA, 22 bp, Artificial Sequence
  Synthetic oligonucleotide; TTC chr11 5367844 5367865 5367861 5367866 +
aaaaatgtattttttttcactt

SEQ ID NO: 107623 - DNA, 22 bp, Artificial Sequence
  Synthetic oligonucleotide; TTT chr11 5367856 5367877 5367873 5367878 +
tttttcacttgtgctttctgcc

SEQ ID NO: 107624 - DNA, 22 bp, Artificial Sequence
  Synthetic oligonucleotide; TTT chr11 5367857 5367878 5367874 5367879 +
ttttcacttgtgctttctgcct

SEQ ID NO: 107625 - DNA, 22 bp, Artificial Sequence
  Synthetic oligonucleotide; TTT chr11 5367858 5367879 5367875 5367880 +
tttcacttgtgctttctgccta

SEQ ID NO: 107626 - DNA, 22 bp, Artificial Sequence
  Synthetic oligonucleotide; TTT chr11 5367859 5367880 5367876 5367881 +
ttcacttgtgctttctgcctat

SEQ ID NO: 107627 - DNA, 22 bp, Artificial Sequence
  Synthetic oligonucleotide; TTT chr11 5367860 5367881 5367877 5367882 +
tcacttgtgctttctgcctata

SEQ ID NO: 107628 - DNA, 22 bp, Artificial Sequence
  Synthetic oligonucleotide; TTT chr11 5367861 5367882 5367878 5367883 +
cacttgtgctttctgcctatat

SEQ ID NO: 107629 - DNA, 22 bp, Artificial Sequence
  Synthetic oligonucleotide; TTC chr11 5367862 5367883 5367879 5367884 +
acttgtgctttctgcctatatc

SEQ ID NO: 107630 - DNA, 22 bp, Artificial Sequence
  Synthetic oligonucleotide; CTT chr11 5367866 5367887 5367883 5367888 +
gtgctttctgcctatatctatt

SEQ ID NO: 107631 - DNA, 22 bp, Artificial Sequence
  Synthetic oligonucleotide; TTG chr11 5367867 5367888 5367884 5367889 +
tgctttctgcctatatctattt

SEQ ID NO: 107632 - DNA, 22 bp, Artificial Sequence
  Synthetic oligonucleotide; CTT chr11 5367872 5367893 5367889 5367894 +
tctgcctatatctatttttatg

SEQ ID NO: 107633 - DNA, 22 bp, Artificial Sequence
  Synthetic oligonucleotide; TTT chr11 5367873 5367894 5367890 5367895 +
ctgcctatatctatttttatgt

SEQ ID NO: 107634 - DNA, 22 bp, Artificial Sequence
  Synthetic oligonucleotide; TTC chr11 5367874 5367895 5367891 5367896 +
tgcctatatctatttttatgtc

SEQ ID NO: 107635 - DNA, 22 bp, Artificial Sequence
  Synthetic oligonucleotide; CTG chr11 5367876 5367897 5367893 5367898 +
cctatatctatttttatgtcct

SEQ ID NO: 107636 - DNA, 22 bp, Artificial Sequence
  Synthetic oligonucleotide; CTA chr11 5367880 5367901 5367897 5367902 +
tatctatttttatgtcctcatg

SEQ ID NO: 107637 - DNA, 22 bp, Artificial Sequence
  Synthetic oligonucleotide; CTA chr11 5367886 5367907 5367903 5367908 +
tttttatgtcctcatgcttaaa

SEQ ID NO: 107638 - DNA, 22 bp, Artificial Sequence
  Synthetic oligonucleotide; TTT chr11 5367889 5367910 5367906 5367911 +
ttatgtcctcatgcttaaatct

SEQ ID NO: 107639 - DNA, 22 bp, Artificial Sequence
  Synthetic oligonucleotide; TTT chr11 5367890 5367911 5367907 5367912 +
tatgtcctcatgcttaaatctt

SEQ ID NO: 107640 - DNA, 22 bp, Artificial Sequence
  Synthetic oligonucleotide; TTT chr11 5367891 5367912 5367908 5367913 +
atgtcctcatgcttaaatcttg

SEQ ID NO: 107641 - DNA, 22 bp, Artificial Sequence
  Synthetic oligonucleotide; TTA chr11 5367892 5367913 5367909 5367914 +
tgtcctcatgcttaaatcttga

SEQ ID NO: 107642 - DNA, 22 bp, Artificial Sequence
  Synthetic oligonucleotide; CTC chr11 5367899 5367920 5367916 5367921 +
atgcttaaatcttgaccaaggc

SEQ ID NO: 107643 - DNA, 22 bp, Artificial Sequence
  Synthetic oligonucleotide; CTT chr11 5367905 5367926 5367922 5367927 +
aaatcttgaccaaggctatgca

SEQ ID NO: 107644 - DNA, 22 bp, Artificial Sequence
  Synthetic oligonucleotide; TTA chr11 5367906 5367927 5367923 5367928 +
aatcttgaccaaggctatgcat

SEQ ID NO: 107645 - DNA, 22 bp, Artificial Sequence
  Synthetic oligonucleotide; CTT chr11 5367912 5367933 5367929 5367934 +
gaccaaggctatgcattttcct

SEQ ID NO: 107646 - DNA, 22 bp, Artificial Sequence
  Synthetic oligonucleotide; TTG chr11 5367913 5367934 5367930 5367935 +
accaaggctatgcattttccta

SEQ ID NO: 107647 - DNA, 22 bp, Artificial Sequence
  Synthetic oligonucleotide; CTA chr11 5367923 5367944 5367940 5367945 +
tgcattttcctatccttactca

SEQ ID NO: 107648 - DNA, 22 bp, Artificial Sequence
  Synthetic oligonucleotide; TTT chr11 5367930 5367951 5367947 5367952 +
tcctatccttactcagcagttt

SEQ ID NO: 107649 - DNA, 22 bp, Artificial Sequence
  Synthetic oligonucleotide; TTT chr11 5367931 5367952 5367948 5367953 +
cctatccttactcagcagtttg

SEQ ID NO: 107650 - DNA, 22 bp, Artificial Sequence
  Synthetic oligonucleotide; TTC chr11 5367932 5367953 5367949 5367954 +
ctatccttactcagcagtttgt

SEQ ID NO: 107651 - DNA, 22 bp, Artificial Sequence
  Synthetic oligonucleotide; CTA chr11 5367935 5367956 5367952 5367957 +
tccttactcagcagtttgtgag

SEQ ID NO: 107652 - DNA, 22 bp, Artificial Sequence
  Synthetic oligonucleotide; CTT chr11 5367940 5367961 5367957 5367962 +
actcagcagtttgtgaggaatc

SEQ ID NO: 107653 - DNA, 22 bp, Artificial Sequence
  Synthetic oligonucleotide; TTA chr11 5367941 5367962 5367958 5367963 +
ctcagcagtttgtgaggaatca

SEQ ID NO: 107654 - DNA, 22 bp, Artificial Sequence
  Synthetic oligonucleotide; CTC chr11 5367944 5367965 5367961 5367966 +
agcagtttgtgaggaatcagac

SEQ ID NO: 107655 - DNA, 22 bp, Artificial Sequence
  Synthetic oligonucleotide; TTT chr11 5367952 5367973 5367969 5367974 +
gtgaggaatcagacattcttca

SEQ ID NO: 107656 - DNA, 22 bp, Artificial Sequence
  Synthetic oligonucleotide; TTG chr11 5367953 5367974 5367970 5367975 +
tgaggaatcagacattcttcaa

SEQ ID NO: 107657 - DNA, 22 bp, Artificial Sequence
  Synthetic oligonucleotide; TTC chr11 5367970 5367991 5367987 5367992 +
ttcaaagtttcacttctaccag

SEQ ID NO: 107658 - DNA, 22 bp, Artificial Sequence
  Synthetic oligonucleotide; CTT chr11 5367972 5367993 5367989 5367994 +
caaagtttcacttctaccagag

SEQ ID NO: 107659 - DNA, 22 bp, Artificial Sequence
  Synthetic oligonucleotide; TTC chr11 5367973 5367994 5367990 5367995 +
aaagtttcacttctaccagagt

SEQ ID NO: 107660 - DNA, 22 bp, Artificial Sequence
  Synthetic oligonucleotide; TTT chr11 5367980 5368001 5367997 5368002 +
cacttctaccagagtagagcta

SEQ ID NO: 107661 - DNA, 22 bp, Artificial Sequence
  Synthetic oligonucleotide; TTC chr11 5367981 5368002 5367998 5368003 +
acttctaccagagtagagctac

SEQ ID NO: 107662 - DNA, 22 bp, Artificial Sequence
  Synthetic oligonucleotide; CTT chr11 5367985 5368006 5368002 5368007 +
ctaccagagtagagctacttct

SEQ ID NO: 107663 - DNA, 22 bp, Artificial Sequence
  Synthetic oligonucleotide; TTC chr11 5367986 5368007 5368003 5368008 +
taccagagtagagctacttctc

SEQ ID NO: 107664 - DNA, 22 bp, Artificial Sequence
  Synthetic oligonucleotide; CTA chr11 5367988 5368009 5368005 5368010 +
ccagagtagagctacttctctt

SEQ ID NO: 107665 - DNA, 22 bp, Artificial Sequence
  Synthetic oligonucleotide; CTA chr11 5368002 5368023 5368019 5368024 +
cttctcttctaattatatctta

SEQ ID NO: 107666 - DNA, 22 bp, Artificial Sequence
  Synthetic oligonucleotide; CTT chr11 5368005 5368026 5368022 5368027 +
ctcttctaattatatcttacac

SEQ ID NO: 107667 - DNA, 22 bp, Artificial Sequence
  Synthetic oligonucleotide; TTC chr11 5368006 5368027 5368023 5368028 +
tcttctaattatatcttacacc

SEQ ID NO: 107668 - DNA, 22 bp, Artificial Sequence
  Synthetic oligonucleotide; CTC chr11 5368008 5368029 5368025 5368030 +
ttctaattatatcttacacccc

SEQ ID NO: 107669 - DNA, 22 bp, Artificial Sequence
  Synthetic oligonucleotide; CTT chr11 5368010 5368031 5368027 5368032 +
ctaattatatcttacaccccac

SEQ ID NO: 107670 - DNA, 22 bp, Artificial Sequence
  Synthetic oligonucleotide; TTC chr11 5368011 5368032 5368028 5368033 +
taattatatcttacaccccaca

SEQ ID NO: 107671 - DNA, 22 bp, Artificial Sequence
  Synthetic oligonucleotide; CTA chr11 5368013 5368034 5368030 5368035 +
attatatcttacaccccacaac

SEQ ID NO: 107672 - DNA, 22 bp, Artificial Sequence
  Synthetic oligonucleotide; TTA chr11 5368017 5368038 5368034 5368039 +
tatcttacaccccacaactaac

SEQ ID NO: 107673 - DNA, 22 bp, Artificial Sequence
  Synthetic oligonucleotide; CTT chr11 5368023 5368044 5368040 5368045 +
acaccccacaactaacccaagc

SEQ ID NO: 107674 - DNA, 22 bp, Artificial Sequence
  Synthetic oligonucleotide; TTA chr11 5368024 5368045 5368041 5368046 +
caccccacaactaacccaagct

SEQ ID NO: 107675 - DNA, 22 bp, Artificial Sequence
  Synthetic oligonucleotide; CTA chr11 5368037 5368058 5368054 5368059 +
acccaagcttcacttggttctt

SEQ ID NO: 107676 - DNA, 22 bp, Artificial Sequence
  Synthetic oligonucleotide; CTT chr11 5368047 5368068 5368064 5368069 +
cacttggttctttgctcctatg

SEQ ID NO: 107677 - DNA, 22 bp, Artificial Sequence
  Synthetic oligonucleotide; TTC chr11 5368048 5368069 5368065 5368070 +
acttggttctttgctcctatgg

SEQ ID NO: 107678 - DNA, 22 bp, Artificial Sequence
  Synthetic oligonucleotide; CTT chr11 5368052 5368073 5368069 5368074 +
ggttctttgctcctatggagac

SEQ ID NO: 107679 - DNA, 22 bp, Artificial Sequence
  Synthetic oligonucleotide; TTG chr11 5368053 5368074 5368070 5368075 +
gttctttgctcctatggagacc

SEQ ID NO: 107680 - DNA, 22 bp, Artificial Sequence
  Synthetic oligonucleotide; TTC chr11 5368057 5368078 5368074 5368079 +
tttgctcctatggagacccagg

SEQ ID NO: 107681 - DNA, 22 bp, Artificial Sequence
  Synthetic oligonucleotide; CTT chr11 5368059 5368080 5368076 5368081 +
tgctcctatggagacccaggct

SEQ ID NO: 107682 - DNA, 22 bp, Artificial Sequence
  Synthetic oligonucleotide; TTT chr11 5368060 5368081 5368077 5368082 +
gctcctatggagacccaggctc

SEQ ID NO: 107683 - DNA, 22 bp, Artificial Sequence
  Synthetic oligonucleotide; TTG chr11 5368061 5368082 5368078 5368083 +
ctcctatggagacccaggctca

SEQ ID NO: 107684 - DNA, 22 bp, Artificial Sequence
  Synthetic oligonucleotide; CTC chr11 5368064 5368085 5368081 5368086 +
ctatggagacccaggctcactc

SEQ ID NO: 107685 - DNA, 22 bp, Artificial Sequence
  Synthetic oligonucleotide; CTA chr11 5368067 5368088 5368084 5368089 +
tggagacccaggctcactcaga

SEQ ID NO: 107686 - DNA, 22 bp, Artificial Sequence
  Synthetic oligonucleotide; CTC chr11 5368082 5368103 5368099 5368104 +
actcagaactctctttctttgt

SEQ ID NO: 107687 - DNA, 22 bp, Artificial Sequence
  Synthetic oligonucleotide; CTC chr11 5368086 5368107 5368103 5368108 +
agaactctctttctttgttttt

SEQ ID NO: 107688 - DNA, 22 bp, Artificial Sequence
  Synthetic oligonucleotide; CTC chr11 5368093 5368114 5368110 5368115 +
tctttctttgttttttcctctg

SEQ ID NO: 107689 - DNA, 22 bp, Artificial Sequence
  Synthetic oligonucleotide; CTC chr11 5368095 5368116 5368112 5368117 +
tttctttgttttttcctctgcc

SEQ ID NO: 107690 - DNA, 22 bp, Artificial Sequence
  Synthetic oligonucleotide; CTT chr11 5368097 5368118 5368114 5368119 +
tctttgttttttcctctgccat

SEQ ID NO: 107691 - DNA, 22 bp, Artificial Sequence
  Synthetic oligonucleotide; TTT chr11 5368098 5368119 5368115 5368120 +
ctttgttttttcctctgccatt

SEQ ID NO: 107692 - DNA, 22 bp, Artificial Sequence
  Synthetic oligonucleotide; TTC chr11 5368099 5368120 5368116 5368121 +
tttgttttttcctctgccattc

SEQ ID NO: 107693 - DNA, 22 bp, Artificial Sequence
  Synthetic oligonucleotide; CTT chr11 5368101 5368122 5368118 5368123 +
tgttttttcctctgccattcag

SEQ ID NO: 107694 - DNA, 22 bp, Artificial Sequence
  Synthetic oligonucleotide; TTT chr11 5368102 5368123 5368119 5368124 +
gttttttcctctgccattcaga

SEQ ID NO: 107695 - DNA, 22 bp, Artificial Sequence
  Synthetic oligonucleotide; TTG chr11 5368103 5368124 5368120 5368125 +
ttttttcctctgccattcagat

SEQ ID NO: 107696 - DNA, 22 bp, Artificial Sequence
  Synthetic oligonucleotide; TTT chr11 5368106 5368127 5368123 5368128 +
tttcctctgccattcagatttg

SEQ ID NO: 107697 - DNA, 22 bp, Artificial Sequence
  Synthetic oligonucleotide; TTT chr11 5368107 5368128 5368124 5368129 +
ttcctctgccattcagatttgt

SEQ ID NO: 107698 - DNA, 22 bp, Artificial Sequence
  Synthetic oligonucleotide; TTT chr11 5368108 5368129 5368125 5368130 +
tcctctgccattcagatttgtt

SEQ ID NO: 107699 - DNA, 22 bp, Artificial Sequence
  Synthetic oligonucleotide; TTT chr11 5368109 5368130 5368126 5368131 +
cctctgccattcagatttgttg

SEQ ID NO: 107700 - DNA, 22 bp, Artificial Sequence
  Synthetic oligonucleotide; TTC chr11 5368110 5368131 5368127 5368132 +
ctctgccattcagatttgttgc

SEQ ID NO: 107701 - DNA, 22 bp, Artificial Sequence
  Synthetic oligonucleotide; CTC chr11 5368113 5368134 5368130 5368135 +
tgccattcagatttgttgcatc

SEQ ID NO: 107702 - DNA, 22 bp, Artificial Sequence
  Synthetic oligonucleotide; CTG chr11 5368115 5368136 5368132 5368137 +
ccattcagatttgttgcatctt

SEQ ID NO: 107703 - DNA, 22 bp, Artificial Sequence
  Synthetic oligonucleotide; TTC chr11 5368121 5368142 5368138 5368143 +
agatttgttgcatcttcaacca

SEQ ID NO: 107704 - DNA, 22 bp, Artificial Sequence
  Synthetic oligonucleotide; TTT chr11 5368127 5368148 5368144 5368149 +
gttgcatcttcaaccaataact

SEQ ID NO: 107705 - DNA, 22 bp, Artificial Sequence
  Synthetic oligonucleotide; TTG chr11 5368128 5368149 5368145 5368150 +
ttgcatcttcaaccaataactt

SEQ ID NO: 107706 - DNA, 22 bp, Artificial Sequence
  Synthetic oligonucleotide; TTG chr11 5368131 5368152 5368148 5368153 +
catcttcaaccaataacttaac

SEQ ID NO: 107707 - DNA, 22 bp, Artificial Sequence
  Synthetic oligonucleotide; CTT chr11 5368137 5368158 5368154 5368159 +
caaccaataacttaactatgaa

SEQ ID NO: 107708 - DNA, 22 bp, Artificial Sequence
  Synthetic oligonucleotide; TTC chr11 5368138 5368159 5368155 5368160 +
aaccaataacttaactatgaac

SEQ ID NO: 107709 - DNA, 22 bp, Artificial Sequence
  Synthetic oligonucleotide; CTT chr11 5368150 5368171 5368167 5368172 +
aactatgaaccagcatgaaaaa

SEQ ID NO: 107710 - DNA, 22 bp, Artificial Sequence
  Synthetic oligonucleotide; TTA chr11 5368151 5368172 5368168 5368173 +
actatgaaccagcatgaaaaat

SEQ ID NO: 107711 - DNA, 22 bp, Artificial Sequence
  Synthetic oligonucleotide; CTA chr11 5368155 5368176 5368172 5368177 +
tgaaccagcatgaaaaatcctg

SEQ ID NO: 107712 - DNA, 22 bp, Artificial Sequence
  Synthetic oligonucleotide; CTG chr11 5368177 5368198 5368194 5368199 +
ttaagtgttctgtaggcttctt

SEQ ID NO: 107713 - DNA, 22 bp, Artificial Sequence
  Synthetic oligonucleotide; TTA chr11 5368180 5368201 5368197 5368202 +
agtgttctgtaggcttcttgaa

SEQ ID NO: 107714 - DNA, 22 bp, Artificial Sequence
  Synthetic oligonucleotide; TTC chr11 5368187 5368208 5368204 5368209 +
tgtaggcttcttgaaacctatt

SEQ ID NO: 107715 - DNA, 22 bp, Artificial Sequence
  Synthetic oligonucleotide; CTG chr11 5368189 5368210 5368206 5368211 +
taggcttcttgaaacctattgt

SEQ ID NO: 107716 - DNA, 22 bp, Artificial Sequence
  Synthetic oligonucleotide; CTT chr11 5368196 5368217 5368213 5368218 +
cttgaaacctattgtttcatgc

SEQ ID NO: 107717 - DNA, 22 bp, Artificial Sequence
  Synthetic oligonucleotide; TTC chr11 5368197 5368218 5368214 5368219 +
ttgaaacctattgtttcatgct

SEQ ID NO: 107718 - DNA, 22 bp, Artificial Sequence
  Synthetic oligonucleotide; CTT chr11 5368199 5368220 5368216 5368221 +
gaaacctattgtttcatgcttc

SEQ ID NO: 107719 - DNA, 22 bp, Artificial Sequence
  Synthetic oligonucleotide; TTG chr11 5368200 5368221 5368217 5368222 +
aaacctattgtttcatgcttct

SEQ ID NO: 107720 - DNA, 22 bp, Artificial Sequence
  Synthetic oligonucleotide; CTA chr11 5368207 5368228 5368224 5368229 +
ttgtttcatgcttcttcataca

SEQ ID NO: 107721 - DNA, 22 bp, Artificial Sequence
  Synthetic oligonucleotide; TTG chr11 5368210 5368231 5368227 5368232 +
tttcatgcttcttcatacagtc

SEQ ID NO: 107722 - DNA, 22 bp, Artificial Sequence
  Synthetic oligonucleotide; TTT chr11 5368213 5368234 5368230 5368235 +
catgcttcttcatacagtctta

SEQ ID NO: 107723 - DNA, 22 bp, Artificial Sequence
  Synthetic oligonucleotide; TTC chr11 5368214 5368235 5368231 5368236 +
atgcttcttcatacagtcttat

SEQ ID NO: 107724 - DNA, 22 bp, Artificial Sequence
  Synthetic oligonucleotide; CTT chr11 5368220 5368241 5368237 5368242 +
cttcatacagtcttatgcagta

SEQ ID NO: 107725 - DNA, 22 bp, Artificial Sequence
  Synthetic oligonucleotide; TTC chr11 5368221 5368242 5368238 5368243 +
ttcatacagtcttatgcagtag

SEQ ID NO: 107726 - DNA, 22 bp, Artificial Sequence
  Synthetic oligonucleotide; CTT chr11 5368223 5368244 5368240 5368245 +
catacagtcttatgcagtagtt

SEQ ID NO: 107727 - DNA, 22 bp, Artificial Sequence
  Synthetic oligonucleotide; TTC chr11 5368224 5368245 5368241 5368246 +
atacagtcttatgcagtagttt

SEQ ID NO: 107728 - DNA, 22 bp, Artificial Sequence
  Synthetic oligonucleotide; CTT chr11 5368234 5368255 5368251 5368256 +
atgcagtagttttgggaattaa

SEQ ID NO: 107729 - DNA, 22 bp, Artificial Sequence
  Synthetic oligonucleotide; TTA chr11 5368235 5368256 5368252 5368257 +
tgcagtagttttgggaattaaa

SEQ ID NO: 107730 - DNA, 22 bp, Artificial Sequence
  Synthetic oligonucleotide; TTT chr11 5368246 5368267 5368263 5368268 +
tgggaattaaacagtttggttt

SEQ ID NO: 107731 - DNA, 22 bp, Artificial Sequence
  Synthetic oligonucleotide; TTT chr11 5368247 5368268 5368264 5368269 +
gggaattaaacagtttggttta

SEQ ID NO: 107732 - DNA, 22 bp, Artificial Sequence
  Synthetic oligonucleotide; TTG chr11 5368248 5368269 5368265 5368270 +
ggaattaaacagtttggtttac

SEQ ID NO: 107733 - DNA, 22 bp, Artificial Sequence
  Synthetic oligonucleotide; TTA chr11 5368255 5368276 5368272 5368277 +
aacagtttggtttacaatccca

SEQ ID NO: 107734 - DNA, 22 bp, Artificial Sequence
  Synthetic oligonucleotide; TTT chr11 5368263 5368284 5368280 5368285 +
ggtttacaatcccaccttccac

SEQ ID NO: 107735 - DNA, 22 bp, Artificial Sequence
  Synthetic oligonucleotide; TTG chr11 5368264 5368285 5368281 5368286 +
gtttacaatcccaccttccact

SEQ ID NO: 107736 - DNA, 22 bp, Artificial Sequence
  Synthetic oligonucleotide; TTT chr11 5368268 5368289 5368285 5368290 +
acaatcccaccttccacttatt

SEQ ID NO: 107737 - DNA, 22 bp, Artificial Sequence
  Synthetic oligonucleotide; TTA chr11 5368269 5368290 5368286 5368291 +
caatcccaccttccacttattg

SEQ ID NO: 107738 - DNA, 22 bp, Artificial Sequence
  Synthetic oligonucleotide; CTT chr11 5368281 5368302 5368298 5368303 +
ccacttattggctgcgtaccct

SEQ ID NO: 107739 - DNA, 22 bp, Artificial Sequence
  Synthetic oligonucleotide; TTC chr11 5368282 5368303 5368299 5368304 +
cacttattggctgcgtacccta

SEQ ID NO: 107740 - DNA, 22 bp, Artificial Sequence
  Synthetic oligonucleotide; CTT chr11 5368287 5368308 5368304 5368309 +
attggctgcgtaccctatagca

SEQ ID NO: 107741 - DNA, 22 bp, Artificial Sequence
  Synthetic oligonucleotide; TTA chr11 5368288 5368309 5368305 5368310 +
ttggctgcgtaccctatagcaa

SEQ ID NO: 107742 - DNA, 22 bp, Artificial Sequence
  Synthetic oligonucleotide; TTG chr11 5368291 5368312 5368308 5368313 +
gctgcgtaccctatagcaaagc

SEQ ID NO: 107743 - DNA, 22 bp, Artificial Sequence
  Synthetic oligonucleotide; CTG chr11 5368295 5368316 5368312 5368317 +
cgtaccctatagcaaagcaatt

SEQ ID NO: 107744 - DNA, 22 bp, Artificial Sequence
  Synthetic oligonucleotide; CTA chr11 5368304 5368325 5368321 5368326 +
tagcaaagcaatttatctttct

SEQ ID NO: 107745 - DNA, 22 bp, Artificial Sequence
  Synthetic oligonucleotide; TTT chr11 5368318 5368339 5368335 5368340 +
atctttctgtgttttggtccac

SEQ ID NO: 107746 - DNA, 22 bp, Artificial Sequence
  Synthetic oligonucleotide; TTA chr11 5368319 5368340 5368336 5368341 +
tctttctgtgttttggtccact

SEQ ID NO: 107747 - DNA, 22 bp, Artificial Sequence
  Synthetic oligonucleotide; CTT chr11 5368323 5368344 5368340 5368345 +
tctgtgttttggtccactcatc

SEQ ID NO: 107748 - DNA, 22 bp, Artificial Sequence
  Synthetic oligonucleotide; TTT chr11 5368324 5368345 5368341 5368346 +
ctgtgttttggtccactcatct

SEQ ID NO: 107749 - DNA, 22 bp, Artificial Sequence
  Synthetic oligonucleotide; TTC chr11 5368325 5368346 5368342 5368347 +
tgtgttttggtccactcatctt

SEQ ID NO: 107750 - DNA, 22 bp, Artificial Sequence
  Synthetic oligonucleotide; CTG chr11 5368327 5368348 5368344 5368349 +
tgttttggtccactcatcttta

SEQ ID NO: 107751 - DNA, 22 bp, Artificial Sequence
  Synthetic oligonucleotide; TTT chr11 5368332 5368353 5368349 5368354 +
tggtccactcatctttaagtgg

SEQ ID NO: 107752 - DNA, 22 bp, Artificial Sequence
  Synthetic oligonucleotide; TTT chr11 5368333 5368354 5368350 5368355 +
ggtccactcatctttaagtggg

SEQ ID NO: 107753 - DNA, 22 bp, Artificial Sequence
  Synthetic oligonucleotide; TTG chr11 5368334 5368355 5368351 5368356 +
gtccactcatctttaagtgggg

SEQ ID NO: 107754 - DNA, 22 bp, Artificial Sequence
  Synthetic oligonucleotide; CTC chr11 5368342 5368363 5368359 5368364 +
atctttaagtggggataccaat

SEQ ID NO: 107755 - DNA, 22 bp, Artificial Sequence
  Synthetic oligonucleotide; CTT chr11 5368347 5368368 5368364 5368369 +
taagtggggataccaatagtac

SEQ ID NO: 107756 - DNA, 22 bp, Artificial Sequence
  Synthetic oligonucleotide; TTT chr11 5368348 5368369 5368365 5368370 +
aagtggggataccaatagtacc

SEQ ID NO: 107757 - DNA, 22 bp, Artificial Sequence
  Synthetic oligonucleotide; TTA chr11 5368349 5368370 5368366 5368371 +
agtggggataccaatagtaccc

SEQ ID NO: 107758 - DNA, 22 bp, Artificial Sequence
  Synthetic oligonucleotide; TTG chr11 5368380 5368401 5368397 5368402 +
aattattttaatgattaaatac

SEQ ID NO: 107759 - DNA, 22 bp, Artificial Sequence
  Synthetic oligonucleotide; TTA chr11 5368385 5368406 5368402 5368407 +
ttttaatgattaaatacattaa

SEQ ID NO: 107760 - DNA, 22 bp, Artificial Sequence
  Synthetic oligonucleotide; TTT chr11 5368388 5368409 5368405 5368410 +
taatgattaaatacattaatat

SEQ ID NO: 107761 - DNA, 22 bp, Artificial Sequence
  Synthetic oligonucleotide; TTT chr11 5368389 5368410 5368406 5368411 +
aatgattaaatacattaatatg

SEQ ID NO: 107762 - DNA, 22 bp, Artificial Sequence
  Synthetic oligonucleotide; TTA chr11 5368390 5368411 5368407 5368412 +
atgattaaatacattaatatgt

SEQ ID NO: 107763 - DNA, 22 bp, Artificial Sequence
  Synthetic oligonucleotide; TTA chr11 5368397 5368418 5368414 5368419 +
aatacattaatatgtctaacgt

SEQ ID NO: 107764 - DNA, 22 bp, Artificial Sequence
  Synthetic oligonucleotide; TTA chr11 5368406 5368427 5368423 5368428 +
atatgtctaacgtgttcaatag

SEQ ID NO: 107765 - DNA, 22 bp, Artificial Sequence
  Synthetic oligonucleotide; CTA chr11 5368415 5368436 5368432 5368437 +
acgtgttcaatagtgcctggtc

SEQ ID NO: 107766 - DNA, 22 bp, Artificial Sequence
  Synthetic oligonucleotide; TTC chr11 5368423 5368444 5368440 5368445 +
aatagtgcctggtccattgtaa

SEQ ID NO: 107767 - DNA, 22 bp, Artificial Sequence
  Synthetic oligonucleotide; CTG chr11 5368434 5368455 5368451 5368456 +
gtccattgtaagtattatagaa

SEQ ID NO: 107768 - DNA, 22 bp, Artificial Sequence
  Synthetic oligonucleotide; TTG chr11 5368442 5368463 5368459 5368464 +
taagtattatagaaatcattgc

SEQ ID NO: 107769 - DNA, 22 bp, Artificial Sequence
  Synthetic oligonucleotide; TTA chr11 5368451 5368472 5368468 5368473 +
tagaaatcattgctattattac

SEQ ID NO: 107770 - DNA, 22 bp, Artificial Sequence
  Synthetic oligonucleotide; TTG chr11 5368463 5368484 5368480 5368485 +
ctattattactataatcatcat

SEQ ID NO: 107771 - DNA, 22 bp, Artificial Sequence
  Synthetic oligonucleotide; CTA chr11 5368466 5368487 5368483 5368488 +
ttattactataatcatcattga

SEQ ID NO: 107772 - DNA, 22 bp, Artificial Sequence
  Synthetic oligonucleotide; TTA chr11 5368469 5368490 5368486 5368491 +
ttactataatcatcattgaaaa

SEQ ID NO: 107773 - DNA, 22 bp, Artificial Sequence
  Synthetic oligonucleotide; TTA chr11 5368472 5368493 5368489 5368494 +
ctataatcatcattgaaaattt

SEQ ID NO: 107774 - DNA, 22 bp, Artificial Sequence
  Synthetic oligonucleotide; CTA chr11 5368475 5368496 5368492 5368497 +
taatcatcattgaaaattttgt

SEQ ID NO: 107775 - DNA, 22 bp, Artificial Sequence
  Synthetic oligonucleotide; TTG chr11 5368487 5368508 5368504 5368509 +
aaaattttgtgaaaatgagaca

SEQ ID NO: 107776 - DNA, 22 bp, Artificial Sequence
  Synthetic oligonucleotide; TTT chr11 5368494 5368515 5368511 5368516 +
tgtgaaaatgagacaatttgac

SEQ ID NO: 107777 - DNA, 22 bp, Artificial Sequence
  Synthetic oligonucleotide; TTT chr11 5368495 5368516 5368512 5368517 +
gtgaaaatgagacaatttgacc

SEQ ID NO: 107778 - DNA, 22 bp, Artificial Sequence
  Synthetic oligonucleotide; TTG chr11 5368496 5368517 5368513 5368518 +
tgaaaatgagacaatttgacct

SEQ ID NO: 107779 - DNA, 22 bp, Artificial Sequence
  Synthetic oligonucleotide; TTT chr11 5368513 5368534 5368530 5368535 +
gacctttgggctgagaagatac

SEQ ID NO: 107780 - DNA, 22 bp, Artificial Sequence
  Synthetic oligonucleotide; TTG chr11 5368514 5368535 5368531 5368536 +
acctttgggctgagaagatact

SEQ ID NO: 107781 - DNA, 22 bp, Artificial Sequence
  Synthetic oligonucleotide; CTT chr11 5368519 5368540 5368536 5368541 +
tgggctgagaagatactctgtc

SEQ ID NO: 107782 - DNA, 22 bp, Artificial Sequence
  Synthetic oligonucleotide; TTT chr11 5368520 5368541 5368537 5368542 +
gggctgagaagatactctgtct

SEQ ID NO: 107783 - DNA, 22 bp, Artificial Sequence
  Synthetic oligonucleotide; TTG chr11 5368521 5368542 5368538 5368543 +
ggctgagaagatactctgtcta

SEQ ID NO: 107784 - DNA, 22 bp, Artificial Sequence
  Synthetic oligonucleotide; CTG chr11 5368526 5368547 5368543 5368548 +
agaagatactctgtctagctct

SEQ ID NO: 107785 - DNA, 22 bp, Artificial Sequence
  Synthetic oligonucleotide; CTC chr11 5368537 5368558 5368554 5368559 +
tgtctagctctgacaaagaaaa

SEQ ID NO: 107786 - DNA, 22 bp, Artificial Sequence
  Synthetic oligonucleotide; CTG chr11 5368539 5368560 5368556 5368561 +
tctagctctgacaaagaaaata

SEQ ID NO: 107787 - DNA, 22 bp, Artificial Sequence
  Synthetic oligonucleotide; CTA chr11 5368543 5368564 5368560 5368565 +
gctctgacaaagaaaataaaaa

SEQ ID NO: 107788 - DNA, 22 bp, Artificial Sequence
  Synthetic oligonucleotide; CTC chr11 5368547 5368568 5368564 5368569 +
tgacaaagaaaataaaaacctt

SEQ ID NO: 107789 - DNA, 22 bp, Artificial Sequence
  Synthetic oligonucleotide; CTG chr11 5368549 5368570 5368566 5368571 +
acaaagaaaataaaaaccttta

SEQ ID NO: 107790 - DNA, 22 bp, Artificial Sequence
  Synthetic oligonucleotide; CTT chr11 5368569 5368590 5368586 5368591 +
taaaaagctctctcacaatcgt

SEQ ID NO: 107791 - DNA, 22 bp, Artificial Sequence
  Synthetic oligonucleotide; TTT chr11 5368570 5368591 5368587 5368592 +
aaaaagctctctcacaatcgta

SEQ ID NO: 107792 - DNA, 22 bp, Artificial Sequence
  Synthetic oligonucleotide; TTA chr11 5368571 5368592 5368588 5368593 +
aaaagctctctcacaatcgtaa

SEQ ID NO: 107793 - DNA, 22 bp, Artificial Sequence
  Synthetic oligonucleotide; CTC chr11 5368579 5368600 5368596 5368601 +
tctcacaatcgtaatacttgaa

SEQ ID NO: 107794 - DNA, 22 bp, Artificial Sequence
  Synthetic oligonucleotide; CTC chr11 5368581 5368602 5368598 5368603 +
tcacaatcgtaatacttgaagt

SEQ ID NO: 107795 - DNA, 22 bp, Artificial Sequence
  Synthetic oligonucleotide; CTC chr11 5368583 5368604 5368600 5368605 +
acaatcgtaatacttgaagtta

SEQ ID NO: 107796 - DNA, 22 bp, Artificial Sequence
  Synthetic oligonucleotide; CTT chr11 5368598 5368619 5368615 5368620 +
gaagttacacaagatattctaa

SEQ ID NO: 107797 - DNA, 22 bp, Artificial Sequence
  Synthetic oligonucleotide; TTG chr11 5368599 5368620 5368616 5368621 +
aagttacacaagatattctaac

SEQ ID NO: 107798 - DNA, 22 bp, Artificial Sequence
  Synthetic oligonucleotide; TTA chr11 5368605 5368626 5368622 5368627 +
cacaagatattctaacataaag

SEQ ID NO: 107799 - DNA, 22 bp, Artificial Sequence
  Synthetic oligonucleotide; TTC chr11 5368617 5368638 5368634 5368639 +
taacataaagactttgtgtttt

SEQ ID NO: 107800 - DNA, 22 bp, Artificial Sequence
  Synthetic oligonucleotide; CTA chr11 5368619 5368640 5368636 5368641 +
acataaagactttgtgttttat

SEQ ID NO: 107801 - DNA, 22 bp, Artificial Sequence
  Synthetic oligonucleotide; CTT chr11 5368631 5368652 5368648 5368653 +
tgtgttttattctcacatgcat

SEQ ID NO: 107802 - DNA, 22 bp, Artificial Sequence
  Synthetic oligonucleotide; TTT chr11 5368632 5368653 5368649 5368654 +
gtgttttattctcacatgcatc

SEQ ID NO: 107803 - DNA, 22 bp, Artificial Sequence
  Synthetic oligonucleotide; TTG chr11 5368633 5368654 5368650 5368655 +
tgttttattctcacatgcatcc

SEQ ID NO: 107804 - DNA, 22 bp, Artificial Sequence
  Synthetic oligonucleotide; TTT chr11 5368638 5368659 5368655 5368660 +
tattctcacatgcatcctgtga

SEQ ID NO: 107805 - DNA, 22 bp, Artificial Sequence
  Synthetic oligonucleotide; TTT chr11 5368639 5368660 5368656 5368661 +
attctcacatgcatcctgtgag

SEQ ID NO: 107806 - DNA, 22 bp, Artificial Sequence
  Synthetic oligonucleotide; TTA chr11 5368640 5368661 5368657 5368662 +
ttctcacatgcatcctgtgaga

SEQ ID NO: 107807 - DNA, 22 bp, Artificial Sequence
  Synthetic oligonucleotide; TTC chr11 5368643 5368664 5368660 5368665 +
tcacatgcatcctgtgagaaag

SEQ ID NO: 107808 - DNA, 22 bp, Artificial Sequence
  Synthetic oligonucleotide; CTC chr11 5368645 5368666 5368662 5368667 +
acatgcatcctgtgagaaagca

SEQ ID NO: 107809 - DNA, 22 bp, Artificial Sequence
  Synthetic oligonucleotide; CTG chr11 5368657 5368678 5368674 5368679 +
tgagaaagcagagcatagtaga

SEQ ID NO: 107810 - DNA, 22 bp, Artificial Sequence
  Synthetic oligonucleotide; TTT chr11 5368684 5368705 5368701 5368706 +
cagttttatctgtcaagagcaa

SEQ ID NO: 107811 - DNA, 22 bp, Artificial Sequence
  Synthetic oligonucleotide; TTC chr11 5368685 5368706 5368702 5368707 +
agttttatctgtcaagagcaaa

SEQ ID NO: 107812 - DNA, 22 bp, Artificial Sequence
  Synthetic oligonucleotide; TTT chr11 5368690 5368711 5368707 5368712 +
tatctgtcaagagcaaaatttg

SEQ ID NO: 107813 - DNA, 22 bp, Artificial Sequence
  Synthetic oligonucleotide; TTT chr11 5368691 5368712 5368708 5368713 +
atctgtcaagagcaaaatttga

SEQ ID NO: 107814 - DNA, 22 bp, Artificial Sequence
  Synthetic oligonucleotide; TTA chr11 5368692 5368713 5368709 5368714 +
tctgtcaagagcaaaatttgag

SEQ ID NO: 107815 - DNA, 22 bp, Artificial Sequence
  Synthetic oligonucleotide; CTG chr11 5368696 5368717 5368713 5368718 +
tcaagagcaaaatttgaggttt

SEQ ID NO: 107816 - DNA, 22 bp, Artificial Sequence
  Synthetic oligonucleotide; TTT chr11 5368711 5368732 5368728 5368733 +
gaggtttctaaacattgagtta

SEQ ID NO: 107817 - DNA, 22 bp, Artificial Sequence
  Synthetic oligonucleotide; TTG chr11 5368712 5368733 5368729 5368734 +
aggtttctaaacattgagttac

SEQ ID NO: 107818 - DNA, 22 bp, Artificial Sequence
  Synthetic oligonucleotide; TTT chr11 5368718 5368739 5368735 5368740 +
ctaaacattgagttactcaaaa

SEQ ID NO: 107819 - DNA, 22 bp, Artificial Sequence
  Synthetic oligonucleotide; TTC chr11 5368719 5368740 5368736 5368741 +
taaacattgagttactcaaaat

SEQ ID NO: 107820 - DNA, 22 bp, Artificial Sequence
  Synthetic oligonucleotide; CTA chr11 5368721 5368742 5368738 5368743 +
aacattgagttactcaaaatat

SEQ ID NO: 107821 - DNA, 22 bp, Artificial Sequence
  Synthetic oligonucleotide; TTG chr11 5368728 5368749 5368745 5368750 +
agttactcaaaatattatgctt

SEQ ID NO: 107822 - DNA, 22 bp, Artificial Sequence
  Synthetic oligonucleotide; TTA chr11 5368733 5368754 5368750 5368755 +
ctcaaaatattatgctttaaaa

SEQ ID NO: 107823 - DNA, 22 bp, Artificial Sequence
  Synthetic oligonucleotide; CTC chr11 5368736 5368757 5368753 5368758 +
aaaatattatgctttaaaactg

SEQ ID NO: 107824 - DNA, 22 bp, Artificial Sequence
  Synthetic oligonucleotide; TTA chr11 5368745 5368766 5368762 5368767 +
tgctttaaaactgaaggaagca

SEQ ID NO: 107825 - DNA, 22 bp, Artificial Sequence
  Synthetic oligonucleotide; CTT chr11 5368750 5368771 5368767 5368772 +
taaaactgaaggaagcaaaacc

SEQ ID NO: 107826 - DNA, 22 bp, Artificial Sequence
  Synthetic oligonucleotide; TTT chr11 5368751 5368772 5368768 5368773 +
aaaactgaaggaagcaaaacct

SEQ ID NO: 107827 - DNA, 22 bp, Artificial Sequence
  Synthetic oligonucleotide; TTA chr11 5368752 5368773 5368769 5368774 +
aaactgaaggaagcaaaacctc

SEQ ID NO: 107828 - DNA, 22 bp, Artificial Sequence
  Synthetic oligonucleotide; CTG chr11 5368758 5368779 5368775 5368780 +
aaggaagcaaaacctcagcata

SEQ ID NO: 107829 - DNA, 22 bp, Artificial Sequence
  Synthetic oligonucleotide; CTC chr11 5368774 5368795 5368791 5368796 +
agcataggccttctgaaagctt

SEQ ID NO: 107830 - DNA, 22 bp, Artificial Sequence
  Synthetic oligonucleotide; CTT chr11 5368786 5368807 5368803 5368808 +
ctgaaagcttacgatggctttt

SEQ ID NO: 107831 - DNA, 22 bp, Artificial Sequence
  Synthetic oligonucleotide; TTC chr11 5368787 5368808 5368804 5368809 +
tgaaagcttacgatggcttttc

SEQ ID NO: 107832 - DNA, 22 bp, Artificial Sequence
  Synthetic oligonucleotide; CTG chr11 5368789 5368810 5368806 5368811 +
aaagcttacgatggcttttctt

SEQ ID NO: 107833 - DNA, 22 bp, Artificial Sequence
  Synthetic oligonucleotide; CTT chr11 5368796 5368817 5368813 5368818 +
acgatggcttttctttttttcc

SEQ ID NO: 107834 - DNA, 22 bp, Artificial Sequence
  Synthetic oligonucleotide; TTA chr11 5368797 5368818 5368814 5368819 +
cgatggcttttctttttttccc

SEQ ID NO: 107835 - DNA, 22 bp, Artificial Sequence
  Synthetic oligonucleotide; CTT chr11 5368806 5368827 5368823 5368828 +
ttctttttttcccccagggcaa

SEQ ID NO: 107836 - DNA, 22 bp, Artificial Sequence
  Synthetic oligonucleotide; TTT chr11 5368807 5368828 5368824 5368829 +
tctttttttcccccagggcaaa

SEQ ID NO: 107837 - DNA, 22 bp, Artificial Sequence
  Synthetic oligonucleotide; TTT chr11 5368808 5368829 5368825 5368830 +
ctttttttcccccagggcaaag

SEQ ID NO: 107838 - DNA, 22 bp, Artificial Sequence
  Synthetic oligonucleotide; TTC chr11 5368809 5368830 5368826 5368831 +
tttttttcccccagggcaaagt

SEQ ID NO: 107839 - DNA, 22 bp, Artificial Sequence
  Synthetic oligonucleotide; CTT chr11 5368811 5368832 5368828 5368833 +
tttttcccccagggcaaagtgt

SEQ ID NO: 107840 - DNA, 22 bp, Artificial Sequence
  Synthetic oligonucleotide; TTT chr11 5368812 5368833 5368829 5368834 +
ttttcccccagggcaaagtgtt

SEQ ID NO: 107841 - DNA, 22 bp, Artificial Sequence
  Synthetic oligonucleotide; TTT chr11 5368813 5368834 5368830 5368835 +
tttcccccagggcaaagtgttc

SEQ ID NO: 107842 - DNA, 22 bp, Artificial Sequence
  Synthetic oligonucleotide; TTT chr11 5368814 5368835 5368831 5368836 +
ttcccccagggcaaagtgttct

SEQ ID NO: 107843 - DNA, 22 bp, Artificial Sequence
  Synthetic oligonucleotide; TTT chr11 5368815 5368836 5368832 5368837 +
tcccccagggcaaagtgttctt

SEQ ID NO: 107844 - DNA, 22 bp, Artificial Sequence
  Synthetic oligonucleotide; TTT chr11 5368816 5368837 5368833 5368838 +
cccccagggcaaagtgttctta

SEQ ID NO: 107845 - DNA, 22 bp, Artificial Sequence
  Synthetic oligonucleotide; TTC chr11 5368817 5368838 5368834 5368839 +
ccccagggcaaagtgttcttag

SEQ ID NO: 107846 - DNA, 22 bp, Artificial Sequence
  Synthetic oligonucleotide; TTC chr11 5368835 5368856 5368852 5368857 +
ttaggagcaagatgttggaatt

SEQ ID NO: 107847 - DNA, 22 bp, Artificial Sequence
  Synthetic oligonucleotide; CTT chr11 5368837 5368858 5368854 5368859 +
aggagcaagatgttggaattta

SEQ ID NO: 107848 - DNA, 22 bp, Artificial Sequence
  Synthetic oligonucleotide; TTA chr11 5368838 5368859 5368855 5368860 +
ggagcaagatgttggaatttac

SEQ ID NO: 107849 - DNA, 22 bp, Artificial Sequence
  Synthetic oligonucleotide; TTG chr11 5368852 5368873 5368869 5368874 +
gaatttacaccattcttatgtg

SEQ ID NO: 107850 - DNA, 22 bp, Artificial Sequence
  Synthetic oligonucleotide; TTT chr11 5368858 5368879 5368875 5368880 +
acaccattcttatgtggattaa

SEQ ID NO: 107851 - DNA, 22 bp, Artificial Sequence
  Synthetic oligonucleotide; TTA chr11 5368859 5368880 5368876 5368881 +
caccattcttatgtggattaag

SEQ ID NO: 107852 - DNA, 22 bp, Artificial Sequence
  Synthetic oligonucleotide; TTC chr11 5368867 5368888 5368884 5368889 +
ttatgtggattaagagaggttt

SEQ ID NO: 107853 - DNA, 22 bp, Artificial Sequence
  Synthetic oligonucleotide; CTT chr11 5368869 5368890 5368886 5368891 +
atgtggattaagagaggtttcc

SEQ ID NO: 107854 - DNA, 22 bp, Artificial Sequence
  Synthetic oligonucleotide; TTA chr11 5368870 5368891 5368887 5368892 +
tgtggattaagagaggtttcct

SEQ ID NO: 107855 - DNA, 22 bp, Artificial Sequence
  Synthetic oligonucleotide; TTA chr11 5368879 5368900 5368896 5368901 +
agagaggtttccttctgaggat

SEQ ID NO: 107856 - DNA, 22 bp, Artificial Sequence
  Synthetic oligonucleotide; TTT chr11 5368889 5368910 5368906 5368911 +
ccttctgaggatgttggaagcc

SEQ ID NO: 107857 - DNA, 22 bp, Artificial Sequence
  Synthetic oligonucleotide; TTC chr11 5368890 5368911 5368907 5368912 +
cttctgaggatgttggaagcct

SEQ ID NO: 107858 - DNA, 22 bp, Artificial Sequence
  Synthetic oligonucleotide; CTT chr11 5368893 5368914 5368910 5368915 +
ctgaggatgttggaagcctctg

SEQ ID NO: 107859 - DNA, 22 bp, Artificial Sequence
  Synthetic oligonucleotide; TTC chr11 5368894 5368915 5368911 5368916 +
tgaggatgttggaagcctctgt

SEQ ID NO: 107860 - DNA, 22 bp, Artificial Sequence
  Synthetic oligonucleotide; CTG chr11 5368896 5368917 5368913 5368918 +
aggatgttggaagcctctgttc

SEQ ID NO: 107861 - DNA, 22 bp, Artificial Sequence
  Synthetic oligonucleotide; TTG chr11 5368905 5368926 5368922 5368927 +
gaagcctctgttcaggaacttt

SEQ ID NO: 107862 - DNA, 22 bp, Artificial Sequence
  Synthetic oligonucleotide; CTC chr11 5368913 5368934 5368930 5368935 +
tgttcaggaactttttctttcc

SEQ ID NO: 107863 - DNA, 22 bp, Artificial Sequence
  Synthetic oligonucleotide; CTG chr11 5368915 5368936 5368932 5368937 +
ttcaggaactttttctttccgg

SEQ ID NO: 107864 - DNA, 22 bp, Artificial Sequence
  Synthetic oligonucleotide; TTC chr11 5368918 5368939 5368935 5368940 +
aggaactttttctttccggatc

SEQ ID NO: 107865 - DNA, 22 bp, Artificial Sequence
  Synthetic oligonucleotide; CTT chr11 5368926 5368947 5368943 5368948 +
tttctttccggatcatgcttac

SEQ ID NO: 107866 - DNA, 22 bp, Artificial Sequence
  Synthetic oligonucleotide; TTT chr11 5368927 5368948 5368944 5368949 +
ttctttccggatcatgcttaca

SEQ ID NO: 107867 - DNA, 22 bp, Artificial Sequence
  Synthetic oligonucleotide; TTT chr11 5368928 5368949 5368945 5368950 +
tctttccggatcatgcttacag

SEQ ID NO: 107868 - DNA, 22 bp, Artificial Sequence
  Synthetic oligonucleotide; TTT chr11 5368929 5368950 5368946 5368951 +
ctttccggatcatgcttacaga

SEQ ID NO: 107869 - DNA, 22 bp, Artificial Sequence
  Synthetic oligonucleotide; TTC chr11 5368930 5368951 5368947 5368952 +
tttccggatcatgcttacagat

SEQ ID NO: 107870 - DNA, 22 bp, Artificial Sequence
  Synthetic oligonucleotide; CTT chr11 5368932 5368953 5368949 5368954 +
tccggatcatgcttacagatct

SEQ ID NO: 107871 - DNA, 22 bp, Artificial Sequence
  Synthetic oligonucleotide; TTT chr11 5368933 5368954 5368950 5368955 +
ccggatcatgcttacagatctg

SEQ ID NO: 107872 - DNA, 22 bp, Artificial Sequence
  Synthetic oligonucleotide; TTC chr11 5368934 5368955 5368951 5368956 +
cggatcatgcttacagatctga

SEQ ID NO: 107873 - DNA, 22 bp, Artificial Sequence
  Synthetic oligonucleotide; CTT chr11 5368946 5368967 5368963 5368968 +
acagatctgattacacccaaga

SEQ ID NO: 107874 - DNA, 22 bp, Artificial Sequence
  Synthetic oligonucleotide; TTA chr11 5368947 5368968 5368964 5368969 +
cagatctgattacacccaagaa

SEQ ID NO: 107875 - DNA, 22 bp, Artificial Sequence
  Synthetic oligonucleotide; CTG chr11 5368955 5368976 5368972 5368977 +
attacacccaagaagcctaaat

SEQ ID NO: 107876 - DNA, 22 bp, Artificial Sequence
  Synthetic oligonucleotide; TTA chr11 5368959 5368980 5368976 5368981 +
cacccaagaagcctaaattgtg

SEQ ID NO: 107877 - DNA, 22 bp, Artificial Sequence
  Synthetic oligonucleotide; CTA chr11 5368974 5368995 5368991 5368996 +
aattgtgtgtcagccaactaga

SEQ ID NO: 107878 - DNA, 22 bp, Artificial Sequence
  Synthetic oligonucleotide; TTG chr11 5368979 5369000 5368996 5369001 +
tgtgtcagccaactagatgtgg

SEQ ID NO: 107879 - DNA, 22 bp, Artificial Sequence
  Synthetic oligonucleotide; CTA chr11 5368994 5369015 5369011 5369016 +
gatgtggacaagatagttttta

SEQ ID NO: 107880 - DNA, 22 bp, Artificial Sequence
  Synthetic oligonucleotide; TTT chr11 5369013 5369034 5369030 5369035 +
ttagcctccttctgggactaga

SEQ ID NO: 107881 - DNA, 22 bp, Artificial Sequence
  Synthetic oligonucleotide; TTT chr11 5369014 5369035 5369031 5369036 +
tagcctccttctgggactagat

SEQ ID NO: 107882 - DNA, 22 bp, Artificial Sequence
  Synthetic oligonucleotide; TTT chr11 5369015 5369036 5369032 5369037 +
agcctccttctgggactagata

SEQ ID NO: 107883 - DNA, 22 bp, Artificial Sequence
  Synthetic oligonucleotide; TTA chr11 5369016 5369037 5369033 5369038 +
gcctccttctgggactagatat

SEQ ID NO: 107884 - DNA, 22 bp, Artificial Sequence
  Synthetic oligonucleotide; CTC chr11 5369021 5369042 5369038 5369043 +
cttctgggactagatattcatt

SEQ ID NO: 107885 - DNA, 22 bp, Artificial Sequence
  Synthetic oligonucleotide; CTT chr11 5369024 5369045 5369041 5369046 +
ctgggactagatattcattcac

SEQ ID NO: 107886 - DNA, 22 bp, Artificial Sequence
  Synthetic oligonucleotide; TTC chr11 5369025 5369046 5369042 5369047 +
tgggactagatattcattcacc

SEQ ID NO: 107887 - DNA, 22 bp, Artificial Sequence
  Synthetic oligonucleotide; CTG chr11 5369027 5369048 5369044 5369049 +
ggactagatattcattcaccaa

SEQ ID NO: 107888 - DNA, 22 bp, Artificial Sequence
  Synthetic oligonucleotide; CTA chr11 5369033 5369054 5369050 5369055 +
gatattcattcaccaagatgag

SEQ ID NO: 107889 - DNA, 22 bp, Artificial Sequence
  Synthetic oligonucleotide; TTC chr11 5369040 5369061 5369057 5369062 +
attcaccaagatgagtgccttt

SEQ ID NO: 107890 - DNA, 22 bp, Artificial Sequence
  Synthetic oligonucleotide; TTC chr11 5369044 5369065 5369061 5369066 +
accaagatgagtgcctttgaag

SEQ ID NO: 107891 - DNA, 22 bp, Artificial Sequence
  Synthetic oligonucleotide; CTT chr11 5369061 5369082 5369078 5369083 +
tgaagcagaatctgtgataggg

SEQ ID NO: 107892 - DNA, 22 bp, Artificial Sequence
  Synthetic oligonucleotide; TTT chr11 5369062 5369083 5369079 5369084 +
gaagcagaatctgtgatagggt

SEQ ID NO: 107893 - DNA, 22 bp, Artificial Sequence
  Synthetic oligonucleotide; TTG chr11 5369063 5369084 5369080 5369085 +
aagcagaatctgtgatagggtg

SEQ ID NO: 107894 - DNA, 22 bp, Artificial Sequence
  Synthetic oligonucleotide; CTG chr11 5369075 5369096 5369092 5369097 +
tgatagggtggttgggccacct

SEQ ID NO: 107895 - DNA, 22 bp, Artificial Sequence
  Synthetic oligonucleotide; TTG chr11 5369089 5369110 5369106 5369111 +
ggccacctagagacatatggcc

SEQ ID NO: 107896 - DNA, 22 bp, Artificial Sequence
  Synthetic oligonucleotide; CTA chr11 5369098 5369119 5369115 5369120 +
gagacatatggccatgactaga

SEQ ID NO: 107897 - DNA, 22 bp, Artificial Sequence
  Synthetic oligonucleotide; CTA chr11 5369118 5369139 5369135 5369140 +
gaatctaaggttagacatacag

SEQ ID NO: 107898 - DNA, 22 bp, Artificial Sequence
  Synthetic oligonucleotide; CTA chr11 5369125 5369146 5369142 5369147 +
aggttagacatacagaaaggat

SEQ ID NO: 107899 - DNA, 22 bp, Artificial Sequence
  Synthetic oligonucleotide; TTA chr11 5369131 5369152 5369148 5369153 +
gacatacagaaaggatgaagtc

SEQ ID NO: 107900 - DNA, 22 bp, Artificial Sequence
  Synthetic oligonucleotide; CTT chr11 5369155 5369176 5369172 5369177 +
taaaaataggcattcattcatt

SEQ ID NO: 107901 - DNA, 22 bp, Artificial Sequence
  Synthetic oligonucleotide; TTT chr11 5369156 5369177 5369173 5369178 +
aaaaataggcattcattcattt

SEQ ID NO: 107902 - DNA, 22 bp, Artificial Sequence
  Synthetic oligonucleotide; TTA chr11 5369157 5369178 5369174 5369179 +
aaaataggcattcattcattta

SEQ ID NO: 107903 - DNA, 22 bp, Artificial Sequence
  Synthetic oligonucleotide; TTC chr11 5369170 5369191 5369187 5369192 +
attcatttattcatccattcac

SEQ ID NO: 107904 - DNA, 22 bp, Artificial Sequence
  Synthetic oligonucleotide; TTC chr11 5369174 5369195 5369191 5369196 +
atttattcatccattcacacat

SEQ ID NO: 107905 - DNA, 22 bp, Artificial Sequence
  Synthetic oligonucleotide; TTT chr11 5369178 5369199 5369195 5369200 +
attcatccattcacacatataa

SEQ ID NO: 107906 - DNA, 22 bp, Artificial Sequence
  Synthetic oligonucleotide; TTA chr11 5369179 5369200 5369196 5369201 +
ttcatccattcacacatataac

SEQ ID NO: 107907 - DNA, 22 bp, Artificial Sequence
  Synthetic oligonucleotide; TTC chr11 5369182 5369203 5369199 5369204 +
atccattcacacatataacctg

SEQ ID NO: 107908 - DNA, 22 bp, Artificial Sequence
  Synthetic oligonucleotide; TTC chr11 5369190 5369211 5369207 5369212 +
acacatataacctgagtcccta

SEQ ID NO: 107909 - DNA, 22 bp, Artificial Sequence
  Synthetic oligonucleotide; CTG chr11 5369204 5369225 5369221 5369226 +
agtccctactgattttctagta

SEQ ID NO: 107910 - DNA, 22 bp, Artificial Sequence
  Synthetic oligonucleotide; CTA chr11 5369212 5369233 5369229 5369234 +
ctgattttctagtactgtactg

SEQ ID NO: 107911 - DNA, 22 bp, Artificial Sequence
  Synthetic oligonucleotide; CTG chr11 5369215 5369236 5369232 5369237 +
attttctagtactgtactgaat

SEQ ID NO: 107912 - DNA, 22 bp, Artificial Sequence
  Synthetic oligonucleotide; TTT chr11 5369219 5369240 5369236 5369241 +
tctagtactgtactgaatgagg

SEQ ID NO: 107913 - DNA, 22 bp, Artificial Sequence
  Synthetic oligonucleotide; TTT chr11 5369220 5369241 5369237 5369242 +
ctagtactgtactgaatgaggc

SEQ ID NO: 107914 - DNA, 22 bp, Artificial Sequence
  Synthetic oligonucleotide; TTC chr11 5369221 5369242 5369238 5369243 +
tagtactgtactgaatgaggcc

SEQ ID NO: 107915 - DNA, 22 bp, Artificial Sequence
  Synthetic oligonucleotide; CTA chr11 5369223 5369244 5369240 5369245 +
gtactgtactgaatgaggccaa

SEQ ID NO: 107916 - DNA, 22 bp, Artificial Sequence
  Synthetic oligonucleotide; CTG chr11 5369229 5369250 5369246 5369251 +
tactgaatgaggccaacatgat

SEQ ID NO: 107917 - DNA, 22 bp, Artificial Sequence
  Synthetic oligonucleotide; CTG chr11 5369234 5369255 5369251 5369256 +
aatgaggccaacatgatagaag

SEQ ID NO: 107918 - DNA, 22 bp, Artificial Sequence
  Synthetic oligonucleotide; CTT chr11 5369306 5369327 5369323 5369328 +
aacaaatattaattaaagttat

SEQ ID NO: 107919 - DNA, 22 bp, Artificial Sequence
  Synthetic oligonucleotide; TTA chr11 5369307 5369328 5369324 5369329 +
acaaatattaattaaagttatt

SEQ ID NO: 107920 - DNA, 22 bp, Artificial Sequence
  Synthetic oligonucleotide; TTA chr11 5369317 5369338 5369334 5369339 +
attaaagttattattactagtt

SEQ ID NO: 107921 - DNA, 22 bp, Artificial Sequence
  Synthetic oligonucleotide; TTA chr11 5369321 5369342 5369338 5369343 +
aagttattattactagttagtg

SEQ ID NO: 107922 - DNA, 22 bp, Artificial Sequence
  Synthetic oligonucleotide; TTA chr11 5369327 5369348 5369344 5369349 +
ttattactagttagtggaatac

SEQ ID NO: 107923 - DNA, 22 bp, Artificial Sequence
  Synthetic oligonucleotide; TTA chr11 5369330 5369351 5369347 5369352 +
ttactagttagtggaatactat

SEQ ID NO: 107924 - DNA, 22 bp, Artificial Sequence
  Synthetic oligonucleotide; TTA chr11 5369333 5369354 5369350 5369355 +
ctagttagtggaatactattaa

SEQ ID NO: 107925 - DNA, 22 bp, Artificial Sequence
  Synthetic oligonucleotide; CTA chr11 5369336 5369357 5369353 5369358 +
gttagtggaatactattaacaa

SEQ ID NO: 107926 - DNA, 22 bp, Artificial Sequence
  Synthetic oligonucleotide; TTA chr11 5369340 5369361 5369357 5369362 +
gtggaatactattaacaataat

SEQ ID NO: 107927 - DNA, 22 bp, Artificial Sequence
  Synthetic oligonucleotide; CTA chr11 5369351 5369372 5369368 5369373 +
ttaacaataatattttagcagc

SEQ ID NO: 107928 - DNA, 22 bp, Artificial Sequence
  Synthetic oligonucleotide; TTA chr11 5369354 5369375 5369371 5369376 +
acaataatattttagcagccac

SEQ ID NO: 107929 - DNA, 22 bp, Artificial Sequence
  Synthetic oligonucleotide; TTT chr11 5369366 5369387 5369383 5369388 +
tagcagccactatttgcaaaat

SEQ ID NO: 107930 - DNA, 22 bp, Artificial Sequence
  Synthetic oligonucleotide; TTT chr11 5369367 5369388 5369384 5369389 +
agcagccactatttgcaaaata

SEQ ID NO: 107931 - DNA, 22 bp, Artificial Sequence
  Synthetic oligonucleotide; TTA chr11 5369368 5369389 5369385 5369390 +
gcagccactatttgcaaaatat

SEQ ID NO: 107932 - DNA, 22 bp, Artificial Sequence
  Synthetic oligonucleotide; CTA chr11 5369378 5369399 5369395 5369400 +
tttgcaaaatataacactttta

SEQ ID NO: 107933 - DNA, 22 bp, Artificial Sequence
  Synthetic oligonucleotide; TTT chr11 5369381 5369402 5369398 5369403 +
gcaaaatataacacttttagga

SEQ ID NO: 107934 - DNA, 22 bp, Artificial Sequence
  Synthetic oligonucleotide; TTG chr11 5369382 5369403 5369399 5369404 +
caaaatataacacttttaggag

SEQ ID NO: 107935 - DNA, 22 bp, Artificial Sequence
  Synthetic oligonucleotide; CTT chr11 5369397 5369418 5369414 5369419 +
ttaggagaattacatctattat

SEQ ID NO: 107936 - DNA, 22 bp, Artificial Sequence
  Synthetic oligonucleotide; TTT chr11 5369398 5369419 5369415 5369420 +
taggagaattacatctattata

SEQ ID NO: 107937 - DNA, 22 bp, Artificial Sequence
  Synthetic oligonucleotide; TTT chr11 5369399 5369420 5369416 5369421 +
aggagaattacatctattatac

SEQ ID NO: 107938 - DNA, 22 bp, Artificial Sequence
  Synthetic oligonucleotide; TTA chr11 5369400 5369421 5369417 5369422 +
ggagaattacatctattatacc

SEQ ID NO: 107939 - DNA, 22 bp, Artificial Sequence
  Synthetic oligonucleotide; TTA chr11 5369409 5369430 5369426 5369431 +
catctattatacctcagtaaaa

SEQ ID NO: 107940 - DNA, 22 bp, Artificial Sequence
  Synthetic oligonucleotide; CTA chr11 5369415 5369436 5369432 5369437 +
ttatacctcagtaaaactctat

SEQ ID NO: 107941 - DNA, 22 bp, Artificial Sequence
  Synthetic oligonucleotide; TTA chr11 5369418 5369439 5369435 5369440 +
tacctcagtaaaactctatgaa

SEQ ID NO: 107942 - DNA, 22 bp, Artificial Sequence
  Synthetic oligonucleotide; CTC chr11 5369424 5369445 5369441 5369446 +
agtaaaactctatgaaacagac

SEQ ID NO: 107943 - DNA, 22 bp, Artificial Sequence
  Synthetic oligonucleotide; CTC chr11 5369434 5369455 5369451 5369456 +
tatgaaacagactttttatata

SEQ ID NO: 107944 - DNA, 22 bp, Artificial Sequence
  Synthetic oligonucleotide; CTA chr11 5369436 5369457 5369453 5369458 +
tgaaacagactttttatatatt

SEQ ID NO: 107945 - DNA, 22 bp, Artificial Sequence
  Synthetic oligonucleotide; CTT chr11 5369448 5369469 5369465 5369470 +
tttatatattttttctggataa

SEQ ID NO: 107946 - DNA, 22 bp, Artificial Sequence
  Synthetic oligonucleotide; TTT chr11 5369449 5369470 5369466 5369471 +
ttatatattttttctggataaa

SEQ ID NO: 107947 - DNA, 22 bp, Artificial Sequence
  Synthetic oligonucleotide; TTT chr11 5369450 5369471 5369467 5369472 +
tatatattttttctggataaaa

SEQ ID NO: 107948 - DNA, 22 bp, Artificial Sequence
  Synthetic oligonucleotide; TTT chr11 5369451 5369472 5369468 5369473 +
atatattttttctggataaaaa

SEQ ID NO: 107949 - DNA, 22 bp, Artificial Sequence
  Synthetic oligonucleotide; TTA chr11 5369452 5369473 5369469 5369474 +
tatattttttctggataaaaaa

SEQ ID NO: 107950 - DNA, 22 bp, Artificial Sequence
  Synthetic oligonucleotide; TTT chr11 5369459 5369480 5369476 5369481 +
tttctggataaaaaataaaatc

SEQ ID NO: 107951 - DNA, 22 bp, Artificial Sequence
  Synthetic oligonucleotide; TTT chr11 5369460 5369481 5369477 5369482 +
ttctggataaaaaataaaatct

SEQ ID NO: 107952 - DNA, 22 bp, Artificial Sequence
  Synthetic oligonucleotide; TTT chr11 5369461 5369482 5369478 5369483 +
tctggataaaaaataaaatctg

SEQ ID NO: 107953 - DNA, 22 bp, Artificial Sequence
  Synthetic oligonucleotide; TTT chr11 5369462 5369483 5369479 5369484 +
ctggataaaaaataaaatctga

SEQ ID NO: 107954 - DNA, 22 bp, Artificial Sequence
  Synthetic oligonucleotide; TTC chr11 5369463 5369484 5369480 5369485 +
tggataaaaaataaaatctgat

SEQ ID NO: 107955 - DNA, 22 bp, Artificial Sequence
  Synthetic oligonucleotide; CTG chr11 5369465 5369486 5369482 5369487 +
gataaaaaataaaatctgataa

SEQ ID NO: 107956 - DNA, 22 bp, Artificial Sequence
  Synthetic oligonucleotide; CTG chr11 5369483 5369504 5369500 5369505 +
ataatttgagacatttaaaaaa

SEQ ID NO: 107957 - DNA, 22 bp, Artificial Sequence
  Synthetic oligonucleotide; TTT chr11 5369490 5369511 5369507 5369512 +
gagacatttaaaaaagtataca

SEQ ID NO: 107958 - DNA, 22 bp, Artificial Sequence
  Synthetic oligonucleotide; TTG chr11 5369491 5369512 5369508 5369513 +
agacatttaaaaaagtatacaa

SEQ ID NO: 107959 - DNA, 22 bp, Artificial Sequence
  Synthetic oligonucleotide; TTT chr11 5369499 5369520 5369516 5369521 +
aaaaaagtatacaactagtaag

SEQ ID NO: 107960 - DNA, 22 bp, Artificial Sequence
  Synthetic oligonucleotide; TTA chr11 5369500 5369521 5369517 5369522 +
aaaaagtatacaactagtaagt

SEQ ID NO: 107961 - DNA, 22 bp, Artificial Sequence
  Synthetic oligonucleotide; CTA chr11 5369516 5369537 5369533 5369538 +
gtaagtagttgtatttttaaaa

SEQ ID NO: 107962 - DNA, 22 bp, Artificial Sequence
  Synthetic oligonucleotide; TTG chr11 5369527 5369548 5369544 5369549 +
tatttttaaaattttccattca

SEQ ID NO: 107963 - DNA, 22 bp, Artificial Sequence
  Synthetic oligonucleotide; TTT chr11 5369532 5369553 5369549 5369554 +
ttaaaattttccattcactatc

SEQ ID NO: 107964 - DNA, 22 bp, Artificial Sequence
  Synthetic oligonucleotide; TTT chr11 5369533 5369554 5369550 5369555 +
taaaattttccattcactatcc

SEQ ID NO: 107965 - DNA, 22 bp, Artificial Sequence
  Synthetic oligonucleotide; TTT chr11 5369534 5369555 5369551 5369556 +
aaaattttccattcactatcct

SEQ ID NO: 107966 - DNA, 22 bp, Artificial Sequence
  Synthetic oligonucleotide; TTA chr11 5369535 5369556 5369552 5369557 +
aaattttccattcactatccta

SEQ ID NO: 107967 - DNA, 22 bp, Artificial Sequence
  Synthetic oligonucleotide; TTT chr11 5369541 5369562 5369558 5369563 +
tccattcactatcctaaatatg

SEQ ID NO: 107968 - DNA, 22 bp, Artificial Sequence
  Synthetic oligonucleotide; TTT chr11 5369542 5369563 5369559 5369564 +
ccattcactatcctaaatatgt

SEQ ID NO: 107969 - DNA, 22 bp, Artificial Sequence
  Synthetic oligonucleotide; TTC chr11 5369543 5369564 5369560 5369565 +
cattcactatcctaaatatgtc

SEQ ID NO: 107970 - DNA, 22 bp, Artificial Sequence
  Synthetic oligonucleotide; TTC chr11 5369548 5369569 5369565 5369570 +
actatcctaaatatgtctatga

SEQ ID NO: 107971 - DNA, 22 bp, Artificial Sequence
  Synthetic oligonucleotide; CTA chr11 5369552 5369573 5369569 5369574 +
tcctaaatatgtctatgatata

SEQ ID NO: 107972 - DNA, 22 bp, Artificial Sequence
  Synthetic oligonucleotide; CTA chr11 5369557 5369578 5369574 5369579 +
aatatgtctatgatataattta

SEQ ID NO: 107973 - DNA, 22 bp, Artificial Sequence
  Synthetic oligonucleotide; CTA chr11 5369567 5369588 5369584 5369589 +
tgatataatttaaaaaattata

SEQ ID NO: 107974 - DNA, 22 bp, Artificial Sequence
  Synthetic oligonucleotide; TTT chr11 5369578 5369599 5369595 5369600 +
aaaaaattatatatactccatg

SEQ ID NO: 107975 - DNA, 22 bp, Artificial Sequence
  Synthetic oligonucleotide; TTA chr11 5369579 5369600 5369596 5369601 +
aaaaattatatatactccatgt

SEQ ID NO: 107976 - DNA, 22 bp, Artificial Sequence
  Synthetic oligonucleotide; TTA chr11 5369587 5369608 5369604 5369609 +
tatatactccatgtatattaaa

SEQ ID NO: 107977 - DNA, 22 bp, Artificial Sequence
  Synthetic oligonucleotide; CTC chr11 5369596 5369617 5369613 5369618 +
catgtatattaaatataaagta

SEQ ID NO: 107978 - DNA, 22 bp, Artificial Sequence
  Synthetic oligonucleotide; TTA chr11 5369607 5369628 5369624 5369629 +
aatataaagtaaagacctttta

SEQ ID NO: 107979 - DNA, 22 bp, Artificial Sequence
  Synthetic oligonucleotide; CTT chr11 5369626 5369647 5369643 5369648 +
ttatccttacctttctatcctc

SEQ ID NO: 107980 - DNA, 22 bp, Artificial Sequence
  Synthetic oligonucleotide; TTT chr11 5369627 5369648 5369644 5369649 +
tatccttacctttctatcctcc

SEQ ID NO: 107981 - DNA, 22 bp, Artificial Sequence
  Synthetic oligonucleotide; TTT chr11 5369628 5369649 5369645 5369650 +
atccttacctttctatcctccc

SEQ ID NO: 107982 - DNA, 22 bp, Artificial Sequence
  Synthetic oligonucleotide; TTA chr11 5369629 5369650 5369646 5369651 +
tccttacctttctatcctccct

SEQ ID NO: 107983 - DNA, 22 bp, Artificial Sequence
  Synthetic oligonucleotide; CTT chr11 5369634 5369655 5369651 5369656 +
acctttctatcctccctggaga

SEQ ID NO: 107984 - DNA, 22 bp, Artificial Sequence
  Synthetic oligonucleotide; TTA chr11 5369635 5369656 5369652 5369657 +
cctttctatcctccctggagat

SEQ ID NO: 107985 - DNA, 22 bp, Artificial Sequence
  Synthetic oligonucleotide; CTT chr11 5369639 5369660 5369656 5369661 +
tctatcctccctggagataatt

SEQ ID NO: 107986 - DNA, 22 bp, Artificial Sequence
  Synthetic oligonucleotide; TTT chr11 5369640 5369661 5369657 5369662 +
ctatcctccctggagataattt

SEQ ID NO: 107987 - DNA, 22 bp, Artificial Sequence
  Synthetic oligonucleotide; TTC chr11 5369641 5369662 5369658 5369663 +
tatcctccctggagataatttc

SEQ ID NO: 107988 - DNA, 22 bp, Artificial Sequence
  Synthetic oligonucleotide; CTA chr11 5369643 5369664 5369660 5369665 +
tcctccctggagataatttccc

SEQ ID NO: 107989 - DNA, 22 bp, Artificial Sequence
  Synthetic oligonucleotide; CTC chr11 5369648 5369669 5369665 5369670 +
cctggagataatttccctttat

SEQ ID NO: 107990 - DNA, 22 bp, Artificial Sequence
  Synthetic oligonucleotide; CTG chr11 5369652 5369673 5369669 5369674 +
gagataatttccctttataatc

SEQ ID NO: 107991 - DNA, 22 bp, Artificial Sequence
  Synthetic oligonucleotide; TTT chr11 5369662 5369683 5369679 5369684 +
ccctttataatctgccatacat

SEQ ID NO: 107992 - DNA, 22 bp, Artificial Sequence
  Synthetic oligonucleotide; TTC chr11 5369663 5369684 5369680 5369685 +
cctttataatctgccatacatt

SEQ ID NO: 107993 - DNA, 22 bp, Artificial Sequence
  Synthetic oligonucleotide; CTT chr11 5369667 5369688 5369684 5369689 +
tataatctgccatacatttctc

SEQ ID NO: 107994 - DNA, 22 bp, Artificial Sequence
  Synthetic oligonucleotide; TTT chr11 5369668 5369689 5369685 5369690 +
ataatctgccatacatttctct

SEQ ID NO: 107995 - DNA, 22 bp, Artificial Sequence
  Synthetic oligonucleotide; TTA chr11 5369669 5369690 5369686 5369691 +
taatctgccatacatttctctg

SEQ ID NO: 107996 - DNA, 22 bp, Artificial Sequence
  Synthetic oligonucleotide; CTG chr11 5369676 5369697 5369693 5369698 +
ccatacatttctctgcaacttt

SEQ ID NO: 107997 - DNA, 22 bp, Artificial Sequence
  Synthetic oligonucleotide; TTT chr11 5369686 5369707 5369703 5369708 +
ctctgcaacttttctacacatt

SEQ ID NO: 107998 - DNA, 22 bp, Artificial Sequence
  Synthetic oligonucleotide; TTC chr11 5369687 5369708 5369704 5369709 +
tctgcaacttttctacacattt

SEQ ID NO: 107999 - DNA, 22 bp, Artificial Sequence
  Synthetic oligonucleotide; CTC chr11 5369689 5369710 5369706 5369711 +
tgcaacttttctacacatttat

SEQ ID NO: 108000 - DNA, 22 bp, Artificial Sequence
  Synthetic oligonucleotide; CTG chr11 5369691 5369712 5369708 5369713 +
caacttttctacacatttatat

SEQ ID NO: 108001 - DNA, 22 bp, Artificial Sequence
  Synthetic oligonucleotide; CTT chr11 5369697 5369718 5369714 5369719 +
ttctacacatttatatatacat

SEQ ID NO: 108002 - DNA, 22 bp, Artificial Sequence
  Synthetic oligonucleotide; TTT chr11 5369698 5369719 5369715 5369720 +
tctacacatttatatatacata

SEQ ID NO: 108003 - DNA, 22 bp, Artificial Sequence
  Synthetic oligonucleotide; TTT chr11 5369699 5369720 5369716 5369721 +
ctacacatttatatatacatat

SEQ ID NO: 108004 - DNA, 22 bp, Artificial Sequence
  Synthetic oligonucleotide; TTC chr11 5369700 5369721 5369717 5369722 +
tacacatttatatatacatata

SEQ ID NO: 108005 - DNA, 22 bp, Artificial Sequence
  Synthetic oligonucleotide; CTA chr11 5369702 5369723 5369719 5369724 +
cacatttatatatacatatatg

SEQ ID NO: 108006 - DNA, 22 bp, Artificial Sequence
  Synthetic oligonucleotide; TTT chr11 5369709 5369730 5369726 5369731 +
atatatacatatatgaacatac

SEQ ID NO: 108007 - DNA, 22 bp, Artificial Sequence
  Synthetic oligonucleotide; TTA chr11 5369710 5369731 5369727 5369732 +
tatatacatatatgaacatact

SEQ ID NO: 108008 - DNA, 22 bp, Artificial Sequence
  Synthetic oligonucleotide; CTC chr11 5369733 5369754 5369750 5369755 +
aaataaatagtcctattggctg

SEQ ID NO: 108009 - DNA, 22 bp, Artificial Sequence
  Synthetic oligonucleotide; CTA chr11 5369748 5369769 5369765 5369770 +
ttggctggtagcaagggctatg

SEQ ID NO: 108010 - DNA, 22 bp, Artificial Sequence
  Synthetic oligonucleotide; TTG chr11 5369751 5369772 5369768 5369773 +
gctggtagcaagggctatgtgt

SEQ ID NO: 108011 - DNA, 22 bp, Artificial Sequence
  Synthetic oligonucleotide; CTG chr11 5369755 5369776 5369772 5369777 +
gtagcaagggctatgtgtagca

SEQ ID NO: 108012 - DNA, 22 bp, Artificial Sequence
  Synthetic oligonucleotide; CTA chr11 5369768 5369789 5369785 5369790 +
tgtgtagcactgttatttccat

SEQ ID NO: 108013 - DNA, 22 bp, Artificial Sequence
  Synthetic oligonucleotide; CTG chr11 5369780 5369801 5369797 5369802 +
ttatttccatgatgccacacta

SEQ ID NO: 108014 - DNA, 22 bp, Artificial Sequence
  Synthetic oligonucleotide; TTA chr11 5369783 5369804 5369800 5369805 +
tttccatgatgccacactaaaa

SEQ ID NO: 108015 - DNA, 22 bp, Artificial Sequence
  Synthetic oligonucleotide; TTT chr11 5369786 5369807 5369803 5369808 +
ccatgatgccacactaaaatca

SEQ ID NO: 108016 - DNA, 22 bp, Artificial Sequence
  Synthetic oligonucleotide; TTC chr11 5369787 5369808 5369804 5369809 +
catgatgccacactaaaatcag

SEQ ID NO: 108017 - DNA, 22 bp, Artificial Sequence
  Synthetic oligonucleotide; CTA chr11 5369802 5369823 5369819 5369824 +
aaatcagtgctgcttgtctgca

SEQ ID NO: 108018 - DNA, 22 bp, Artificial Sequence
  Synthetic oligonucleotide; CTG chr11 5369814 5369835 5369831 5369836 +
cttgtctgcatttttgtgttac

SEQ ID NO: 108019 - DNA, 22 bp, Artificial Sequence
  Synthetic oligonucleotide; CTT chr11 5369817 5369838 5369834 5369839 +
gtctgcatttttgtgttacagt

SEQ ID NO: 108020 - DNA, 22 bp, Artificial Sequence
  Synthetic oligonucleotide; TTG chr11 5369818 5369839 5369835 5369840 +
tctgcatttttgtgttacagtg

SEQ ID NO: 108021 - DNA, 22 bp, Artificial Sequence
  Synthetic oligonucleotide; CTG chr11 5369822 5369843 5369839 5369844 +
catttttgtgttacagtgaatg

SEQ ID NO: 108022 - DNA, 22 bp, Artificial Sequence
  Synthetic oligonucleotide; TTT chr11 5369827 5369848 5369844 5369849 +
ttgtgttacagtgaatgtagac

SEQ ID NO: 108023 - DNA, 22 bp, Artificial Sequence
  Synthetic oligonucleotide; TTT chr11 5369828 5369849 5369845 5369850 +
tgtgttacagtgaatgtagact

SEQ ID NO: 108024 - DNA, 22 bp, Artificial Sequence
  Synthetic oligonucleotide; TTT chr11 5369829 5369850 5369846 5369851 +
gtgttacagtgaatgtagacta

SEQ ID NO: 108025 - DNA, 22 bp, Artificial Sequence
  Synthetic oligonucleotide; TTG chr11 5369830 5369851 5369847 5369852 +
tgttacagtgaatgtagactaa

SEQ ID NO: 108026 - DNA, 22 bp, Artificial Sequence
  Synthetic oligonucleotide; TTA chr11 5369835 5369856 5369852 5369857 +
cagtgaatgtagactaaaatcc

SEQ ID NO: 108027 - DNA, 22 bp, Artificial Sequence
  Synthetic oligonucleotide; CTA chr11 5369851 5369872 5369868 5369873 +
aaatccaaaataagtcaacagt

SEQ ID NO: 108028 - DNA, 22 bp, Artificial Sequence
  Synthetic oligonucleotide; TTG chr11 5369875 5369896 5369892 5369897 +
ttaaaagtgatgacctcattgg

SEQ ID NO: 108029 - DNA, 22 bp, Artificial Sequence
  Synthetic oligonucleotide; TTA chr11 5369878 5369899 5369895 5369900 +
aaagtgatgacctcattggttt

SEQ ID NO: 108030 - DNA, 22 bp, Artificial Sequence
  Synthetic oligonucleotide; CTC chr11 5369892 5369913 5369909 5369914 +
attggttttgctatcaacatag

SEQ ID NO: 108031 - DNA, 22 bp, Artificial Sequence
  Synthetic oligonucleotide; TTG chr11 5369896 5369917 5369913 5369918 +
gttttgctatcaacatagaaag

SEQ ID NO: 108032 - DNA, 22 bp, Artificial Sequence
  Synthetic oligonucleotide; TTT chr11 5369900 5369921 5369917 5369922 +
tgctatcaacatagaaagaaag

SEQ ID NO: 108033 - DNA, 22 bp, Artificial Sequence
  Synthetic oligonucleotide; TTT chr11 5369901 5369922 5369918 5369923 +
gctatcaacatagaaagaaagg

SEQ ID NO: 108034 - DNA, 22 bp, Artificial Sequence
  Synthetic oligonucleotide; TTG chr11 5369902 5369923 5369919 5369924 +
ctatcaacatagaaagaaaggg

SEQ ID NO: 108035 - DNA, 22 bp, Artificial Sequence
  Synthetic oligonucleotide; CTA chr11 5369905 5369926 5369922 5369927 +
tcaacatagaaagaaagggaag

SEQ ID NO: 108036 - DNA, 22 bp, Artificial Sequence
  Synthetic oligonucleotide; TTT chr11 5369933 5369954 5369950 5369955 +
tctcaggatttttactcaagga

SEQ ID NO: 108037 - DNA, 22 bp, Artificial Sequence
  Synthetic oligonucleotide; TTT chr11 5369934 5369955 5369951 5369956 +
ctcaggatttttactcaaggaa

SEQ ID NO: 108038 - DNA, 22 bp, Artificial Sequence
  Synthetic oligonucleotide; TTC chr11 5369935 5369956 5369952 5369957 +
tcaggatttttactcaaggaaa

SEQ ID NO: 108039 - DNA, 22 bp, Artificial Sequence
  Synthetic oligonucleotide; CTC chr11 5369937 5369958 5369954 5369959 +
aggatttttactcaaggaaagg

SEQ ID NO: 108040 - DNA, 22 bp, Artificial Sequence
  Synthetic oligonucleotide; TTT chr11 5369944 5369965 5369961 5369966 +
ttactcaaggaaaggcagtggg

SEQ ID NO: 108041 - DNA, 22 bp, Artificial Sequence
  Synthetic oligonucleotide; TTT chr11 5369945 5369966 5369962 5369967 +
tactcaaggaaaggcagtgggg

SEQ ID NO: 108042 - DNA, 22 bp, Artificial Sequence
  Synthetic oligonucleotide; TTT chr11 5369946 5369967 5369963 5369968 +
actcaaggaaaggcagtgggga

SEQ ID NO: 108043 - DNA, 22 bp, Artificial Sequence
  Synthetic oligonucleotide; TTA chr11 5369947 5369968 5369964 5369969 +
ctcaaggaaaggcagtggggaa

SEQ ID NO: 108044 - DNA, 22 bp, Artificial Sequence
  Synthetic oligonucleotide; CTC chr11 5369950 5369971 5369967 5369972 +
aaggaaaggcagtggggaaaga

SEQ ID NO: 108045 - DNA, 22 bp, Artificial Sequence
  Synthetic oligonucleotide; CTT chr11 5369977 5369998 5369994 5369999 +
tggtattctgtgtcaatctgta

SEQ ID NO: 108046 - DNA, 22 bp, Artificial Sequence
  Synthetic oligonucleotide; TTT chr11 5369978 5369999 5369995 5370000 +
ggtattctgtgtcaatctgtat

SEQ ID NO: 108047 - DNA, 22 bp, Artificial Sequence
  Synthetic oligonucleotide; TTG chr11 5369979 5370000 5369996 5370001 +
gtattctgtgtcaatctgtatc

SEQ ID NO: 108048 - DNA, 22 bp, Artificial Sequence
  Synthetic oligonucleotide; TTC chr11 5369985 5370006 5370002 5370007 +
tgtgtcaatctgtatcaacaag

SEQ ID NO: 108049 - DNA, 22 bp, Artificial Sequence
  Synthetic oligonucleotide; CTG chr11 5369987 5370008 5370004 5370009 +
tgtcaatctgtatcaacaagat

SEQ ID NO: 108050 - DNA, 22 bp, Artificial Sequence
  Synthetic oligonucleotide; CTG chr11 5369997 5370018 5370014 5370019 +
tatcaacaagatcttcaaacct

SEQ ID NO: 108051 - DNA, 22 bp, Artificial Sequence
  Synthetic oligonucleotide; CTT chr11 5370012 5370033 5370029 5370034 +
caaacctccctctgcatggccc

SEQ ID NO: 108052 - DNA, 22 bp, Artificial Sequence
  Synthetic oligonucleotide; TTC chr11 5370013 5370034 5370030 5370035 +
aaacctccctctgcatggcccc

SEQ ID NO: 108053 - DNA, 22 bp, Artificial Sequence
  Synthetic oligonucleotide; CTC chr11 5370020 5370041 5370037 5370042 +
cctctgcatggccccaggagag

SEQ ID NO: 108054 - DNA, 22 bp, Artificial Sequence
  Synthetic oligonucleotide; CTC chr11 5370024 5370045 5370041 5370046 +
tgcatggccccaggagagtcag

SEQ ID NO: 108055 - DNA, 22 bp, Artificial Sequence
  Synthetic oligonucleotide; CTG chr11 5370026 5370047 5370043 5370048 +
catggccccaggagagtcagtg

SEQ ID NO: 108056 - DNA, 22 bp, Artificial Sequence
  Synthetic oligonucleotide; TTC chr11 5370051 5370072 5370068 5370073 +
cacaaacctctcctgccatctt

SEQ ID NO: 108057 - DNA, 22 bp, Artificial Sequence
  Synthetic oligonucleotide; CTC chr11 5370061 5370082 5370078 5370083 +
tcctgccatcttatggtttgta

SEQ ID NO: 108058 - DNA, 22 bp, Artificial Sequence
  Synthetic oligonucleotide; CTC chr11 5370063 5370084 5370080 5370085 +
ctgccatcttatggtttgtaca

SEQ ID NO: 108059 - DNA, 22 bp, Artificial Sequence
  Synthetic oligonucleotide; CTG chr11 5370066 5370087 5370083 5370088 +
ccatcttatggtttgtacagca

SEQ ID NO: 108060 - DNA, 22 bp, Artificial Sequence
  Synthetic oligonucleotide; CTT chr11 5370073 5370094 5370090 5370095 +
atggtttgtacagcatgtgcaa

SEQ ID NO: 108061 - DNA, 22 bp, Artificial Sequence
  Synthetic oligonucleotide; TTA chr11 5370074 5370095 5370091 5370096 +
tggtttgtacagcatgtgcaag

SEQ ID NO: 108062 - DNA, 22 bp, Artificial Sequence
  Synthetic oligonucleotide; TTT chr11 5370080 5370101 5370097 5370102 +
gtacagcatgtgcaagctgctt

SEQ ID NO: 108063 - DNA, 22 bp, Artificial Sequence
  Synthetic oligonucleotide; TTG chr11 5370081 5370102 5370098 5370103 +
tacagcatgtgcaagctgcttc

SEQ ID NO: 108064 - DNA, 22 bp, Artificial Sequence
  Synthetic oligonucleotide; CTG chr11 5370099 5370120 5370116 5370121 +
cttctatagaaatgcatataga

SEQ ID NO: 108065 - DNA, 22 bp, Artificial Sequence
  Synthetic oligonucleotide; CTT chr11 5370102 5370123 5370119 5370124 +
ctatagaaatgcatatagaaaa

SEQ ID NO: 108066 - DNA, 22 bp, Artificial Sequence
  Synthetic oligonucleotide; TTC chr11 5370103 5370124 5370120 5370125 +
tatagaaatgcatatagaaaat

SEQ ID NO: 108067 - DNA, 22 bp, Artificial Sequence
  Synthetic oligonucleotide; CTA chr11 5370105 5370126 5370122 5370127 +
tagaaatgcatatagaaaatac

SEQ ID NO: 108068 - DNA, 22 bp, Artificial Sequence
  Synthetic oligonucleotide; CTA chr11 5370143 5370164 5370160 5370165 +
gaggctaccaagttgtaattta

SEQ ID NO: 108069 - DNA, 22 bp, Artificial Sequence
  Synthetic oligonucleotide; CTA chr11 5370150 5370171 5370167 5370172 +
ccaagttgtaatttaaaaataa

SEQ ID NO: 108070 - DNA, 22 bp, Artificial Sequence
  Synthetic oligonucleotide; TTG chr11 5370158 5370179 5370175 5370180 +
taatttaaaaataatgctcata

SEQ ID NO: 108071 - DNA, 22 bp, Artificial Sequence
  Synthetic oligonucleotide; TTT chr11 5370164 5370185 5370181 5370186 +
aaaaataatgctcataatcatc

SEQ ID NO: 108072 - DNA, 22 bp, Artificial Sequence
  Synthetic oligonucleotide; TTA chr11 5370165 5370186 5370182 5370187 +
aaaataatgctcataatcatca

SEQ ID NO: 108073 - DNA, 22 bp, Artificial Sequence
  Synthetic oligonucleotide; CTC chr11 5370177 5370198 5370194 5370199 +
ataatcatcaatgtatttatta

SEQ ID NO: 108074 - DNA, 22 bp, Artificial Sequence
  Synthetic oligonucleotide; TTT chr11 5370195 5370216 5370212 5370217 +
attattatcattaacagtcaca

SEQ ID NO: 108075 - DNA, 22 bp, Artificial Sequence
  Synthetic oligonucleotide; TTA chr11 5370196 5370217 5370213 5370218 +
ttattatcattaacagtcacag

SEQ ID NO: 108076 - DNA, 22 bp, Artificial Sequence
  Synthetic oligonucleotide; TTA chr11 5370199 5370220 5370216 5370221 +
ttatcattaacagtcacagtct

SEQ ID NO: 108077 - DNA, 22 bp, Artificial Sequence
  Synthetic oligonucleotide; TTA chr11 5370202 5370223 5370219 5370224 +
tcattaacagtcacagtctttt

SEQ ID NO: 108078 - DNA, 22 bp, Artificial Sequence
  Synthetic oligonucleotide; TTA chr11 5370208 5370229 5370225 5370230 +
acagtcacagtcttttatagta

SEQ ID NO: 108079 - DNA, 22 bp, Artificial Sequence
  Synthetic oligonucleotide; CTT chr11 5370222 5370243 5370239 5370244 +
ttatagtaaatcctaaagttga

SEQ ID NO: 108080 - DNA, 22 bp, Artificial Sequence
  Synthetic oligonucleotide; TTT chr11 5370223 5370244 5370240 5370245 +
tatagtaaatcctaaagttgaa

SEQ ID NO: 108081 - DNA, 22 bp, Artificial Sequence
  Synthetic oligonucleotide; TTT chr11 5370224 5370245 5370241 5370246 +
atagtaaatcctaaagttgaag

SEQ ID NO: 108082 - DNA, 22 bp, Artificial Sequence
  Synthetic oligonucleotide; TTA chr11 5370225 5370246 5370242 5370247 +
tagtaaatcctaaagttgaagg

SEQ ID NO: 108083 - DNA, 22 bp, Artificial Sequence
  Synthetic oligonucleotide; CTA chr11 5370237 5370258 5370254 5370259 +
aagttgaaggtttgaatgttta

SEQ ID NO: 108084 - DNA, 22 bp, Artificial Sequence
  Synthetic oligonucleotide; TTG chr11 5370243 5370264 5370260 5370265 +
aaggtttgaatgtttaatgcta

SEQ ID NO: 108085 - DNA, 22 bp, Artificial Sequence
  Synthetic oligonucleotide; TTT chr11 5370250 5370271 5370267 5370272 +
gaatgtttaatgctatgaaata

SEQ ID NO: 108086 - DNA, 22 bp, Artificial Sequence
  Synthetic oligonucleotide; TTG chr11 5370251 5370272 5370268 5370273 +
aatgtttaatgctatgaaatat

SEQ ID NO: 108087 - DNA, 22 bp, Artificial Sequence
  Synthetic oligonucleotide; TTT chr11 5370258 5370279 5370275 5370280 +
aatgctatgaaatattaaataa

SEQ ID NO: 108088 - DNA, 22 bp, Artificial Sequence
  Synthetic oligonucleotide; TTA chr11 5370259 5370280 5370276 5370281 +
atgctatgaaatattaaataag

SEQ ID NO: 108089 - DNA, 22 bp, Artificial Sequence
  Synthetic oligonucleotide; CTA chr11 5370265 5370286 5370282 5370287 +
tgaaatattaaataagtgacga

SEQ ID NO: 108090 - DNA, 22 bp, Artificial Sequence
  Synthetic oligonucleotide; TTA chr11 5370275 5370296 5370292 5370297 +
aataagtgacgatagtatcttt

SEQ ID NO: 108091 - DNA, 22 bp, Artificial Sequence
  Synthetic oligonucleotide; CTT chr11 5370296 5370317 5370313 5370318 +
ttatgctgactgtccaggattg

SEQ ID NO: 108092 - DNA, 22 bp, Artificial Sequence
  Synthetic oligonucleotide; TTT chr11 5370297 5370318 5370314 5370319 +
tatgctgactgtccaggattgg

SEQ ID NO: 108093 - DNA, 22 bp, Artificial Sequence
  Synthetic oligonucleotide; TTT chr11 5370298 5370319 5370315 5370320 +
atgctgactgtccaggattgga

SEQ ID NO: 108094 - DNA, 22 bp, Artificial Sequence
  Synthetic oligonucleotide; TTA chr11 5370299 5370320 5370316 5370321 +
tgctgactgtccaggattggaa

SEQ ID NO: 108095 - DNA, 22 bp, Artificial Sequence
  Synthetic oligonucleotide; CTG chr11 5370304 5370325 5370321 5370326 +
actgtccaggattggaaatgct

SEQ ID NO: 108096 - DNA, 22 bp, Artificial Sequence
  Synthetic oligonucleotide; CTG chr11 5370308 5370329 5370325 5370330 +
tccaggattggaaatgctacag

SEQ ID NO: 108097 - DNA, 22 bp, Artificial Sequence
  Synthetic oligonucleotide; TTG chr11 5370318 5370339 5370335 5370340 +
gaaatgctacagcaaagtgaga

SEQ ID NO: 108098 - DNA, 22 bp, Artificial Sequence
  Synthetic oligonucleotide; CTA chr11 5370327 5370348 5370344 5370349 +
cagcaaagtgagataggcattt

SEQ ID NO: 108099 - DNA, 22 bp, Artificial Sequence
  Synthetic oligonucleotide; TTT chr11 5370349 5370370 5370366 5370371 +
tatgtatatcatctgcaaagac

SEQ ID NO: 108100 - DNA, 22 bp, Artificial Sequence
  Synthetic oligonucleotide; TTT chr11 5370350 5370371 5370367 5370372 +
atgtatatcatctgcaaagact

SEQ ID NO: 108101 - DNA, 22 bp, Artificial Sequence
  Synthetic oligonucleotide; TTA chr11 5370351 5370372 5370368 5370373 +
tgtatatcatctgcaaagacta

SEQ ID NO: 108102 - DNA, 22 bp, Artificial Sequence
  Synthetic oligonucleotide; CTG chr11 5370364 5370385 5370381 5370386 +
caaagactaaactaaaatagct

SEQ ID NO: 108103 - DNA, 22 bp, Artificial Sequence
  Synthetic oligonucleotide; CTA chr11 5370373 5370394 5370390 5370395 +
aactaaaatagctgggttgtca

SEQ ID NO: 108104 - DNA, 22 bp, Artificial Sequence
  Synthetic oligonucleotide; CTA chr11 5370378 5370399 5370395 5370400 +
aaatagctgggttgtcaggtca

SEQ ID NO: 108105 - DNA, 22 bp, Artificial Sequence
  Synthetic oligonucleotide; CTG chr11 5370387 5370408 5370404 5370409 +
ggttgtcaggtcagagcaattt

SEQ ID NO: 108106 - DNA, 22 bp, Artificial Sequence
  Synthetic oligonucleotide; TTG chr11 5370392 5370413 5370409 5370414 +
tcaggtcagagcaatttacagg

SEQ ID NO: 108107 - DNA, 22 bp, Artificial Sequence
  Synthetic oligonucleotide; TTT chr11 5370409 5370430 5370426 5370431 +
acagggaaaattaaattcaaat

SEQ ID NO: 108108 - DNA, 22 bp, Artificial Sequence
  Synthetic oligonucleotide; TTA chr11 5370410 5370431 5370427 5370432 +
cagggaaaattaaattcaaatc

SEQ ID NO: 108109 - DNA, 22 bp, Artificial Sequence
  Synthetic oligonucleotide; TTA chr11 5370422 5370443 5370439 5370444 +
aattcaaatcttcagaggatca

SEQ ID NO: 108110 - DNA, 22 bp, Artificial Sequence
  Synthetic oligonucleotide; TTC chr11 5370427 5370448 5370444 5370449 +
aaatcttcagaggatcatttgt

SEQ ID NO: 108111 - DNA, 22 bp, Artificial Sequence
  Synthetic oligonucleotide; CTT chr11 5370434 5370455 5370451 5370456 +
cagaggatcatttgttggtatg

SEQ ID NO: 108112 - DNA, 22 bp, Artificial Sequence
  Synthetic oligonucleotide; TTC chr11 5370435 5370456 5370452 5370457 +
agaggatcatttgttggtatgt

SEQ ID NO: 108113 - DNA, 22 bp, Artificial Sequence
  Synthetic oligonucleotide; TTT chr11 5370447 5370468 5370464 5370469 +
gttggtatgtctctgtccaatt

SEQ ID NO: 108114 - DNA, 22 bp, Artificial Sequence
  Synthetic oligonucleotide; TTG chr11 5370448 5370469 5370465 5370470 +
ttggtatgtctctgtccaattt

SEQ ID NO: 108115 - DNA, 22 bp, Artificial Sequence
  Synthetic oligonucleotide; TTG chr11 5370451 5370472 5370468 5370473 +
gtatgtctctgtccaatttgag

SEQ ID NO: 108116 - DNA, 22 bp, Artificial Sequence
  Synthetic oligonucleotide; CTC chr11 5370460 5370481 5370477 5370482 +
tgtccaatttgagggcaataat

SEQ ID NO: 108117 - DNA, 22 bp, Artificial Sequence
  Synthetic oligonucleotide; CTG chr11 5370462 5370483 5370479 5370484 +
tccaatttgagggcaataattt

SEQ ID NO: 108118 - DNA, 22 bp, Artificial Sequence
  Synthetic oligonucleotide; TTT chr11 5370470 5370491 5370487 5370492 +
gagggcaataatttaatgccag

SEQ ID NO: 108119 - DNA, 22 bp, Artificial Sequence
  Synthetic oligonucleotide; TTG chr11 5370471 5370492 5370488 5370493 +
agggcaataatttaatgccaga

SEQ ID NO: 108120 - DNA, 22 bp, Artificial Sequence
  Synthetic oligonucleotide; TTT chr11 5370484 5370505 5370501 5370506 +
aatgccagaaaatatctattct

SEQ ID NO: 108121 - DNA, 22 bp, Artificial Sequence
  Synthetic oligonucleotide; TTA chr11 5370485 5370506 5370502 5370507 +
atgccagaaaatatctattctt

SEQ ID NO: 108122 - DNA, 22 bp, Artificial Sequence
  Synthetic oligonucleotide; CTA chr11 5370502 5370523 5370519 5370524 +
ttctttatctcactctctttct

SEQ ID NO: 108123 - DNA, 22 bp, Artificial Sequence
  Synthetic oligonucleotide; TTC chr11 5370505 5370526 5370522 5370527 +
tttatctcactctctttctttc

SEQ ID NO: 108124 - DNA, 22 bp, Artificial Sequence
  Synthetic oligonucleotide; CTT chr11 5370507 5370528 5370524 5370529 +
tatctcactctctttctttcat

SEQ ID NO: 108125 - DNA, 22 bp, Artificial Sequence
  Synthetic oligonucleotide; TTT chr11 5370508 5370529 5370525 5370530 +
atctcactctctttctttcatt

SEQ ID NO: 108126 - DNA, 22 bp, Artificial Sequence
  Synthetic oligonucleotide; TTA chr11 5370509 5370530 5370526 5370531 +
tctcactctctttctttcattc

SEQ ID NO: 108127 - DNA, 22 bp, Artificial Sequence
  Synthetic oligonucleotide; CTC chr11 5370513 5370534 5370530 5370535 +
actctctttctttcattcttac

SEQ ID NO: 108128 - DNA, 22 bp, Artificial Sequence
  Synthetic oligonucleotide; CTC chr11 5370517 5370538 5370534 5370539 +
tctttctttcattcttactttc

SEQ ID NO: 108129 - DNA, 22 bp, Artificial Sequence
  Synthetic oligonucleotide; CTC chr11 5370519 5370540 5370536 5370541 +
tttctttcattcttactttctg

SEQ ID NO: 108130 - DNA, 22 bp, Artificial Sequence
  Synthetic oligonucleotide; CTT chr11 5370521 5370542 5370538 5370543 +
tctttcattcttactttctgtc

SEQ ID NO: 108131 - DNA, 22 bp, Artificial Sequence
  Synthetic oligonucleotide; TTT chr11 5370522 5370543 5370539 5370544 +
ctttcattcttactttctgtct

SEQ ID NO: 108132 - DNA, 22 bp, Artificial Sequence
  Synthetic oligonucleotide; TTC chr11 5370523 5370544 5370540 5370545 +
tttcattcttactttctgtctt

SEQ ID NO: 108133 - DNA, 22 bp, Artificial Sequence
  Synthetic oligonucleotide; CTT chr11 5370525 5370546 5370542 5370547 +
tcattcttactttctgtctttc

SEQ ID NO: 108134 - DNA, 22 bp, Artificial Sequence
  Synthetic oligonucleotide; TTT chr11 5370526 5370547 5370543 5370548 +
cattcttactttctgtctttct

SEQ ID NO: 108135 - DNA, 22 bp, Artificial Sequence
  Synthetic oligonucleotide; TTC chr11 5370527 5370548 5370544 5370549 +
attcttactttctgtctttctc

SEQ ID NO: 108136 - DNA, 22 bp, Artificial Sequence
  Synthetic oligonucleotide; TTC chr11 5370531 5370552 5370548 5370553 +
ttactttctgtctttctccctt

SEQ ID NO: 108137 - DNA, 22 bp, Artificial Sequence
  Synthetic oligonucleotide; CTT chr11 5370533 5370554 5370550 5370555 +
actttctgtctttctccctttc

SEQ ID NO: 108138 - DNA, 22 bp, Artificial Sequence
  Synthetic oligonucleotide; TTA chr11 5370534 5370555 5370551 5370556 +
ctttctgtctttctccctttct

SEQ ID NO: 108139 - DNA, 22 bp, Artificial Sequence
  Synthetic oligonucleotide; CTT chr11 5370537 5370558 5370554 5370559 +
tctgtctttctccctttctcac

SEQ ID NO: 108140 - DNA, 22 bp, Artificial Sequence
  Synthetic oligonucleotide; TTT chr11 5370538 5370559 5370555 5370560 +
ctgtctttctccctttctcact

SEQ ID NO: 108141 - DNA, 22 bp, Artificial Sequence
  Synthetic oligonucleotide; TTC chr11 5370539 5370560 5370556 5370561 +
tgtctttctccctttctcactc

SEQ ID NO: 108142 - DNA, 22 bp, Artificial Sequence
  Synthetic oligonucleotide; CTG chr11 5370541 5370562 5370558 5370563 +
tctttctccctttctcactctt

SEQ ID NO: 108143 - DNA, 22 bp, Artificial Sequence
  Synthetic oligonucleotide; CTT chr11 5370545 5370566 5370562 5370567 +
tctccctttctcactctttctg

SEQ ID NO: 108144 - DNA, 22 bp, Artificial Sequence
  Synthetic oligonucleotide; TTT chr11 5370546 5370567 5370563 5370568 +
ctccctttctcactctttctgt

SEQ ID NO: 108145 - DNA, 22 bp, Artificial Sequence
  Synthetic oligonucleotide; TTC chr11 5370547 5370568 5370564 5370569 +
tccctttctcactctttctgtg

SEQ ID NO: 108146 - DNA, 22 bp, Artificial Sequence
  Synthetic oligonucleotide; CTC chr11 5370549 5370570 5370566 5370571 +
cctttctcactctttctgtgtt

SEQ ID NO: 108147 - DNA, 22 bp, Artificial Sequence
  Synthetic oligonucleotide; CTT chr11 5370553 5370574 5370570 5370575 +
tctcactctttctgtgtttaga

SEQ ID NO: 108148 - DNA, 22 bp, Artificial Sequence
  Synthetic oligonucleotide; TTT chr11 5370554 5370575 5370571 5370576 +
ctcactctttctgtgtttagaa

SEQ ID NO: 108149 - DNA, 22 bp, Artificial Sequence
  Synthetic oligonucleotide; TTC chr11 5370555 5370576 5370572 5370577 +
tcactctttctgtgtttagaaa

SEQ ID NO: 108150 - DNA, 22 bp, Artificial Sequence
  Synthetic oligonucleotide; CTC chr11 5370557 5370578 5370574 5370579 +
actctttctgtgtttagaaatg

SEQ ID NO: 108151 - DNA, 22 bp, Artificial Sequence
  Synthetic oligonucleotide; CTC chr11 5370561 5370582 5370578 5370583 +
tttctgtgtttagaaatgaata

SEQ ID NO: 108152 - DNA, 22 bp, Artificial Sequence
  Synthetic oligonucleotide; CTT chr11 5370563 5370584 5370580 5370585 +
tctgtgtttagaaatgaataat

SEQ ID NO: 108153 - DNA, 22 bp, Artificial Sequence
  Synthetic oligonucleotide; TTT chr11 5370564 5370585 5370581 5370586 +
ctgtgtttagaaatgaataata

SEQ ID NO: 108154 - DNA, 22 bp, Artificial Sequence
  Synthetic oligonucleotide; TTC chr11 5370565 5370586 5370582 5370587 +
tgtgtttagaaatgaataatag

SEQ ID NO: 108155 - DNA, 22 bp, Artificial Sequence
  Synthetic oligonucleotide; CTG chr11 5370567 5370588 5370584 5370589 +
tgtttagaaatgaataatagaa

SEQ ID NO: 108156 - DNA, 22 bp, Artificial Sequence
  Synthetic oligonucleotide; TTT chr11 5370572 5370593 5370589 5370594 +
agaaatgaataatagaataact

SEQ ID NO: 108157 - DNA, 22 bp, Artificial Sequence
  Synthetic oligonucleotide; TTA chr11 5370573 5370594 5370590 5370595 +
gaaatgaataatagaataacta

SEQ ID NO: 108158 - DNA, 22 bp, Artificial Sequence
  Synthetic oligonucleotide; CTA chr11 5370595 5370616 5370612 5370617 +
aatacatttatttaacaagcgg

SEQ ID NO: 108159 - DNA, 22 bp, Artificial Sequence
  Synthetic oligonucleotide; TTT chr11 5370604 5370625 5370621 5370626 +
atttaacaagcggtcattgttt

SEQ ID NO: 108160 - DNA, 22 bp, Artificial Sequence
  Synthetic oligonucleotide; TTA chr11 5370605 5370626 5370622 5370627 +
tttaacaagcggtcattgttta

SEQ ID NO: 108161 - DNA, 22 bp, Artificial Sequence
  Synthetic oligonucleotide; TTT chr11 5370608 5370629 5370625 5370630 +
aacaagcggtcattgtttagtt

SEQ ID NO: 108162 - DNA, 22 bp, Artificial Sequence
  Synthetic oligonucleotide; TTA chr11 5370609 5370630 5370626 5370631 +
acaagcggtcattgtttagttg

SEQ ID NO: 108163 - DNA, 22 bp, Artificial Sequence
  Synthetic oligonucleotide; TTG chr11 5370623 5370644 5370640 5370645 +
tttagttgtttgtttatctaat

SEQ ID NO: 108164 - DNA, 22 bp, Artificial Sequence
  Synthetic oligonucleotide; TTT chr11 5370626 5370647 5370643 5370648 +
agttgtttgtttatctaatgag

SEQ ID NO: 108165 - DNA, 22 bp, Artificial Sequence
  Synthetic oligonucleotide; TTA chr11 5370627 5370648 5370644 5370649 +
gttgtttgtttatctaatgaga

SEQ ID NO: 108166 - DNA, 22 bp, Artificial Sequence
  Synthetic oligonucleotide; TTG chr11 5370631 5370652 5370648 5370653 +
tttgtttatctaatgagaggct

SEQ ID NO: 108167 - DNA, 22 bp, Artificial Sequence
  Synthetic oligonucleotide; TTT chr11 5370634 5370655 5370651 5370656 +
gtttatctaatgagaggcttct

SEQ ID NO: 108168 - DNA, 22 bp, Artificial Sequence
  Synthetic oligonucleotide; TTG chr11 5370635 5370656 5370652 5370657 +
tttatctaatgagaggcttctc

SEQ ID NO: 108169 - DNA, 22 bp, Artificial Sequence
  Synthetic oligonucleotide; TTT chr11 5370638 5370659 5370655 5370660 +
atctaatgagaggcttctctat

SEQ ID NO: 108170 - DNA, 22 bp, Artificial Sequence
  Synthetic oligonucleotide; TTA chr11 5370639 5370660 5370656 5370661 +
tctaatgagaggcttctctatt

SEQ ID NO: 108171 - DNA, 22 bp, Artificial Sequence
  Synthetic oligonucleotide; CTA chr11 5370643 5370664 5370660 5370665 +
atgagaggcttctctattttag

SEQ ID NO: 108172 - DNA, 22 bp, Artificial Sequence
  Synthetic oligonucleotide; CTT chr11 5370654 5370675 5370671 5370676 +
ctctattttagcaactactggg

SEQ ID NO: 108173 - DNA, 22 bp, Artificial Sequence
  Synthetic oligonucleotide; TTC chr11 5370655 5370676 5370672 5370677 +
tctattttagcaactactgggt

SEQ ID NO: 108174 - DNA, 22 bp, Artificial Sequence
  Synthetic oligonucleotide; CTC chr11 5370657 5370678 5370674 5370679 +
tattttagcaactactgggtac

SEQ ID NO: 108175 - DNA, 22 bp, Artificial Sequence
  Synthetic oligonucleotide; CTA chr11 5370659 5370680 5370676 5370681 +
ttttagcaactactgggtacaa

SEQ ID NO: 108176 - DNA, 22 bp, Artificial Sequence
  Synthetic oligonucleotide; TTT chr11 5370662 5370683 5370679 5370684 +
tagcaactactgggtacaaaaa

SEQ ID NO: 108177 - DNA, 22 bp, Artificial Sequence
  Synthetic oligonucleotide; TTT chr11 5370663 5370684 5370680 5370685 +
agcaactactgggtacaaaaat

SEQ ID NO: 108178 - DNA, 22 bp, Artificial Sequence
  Synthetic oligonucleotide; TTA chr11 5370664 5370685 5370681 5370686 +
gcaactactgggtacaaaaata

SEQ ID NO: 108179 - DNA, 22 bp, Artificial Sequence
  Synthetic oligonucleotide; CTA chr11 5370671 5370692 5370688 5370693 +
ctgggtacaaaaatacattggt

SEQ ID NO: 108180 - DNA, 22 bp, Artificial Sequence
  Synthetic oligonucleotide; CTG chr11 5370674 5370695 5370691 5370696 +
ggtacaaaaatacattggtgca

SEQ ID NO: 108181 - DNA, 22 bp, Artificial Sequence
  Synthetic oligonucleotide; TTG chr11 5370691 5370712 5370708 5370713 +
gtgcatatattctctgttccta

SEQ ID NO: 108182 - DNA, 22 bp, Artificial Sequence
  Synthetic oligonucleotide; TTC chr11 5370703 5370724 5370720 5370725 +
tctgttcctatgaagcttgtat

SEQ ID NO: 108183 - DNA, 22 bp, Artificial Sequence
  Synthetic oligonucleotide; CTC chr11 5370705 5370726 5370722 5370727 +
tgttcctatgaagcttgtattt

SEQ ID NO: 108184 - DNA, 22 bp, Artificial Sequence
  Synthetic oligonucleotide; CTG chr11 5370707 5370728 5370724 5370729 +
ttcctatgaagcttgtatttta

SEQ ID NO: 108185 - DNA, 22 bp, Artificial Sequence
  Synthetic oligonucleotide; TTC chr11 5370710 5370731 5370727 5370732 +
ctatgaagcttgtattttaacg

SEQ ID NO: 108186 - DNA, 22 bp, Artificial Sequence
  Synthetic oligonucleotide; CTA chr11 5370713 5370734 5370730 5370735 +
tgaagcttgtattttaacggaa

SEQ ID NO: 108187 - DNA, 22 bp, Artificial Sequence
  Synthetic oligonucleotide; CTT chr11 5370721 5370742 5370738 5370743 +
gtattttaacggaaaggaaata

SEQ ID NO: 108188 - DNA, 22 bp, Artificial Sequence
  Synthetic oligonucleotide; TTG chr11 5370722 5370743 5370739 5370744 +
tattttaacggaaaggaaataa

SEQ ID NO: 108189 - DNA, 22 bp, Artificial Sequence
  Synthetic oligonucleotide; TTT chr11 5370727 5370748 5370744 5370749 +
taacggaaaggaaataataaaa

SEQ ID NO: 108190 - DNA, 22 bp, Artificial Sequence
  Synthetic oligonucleotide; TTT chr11 5370728 5370749 5370745 5370750 +
aacggaaaggaaataataaaaa

SEQ ID NO: 108191 - DNA, 22 bp, Artificial Sequence
  Synthetic oligonucleotide; TTA chr11 5370729 5370750 5370746 5370751 +
acggaaaggaaataataaaaaa

SEQ ID NO: 108192 - DNA, 22 bp, Artificial Sequence
  Synthetic oligonucleotide; TTA chr11 5370767 5370788 5370784 5370789 +
caacctcatatagctgctatga

SEQ ID NO: 108193 - DNA, 22 bp, Artificial Sequence
  Synthetic oligonucleotide; CTC chr11 5370774 5370795 5370791 5370796 +
atatagctgctatgaaagaaag

SEQ ID NO: 108194 - DNA, 22 bp, Artificial Sequence
  Synthetic oligonucleotide; CTG chr11 5370783 5370804 5370800 5370805 +
ctatgaaagaaagaaaaaattt

SEQ ID NO: 108195 - DNA, 22 bp, Artificial Sequence
  Synthetic oligonucleotide; CTA chr11 5370786 5370807 5370803 5370808 +
tgaaagaaagaaaaaatttgat

SEQ ID NO: 108196 - DNA, 22 bp, Artificial Sequence
  Synthetic oligonucleotide; TTT chr11 5370805 5370826 5370822 5370827 +
gatgcaatagagaataacaaaa

SEQ ID NO: 108197 - DNA, 22 bp, Artificial Sequence
  Synthetic oligonucleotide; TTG chr11 5370806 5370827 5370823 5370828 +
atgcaatagagaataacaaaat

SEQ ID NO: 108198 - DNA, 22 bp, Artificial Sequence
  Synthetic oligonucleotide; TTT chr11 5370830 5370851 5370847 5370852 +
atgtaagctagtgtgacaaatg

SEQ ID NO: 108199 - DNA, 22 bp, Artificial Sequence
  Synthetic oligonucleotide; TTA chr11 5370831 5370852 5370848 5370853 +
tgtaagctagtgtgacaaatgc

SEQ ID NO: 108200 - DNA, 22 bp, Artificial Sequence
  Synthetic oligonucleotide; CTA chr11 5370840 5370861 5370857 5370862 +
gtgtgacaaatgcgggttctga

SEQ ID NO: 108201 - DNA, 22 bp, Artificial Sequence
  Synthetic oligonucleotide; TTC chr11 5370859 5370880 5370876 5370881 +
tgagaggaggtaatatttcagc

SEQ ID NO: 108202 - DNA, 22 bp, Artificial Sequence
  Synthetic oligonucleotide; CTG chr11 5370861 5370882 5370878 5370883 +
agaggaggtaatatttcagctg

SEQ ID NO: 108203 - DNA, 22 bp, Artificial Sequence
  Synthetic oligonucleotide; TTT chr11 5370877 5370898 5370894 5370899 +
cagctgtgacctgagagttgta

SEQ ID NO: 108204 - DNA, 22 bp, Artificial Sequence
  Synthetic oligonucleotide; TTC chr11 5370878 5370899 5370895 5370900 +
agctgtgacctgagagttgtag

SEQ ID NO: 108205 - DNA, 22 bp, Artificial Sequence
  Synthetic oligonucleotide; CTG chr11 5370883 5370904 5370900 5370905 +
tgacctgagagttgtagaggca

SEQ ID NO: 108206 - DNA, 22 bp, Artificial Sequence
  Synthetic oligonucleotide; CTG chr11 5370890 5370911 5370907 5370912 +
agagttgtagaggcaaaagaag

SEQ ID NO: 108207 - DNA, 22 bp, Artificial Sequence
  Synthetic oligonucleotide; TTG chr11 5370897 5370918 5370914 5370919 +
tagaggcaaaagaagtattgcc

SEQ ID NO: 108208 - DNA, 22 bp, Artificial Sequence
  Synthetic oligonucleotide; TTG chr11 5370917 5370938 5370934 5370939 +
ccatagtggtattggtcctgga

SEQ ID NO: 108209 - DNA, 22 bp, Artificial Sequence
  Synthetic oligonucleotide; TTG chr11 5370931 5370952 5370948 5370953 +
gtcctggagctctggttcaatg

SEQ ID NO: 108210 - DNA, 22 bp, Artificial Sequence
  Synthetic oligonucleotide; CTG chr11 5370937 5370958 5370954 5370959 +
gagctctggttcaatgagcaga

SEQ ID NO: 108211 - DNA, 22 bp, Artificial Sequence
  Synthetic oligonucleotide; CTC chr11 5370943 5370964 5370960 5370965 +
tggttcaatgagcagacagaag

SEQ ID NO: 108212 - DNA, 22 bp, Artificial Sequence
  Synthetic oligonucleotide; CTG chr11 5370945 5370966 5370962 5370967 +
gttcaatgagcagacagaagga

SEQ ID NO: 108213 - DNA, 22 bp, Artificial Sequence
  Synthetic oligonucleotide; TTC chr11 5370949 5370970 5370966 5370971 +
aatgagcagacagaaggaagag

SEQ ID NO: 108214 - DNA, 22 bp, Artificial Sequence
  Synthetic oligonucleotide; CTT chr11 5370989 5371010 5371006 5371011 +
caggaaaaagacttacacatga

SEQ ID NO: 108215 - DNA, 22 bp, Artificial Sequence
  Synthetic oligonucleotide; TTC chr11 5370990 5371011 5371007 5371012 +
aggaaaaagacttacacatgat

SEQ ID NO: 108216 - DNA, 22 bp, Artificial Sequence
  Synthetic oligonucleotide; CTT chr11 5371003 5371024 5371020 5371025 +
acacatgattggggctacccaa

SEQ ID NO: 108217 - DNA, 22 bp, Artificial Sequence
  Synthetic oligonucleotide; TTA chr11 5371004 5371025 5371021 5371026 +
cacatgattggggctacccaaa

SEQ ID NO: 108218 - DNA, 22 bp, Artificial Sequence
  Synthetic oligonucleotide; TTG chr11 5371014 5371035 5371031 5371036 +
gggctacccaaagggactggtt

SEQ ID NO: 108219 - DNA, 22 bp, Artificial Sequence
  Synthetic oligonucleotide; CTA chr11 5371020 5371041 5371037 5371042 +
cccaaagggactggtttttcca

SEQ ID NO: 108220 - DNA, 22 bp, Artificial Sequence
  Synthetic oligonucleotide; CTG chr11 5371033 5371054 5371050 5371055 +
gtttttccaagagcagataatt

SEQ ID NO: 108221 - DNA, 22 bp, Artificial Sequence
  Synthetic oligonucleotide; TTT chr11 5371037 5371058 5371054 5371059 +
ttccaagagcagataatttgag

SEQ ID NO: 108222 - DNA, 22 bp, Artificial Sequence
  Synthetic oligonucleotide; TTT chr11 5371038 5371059 5371055 5371060 +
tccaagagcagataatttgagt

SEQ ID NO: 108223 - DNA, 22 bp, Artificial Sequence
  Synthetic oligonucleotide; TTT chr11 5371039 5371060 5371056 5371061 +
ccaagagcagataatttgagtg

SEQ ID NO: 108224 - DNA, 22 bp, Artificial Sequence
  Synthetic oligonucleotide; TTC chr11 5371040 5371061 5371057 5371062 +
caagagcagataatttgagtga

SEQ ID NO: 108225 - DNA, 22 bp, Artificial Sequence
  Synthetic oligonucleotide; TTT chr11 5371056 5371077 5371073 5371078 +
gagtgataaaaatagtgatttt

SEQ ID NO: 108226 - DNA, 22 bp, Artificial Sequence
  Synthetic oligonucleotide; TTG chr11 5371057 5371078 5371074 5371079 +
agtgataaaaatagtgattttg

SEQ ID NO: 108227 - DNA, 22 bp, Artificial Sequence
  Synthetic oligonucleotide; TTT chr11 5371077 5371098 5371094 5371099 +
tgaacccttccttctgctagcc

SEQ ID NO: 108228 - DNA, 22 bp, Artificial Sequence
  Synthetic oligonucleotide; TTT chr11 5371078 5371099 5371095 5371100 +
gaacccttccttctgctagccc

SEQ ID NO: 108229 - DNA, 22 bp, Artificial Sequence
  Synthetic oligonucleotide; TTG chr11 5371079 5371100 5371096 5371101 +
aacccttccttctgctagccct

SEQ ID NO: 108230 - DNA, 22 bp, Artificial Sequence
  Synthetic oligonucleotide; CTT chr11 5371086 5371107 5371103 5371108 +
ccttctgctagccctagctatg

SEQ ID NO: 108231 - DNA, 22 bp, Artificial Sequence
  Synthetic oligonucleotide; TTC chr11 5371087 5371108 5371104 5371109 +
cttctgctagccctagctatgg

SEQ ID NO: 108232 - DNA, 22 bp, Artificial Sequence
  Synthetic oligonucleotide; CTT chr11 5371090 5371111 5371107 5371112 +
ctgctagccctagctatggacc

SEQ ID NO: 108233 - DNA, 22 bp, Artificial Sequence
  Synthetic oligonucleotide; TTC chr11 5371091 5371112 5371108 5371113 +
tgctagccctagctatggacca

SEQ ID NO: 108234 - DNA, 22 bp, Artificial Sequence
  Synthetic oligonucleotide; CTG chr11 5371093 5371114 5371110 5371115 +
ctagccctagctatggaccacc

SEQ ID NO: 108235 - DNA, 22 bp, Artificial Sequence
  Synthetic oligonucleotide; CTA chr11 5371096 5371117 5371113 5371118 +
gccctagctatggaccaccatg

SEQ ID NO: 108236 - DNA, 22 bp, Artificial Sequence
  Synthetic oligonucleotide; CTA chr11 5371102 5371123 5371119 5371124 +
gctatggaccaccatggatatt

SEQ ID NO: 108237 - DNA, 22 bp, Artificial Sequence
  Synthetic oligonucleotide; CTA chr11 5371106 5371127 5371123 5371128 +
tggaccaccatggatattgaag

SEQ ID NO: 108238 - DNA, 22 bp, Artificial Sequence
  Synthetic oligonucleotide; TTG chr11 5371125 5371146 5371142 5371147 +
aagtaagggctttgttttggaa

SEQ ID NO: 108239 - DNA, 22 bp, Artificial Sequence
  Synthetic oligonucleotide; CTT chr11 5371137 5371158 5371154 5371159 +
tgttttggaattactctccaca

SEQ ID NO: 108240 - DNA, 22 bp, Artificial Sequence
  Synthetic oligonucleotide; TTT chr11 5371138 5371159 5371155 5371160 +
gttttggaattactctccacac

SEQ ID NO: 108241 - DNA, 22 bp, Artificial Sequence
  Synthetic oligonucleotide; TTG chr11 5371139 5371160 5371156 5371161 +
ttttggaattactctccacaca

SEQ ID NO: 108242 - DNA, 22 bp, Artificial Sequence
  Synthetic oligonucleotide; TTT chr11 5371142 5371163 5371159 5371164 +
tggaattactctccacacattc

SEQ ID NO: 108243 - DNA, 22 bp, Artificial Sequence
  Synthetic oligonucleotide; TTT chr11 5371143 5371164 5371160 5371165 +
ggaattactctccacacattct

SEQ ID NO: 108244 - DNA, 22 bp, Artificial Sequence
  Synthetic oligonucleotide; TTG chr11 5371144 5371165 5371161 5371166 +
gaattactctccacacattctg

SEQ ID NO: 108245 - DNA, 22 bp, Artificial Sequence
  Synthetic oligonucleotide; TTA chr11 5371150 5371171 5371167 5371172 +
ctctccacacattctgaggata

SEQ ID NO: 108246 - DNA, 22 bp, Artificial Sequence
  Synthetic oligonucleotide; CTC chr11 5371153 5371174 5371170 5371175 +
tccacacattctgaggatatac

SEQ ID NO: 108247 - DNA, 22 bp, Artificial Sequence
  Synthetic oligonucleotide; CTC chr11 5371155 5371176 5371172 5371177 +
cacacattctgaggatatacaa

SEQ ID NO: 108248 - DNA, 22 bp, Artificial Sequence
  Synthetic oligonucleotide; TTC chr11 5371164 5371185 5371181 5371186 +
tgaggatatacaagggcactga

SEQ ID NO: 108249 - DNA, 22 bp, Artificial Sequence
  Synthetic oligonucleotide; CTG chr11 5371166 5371187 5371183 5371188 +
aggatatacaagggcactgaaa

SEQ ID NO: 108250 - DNA, 22 bp, Artificial Sequence
  Synthetic oligonucleotide; CTG chr11 5371185 5371206 5371202 5371207 +
aaatattctagaaagtccatag

SEQ ID NO: 108251 - DNA, 22 bp, Artificial Sequence
  Synthetic oligonucleotide; TTC chr11 5371193 5371214 5371210 5371215 +
tagaaagtccatagcacattct

SEQ ID NO: 108252 - DNA, 22 bp, Artificial Sequence
  Synthetic oligonucleotide; CTA chr11 5371195 5371216 5371212 5371217 +
gaaagtccatagcacattctga

SEQ ID NO: 108253 - DNA, 22 bp, Artificial Sequence
  Synthetic oligonucleotide; TTC chr11 5371214 5371235 5371231 5371236 +
tgatgtttatactctaagccac

SEQ ID NO: 108254 - DNA, 22 bp, Artificial Sequence
  Synthetic oligonucleotide; CTG chr11 5371216 5371237 5371233 5371238 +
atgtttatactctaagccacac

SEQ ID NO: 108255 - DNA, 22 bp, Artificial Sequence
  Synthetic oligonucleotide; TTT chr11 5371222 5371243 5371239 5371244 +
atactctaagccacacagcacc

SEQ ID NO: 108256 - DNA, 22 bp, Artificial Sequence
  Synthetic oligonucleotide; TTA chr11 5371223 5371244 5371240 5371245 +
tactctaagccacacagcacct

SEQ ID NO: 108257 - DNA, 22 bp, Artificial Sequence
  Synthetic oligonucleotide; CTC chr11 5371228 5371249 5371245 5371250 +
taagccacacagcacctttccc

SEQ ID NO: 108258 - DNA, 22 bp, Artificial Sequence
  Synthetic oligonucleotide; CTA chr11 5371230 5371251 5371247 5371252 +
agccacacagcacctttccccg

SEQ ID NO: 108259 - DNA, 22 bp, Artificial Sequence
  Synthetic oligonucleotide; CTT chr11 5371246 5371267 5371263 5371268 +
tccccggatctagggtctttca

SEQ ID NO: 108260 - DNA, 22 bp, Artificial Sequence
  Synthetic oligonucleotide; TTT chr11 5371247 5371268 5371264 5371269 +
ccccggatctagggtctttcac

SEQ ID NO: 108261 - DNA, 22 bp, Artificial Sequence
  Synthetic oligonucleotide; TTC chr11 5371248 5371269 5371265 5371270 +
cccggatctagggtctttcaca

SEQ ID NO: 108262 - DNA, 22 bp, Artificial Sequence
  Synthetic oligonucleotide; CTA chr11 5371258 5371279 5371275 5371280 +
gggtctttcacattaggttaat

SEQ ID NO: 108263 - DNA, 22 bp, Artificial Sequence
  Synthetic oligonucleotide; CTT chr11 5371265 5371286 5371282 5371287 +
tcacattaggttaattttttta

SEQ ID NO: 108264 - DNA, 22 bp, Artificial Sequence
  Synthetic oligonucleotide; TTT chr11 5371266 5371287 5371283 5371288 +
cacattaggttaatttttttaa

SEQ ID NO: 108265 - DNA, 22 bp, Artificial Sequence
  Synthetic oligonucleotide; TTC chr11 5371267 5371288 5371284 5371289 +
acattaggttaatttttttaaa

SEQ ID NO: 108266 - DNA, 22 bp, Artificial Sequence
  Synthetic oligonucleotide; TTA chr11 5371273 5371294 5371290 5371295 +
ggttaatttttttaaaactcaa

SEQ ID NO: 108267 - DNA, 22 bp, Artificial Sequence
  Synthetic oligonucleotide; TTA chr11 5371278 5371299 5371295 5371300 +
atttttttaaaactcaaacaca

SEQ ID NO: 108268 - DNA, 22 bp, Artificial Sequence
  Synthetic oligonucleotide; TTT chr11 5371282 5371303 5371299 5371304 +
ttttaaaactcaaacacagaag

SEQ ID NO: 108269 - DNA, 22 bp, Artificial Sequence
  Synthetic oligonucleotide; TTT chr11 5371283 5371304 5371300 5371305 +
tttaaaactcaaacacagaagt

SEQ ID NO: 108270 - DNA, 22 bp, Artificial Sequence
  Synthetic oligonucleotide; TTT chr11 5371284 5371305 5371301 5371306 +
ttaaaactcaaacacagaagtt

SEQ ID NO: 108271 - DNA, 22 bp, Artificial Sequence
  Synthetic oligonucleotide; TTT chr11 5371285 5371306 5371302 5371307 +
taaaactcaaacacagaagttc

SEQ ID NO: 108272 - DNA, 22 bp, Artificial Sequence
  Synthetic oligonucleotide; TTT chr11 5371286 5371307 5371303 5371308 +
aaaactcaaacacagaagttca

SEQ ID NO: 108273 - DNA, 22 bp, Artificial Sequence
  Synthetic oligonucleotide; TTA chr11 5371287 5371308 5371304 5371309 +
aaactcaaacacagaagttcaa

SEQ ID NO: 108274 - DNA, 22 bp, Artificial Sequence
  Synthetic oligonucleotide; CTC chr11 5371293 5371314 5371310 5371315 +
aaacacagaagttcaaaaaaat

SEQ ID NO: 108275 - DNA, 22 bp, Artificial Sequence
  Synthetic oligonucleotide; TTC chr11 5371307 5371328 5371324 5371329 +
aaaaaaattgaacatataattc

SEQ ID NO: 108276 - DNA, 22 bp, Artificial Sequence
  Synthetic oligonucleotide; TTG chr11 5371317 5371338 5371334 5371339 +
aacatataattctcattctctg

SEQ ID NO: 108277 - DNA, 22 bp, Artificial Sequence
  Synthetic oligonucleotide; TTC chr11 5371329 5371350 5371346 5371351 +
tcattctctgtggctcataaac

SEQ ID NO: 108278 - DNA, 22 bp, Artificial Sequence
  Synthetic oligonucleotide; CTC chr11 5371331 5371352 5371348 5371353 +
attctctgtggctcataaacat

SEQ ID NO: 108279 - DNA, 22 bp, Artificial Sequence
  Synthetic oligonucleotide; TTC chr11 5371335 5371356 5371352 5371357 +
tctgtggctcataaacatttaa

SEQ ID NO: 108280 - DNA, 22 bp, Artificial Sequence
  Synthetic oligonucleotide; CTC chr11 5371337 5371358 5371354 5371359 +
tgtggctcataaacatttaata

SEQ ID NO: 108281 - DNA, 22 bp, Artificial Sequence
  Synthetic oligonucleotide; CTG chr11 5371339 5371360 5371356 5371361 +
tggctcataaacatttaataga

SEQ ID NO: 108282 - DNA, 22 bp, Artificial Sequence
  Synthetic oligonucleotide; CTC chr11 5371345 5371366 5371362 5371367 +
ataaacatttaatagagacatt

SEQ ID NO: 108283 - DNA, 22 bp, Artificial Sequence
  Synthetic oligonucleotide; TTT chr11 5371355 5371376 5371372 5371377 +
aatagagacattgatgaaactg

SEQ ID NO: 108284 - DNA, 22 bp, Artificial Sequence
  Synthetic oligonucleotide; TTA chr11 5371356 5371377 5371373 5371378 +
atagagacattgatgaaactgt

SEQ ID NO: 108285 - DNA, 22 bp, Artificial Sequence
  Synthetic oligonucleotide; TTG chr11 5371368 5371389 5371385 5371390 +
atgaaactgtaaaaccctgagt

SEQ ID NO: 108286 - DNA, 22 bp, Artificial Sequence
  Synthetic oligonucleotide; CTG chr11 5371377 5371398 5371394 5371399 +
taaaaccctgagttgtaggccg

SEQ ID NO: 108287 - DNA, 22 bp, Artificial Sequence
  Synthetic oligonucleotide; CTG chr11 5371387 5371408 5371404 5371409 +
agttgtaggccggagatataaa

SEQ ID NO: 108288 - DNA, 22 bp, Artificial Sequence
  Synthetic oligonucleotide; TTG chr11 5371392 5371413 5371409 5371414 +
taggccggagatataaaatttc

SEQ ID NO: 108289 - DNA, 22 bp, Artificial Sequence
  Synthetic oligonucleotide; TTT chr11 5371413 5371434 5371430 5371435 +
caacataaagaatgaacaaaat

SEQ ID NO: 108290 - DNA, 22 bp, Artificial Sequence
  Synthetic oligonucleotide; TTC chr11 5371414 5371435 5371431 5371436 +
aacataaagaatgaacaaaatg

SEQ ID NO: 108291 - DNA, 22 bp, Artificial Sequence
  Synthetic oligonucleotide; CTG chr11 5371457 5371478 5371474 5371479 +
agagacagtgatagctgtatct

SEQ ID NO: 108292 - DNA, 22 bp, Artificial Sequence
  Synthetic oligonucleotide; CTG chr11 5371474 5371495 5371491 5371496 +
tatctaaagagtactgatatta

SEQ ID NO: 108293 - DNA, 22 bp, Artificial Sequence
  Synthetic oligonucleotide; CTA chr11 5371480 5371501 5371497 5371502 +
aagagtactgatattaaaaata

SEQ ID NO: 108294 - DNA, 22 bp, Artificial Sequence
  Synthetic oligonucleotide; CTG chr11 5371490 5371511 5371507 5371512 +
atattaaaaatagagaaaaaca

SEQ ID NO: 108295 - DNA, 22 bp, Artificial Sequence
  Synthetic oligonucleotide; TTA chr11 5371496 5371517 5371513 5371518 +
aaaatagagaaaaacatatatc

SEQ ID NO: 108296 - DNA, 22 bp, Artificial Sequence
  Synthetic oligonucleotide; CTC chr11 5371520 5371541 5371537 5371542 +
attatatccaaagggttacata

SEQ ID NO: 108297 - DNA, 22 bp, Artificial Sequence
  Synthetic oligonucleotide; TTA chr11 5371524 5371545 5371541 5371546 +
tatccaaagggttacataagtt

SEQ ID NO: 108298 - DNA, 22 bp, Artificial Sequence
  Synthetic oligonucleotide; TTA chr11 5371538 5371559 5371555 5371560 +
cataagttttaagagtggaaat

SEQ ID NO: 108299 - DNA, 22 bp, Artificial Sequence
  Synthetic oligonucleotide; TTT chr11 5371547 5371568 5371564 5371569 +
taagagtggaaataacatgaag

SEQ ID NO: 108300 - DNA, 22 bp, Artificial Sequence
  Synthetic oligonucleotide; TTT chr11 5371548 5371569 5371565 5371570 +
aagagtggaaataacatgaagg

SEQ ID NO: 108301 - DNA, 22 bp, Artificial Sequence
  Synthetic oligonucleotide; TTA chr11 5371549 5371570 5371566 5371571 +
agagtggaaataacatgaagga

SEQ ID NO: 108302 - DNA, 22 bp, Artificial Sequence
  Synthetic oligonucleotide; CTA chr11 5371576 5371597 5371593 5371598 +
aacaattaggaaacagaaattt

SEQ ID NO: 108303 - DNA, 22 bp, Artificial Sequence
  Synthetic oligonucleotide; TTA chr11 5371584 5371605 5371601 5371606 +
ggaaacagaaatttgacttgct

SEQ ID NO: 108304 - DNA, 22 bp, Artificial Sequence
  Synthetic oligonucleotide; TTT chr11 5371598 5371619 5371615 5371620 +
gacttgcttcagataaaagctt

SEQ ID NO: 108305 - DNA, 22 bp, Artificial Sequence
  Synthetic oligonucleotide; TTG chr11 5371599 5371620 5371616 5371621 +
acttgcttcagataaaagcttt

SEQ ID NO: 108306 - DNA, 22 bp, Artificial Sequence
  Synthetic oligonucleotide; CTT chr11 5371603 5371624 5371620 5371625 +
gcttcagataaaagcttttaaa

SEQ ID NO: 108307 - DNA, 22 bp, Artificial Sequence
  Synthetic oligonucleotide; TTG chr11 5371604 5371625 5371621 5371626 +
cttcagataaaagcttttaaaa

SEQ ID NO: 108308 - DNA, 22 bp, Artificial Sequence
  Synthetic oligonucleotide; CTT chr11 5371607 5371628 5371624 5371629 +
cagataaaagcttttaaaatat

SEQ ID NO: 108309 - DNA, 22 bp, Artificial Sequence
  Synthetic oligonucleotide; TTC chr11 5371608 5371629 5371625 5371630 +
agataaaagcttttaaaatatt

SEQ ID NO: 108310 - DNA, 22 bp, Artificial Sequence
  Synthetic oligonucleotide; CTT chr11 5371620 5371641 5371637 5371642 +
ttaaaatattttatctgaaaca

SEQ ID NO: 108311 - DNA, 22 bp, Artificial Sequence
  Synthetic oligonucleotide; TTT chr11 5371621 5371642 5371638 5371643 +
taaaatattttatctgaaacaa

SEQ ID NO: 108312 - DNA, 22 bp, Artificial Sequence
  Synthetic oligonucleotide; TTT chr11 5371622 5371643 5371639 5371644 +
aaaatattttatctgaaacaag

SEQ ID NO: 108313 - DNA, 22 bp, Artificial Sequence
  Synthetic oligonucleotide; TTA chr11 5371623 5371644 5371640 5371645 +
aaatattttatctgaaacaagt

SEQ ID NO: 108314 - DNA, 22 bp, Artificial Sequence
  Synthetic oligonucleotide; TTT chr11 5371631 5371652 5371648 5371653 +
tatctgaaacaagtaagcttgt

SEQ ID NO: 108315 - DNA, 22 bp, Artificial Sequence
  Synthetic oligonucleotide; TTT chr11 5371632 5371653 5371649 5371654 +
atctgaaacaagtaagcttgtt

SEQ ID NO: 108316 - DNA, 22 bp, Artificial Sequence
  Synthetic oligonucleotide; TTA chr11 5371633 5371654 5371650 5371655 +
tctgaaacaagtaagcttgttc

SEQ ID NO: 108317 - DNA, 22 bp, Artificial Sequence
  Synthetic oligonucleotide; CTG chr11 5371637 5371658 5371654 5371659 +
aaacaagtaagcttgttcaaaa

SEQ ID NO: 108318 - DNA, 22 bp, Artificial Sequence
  Synthetic oligonucleotide; CTT chr11 5371651 5371672 5371668 5371673 +
gttcaaaaaatataggatatat

SEQ ID NO: 108319 - DNA, 22 bp, Artificial Sequence
  Synthetic oligonucleotide; TTG chr11 5371652 5371673 5371669 5371674 +
ttcaaaaaatataggatatatg

SEQ ID NO: 108320 - DNA, 22 bp, Artificial Sequence
  Synthetic oligonucleotide; TTC chr11 5371655 5371676 5371672 5371677 +
aaaaaatataggatatatgtgt

SEQ ID NO: 108321 - DNA, 22 bp, Artificial Sequence
  Synthetic oligonucleotide; TTA chr11 5371694 5371715 5371711 5371716 +
cttcaatcaagcaaattaacct

SEQ ID NO: 108322 - DNA, 22 bp, Artificial Sequence
  Synthetic oligonucleotide; CTT chr11 5371697 5371718 5371714 5371719 +
caatcaagcaaattaacctatc

SEQ ID NO: 108323 - DNA, 22 bp, Artificial Sequence
  Synthetic oligonucleotide; TTC chr11 5371698 5371719 5371715 5371720 +
aatcaagcaaattaacctatcc

SEQ ID NO: 108324 - DNA, 22 bp, Artificial Sequence
  Synthetic oligonucleotide; TTA chr11 5371712 5371733 5371729 5371734 +
acctatccatcaatacaacacc

SEQ ID NO: 108325 - DNA, 22 bp, Artificial Sequence
  Synthetic oligonucleotide; CTA chr11 5371717 5371738 5371734 5371739 +
tccatcaatacaacaccttcca

SEQ ID NO: 108326 - DNA, 22 bp, Artificial Sequence
  Synthetic oligonucleotide; CTT chr11 5371736 5371757 5371753 5371758 +
ccatagataccttttgcttttt

SEQ ID NO: 108327 - DNA, 22 bp, Artificial Sequence
  Synthetic oligonucleotide; TTC chr11 5371737 5371758 5371754 5371759 +
catagataccttttgctttttc

SEQ ID NO: 108328 - DNA, 22 bp, Artificial Sequence
  Synthetic oligonucleotide; CTT chr11 5371749 5371770 5371766 5371771 +
ttgctttttctttgtgtaaggg

SEQ ID NO: 108329 - DNA, 22 bp, Artificial Sequence
  Synthetic oligonucleotide; TTT chr11 5371750 5371771 5371767 5371772 +
tgctttttctttgtgtaagggc

SEQ ID NO: 108330 - DNA, 22 bp, Artificial Sequence
  Synthetic oligonucleotide; TTT chr11 5371751 5371772 5371768 5371773 +
gctttttctttgtgtaagggca

SEQ ID NO: 108331 - DNA, 22 bp, Artificial Sequence
  Synthetic oligonucleotide; TTG chr11 5371752 5371773 5371769 5371774 +
ctttttctttgtgtaagggcat

SEQ ID NO: 108332 - DNA, 22 bp, Artificial Sequence
  Synthetic oligonucleotide; CTT chr11 5371755 5371776 5371772 5371777 +
tttctttgtgtaagggcatcta

SEQ ID NO: 108333 - DNA, 22 bp, Artificial Sequence
  Synthetic oligonucleotide; TTT chr11 5371756 5371777 5371773 5371778 +
ttctttgtgtaagggcatctaa

SEQ ID NO: 108334 - DNA, 22 bp, Artificial Sequence
  Synthetic oligonucleotide; TTT chr11 5371757 5371778 5371774 5371779 +
tctttgtgtaagggcatctaac

SEQ ID NO: 108335 - DNA, 22 bp, Artificial Sequence
  Synthetic oligonucleotide; TTT chr11 5371758 5371779 5371775 5371780 +
ctttgtgtaagggcatctaaca

SEQ ID NO: 108336 - DNA, 22 bp, Artificial Sequence
  Synthetic oligonucleotide; TTC chr11 5371759 5371780 5371776 5371781 +
tttgtgtaagggcatctaacat

SEQ ID NO: 108337 - DNA, 22 bp, Artificial Sequence
  Synthetic oligonucleotide; CTT chr11 5371761 5371782 5371778 5371783 +
tgtgtaagggcatctaacatct

SEQ ID NO: 108338 - DNA, 22 bp, Artificial Sequence
  Synthetic oligonucleotide; TTT chr11 5371762 5371783 5371779 5371784 +
gtgtaagggcatctaacatcta

SEQ ID NO: 108339 - DNA, 22 bp, Artificial Sequence
  Synthetic oligonucleotide; TTG chr11 5371763 5371784 5371780 5371785 +
tgtaagggcatctaacatctac

SEQ ID NO: 108340 - DNA, 22 bp, Artificial Sequence
  Synthetic oligonucleotide; CTA chr11 5371777 5371798 5371794 5371799 +
acatctactgtcataacaaatg

SEQ ID NO: 108341 - DNA, 22 bp, Artificial Sequence
  Synthetic oligonucleotide; CTA chr11 5371784 5371805 5371801 5371806 +
ctgtcataacaaatgtttagtt

SEQ ID NO: 108342 - DNA, 22 bp, Artificial Sequence
  Synthetic oligonucleotide; CTG chr11 5371787 5371808 5371804 5371809 +
tcataacaaatgtttagtttac

SEQ ID NO: 108343 - DNA, 22 bp, Artificial Sequence
  Synthetic oligonucleotide; TTT chr11 5371802 5371823 5371819 5371824 +
agtttacagtacagtattaagt

SEQ ID NO: 108344 - DNA, 22 bp, Artificial Sequence
  Synthetic oligonucleotide; TTA chr11 5371803 5371824 5371820 5371825 +
gtttacagtacagtattaagtc

SEQ ID NO: 108345 - DNA, 22 bp, Artificial Sequence
  Synthetic oligonucleotide; TTT chr11 5371807 5371828 5371824 5371829 +
acagtacagtattaagtcttca

SEQ ID NO: 108346 - DNA, 22 bp, Artificial Sequence
  Synthetic oligonucleotide; TTA chr11 5371808 5371829 5371825 5371830 +
cagtacagtattaagtcttcat

SEQ ID NO: 108347 - DNA, 22 bp, Artificial Sequence
  Synthetic oligonucleotide; TTA chr11 5371821 5371842 5371838 5371843 +
agtcttcatgccatacactaga

SEQ ID NO: 108348 - DNA, 22 bp, Artificial Sequence
  Synthetic oligonucleotide; CTT chr11 5371827 5371848 5371844 5371849 +
catgccatacactagatctcta

SEQ ID NO: 108349 - DNA, 22 bp, Artificial Sequence
  Synthetic oligonucleotide; TTC chr11 5371828 5371849 5371845 5371850 +
atgccatacactagatctctaa

SEQ ID NO: 108350 - DNA, 22 bp, Artificial Sequence
  Synthetic oligonucleotide; CTA chr11 5371841 5371862 5371858 5371863 +
gatctctaaacttatttatcct

SEQ ID NO: 108351 - DNA, 22 bp, Artificial Sequence
  Synthetic oligonucleotide; CTC chr11 5371847 5371868 5371864 5371869 +
taaacttatttatcctatacag

SEQ ID NO: 108352 - DNA, 22 bp, Artificial Sequence
  Synthetic oligonucleotide; CTA chr11 5371849 5371870 5371866 5371871 +
aacttatttatcctatacagct

SEQ ID NO: 108353 - DNA, 22 bp, Artificial Sequence
  Synthetic oligonucleotide; CTT chr11 5371854 5371875 5371871 5371876 +
atttatcctatacagctgcaag

SEQ ID NO: 108354 - DNA, 22 bp, Artificial Sequence
  Synthetic oligonucleotide; TTA chr11 5371855 5371876 5371872 5371877 +
tttatcctatacagctgcaagt

SEQ ID NO: 108355 - DNA, 22 bp, Artificial Sequence
  Synthetic oligonucleotide; TTT chr11 5371858 5371879 5371875 5371880 +
atcctatacagctgcaagttta

SEQ ID NO: 108356 - DNA, 22 bp, Artificial Sequence
  Synthetic oligonucleotide; TTA chr11 5371859 5371880 5371876 5371881 +
tcctatacagctgcaagtttat

SEQ ID NO: 108357 - DNA, 22 bp, Artificial Sequence
  Synthetic oligonucleotide; CTA chr11 5371864 5371885 5371881 5371886 +
tacagctgcaagtttataacct

SEQ ID NO: 108358 - DNA, 22 bp, Artificial Sequence
  Synthetic oligonucleotide; CTG chr11 5371872 5371893 5371889 5371894 +
caagtttataacctttgaccta

SEQ ID NO: 108359 - DNA, 22 bp, Artificial Sequence
  Synthetic oligonucleotide; TTT chr11 5371879 5371900 5371896 5371901 +
ataacctttgacctacttctcc

SEQ ID NO: 108360 - DNA, 22 bp, Artificial Sequence
  Synthetic oligonucleotide; TTA chr11 5371880 5371901 5371897 5371902 +
taacctttgacctacttctccc

SEQ ID NO: 108361 - DNA, 22 bp, Artificial Sequence
  Synthetic oligonucleotide; CTT chr11 5371887 5371908 5371904 5371909 +
tgacctacttctccctattttc

SEQ ID NO: 108362 - DNA, 22 bp, Artificial Sequence
  Synthetic oligonucleotide; TTT chr11 5371888 5371909 5371905 5371910 +
gacctacttctccctattttct

SEQ ID NO: 108363 - DNA, 22 bp, Artificial Sequence
  Synthetic oligonucleotide; TTG chr11 5371889 5371910 5371906 5371911 +
acctacttctccctattttctc

SEQ ID NO: 108364 - DNA, 22 bp, Artificial Sequence
  Synthetic oligonucleotide; CTA chr11 5371894 5371915 5371911 5371916 +
cttctccctattttctctttct

SEQ ID NO: 108365 - DNA, 22 bp, Artificial Sequence
  Synthetic oligonucleotide; CTT chr11 5371897 5371918 5371914 5371919 +
ctccctattttctctttctttc

SEQ ID NO: 108366 - DNA, 22 bp, Artificial Sequence
  Synthetic oligonucleotide; TTC chr11 5371898 5371919 5371915 5371920 +
tccctattttctctttctttct

SEQ ID NO: 108367 - DNA, 22 bp, Artificial Sequence
  Synthetic oligonucleotide; CTC chr11 5371900 5371921 5371917 5371922 +
cctattttctctttctttcttc

SEQ ID NO: 108368 - DNA, 22 bp, Artificial Sequence
  Synthetic oligonucleotide; CTA chr11 5371904 5371925 5371921 5371926 +
ttttctctttctttcttcccct

SEQ ID NO: 108369 - DNA, 22 bp, Artificial Sequence
  Synthetic oligonucleotide; TTT chr11 5371907 5371928 5371924 5371929 +
tctctttctttcttcccctttt

SEQ ID NO: 108370 - DNA, 22 bp, Artificial Sequence
  Synthetic oligonucleotide; TTT chr11 5371908 5371929 5371925 5371930 +
ctctttctttcttccccttttt

SEQ ID NO: 108371 - DNA, 22 bp, Artificial Sequence
  Synthetic oligonucleotide; TTC chr11 5371909 5371930 5371926 5371931 +
tctttctttcttccccttttta

SEQ ID NO: 108372 - DNA, 22 bp, Artificial Sequence
  Synthetic oligonucleotide; CTC chr11 5371911 5371932 5371928 5371933 +
tttctttcttcccctttttaca

SEQ ID NO: 108373 - DNA, 22 bp, Artificial Sequence
  Synthetic oligonucleotide; CTT chr11 5371913 5371934 5371930 5371935 +
tctttcttcccctttttacact

SEQ ID NO: 108374 - DNA, 22 bp, Artificial Sequence
  Synthetic oligonucleotide; TTT chr11 5371914 5371935 5371931 5371936 +
ctttcttcccctttttacactg

SEQ ID NO: 108375 - DNA, 22 bp, Artificial Sequence
  Synthetic oligonucleotide; TTC chr11 5371915 5371936 5371932 5371937 +
tttcttcccctttttacactgt

SEQ ID NO: 108376 - DNA, 22 bp, Artificial Sequence
  Synthetic oligonucleotide; CTT chr11 5371917 5371938 5371934 5371939 +
tcttcccctttttacactgttt

SEQ ID NO: 108377 - DNA, 22 bp, Artificial Sequence
  Synthetic oligonucleotide; TTT chr11 5371918 5371939 5371935 5371940 +
cttcccctttttacactgtttc

SEQ ID NO: 108378 - DNA, 22 bp, Artificial Sequence
  Synthetic oligonucleotide; TTC chr11 5371919 5371940 5371936 5371941 +
ttcccctttttacactgtttct

SEQ ID NO: 108379 - DNA, 22 bp, Artificial Sequence
  Synthetic oligonucleotide; CTT chr11 5371921 5371942 5371938 5371943 +
cccctttttacactgtttctat

SEQ ID NO: 108380 - DNA, 22 bp, Artificial Sequence
  Synthetic oligonucleotide; TTC chr11 5371922 5371943 5371939 5371944 +
ccctttttacactgtttctatg

SEQ ID NO: 108381 - DNA, 22 bp, Artificial Sequence
  Synthetic oligonucleotide; CTT chr11 5371927 5371948 5371944 5371949 +
tttacactgtttctatgcattt

SEQ ID NO: 108382 - DNA, 22 bp, Artificial Sequence
  Synthetic oligonucleotide; TTT chr11 5371928 5371949 5371945 5371950 +
ttacactgtttctatgcatttg

SEQ ID NO: 108383 - DNA, 22 bp, Artificial Sequence
  Synthetic oligonucleotide; TTT chr11 5371929 5371950 5371946 5371951 +
tacactgtttctatgcatttga

SEQ ID NO: 108384 - DNA, 22 bp, Artificial Sequence
  Synthetic oligonucleotide; TTT chr11 5371930 5371951 5371947 5371952 +
acactgtttctatgcatttgac

SEQ ID NO: 108385 - DNA, 22 bp, Artificial Sequence
  Synthetic oligonucleotide; TTA chr11 5371931 5371952 5371948 5371953 +
cactgtttctatgcatttgacc

SEQ ID NO: 108386 - DNA, 22 bp, Artificial Sequence
  Synthetic oligonucleotide; CTG chr11 5371936 5371957 5371953 5371958 +
tttctatgcatttgaccttatt

SEQ ID NO: 108387 - DNA, 22 bp, Artificial Sequence
  Synthetic oligonucleotide; TTT chr11 5371939 5371960 5371956 5371961 +
ctatgcatttgaccttattttt

SEQ ID NO: 108388 - DNA, 22 bp, Artificial Sequence
  Synthetic oligonucleotide; TTC chr11 5371940 5371961 5371957 5371962 +
tatgcatttgaccttatttttc

SEQ ID NO: 108389 - DNA, 22 bp, Artificial Sequence
  Synthetic oligonucleotide; CTA chr11 5371942 5371963 5371959 5371964 +
tgcatttgaccttatttttctt

SEQ ID NO: 108390 - DNA, 22 bp, Artificial Sequence
  Synthetic oligonucleotide; TTT chr11 5371949 5371970 5371966 5371971 +
gaccttatttttcttttgagat

SEQ ID NO: 108391 - DNA, 22 bp, Artificial Sequence
  Synthetic oligonucleotide; TTG chr11 5371950 5371971 5371967 5371972 +
accttatttttcttttgagatt

SEQ ID NO: 108392 - DNA, 22 bp, Artificial Sequence
  Synthetic oligonucleotide; CTT chr11 5371955 5371976 5371972 5371977 +
atttttcttttgagattccaca

SEQ ID NO: 108393 - DNA, 22 bp, Artificial Sequence
  Synthetic oligonucleotide; TTA chr11 5371956 5371977 5371973 5371978 +
tttttcttttgagattccacat

SEQ ID NO: 108394 - DNA, 22 bp, Artificial Sequence
  Synthetic oligonucleotide; TTT chr11 5371959 5371980 5371976 5371981 +
ttcttttgagattccacatata

SEQ ID NO: 108395 - DNA, 22 bp, Artificial Sequence
  Synthetic oligonucleotide; TTT chr11 5371960 5371981 5371977 5371982 +
tcttttgagattccacatataa

SEQ ID NO: 108396 - DNA, 22 bp, Artificial Sequence
  Synthetic oligonucleotide; TTT chr11 5371961 5371982 5371978 5371983 +
cttttgagattccacatataag

SEQ ID NO: 108397 - DNA, 22 bp, Artificial Sequence
  Synthetic oligonucleotide; TTC chr11 5371962 5371983 5371979 5371984 +
ttttgagattccacatataagt

SEQ ID NO: 108398 - DNA, 22 bp, Artificial Sequence
  Synthetic oligonucleotide; CTT chr11 5371964 5371985 5371981 5371986 +
ttgagattccacatataagtaa

SEQ ID NO: 108399 - DNA, 22 bp, Artificial Sequence
  Synthetic oligonucleotide; TTT chr11 5371965 5371986 5371982 5371987 +
tgagattccacatataagtaat

SEQ ID NO: 108400 - DNA, 22 bp, Artificial Sequence
  Synthetic oligonucleotide; TTT chr11 5371966 5371987 5371983 5371988 +
gagattccacatataagtaata

SEQ ID NO: 108401 - DNA, 22 bp, Artificial Sequence
  Synthetic oligonucleotide; TTG chr11 5371967 5371988 5371984 5371989 +
agattccacatataagtaatat

SEQ ID NO: 108402 - DNA, 22 bp, Artificial Sequence
  Synthetic oligonucleotide; TTC chr11 5371973 5371994 5371990 5371995 +
cacatataagtaatatcatgcc

SEQ ID NO: 108403 - DNA, 22 bp, Artificial Sequence
  Synthetic oligonucleotide; CTT chr11 5371997 5372018 5372014 5372019 +
tatttgtttctgtgtctggttt

SEQ ID NO: 108404 - DNA, 22 bp, Artificial Sequence
  Synthetic oligonucleotide; TTT chr11 5371998 5372019 5372015 5372020 +
atttgtttctgtgtctggttta

SEQ ID NO: 108405 - DNA, 22 bp, Artificial Sequence
  Synthetic oligonucleotide; TTA chr11 5371999 5372020 5372016 5372021 +
tttgtttctgtgtctggtttat

SEQ ID NO: 108406 - DNA, 22 bp, Artificial Sequence
  Synthetic oligonucleotide; TTT chr11 5372002 5372023 5372019 5372024 +
gtttctgtgtctggtttatttc

SEQ ID NO: 108407 - DNA, 22 bp, Artificial Sequence
  Synthetic oligonucleotide; TTG chr11 5372003 5372024 5372020 5372025 +
tttctgtgtctggtttatttca

SEQ ID NO: 108408 - DNA, 22 bp, Artificial Sequence
  Synthetic oligonucleotide; TTT chr11 5372006 5372027 5372023 5372028 +
ctgtgtctggtttatttcactt

SEQ ID NO: 108409 - DNA, 22 bp, Artificial Sequence
  Synthetic oligonucleotide; TTC chr11 5372007 5372028 5372024 5372029 +
tgtgtctggtttatttcactta

SEQ ID NO: 108410 - DNA, 22 bp, Artificial Sequence
  Synthetic oligonucleotide; CTG chr11 5372009 5372030 5372026 5372031 +
tgtctggtttatttcacttagc

SEQ ID NO: 108411 - DNA, 22 bp, Artificial Sequence
  Synthetic oligonucleotide; CTG chr11 5372015 5372036 5372032 5372037 +
gtttatttcacttagcaaaatg

SEQ ID NO: 108412 - DNA, 22 bp, Artificial Sequence
  Synthetic oligonucleotide; TTT chr11 5372019 5372040 5372036 5372041 +
atttcacttagcaaaatgtact

SEQ ID NO: 108413 - DNA, 22 bp, Artificial Sequence
  Synthetic oligonucleotide; TTA chr11 5372020 5372041 5372037 5372042 +
tttcacttagcaaaatgtactc

SEQ ID NO: 108414 - DNA, 22 bp, Artificial Sequence
  Synthetic oligonucleotide; TTT chr11 5372023 5372044 5372040 5372045 +
cacttagcaaaatgtactctag

SEQ ID NO: 108415 - DNA, 22 bp, Artificial Sequence
  Synthetic oligonucleotide; TTC chr11 5372024 5372045 5372041 5372046 +
acttagcaaaatgtactctagg

SEQ ID NO: 108416 - DNA, 22 bp, Artificial Sequence
  Synthetic oligonucleotide; CTT chr11 5372028 5372049 5372045 5372050 +
agcaaaatgtactctaggttta

SEQ ID NO: 108417 - DNA, 22 bp, Artificial Sequence
  Synthetic oligonucleotide; TTA chr11 5372029 5372050 5372046 5372051 +
gcaaaatgtactctaggtttat

SEQ ID NO: 108418 - DNA, 22 bp, Artificial Sequence
  Synthetic oligonucleotide; CTC chr11 5372042 5372063 5372059 5372064 +
taggtttatacattccccccat

SEQ ID NO: 108419 - DNA, 22 bp, Artificial Sequence
  Synthetic oligonucleotide; CTA chr11 5372044 5372065 5372061 5372066 +
ggtttatacattccccccatct

SEQ ID NO: 108420 - DNA, 22 bp, Artificial Sequence
  Synthetic oligonucleotide; TTT chr11 5372049 5372070 5372066 5372071 +
atacattccccccatctccttt

SEQ ID NO: 108421 - DNA, 22 bp, Artificial Sequence
  Synthetic oligonucleotide; TTA chr11 5372050 5372071 5372067 5372072 +
tacattccccccatctcctttt

SEQ ID NO: 108422 - DNA, 22 bp, Artificial Sequence
  Synthetic oligonucleotide; TTC chr11 5372057 5372078 5372074 5372079 +
cccccatctccttttttaaggc

SEQ ID NO: 108423 - DNA, 22 bp, Artificial Sequence
  Synthetic oligonucleotide; CTC chr11 5372067 5372088 5372084 5372089 +
cttttttaaggctgaataatat

SEQ ID NO: 108424 - DNA, 22 bp, Artificial Sequence
  Synthetic oligonucleotide; CTT chr11 5372070 5372091 5372087 5372092 +
ttttaaggctgaataatattgt

SEQ ID NO: 108425 - DNA, 22 bp, Artificial Sequence
  Synthetic oligonucleotide; TTT chr11 5372071 5372092 5372088 5372093 +
tttaaggctgaataatattgtg

SEQ ID NO: 108426 - DNA, 22 bp, Artificial Sequence
  Synthetic oligonucleotide; TTT chr11 5372072 5372093 5372089 5372094 +
ttaaggctgaataatattgtga

SEQ ID NO: 108427 - DNA, 22 bp, Artificial Sequence
  Synthetic oligonucleotide; TTT chr11 5372073 5372094 5372090 5372095 +
taaggctgaataatattgtgat

SEQ ID NO: 108428 - DNA, 22 bp, Artificial Sequence
  Synthetic oligonucleotide; TTT chr11 5372074 5372095 5372091 5372096 +
aaggctgaataatattgtgata

SEQ ID NO: 108429 - DNA, 22 bp, Artificial Sequence
  Synthetic oligonucleotide; TTA chr11 5372075 5372096 5372092 5372097 +
aggctgaataatattgtgatat

SEQ ID NO: 108430 - DNA, 22 bp, Artificial Sequence
  Synthetic oligonucleotide; CTG chr11 5372081 5372102 5372098 5372103 +
aataatattgtgatatcataca

SEQ ID NO: 108431 - DNA, 22 bp, Artificial Sequence
  Synthetic oligonucleotide; TTG chr11 5372091 5372112 5372108 5372113 +
tgatatcatacatacatatgac

SEQ ID NO: 108432 - DNA, 22 bp, Artificial Sequence
  Synthetic oligonucleotide; CTG chr11 5372141 5372162 5372158 5372163 +
tcacaatgtctttatctgttca

SEQ ID NO: 108433 - DNA, 22 bp, Artificial Sequence
  Synthetic oligonucleotide; CTT chr11 5372153 5372174 5372170 5372175 +
tatctgttcatctatatataga

SEQ ID NO: 108434 - DNA, 22 bp, Artificial Sequence
  Synthetic oligonucleotide; TTT chr11 5372154 5372175 5372171 5372176 +
atctgttcatctatatatagat

SEQ ID NO: 108435 - DNA, 22 bp, Artificial Sequence
  Synthetic oligonucleotide; TTA chr11 5372155 5372176 5372172 5372177 +
tctgttcatctatatatagata

SEQ ID NO: 108436 - DNA, 22 bp, Artificial Sequence
  Synthetic oligonucleotide; CTG chr11 5372159 5372180 5372176 5372181 +
ttcatctatatatagataccac

SEQ ID NO: 108437 - DNA, 22 bp, Artificial Sequence
  Synthetic oligonucleotide; TTC chr11 5372162 5372183 5372179 5372184 +
atctatatatagataccactta

SEQ ID NO: 108438 - DNA, 22 bp, Artificial Sequence
  Synthetic oligonucleotide; CTA chr11 5372167 5372188 5372184 5372189 +
tatatagataccacttagattg

SEQ ID NO: 108439 - DNA, 22 bp, Artificial Sequence
  Synthetic oligonucleotide; CTT chr11 5372183 5372204 5372200 5372205 +
agattgtttccatgtcttggct

SEQ ID NO: 108440 - DNA, 22 bp, Artificial Sequence
  Synthetic oligonucleotide; TTA chr11 5372184 5372205 5372201 5372206 +
gattgtttccatgtcttggcta

SEQ ID NO: 108441 - DNA, 22 bp, Artificial Sequence
  Synthetic oligonucleotide; TTG chr11 5372189 5372210 5372206 5372211 +
tttccatgtcttggctattgtg

SEQ ID NO: 108442 - DNA, 22 bp, Artificial Sequence
  Synthetic oligonucleotide; TTT chr11 5372192 5372213 5372209 5372214 +
ccatgtcttggctattgtgaat

SEQ ID NO: 108443 - DNA, 22 bp, Artificial Sequence
  Synthetic oligonucleotide; TTC chr11 5372193 5372214 5372210 5372215 +
catgtcttggctattgtgaata

SEQ ID NO: 108444 - DNA, 22 bp, Artificial Sequence
  Synthetic oligonucleotide; CTT chr11 5372201 5372222 5372218 5372223 +
ggctattgtgaataatgctgca

SEQ ID NO: 108445 - DNA, 22 bp, Artificial Sequence
  Synthetic oligonucleotide; TTG chr11 5372202 5372223 5372219 5372224 +
gctattgtgaataatgctgcaa

SEQ ID NO: 108446 - DNA, 22 bp, Artificial Sequence
  Synthetic oligonucleotide; CTA chr11 5372206 5372227 5372223 5372228 +
ttgtgaataatgctgcaattaa

SEQ ID NO: 108447 - DNA, 22 bp, Artificial Sequence
  Synthetic oligonucleotide; TTG chr11 5372209 5372230 5372226 5372231 +
tgaataatgctgcaattaacat

SEQ ID NO: 108448 - DNA, 22 bp, Artificial Sequence
  Synthetic oligonucleotide; CTG chr11 5372221 5372242 5372238 5372243 +
caattaacatgagagtgcagat

SEQ ID NO: 108449 - DNA, 22 bp, Artificial Sequence
  Synthetic oligonucleotide; TTA chr11 5372227 5372248 5372244 5372249 +
acatgagagtgcagatagctct

SEQ ID NO: 108450 - DNA, 22 bp, Artificial Sequence
  Synthetic oligonucleotide; CTC chr11 5372248 5372269 5372265 5372270 +
tagaaaatgcggattttattta

SEQ ID NO: 108451 - DNA, 22 bp, Artificial Sequence
  Synthetic oligonucleotide; CTA chr11 5372250 5372271 5372267 5372272 +
gaaaatgcggattttatttatt

SEQ ID NO: 108452 - DNA, 22 bp, Artificial Sequence
  Synthetic oligonucleotide; TTT chr11 5372264 5372285 5372281 5372286 +
tatttattttggatacatatac

SEQ ID NO: 108453 - DNA, 22 bp, Artificial Sequence
  Synthetic oligonucleotide; TTT chr11 5372265 5372286 5372282 5372287 +
atttattttggatacatataca

SEQ ID NO: 108454 - DNA, 22 bp, Artificial Sequence
  Synthetic oligonucleotide; TTA chr11 5372266 5372287 5372283 5372288 +
tttattttggatacatatacag

SEQ ID NO: 108455 - DNA, 22 bp, Artificial Sequence
  Synthetic oligonucleotide; TTT chr11 5372269 5372290 5372286 5372291 +
attttggatacatatacagcag

SEQ ID NO: 108456 - DNA, 22 bp, Artificial Sequence
  Synthetic oligonucleotide; TTA chr11 5372270 5372291 5372287 5372292 +
ttttggatacatatacagcaga

SEQ ID NO: 108457 - DNA, 22 bp, Artificial Sequence
  Synthetic oligonucleotide; TTT chr11 5372273 5372294 5372290 5372295 +
tggatacatatacagcagagaa

SEQ ID NO: 108458 - DNA, 22 bp, Artificial Sequence
  Synthetic oligonucleotide; TTT chr11 5372274 5372295 5372291 5372296 +
ggatacatatacagcagagaaa

SEQ ID NO: 108459 - DNA, 22 bp, Artificial Sequence
  Synthetic oligonucleotide; TTG chr11 5372275 5372296 5372292 5372297 +
gatacatatacagcagagaaat

SEQ ID NO: 108460 - DNA, 22 bp, Artificial Sequence
  Synthetic oligonucleotide; TTT chr11 5372299 5372320 5372316 5372321 +
cttcatcatacaataactctat

SEQ ID NO: 108461 - DNA, 22 bp, Artificial Sequence
  Synthetic oligonucleotide; TTC chr11 5372300 5372321 5372317 5372322 +
ttcatcatacaataactctatt

SEQ ID NO: 108462 - DNA, 22 bp, Artificial Sequence
  Synthetic oligonucleotide; CTT chr11 5372302 5372323 5372319 5372324 +
catcatacaataactctatttt

SEQ ID NO: 108463 - DNA, 22 bp, Artificial Sequence
  Synthetic oligonucleotide; TTC chr11 5372303 5372324 5372320 5372325 +
atcatacaataactctattttt

SEQ ID NO: 108464 - DNA, 22 bp, Artificial Sequence
  Synthetic oligonucleotide; CTC chr11 5372318 5372339 5372335 5372340 +
tatttttagttgtttgagaaac

SEQ ID NO: 108465 - DNA, 22 bp, Artificial Sequence
  Synthetic oligonucleotide; CTA chr11 5372320 5372341 5372337 5372342 +
tttttagttgtttgagaaactt

SEQ ID NO: 108466 - DNA, 22 bp, Artificial Sequence
  Synthetic oligonucleotide; TTT chr11 5372323 5372344 5372340 5372345 +
ttagttgtttgagaaacttcca

SEQ ID NO: 108467 - DNA, 22 bp, Artificial Sequence
  Synthetic oligonucleotide; TTT chr11 5372324 5372345 5372341 5372346 +
tagttgtttgagaaacttccat

SEQ ID NO: 108468 - DNA, 22 bp, Artificial Sequence
  Synthetic oligonucleotide; TTT chr11 5372325 5372346 5372342 5372347 +
agttgtttgagaaacttccata

SEQ ID NO: 108469 - DNA, 22 bp, Artificial Sequence
  Synthetic oligonucleotide; TTA chr11 5372326 5372347 5372343 5372348 +
gttgtttgagaaacttccatac

SEQ ID NO: 108470 - DNA, 22 bp, Artificial Sequence
  Synthetic oligonucleotide; TTG chr11 5372330 5372351 5372347 5372352 +
tttgagaaacttccatacgttt

SEQ ID NO: 108471 - DNA, 22 bp, Artificial Sequence
  Synthetic oligonucleotide; TTT chr11 5372333 5372354 5372350 5372355 +
gagaaacttccatacgttttct

SEQ ID NO: 108472 - DNA, 22 bp, Artificial Sequence
  Synthetic oligonucleotide; TTG chr11 5372334 5372355 5372351 5372356 +
agaaacttccatacgttttcta

SEQ ID NO: 108473 - DNA, 22 bp, Artificial Sequence
  Synthetic oligonucleotide; CTT chr11 5372342 5372363 5372359 5372364 +
ccatacgttttctataatggct

SEQ ID NO: 108474 - DNA, 22 bp, Artificial Sequence
  Synthetic oligonucleotide; TTC chr11 5372343 5372364 5372360 5372365 +
catacgttttctataatggcta

SEQ ID NO: 108475 - DNA, 22 bp, Artificial Sequence
  Synthetic oligonucleotide; TTT chr11 5372352 5372373 5372369 5372374 +
tctataatggctatgttaactt

SEQ ID NO: 108476 - DNA, 22 bp, Artificial Sequence
  Synthetic oligonucleotide; TTT chr11 5372353 5372374 5372370 5372375 +
ctataatggctatgttaactta

SEQ ID NO: 108477 - DNA, 22 bp, Artificial Sequence
  Synthetic oligonucleotide; TTC chr11 5372354 5372375 5372371 5372376 +
tataatggctatgttaacttac

SEQ ID NO: 108478 - DNA, 22 bp, Artificial Sequence
  Synthetic oligonucleotide; CTA chr11 5372356 5372377 5372373 5372378 +
taatggctatgttaacttacat

SEQ ID NO: 108479 - DNA, 22 bp, Artificial Sequence
  Synthetic oligonucleotide; CTA chr11 5372365 5372386 5372382 5372387 +
tgttaacttacattcccaccag

SEQ ID NO: 108480 - DNA, 22 bp, Artificial Sequence
  Synthetic oligonucleotide; TTA chr11 5372370 5372391 5372387 5372392 +
acttacattcccaccagctatg

SEQ ID NO: 108481 - DNA, 22 bp, Artificial Sequence
  Synthetic oligonucleotide; CTT chr11 5372374 5372395 5372391 5372396 +
acattcccaccagctatgcaca

SEQ ID NO: 108482 - DNA, 22 bp, Artificial Sequence
  Synthetic oligonucleotide; TTA chr11 5372375 5372396 5372392 5372397 +
cattcccaccagctatgcacaa

SEQ ID NO: 108483 - DNA, 22 bp, Artificial Sequence
  Synthetic oligonucleotide; TTC chr11 5372380 5372401 5372397 5372402 +
ccaccagctatgcacaagagtt

SEQ ID NO: 108484 - DNA, 22 bp, Artificial Sequence
  Synthetic oligonucleotide; CTA chr11 5372390 5372411 5372407 5372412 +
tgcacaagagttctcctttctc

SEQ ID NO: 108485 - DNA, 22 bp, Artificial Sequence
  Synthetic oligonucleotide; TTC chr11 5372403 5372424 5372420 5372425 +
tcctttctccacagcctctcca

SEQ ID NO: 108486 - DNA, 22 bp, Artificial Sequence
  Synthetic oligonucleotide; CTC chr11 5372405 5372426 5372422 5372427 +
ctttctccacagcctctccaac

SEQ ID NO: 108487 - DNA, 22 bp, Artificial Sequence
  Synthetic oligonucleotide; CTT chr11 5372408 5372429 5372425 5372430 +
tctccacagcctctccaacccc

SEQ ID NO: 108488 - DNA, 22 bp, Artificial Sequence
  Synthetic oligonucleotide; TTT chr11 5372409 5372430 5372426 5372431 +
ctccacagcctctccaacccct

SEQ ID NO: 108489 - DNA, 22 bp, Artificial Sequence
  Synthetic oligonucleotide; TTC chr11 5372410 5372431 5372427 5372432 +
tccacagcctctccaaccccta

SEQ ID NO: 108490 - DNA, 22 bp, Artificial Sequence
  Synthetic oligonucleotide; CTC chr11 5372412 5372433 5372429 5372434 +
cacagcctctccaacccctatc

SEQ ID NO: 108491 - DNA, 22 bp, Artificial Sequence
  Synthetic oligonucleotide; CTC chr11 5372421 5372442 5372438 5372443 +
tccaacccctatctcttgtctt

SEQ ID NO: 108492 - DNA, 22 bp, Artificial Sequence
  Synthetic oligonucleotide; CTC chr11 5372423 5372444 5372440 5372445 +
caacccctatctcttgtctttt

SEQ ID NO: 108493 - DNA, 22 bp, Artificial Sequence
  Synthetic oligonucleotide; CTA chr11 5372432 5372453 5372449 5372454 +
tctcttgtcttttttgataata

SEQ ID NO: 108494 - DNA, 22 bp, Artificial Sequence
  Synthetic oligonucleotide; CTC chr11 5372436 5372457 5372453 5372458 +
ttgtcttttttgataatagcca

SEQ ID NO: 108495 - DNA, 22 bp, Artificial Sequence
  Synthetic oligonucleotide; CTT chr11 5372438 5372459 5372455 5372460 +
gtcttttttgataatagccatc

SEQ ID NO: 108496 - DNA, 22 bp, Artificial Sequence
  Synthetic oligonucleotide; TTG chr11 5372439 5372460 5372456 5372461 +
tcttttttgataatagccatct

SEQ ID NO: 108497 - DNA, 22 bp, Artificial Sequence
  Synthetic oligonucleotide; CTT chr11 5372443 5372464 5372460 5372465 +
ttttgataatagccatctcaac

SEQ ID NO: 108498 - DNA, 22 bp, Artificial Sequence
  Synthetic oligonucleotide; TTT chr11 5372444 5372465 5372461 5372466 +
tttgataatagccatctcaaca

SEQ ID NO: 108499 - DNA, 22 bp, Artificial Sequence
  Synthetic oligonucleotide; TTT chr11 5372445 5372466 5372462 5372467 +
ttgataatagccatctcaacag

SEQ ID NO: 108500 - DNA, 22 bp, Artificial Sequence
  Synthetic oligonucleotide; TTT chr11 5372446 5372467 5372463 5372468 +
tgataatagccatctcaacagg

SEQ ID NO: 108501 - DNA, 22 bp, Artificial Sequence
  Synthetic oligonucleotide; TTT chr11 5372447 5372468 5372464 5372469 +
gataatagccatctcaacaggt

SEQ ID NO: 108502 - DNA, 22 bp, Artificial Sequence
  Synthetic oligonucleotide; TTG chr11 5372448 5372469 5372465 5372470 +
ataatagccatctcaacaggtg

SEQ ID NO: 108503 - DNA, 22 bp, Artificial Sequence
  Synthetic oligonucleotide; CTC chr11 5372462 5372483 5372479 5372484 +
aacaggtgtgagtgatacttgt

SEQ ID NO: 108504 - DNA, 22 bp, Artificial Sequence
  Synthetic oligonucleotide; CTT chr11 5372482 5372503 5372499 5372504 +
gtggttttgatttgcattttcc

SEQ ID NO: 108505 - DNA, 22 bp, Artificial Sequence
  Synthetic oligonucleotide; TTG chr11 5372483 5372504 5372500 5372505 +
tggttttgatttgcattttcct

SEQ ID NO: 108506 - DNA, 22 bp, Artificial Sequence
  Synthetic oligonucleotide; TTT chr11 5372489 5372510 5372506 5372511 +
tgatttgcattttcctgatgat

SEQ ID NO: 108507 - DNA, 22 bp, Artificial Sequence
  Synthetic oligonucleotide; TTT chr11 5372490 5372511 5372507 5372512 +
gatttgcattttcctgatgatt

SEQ ID NO: 108508 - DNA, 22 bp, Artificial Sequence
  Synthetic oligonucleotide; TTG chr11 5372491 5372512 5372508 5372513 +
atttgcattttcctgatgattg

SEQ ID NO: 108509 - DNA, 22 bp, Artificial Sequence
  Synthetic oligonucleotide; TTT chr11 5372495 5372516 5372512 5372517 +
gcattttcctgatgattggtga

SEQ ID NO: 108510 - DNA, 22 bp, Artificial Sequence
  Synthetic oligonucleotide; TTG chr11 5372496 5372517 5372513 5372518 +
cattttcctgatgattggtgat

SEQ ID NO: 108511 - DNA, 22 bp, Artificial Sequence
  Synthetic oligonucleotide; TTT chr11 5372501 5372522 5372518 5372523 +
tcctgatgattggtgatgtagt

SEQ ID NO: 108512 - DNA, 22 bp, Artificial Sequence
  Synthetic oligonucleotide; TTT chr11 5372502 5372523 5372519 5372524 +
cctgatgattggtgatgtagtg

SEQ ID NO: 108513 - DNA, 22 bp, Artificial Sequence
  Synthetic oligonucleotide; TTC chr11 5372503 5372524 5372520 5372525 +
ctgatgattggtgatgtagtgc

SEQ ID NO: 108514 - DNA, 22 bp, Artificial Sequence
  Synthetic oligonucleotide; CTG chr11 5372506 5372527 5372523 5372528 +
atgattggtgatgtagtgcacc

SEQ ID NO: 108515 - DNA, 22 bp, Artificial Sequence
  Synthetic oligonucleotide; TTG chr11 5372513 5372534 5372530 5372535 +
gtgatgtagtgcaccttttcat

SEQ ID NO: 108516 - DNA, 22 bp, Artificial Sequence
  Synthetic oligonucleotide; CTT chr11 5372530 5372551 5372547 5372552 +
ttcatatgcctgctgaccattt

SEQ ID NO: 108517 - DNA, 22 bp, Artificial Sequence
  Synthetic oligonucleotide; TTT chr11 5372531 5372552 5372548 5372553 +
tcatatgcctgctgaccatttg

SEQ ID NO: 108518 - DNA, 22 bp, Artificial Sequence
  Synthetic oligonucleotide; TTT chr11 5372532 5372553 5372549 5372554 +
catatgcctgctgaccatttgc

SEQ ID NO: 108519 - DNA, 22 bp, Artificial Sequence
  Synthetic oligonucleotide; TTC chr11 5372533 5372554 5372550 5372555 +
atatgcctgctgaccatttgca

SEQ ID NO: 108520 - DNA, 22 bp, Artificial Sequence
  Synthetic oligonucleotide; CTG chr11 5372542 5372563 5372559 5372564 +
ctgaccatttgcatgtcttcag

SEQ ID NO: 108521 - DNA, 22 bp, Artificial Sequence
  Synthetic oligonucleotide; CTG chr11 5372545 5372566 5372562 5372567 +
accatttgcatgtcttcagaga

SEQ ID NO: 108522 - DNA, 22 bp, Artificial Sequence
  Synthetic oligonucleotide; TTT chr11 5372552 5372573 5372569 5372574 +
gcatgtcttcagagaaatgtat

SEQ ID NO: 108523 - DNA, 22 bp, Artificial Sequence
  Synthetic oligonucleotide; TTG chr11 5372553 5372574 5372570 5372575 +
catgtcttcagagaaatgtata

SEQ ID NO: 108524 - DNA, 22 bp, Artificial Sequence
  Synthetic oligonucleotide; CTT chr11 5372561 5372582 5372578 5372583 +
cagagaaatgtatattcagatc

SEQ ID NO: 108525 - DNA, 22 bp, Artificial Sequence
  Synthetic oligonucleotide; TTC chr11 5372562 5372583 5372579 5372584 +
agagaaatgtatattcagatcc

SEQ ID NO: 108526 - DNA, 22 bp, Artificial Sequence
  Synthetic oligonucleotide; TTC chr11 5372578 5372599 5372595 5372600 +
agatcctttgcccatttttact

SEQ ID NO: 108527 - DNA, 22 bp, Artificial Sequence
  Synthetic oligonucleotide; CTT chr11 5372586 5372607 5372603 5372608 +
tgcccatttttacttaggttac

SEQ ID NO: 108528 - DNA, 22 bp, Artificial Sequence
  Synthetic oligonucleotide; TTT chr11 5372587 5372608 5372604 5372609 +
gcccatttttacttaggttact

SEQ ID NO: 108529 - DNA, 22 bp, Artificial Sequence
  Synthetic oligonucleotide; TTG chr11 5372588 5372609 5372605 5372610 +
cccatttttacttaggttacta

SEQ ID NO: 108530 - DNA, 22 bp, Artificial Sequence
  Synthetic oligonucleotide; TTT chr11 5372595 5372616 5372612 5372617 +
ttacttaggttactattatatt

SEQ ID NO: 108531 - DNA, 22 bp, Artificial Sequence
  Synthetic oligonucleotide; TTT chr11 5372596 5372617 5372613 5372618 +
tacttaggttactattatattt

SEQ ID NO: 108532 - DNA, 22 bp, Artificial Sequence
  Synthetic oligonucleotide; TTT chr11 5372597 5372618 5372614 5372619 +
acttaggttactattatatttt

SEQ ID NO: 108533 - DNA, 22 bp, Artificial Sequence
  Synthetic oligonucleotide; TTA chr11 5372598 5372619 5372615 5372620 +
cttaggttactattatattttt

SEQ ID NO: 108534 - DNA, 22 bp, Artificial Sequence
  Synthetic oligonucleotide; CTT chr11 5372601 5372622 5372618 5372623 +
aggttactattatattttttca

SEQ ID NO: 108535 - DNA, 22 bp, Artificial Sequence
  Synthetic oligonucleotide; TTA chr11 5372602 5372623 5372619 5372624 +
ggttactattatattttttcat

SEQ ID NO: 108536 - DNA, 22 bp, Artificial Sequence
  Synthetic oligonucleotide; TTA chr11 5372607 5372628 5372624 5372629 +
ctattatattttttcatattta

SEQ ID NO: 108537 - DNA, 22 bp, Artificial Sequence
  Synthetic oligonucleotide; CTA chr11 5372610 5372631 5372627 5372632 +
ttatattttttcatatttagtt

SEQ ID NO: 108538 - DNA, 22 bp, Artificial Sequence
  Synthetic oligonucleotide; TTA chr11 5372613 5372634 5372630 5372635 +
tattttttcatatttagttgat

SEQ ID NO: 108539 - DNA, 22 bp, Artificial Sequence
  Synthetic oligonucleotide; TTT chr11 5372618 5372639 5372635 5372640 +
tttcatatttagttgattgagt

SEQ ID NO: 108540 - DNA, 22 bp, Artificial Sequence
  Synthetic oligonucleotide; TTT chr11 5372619 5372640 5372636 5372641 +
ttcatatttagttgattgagtt

SEQ ID NO: 108541 - DNA, 22 bp, Artificial Sequence
  Synthetic oligonucleotide; TTT chr11 5372620 5372641 5372637 5372642 +
tcatatttagttgattgagttc

SEQ ID NO: 108542 - DNA, 22 bp, Artificial Sequence
  Synthetic oligonucleotide; TTT chr11 5372621 5372642 5372638 5372643 +
catatttagttgattgagttcc

SEQ ID NO: 108543 - DNA, 22 bp, Artificial Sequence
  Synthetic oligonucleotide; TTC chr11 5372622 5372643 5372639 5372644 +
atatttagttgattgagttcct

SEQ ID NO: 108544 - DNA, 22 bp, Artificial Sequence
  Synthetic oligonucleotide; TTT chr11 5372628 5372649 5372645 5372650 +
agttgattgagttccttatata

SEQ ID NO: 108545 - DNA, 22 bp, Artificial Sequence
  Synthetic oligonucleotide; TTA chr11 5372629 5372650 5372646 5372651 +
gttgattgagttccttatatat

SEQ ID NO: 108546 - DNA, 22 bp, Artificial Sequence
  Synthetic oligonucleotide; TTG chr11 5372633 5372654 5372650 5372655 +
attgagttccttatatattttg

SEQ ID NO: 108547 - DNA, 22 bp, Artificial Sequence
  Synthetic oligonucleotide; TTG chr11 5372637 5372658 5372654 5372659 +
agttccttatatattttgggta

SEQ ID NO: 108548 - DNA, 22 bp, Artificial Sequence
  Synthetic oligonucleotide; TTC chr11 5372642 5372663 5372659 5372664 +
cttatatattttgggtattaga

SEQ ID NO: 108549 - DNA, 22 bp, Artificial Sequence
  Synthetic oligonucleotide; CTT chr11 5372645 5372666 5372662 5372667 +
atatattttgggtattagactt

SEQ ID NO: 108550 - DNA, 22 bp, Artificial Sequence
  Synthetic oligonucleotide; TTA chr11 5372646 5372667 5372663 5372668 +
tatattttgggtattagacttg

SEQ ID NO: 108551 - DNA, 22 bp, Artificial Sequence
  Synthetic oligonucleotide; TTT chr11 5372653 5372674 5372670 5372675 +
tgggtattagacttgtatcaga

SEQ ID NO: 108552 - DNA, 22 bp, Artificial Sequence
  Synthetic oligonucleotide; TTT chr11 5372654 5372675 5372671 5372676 +
gggtattagacttgtatcagat

SEQ ID NO: 108553 - DNA, 22 bp, Artificial Sequence
  Synthetic oligonucleotide; TTG chr11 5372655 5372676 5372672 5372677 +
ggtattagacttgtatcagata

SEQ ID NO: 108554 - DNA, 22 bp, Artificial Sequence
  Synthetic oligonucleotide; TTA chr11 5372662 5372683 5372679 5372684 +
gacttgtatcagatatatgatc

SEQ ID NO: 108555 - DNA, 22 bp, Artificial Sequence
  Synthetic oligonucleotide; CTT chr11 5372667 5372688 5372684 5372689 +
gtatcagatatatgatctgtaa

SEQ ID NO: 108556 - DNA, 22 bp, Artificial Sequence
  Synthetic oligonucleotide; TTG chr11 5372668 5372689 5372685 5372690 +
tatcagatatatgatctgtaaa

SEQ ID NO: 108557 - DNA, 22 bp, Artificial Sequence
  Synthetic oligonucleotide; CTG chr11 5372686 5372707 5372703 5372708 +
taaatattttctcccaaactgt

SEQ ID NO: 108558 - DNA, 22 bp, Artificial Sequence
  Synthetic oligonucleotide; TTT chr11 5372695 5372716 5372712 5372717 +
tctcccaaactgttccttttga

SEQ ID NO: 108559 - DNA, 22 bp, Artificial Sequence
  Synthetic oligonucleotide; TTT chr11 5372696 5372717 5372713 5372718 +
ctcccaaactgttccttttgat

SEQ ID NO: 108560 - DNA, 22 bp, Artificial Sequence
  Synthetic oligonucleotide; TTC chr11 5372697 5372718 5372714 5372719 +
tcccaaactgttccttttgatg

SEQ ID NO: 108561 - DNA, 22 bp, Artificial Sequence
  Synthetic oligonucleotide; CTC chr11 5372699 5372720 5372716 5372721 +
ccaaactgttccttttgatgat

SEQ ID NO: 108562 - DNA, 22 bp, Artificial Sequence
  Synthetic oligonucleotide; CTG chr11 5372707 5372728 5372724 5372729 +
ttccttttgatgattgttttct

SEQ ID NO: 108563 - DNA, 22 bp, Artificial Sequence
  Synthetic oligonucleotide; TTC chr11 5372710 5372731 5372727 5372732 +
cttttgatgattgttttctttg

SEQ ID NO: 108564 - DNA, 22 bp, Artificial Sequence
  Synthetic oligonucleotide; CTT chr11 5372713 5372734 5372730 5372735 +
ttgatgattgttttctttgctg

SEQ ID NO: 108565 - DNA, 22 bp, Artificial Sequence
  Synthetic oligonucleotide; TTT chr11 5372714 5372735 5372731 5372736 +
tgatgattgttttctttgctgt

SEQ ID NO: 108566 - DNA, 22 bp, Artificial Sequence
  Synthetic oligonucleotide; TTT chr11 5372715 5372736 5372732 5372737 +
gatgattgttttctttgctgtg

SEQ ID NO: 108567 - DNA, 22 bp, Artificial Sequence
  Synthetic oligonucleotide; TTG chr11 5372716 5372737 5372733 5372738 +
atgattgttttctttgctgtgc

SEQ ID NO: 108568 - DNA, 22 bp, Artificial Sequence
  Synthetic oligonucleotide; TTG chr11 5372723 5372744 5372740 5372745 +
ttttctttgctgtgcagaaaat

SEQ ID NO: 108569 - DNA, 22 bp, Artificial Sequence
  Synthetic oligonucleotide; TTT chr11 5372726 5372747 5372743 5372748 +
tctttgctgtgcagaaaatatt

SEQ ID NO: 108570 - DNA, 22 bp, Artificial Sequence
  Synthetic oligonucleotide; TTT chr11 5372727 5372748 5372744 5372749 +
ctttgctgtgcagaaaatattt

SEQ ID NO: 108571 - DNA, 22 bp, Artificial Sequence
  Synthetic oligonucleotide; TTC chr11 5372728 5372749 5372745 5372750 +
tttgctgtgcagaaaatattta

SEQ ID NO: 108572 - DNA, 22 bp, Artificial Sequence
  Synthetic oligonucleotide; CTT chr11 5372730 5372751 5372747 5372752 +
tgctgtgcagaaaatatttagt

SEQ ID NO: 108573 - DNA, 22 bp, Artificial Sequence
  Synthetic oligonucleotide; TTT chr11 5372731 5372752 5372748 5372753 +
gctgtgcagaaaatatttagtt

SEQ ID NO: 108574 - DNA, 22 bp, Artificial Sequence
  Synthetic oligonucleotide; TTG chr11 5372732 5372753 5372749 5372754 +
ctgtgcagaaaatatttagttt

SEQ ID NO: 108575 - DNA, 22 bp, Artificial Sequence
  Synthetic oligonucleotide; CTG chr11 5372735 5372756 5372752 5372757 +
tgcagaaaatatttagtttgat

SEQ ID NO: 108576 - DNA, 22 bp, Artificial Sequence
  Synthetic oligonucleotide; TTT chr11 5372749 5372770 5372766 5372771 +
agtttgatgttgctccacttgt

SEQ ID NO: 108577 - DNA, 22 bp, Artificial Sequence
  Synthetic oligonucleotide; TTA chr11 5372750 5372771 5372767 5372772 +
gtttgatgttgctccacttgtt

SEQ ID NO: 108578 - DNA, 22 bp, Artificial Sequence
  Synthetic oligonucleotide; TTT chr11 5372754 5372775 5372771 5372776 +
gatgttgctccacttgtttatt

SEQ ID NO: 108579 - DNA, 22 bp, Artificial Sequence
  Synthetic oligonucleotide; TTG chr11 5372755 5372776 5372772 5372777 +
atgttgctccacttgtttattt

SEQ ID NO: 108580 - DNA, 22 bp, Artificial Sequence
  Synthetic oligonucleotide; TTG chr11 5372761 5372782 5372778 5372783 +
ctccacttgtttatttttgctt

SEQ ID NO: 108581 - DNA, 22 bp, Artificial Sequence
  Synthetic oligonucleotide; CTC chr11 5372764 5372785 5372781 5372786 +
cacttgtttatttttgcttttg

SEQ ID NO: 108582 - DNA, 22 bp, Artificial Sequence
  Synthetic oligonucleotide; CTT chr11 5372769 5372790 5372786 5372791 +
gtttatttttgcttttgttacc

SEQ ID NO: 108583 - DNA, 22 bp, Artificial Sequence
  Synthetic oligonucleotide; TTG chr11 5372770 5372791 5372787 5372792 +
tttatttttgcttttgttacct

SEQ ID NO: 108584 - DNA, 22 bp, Artificial Sequence
  Synthetic oligonucleotide; TTT chr11 5372773 5372794 5372790 5372795 +
atttttgcttttgttacctgag

SEQ ID NO: 108585 - DNA, 22 bp, Artificial Sequence
  Synthetic oligonucleotide; TTA chr11 5372774 5372795 5372791 5372796 +
tttttgcttttgttacctgagc

SEQ ID NO: 108586 - DNA, 22 bp, Artificial Sequence
  Synthetic oligonucleotide; TTT chr11 5372777 5372798 5372794 5372799 +
ttgcttttgttacctgagctct

SEQ ID NO: 108587 - DNA, 22 bp, Artificial Sequence
  Synthetic oligonucleotide; TTT chr11 5372778 5372799 5372795 5372800 +
tgcttttgttacctgagctctg

SEQ ID NO: 108588 - DNA, 22 bp, Artificial Sequence
  Synthetic oligonucleotide; TTT chr11 5372779 5372800 5372796 5372801 +
gcttttgttacctgagctctgg

SEQ ID NO: 108589 - DNA, 22 bp, Artificial Sequence
  Synthetic oligonucleotide; TTG chr11 5372780 5372801 5372797 5372802 +
cttttgttacctgagctctggc

SEQ ID NO: 108590 - DNA, 22 bp, Artificial Sequence
  Synthetic oligonucleotide; CTT chr11 5372783 5372804 5372800 5372805 +
ttgttacctgagctctggcaca

SEQ ID NO: 108591 - DNA, 22 bp, Artificial Sequence
  Synthetic oligonucleotide; TTT chr11 5372784 5372805 5372801 5372806 +
tgttacctgagctctggcacat

SEQ ID NO: 108592 - DNA, 22 bp, Artificial Sequence
  Synthetic oligonucleotide; TTT chr11 5372785 5372806 5372802 5372807 +
gttacctgagctctggcacatt

SEQ ID NO: 108593 - DNA, 22 bp, Artificial Sequence
  Synthetic oligonucleotide; TTG chr11 5372786 5372807 5372803 5372808 +
ttacctgagctctggcacattt

SEQ ID NO: 108594 - DNA, 22 bp, Artificial Sequence
  Synthetic oligonucleotide; TTA chr11 5372789 5372810 5372806 5372811 +
cctgagctctggcacattttac

SEQ ID NO: 108595 - DNA, 22 bp, Artificial Sequence
  Synthetic oligonucleotide; CTG chr11 5372793 5372814 5372810 5372815 +
agctctggcacattttacagaa

SEQ ID NO: 108596 - DNA, 22 bp, Artificial Sequence
  Synthetic oligonucleotide; CTC chr11 5372798 5372819 5372815 5372820 +
tggcacattttacagaaaacaa

SEQ ID NO: 108597 - DNA, 22 bp, Artificial Sequence
  Synthetic oligonucleotide; CTG chr11 5372800 5372821 5372817 5372822 +
gcacattttacagaaaacaatt

SEQ ID NO: 108598 - DNA, 22 bp, Artificial Sequence
  Synthetic oligonucleotide; TTT chr11 5372808 5372829 5372825 5372830 +
tacagaaaacaatttgaaaatt

SEQ ID NO: 108599 - DNA, 22 bp, Artificial Sequence
  Synthetic oligonucleotide; TTT chr11 5372809 5372830 5372826 5372831 +
acagaaaacaatttgaaaattt

SEQ ID NO: 108600 - DNA, 22 bp, Artificial Sequence
  Synthetic oligonucleotide; TTA chr11 5372810 5372831 5372827 5372832 +
cagaaaacaatttgaaaatttg

SEQ ID NO: 108601 - DNA, 22 bp, Artificial Sequence
  Synthetic oligonucleotide; TTT chr11 5372823 5372844 5372840 5372845 +
gaaaatttgtatgaaaccacag

SEQ ID NO: 108602 - DNA, 22 bp, Artificial Sequence
  Synthetic oligonucleotide; TTG chr11 5372824 5372845 5372841 5372846 +
aaaatttgtatgaaaccacaga

SEQ ID NO: 108603 - DNA, 22 bp, Artificial Sequence
  Synthetic oligonucleotide; TTT chr11 5372831 5372852 5372848 5372853 +
gtatgaaaccacagaacacccc

SEQ ID NO: 108604 - DNA, 22 bp, Artificial Sequence
  Synthetic oligonucleotide; TTG chr11 5372832 5372853 5372849 5372854 +
tatgaaaccacagaacaccccc

SEQ ID NO: 108605 - DNA, 22 bp, Artificial Sequence
  Synthetic oligonucleotide; CTT chr11 5372873 5372894 5372890 5372895 +
gagaaagaaaaaccaacttgat

SEQ ID NO: 108606 - DNA, 22 bp, Artificial Sequence
  Synthetic oligonucleotide; TTG chr11 5372874 5372895 5372891 5372896 +
agaaagaaaaaccaacttgatg

SEQ ID NO: 108607 - DNA, 22 bp, Artificial Sequence
  Synthetic oligonucleotide; CTT chr11 5372892 5372913 5372909 5372914 +
gatggcagcacacgttctgatt

SEQ ID NO: 108608 - DNA, 22 bp, Artificial Sequence
  Synthetic oligonucleotide; TTG chr11 5372893 5372914 5372910 5372915 +
atggcagcacacgttctgattt

SEQ ID NO: 108609 - DNA, 22 bp, Artificial Sequence
  Synthetic oligonucleotide; TTC chr11 5372909 5372930 5372926 5372931 +
tgatttcaaattatattacaaa

SEQ ID NO: 108610 - DNA, 22 bp, Artificial Sequence
  Synthetic oligonucleotide; CTG chr11 5372911 5372932 5372928 5372933 +
atttcaaattatattacaaagc

SEQ ID NO: 108611 - DNA, 22 bp, Artificial Sequence
  Synthetic oligonucleotide; TTT chr11 5372915 5372936 5372932 5372937 +
caaattatattacaaagctata

SEQ ID NO: 108612 - DNA, 22 bp, Artificial Sequence
  Synthetic oligonucleotide; TTC chr11 5372916 5372937 5372933 5372938 +
aaattatattacaaagctatag

SEQ ID NO: 108613 - DNA, 22 bp, Artificial Sequence
  Synthetic oligonucleotide; TTA chr11 5372922 5372943 5372939 5372944 +
tattacaaagctatagtaacca

SEQ ID NO: 108614 - DNA, 22 bp, Artificial Sequence
  Synthetic oligonucleotide; TTA chr11 5372927 5372948 5372944 5372949 +
caaagctatagtaaccaaaaaa

SEQ ID NO: 108615 - DNA, 22 bp, Artificial Sequence
  Synthetic oligonucleotide; CTA chr11 5372935 5372956 5372952 5372957 +
tagtaaccaaaaaagtatggta

SEQ ID NO: 108616 - DNA, 22 bp, Artificial Sequence
  Synthetic oligonucleotide; CTA chr11 5372960 5372981 5372977 5372982 +
tcacataaatagacacatagac

SEQ ID NO: 108617 - DNA, 22 bp, Artificial Sequence
  Synthetic oligonucleotide; TTG chr11 5372989 5373010 5373006 5373011 +
aacagaataaagagcccagaaa

SEQ ID NO: 108618 - DNA, 22 bp, Artificial Sequence
  Synthetic oligonucleotide; TTT chr11 5373018 5373039 5373035 5373040 +
acgtatatacagtccagtaatt

SEQ ID NO: 108619 - DNA, 22 bp, Artificial Sequence
  Synthetic oligonucleotide; TTA chr11 5373019 5373040 5373036 5373041 +
cgtatatacagtccagtaattc

SEQ ID NO: 108620 - DNA, 22 bp, Artificial Sequence
  Synthetic oligonucleotide; TTC chr11 5373041 5373062 5373058 5373063 +
tcaacaaggccaccaacacaat

SEQ ID NO: 108621 - DNA, 22 bp, Artificial Sequence
  Synthetic oligonucleotide; CTC chr11 5373043 5373064 5373060 5373065 +
aacaaggccaccaacacaatag

SEQ ID NO: 108622 - DNA, 22 bp, Artificial Sequence
  Synthetic oligonucleotide; CTC chr11 5373080 5373101 5373097 5373102 +
ctcaacaaatagtgttgggaaa

SEQ ID NO: 108623 - DNA, 22 bp, Artificial Sequence
  Synthetic oligonucleotide; CTC chr11 5373083 5373104 5373100 5373105 +
aacaaatagtgttgggaaaact

SEQ ID NO: 108624 - DNA, 22 bp, Artificial Sequence
  Synthetic oligonucleotide; TTG chr11 5373097 5373118 5373114 5373119 +
ggaaaactggatatccaaatgc

SEQ ID NO: 108625 - DNA, 22 bp, Artificial Sequence
  Synthetic oligonucleotide; CTG chr11 5373106 5373127 5373123 5373128 +
gatatccaaatgcaaaagaata

SEQ ID NO: 108626 - DNA, 22 bp, Artificial Sequence
  Synthetic oligonucleotide; TTG chr11 5373134 5373155 5373151 5373156 +
gacctttaccttaagccataag

SEQ ID NO: 108627 - DNA, 22 bp, Artificial Sequence
  Synthetic oligonucleotide; CTT chr11 5373140 5373161 5373157 5373162 +
taccttaagccataagtcaact

SEQ ID NO: 108628 - DNA, 22 bp, Artificial Sequence
  Synthetic oligonucleotide; TTT chr11 5373141 5373162 5373158 5373163 +
accttaagccataagtcaactc

SEQ ID NO: 108629 - DNA, 22 bp, Artificial Sequence
  Synthetic oligonucleotide; TTA chr11 5373142 5373163 5373159 5373164 +
ccttaagccataagtcaactca

SEQ ID NO: 108630 - DNA, 22 bp, Artificial Sequence
  Synthetic oligonucleotide; CTT chr11 5373146 5373167 5373163 5373168 +
aagccataagtcaactcaaaat

SEQ ID NO: 108631 - DNA, 22 bp, Artificial Sequence
  Synthetic oligonucleotide; TTA chr11 5373147 5373168 5373164 5373169 +
agccataagtcaactcaaaata

SEQ ID NO: 108632 - DNA, 22 bp, Artificial Sequence
  Synthetic oligonucleotide; CTC chr11 5373163 5373184 5373180 5373185 +
aaaatagattaaagacataaat

SEQ ID NO: 108633 - DNA, 22 bp, Artificial Sequence
  Synthetic oligonucleotide; TTA chr11 5373174 5373195 5373191 5373196 +
aagacataaatgtaagacctga

SEQ ID NO: 108634 - DNA, 22 bp, Artificial Sequence
  Synthetic oligonucleotide; CTG chr11 5373195 5373216 5373212 5373217 +
aaatcacaaaactcctggaaga

SEQ ID NO: 108635 - DNA, 22 bp, Artificial Sequence
  Synthetic oligonucleotide; CTC chr11 5373209 5373230 5373226 5373231 +
ctggaagaacatgtatagagat

SEQ ID NO: 108636 - DNA, 22 bp, Artificial Sequence
  Synthetic oligonucleotide; CTG chr11 5373212 5373233 5373229 5373234 +
gaagaacatgtatagagatagc

SEQ ID NO: 108637 - DNA, 22 bp, Artificial Sequence
  Synthetic oligonucleotide; CTG chr11 5373236 5373257 5373253 5373258 +
cttgatatcagtctcggcaatt

SEQ ID NO: 108638 - DNA, 22 bp, Artificial Sequence
  Synthetic oligonucleotide; CTT chr11 5373239 5373260 5373256 5373261 +
gatatcagtctcggcaattttt

SEQ ID NO: 108639 - DNA, 22 bp, Artificial Sequence
  Synthetic oligonucleotide; TTG chr11 5373240 5373261 5373257 5373262 +
atatcagtctcggcaatttttt

SEQ ID NO: 108640 - DNA, 22 bp, Artificial Sequence
  Synthetic oligonucleotide; CTC chr11 5373251 5373272 5373268 5373273 +
ggcaattttttagatattgtct

SEQ ID NO: 108641 - DNA, 22 bp, Artificial Sequence
  Synthetic oligonucleotide; TTT chr11 5373259 5373280 5373276 5373281 +
tttagatattgtcttgatttga

SEQ ID NO: 108642 - DNA, 22 bp, Artificial Sequence
  Synthetic oligonucleotide; TTT chr11 5373260 5373281 5373277 5373282 +
ttagatattgtcttgatttgaa

SEQ ID NO: 108643 - DNA, 22 bp, Artificial Sequence
  Synthetic oligonucleotide; TTT chr11 5373261 5373282 5373278 5373283 +
tagatattgtcttgatttgaag

SEQ ID NO: 108644 - DNA, 22 bp, Artificial Sequence
  Synthetic oligonucleotide; TTT chr11 5373262 5373283 5373279 5373284 +
agatattgtcttgatttgaaga

SEQ ID NO: 108645 - DNA, 22 bp, Artificial Sequence
  Synthetic oligonucleotide; TTA chr11 5373263 5373284 5373280 5373285 +
gatattgtcttgatttgaagaa

SEQ ID NO: 108646 - DNA, 22 bp, Artificial Sequence
  Synthetic oligonucleotide; TTG chr11 5373270 5373291 5373287 5373292 +
tcttgatttgaagaaaattttc

SEQ ID NO: 108647 - DNA, 22 bp, Artificial Sequence
  Synthetic oligonucleotide; CTT chr11 5373274 5373295 5373291 5373296 +
gatttgaagaaaattttcactg

SEQ ID NO: 108648 - DNA, 22 bp, Artificial Sequence
  Synthetic oligonucleotide; TTG chr11 5373275 5373296 5373292 5373297 +
atttgaagaaaattttcactgg

SEQ ID NO: 108649 - DNA, 22 bp, Artificial Sequence
  Synthetic oligonucleotide; TTT chr11 5373279 5373300 5373296 5373301 +
gaagaaaattttcactggaagt

SEQ ID NO: 108650 - DNA, 22 bp, Artificial Sequence
  Synthetic oligonucleotide; TTG chr11 5373280 5373301 5373297 5373302 +
aagaaaattttcactggaagtc

SEQ ID NO: 108651 - DNA, 22 bp, Artificial Sequence
  Synthetic oligonucleotide; TTT chr11 5373290 5373311 5373307 5373312 +
tcactggaagtctatattgatc

SEQ ID NO: 108652 - DNA, 22 bp, Artificial Sequence
  Synthetic oligonucleotide; TTT chr11 5373291 5373312 5373308 5373313 +
cactggaagtctatattgatcg

SEQ ID NO: 108653 - DNA, 22 bp, Artificial Sequence
  Synthetic oligonucleotide; TTC chr11 5373292 5373313 5373309 5373314 +
actggaagtctatattgatcga

SEQ ID NO: 108654 - DNA, 22 bp, Artificial Sequence
  Synthetic oligonucleotide; CTG chr11 5373296 5373317 5373313 5373318 +
gaagtctatattgatcgatttt

SEQ ID NO: 108655 - DNA, 22 bp, Artificial Sequence
  Synthetic oligonucleotide; CTA chr11 5373304 5373325 5373321 5373326 +
tattgatcgattttttctttca

SEQ ID NO: 108656 - DNA, 22 bp, Artificial Sequence
  Synthetic oligonucleotide; TTG chr11 5373309 5373330 5373326 5373331 +
atcgattttttctttcacaaat

SEQ ID NO: 108657 - DNA, 22 bp, Artificial Sequence
  Synthetic oligonucleotide; TTT chr11 5373317 5373338 5373334 5373339 +
tttctttcacaaataaagttcc

SEQ ID NO: 108658 - DNA, 22 bp, Artificial Sequence
  Synthetic oligonucleotide; TTT chr11 5373318 5373339 5373335 5373340 +
ttctttcacaaataaagttcca

SEQ ID NO: 108659 - DNA, 22 bp, Artificial Sequence
  Synthetic oligonucleotide; TTT chr11 5373319 5373340 5373336 5373341 +
tctttcacaaataaagttccag

SEQ ID NO: 108660 - DNA, 22 bp, Artificial Sequence
  Synthetic oligonucleotide; TTT chr11 5373320 5373341 5373337 5373342 +
ctttcacaaataaagttccagt

SEQ ID NO: 108661 - DNA, 22 bp, Artificial Sequence
  Synthetic oligonucleotide; TTC chr11 5373321 5373342 5373338 5373343 +
tttcacaaataaagttccagtt

SEQ ID NO: 108662 - DNA, 22 bp, Artificial Sequence
  Synthetic oligonucleotide; CTT chr11 5373323 5373344 5373340 5373345 +
tcacaaataaagttccagtttt

SEQ ID NO: 108663 - DNA, 22 bp, Artificial Sequence
  Synthetic oligonucleotide; TTT chr11 5373324 5373345 5373341 5373346 +
cacaaataaagttccagttttt

SEQ ID NO: 108664 - DNA, 22 bp, Artificial Sequence
  Synthetic oligonucleotide; TTC chr11 5373325 5373346 5373342 5373347 +
acaaataaagttccagtttttg

SEQ ID NO: 108665 - DNA, 22 bp, Artificial Sequence
  Synthetic oligonucleotide; TTC chr11 5373338 5373359 5373355 5373360 +
cagtttttgagccaagatggcc

SEQ ID NO: 108666 - DNA, 22 bp, Artificial Sequence
  Synthetic oligonucleotide; TTT chr11 5373344 5373365 5373361 5373366 +
ttgagccaagatggccaaatag

SEQ ID NO: 108667 - DNA, 22 bp, Artificial Sequence
  Synthetic oligonucleotide; TTT chr11 5373345 5373366 5373362 5373367 +
tgagccaagatggccaaatagg

SEQ ID NO: 108668 - DNA, 22 bp, Artificial Sequence
  Synthetic oligonucleotide; TTT chr11 5373346 5373367 5373363 5373368 +
gagccaagatggccaaatagga

SEQ ID NO: 108669 - DNA, 22 bp, Artificial Sequence
  Synthetic oligonucleotide; TTG chr11 5373347 5373368 5373364 5373369 +
agccaagatggccaaataggaa

SEQ ID NO: 108670 - DNA, 22 bp, Artificial Sequence
  Synthetic oligonucleotide; CTC chr11 5373375 5373396 5373392 5373397 +
tggtctacagctcccagcgtga

SEQ ID NO: 108671 - DNA, 22 bp, Artificial Sequence
  Synthetic oligonucleotide; CTG chr11 5373377 5373398 5373394 5373399 +
gtctacagctcccagcgtgaac

SEQ ID NO: 108672 - DNA, 22 bp, Artificial Sequence
  Synthetic oligonucleotide; CTA chr11 5373382 5373403 5373399 5373404 +
cagctcccagcgtgaacaacac

SEQ ID NO: 108673 - DNA, 22 bp, Artificial Sequence
  Synthetic oligonucleotide; CTC chr11 5373388 5373409 5373405 5373410 +
ccagcgtgaacaacacagaaga

SEQ ID NO: 108674 - DNA, 22 bp, Artificial Sequence
  Synthetic oligonucleotide; TTT chr11 5373420 5373441 5373437 5373442 +
ctgcatttccatctgaggtatg

SEQ ID NO: 108675 - DNA, 22 bp, Artificial Sequence
  Synthetic oligonucleotide; TTC chr11 5373421 5373442 5373438 5373443 +
tgcatttccatctgaggtatgg

SEQ ID NO: 108676 - DNA, 22 bp, Artificial Sequence
  Synthetic oligonucleotide; CTG chr11 5373423 5373444 5373440 5373445 +
catttccatctgaggtatgggg

SEQ ID NO: 108677 - DNA, 22 bp, Artificial Sequence
  Synthetic oligonucleotide; TTT chr11 5373428 5373449 5373445 5373450 +
ccatctgaggtatggggttcat

SEQ ID NO: 108678 - DNA, 22 bp, Artificial Sequence
  Synthetic oligonucleotide; TTC chr11 5373429 5373450 5373446 5373451 +
catctgaggtatggggttcatc

SEQ ID NO: 108679 - DNA, 22 bp, Artificial Sequence
  Synthetic oligonucleotide; CTG chr11 5373435 5373456 5373452 5373457 +
aggtatggggttcatctcgcta

SEQ ID NO: 108680 - DNA, 22 bp, Artificial Sequence
  Synthetic oligonucleotide; TTC chr11 5373448 5373469 5373465 5373470 +
atctcgctagggagtgccagac

SEQ ID NO: 108681 - DNA, 22 bp, Artificial Sequence
  Synthetic oligonucleotide; CTC chr11 5373453 5373474 5373470 5373475 +
gctagggagtgccagacagtgg

SEQ ID NO: 108682 - DNA, 22 bp, Artificial Sequence
  Synthetic oligonucleotide; CTA chr11 5373457 5373478 5373474 5373479 +
gggagtgccagacagtgggcac

SEQ ID NO: 108683 - DNA, 22 bp, Artificial Sequence
  Synthetic oligonucleotide; TTG chr11 5373531 5373552 5373548 5373553 +
cctcacttgggaagcacaaggg

SEQ ID NO: 108684 - DNA, 22 bp, Artificial Sequence
  Synthetic oligonucleotide; CTC chr11 5373535 5373556 5373552 5373557 +
acttgggaagcacaaggggtca

SEQ ID NO: 108685 - DNA, 22 bp, Artificial Sequence
  Synthetic oligonucleotide; CTT chr11 5373539 5373560 5373556 5373561 +
gggaagcacaaggggtcatgga

SEQ ID NO: 108686 - DNA, 22 bp, Artificial Sequence
  Synthetic oligonucleotide; TTG chr11 5373540 5373561 5373557 5373562 +
ggaagcacaaggggtcatggag

SEQ ID NO: 108687 - DNA, 22 bp, Artificial Sequence
  Synthetic oligonucleotide; TTC chr11 5373565 5373586 5373582 5373587 +
cctttcctggtcaaggaaaggg

SEQ ID NO: 108688 - DNA, 22 bp, Artificial Sequence
  Synthetic oligonucleotide; CTT chr11 5373569 5373590 5373586 5373591 +
tcctggtcaaggaaaggggtga

SEQ ID NO: 108689 - DNA, 22 bp, Artificial Sequence
  Synthetic oligonucleotide; TTT chr11 5373570 5373591 5373587 5373592 +
cctggtcaaggaaaggggtgac

SEQ ID NO: 108690 - DNA, 22 bp, Artificial Sequence
  Synthetic oligonucleotide; TTC chr11 5373571 5373592 5373588 5373593 +
ctggtcaaggaaaggggtgaca

SEQ ID NO: 108691 - DNA, 22 bp, Artificial Sequence
  Synthetic oligonucleotide; CTG chr11 5373574 5373595 5373591 5373596 +
gtcaaggaaaggggtgacatac

SEQ ID NO: 108692 - DNA, 22 bp, Artificial Sequence
  Synthetic oligonucleotide; CTG chr11 5373604 5373625 5373621 5373626 +
gaaaattgggccactcccaccc

SEQ ID NO: 108693 - DNA, 22 bp, Artificial Sequence
  Synthetic oligonucleotide; TTG chr11 5373612 5373633 5373629 5373634 +
ggccactcccacccgaatactg

SEQ ID NO: 108694 - DNA, 22 bp, Artificial Sequence
  Synthetic oligonucleotide; CTC chr11 5373620 5373641 5373637 5373642 +
ccacccgaatactgtgcttttc

SEQ ID NO: 108695 - DNA, 22 bp, Artificial Sequence
  Synthetic oligonucleotide; CTG chr11 5373634 5373655 5373651 5373656 +
tgcttttctgacaggcttagga

SEQ ID NO: 108696 - DNA, 22 bp, Artificial Sequence
  Synthetic oligonucleotide; CTT chr11 5373639 5373660 5373656 5373661 +
ttctgacaggcttaggaaatgg

SEQ ID NO: 108697 - DNA, 22 bp, Artificial Sequence
  Synthetic oligonucleotide; TTT chr11 5373640 5373661 5373657 5373662 +
tctgacaggcttaggaaatggc

SEQ ID NO: 108698 - DNA, 22 bp, Artificial Sequence
  Synthetic oligonucleotide; TTT chr11 5373641 5373662 5373658 5373663 +
ctgacaggcttaggaaatggcg

SEQ ID NO: 108699 - DNA, 22 bp, Artificial Sequence
  Synthetic oligonucleotide; TTC chr11 5373642 5373663 5373659 5373664 +
tgacaggcttaggaaatggcgc

SEQ ID NO: 108700 - DNA, 22 bp, Artificial Sequence
  Synthetic oligonucleotide; CTG chr11 5373644 5373665 5373661 5373666 +
acaggcttaggaaatggcgcac

SEQ ID NO: 108701 - DNA, 22 bp, Artificial Sequence
  Synthetic oligonucleotide; CTT chr11 5373652 5373673 5373669 5373674 +
aggaaatggcgcaccaggagat

SEQ ID NO: 108702 - DNA, 22 bp, Artificial Sequence
  Synthetic oligonucleotide; TTA chr11 5373653 5373674 5373670 5373675 +
ggaaatggcgcaccaggagatt

SEQ ID NO: 108703 - DNA, 22 bp, Artificial Sequence
  Synthetic oligonucleotide; TTA chr11 5373676 5373697 5373693 5373698 +
tatcctgcacatggctccgagg

SEQ ID NO: 108704 - DNA, 22 bp, Artificial Sequence
  Synthetic oligonucleotide; CTG chr11 5373683 5373704 5373700 5373705 +
cacatggctccgagggtcctac

SEQ ID NO: 108705 - DNA, 22 bp, Artificial Sequence
  Synthetic oligonucleotide; CTC chr11 5373693 5373714 5373710 5373715 +
cgagggtcctacgcccacggag

SEQ ID NO: 108706 - DNA, 22 bp, Artificial Sequence
  Synthetic oligonucleotide; CTA chr11 5373704 5373725 5373721 5373726 +
cgcccacggagtctccctgatt

SEQ ID NO: 108707 - DNA, 22 bp, Artificial Sequence
  Synthetic oligonucleotide; CTC chr11 5373719 5373740 5373736 5373741 +
cctgattgctagcacagcagtc

SEQ ID NO: 108708 - DNA, 22 bp, Artificial Sequence
  Synthetic oligonucleotide; CTG chr11 5373723 5373744 5373740 5373745 +
attgctagcacagcagtctgag

SEQ ID NO: 108709 - DNA, 22 bp, Artificial Sequence
  Synthetic oligonucleotide; TTG chr11 5373727 5373748 5373744 5373749 +
ctagcacagcagtctgagatca

SEQ ID NO: 108710 - DNA, 22 bp, Artificial Sequence
  Synthetic oligonucleotide; CTA chr11 5373730 5373751 5373747 5373752 +
gcacagcagtctgagatcaaac

SEQ ID NO: 108711 - DNA, 22 bp, Artificial Sequence
  Synthetic oligonucleotide; CTG chr11 5373743 5373764 5373760 5373765 +
agatcaaactgcaaggtggcag

SEQ ID NO: 108712 - DNA, 22 bp, Artificial Sequence
  Synthetic oligonucleotide; CTG chr11 5373754 5373775 5373771 5373776 +
caaggtggcagcgaggctgggg

SEQ ID NO: 108713 - DNA, 22 bp, Artificial Sequence
  Synthetic oligonucleotide; CTG chr11 5373773 5373794 5373790 5373795 +
ggggaggggcagccgccattgc

SEQ ID NO: 108714 - DNA, 22 bp, Artificial Sequence
  Synthetic oligonucleotide; TTG chr11 5373794 5373815 5373811 5373816 +
cccaggcttgcttaggtaaaca

SEQ ID NO: 108715 - DNA, 22 bp, Artificial Sequence
  Synthetic oligonucleotide; CTT chr11 5373803 5373824 5373820 5373825 +
gcttaggtaaacaaagcagcca

SEQ ID NO: 108716 - DNA, 22 bp, Artificial Sequence
  Synthetic oligonucleotide; TTG chr11 5373804 5373825 5373821 5373826 +
cttaggtaaacaaagcagccag

SEQ ID NO: 108717 - DNA, 22 bp, Artificial Sequence
  Synthetic oligonucleotide; CTT chr11 5373807 5373828 5373824 5373829 +
aggtaaacaaagcagccaggaa

SEQ ID NO: 108718 - DNA, 22 bp, Artificial Sequence
  Synthetic oligonucleotide; TTA chr11 5373808 5373829 5373825 5373830 +
ggtaaacaaagcagccaggaag

SEQ ID NO: 108719 - DNA, 22 bp, Artificial Sequence
  Synthetic oligonucleotide; CTC chr11 5373833 5373854 5373850 5373855 +
aaactgggtggaccccaccaca

SEQ ID NO: 108720 - DNA, 22 bp, Artificial Sequence
  Synthetic oligonucleotide; CTG chr11 5373839 5373860 5373856 5373861 +
ggtggaccccaccacagctcaa

SEQ ID NO: 108721 - DNA, 22 bp, Artificial Sequence
  Synthetic oligonucleotide; CTC chr11 5373859 5373880 5373876 5373881 +
aaggaggcctgcctgcctctgt

SEQ ID NO: 108722 - DNA, 22 bp, Artificial Sequence
  Synthetic oligonucleotide; CTG chr11 5373870 5373891 5373887 5373892 +
cctgcctctgtaggctccacct

SEQ ID NO: 108723 - DNA, 22 bp, Artificial Sequence
  Synthetic oligonucleotide; CTG chr11 5373874 5373895 5373891 5373896 +
cctctgtaggctccacctttgg

SEQ ID NO: 108724 - DNA, 22 bp, Artificial Sequence
  Synthetic oligonucleotide; CTC chr11 5373878 5373899 5373895 5373900 +
tgtaggctccacctttgggggc

SEQ ID NO: 108725 - DNA, 22 bp, Artificial Sequence
  Synthetic oligonucleotide; CTG chr11 5373880 5373901 5373897 5373902 +
taggctccacctttgggggcag

SEQ ID NO: 108726 - DNA, 22 bp, Artificial Sequence
  Synthetic oligonucleotide; CTC chr11 5373887 5373908 5373904 5373909 +
cacctttgggggcagggcacag

SEQ ID NO: 108727 - DNA, 22 bp, Artificial Sequence
  Synthetic oligonucleotide; CTT chr11 5373893 5373914 5373910 5373915 +
tgggggcagggcacagacaaac

SEQ ID NO: 108728 - DNA, 22 bp, Artificial Sequence
  Synthetic oligonucleotide; TTT chr11 5373894 5373915 5373911 5373916 +
gggggcagggcacagacaaaca

SEQ ID NO: 108729 - DNA, 22 bp, Artificial Sequence
  Synthetic oligonucleotide; TTG chr11 5373895 5373916 5373912 5373917 +
ggggcagggcacagacaaacaa

SEQ ID NO: 108730 - DNA, 22 bp, Artificial Sequence
  Synthetic oligonucleotide; CTC chr11 5373935 5373956 5373952 5373957 +
tgcagacttaaatgtccctgtc

SEQ ID NO: 108731 - DNA, 22 bp, Artificial Sequence
  Synthetic oligonucleotide; CTG chr11 5373937 5373958 5373954 5373959 +
cagacttaaatgtccctgtctg

SEQ ID NO: 108732 - DNA, 22 bp, Artificial Sequence
  Synthetic oligonucleotide; CTT chr11 5373944 5373965 5373961 5373966 +
aaatgtccctgtctgacagctt

SEQ ID NO: 108733 - DNA, 22 bp, Artificial Sequence
  Synthetic oligonucleotide; TTA chr11 5373945 5373966 5373962 5373967 +
aatgtccctgtctgacagcttt

SEQ ID NO: 108734 - DNA, 22 bp, Artificial Sequence
  Synthetic oligonucleotide; CTG chr11 5373955 5373976 5373972 5373977 +
tctgacagctttgaggagagca

SEQ ID NO: 108735 - DNA, 22 bp, Artificial Sequence
  Synthetic oligonucleotide; CTG chr11 5373959 5373980 5373976 5373981 +
acagctttgaggagagcagtgg

SEQ ID NO: 108736 - DNA, 22 bp, Artificial Sequence
  Synthetic oligonucleotide; CTT chr11 5373966 5373987 5373983 5373988 +
tgaggagagcagtggttctccc

SEQ ID NO: 108737 - DNA, 22 bp, Artificial Sequence
  Synthetic oligonucleotide; TTT chr11 5373967 5373988 5373984 5373989 +
gaggagagcagtggttctccca

SEQ ID NO: 108738 - DNA, 22 bp, Artificial Sequence
  Synthetic oligonucleotide; TTG chr11 5373968 5373989 5373985 5373990 +
aggagagcagtggttctcccag

SEQ ID NO: 108739 - DNA, 22 bp, Artificial Sequence
  Synthetic oligonucleotide; TTC chr11 5373984 5374005 5374001 5374006 +
tcccagcacacagctggagatc

SEQ ID NO: 108740 - DNA, 22 bp, Artificial Sequence
  Synthetic oligonucleotide; CTC chr11 5373986 5374007 5374003 5374008 +
ccagcacacagctggagatctg

SEQ ID NO: 108741 - DNA, 22 bp, Artificial Sequence
  Synthetic oligonucleotide; CTG chr11 5374000 5374021 5374017 5374022 +
gagatctgagaacgggcagact

SEQ ID NO: 108742 - DNA, 22 bp, Artificial Sequence
  Synthetic oligonucleotide; CTG chr11 5374008 5374029 5374025 5374030 +
agaacgggcagactgcctcctc

SEQ ID NO: 108743 - DNA, 22 bp, Artificial Sequence
  Synthetic oligonucleotide; CTG chr11 5374023 5374044 5374040 5374045 +
cctcctcaagtgggtccctgac

SEQ ID NO: 108744 - DNA, 22 bp, Artificial Sequence
  Synthetic oligonucleotide; CTC chr11 5374027 5374048 5374044 5374049 +
ctcaagtgggtccctgacccct

SEQ ID NO: 108745 - DNA, 22 bp, Artificial Sequence
  Synthetic oligonucleotide; CTC chr11 5374030 5374051 5374047 5374052 +
aagtgggtccctgacccctgac

SEQ ID NO: 108746 - DNA, 22 bp, Artificial Sequence
  Synthetic oligonucleotide; CTG chr11 5374043 5374064 5374060 5374065 +
acccctgacccccgagcagcct

SEQ ID NO: 108747 - DNA, 22 bp, Artificial Sequence
  Synthetic oligonucleotide; CTG chr11 5374050 5374071 5374067 5374072 +
acccccgagcagcctaactggg

SEQ ID NO: 108748 - DNA, 22 bp, Artificial Sequence
  Synthetic oligonucleotide; CTA chr11 5374066 5374087 5374083 5374088 +
actgggaggcacccccaagtaa

SEQ ID NO: 108749 - DNA, 22 bp, Artificial Sequence
  Synthetic oligonucleotide; CTG chr11 5374070 5374091 5374087 5374092 +
ggaggcacccccaagtaagggc

SEQ ID NO: 108750 - DNA, 22 bp, Artificial Sequence
  Synthetic oligonucleotide; CTG chr11 5374098 5374119 5374115 5374120 +
acacctcacacggccaggtact

SEQ ID NO: 108751 - DNA, 22 bp, Artificial Sequence
  Synthetic oligonucleotide; CTC chr11 5374105 5374126 5374122 5374127 +
acacggccaggtactcctctga

SEQ ID NO: 108752 - DNA, 22 bp, Artificial Sequence
  Synthetic oligonucleotide; CTC chr11 5374121 5374142 5374138 5374143 +
ctctgagacaaaacttccagag

SEQ ID NO: 108753 - DNA, 22 bp, Artificial Sequence
  Synthetic oligonucleotide; CTC chr11 5374124 5374145 5374141 5374146 +
tgagacaaaacttccagaggaa

SEQ ID NO: 108754 - DNA, 22 bp, Artificial Sequence
  Synthetic oligonucleotide; CTG chr11 5374126 5374147 5374143 5374148 +
agacaaaacttccagaggaacg

SEQ ID NO: 108755 - DNA, 22 bp, Artificial Sequence
  Synthetic oligonucleotide; CTT chr11 5374137 5374158 5374154 5374159 +
ccagaggaacgatcagacagca

SEQ ID NO: 108756 - DNA, 22 bp, Artificial Sequence
  Synthetic oligonucleotide; TTC chr11 5374138 5374159 5374155 5374160 +
cagaggaacgatcagacagcag

SEQ ID NO: 108757 - DNA, 22 bp, Artificial Sequence
  Synthetic oligonucleotide; TTC chr11 5374165 5374186 5374182 5374187 +
gcggatcacgaaaatctgcggt

SEQ ID NO: 108758 - DNA, 22 bp, Artificial Sequence
  Synthetic oligonucleotide; CTG chr11 5374183 5374204 5374200 5374205 +
cggttctgcagacaccgctgct

SEQ ID NO: 108759 - DNA, 22 bp, Artificial Sequence
  Synthetic oligonucleotide; TTC chr11 5374189 5374210 5374206 5374211 +
tgcagacaccgctgctgatacc

SEQ ID NO: 108760 - DNA, 22 bp, Artificial Sequence
  Synthetic oligonucleotide; CTG chr11 5374191 5374212 5374208 5374213 +
cagacaccgctgctgataccca

SEQ ID NO: 108761 - DNA, 22 bp, Artificial Sequence
  Synthetic oligonucleotide; CTG chr11 5374203 5374224 5374220 5374225 +
ctgatacccaggcaaacagggt

SEQ ID NO: 108762 - DNA, 22 bp, Artificial Sequence
  Synthetic oligonucleotide; CTG chr11 5374206 5374227 5374223 5374228 +
atacccaggcaaacagggtctg

SEQ ID NO: 108763 - DNA, 22 bp, Artificial Sequence
  Synthetic oligonucleotide; CTG chr11 5374228 5374249 5374245 5374250 +
gagtggacctctagcaaactcc

SEQ ID NO: 108764 - DNA, 22 bp, Artificial Sequence
  Synthetic oligonucleotide; CTC chr11 5374239 5374260 5374256 5374261 +
tagcaaactccaacagacctgc

SEQ ID NO: 108765 - DNA, 22 bp, Artificial Sequence
  Synthetic oligonucleotide; CTA chr11 5374241 5374262 5374258 5374263 +
gcaaactccaacagacctgcag

SEQ ID NO: 108766 - DNA, 22 bp, Artificial Sequence
  Synthetic oligonucleotide; CTC chr11 5374249 5374270 5374266 5374271 +
caacagacctgcagctgagggt

SEQ ID NO: 108767 - DNA, 22 bp, Artificial Sequence
  Synthetic oligonucleotide; CTG chr11 5374260 5374281 5374277 5374282 +
cagctgagggtcctgtctgtta

SEQ ID NO: 108768 - DNA, 22 bp, Artificial Sequence
  Synthetic oligonucleotide; CTG chr11 5374266 5374287 5374283 5374288 +
agggtcctgtctgttagaagga

SEQ ID NO: 108769 - DNA, 22 bp, Artificial Sequence
  Synthetic oligonucleotide; CTG chr11 5374275 5374296 5374292 5374297 +
tctgttagaaggaaaactaaca

SEQ ID NO: 108770 - DNA, 22 bp, Artificial Sequence
  Synthetic oligonucleotide; CTG chr11 5374279 5374300 5374296 5374301 +
ttagaaggaaaactaacaaaca

SEQ ID NO: 108771 - DNA, 22 bp, Artificial Sequence
  Synthetic oligonucleotide; TTA chr11 5374282 5374303 5374299 5374304 +
gaaggaaaactaacaaacagaa

SEQ ID NO: 108772 - DNA, 22 bp, Artificial Sequence
  Synthetic oligonucleotide; CTA chr11 5374294 5374315 5374311 5374316 +
acaaacagaaaggacatccaca

SEQ ID NO: 108773 - DNA, 22 bp, Artificial Sequence
  Synthetic oligonucleotide; CTA chr11 5374341 5374362 5374358 5374363 +
tcatcaaagaccaaaagtagat

SEQ ID NO: 108774 - DNA, 22 bp, Artificial Sequence
  Synthetic oligonucleotide; TTG chr11 5374378 5374399 5374395 5374400 +
gggaaaaaacagagcagaaaaa

SEQ ID NO: 108775 - DNA, 22 bp, Artificial Sequence
  Synthetic oligonucleotide; CTG chr11 5374403 5374424 5374420 5374425 +
gaaactctaaaaagcagagcac

SEQ ID NO: 108776 - DNA, 22 bp, Artificial Sequence
  Synthetic oligonucleotide; CTC chr11 5374410 5374431 5374427 5374432 +
taaaaagcagagcacctttcct

SEQ ID NO: 108777 - DNA, 22 bp, Artificial Sequence
  Synthetic oligonucleotide; CTA chr11 5374412 5374433 5374429 5374434 +
aaaagcagagcacctttcctcc

SEQ ID NO: 108778 - DNA, 22 bp, Artificial Sequence
  Synthetic oligonucleotide; CTT chr11 5374428 5374449 5374445 5374450 +
tcctcctccaaaggaaagcagt

SEQ ID NO: 108779 - DNA, 22 bp, Artificial Sequence
  Synthetic oligonucleotide; TTT chr11 5374429 5374450 5374446 5374451 +
cctcctccaaaggaaagcagtt

SEQ ID NO: 108780 - DNA, 22 bp, Artificial Sequence
  Synthetic oligonucleotide; TTC chr11 5374430 5374451 5374447 5374452 +
ctcctccaaaggaaagcagttc

SEQ ID NO: 108781 - DNA, 22 bp, Artificial Sequence
  Synthetic oligonucleotide; CTC chr11 5374433 5374454 5374450 5374455 +
ctccaaaggaaagcagttcctc

SEQ ID NO: 108782 - DNA, 22 bp, Artificial Sequence
  Synthetic oligonucleotide; CTC chr11 5374436 5374457 5374453 5374458 +
caaaggaaagcagttcctcacc

SEQ ID NO: 108783 - DNA, 22 bp, Artificial Sequence
  Synthetic oligonucleotide; TTC chr11 5374452 5374473 5374469 5374474 +
ctcaccagcaacggaacaaagc

SEQ ID NO: 108784 - DNA, 22 bp, Artificial Sequence
  Synthetic oligonucleotide; CTC chr11 5374455 5374476 5374472 5374477 +
accagcaacggaacaaagctgg

SEQ ID NO: 108785 - DNA, 22 bp, Artificial Sequence
  Synthetic oligonucleotide; CTG chr11 5374476 5374497 5374493 5374498 +
gatggagaatgactttgacgag

SEQ ID NO: 108786 - DNA, 22 bp, Artificial Sequence
  Synthetic oligonucleotide; CTT chr11 5374491 5374512 5374508 5374513 +
tgacgagctgagagaagaagac

SEQ ID NO: 108787 - DNA, 22 bp, Artificial Sequence
  Synthetic oligonucleotide; TTT chr11 5374492 5374513 5374509 5374514 +
gacgagctgagagaagaagact

SEQ ID NO: 108788 - DNA, 22 bp, Artificial Sequence
  Synthetic oligonucleotide; TTG chr11 5374493 5374514 5374510 5374515 +
acgagctgagagaagaagactt

SEQ ID NO: 108789 - DNA, 22 bp, Artificial Sequence
  Synthetic oligonucleotide; CTG chr11 5374501 5374522 5374518 5374523 +
agagaagaagacttcagacgat

SEQ ID NO: 108790 - DNA, 22 bp, Artificial Sequence
  Synthetic oligonucleotide; CTT chr11 5374515 5374536 5374532 5374537 +
cagacgatgaaactactccgag

SEQ ID NO: 108791 - DNA, 22 bp, Artificial Sequence
  Synthetic oligonucleotide; TTC chr11 5374516 5374537 5374533 5374538 +
agacgatgaaactactccgagc

SEQ ID NO: 108792 - DNA, 22 bp, Artificial Sequence
  Synthetic oligonucleotide; CTA chr11 5374530 5374551 5374547 5374552 +
ctccgagctacaggaggaaatt

SEQ ID NO: 108793 - DNA, 22 bp, Artificial Sequence
  Synthetic oligonucleotide; CTC chr11 5374533 5374554 5374550 5374555 +
cgagctacaggaggaaattcaa

SEQ ID NO: 108794 - DNA, 22 bp, Artificial Sequence
  Synthetic oligonucleotide; CTA chr11 5374540 5374561 5374557 5374562 +
caggaggaaattcaaaccaaag

SEQ ID NO: 108795 - DNA, 22 bp, Artificial Sequence
  Synthetic oligonucleotide; TTC chr11 5374553 5374574 5374570 5374575 +
aaaccaaaggcaaagaagataa

SEQ ID NO: 108796 - DNA, 22 bp, Artificial Sequence
  Synthetic oligonucleotide; CTT chr11 5374581 5374602 5374598 5374603 +
tgaaaaaaaatttagatgaatg

SEQ ID NO: 108797 - DNA, 22 bp, Artificial Sequence
  Synthetic oligonucleotide; TTT chr11 5374582 5374603 5374599 5374604 +
gaaaaaaaatttagatgaatgt

SEQ ID NO: 108798 - DNA, 22 bp, Artificial Sequence
  Synthetic oligonucleotide; TTG chr11 5374583 5374604 5374600 5374605 +
aaaaaaaatttagatgaatgta

SEQ ID NO: 108799 - DNA, 22 bp, Artificial Sequence
  Synthetic oligonucleotide; TTT chr11 5374594 5374615 5374611 5374616 +
agatgaatgtataactagaata

SEQ ID NO: 108800 - DNA, 22 bp, Artificial Sequence
  Synthetic oligonucleotide; TTA chr11 5374595 5374616 5374612 5374617 +
gatgaatgtataactagaataa

SEQ ID NO: 108801 - DNA, 22 bp, Artificial Sequence
  Synthetic oligonucleotide; CTA chr11 5374611 5374632 5374628 5374633 +
gaataaccaatacagagaagtg

SEQ ID NO: 108802 - DNA, 22 bp, Artificial Sequence
  Synthetic oligonucleotide; CTT chr11 5374636 5374657 5374653 5374658 +
aaaggagctgatggagctgaaa

SEQ ID NO: 108803 - DNA, 22 bp, Artificial Sequence
  Synthetic oligonucleotide; TTA chr11 5374637 5374658 5374654 5374659 +
aaggagctgatggagctgaaag

SEQ ID NO: 108804 - DNA, 22 bp, Artificial Sequence
  Synthetic oligonucleotide; CTG chr11 5374646 5374667 5374663 5374668 +
atggagctgaaagccaaggctc

SEQ ID NO: 108805 - DNA, 22 bp, Artificial Sequence
  Synthetic oligonucleotide; CTG chr11 5374655 5374676 5374672 5374677 +
aaagccaaggctcgagaatgac

SEQ ID NO: 108806 - DNA, 22 bp, Artificial Sequence
  Synthetic oligonucleotide; CTC chr11 5374668 5374689 5374685 5374690 +
gagaatgacgtgaagaatggag

SEQ ID NO: 108807 - DNA, 22 bp, Artificial Sequence
  Synthetic oligonucleotide; CTC chr11 5374697 5374718 5374714 5374719 +
aggagctgatgcgatcaactgg

SEQ ID NO: 108808 - DNA, 22 bp, Artificial Sequence
  Synthetic oligonucleotide; CTG chr11 5374705 5374726 5374722 5374727 +
atgcgatcaactggaagaaagg

SEQ ID NO: 108809 - DNA, 22 bp, Artificial Sequence
  Synthetic oligonucleotide; CTG chr11 5374718 5374739 5374735 5374740 +
gaagaaagggtatcagtgatgg

SEQ ID NO: 108810 - DNA, 22 bp, Artificial Sequence
  Synthetic oligonucleotide; TTT chr11 5374778 5374799 5374795 5374800 +
agagaaaaaagaataaaaagaa

SEQ ID NO: 108811 - DNA, 22 bp, Artificial Sequence
  Synthetic oligonucleotide; TTA chr11 5374779 5374800 5374796 5374801 +
gagaaaaaagaataaaaagaaa

SEQ ID NO: 108812 - DNA, 22 bp, Artificial Sequence
  Synthetic oligonucleotide; CTC chr11 5374814 5374835 5374831 5374836 +
caagaaatatgggactatgtga

SEQ ID NO: 108813 - DNA, 22 bp, Artificial Sequence
  Synthetic oligonucleotide; CTA chr11 5374831 5374852 5374848 5374853 +
tgtgaaaagatcaaatctaggt

SEQ ID NO: 108814 - DNA, 22 bp, Artificial Sequence
  Synthetic oligonucleotide; CTA chr11 5374850 5374871 5374867 5374872 +
ggtctgattggtgtacctgaaa

SEQ ID NO: 108815 - DNA, 22 bp, Artificial Sequence
  Synthetic oligonucleotide; CTG chr11 5374856 5374877 5374873 5374878 +
attggtgtacctgaaagtgacg

SEQ ID NO: 108816 - DNA, 22 bp, Artificial Sequence
  Synthetic oligonucleotide; TTG chr11 5374860 5374881 5374877 5374882 +
gtgtacctgaaagtgacgggga

SEQ ID NO: 108817 - DNA, 22 bp, Artificial Sequence
  Synthetic oligonucleotide; CTG chr11 5374869 5374890 5374886 5374891 +
aaagtgacggggagaatcgaac

SEQ ID NO: 108818 - DNA, 22 bp, Artificial Sequence
  Synthetic oligonucleotide; TTG chr11 5374898 5374919 5374915 5374920 +
gaaaacactctgcaggatatta

SEQ ID NO: 108819 - DNA, 22 bp, Artificial Sequence
  Synthetic oligonucleotide; CTC chr11 5374908 5374929 5374925 5374930 +
tgcaggatattatccaggagaa

SEQ ID NO: 108820 - DNA, 22 bp, Artificial Sequence
  Synthetic oligonucleotide; CTG chr11 5374910 5374931 5374927 5374932 +
caggatattatccaggagaact

SEQ ID NO: 108821 - DNA, 22 bp, Artificial Sequence
  Synthetic oligonucleotide; TTA chr11 5374920 5374941 5374937 5374942 +
tccaggagaacttccccaatct

SEQ ID NO: 108822 - DNA, 22 bp, Artificial Sequence
  Synthetic oligonucleotide; CTT chr11 5374933 5374954 5374950 5374955 +
ccccaatctagcaaggcaggcc

SEQ ID NO: 108823 - DNA, 22 bp, Artificial Sequence
  Synthetic oligonucleotide; TTC chr11 5374934 5374955 5374951 5374956 +
cccaatctagcaaggcaggcca

SEQ ID NO: 108824 - DNA, 22 bp, Artificial Sequence
  Synthetic oligonucleotide; CTA chr11 5374943 5374964 5374960 5374965 +
gcaaggcaggccaacattcaga

SEQ ID NO: 108825 - DNA, 22 bp, Artificial Sequence
  Synthetic oligonucleotide; TTC chr11 5374962 5374983 5374979 5374984 +
agattcaggaaatacagagaac

SEQ ID NO: 108826 - DNA, 22 bp, Artificial Sequence
  Synthetic oligonucleotide; TTC chr11 5374968 5374989 5374985 5374990 +
aggaaatacagagaacgccaca

SEQ ID NO: 108827 - DNA, 22 bp, Artificial Sequence
  Synthetic oligonucleotide; CTC chr11 5374999 5375020 5375016 5375021 +
ctcgagaagagcaactccaaga

SEQ ID NO: 108828 - DNA, 22 bp, Artificial Sequence
  Synthetic oligonucleotide; CTC chr11 5375002 5375023 5375019 5375024 +
gagaagagcaactccaagacac

SEQ ID NO: 108829 - DNA, 22 bp, Artificial Sequence
  Synthetic oligonucleotide; CTC chr11 5375016 5375037 5375033 5375038 +
caagacacataattgtcagatt

SEQ ID NO: 108830 - DNA, 22 bp, Artificial Sequence
  Synthetic oligonucleotide; TTG chr11 5375031 5375052 5375048 5375053 +
tcagattcaccaaagttgaaat

SEQ ID NO: 108831 - DNA, 22 bp, Artificial Sequence
  Synthetic oligonucleotide; TTC chr11 5375039 5375060 5375056 5375061 +
accaaagttgaaatgaaggaaa

SEQ ID NO: 108832 - DNA, 22 bp, Artificial Sequence
  Synthetic oligonucleotide; TTG chr11 5375049 5375070 5375066 5375071 +
aaatgaaggaaaaaatgttaag

SEQ ID NO: 108833 - DNA, 22 bp, Artificial Sequence
  Synthetic oligonucleotide; TTA chr11 5375069 5375090 5375086 5375091 +
agggcagccagagagaaaggtc

SEQ ID NO: 108834 - DNA, 22 bp, Artificial Sequence
  Synthetic oligonucleotide; TTA chr11 5375097 5375118 5375114 5375119 +
cccacaaagggaagcccatcag

SEQ ID NO: 108835 - DNA, 22 bp, Artificial Sequence
  Synthetic oligonucleotide; CTA chr11 5375123 5375144 5375140 5375145 +
acagcagctctcttggcagaaa

SEQ ID NO: 108836 - DNA, 22 bp, Artificial Sequence
  Synthetic oligonucleotide; CTC chr11 5375133 5375154 5375150 5375155 +
tcttggcagaaactctacaagc

SEQ ID NO: 108837 - DNA, 22 bp, Artificial Sequence
  Synthetic oligonucleotide; CTC chr11 5375135 5375156 5375152 5375157 +
ttggcagaaactctacaagcca

SEQ ID NO: 108838 - DNA, 22 bp, Artificial Sequence
  Synthetic oligonucleotide; CTT chr11 5375137 5375158 5375154 5375159 +
ggcagaaactctacaagccaga

SEQ ID NO: 108839 - DNA, 22 bp, Artificial Sequence
  Synthetic oligonucleotide; TTG chr11 5375138 5375159 5375155 5375160 +
gcagaaactctacaagccagaa

SEQ ID NO: 108840 - DNA, 22 bp, Artificial Sequence
  Synthetic oligonucleotide; CTC chr11 5375148 5375169 5375165 5375170 +
tacaagccagaagagagtgggg

SEQ ID NO: 108841 - DNA, 22 bp, Artificial Sequence
  Synthetic oligonucleotide; CTA chr11 5375150 5375171 5375167 5375172 +
caagccagaagagagtgggggc

SEQ ID NO: 108842 - DNA, 22 bp, Artificial Sequence
  Synthetic oligonucleotide; TTC chr11 5375180 5375201 5375197 5375202 +
aacatccttaaaggaaagaatt

SEQ ID NO: 108843 - DNA, 22 bp, Artificial Sequence
  Synthetic oligonucleotide; CTT chr11 5375189 5375210 5375206 5375211 +
aaaggaaagaattttcaacaca

SEQ ID NO: 108844 - DNA, 22 bp, Artificial Sequence
  Synthetic oligonucleotide; TTA chr11 5375190 5375211 5375207 5375212 +
aaggaaagaattttcaacacag

SEQ ID NO: 108845 - DNA, 22 bp, Artificial Sequence
  Synthetic oligonucleotide; TTT chr11 5375203 5375224 5375220 5375225 +
tcaacacagaatttaatatcca

SEQ ID NO: 108846 - DNA, 22 bp, Artificial Sequence
  Synthetic oligonucleotide; TTT chr11 5375204 5375225 5375221 5375226 +
caacacagaatttaatatccag

SEQ ID NO: 108847 - DNA, 22 bp, Artificial Sequence
  Synthetic oligonucleotide; TTC chr11 5375205 5375226 5375222 5375227 +
aacacagaatttaatatccagc

SEQ ID NO: 108848 - DNA, 22 bp, Artificial Sequence
  Synthetic oligonucleotide; TTT chr11 5375217 5375238 5375234 5375239 +
aatatccagccaaactaagctt

SEQ ID NO: 108849 - DNA, 22 bp, Artificial Sequence
  Synthetic oligonucleotide; TTA chr11 5375218 5375239 5375235 5375240 +
atatccagccaaactaagcttc

SEQ ID NO: 108850 - DNA, 22 bp, Artificial Sequence
  Synthetic oligonucleotide; CTA chr11 5375234 5375255 5375251 5375256 +
agcttcataagtgaaggagaaa

SEQ ID NO: 108851 - DNA, 22 bp, Artificial Sequence
  Synthetic oligonucleotide; CTT chr11 5375239 5375260 5375256 5375261 +
cataagtgaaggagaaataaaa

SEQ ID NO: 108852 - DNA, 22 bp, Artificial Sequence
  Synthetic oligonucleotide; TTC chr11 5375240 5375261 5375257 5375262 +
ataagtgaaggagaaataaaat

SEQ ID NO: 108853 - DNA, 22 bp, Artificial Sequence
  Synthetic oligonucleotide; CTT chr11 5375266 5375287 5375283 5375288 +
tacagacaagcaaatgctgaga

SEQ ID NO: 108854 - DNA, 22 bp, Artificial Sequence
  Synthetic oligonucleotide; TTT chr11 5375267 5375288 5375284 5375289 +
acagacaagcaaatgctgagag

SEQ ID NO: 108855 - DNA, 22 bp, Artificial Sequence
  Synthetic oligonucleotide; TTA chr11 5375268 5375289 5375285 5375290 +
cagacaagcaaatgctgagaga

SEQ ID NO: 108856 - DNA, 22 bp, Artificial Sequence
  Synthetic oligonucleotide; CTG chr11 5375285 5375306 5375302 5375307 +
agagattttgtcatcaccaggc

SEQ ID NO: 108857 - DNA, 22 bp, Artificial Sequence
  Synthetic oligonucleotide; TTT chr11 5375293 5375314 5375310 5375315 +
tgtcatcaccaggcctgaccta

SEQ ID NO: 108858 - DNA, 22 bp, Artificial Sequence
  Synthetic oligonucleotide; TTT chr11 5375294 5375315 5375311 5375316 +
gtcatcaccaggcctgacctaa

SEQ ID NO: 108859 - DNA, 22 bp, Artificial Sequence
  Synthetic oligonucleotide; TTG chr11 5375295 5375316 5375312 5375317 +
tcatcaccaggcctgacctaaa

SEQ ID NO: 108860 - DNA, 22 bp, Artificial Sequence
  Synthetic oligonucleotide; CTG chr11 5375310 5375331 5375327 5375332 +
acctaaaagagctcctgaagga

SEQ ID NO: 108861 - DNA, 22 bp, Artificial Sequence
  Synthetic oligonucleotide; CTA chr11 5375315 5375336 5375332 5375337 +
aaagagctcctgaaggaagcac

SEQ ID NO: 108862 - DNA, 22 bp, Artificial Sequence
  Synthetic oligonucleotide; CTC chr11 5375324 5375345 5375341 5375346 +
ctgaaggaagcactaaacatgg

SEQ ID NO: 108863 - DNA, 22 bp, Artificial Sequence
  Synthetic oligonucleotide; CTG chr11 5375327 5375348 5375344 5375349 +
aaggaagcactaaacatggaaa

SEQ ID NO: 108864 - DNA, 22 bp, Artificial Sequence
  Synthetic oligonucleotide; CTA chr11 5375339 5375360 5375356 5375361 +
aacatggaaaggcacaaccggt

SEQ ID NO: 108865 - DNA, 22 bp, Artificial Sequence
  Synthetic oligonucleotide; CTG chr11 5375372 5375393 5375389 5375394 +
caaaatcaggccaaaatgtgaa

SEQ ID NO: 108866 - DNA, 22 bp, Artificial Sequence
  Synthetic oligonucleotide; CTA chr11 5375408 5375429 5375425 5375430 +
ggaagaaactgcatcaactaac

SEQ ID NO: 108867 - DNA, 22 bp, Artificial Sequence
  Synthetic oligonucleotide; CTG chr11 5375419 5375440 5375436 5375441 +
catcaactaacgagcaaaataa

SEQ ID NO: 108868 - DNA, 22 bp, Artificial Sequence
  Synthetic oligonucleotide; CTA chr11 5375428 5375449 5375445 5375450 +
acgagcaaaataaccagctatc

SEQ ID NO: 108869 - DNA, 22 bp, Artificial Sequence
  Synthetic oligonucleotide; CTA chr11 5375448 5375469 5375465 5375470 +
tcataatgacaggatcaaattc

SEQ ID NO: 108870 - DNA, 22 bp, Artificial Sequence
  Synthetic oligonucleotide; TTC chr11 5375470 5375491 5375487 5375492 +
acacatacaatattaactttaa

SEQ ID NO: 108871 - DNA, 22 bp, Artificial Sequence
  Synthetic oligonucleotide; TTA chr11 5375485 5375506 5375502 5375507 +
actttaaatgtaaatggactaa

SEQ ID NO: 108872 - DNA, 22 bp, Artificial Sequence
  Synthetic oligonucleotide; CTT chr11 5375489 5375510 5375506 5375511 +
taaatgtaaatggactaagtgc

SEQ ID NO: 108873 - DNA, 22 bp, Artificial Sequence
  Synthetic oligonucleotide; TTT chr11 5375490 5375511 5375507 5375512 +
aaatgtaaatggactaagtgct

SEQ ID NO: 108874 - DNA, 22 bp, Artificial Sequence
  Synthetic oligonucleotide; TTA chr11 5375491 5375512 5375508 5375513 +
aatgtaaatggactaagtgctc

SEQ ID NO: 108875 - DNA, 22 bp, Artificial Sequence
  Synthetic oligonucleotide; CTA chr11 5375506 5375527 5375523 5375528 +
agtgctccaattgaaagacaca

SEQ ID NO: 108876 - DNA, 22 bp, Artificial Sequence
  Synthetic oligonucleotide; CTC chr11 5375513 5375534 5375530 5375535 +
caattgaaagacacagactggc

SEQ ID NO: 108877 - DNA, 22 bp, Artificial Sequence
  Synthetic oligonucleotide; TTG chr11 5375519 5375540 5375536 5375541 +
aaagacacagactggcaaattg

SEQ ID NO: 108878 - DNA, 22 bp, Artificial Sequence
  Synthetic oligonucleotide; CTG chr11 5375533 5375554 5375550 5375555 +
gcaaattggataaagagtgtat

SEQ ID NO: 108879 - DNA, 22 bp, Artificial Sequence
  Synthetic oligonucleotide; TTG chr11 5375541 5375562 5375558 5375563 +
gataaagagtgtattcaggaaa

SEQ ID NO: 108880 - DNA, 22 bp, Artificial Sequence
  Synthetic oligonucleotide; TTC chr11 5375557 5375578 5375574 5375579 +
aggaaacccatctcatgtgcac

SEQ ID NO: 108881 - DNA, 22 bp, Artificial Sequence
  Synthetic oligonucleotide; CTC chr11 5375571 5375592 5375588 5375593 +
atgtgcacacacacacataggc

SEQ ID NO: 108882 - DNA, 22 bp, Artificial Sequence
  Synthetic oligonucleotide; CTC chr11 5375595 5375616 5375612 5375617 +
aaaataaaaggatggaggaaga

SEQ ID NO: 108883 - DNA, 22 bp, Artificial Sequence
  Synthetic oligonucleotide; CTA chr11 5375621 5375642 5375638 5375643 +
ccaagcaaatggaaaacaaaaa

SEQ ID NO: 108884 - DNA, 22 bp, Artificial Sequence
  Synthetic oligonucleotide; TTG chr11 5375656 5375677 5375673 5375678 +
caatcctagtctctgataaaac

SEQ ID NO: 108885 - DNA, 22 bp, Artificial Sequence
  Synthetic oligonucleotide; CTA chr11 5375664 5375685 5375681 5375686 +
gtctctgataaaacaggcttta

SEQ ID NO: 108886 - DNA, 22 bp, Artificial Sequence
  Synthetic oligonucleotide; CTC chr11 5375669 5375690 5375686 5375691 +
tgataaaacaggctttaaacca

SEQ ID NO: 108887 - DNA, 22 bp, Artificial Sequence
  Synthetic oligonucleotide; CTG chr11 5375671 5375692 5375688 5375693 +
ataaaacaggctttaaaccaac

SEQ ID NO: 108888 - DNA, 22 bp, Artificial Sequence
  Synthetic oligonucleotide; CTT chr11 5375684 5375705 5375701 5375706 +
taaaccaacaaagatcaaaaga

SEQ ID NO: 108889 - DNA, 22 bp, Artificial Sequence
  Synthetic oligonucleotide; TTT chr11 5375685 5375706 5375702 5375707 +
aaaccaacaaagatcaaaagag

SEQ ID NO: 108890 - DNA, 22 bp, Artificial Sequence
  Synthetic oligonucleotide; TTA chr11 5375686 5375707 5375703 5375708 +
aaccaacaaagatcaaaagaga

SEQ ID NO: 108891 - DNA, 22 bp, Artificial Sequence
  Synthetic oligonucleotide; TTA chr11 5375723 5375744 5375740 5375745 +
cataatggtaaagggatcaatt

SEQ ID NO: 108892 - DNA, 22 bp, Artificial Sequence
  Synthetic oligonucleotide; TTC chr11 5375746 5375767 5375763 5375768 +
aacaagaagagctaactatcct

SEQ ID NO: 108893 - DNA, 22 bp, Artificial Sequence
  Synthetic oligonucleotide; CTA chr11 5375760 5375781 5375777 5375782 +
actatcctaaatatatatgcac

SEQ ID NO: 108894 - DNA, 22 bp, Artificial Sequence
  Synthetic oligonucleotide; CTA chr11 5375764 5375785 5375781 5375786 +
tcctaaatatatatgcacccaa

SEQ ID NO: 108895 - DNA, 22 bp, Artificial Sequence
  Synthetic oligonucleotide; CTA chr11 5375769 5375790 5375786 5375791 +
aatatatatgcacccaatacag

SEQ ID NO: 108896 - DNA, 22 bp, Artificial Sequence
  Synthetic oligonucleotide; TTC chr11 5375805 5375826 5375822 5375827 +
ataaagcaagtccttagagacc

SEQ ID NO: 108897 - DNA, 22 bp, Artificial Sequence
  Synthetic oligonucleotide; CTT chr11 5375820 5375841 5375837 5375842 +
agagacctacaaagagacttag

SEQ ID NO: 108898 - DNA, 22 bp, Artificial Sequence
  Synthetic oligonucleotide; TTA chr11 5375821 5375842 5375838 5375843 +
gagacctacaaagagacttaga

SEQ ID NO: 108899 - DNA, 22 bp, Artificial Sequence
  Synthetic oligonucleotide; CTA chr11 5375829 5375850 5375846 5375851 +
caaagagacttagactcccaca

SEQ ID NO: 108900 - DNA, 22 bp, Artificial Sequence
  Synthetic oligonucleotide; CTT chr11 5375840 5375861 5375857 5375862 +
agactcccacactttaataatg

SEQ ID NO: 108901 - DNA, 22 bp, Artificial Sequence
  Synthetic oligonucleotide; TTA chr11 5375841 5375862 5375858 5375863 +
gactcccacactttaataatgg

SEQ ID NO: 108902 - DNA, 22 bp, Artificial Sequence
  Synthetic oligonucleotide; CTC chr11 5375846 5375867 5375863 5375868 +
ccacactttaataatgggagac

SEQ ID NO: 108903 - DNA, 22 bp, Artificial Sequence
  Synthetic oligonucleotide; CTT chr11 5375854 5375875 5375871 5375876 +
taataatgggagactttaatac

SEQ ID NO: 108904 - DNA, 22 bp, Artificial Sequence
  Synthetic oligonucleotide; TTT chr11 5375855 5375876 5375872 5375877 +
aataatgggagactttaatacc

SEQ ID NO: 108905 - DNA, 22 bp, Artificial Sequence
  Synthetic oligonucleotide; TTA chr11 5375856 5375877 5375873 5375878 +
ataatgggagactttaataccc

SEQ ID NO: 108906 - DNA, 22 bp, Artificial Sequence
  Synthetic oligonucleotide; CTT chr11 5375870 5375891 5375887 5375892 +
taataccccactgtcaacatta

SEQ ID NO: 108907 - DNA, 22 bp, Artificial Sequence
  Synthetic oligonucleotide; TTT chr11 5375871 5375892 5375888 5375893 +
aataccccactgtcaacattag

SEQ ID NO: 108908 - DNA, 22 bp, Artificial Sequence
  Synthetic oligonucleotide; TTA chr11 5375872 5375893 5375889 5375894 +
ataccccactgtcaacattaga

SEQ ID NO: 108909 - DNA, 22 bp, Artificial Sequence
  Synthetic oligonucleotide; CTG chr11 5375883 5375904 5375900 5375905 +
tcaacattagacagatcaacga

SEQ ID NO: 108910 - DNA, 22 bp, Artificial Sequence
  Synthetic oligonucleotide; TTA chr11 5375892 5375913 5375909 5375914 +
gacagatcaacgagacagaaag

SEQ ID NO: 108911 - DNA, 22 bp, Artificial Sequence
  Synthetic oligonucleotide; TTA chr11 5375917 5375938 5375934 5375939 +
acaaggatatccaggaattgaa

SEQ ID NO: 108912 - DNA, 22 bp, Artificial Sequence
  Synthetic oligonucleotide; TTG chr11 5375937 5375958 5375954 5375959 +
aacacagctctgcaccaagcag

SEQ ID NO: 108913 - DNA, 22 bp, Artificial Sequence
  Synthetic oligonucleotide; CTC chr11 5375947 5375968 5375964 5375969 +
tgcaccaagcagacctaataga

SEQ ID NO: 108914 - DNA, 22 bp, Artificial Sequence
  Synthetic oligonucleotide; CTG chr11 5375949 5375970 5375966 5375971 +
caccaagcagacctaatagaca

SEQ ID NO: 108915 - DNA, 22 bp, Artificial Sequence
  Synthetic oligonucleotide; CTA chr11 5375964 5375985 5375981 5375986 +
atagacatctacagaactctcc

SEQ ID NO: 108916 - DNA, 22 bp, Artificial Sequence
  Synthetic oligonucleotide; CTA chr11 5375975 5375996 5375992 5375997 +
cagaactctccaccccaaatca

SEQ ID NO: 108917 - DNA, 22 bp, Artificial Sequence
  Synthetic oligonucleotide; CTC chr11 5375983 5376004 5376000 5376005 +
tccaccccaaatcaacagaata

SEQ ID NO: 108918 - DNA, 22 bp, Artificial Sequence
  Synthetic oligonucleotide; CTC chr11 5375985 5376006 5376002 5376007 +
caccccaaatcaacagaatata

SEQ ID NO: 108919 - DNA, 22 bp, Artificial Sequence
  Synthetic oligonucleotide; TTT chr11 5376012 5376033 5376029 5376034 +
tttttcagcaccacacaacacc

SEQ ID NO: 108920 - DNA, 22 bp, Artificial Sequence
  Synthetic oligonucleotide; TTT chr11 5376013 5376034 5376030 5376035 +
ttttcagcaccacacaacacct

SEQ ID NO: 108921 - DNA, 22 bp, Artificial Sequence
  Synthetic oligonucleotide; TTT chr11 5376014 5376035 5376031 5376036 +
tttcagcaccacacaacaccta

SEQ ID NO: 108922 - DNA, 22 bp, Artificial Sequence
  Synthetic oligonucleotide; TTT chr11 5376015 5376036 5376032 5376037 +
ttcagcaccacacaacacctat

SEQ ID NO: 108923 - DNA, 22 bp, Artificial Sequence
  Synthetic oligonucleotide; TTT chr11 5376016 5376037 5376033 5376038 +
tcagcaccacacaacacctatt

SEQ ID NO: 108924 - DNA, 22 bp, Artificial Sequence
  Synthetic oligonucleotide; TTT chr11 5376017 5376038 5376034 5376039 +
cagcaccacacaacacctattc

SEQ ID NO: 108925 - DNA, 22 bp, Artificial Sequence
  Synthetic oligonucleotide; TTC chr11 5376018 5376039 5376035 5376040 +
agcaccacacaacacctattcc

SEQ ID NO: 108926 - DNA, 22 bp, Artificial Sequence
  Synthetic oligonucleotide; CTA chr11 5376036 5376057 5376053 5376058 +
ttccaaaattgaccacatactt

SEQ ID NO: 108927 - DNA, 22 bp, Artificial Sequence
  Synthetic oligonucleotide; TTC chr11 5376039 5376060 5376056 5376061 +
caaaattgaccacatacttgga

SEQ ID NO: 108928 - DNA, 22 bp, Artificial Sequence
  Synthetic oligonucleotide; TTG chr11 5376047 5376068 5376064 5376069 +
accacatacttggaagtaaagc

SEQ ID NO: 108929 - DNA, 22 bp, Artificial Sequence
  Synthetic oligonucleotide; CTT chr11 5376058 5376079 5376075 5376080 +
ggaagtaaagctctcctcagca

SEQ ID NO: 108930 - DNA, 22 bp, Artificial Sequence
  Synthetic oligonucleotide; TTG chr11 5376059 5376080 5376076 5376081 +
gaagtaaagctctcctcagcaa

SEQ ID NO: 108931 - DNA, 22 bp, Artificial Sequence
  Synthetic oligonucleotide; CTC chr11 5376071 5376092 5376088 5376093 +
tcctcagcaaatataaaagaac

SEQ ID NO: 108932 - DNA, 22 bp, Artificial Sequence
  Synthetic oligonucleotide; CTC chr11 5376073 5376094 5376090 5376095 +
ctcagcaaatataaaagaacag

SEQ ID NO: 108933 - DNA, 22 bp, Artificial Sequence
  Synthetic oligonucleotide; CTC chr11 5376076 5376097 5376093 5376098 +
agcaaatataaaagaacagaaa

SEQ ID NO: 108934 - DNA, 22 bp, Artificial Sequence
  Synthetic oligonucleotide; TTA chr11 5376101 5376122 5376118 5376123 +
taacaaactgtctctcagacca

SEQ ID NO: 108935 - DNA, 22 bp, Artificial Sequence
  Synthetic oligonucleotide; CTG chr11 5376111 5376132 5376128 5376133 +
tctctcagaccacagtgcaatc

SEQ ID NO: 108936 - DNA, 22 bp, Artificial Sequence
  Synthetic oligonucleotide; CTC chr11 5376115 5376136 5376132 5376137 +
tcagaccacagtgcaatcaaac

SEQ ID NO: 108937 - DNA, 22 bp, Artificial Sequence
  Synthetic oligonucleotide; CTC chr11 5376117 5376138 5376134 5376139 +
agaccacagtgcaatcaaacta

SEQ ID NO: 108938 - DNA, 22 bp, Artificial Sequence
  Synthetic oligonucleotide; CTA chr11 5376139 5376160 5376156 5376161 +
gaactcaggattaagaaactca

SEQ ID NO: 108939 - DNA, 22 bp, Artificial Sequence
  Synthetic oligonucleotide; CTC chr11 5376145 5376166 5376162 5376167 +
aggattaagaaactcactcaaa

SEQ ID NO: 108940 - DNA, 22 bp, Artificial Sequence
  Synthetic oligonucleotide; TTA chr11 5376152 5376173 5376169 5376174 +
agaaactcactcaaaaccactc

SEQ ID NO: 108941 - DNA, 22 bp, Artificial Sequence
  Synthetic oligonucleotide; CTC chr11 5376160 5376181 5376177 5376182 +
actcaaaaccactcaactacat

SEQ ID NO: 108942 - DNA, 22 bp, Artificial Sequence
  Synthetic oligonucleotide; CTC chr11 5376164 5376185 5376181 5376186 +
aaaaccactcaactacatggaa

SEQ ID NO: 108943 - DNA, 22 bp, Artificial Sequence
  Synthetic oligonucleotide; CTC chr11 5376174 5376195 5376191 5376196 +
aactacatggaaactgaacaac

SEQ ID NO: 108944 - DNA, 22 bp, Artificial Sequence
  Synthetic oligonucleotide; CTA chr11 5376179 5376200 5376196 5376201 +
catggaaactgaacaacctgct

SEQ ID NO: 108945 - DNA, 22 bp, Artificial Sequence
  Synthetic oligonucleotide; CTG chr11 5376190 5376211 5376207 5376212 +
aacaacctgctcctgaatgact

SEQ ID NO: 108946 - DNA, 22 bp, Artificial Sequence
  Synthetic oligonucleotide; CTG chr11 5376199 5376220 5376216 5376221 +
ctcctgaatgactactgggtac

SEQ ID NO: 108947 - DNA, 22 bp, Artificial Sequence
  Synthetic oligonucleotide; CTC chr11 5376202 5376223 5376219 5376224 +
ctgaatgactactgggtacata

SEQ ID NO: 108948 - DNA, 22 bp, Artificial Sequence
  Synthetic oligonucleotide; CTG chr11 5376205 5376226 5376222 5376227 +
aatgactactgggtacataacg

SEQ ID NO: 108949 - DNA, 22 bp, Artificial Sequence
  Synthetic oligonucleotide; CTA chr11 5376213 5376234 5376230 5376235 +
ctgggtacataacgaaatgaag

SEQ ID NO: 108950 - DNA, 22 bp, Artificial Sequence
  Synthetic oligonucleotide; CTG chr11 5376216 5376237 5376233 5376238 +
ggtacataacgaaatgaaggca

SEQ ID NO: 108951 - DNA, 22 bp, Artificial Sequence
  Synthetic oligonucleotide; TTC chr11 5376253 5376274 5376270 5376275 +
tttgaaaccaatgagaacaaag

SEQ ID NO: 108952 - DNA, 22 bp, Artificial Sequence
  Synthetic oligonucleotide; CTT chr11 5376255 5376276 5376272 5376277 +
tgaaaccaatgagaacaaagac

SEQ ID NO: 108953 - DNA, 22 bp, Artificial Sequence
  Synthetic oligonucleotide; TTT chr11 5376256 5376277 5376273 5376278 +
gaaaccaatgagaacaaagaca

SEQ ID NO: 108954 - DNA, 22 bp, Artificial Sequence
  Synthetic oligonucleotide; TTG chr11 5376257 5376278 5376274 5376279 +
aaaccaatgagaacaaagacac

SEQ ID NO: 108955 - DNA, 22 bp, Artificial Sequence
  Synthetic oligonucleotide; CTC chr11 5376295 5376316 5376312 5376317 +
tgggacacattcgaatcagtgt

SEQ ID NO: 108956 - DNA, 22 bp, Artificial Sequence
  Synthetic oligonucleotide; CTG chr11 5376297 5376318 5376314 5376319 +
ggacacattcgaatcagtgtgt

SEQ ID NO: 108957 - DNA, 22 bp, Artificial Sequence
  Synthetic oligonucleotide; TTC chr11 5376307 5376328 5376324 5376329 +
gaatcagtgtgtagggggaaat

SEQ ID NO: 108958 - DNA, 22 bp, Artificial Sequence
  Synthetic oligonucleotide; TTT chr11 5376331 5376352 5376348 5376353 +
atagcactaaacgcccacaaga

SEQ ID NO: 108959 - DNA, 22 bp, Artificial Sequence
  Synthetic oligonucleotide; TTA chr11 5376332 5376353 5376349 5376354 +
tagcactaaacgcccacaagag

SEQ ID NO: 108960 - DNA, 22 bp, Artificial Sequence
  Synthetic oligonucleotide; CTA chr11 5376340 5376361 5376357 5376362 +
aacgcccacaagagaaagcaag

SEQ ID NO: 108961 - DNA, 22 bp, Artificial Sequence
  Synthetic oligonucleotide; TTG chr11 5376377 5376398 5376394 5376399 +
acaccctaacatcacaattaaa

SEQ ID NO: 108962 - DNA, 22 bp, Artificial Sequence
  Synthetic oligonucleotide; CTA chr11 5376385 5376406 5376402 5376407 +
acatcacaattaaaagaactag

SEQ ID NO: 108963 - DNA, 22 bp, Artificial Sequence
  Synthetic oligonucleotide; TTA chr11 5376397 5376418 5376414 5376419 +
aaagaactagataagcaagagc

SEQ ID NO: 108964 - DNA, 22 bp, Artificial Sequence
  Synthetic oligonucleotide; CTA chr11 5376406 5376427 5376423 5376428 +
gataagcaagagcaaacacatt

SEQ ID NO: 108965 - DNA, 22 bp, Artificial Sequence
  Synthetic oligonucleotide; TTC chr11 5376429 5376450 5376446 5376451 +
aaaagctagcagaagtcaagaa

SEQ ID NO: 108966 - DNA, 22 bp, Artificial Sequence
  Synthetic oligonucleotide; CTA chr11 5376437 5376458 5376454 5376459 +
gcagaagtcaagaaataactaa

SEQ ID NO: 108967 - DNA, 22 bp, Artificial Sequence
  Synthetic oligonucleotide; CTA chr11 5376458 5376479 5376475 5376480 +
aaatcagagcagaactgaagga

SEQ ID NO: 108968 - DNA, 22 bp, Artificial Sequence
  Synthetic oligonucleotide; CTG chr11 5376475 5376496 5376492 5376497 +
aaggaaacagagacacaaaaaa

SEQ ID NO: 108969 - DNA, 22 bp, Artificial Sequence
  Synthetic oligonucleotide; CTT chr11 5376502 5376523 5376519 5376524 +
caaaaaattaatgaatctggga

SEQ ID NO: 108970 - DNA, 22 bp, Artificial Sequence
  Synthetic oligonucleotide; TTC chr11 5376503 5376524 5376520 5376525 +
aaaaaattaatgaatctgggag

SEQ ID NO: 108971 - DNA, 22 bp, Artificial Sequence
  Synthetic oligonucleotide; TTA chr11 5376512 5376533 5376529 5376534 +
atgaatctgggagctggttttt

SEQ ID NO: 108972 - DNA, 22 bp, Artificial Sequence
  Synthetic oligonucleotide; CTG chr11 5376521 5376542 5376538 5376543 +
ggagctggttttttgaaaggat

SEQ ID NO: 108973 - DNA, 22 bp, Artificial Sequence
  Synthetic oligonucleotide; CTG chr11 5376528 5376549 5376545 5376550 +
gttttttgaaaggatcaacaaa

SEQ ID NO: 108974 - DNA, 22 bp, Artificial Sequence
  Synthetic oligonucleotide; TTT chr11 5376532 5376553 5376549 5376554 +
tttgaaaggatcaacaaaactg

SEQ ID NO: 108975 - DNA, 22 bp, Artificial Sequence
  Synthetic oligonucleotide; TTT chr11 5376533 5376554 5376550 5376555 +
ttgaaaggatcaacaaaactga

SEQ ID NO: 108976 - DNA, 22 bp, Artificial Sequence
  Synthetic oligonucleotide; TTT chr11 5376534 5376555 5376551 5376556 +
tgaaaggatcaacaaaactgat

SEQ ID NO: 108977 - DNA, 22 bp, Artificial Sequence
  Synthetic oligonucleotide; TTT chr11 5376535 5376556 5376552 5376557 +
gaaaggatcaacaaaactgata

SEQ ID NO: 108978 - DNA, 22 bp, Artificial Sequence
  Synthetic oligonucleotide; TTG chr11 5376536 5376557 5376553 5376558 +
aaaggatcaacaaaactgatag

SEQ ID NO: 108979 - DNA, 22 bp, Artificial Sequence
  Synthetic oligonucleotide; CTG chr11 5376554 5376575 5376571 5376576 +
atagaccgctagcaagactaat

SEQ ID NO: 108980 - DNA, 22 bp, Artificial Sequence
  Synthetic oligonucleotide; CTA chr11 5376565 5376586 5376582 5376587 +
gcaagactaataagaaaagaga

SEQ ID NO: 108981 - DNA, 22 bp, Artificial Sequence
  Synthetic oligonucleotide; CTA chr11 5376574 5376595 5376591 5376596 +
ataagaaaagagagaagaatca

SEQ ID NO: 108982 - DNA, 22 bp, Artificial Sequence
  Synthetic oligonucleotide; CTG chr11 5376659 5376680 5376676 5376681 +
ccatcagagaatactacaaaca

SEQ ID NO: 108983 - DNA, 22 bp, Artificial Sequence
  Synthetic oligonucleotide; CTA chr11 5376675 5376696 5376692 5376697 +
caaacacctctacgcaaataaa

SEQ ID NO: 108984 - DNA, 22 bp, Artificial Sequence
  Synthetic oligonucleotide; CTC chr11 5376685 5376706 5376702 5376707 +
tacgcaaataaactagaaaatc

SEQ ID NO: 108985 - DNA, 22 bp, Artificial Sequence
  Synthetic oligonucleotide; CTA chr11 5376687 5376708 5376704 5376709 +
cgcaaataaactagaaaatcta

SEQ ID NO: 108986 - DNA, 22 bp, Artificial Sequence
  Synthetic oligonucleotide; CTA chr11 5376700 5376721 5376717 5376722 +
gaaaatctagaagaaatggata

SEQ ID NO: 108987 - DNA, 22 bp, Artificial Sequence
  Synthetic oligonucleotide; CTA chr11 5376709 5376730 5376726 5376731 +
gaagaaatggataaattcctgg

SEQ ID NO: 108988 - DNA, 22 bp, Artificial Sequence
  Synthetic oligonucleotide; TTC chr11 5376727 5376748 5376744 5376749 +
ctggacacatacactatcccaa

SEQ ID NO: 108989 - DNA, 22 bp, Artificial Sequence
  Synthetic oligonucleotide; CTG chr11 5376730 5376751 5376747 5376752 +
gacacatacactatcccaagac

SEQ ID NO: 108990 - DNA, 22 bp, Artificial Sequence
  Synthetic oligonucleotide; CTA chr11 5376743 5376764 5376760 5376765 +
tcccaagactaaaccaggaaga

SEQ ID NO: 108991 - DNA, 22 bp, Artificial Sequence
  Synthetic oligonucleotide; CTA chr11 5376754 5376775 5376771 5376776 +
aaccaggaagaagttgaatctc

SEQ ID NO: 108992 - DNA, 22 bp, Artificial Sequence
  Synthetic oligonucleotide; TTG chr11 5376770 5376791 5376787 5376792 +
aatctctgaatagaccaataac

SEQ ID NO: 108993 - DNA, 22 bp, Artificial Sequence
  Synthetic oligonucleotide; CTC chr11 5376776 5376797 5376793 5376798 +
tgaatagaccaataacaggatc

SEQ ID NO: 108994 - DNA, 22 bp, Artificial Sequence
  Synthetic oligonucleotide; CTG chr11 5376778 5376799 5376795 5376800 +
aatagaccaataacaggatctg

SEQ ID NO: 108995 - DNA, 22 bp, Artificial Sequence
  Synthetic oligonucleotide; CTG chr11 5376800 5376821 5376817 5376822 +
aaattgtggcaataatcaatag

SEQ ID NO: 108996 - DNA, 22 bp, Artificial Sequence
  Synthetic oligonucleotide; TTG chr11 5376806 5376827 5376823 5376828 +
tggcaataatcaatagcttacc

SEQ ID NO: 108997 - DNA, 22 bp, Artificial Sequence
  Synthetic oligonucleotide; CTT chr11 5376825 5376846 5376842 5376847 +
accaaccaaaaagagtccagga

SEQ ID NO: 108998 - DNA, 22 bp, Artificial Sequence
  Synthetic oligonucleotide; TTA chr11 5376826 5376847 5376843 5376848 +
ccaaccaaaaagagtccaggac

SEQ ID NO: 108999 - DNA, 22 bp, Artificial Sequence
  Synthetic oligonucleotide; TTC chr11 5376859 5376880 5376876 5376881 +
acagccaaattctaacagaggt

SEQ ID NO: 109000 - DNA, 22 bp, Artificial Sequence
  Synthetic oligonucleotide; TTC chr11 5376871 5376892 5376888 5376893 +
taacagaggtacaaggaggaat

SEQ ID NO: 109001 - DNA, 22 bp, Artificial Sequence
  Synthetic oligonucleotide; CTA chr11 5376873 5376894 5376890 5376895 +
acagaggtacaaggaggaattg

SEQ ID NO: 109002 - DNA, 22 bp, Artificial Sequence
  Synthetic oligonucleotide; TTG chr11 5376895 5376916 5376912 5376917 +
gtaccattccttctgaaactat

SEQ ID NO: 109003 - DNA, 22 bp, Artificial Sequence
  Synthetic oligonucleotide; TTC chr11 5376904 5376925 5376921 5376926 +
cttctgaaactattccaatcaa

SEQ ID NO: 109004 - DNA, 22 bp, Artificial Sequence
  Synthetic oligonucleotide; CTT chr11 5376907 5376928 5376924 5376929 +
ctgaaactattccaatcaacag

SEQ ID NO: 109005 - DNA, 22 bp, Artificial Sequence
  Synthetic oligonucleotide; TTC chr11 5376908 5376929 5376925 5376930 +
tgaaactattccaatcaacaga

SEQ ID NO: 109006 - DNA, 22 bp, Artificial Sequence
  Synthetic oligonucleotide; CTG chr11 5376910 5376931 5376927 5376932 +
aaactattccaatcaacagaaa

SEQ ID NO: 109007 - DNA, 22 bp, Artificial Sequence
  Synthetic oligonucleotide; CTA chr11 5376916 5376937 5376933 5376938 +
ttccaatcaacagaaaaagaag

SEQ ID NO: 109008 - DNA, 22 bp, Artificial Sequence
  Synthetic oligonucleotide; TTC chr11 5376919 5376940 5376936 5376941 +
caatcaacagaaaaagaaggaa

SEQ ID NO: 109009 - DNA, 22 bp, Artificial Sequence
  Synthetic oligonucleotide; CTC chr11 5376946 5376967 5376963 5376968 +
cctaactcattttatgaggcca

SEQ ID NO: 109010 - DNA, 22 bp, Artificial Sequence
  Synthetic oligonucleotide; CTA chr11 5376950 5376971 5376967 5376972 +
actcattttatgaggccagcat

SEQ ID NO: 109011 - DNA, 22 bp, Artificial Sequence
  Synthetic oligonucleotide; CTC chr11 5376954 5376975 5376971 5376976 +
attttatgaggccagcatcatc

SEQ ID NO: 109012 - DNA, 22 bp, Artificial Sequence
  Synthetic oligonucleotide; TTT chr11 5376958 5376979 5376975 5376980 +
tatgaggccagcatcatcctaa

SEQ ID NO: 109013 - DNA, 22 bp, Artificial Sequence
  Synthetic oligonucleotide; TTT chr11 5376959 5376980 5376976 5376981 +
atgaggccagcatcatcctaat

SEQ ID NO: 109014 - DNA, 22 bp, Artificial Sequence
  Synthetic oligonucleotide; TTA chr11 5376960 5376981 5376977 5376982 +
tgaggccagcatcatcctaata

SEQ ID NO: 109015 - DNA, 22 bp, Artificial Sequence
  Synthetic oligonucleotide; CTA chr11 5376979 5377000 5376996 5377001 +
ataccaaagccagaaagagaca

SEQ ID NO: 109016 - DNA, 22 bp, Artificial Sequence
  Synthetic oligonucleotide; TTT chr11 5377020 5377041 5377037 5377042 +
tagatgaatatccctgatgaac

SEQ ID NO: 109017 - DNA, 22 bp, Artificial Sequence
  Synthetic oligonucleotide; TTT chr11 5377021 5377042 5377038 5377043 +
agatgaatatccctgatgaaca

SEQ ID NO: 109018 - DNA, 22 bp, Artificial Sequence
  Synthetic oligonucleotide; TTA chr11 5377022 5377043 5377039 5377044 +
gatgaatatccctgatgaacat

SEQ ID NO: 109019 - DNA, 22 bp, Artificial Sequence
  Synthetic oligonucleotide; CTG chr11 5377036 5377057 5377053 5377058 +
atgaacatcgatgcaaaaatcc

SEQ ID NO: 109020 - DNA, 22 bp, Artificial Sequence
  Synthetic oligonucleotide; CTC chr11 5377060 5377081 5377077 5377082 +
aataaaatactggcaaaccgaa

SEQ ID NO: 109021 - DNA, 22 bp, Artificial Sequence
  Synthetic oligonucleotide; CTG chr11 5377072 5377093 5377089 5377094 +
gcaaaccgaatccagcagcaca

SEQ ID NO: 109022 - DNA, 22 bp, Artificial Sequence
  Synthetic oligonucleotide; CTT chr11 5377105 5377126 5377122 5377127 +
atccacgatgatcaagtggact

SEQ ID NO: 109023 - DNA, 22 bp, Artificial Sequence
  Synthetic oligonucleotide; TTA chr11 5377106 5377127 5377123 5377128 +
tccacgatgatcaagtggactt

SEQ ID NO: 109024 - DNA, 22 bp, Artificial Sequence
  Synthetic oligonucleotide; CTT chr11 5377128 5377149 5377145 5377150 +
catccctgggatgcaaggctgg

SEQ ID NO: 109025 - DNA, 22 bp, Artificial Sequence
  Synthetic oligonucleotide; TTC chr11 5377129 5377150 5377146 5377151 +
atccctgggatgcaaggctggt

SEQ ID NO: 109026 - DNA, 22 bp, Artificial Sequence
  Synthetic oligonucleotide; CTG chr11 5377136 5377157 5377153 5377158 +
ggatgcaaggctggttcaatat

SEQ ID NO: 109027 - DNA, 22 bp, Artificial Sequence
  Synthetic oligonucleotide; CTG chr11 5377149 5377170 5377166 5377171 +
gttcaatatatgcaaatcaata

SEQ ID NO: 109028 - DNA, 22 bp, Artificial Sequence
  Synthetic oligonucleotide; TTC chr11 5377153 5377174 5377170 5377175 +
aatatatgcaaatcaataaatg

SEQ ID NO: 109029 - DNA, 22 bp, Artificial Sequence
  Synthetic oligonucleotide; TTA chr11 5377220 5377241 5377237 5377242 +
tctcaatagatgcagaaaaggc

SEQ ID NO: 109030 - DNA, 22 bp, Artificial Sequence
  Synthetic oligonucleotide; CTC chr11 5377224 5377245 5377241 5377246 +
aatagatgcagaaaaggccttt

SEQ ID NO: 109031 - DNA, 22 bp, Artificial Sequence
  Synthetic oligonucleotide; CTT chr11 5377245 5377266 5377262 5377267 +
tgacaaaattcaacaacccttc

SEQ ID NO: 109032 - DNA, 22 bp, Artificial Sequence
  Synthetic oligonucleotide; TTT chr11 5377246 5377267 5377263 5377268 +
gacaaaattcaacaacccttca

SEQ ID NO: 109033 - DNA, 22 bp, Artificial Sequence
  Synthetic oligonucleotide; TTG chr11 5377247 5377268 5377264 5377269 +
acaaaattcaacaacccttcat

SEQ ID NO: 109034 - DNA, 22 bp, Artificial Sequence
  Synthetic oligonucleotide; TTC chr11 5377256 5377277 5377273 5377278 +
aacaacccttcatgctaaaaac

SEQ ID NO: 109035 - DNA, 22 bp, Artificial Sequence
  Synthetic oligonucleotide; CTT chr11 5377266 5377287 5377283 5377288 +
catgctaaaaactttcaataaa

SEQ ID NO: 109036 - DNA, 22 bp, Artificial Sequence
  Synthetic oligonucleotide; TTC chr11 5377267 5377288 5377284 5377289 +
atgctaaaaactttcaataaat

SEQ ID NO: 109037 - DNA, 22 bp, Artificial Sequence
  Synthetic oligonucleotide; CTA chr11 5377273 5377294 5377290 5377295 +
aaaactttcaataaattaggta

SEQ ID NO: 109038 - DNA, 22 bp, Artificial Sequence
  Synthetic oligonucleotide; CTT chr11 5377280 5377301 5377297 5377302 +
tcaataaattaggtattgatgg

SEQ ID NO: 109039 - DNA, 22 bp, Artificial Sequence
  Synthetic oligonucleotide; TTT chr11 5377281 5377302 5377298 5377303 +
caataaattaggtattgatggg

SEQ ID NO: 109040 - DNA, 22 bp, Artificial Sequence
  Synthetic oligonucleotide; TTC chr11 5377282 5377303 5377299 5377304 +
aataaattaggtattgatggga

SEQ ID NO: 109041 - DNA, 22 bp, Artificial Sequence
  Synthetic oligonucleotide; TTA chr11 5377291 5377312 5377308 5377313 +
ggtattgatgggacatatctca

SEQ ID NO: 109042 - DNA, 22 bp, Artificial Sequence
  Synthetic oligonucleotide; TTG chr11 5377298 5377319 5377315 5377320 +
atgggacatatctcaaaataat

SEQ ID NO: 109043 - DNA, 22 bp, Artificial Sequence
  Synthetic oligonucleotide; CTC chr11 5377312 5377333 5377329 5377334 +
aaaataataagagctatctatg

SEQ ID NO: 109044 - DNA, 22 bp, Artificial Sequence
  Synthetic oligonucleotide; CTA chr11 5377328 5377349 5377345 5377350 +
tctatgacaaacccacagccaa

SEQ ID NO: 109045 - DNA, 22 bp, Artificial Sequence
  Synthetic oligonucleotide; CTA chr11 5377332 5377353 5377349 5377354 +
tgacaaacccacagccaatatc

SEQ ID NO: 109046 - DNA, 22 bp, Artificial Sequence
  Synthetic oligonucleotide; CTG chr11 5377360 5377381 5377377 5377382 +
aatgggcaaaaactggaagcat

SEQ ID NO: 109047 - DNA, 22 bp, Artificial Sequence
  Synthetic oligonucleotide; CTG chr11 5377375 5377396 5377392 5377397 +
gaagcattccctttgtaaactg

SEQ ID NO: 109048 - DNA, 22 bp, Artificial Sequence
  Synthetic oligonucleotide; TTC chr11 5377384 5377405 5377401 5377406 +
cctttgtaaactggcacaagac

SEQ ID NO: 109049 - DNA, 22 bp, Artificial Sequence
  Synthetic oligonucleotide; CTT chr11 5377388 5377409 5377405 5377410 +
tgtaaactggcacaagacaggg

SEQ ID NO: 109050 - DNA, 22 bp, Artificial Sequence
  Synthetic oligonucleotide; TTT chr11 5377389 5377410 5377406 5377411 +
gtaaactggcacaagacaggga

SEQ ID NO: 109051 - DNA, 22 bp, Artificial Sequence
  Synthetic oligonucleotide; TTG chr11 5377390 5377411 5377407 5377412 +
taaactggcacaagacagggat

SEQ ID NO: 109052 - DNA, 22 bp, Artificial Sequence
  Synthetic oligonucleotide; CTG chr11 5377397 5377418 5377414 5377419 +
gcacaagacagggatgccctct

SEQ ID NO: 109053 - DNA, 22 bp, Artificial Sequence
  Synthetic oligonucleotide; CTC chr11 5377418 5377439 5377435 5377440 +
tctcactactcctattcaacat

SEQ ID NO: 109054 - DNA, 22 bp, Artificial Sequence
  Synthetic oligonucleotide; CTC chr11 5377420 5377441 5377437 5377442 +
tcactactcctattcaacatag

SEQ ID NO: 109055 - DNA, 22 bp, Artificial Sequence
  Synthetic oligonucleotide; CTC chr11 5377422 5377443 5377439 5377444 +
actactcctattcaacatagtg

SEQ ID NO: 109056 - DNA, 22 bp, Artificial Sequence
  Synthetic oligonucleotide; CTA chr11 5377426 5377447 5377443 5377448 +
ctcctattcaacatagtgttgg

SEQ ID NO: 109057 - DNA, 22 bp, Artificial Sequence
  Synthetic oligonucleotide; CTC chr11 5377429 5377450 5377446 5377451 +
ctattcaacatagtgttggaag

SEQ ID NO: 109058 - DNA, 22 bp, Artificial Sequence
  Synthetic oligonucleotide; CTA chr11 5377432 5377453 5377449 5377454 +
ttcaacatagtgttggaagttc

SEQ ID NO: 109059 - DNA, 22 bp, Artificial Sequence
  Synthetic oligonucleotide; TTC chr11 5377435 5377456 5377452 5377457 +
aacatagtgttggaagttctgg

SEQ ID NO: 109060 - DNA, 22 bp, Artificial Sequence
  Synthetic oligonucleotide; TTG chr11 5377447 5377468 5377464 5377469 +
gaagttctggccagggcaatta

SEQ ID NO: 109061 - DNA, 22 bp, Artificial Sequence
  Synthetic oligonucleotide; TTC chr11 5377454 5377475 5377471 5377476 +
tggccagggcaattaggcagaa

SEQ ID NO: 109062 - DNA, 22 bp, Artificial Sequence
  Synthetic oligonucleotide; CTG chr11 5377456 5377477 5377473 5377478 +
gccagggcaattaggcagaaga

SEQ ID NO: 109063 - DNA, 22 bp, Artificial Sequence
  Synthetic oligonucleotide; TTA chr11 5377469 5377490 5377486 5377491 +
ggcagaagacaggaaaaaaggg

SEQ ID NO: 109064 - DNA, 22 bp, Artificial Sequence
  Synthetic oligonucleotide; TTC chr11 5377496 5377517 5377513 5377518 +
aattaagaaaagaggaagtcaa

SEQ ID NO: 109065 - DNA, 22 bp, Artificial Sequence
  Synthetic oligonucleotide; TTA chr11 5377501 5377522 5377518 5377523 +
agaaaagaggaagtcaaattgt

SEQ ID NO: 109066 - DNA, 22 bp, Artificial Sequence
  Synthetic oligonucleotide; TTG chr11 5377522 5377543 5377539 5377544 +
tccctgtttgcagacgacatga

SEQ ID NO: 109067 - DNA, 22 bp, Artificial Sequence
  Synthetic oligonucleotide; CTG chr11 5377528 5377549 5377545 5377550 +
tttgcagacgacatgattgtat

SEQ ID NO: 109068 - DNA, 22 bp, Artificial Sequence
  Synthetic oligonucleotide; TTT chr11 5377531 5377552 5377548 5377553 +
gcagacgacatgattgtatatc

SEQ ID NO: 109069 - DNA, 22 bp, Artificial Sequence
  Synthetic oligonucleotide; TTG chr11 5377532 5377553 5377549 5377554 +
cagacgacatgattgtatatct

SEQ ID NO: 109070 - DNA, 22 bp, Artificial Sequence
  Synthetic oligonucleotide; TTG chr11 5377547 5377568 5377564 5377569 +
tatatctagaaaacccccttgt

SEQ ID NO: 109071 - DNA, 22 bp, Artificial Sequence
  Synthetic oligonucleotide; CTA chr11 5377555 5377576 5377572 5377577 +
gaaaacccccttgtctcagccc

SEQ ID NO: 109072 - DNA, 22 bp, Artificial Sequence
  Synthetic oligonucleotide; CTT chr11 5377567 5377588 5377584 5377589 +
gtctcagcccaaaatctcctta

SEQ ID NO: 109073 - DNA, 22 bp, Artificial Sequence
  Synthetic oligonucleotide; TTG chr11 5377568 5377589 5377585 5377590 +
tctcagcccaaaatctccttaa

SEQ ID NO: 109074 - DNA, 22 bp, Artificial Sequence
  Synthetic oligonucleotide; CTC chr11 5377572 5377593 5377589 5377594 +
agcccaaaatctccttaagctg

SEQ ID NO: 109075 - DNA, 22 bp, Artificial Sequence
  Synthetic oligonucleotide; CTC chr11 5377585 5377606 5377602 5377607 +
cttaagctgataagcaacttca

SEQ ID NO: 109076 - DNA, 22 bp, Artificial Sequence
  Synthetic oligonucleotide; CTT chr11 5377588 5377609 5377605 5377610 +
aagctgataagcaacttcagca

SEQ ID NO: 109077 - DNA, 22 bp, Artificial Sequence
  Synthetic oligonucleotide; TTA chr11 5377589 5377610 5377606 5377611 +
agctgataagcaacttcagcaa

SEQ ID NO: 109078 - DNA, 22 bp, Artificial Sequence
  Synthetic oligonucleotide; CTG chr11 5377594 5377615 5377611 5377616 +
ataagcaacttcagcaaagcct

SEQ ID NO: 109079 - DNA, 22 bp, Artificial Sequence
  Synthetic oligonucleotide; CTT chr11 5377605 5377626 5377622 5377627 +
cagcaaagcctcaggatacaaa

SEQ ID NO: 109080 - DNA, 22 bp, Artificial Sequence
  Synthetic oligonucleotide; TTC chr11 5377606 5377627 5377623 5377628 +
agcaaagcctcaggatacaaaa

SEQ ID NO: 109081 - DNA, 22 bp, Artificial Sequence
  Synthetic oligonucleotide; CTC chr11 5377617 5377638 5377634 5377639 +
aggatacaaaaccaatgtgcaa

SEQ ID NO: 109082 - DNA, 22 bp, Artificial Sequence
  Synthetic oligonucleotide; TTC chr11 5377654 5377675 5377671 5377676 +
ttatacaccaataacagacaaa

SEQ ID NO: 109083 - DNA, 22 bp, Artificial Sequence
  Synthetic oligonucleotide; CTT chr11 5377656 5377677 5377673 5377678 +
atacaccaataacagacaaaca

SEQ ID NO: 109084 - DNA, 22 bp, Artificial Sequence
  Synthetic oligonucleotide; TTA chr11 5377657 5377678 5377674 5377679 +
tacaccaataacagacaaacag

SEQ ID NO: 109085 - DNA, 22 bp, Artificial Sequence
  Synthetic oligonucleotide; CTC chr11 5377702 5377723 5377719 5377724 +
ccattcacaattgcttcaaaga

SEQ ID NO: 109086 - DNA, 22 bp, Artificial Sequence
  Synthetic oligonucleotide; TTC chr11 5377708 5377729 5377725 5377730 +
acaattgcttcaaagagaataa

SEQ ID NO: 109087 - DNA, 22 bp, Artificial Sequence
  Synthetic oligonucleotide; TTG chr11 5377715 5377736 5377732 5377737 +
cttcaaagagaataaaatacct

SEQ ID NO: 109088 - DNA, 22 bp, Artificial Sequence
  Synthetic oligonucleotide; CTT chr11 5377718 5377739 5377735 5377740 +
caaagagaataaaatacctagg

SEQ ID NO: 109089 - DNA, 22 bp, Artificial Sequence
  Synthetic oligonucleotide; TTC chr11 5377719 5377740 5377736 5377741 +
aaagagaataaaatacctagga

SEQ ID NO: 109090 - DNA, 22 bp, Artificial Sequence
  Synthetic oligonucleotide; CTA chr11 5377738 5377759 5377755 5377760 +
ggaatccaacttacaagggatg

SEQ ID NO: 109091 - DNA, 22 bp, Artificial Sequence
  Synthetic oligonucleotide; CTT chr11 5377750 5377771 5377767 5377772 +
acaagggatgtgaaggacctct

SEQ ID NO: 109092 - DNA, 22 bp, Artificial Sequence
  Synthetic oligonucleotide; TTA chr11 5377751 5377772 5377768 5377773 +
caagggatgtgaaggacctctt

SEQ ID NO: 109093 - DNA, 22 bp, Artificial Sequence
  Synthetic oligonucleotide; CTC chr11 5377771 5377792 5377788 5377793 +
ttcaaggagaactacaaaccac

SEQ ID NO: 109094 - DNA, 22 bp, Artificial Sequence
  Synthetic oligonucleotide; CTT chr11 5377773 5377794 5377790 5377795 +
caaggagaactacaaaccactg

SEQ ID NO: 109095 - DNA, 22 bp, Artificial Sequence
  Synthetic oligonucleotide; TTC chr11 5377774 5377795 5377791 5377796 +
aaggagaactacaaaccactgc

SEQ ID NO: 109096 - DNA, 22 bp, Artificial Sequence
  Synthetic oligonucleotide; CTA chr11 5377785 5377806 5377802 5377807 +
caaaccactgctcaatgaaata

SEQ ID NO: 109097 - DNA, 22 bp, Artificial Sequence
  Synthetic oligonucleotide; CTG chr11 5377795 5377816 5377812 5377817 +
ctcaatgaaataaaagaagata

SEQ ID NO: 109098 - DNA, 22 bp, Artificial Sequence
  Synthetic oligonucleotide; CTC chr11 5377798 5377819 5377815 5377820 +
aatgaaataaaagaagatacaa

SEQ ID NO: 109099 - DNA, 22 bp, Artificial Sequence
  Synthetic oligonucleotide; TTC chr11 5377838 5377859 5377855 5377860 +
catgcttatgggtaggaagaat

SEQ ID NO: 109100 - DNA, 22 bp, Artificial Sequence
  Synthetic oligonucleotide; CTT chr11 5377845 5377866 5377862 5377867 +
atgggtaggaagaatcaatatc

SEQ ID NO: 109101 - DNA, 22 bp, Artificial Sequence
  Synthetic oligonucleotide; TTA chr11 5377846 5377867 5377863 5377868 +
tgggtaggaagaatcaatatca

SEQ ID NO: 109102 - DNA, 22 bp, Artificial Sequence
  Synthetic oligonucleotide; TTT chr11 5377898 5377919 5377915 5377920 +
atagattcaatgccatccccat

SEQ ID NO: 109103 - DNA, 22 bp, Artificial Sequence
  Synthetic oligonucleotide; TTA chr11 5377899 5377920 5377916 5377921 +
tagattcaatgccatccccatc

SEQ ID NO: 109104 - DNA, 22 bp, Artificial Sequence
  Synthetic oligonucleotide; TTC chr11 5377906 5377927 5377923 5377928 +
aatgccatccccatcaagctac

SEQ ID NO: 109105 - DNA, 22 bp, Artificial Sequence
  Synthetic oligonucleotide; CTA chr11 5377927 5377948 5377944 5377949 +
ccaatgattttcttcacagaat

SEQ ID NO: 109106 - DNA, 22 bp, Artificial Sequence
  Synthetic oligonucleotide; TTT chr11 5377937 5377958 5377954 5377959 +
tcttcacagaattggaaaaacg

SEQ ID NO: 109107 - DNA, 22 bp, Artificial Sequence
  Synthetic oligonucleotide; TTT chr11 5377938 5377959 5377955 5377960 +
cttcacagaattggaaaaacga

SEQ ID NO: 109108 - DNA, 22 bp, Artificial Sequence
  Synthetic oligonucleotide; TTC chr11 5377939 5377960 5377956 5377961 +
ttcacagaattggaaaaacgac

SEQ ID NO: 109109 - DNA, 22 bp, Artificial Sequence
  Synthetic oligonucleotide; CTT chr11 5377941 5377962 5377958 5377963 +
cacagaattggaaaaacgactt

SEQ ID NO: 109110 - DNA, 22 bp, Artificial Sequence
  Synthetic oligonucleotide; TTC chr11 5377942 5377963 5377959 5377964 +
acagaattggaaaaacgacttt

SEQ ID NO: 109111 - DNA, 22 bp, Artificial Sequence
  Synthetic oligonucleotide; TTG chr11 5377951 5377972 5377968 5377973 +
gaaaaacgactttaaagttcat

SEQ ID NO: 109112 - DNA, 22 bp, Artificial Sequence
  Synthetic oligonucleotide; CTT chr11 5377963 5377984 5377980 5377985 +
taaagttcatatggaaccaaaa

SEQ ID NO: 109113 - DNA, 22 bp, Artificial Sequence
  Synthetic oligonucleotide; TTT chr11 5377964 5377985 5377981 5377986 +
aaagttcatatggaaccaaaaa

SEQ ID NO: 109114 - DNA, 22 bp, Artificial Sequence
  Synthetic oligonucleotide; TTA chr11 5377965 5377986 5377982 5377987 +
aagttcatatggaaccaaaaaa

SEQ ID NO: 109115 - DNA, 22 bp, Artificial Sequence
  Synthetic oligonucleotide; TTC chr11 5377971 5377992 5377988 5377993 +
atatggaaccaaaaaagagcct

SEQ ID NO: 109116 - DNA, 22 bp, Artificial Sequence
  Synthetic oligonucleotide; CTG chr11 5377994 5378015 5378011 5378016 +
cattgccaagtcaatcctaagc

SEQ ID NO: 109117 - DNA, 22 bp, Artificial Sequence
  Synthetic oligonucleotide; TTG chr11 5377999 5378020 5378016 5378021 +
ccaagtcaatcctaagccaaaa

SEQ ID NO: 109118 - DNA, 22 bp, Artificial Sequence
  Synthetic oligonucleotide; CTA chr11 5378013 5378034 5378030 5378035 +
agccaaaagaacaaagctggag

SEQ ID NO: 109119 - DNA, 22 bp, Artificial Sequence
  Synthetic oligonucleotide; CTG chr11 5378032 5378053 5378049 5378054 +
gaggcatcaggctacctcactt

SEQ ID NO: 109120 - DNA, 22 bp, Artificial Sequence
  Synthetic oligonucleotide; CTA chr11 5378046 5378067 5378063 5378068 +
cctcacttcaaactatactaca

SEQ ID NO: 109121 - DNA, 22 bp, Artificial Sequence
  Synthetic oligonucleotide; CTC chr11 5378050 5378071 5378067 5378072 +
acttcaaactatactacaaggc

SEQ ID NO: 109122 - DNA, 22 bp, Artificial Sequence
  Synthetic oligonucleotide; CTT chr11 5378054 5378075 5378071 5378076 +
caaactatactacaaggctaca

SEQ ID NO: 109123 - DNA, 22 bp, Artificial Sequence
  Synthetic oligonucleotide; TTC chr11 5378055 5378076 5378072 5378077 +
aaactatactacaaggctacag

SEQ ID NO: 109124 - DNA, 22 bp, Artificial Sequence
  Synthetic oligonucleotide; CTA chr11 5378061 5378082 5378078 5378083 +
tactacaaggctacagtaacca

SEQ ID NO: 109125 - DNA, 22 bp, Artificial Sequence
  Synthetic oligonucleotide; CTA chr11 5378066 5378087 5378083 5378088 +
caaggctacagtaaccaaaaca

SEQ ID NO: 109126 - DNA, 22 bp, Artificial Sequence
  Synthetic oligonucleotide; CTA chr11 5378074 5378095 5378091 5378096 +
cagtaaccaaaacagcatgtta

SEQ ID NO: 109127 - DNA, 22 bp, Artificial Sequence
  Synthetic oligonucleotide; TTA chr11 5378096 5378117 5378113 5378118 +
ctggtaccaaaacacagatata

SEQ ID NO: 109128 - DNA, 22 bp, Artificial Sequence
  Synthetic oligonucleotide; CTG chr11 5378099 5378120 5378116 5378121 +
gtaccaaaacacagatatagat

SEQ ID NO: 109129 - DNA, 22 bp, Artificial Sequence
  Synthetic oligonucleotide; CTC chr11 5378144 5378165 5378161 5378166 +
agaaataacgacgcatatctac

SEQ ID NO: 109130 - DNA, 22 bp, Artificial Sequence
  Synthetic oligonucleotide; CTA chr11 5378165 5378186 5378182 5378187 +
caactatctgatctttgaaaaa

SEQ ID NO: 109131 - DNA, 22 bp, Artificial Sequence
  Synthetic oligonucleotide; CTA chr11 5378171 5378192 5378188 5378193 +
tctgatctttgaaaaacctgag

SEQ ID NO: 109132 - DNA, 22 bp, Artificial Sequence
  Synthetic oligonucleotide; CTG chr11 5378175 5378196 5378192 5378197 +
atctttgaaaaacctgagaaaa

SEQ ID NO: 109133 - DNA, 22 bp, Artificial Sequence
  Synthetic oligonucleotide; CTT chr11 5378180 5378201 5378197 5378202 +
tgaaaaacctgagaaaaacaag

SEQ ID NO: 109134 - DNA, 22 bp, Artificial Sequence
  Synthetic oligonucleotide; TTT chr11 5378181 5378202 5378198 5378203 +
gaaaaacctgagaaaaacaaga

SEQ ID NO: 109135 - DNA, 22 bp, Artificial Sequence
  Synthetic oligonucleotide; TTG chr11 5378182 5378203 5378199 5378204 +
aaaaacctgagaaaaacaagaa

SEQ ID NO: 109136 - DNA, 22 bp, Artificial Sequence
  Synthetic oligonucleotide; CTG chr11 5378191 5378212 5378208 5378213 +
agaaaaacaagaaatggggaaa

SEQ ID NO: 109137 - DNA, 22 bp, Artificial Sequence
  Synthetic oligonucleotide; TTC chr11 5378219 5378240 5378236 5378241 +
cctatttaataaatggtgctgg

SEQ ID NO: 109138 - DNA, 22 bp, Artificial Sequence
  Synthetic oligonucleotide; CTA chr11 5378223 5378244 5378240 5378245 +
tttaataaatggtgctgggaga

SEQ ID NO: 109139 - DNA, 22 bp, Artificial Sequence
  Synthetic oligonucleotide; TTT chr11 5378226 5378247 5378243 5378248 +
aataaatggtgctgggagaact

SEQ ID NO: 109140 - DNA, 22 bp, Artificial Sequence
  Synthetic oligonucleotide; TTA chr11 5378227 5378248 5378244 5378249 +
ataaatggtgctgggagaactg

SEQ ID NO: 109141 - DNA, 22 bp, Artificial Sequence
  Synthetic oligonucleotide; CTG chr11 5378240 5378261 5378257 5378262 +
ggagaactggctagccatatgt

SEQ ID NO: 109142 - DNA, 22 bp, Artificial Sequence
  Synthetic oligonucleotide; CTG chr11 5378249 5378270 5378266 5378271 +
gctagccatatgtagaatgctg

SEQ ID NO: 109143 - DNA, 22 bp, Artificial Sequence
  Synthetic oligonucleotide; CTA chr11 5378253 5378274 5378270 5378275 +
gccatatgtagaatgctgaaac

SEQ ID NO: 109144 - DNA, 22 bp, Artificial Sequence
  Synthetic oligonucleotide; CTG chr11 5378271 5378292 5378288 5378293 +
aaactggatcccttccttacac

SEQ ID NO: 109145 - DNA, 22 bp, Artificial Sequence
  Synthetic oligonucleotide; CTG chr11 5378277 5378298 5378294 5378299 +
gatcccttccttacaccttata

SEQ ID NO: 109146 - DNA, 22 bp, Artificial Sequence
  Synthetic oligonucleotide; CTT chr11 5378285 5378306 5378302 5378307 +
ccttacaccttatacaaaaatt

SEQ ID NO: 109147 - DNA, 22 bp, Artificial Sequence
  Synthetic oligonucleotide; TTC chr11 5378286 5378307 5378303 5378308 +
cttacaccttatacaaaaatta

SEQ ID NO: 109148 - DNA, 22 bp, Artificial Sequence
  Synthetic oligonucleotide; CTT chr11 5378289 5378310 5378306 5378311 +
acaccttatacaaaaattaatt

SEQ ID NO: 109149 - DNA, 22 bp, Artificial Sequence
  Synthetic oligonucleotide; TTA chr11 5378290 5378311 5378307 5378312 +
caccttatacaaaaattaattc

SEQ ID NO: 109150 - DNA, 22 bp, Artificial Sequence
  Synthetic oligonucleotide; CTT chr11 5378296 5378317 5378313 5378318 +
atacaaaaattaattcaagatg

SEQ ID NO: 109151 - DNA, 22 bp, Artificial Sequence
  Synthetic oligonucleotide; TTA chr11 5378297 5378318 5378314 5378319 +
tacaaaaattaattcaagatgg

SEQ ID NO: 109152 - DNA, 22 bp, Artificial Sequence
  Synthetic oligonucleotide; TTA chr11 5378308 5378329 5378325 5378330 +
attcaagatggattaaagactt

SEQ ID NO: 109153 - DNA, 22 bp, Artificial Sequence
  Synthetic oligonucleotide; TTC chr11 5378312 5378333 5378329 5378334 +
aagatggattaaagacttaaac

SEQ ID NO: 109154 - DNA, 22 bp, Artificial Sequence
  Synthetic oligonucleotide; TTA chr11 5378323 5378344 5378340 5378345 +
aagacttaaacattagacctaa

SEQ ID NO: 109155 - DNA, 22 bp, Artificial Sequence
  Synthetic oligonucleotide; CTT chr11 5378330 5378351 5378347 5378352 +
aaacattagacctaaaaccata

SEQ ID NO: 109156 - DNA, 22 bp, Artificial Sequence
  Synthetic oligonucleotide; TTA chr11 5378331 5378352 5378348 5378353 +
aacattagacctaaaaccataa

SEQ ID NO: 109157 - DNA, 22 bp, Artificial Sequence
  Synthetic oligonucleotide; TTA chr11 5378338 5378359 5378355 5378360 +
gacctaaaaccataaaaaccct

SEQ ID NO: 109158 - DNA, 22 bp, Artificial Sequence
  Synthetic oligonucleotide; CTA chr11 5378344 5378365 5378361 5378366 +
aaaccataaaaaccctagaaga

SEQ ID NO: 109159 - DNA, 22 bp, Artificial Sequence
  Synthetic oligonucleotide; CTA chr11 5378361 5378382 5378378 5378383 +
gaagaaaacgcaggcattacca

SEQ ID NO: 109160 - DNA, 22 bp, Artificial Sequence
  Synthetic oligonucleotide; TTA chr11 5378380 5378401 5378397 5378402 +
ccattcaggacataggcatggg

SEQ ID NO: 109161 - DNA, 22 bp, Artificial Sequence
  Synthetic oligonucleotide; TTC chr11 5378386 5378407 5378403 5378408 +
aggacataggcatgggcaagga

SEQ ID NO: 109162 - DNA, 22 bp, Artificial Sequence
  Synthetic oligonucleotide; CTT chr11 5378411 5378432 5378428 5378433 +
catgtctaaaacaccaaaagcg

SEQ ID NO: 109163 - DNA, 22 bp, Artificial Sequence
  Synthetic oligonucleotide; TTC chr11 5378412 5378433 5378429 5378434 +
atgtctaaaacaccaaaagcga

SEQ ID NO: 109164 - DNA, 22 bp, Artificial Sequence
  Synthetic oligonucleotide; CTA chr11 5378419 5378440 5378436 5378441 +
aaacaccaaaagcgatggcaac

SEQ ID NO: 109165 - DNA, 22 bp, Artificial Sequence
  Synthetic oligonucleotide; TTC chr11 5378455 5378476 5378472 5378477 +
actaatgggatctaatgaaact

SEQ ID NO: 109166 - DNA, 22 bp, Artificial Sequence
  Synthetic oligonucleotide; CTA chr11 5378459 5378480 5378476 5378481 +
atgggatctaatgaaactaaag

SEQ ID NO: 109167 - DNA, 22 bp, Artificial Sequence
  Synthetic oligonucleotide; CTA chr11 5378469 5378490 5378486 5378491 +
atgaaactaaagagcttctgca

SEQ ID NO: 109168 - DNA, 22 bp, Artificial Sequence
  Synthetic oligonucleotide; CTA chr11 5378478 5378499 5378495 5378500 +
aagagcttctgcacagctaaag

SEQ ID NO: 109169 - DNA, 22 bp, Artificial Sequence
  Synthetic oligonucleotide; CTT chr11 5378486 5378507 5378503 5378508 +
ctgcacagctaaagaaactacc

SEQ ID NO: 109170 - DNA, 22 bp, Artificial Sequence
  Synthetic oligonucleotide; TTC chr11 5378487 5378508 5378504 5378509 +
tgcacagctaaagaaactacca

SEQ ID NO: 109171 - DNA, 22 bp, Artificial Sequence
  Synthetic oligonucleotide; CTG chr11 5378489 5378510 5378506 5378511 +
cacagctaaagaaactaccatc

SEQ ID NO: 109172 - DNA, 22 bp, Artificial Sequence
  Synthetic oligonucleotide; CTA chr11 5378497 5378518 5378514 5378519 +
aagaaactaccatcagagtgaa

SEQ ID NO: 109173 - DNA, 22 bp, Artificial Sequence
  Synthetic oligonucleotide; CTA chr11 5378506 5378527 5378523 5378528 +
ccatcagagtgaacaggcaacc

SEQ ID NO: 109174 - DNA, 22 bp, Artificial Sequence
  Synthetic oligonucleotide; CTA chr11 5378530 5378551 5378547 5378552 +
cacaatgggagaaaattttcac

SEQ ID NO: 109175 - DNA, 22 bp, Artificial Sequence
  Synthetic oligonucleotide; TTT chr11 5378548 5378569 5378565 5378570 +
tcacaacctactcatctgacaa

SEQ ID NO: 109176 - DNA, 22 bp, Artificial Sequence
  Synthetic oligonucleotide; TTT chr11 5378549 5378570 5378566 5378571 +
cacaacctactcatctgacaaa

SEQ ID NO: 109177 - DNA, 22 bp, Artificial Sequence
  Synthetic oligonucleotide; TTC chr11 5378550 5378571 5378567 5378572 +
acaacctactcatctgacaaag

SEQ ID NO: 109178 - DNA, 22 bp, Artificial Sequence
  Synthetic oligonucleotide; CTA chr11 5378558 5378579 5378575 5378580 +
ctcatctgacaaagggctaata

SEQ ID NO: 109179 - DNA, 22 bp, Artificial Sequence
  Synthetic oligonucleotide; CTC chr11 5378561 5378582 5378578 5378583 +
atctgacaaagggctaatatcc

SEQ ID NO: 109180 - DNA, 22 bp, Artificial Sequence
  Synthetic oligonucleotide; CTG chr11 5378566 5378587 5378583 5378588 +
acaaagggctaatatccagaat

SEQ ID NO: 109181 - DNA, 22 bp, Artificial Sequence
  Synthetic oligonucleotide; CTA chr11 5378577 5378598 5378594 5378599 +
atatccagaatctataatgaac

SEQ ID NO: 109182 - DNA, 22 bp, Artificial Sequence
  Synthetic oligonucleotide; CTA chr11 5378591 5378612 5378608 5378613 +
taatgaactcaaacaaatttac

SEQ ID NO: 109183 - DNA, 22 bp, Artificial Sequence
  Synthetic oligonucleotide; CTC chr11 5378601 5378622 5378618 5378623 +
aaacaaatttacaagaaaaaaa

SEQ ID NO: 109184 - DNA, 22 bp, Artificial Sequence
  Synthetic oligonucleotide; TTT chr11 5378611 5378632 5378628 5378633 +
acaagaaaaaaacaaacagccc

SEQ ID NO: 109185 - DNA, 22 bp, Artificial Sequence
  Synthetic oligonucleotide; TTA chr11 5378612 5378633 5378629 5378634 +
caagaaaaaaacaaacagcccc

SEQ ID NO: 109186 - DNA, 22 bp, Artificial Sequence
  Synthetic oligonucleotide; CTT chr11 5378669 5378690 5378686 5378691 +
ctcaaaagaaaacatttatgca

SEQ ID NO: 109187 - DNA, 22 bp, Artificial Sequence
  Synthetic oligonucleotide; TTC chr11 5378670 5378691 5378687 5378692 +
tcaaaagaaaacatttatgcaa

SEQ ID NO: 109188 - DNA, 22 bp, Artificial Sequence
  Synthetic oligonucleotide; CTC chr11 5378672 5378693 5378689 5378694 +
aaaagaaaacatttatgcaacc

SEQ ID NO: 109189 - DNA, 22 bp, Artificial Sequence
  Synthetic oligonucleotide; TTT chr11 5378686 5378707 5378703 5378708 +
atgcaaccaaaagacacatgaa

SEQ ID NO: 109190 - DNA, 22 bp, Artificial Sequence
  Synthetic oligonucleotide; TTA chr11 5378687 5378708 5378704 5378709 +
tgcaaccaaaagacacatgaaa

SEQ ID NO: 109191 - DNA, 22 bp, Artificial Sequence
  Synthetic oligonucleotide; CTC chr11 5378717 5378738 5378734 5378739 +
atcatcactggccatcagagaa

SEQ ID NO: 109192 - DNA, 22 bp, Artificial Sequence
  Synthetic oligonucleotide; CTG chr11 5378727 5378748 5378744 5378749 +
gccatcagagaaatgcaaatca

SEQ ID NO: 109193 - DNA, 22 bp, Artificial Sequence
  Synthetic oligonucleotide; CTC chr11 5378772 5378793 5378789 5378794 +
ataccagttagaatggcaatca

SEQ ID NO: 109194 - DNA, 22 bp, Artificial Sequence
  Synthetic oligonucleotide; TTA chr11 5378782 5378803 5378799 5378804 +
gaatggcaatcattaaaaagtc

SEQ ID NO: 109195 - DNA, 22 bp, Artificial Sequence
  Synthetic oligonucleotide; TTA chr11 5378797 5378818 5378814 5378819 +
aaaagtcaggaaacaacaggtg

SEQ ID NO: 109196 - DNA, 22 bp, Artificial Sequence
  Synthetic oligonucleotide; CTG chr11 5378822 5378843 5378839 5378844 +
gagaggatgtggagaaatagga

SEQ ID NO: 109197 - DNA, 22 bp, Artificial Sequence
  Synthetic oligonucleotide; CTT chr11 5378850 5378871 5378867 5378872 +
ttacactcttggtgggactgta

SEQ ID NO: 109198 - DNA, 22 bp, Artificial Sequence
  Synthetic oligonucleotide; TTT chr11 5378851 5378872 5378868 5378873 +
tacactcttggtgggactgtaa

SEQ ID NO: 109199 - DNA, 22 bp, Artificial Sequence
  Synthetic oligonucleotide; TTT chr11 5378852 5378873 5378869 5378874 +
acactcttggtgggactgtaaa

SEQ ID NO: 109200 - DNA, 22 bp, Artificial Sequence
  Synthetic oligonucleotide; TTA chr11 5378853 5378874 5378870 5378875 +
cactcttggtgggactgtaaac

SEQ ID NO: 109201 - DNA, 22 bp, Artificial Sequence
  Synthetic oligonucleotide; CTC chr11 5378858 5378879 5378875 5378880 +
ttggtgggactgtaaactagtt

SEQ ID NO: 109202 - DNA, 22 bp, Artificial Sequence
  Synthetic oligonucleotide; CTT chr11 5378860 5378881 5378877 5378882 +
ggtgggactgtaaactagttca

SEQ ID NO: 109203 - DNA, 22 bp, Artificial Sequence
  Synthetic oligonucleotide; TTG chr11 5378861 5378882 5378878 5378883 +
gtgggactgtaaactagttcaa

SEQ ID NO: 109204 - DNA, 22 bp, Artificial Sequence
  Synthetic oligonucleotide; CTG chr11 5378870 5378891 5378887 5378892 +
taaactagttcaaccattgtgg

SEQ ID NO: 109205 - DNA, 22 bp, Artificial Sequence
  Synthetic oligonucleotide; CTA chr11 5378877 5378898 5378894 5378899 +
gttcaaccattgtggaagtcag

SEQ ID NO: 109206 - DNA, 22 bp, Artificial Sequence
  Synthetic oligonucleotide; TTC chr11 5378881 5378902 5378898 5378903 +
aaccattgtggaagtcagtgtg

SEQ ID NO: 109207 - DNA, 22 bp, Artificial Sequence
  Synthetic oligonucleotide; TTG chr11 5378889 5378910 5378906 5378911 +
tggaagtcagtgtggcgattcc

SEQ ID NO: 109208 - DNA, 22 bp, Artificial Sequence
  Synthetic oligonucleotide; TTC chr11 5378910 5378931 5378927 5378932 +
ctcagggatctagaactagaaa

SEQ ID NO: 109209 - DNA, 22 bp, Artificial Sequence
  Synthetic oligonucleotide; CTC chr11 5378913 5378934 5378930 5378935 +
agggatctagaactagaaatac

SEQ ID NO: 109210 - DNA, 22 bp, Artificial Sequence
  Synthetic oligonucleotide; CTA chr11 5378922 5378943 5378939 5378944 +
gaactagaaataccatttgacc

SEQ ID NO: 109211 - DNA, 22 bp, Artificial Sequence
  Synthetic oligonucleotide; CTA chr11 5378928 5378949 5378945 5378950 +
gaaataccatttgacccagcca

SEQ ID NO: 109212 - DNA, 22 bp, Artificial Sequence
  Synthetic oligonucleotide; TTT chr11 5378940 5378961 5378957 5378962 +
gacccagccatcccattactgg

SEQ ID NO: 109213 - DNA, 22 bp, Artificial Sequence
  Synthetic oligonucleotide; TTG chr11 5378941 5378962 5378958 5378963 +
acccagccatcccattactggg

SEQ ID NO: 109214 - DNA, 22 bp, Artificial Sequence
  Synthetic oligonucleotide; TTA chr11 5378958 5378979 5378975 5378980 +
ctgggtatatacccaaaggaat

SEQ ID NO: 109215 - DNA, 22 bp, Artificial Sequence
  Synthetic oligonucleotide; CTG chr11 5378961 5378982 5378978 5378983 +
ggtatatacccaaaggaatata

SEQ ID NO: 109216 - DNA, 22 bp, Artificial Sequence
  Synthetic oligonucleotide; CTG chr11 5378993 5379014 5379010 5379015 +
ctataaagacacatgcacacgt

SEQ ID NO: 109217 - DNA, 22 bp, Artificial Sequence
  Synthetic oligonucleotide; CTA chr11 5378996 5379017 5379013 5379018 +
taaagacacatgcacacgtatg

SEQ ID NO: 109218 - DNA, 22 bp, Artificial Sequence
  Synthetic oligonucleotide; TTT chr11 5379021 5379042 5379038 5379043 +
attgcggtactattcacaatag

SEQ ID NO: 109219 - DNA, 22 bp, Artificial Sequence
  Synthetic oligonucleotide; TTA chr11 5379022 5379043 5379039 5379044 +
ttgcggtactattcacaatagc

SEQ ID NO: 109220 - DNA, 22 bp, Artificial Sequence
  Synthetic oligonucleotide; TTG chr11 5379025 5379046 5379042 5379047 +
cggtactattcacaatagcaaa

SEQ ID NO: 109221 - DNA, 22 bp, Artificial Sequence
  Synthetic oligonucleotide; CTA chr11 5379033 5379054 5379050 5379055 +
ttcacaatagcaaagacttgga

SEQ ID NO: 109222 - DNA, 22 bp, Artificial Sequence
  Synthetic oligonucleotide; TTC chr11 5379036 5379057 5379053 5379058 +
acaatagcaaagacttggaacc

SEQ ID NO: 109223 - DNA, 22 bp, Artificial Sequence
  Synthetic oligonucleotide; CTT chr11 5379052 5379073 5379069 5379074 +
ggaaccaacccaaatgtccaac

SEQ ID NO: 109224 - DNA, 22 bp, Artificial Sequence
  Synthetic oligonucleotide; TTG chr11 5379053 5379074 5379070 5379075 +
gaaccaacccaaatgtccaaca

SEQ ID NO: 109225 - DNA, 22 bp, Artificial Sequence
  Synthetic oligonucleotide; CTG chr11 5379086 5379107 5379103 5379108 +
gattaagaaaatgtggcacata

SEQ ID NO: 109226 - DNA, 22 bp, Artificial Sequence
  Synthetic oligonucleotide; TTA chr11 5379091 5379112 5379108 5379113 +
agaaaatgtggcacatatacac

SEQ ID NO: 109227 - DNA, 22 bp, Artificial Sequence
  Synthetic oligonucleotide; CTA chr11 5379125 5379146 5379142 5379147 +
tgcagccataaaaatgatgagt

SEQ ID NO: 109228 - DNA, 22 bp, Artificial Sequence
  Synthetic oligonucleotide; TTC chr11 5379149 5379170 5379166 5379171 +
atgtcctttgtagggacatgga

SEQ ID NO: 109229 - DNA, 22 bp, Artificial Sequence
  Synthetic oligonucleotide; CTT chr11 5379157 5379178 5379174 5379179 +
tgtagggacatggatgaaattg

SEQ ID NO: 109230 - DNA, 22 bp, Artificial Sequence
  Synthetic oligonucleotide; TTT chr11 5379158 5379179 5379175 5379180 +
gtagggacatggatgaaattgg

SEQ ID NO: 109231 - DNA, 22 bp, Artificial Sequence
  Synthetic oligonucleotide; TTG chr11 5379159 5379180 5379176 5379181 +
tagggacatggatgaaattgga

SEQ ID NO: 109232 - DNA, 22 bp, Artificial Sequence
  Synthetic oligonucleotide; TTG chr11 5379179 5379200 5379196 5379201 +
gaaatcatcattctcagtaaac

SEQ ID NO: 109233 - DNA, 22 bp, Artificial Sequence
  Synthetic oligonucleotide; TTC chr11 5379192 5379213 5379209 5379214 +
tcagtaaactatcgcaaggaca

SEQ ID NO: 109234 - DNA, 22 bp, Artificial Sequence
  Synthetic oligonucleotide; CTC chr11 5379194 5379215 5379211 5379216 +
agtaaactatcgcaaggacaaa

SEQ ID NO: 109235 - DNA, 22 bp, Artificial Sequence
  Synthetic oligonucleotide; CTA chr11 5379203 5379224 5379220 5379225 +
tcgcaaggacaaaaaaccaaac

SEQ ID NO: 109236 - DNA, 22 bp, Artificial Sequence
  Synthetic oligonucleotide; TTC chr11 5379236 5379257 5379253 5379258 +
tcactcatagatgggaactgaa

SEQ ID NO: 109237 - DNA, 22 bp, Artificial Sequence
  Synthetic oligonucleotide; CTC chr11 5379238 5379259 5379255 5379260 +
actcatagatgggaactgaaca

SEQ ID NO: 109238 - DNA, 22 bp, Artificial Sequence
  Synthetic oligonucleotide; CTC chr11 5379242 5379263 5379259 5379264 +
atagatgggaactgaacaatga

SEQ ID NO: 109239 - DNA, 22 bp, Artificial Sequence
  Synthetic oligonucleotide; CTG chr11 5379256 5379277 5379273 5379278 +
aacaatgagaacacatggacac

SEQ ID NO: 109240 - DNA, 22 bp, Artificial Sequence
  Synthetic oligonucleotide; CTC chr11 5379299 5379320 5379316 5379321 +
tggggactgttgtggggtgggg

SEQ ID NO: 109241 - DNA, 22 bp, Artificial Sequence
  Synthetic oligonucleotide; CTG chr11 5379301 5379322 5379318 5379323 +
gggactgttgtggggtgggggt

SEQ ID NO: 109242 - DNA, 22 bp, Artificial Sequence
  Synthetic oligonucleotide; CTG chr11 5379308 5379329 5379325 5379330 +
ttgtggggtgggggtgcaggga

SEQ ID NO: 109243 - DNA, 22 bp, Artificial Sequence
  Synthetic oligonucleotide; TTG chr11 5379311 5379332 5379328 5379333 +
tggggtgggggtgcagggaggg

SEQ ID NO: 109244 - DNA, 22 bp, Artificial Sequence
  Synthetic oligonucleotide; TTA chr11 5379342 5379363 5379359 5379364 +
ggagatatacctaatgctaaat

SEQ ID NO: 109245 - DNA, 22 bp, Artificial Sequence
  Synthetic oligonucleotide; CTA chr11 5379355 5379376 5379372 5379377 +
atgctaaattacgagttaatgg

SEQ ID NO: 109246 - DNA, 22 bp, Artificial Sequence
  Synthetic oligonucleotide; CTA chr11 5379361 5379382 5379378 5379383 +
aattacgagttaatgggtgcag

SEQ ID NO: 109247 - DNA, 22 bp, Artificial Sequence
  Synthetic oligonucleotide; TTA chr11 5379366 5379387 5379383 5379388 +
cgagttaatgggtgcagcacac

SEQ ID NO: 109248 - DNA, 22 bp, Artificial Sequence
  Synthetic oligonucleotide; TTA chr11 5379373 5379394 5379390 5379395 +
atgggtgcagcacaccaacatg

SEQ ID NO: 109249 - DNA, 22 bp, Artificial Sequence
  Synthetic oligonucleotide; CTA chr11 5379418 5379439 5379435 5379440 +
accggcacattatgcacatgta

SEQ ID NO: 109250 - DNA, 22 bp, Artificial Sequence
  Synthetic oligonucleotide; TTA chr11 5379430 5379451 5379447 5379452 +
tgcacatgtaccctaaatctta

SEQ ID NO: 109251 - DNA, 22 bp, Artificial Sequence
  Synthetic oligonucleotide; CTA chr11 5379445 5379466 5379462 5379467 +
aatcttaaagtataataataat

SEQ ID NO: 109252 - DNA, 22 bp, Artificial Sequence
  Synthetic oligonucleotide; CTT chr11 5379451 5379472 5379468 5379473 +
aaagtataataataataataaa

SEQ ID NO: 109253 - DNA, 22 bp, Artificial Sequence
  Synthetic oligonucleotide; TTA chr11 5379452 5379473 5379469 5379474 +
aagtataataataataataaat

SEQ ID NO: 109254 - DNA, 22 bp, Artificial Sequence
  Synthetic oligonucleotide; TTC chr11 5379505 5379526 5379522 5379527 +
cagtttattttttcaggtttcc

SEQ ID NO: 109255 - DNA, 22 bp, Artificial Sequence
  Synthetic oligonucleotide; TTT chr11 5379511 5379532 5379528 5379533 +
attttttcaggtttccgttgtt

SEQ ID NO: 109256 - DNA, 22 bp, Artificial Sequence
  Synthetic oligonucleotide; TTA chr11 5379512 5379533 5379529 5379534 +
ttttttcaggtttccgttgttt

SEQ ID NO: 109257 - DNA, 22 bp, Artificial Sequence
  Synthetic oligonucleotide; TTT chr11 5379515 5379536 5379532 5379537 +
tttcaggtttccgttgtttcct

SEQ ID NO: 109258 - DNA, 22 bp, Artificial Sequence
  Synthetic oligonucleotide; TTT chr11 5379516 5379537 5379533 5379538 +
ttcaggtttccgttgtttcctc

SEQ ID NO: 109259 - DNA, 22 bp, Artificial Sequence
  Synthetic oligonucleotide; TTT chr11 5379517 5379538 5379534 5379539 +
tcaggtttccgttgtttcctct

SEQ ID NO: 109260 - DNA, 22 bp, Artificial Sequence
  Synthetic oligonucleotide; TTT chr11 5379518 5379539 5379535 5379540 +
caggtttccgttgtttcctcta

SEQ ID NO: 109261 - DNA, 22 bp, Artificial Sequence
  Synthetic oligonucleotide; TTC chr11 5379519 5379540 5379536 5379541 +
aggtttccgttgtttcctctaa

SEQ ID NO: 109262 - DNA, 22 bp, Artificial Sequence
  Synthetic oligonucleotide; TTT chr11 5379525 5379546 5379542 5379547 +
ccgttgtttcctctaataattt

SEQ ID NO: 109263 - DNA, 22 bp, Artificial Sequence
  Synthetic oligonucleotide; TTC chr11 5379526 5379547 5379543 5379548 +
cgttgtttcctctaataatttt

SEQ ID NO: 109264 - DNA, 22 bp, Artificial Sequence
  Synthetic oligonucleotide; TTG chr11 5379531 5379552 5379548 5379553 +
tttcctctaataattttcttgt

SEQ ID NO: 109265 - DNA, 22 bp, Artificial Sequence
  Synthetic oligonucleotide; TTT chr11 5379534 5379555 5379551 5379556 +
cctctaataattttcttgtatg

SEQ ID NO: 109266 - DNA, 22 bp, Artificial Sequence
  Synthetic oligonucleotide; TTC chr11 5379535 5379556 5379552 5379557 +
ctctaataattttcttgtatgc

SEQ ID NO: 109267 - DNA, 22 bp, Artificial Sequence
  Synthetic oligonucleotide; CTC chr11 5379538 5379559 5379555 5379560 +
taataattttcttgtatgcaat

SEQ ID NO: 109268 - DNA, 22 bp, Artificial Sequence
  Synthetic oligonucleotide; CTA chr11 5379540 5379561 5379557 5379562 +
ataattttcttgtatgcaatgt

SEQ ID NO: 109269 - DNA, 22 bp, Artificial Sequence
  Synthetic oligonucleotide; TTT chr11 5379547 5379568 5379564 5379569 +
tcttgtatgcaatgtgtctttt

SEQ ID NO: 109270 - DNA, 22 bp, Artificial Sequence
  Synthetic oligonucleotide; TTT chr11 5379548 5379569 5379565 5379570 +
cttgtatgcaatgtgtcttttt

SEQ ID NO: 109271 - DNA, 22 bp, Artificial Sequence
  Synthetic oligonucleotide; TTC chr11 5379549 5379570 5379566 5379571 +
ttgtatgcaatgtgtctttttc

SEQ ID NO: 109272 - DNA, 22 bp, Artificial Sequence
  Synthetic oligonucleotide; CTT chr11 5379551 5379572 5379568 5379573 +
gtatgcaatgtgtctttttcta

SEQ ID NO: 109273 - DNA, 22 bp, Artificial Sequence
  Synthetic oligonucleotide; TTG chr11 5379552 5379573 5379569 5379574 +
tatgcaatgtgtctttttctat

SEQ ID NO: 109274 - DNA, 22 bp, Artificial Sequence
  Synthetic oligonucleotide; CTT chr11 5379567 5379588 5379584 5379589 +
tttctatgtctgcttttaagat

SEQ ID NO: 109275 - DNA, 22 bp, Artificial Sequence
  Synthetic oligonucleotide; TTT chr11 5379568 5379589 5379585 5379590 +
ttctatgtctgcttttaagatt

SEQ ID NO: 109276 - DNA, 22 bp, Artificial Sequence
  Synthetic oligonucleotide; TTT chr11 5379569 5379590 5379586 5379591 +
tctatgtctgcttttaagattg

SEQ ID NO: 109277 - DNA, 22 bp, Artificial Sequence
  Synthetic oligonucleotide; TTT chr11 5379570 5379591 5379587 5379592 +
ctatgtctgcttttaagattgg

SEQ ID NO: 109278 - DNA, 22 bp, Artificial Sequence
  Synthetic oligonucleotide; TTC chr11 5379571 5379592 5379588 5379593 +
tatgtctgcttttaagattggc

SEQ ID NO: 109279 - DNA, 22 bp, Artificial Sequence
  Synthetic oligonucleotide; CTA chr11 5379573 5379594 5379590 5379595 +
tgtctgcttttaagattggcat

SEQ ID NO: 109280 - DNA, 22 bp, Artificial Sequence
  Synthetic oligonucleotide; CTG chr11 5379579 5379600 5379596 5379601 +
cttttaagattggcatacattt

SEQ ID NO: 109281 - DNA, 22 bp, Artificial Sequence
  Synthetic oligonucleotide; CTT chr11 5379582 5379603 5379599 5379604 +
ttaagattggcatacatttgtt

SEQ ID NO: 109282 - DNA, 22 bp, Artificial Sequence
  Synthetic oligonucleotide; TTT chr11 5379583 5379604 5379600 5379605 +
taagattggcatacatttgttg

SEQ ID NO: 109283 - DNA, 22 bp, Artificial Sequence
  Synthetic oligonucleotide; TTT chr11 5379584 5379605 5379601 5379606 +
aagattggcatacatttgttgt

SEQ ID NO: 109284 - DNA, 22 bp, Artificial Sequence
  Synthetic oligonucleotide; TTA chr11 5379585 5379606 5379602 5379607 +
agattggcatacatttgttgtt

SEQ ID NO: 109285 - DNA, 22 bp, Artificial Sequence
  Synthetic oligonucleotide; TTG chr11 5379591 5379612 5379608 5379613 +
gcatacatttgttgtttatgcc

SEQ ID NO: 109286 - DNA, 22 bp, Artificial Sequence
  Synthetic oligonucleotide; TTT chr11 5379601 5379622 5379618 5379623 +
gttgtttatgccatttgtaaga

SEQ ID NO: 109287 - DNA, 22 bp, Artificial Sequence
  Synthetic oligonucleotide; TTG chr11 5379602 5379623 5379619 5379624 +
ttgtttatgccatttgtaagat

SEQ ID NO: 109288 - DNA, 22 bp, Artificial Sequence
  Synthetic oligonucleotide; TTG chr11 5379605 5379626 5379622 5379627 +
tttatgccatttgtaagatatg

SEQ ID NO: 109289 - DNA, 22 bp, Artificial Sequence
  Synthetic oligonucleotide; TTT chr11 5379608 5379629 5379625 5379630 +
atgccatttgtaagatatgcat

SEQ ID NO: 109290 - DNA, 22 bp, Artificial Sequence
  Synthetic oligonucleotide; TTA chr11 5379609 5379630 5379626 5379631 +
tgccatttgtaagatatgcatt

SEQ ID NO: 109291 - DNA, 22 bp, Artificial Sequence
  Synthetic oligonucleotide; TTT chr11 5379617 5379638 5379634 5379639 +
gtaagatatgcatttagttgtg

SEQ ID NO: 109292 - DNA, 22 bp, Artificial Sequence
  Synthetic oligonucleotide; TTG chr11 5379618 5379639 5379635 5379640 +
taagatatgcatttagttgtgt

SEQ ID NO: 109293 - DNA, 22 bp, Artificial Sequence
  Synthetic oligonucleotide; TTT chr11 5379632 5379653 5379649 5379654 +
agttgtgttttattttttaatt

SEQ ID NO: 109294 - DNA, 22 bp, Artificial Sequence
  Synthetic oligonucleotide; TTA chr11 5379633 5379654 5379650 5379655 +
gttgtgttttattttttaattg

SEQ ID NO: 109295 - DNA, 22 bp, Artificial Sequence
  Synthetic oligonucleotide; TTG chr11 5379637 5379658 5379654 5379659 +
tgttttattttttaattgacat

SEQ ID NO: 109296 - DNA, 22 bp, Artificial Sequence
  Synthetic oligonucleotide; TTT chr11 5379642 5379663 5379659 5379664 +
tattttttaattgacattgctc

SEQ ID NO: 109297 - DNA, 22 bp, Artificial Sequence
  Synthetic oligonucleotide; TTT chr11 5379643 5379664 5379660 5379665 +
attttttaattgacattgctca

SEQ ID NO: 109298 - DNA, 22 bp, Artificial Sequence
  Synthetic oligonucleotide; TTA chr11 5379644 5379665 5379661 5379666 +
ttttttaattgacattgctcaa

SEQ ID NO: 109299 - DNA, 22 bp, Artificial Sequence
  Synthetic oligonucleotide; TTT chr11 5379647 5379668 5379664 5379669 +
tttaattgacattgctcaaggt

SEQ ID NO: 109300 - DNA, 22 bp, Artificial Sequence
  Synthetic oligonucleotide; TTT chr11 5379648 5379669 5379665 5379670 +
ttaattgacattgctcaaggtt

SEQ ID NO: 109301 - DNA, 22 bp, Artificial Sequence
  Synthetic oligonucleotide; TTT chr11 5379649 5379670 5379666 5379671 +
taattgacattgctcaaggtta

SEQ ID NO: 109302 - DNA, 22 bp, Artificial Sequence
  Synthetic oligonucleotide; TTT chr11 5379650 5379671 5379667 5379672 +
aattgacattgctcaaggttag

SEQ ID NO: 109303 - DNA, 22 bp, Artificial Sequence
  Synthetic oligonucleotide; TTA chr11 5379651 5379672 5379668 5379673 +
attgacattgctcaaggttagc

SEQ ID NO: 109304 - DNA, 22 bp, Artificial Sequence
  Synthetic oligonucleotide; TTG chr11 5379655 5379676 5379672 5379677 +
acattgctcaaggttagctaaa

SEQ ID NO: 109305 - DNA, 22 bp, Artificial Sequence
  Synthetic oligonucleotide; TTG chr11 5379661 5379682 5379678 5379683 +
ctcaaggttagctaaagatatg

SEQ ID NO: 109306 - DNA, 22 bp, Artificial Sequence
  Synthetic oligonucleotide; CTC chr11 5379664 5379685 5379681 5379686 +
aaggttagctaaagatatgaat

SEQ ID NO: 109307 - DNA, 22 bp, Artificial Sequence
  Synthetic oligonucleotide; TTA chr11 5379671 5379692 5379688 5379693 +
gctaaagatatgaattaataga

SEQ ID NO: 109308 - DNA, 22 bp, Artificial Sequence
  Synthetic oligonucleotide; CTA chr11 5379675 5379696 5379692 5379697 +
aagatatgaattaatagatttt

SEQ ID NO: 109309 - DNA, 22 bp, Artificial Sequence
  Synthetic oligonucleotide; TTA chr11 5379688 5379709 5379705 5379710 +
atagattttatgtccagatgtt

SEQ ID NO: 109310 - DNA, 22 bp, Artificial Sequence
  Synthetic oligonucleotide; TTT chr11 5379696 5379717 5379713 5379718 +
tatgtccagatgttgaaacatt

SEQ ID NO: 109311 - DNA, 22 bp, Artificial Sequence
  Synthetic oligonucleotide; TTT chr11 5379697 5379718 5379714 5379719 +
atgtccagatgttgaaacattc

SEQ ID NO: 109312 - DNA, 22 bp, Artificial Sequence
  Synthetic oligonucleotide; TTA chr11 5379698 5379719 5379715 5379720 +
tgtccagatgttgaaacattca

SEQ ID NO: 109313 - DNA, 22 bp, Artificial Sequence
  Synthetic oligonucleotide; TTG chr11 5379711 5379732 5379728 5379733 +
aaacattcagtcaataattcct

SEQ ID NO: 109314 - DNA, 22 bp, Artificial Sequence
  Synthetic oligonucleotide; TTC chr11 5379719 5379740 5379736 5379741 +
agtcaataattcctcaaaaaac

SEQ ID NO: 109315 - DNA, 22 bp, Artificial Sequence
  Synthetic oligonucleotide; TTC chr11 5379731 5379752 5379748 5379753 +
ctcaaaaaacgtttaatccatt

SEQ ID NO: 109316 - DNA, 22 bp, Artificial Sequence
  Synthetic oligonucleotide; CTC chr11 5379734 5379755 5379751 5379756 +
aaaaaacgtttaatccattttt

SEQ ID NO: 109317 - DNA, 22 bp, Artificial Sequence
  Synthetic oligonucleotide; TTT chr11 5379745 5379766 5379762 5379767 +
aatccattttttgtttcctttt

SEQ ID NO: 109318 - DNA, 22 bp, Artificial Sequence
  Synthetic oligonucleotide; TTA chr11 5379746 5379767 5379763 5379768 +
atccattttttgtttcctttta

SEQ ID NO: 109319 - DNA, 22 bp, Artificial Sequence
  Synthetic oligonucleotide; TTT chr11 5379754 5379775 5379771 5379776 +
tttgtttccttttagaattcta

SEQ ID NO: 109320 - DNA, 22 bp, Artificial Sequence
  Synthetic oligonucleotide; TTT chr11 5379755 5379776 5379772 5379777 +
ttgtttccttttagaattctaa

SEQ ID NO: 109321 - DNA, 22 bp, Artificial Sequence
  Synthetic oligonucleotide; TTT chr11 5379756 5379777 5379773 5379778 +
tgtttccttttagaattctaat

SEQ ID NO: 109322 - DNA, 22 bp, Artificial Sequence
  Synthetic oligonucleotide; TTT chr11 5379757 5379778 5379774 5379779 +
gtttccttttagaattctaatt

SEQ ID NO: 109323 - DNA, 22 bp, Artificial Sequence
  Synthetic oligonucleotide; TTG chr11 5379758 5379779 5379775 5379780 +
tttccttttagaattctaattt

SEQ ID NO: 109324 - DNA, 22 bp, Artificial Sequence
  Synthetic oligonucleotide; TTT chr11 5379761 5379782 5379778 5379783 +
ccttttagaattctaatttcac

SEQ ID NO: 109325 - DNA, 22 bp, Artificial Sequence
  Synthetic oligonucleotide; TTC chr11 5379762 5379783 5379779 5379784 +
cttttagaattctaatttcaca

SEQ ID NO: 109326 - DNA, 22 bp, Artificial Sequence
  Synthetic oligonucleotide; CTT chr11 5379765 5379786 5379782 5379787 +
ttagaattctaatttcacatat

SEQ ID NO: 109327 - DNA, 22 bp, Artificial Sequence
  Synthetic oligonucleotide; TTT chr11 5379766 5379787 5379783 5379788 +
tagaattctaatttcacatatg

SEQ ID NO: 109328 - DNA, 22 bp, Artificial Sequence
  Synthetic oligonucleotide; TTT chr11 5379767 5379788 5379784 5379789 +
agaattctaatttcacatatgg

SEQ ID NO: 109329 - DNA, 22 bp, Artificial Sequence
  Synthetic oligonucleotide; TTA chr11 5379768 5379789 5379785 5379790 +
gaattctaatttcacatatggt

SEQ ID NO: 109330 - DNA, 22 bp, Artificial Sequence
  Synthetic oligonucleotide; TTC chr11 5379774 5379795 5379791 5379796 +
taatttcacatatggtggacag

SEQ ID NO: 109331 - DNA, 22 bp, Artificial Sequence
  Synthetic oligonucleotide; CTA chr11 5379776 5379797 5379793 5379798 +
atttcacatatggtggacagct

SEQ ID NO: 109332 - DNA, 22 bp, Artificial Sequence
  Synthetic oligonucleotide; TTT chr11 5379780 5379801 5379797 5379802 +
cacatatggtggacagcttgat

SEQ ID NO: 109333 - DNA, 22 bp, Artificial Sequence
  Synthetic oligonucleotide; TTC chr11 5379781 5379802 5379798 5379803 +
acatatggtggacagcttgata

SEQ ID NO: 109334 - DNA, 22 bp, Artificial Sequence
  Synthetic oligonucleotide; CTT chr11 5379799 5379820 5379816 5379821 +
gatactttcccatgagtctggc

SEQ ID NO: 109335 - DNA, 22 bp, Artificial Sequence
  Synthetic oligonucleotide; TTG chr11 5379800 5379821 5379817 5379822 +
atactttcccatgagtctggct

SEQ ID NO: 109336 - DNA, 22 bp, Artificial Sequence
  Synthetic oligonucleotide; CTT chr11 5379806 5379827 5379823 5379828 +
tcccatgagtctggctttctgg

SEQ ID NO: 109337 - DNA, 22 bp, Artificial Sequence
  Synthetic oligonucleotide; TTT chr11 5379807 5379828 5379824 5379829 +
cccatgagtctggctttctggg

SEQ ID NO: 109338 - DNA, 22 bp, Artificial Sequence
  Synthetic oligonucleotide; TTC chr11 5379808 5379829 5379825 5379830 +
ccatgagtctggctttctgggt

SEQ ID NO: 109339 - DNA, 22 bp, Artificial Sequence
  Synthetic oligonucleotide; CTG chr11 5379819 5379840 5379836 5379841 +
gctttctgggtttctctccctg

SEQ ID NO: 109340 - DNA, 22 bp, Artificial Sequence
  Synthetic oligonucleotide; CTT chr11 5379823 5379844 5379840 5379845 +
tctgggtttctctccctggcgt

SEQ ID NO: 109341 - DNA, 22 bp, Artificial Sequence
  Synthetic oligonucleotide; TTT chr11 5379824 5379845 5379841 5379846 +
ctgggtttctctccctggcgtc

SEQ ID NO: 109342 - DNA, 22 bp, Artificial Sequence
  Synthetic oligonucleotide; TTC chr11 5379825 5379846 5379842 5379847 +
tgggtttctctccctggcgtcc

SEQ ID NO: 109343 - DNA, 22 bp, Artificial Sequence
  Synthetic oligonucleotide; CTG chr11 5379827 5379848 5379844 5379849 +
ggtttctctccctggcgtcctc

SEQ ID NO: 109344 - DNA, 22 bp, Artificial Sequence
  Synthetic oligonucleotide; TTT chr11 5379832 5379853 5379849 5379854 +
ctctccctggcgtcctctctca

SEQ ID NO: 109345 - DNA, 22 bp, Artificial Sequence
  Synthetic oligonucleotide; TTC chr11 5379833 5379854 5379850 5379855 +
tctccctggcgtcctctctcat

SEQ ID NO: 109346 - DNA, 22 bp, Artificial Sequence
  Synthetic oligonucleotide; CTC chr11 5379835 5379856 5379852 5379857 +
tccctggcgtcctctctcatca

SEQ ID NO: 109347 - DNA, 22 bp, Artificial Sequence
  Synthetic oligonucleotide; CTC chr11 5379837 5379858 5379854 5379859 +
cctggcgtcctctctcatcatg

SEQ ID NO: 109348 - DNA, 22 bp, Artificial Sequence
  Synthetic oligonucleotide; CTG chr11 5379841 5379862 5379858 5379863 +
gcgtcctctctcatcatgtgat

SEQ ID NO: 109349 - DNA, 22 bp, Artificial Sequence
  Synthetic oligonucleotide; CTC chr11 5379849 5379870 5379866 5379871 +
tctcatcatgtgatctccttgc

SEQ ID NO: 109350 - DNA, 22 bp, Artificial Sequence
  Synthetic oligonucleotide; CTC chr11 5379851 5379872 5379868 5379873 +
tcatcatgtgatctccttgcat

SEQ ID NO: 109351 - DNA, 22 bp, Artificial Sequence
  Synthetic oligonucleotide; CTC chr11 5379853 5379874 5379870 5379875 +
atcatgtgatctccttgcatgc

SEQ ID NO: 109352 - DNA, 22 bp, Artificial Sequence
  Synthetic oligonucleotide; CTC chr11 5379866 5379887 5379883 5379888 +
cttgcatgcacttgctctttgt

SEQ ID NO: 109353 - DNA, 22 bp, Artificial Sequence
  Synthetic oligonucleotide; CTT chr11 5379869 5379890 5379886 5379891 +
gcatgcacttgctctttgtctg

SEQ ID NO: 109354 - DNA, 22 bp, Artificial Sequence
  Synthetic oligonucleotide; TTG chr11 5379870 5379891 5379887 5379892 +
catgcacttgctctttgtctgc

SEQ ID NO: 109355 - DNA, 22 bp, Artificial Sequence
  Synthetic oligonucleotide; CTT chr11 5379879 5379900 5379896 5379901 +
gctctttgtctgctttctgcca

SEQ ID NO: 109356 - DNA, 22 bp, Artificial Sequence
  Synthetic oligonucleotide; TTG chr11 5379880 5379901 5379897 5379902 +
ctctttgtctgctttctgccat

SEQ ID NO: 109357 - DNA, 22 bp, Artificial Sequence
  Synthetic oligonucleotide; CTC chr11 5379883 5379904 5379900 5379905 +
tttgtctgctttctgccatgtt

SEQ ID NO: 109358 - DNA, 22 bp, Artificial Sequence
  Synthetic oligonucleotide; CTT chr11 5379885 5379906 5379902 5379907 +
tgtctgctttctgccatgtttg

SEQ ID NO: 109359 - DNA, 22 bp, Artificial Sequence
  Synthetic oligonucleotide; TTT chr11 5379886 5379907 5379903 5379908 +
gtctgctttctgccatgtttgg

SEQ ID NO: 109360 - DNA, 22 bp, Artificial Sequence
  Synthetic oligonucleotide; TTG chr11 5379887 5379908 5379904 5379909 +
tctgctttctgccatgtttgga

SEQ ID NO: 109361 - DNA, 22 bp, Artificial Sequence
  Synthetic oligonucleotide; CTG chr11 5379891 5379912 5379908 5379913 +
ctttctgccatgtttggaacca

SEQ ID NO: 109362 - DNA, 22 bp, Artificial Sequence
  Synthetic oligonucleotide; CTT chr11 5379894 5379915 5379911 5379916 +
tctgccatgtttggaaccagca

SEQ ID NO: 109363 - DNA, 22 bp, Artificial Sequence
  Synthetic oligonucleotide; TTT chr11 5379895 5379916 5379912 5379917 +
ctgccatgtttggaaccagcat

SEQ ID NO: 109364 - DNA, 22 bp, Artificial Sequence
  Synthetic oligonucleotide; TTC chr11 5379896 5379917 5379913 5379918 +
tgccatgtttggaaccagcatg

SEQ ID NO: 109365 - DNA, 22 bp, Artificial Sequence
  Synthetic oligonucleotide; CTG chr11 5379898 5379919 5379915 5379920 +
ccatgtttggaaccagcatgag

SEQ ID NO: 109366 - DNA, 22 bp, Artificial Sequence
  Synthetic oligonucleotide; TTT chr11 5379906 5379927 5379923 5379928 +
ggaaccagcatgagacctttat

SEQ ID NO: 109367 - DNA, 22 bp, Artificial Sequence
  Synthetic oligonucleotide; TTG chr11 5379907 5379928 5379924 5379929 +
gaaccagcatgagacctttatc

SEQ ID NO: 109368 - DNA, 22 bp, Artificial Sequence
  Synthetic oligonucleotide; CTT chr11 5379925 5379946 5379942 5379947 +
tatcagatgcaaccgcccgatc

SEQ ID NO: 109369 - DNA, 22 bp, Artificial Sequence
  Synthetic oligonucleotide; TTT chr11 5379926 5379947 5379943 5379948 +
atcagatgcaaccgcccgatct

SEQ ID NO: 109370 - DNA, 22 bp, Artificial Sequence
  Synthetic oligonucleotide; TTA chr11 5379927 5379948 5379944 5379949 +
tcagatgcaaccgcccgatctt

SEQ ID NO: 109371 - DNA, 22 bp, Artificial Sequence
  Synthetic oligonucleotide; CTT chr11 5379949 5379970 5379966 5379971 +
ggacttttaagtcaccagaatc

SEQ ID NO: 109372 - DNA, 22 bp, Artificial Sequence
  Synthetic oligonucleotide; TTG chr11 5379950 5379971 5379967 5379972 +
gacttttaagtcaccagaatca

SEQ ID NO: 109373 - DNA, 22 bp, Artificial Sequence
  Synthetic oligonucleotide; CTT chr11 5379955 5379976 5379972 5379977 +
ttaagtcaccagaatcatgaac

SEQ ID NO: 109374 - DNA, 22 bp, Artificial Sequence
  Synthetic oligonucleotide; TTT chr11 5379956 5379977 5379973 5379978 +
taagtcaccagaatcatgaacc

SEQ ID NO: 109375 - DNA, 22 bp, Artificial Sequence
  Synthetic oligonucleotide; TTT chr11 5379957 5379978 5379974 5379979 +
aagtcaccagaatcatgaacca

SEQ ID NO: 109376 - DNA, 22 bp, Artificial Sequence
  Synthetic oligonucleotide; TTA chr11 5379958 5379979 5379975 5379980 +
agtcaccagaatcatgaaccaa

SEQ ID NO: 109377 - DNA, 22 bp, Artificial Sequence
  Synthetic oligonucleotide; CTT chr11 5379989 5380010 5380006 5380011 +
taaaaaaaaaaaataagctacc

SEQ ID NO: 109378 - DNA, 22 bp, Artificial Sequence
  Synthetic oligonucleotide; TTT chr11 5379990 5380011 5380007 5380012 +
aaaaaaaaaaaataagctaccc

SEQ ID NO: 109379 - DNA, 22 bp, Artificial Sequence
  Synthetic oligonucleotide; TTA chr11 5379991 5380012 5380008 5380013 +
aaaaaaaaaaataagctaccca

SEQ ID NO: 109380 - DNA, 22 bp, Artificial Sequence
  Synthetic oligonucleotide; CTA chr11 5380009 5380030 5380026 5380031 +
cccagactcaggtactctgtta

SEQ ID NO: 109381 - DNA, 22 bp, Artificial Sequence
  Synthetic oligonucleotide; CTC chr11 5380018 5380039 5380035 5380040 +
aggtactctgttatagcaaatc

SEQ ID NO: 109382 - DNA, 22 bp, Artificial Sequence
  Synthetic oligonucleotide; CTC chr11 5380026 5380047 5380043 5380048 +
tgttatagcaaatcaaaatatg

SEQ ID NO: 109383 - DNA, 22 bp, Artificial Sequence
  Synthetic oligonucleotide; CTG chr11 5380028 5380049 5380045 5380050 +
ttatagcaaatcaaaatatgca

SEQ ID NO: 109384 - DNA, 22 bp, Artificial Sequence
  Synthetic oligonucleotide; TTA chr11 5380031 5380052 5380048 5380053 +
tagcaaatcaaaatatgcaaaa

SEQ ID NO: 109385 - DNA, 22 bp, Artificial Sequence
  Synthetic oligonucleotide; CTA chr11 5380060 5380081 5380077 5380082 +
aaactttagcccaacttggagt

SEQ ID NO: 109386 - DNA, 22 bp, Artificial Sequence
  Synthetic oligonucleotide; CTT chr11 5380066 5380087 5380083 5380088 +
tagcccaacttggagtggggag

SEQ ID NO: 109387 - DNA, 22 bp, Artificial Sequence
  Synthetic oligonucleotide; TTT chr11 5380067 5380088 5380084 5380089 +
agcccaacttggagtggggaga

SEQ ID NO: 109388 - DNA, 22 bp, Artificial Sequence
  Synthetic oligonucleotide; TTA chr11 5380068 5380089 5380085 5380090 +
gcccaacttggagtggggagaa

SEQ ID NO: 109389 - DNA, 22 bp, Artificial Sequence
  Synthetic oligonucleotide; CTT chr11 5380077 5380098 5380094 5380099 +
ggagtggggagaagagatggtt

SEQ ID NO: 109390 - DNA, 22 bp, Artificial Sequence
  Synthetic oligonucleotide; TTG chr11 5380078 5380099 5380095 5380100 +
gagtggggagaagagatggttt

SEQ ID NO: 109391 - DNA, 22 bp, Artificial Sequence
  Synthetic oligonucleotide; TTT chr11 5380100 5380121 5380117 5380122 +
cccaaaaggggtctctctgaaa

SEQ ID NO: 109392 - DNA, 22 bp, Artificial Sequence
  Synthetic oligonucleotide; TTC chr11 5380101 5380122 5380118 5380123 +
ccaaaaggggtctctctgaaaa

SEQ ID NO: 109393 - DNA, 22 bp, Artificial Sequence
  Synthetic oligonucleotide; CTC chr11 5380115 5380136 5380132 5380137 +
tctgaaaagttttcacaatgaa

SEQ ID NO: 109394 - DNA, 22 bp, Artificial Sequence
  Synthetic oligonucleotide; CTC chr11 5380117 5380138 5380134 5380139 +
tgaaaagttttcacaatgaaaa

SEQ ID NO: 109395 - DNA, 22 bp, Artificial Sequence
  Synthetic oligonucleotide; CTG chr11 5380119 5380140 5380136 5380141 +
aaaagttttcacaatgaaaatg

SEQ ID NO: 109396 - DNA, 22 bp, Artificial Sequence
  Synthetic oligonucleotide; TTT chr11 5380127 5380148 5380144 5380149 +
tcacaatgaaaatgaaaatcgg

SEQ ID NO: 109397 - DNA, 22 bp, Artificial Sequence
  Synthetic oligonucleotide; TTT chr11 5380128 5380149 5380145 5380150 +
cacaatgaaaatgaaaatcggt

SEQ ID NO: 109398 - DNA, 22 bp, Artificial Sequence
  Synthetic oligonucleotide; TTC chr11 5380129 5380150 5380146 5380151 +
acaatgaaaatgaaaatcggtt

SEQ ID NO: 109399 - DNA, 22 bp, Artificial Sequence
  Synthetic oligonucleotide; TTC chr11 5380152 5380173 5380169 5380174 +
cctttcataatgactgaagaga

SEQ ID NO: 109400 - DNA, 22 bp, Artificial Sequence
  Synthetic oligonucleotide; CTT chr11 5380156 5380177 5380173 5380178 +
tcataatgactgaagagaggta

SEQ ID NO: 109401 - DNA, 22 bp, Artificial Sequence
  Synthetic oligonucleotide; TTT chr11 5380157 5380178 5380174 5380179 +
cataatgactgaagagaggtag

SEQ ID NO: 109402 - DNA, 22 bp, Artificial Sequence
  Synthetic oligonucleotide; TTC chr11 5380158 5380179 5380175 5380180 +
ataatgactgaagagaggtagg

SEQ ID NO: 109403 - DNA, 22 bp, Artificial Sequence
  Synthetic oligonucleotide; CTG chr11 5380168 5380189 5380185 5380190 +
aagagaggtaggatgttacgaa

SEQ ID NO: 109404 - DNA, 22 bp, Artificial Sequence
  Synthetic oligonucleotide; TTA chr11 5380186 5380207 5380203 5380208 +
cgaaagaaggcgtttctgaaag

SEQ ID NO: 109405 - DNA, 22 bp, Artificial Sequence
  Synthetic oligonucleotide; TTT chr11 5380201 5380222 5380218 5380223 +
ctgaaagagttgctgtgggaag

SEQ ID NO: 109406 - DNA, 22 bp, Artificial Sequence
  Synthetic oligonucleotide; TTC chr11 5380202 5380223 5380219 5380224 +
tgaaagagttgctgtgggaaga

SEQ ID NO: 109407 - DNA, 22 bp, Artificial Sequence
  Synthetic oligonucleotide; CTG chr11 5380204 5380225 5380221 5380226 +
aaagagttgctgtgggaagatg

SEQ ID NO: 109408 - DNA, 22 bp, Artificial Sequence
  Synthetic oligonucleotide; TTG chr11 5380213 5380234 5380230 5380235 +
ctgtgggaagatgtggagactt

SEQ ID NO: 109409 - DNA, 22 bp, Artificial Sequence
  Synthetic oligonucleotide; CTG chr11 5380216 5380237 5380233 5380238 +
tgggaagatgtggagacttctc

SEQ ID NO: 109410 - DNA, 22 bp, Artificial Sequence
  Synthetic oligonucleotide; CTT chr11 5380235 5380256 5380252 5380257 +
ctctgtaaaccttccagactct

SEQ ID NO: 109411 - DNA, 22 bp, Artificial Sequence
  Synthetic oligonucleotide; TTC chr11 5380236 5380257 5380253 5380258 +
tctgtaaaccttccagactctc

SEQ ID NO: 109412 - DNA, 22 bp, Artificial Sequence
  Synthetic oligonucleotide; CTC chr11 5380238 5380259 5380255 5380260 +
tgtaaaccttccagactctctg

SEQ ID NO: 109413 - DNA, 22 bp, Artificial Sequence
  Synthetic oligonucleotide; CTG chr11 5380240 5380261 5380257 5380262 +
taaaccttccagactctctgtg

SEQ ID NO: 109414 - DNA, 22 bp, Artificial Sequence
  Synthetic oligonucleotide; CTT chr11 5380248 5380269 5380265 5380270 +
ccagactctctgtgcacacaca

SEQ ID NO: 109415 - DNA, 22 bp, Artificial Sequence
  Synthetic oligonucleotide; TTC chr11 5380249 5380270 5380266 5380271 +
cagactctctgtgcacacacag

SEQ ID NO: 109416 - DNA, 22 bp, Artificial Sequence
  Synthetic oligonucleotide; CTC chr11 5380256 5380277 5380273 5380278 +
tctgtgcacacacagatgcagg

SEQ ID NO: 109417 - DNA, 22 bp, Artificial Sequence
  Synthetic oligonucleotide; CTC chr11 5380258 5380279 5380275 5380280 +
tgtgcacacacagatgcaggtg

SEQ ID NO: 109418 - DNA, 22 bp, Artificial Sequence
  Synthetic oligonucleotide; CTG chr11 5380260 5380281 5380277 5380282 +
tgcacacacagatgcaggtgtc

SEQ ID NO: 109419 - DNA, 22 bp, Artificial Sequence
  Synthetic oligonucleotide; TTG chr11 5380314 5380335 5380331 5380336 +
caacatgaaaatttcttagggg

SEQ ID NO: 109420 - DNA, 22 bp, Artificial Sequence
  Synthetic oligonucleotide; TTT chr11 5380328 5380349 5380345 5380350 +
cttaggggctgtggaccagtcc

SEQ ID NO: 109421 - DNA, 22 bp, Artificial Sequence
  Synthetic oligonucleotide; TTC chr11 5380329 5380350 5380346 5380351 +
ttaggggctgtggaccagtcca

SEQ ID NO: 109422 - DNA, 22 bp, Artificial Sequence
  Synthetic oligonucleotide; CTT chr11 5380331 5380352 5380348 5380353 +
aggggctgtggaccagtccaga

SEQ ID NO: 109423 - DNA, 22 bp, Artificial Sequence
  Synthetic oligonucleotide; TTA chr11 5380332 5380353 5380349 5380354 +
ggggctgtggaccagtccagaa

SEQ ID NO: 109424 - DNA, 22 bp, Artificial Sequence
  Synthetic oligonucleotide; CTG chr11 5380339 5380360 5380356 5380361 +
tggaccagtccagaagaccctt

SEQ ID NO: 109425 - DNA, 22 bp, Artificial Sequence
  Synthetic oligonucleotide; CTT chr11 5380361 5380382 5380378 5380383 +
ttggcaatcctaacttctgtgg

SEQ ID NO: 109426 - DNA, 22 bp, Artificial Sequence
  Synthetic oligonucleotide; TTT chr11 5380362 5380383 5380379 5380384 +
tggcaatcctaacttctgtggg

SEQ ID NO: 109427 - DNA, 22 bp, Artificial Sequence
  Synthetic oligonucleotide; TTT chr11 5380363 5380384 5380380 5380385 +
ggcaatcctaacttctgtgggt

SEQ ID NO: 109428 - DNA, 22 bp, Artificial Sequence
  Synthetic oligonucleotide; TTG chr11 5380364 5380385 5380381 5380386 +
gcaatcctaacttctgtgggtc

SEQ ID NO: 109429 - DNA, 22 bp, Artificial Sequence
  Synthetic oligonucleotide; CTA chr11 5380373 5380394 5380390 5380395 +
acttctgtgggtctctccagtc

SEQ ID NO: 109430 - DNA, 22 bp, Artificial Sequence
  Synthetic oligonucleotide; CTT chr11 5380377 5380398 5380394 5380399 +
ctgtgggtctctccagtctgaa

SEQ ID NO: 109431 - DNA, 22 bp, Artificial Sequence
  Synthetic oligonucleotide; TTC chr11 5380378 5380399 5380395 5380400 +
tgtgggtctctccagtctgaaa

SEQ ID NO: 109432 - DNA, 22 bp, Artificial Sequence
  Synthetic oligonucleotide; CTG chr11 5380380 5380401 5380397 5380402 +
tgggtctctccagtctgaaaga

SEQ ID NO: 109433 - DNA, 22 bp, Artificial Sequence
  Synthetic oligonucleotide; CTC chr11 5380388 5380409 5380405 5380410 +
tccagtctgaaagacccgcatc

SEQ ID NO: 109434 - DNA, 22 bp, Artificial Sequence
  Synthetic oligonucleotide; CTC chr11 5380390 5380411 5380407 5380412 +
cagtctgaaagacccgcatcga

SEQ ID NO: 109435 - DNA, 22 bp, Artificial Sequence
  Synthetic oligonucleotide; CTG chr11 5380397 5380418 5380414 5380419 +
aaagacccgcatcgatctcaca

SEQ ID NO: 109436 - DNA, 22 bp, Artificial Sequence
  Synthetic oligonucleotide; CTC chr11 5380416 5380437 5380433 5380438 +
acaccacaaaatggagttcttc

SEQ ID NO: 109437 - DNA, 22 bp, Artificial Sequence
  Synthetic oligonucleotide; TTC chr11 5380435 5380456 5380452 5380457 +
ttctgggaaggacttgttctaa

SEQ ID NO: 109438 - DNA, 22 bp, Artificial Sequence
  Synthetic oligonucleotide; CTT chr11 5380437 5380458 5380454 5380459 +
ctgggaaggacttgttctaaca

SEQ ID NO: 109439 - DNA, 22 bp, Artificial Sequence
  Synthetic oligonucleotide; TTC chr11 5380438 5380459 5380455 5380460 +
tgggaaggacttgttctaacag

SEQ ID NO: 109440 - DNA, 22 bp, Artificial Sequence
  Synthetic oligonucleotide; CTG chr11 5380440 5380461 5380457 5380462 +
ggaaggacttgttctaacaggc

SEQ ID NO: 109441 - DNA, 22 bp, Artificial Sequence
  Synthetic oligonucleotide; CTT chr11 5380450 5380471 5380467 5380472 +
gttctaacaggcctgagagtga

SEQ ID NO: 109442 - DNA, 22 bp, Artificial Sequence
  Synthetic oligonucleotide; TTG chr11 5380451 5380472 5380468 5380473 +
ttctaacaggcctgagagtgag

SEQ ID NO: 109443 - DNA, 22 bp, Artificial Sequence
  Synthetic oligonucleotide; TTC chr11 5380454 5380475 5380471 5380476 +
taacaggcctgagagtgaggtg

SEQ ID NO: 109444 - DNA, 22 bp, Artificial Sequence
  Synthetic oligonucleotide; CTA chr11 5380456 5380477 5380473 5380478 +
acaggcctgagagtgaggtgac

SEQ ID NO: 109445 - DNA, 22 bp, Artificial Sequence
  Synthetic oligonucleotide; CTG chr11 5380465 5380486 5380482 5380487 +
agagtgaggtgaccttgtggcc

SEQ ID NO: 109446 - DNA, 22 bp, Artificial Sequence
  Synthetic oligonucleotide; CTT chr11 5380481 5380502 5380498 5380503 +
gtggccattttctgtgacagag

SEQ ID NO: 109447 - DNA, 22 bp, Artificial Sequence
  Synthetic oligonucleotide; TTG chr11 5380482 5380503 5380499 5380504 +
tggccattttctgtgacagaga

SEQ ID NO: 109448 - DNA, 22 bp, Artificial Sequence
  Synthetic oligonucleotide; TTT chr11 5380491 5380512 5380508 5380513 +
tctgtgacagagacacctaaaa

SEQ ID NO: 109449 - DNA, 22 bp, Artificial Sequence
  Synthetic oligonucleotide; TTT chr11 5380492 5380513 5380509 5380514 +
ctgtgacagagacacctaaaaa

SEQ ID NO: 109450 - DNA, 22 bp, Artificial Sequence
  Synthetic oligonucleotide; TTC chr11 5380493 5380514 5380510 5380515 +
tgtgacagagacacctaaaaag

SEQ ID NO: 109451 - DNA, 22 bp, Artificial Sequence
  Synthetic oligonucleotide; CTG chr11 5380495 5380516 5380512 5380517 +
tgacagagacacctaaaaagag

SEQ ID NO: 109452 - DNA, 22 bp, Artificial Sequence
  Synthetic oligonucleotide; CTA chr11 5380510 5380531 5380527 5380532 +
aaaagagtctgttgtgagtctg

SEQ ID NO: 109453 - DNA, 22 bp, Artificial Sequence
  Synthetic oligonucleotide; CTG chr11 5380521 5380542 5380538 5380543 +
ttgtgagtctggagacattgag

SEQ ID NO: 109454 - DNA, 22 bp, Artificial Sequence
  Synthetic oligonucleotide; TTG chr11 5380524 5380545 5380541 5380546 +
tgagtctggagacattgagaac

SEQ ID NO: 109455 - DNA, 22 bp, Artificial Sequence
  Synthetic oligonucleotide; CTG chr11 5380532 5380553 5380549 5380554 +
gagacattgagaaccctgtgag

SEQ ID NO: 109456 - DNA, 22 bp, Artificial Sequence
  Synthetic oligonucleotide; TTG chr11 5380541 5380562 5380558 5380563 +
agaaccctgtgagtaaggattt

SEQ ID NO: 109457 - DNA, 22 bp, Artificial Sequence
  Synthetic oligonucleotide; CTG chr11 5380550 5380571 5380567 5380572 +
tgagtaaggattttatttaggt

SEQ ID NO: 109458 - DNA, 22 bp, Artificial Sequence
  Synthetic oligonucleotide; TTT chr11 5380563 5380584 5380580 5380585 +
tatttaggtctgtttctggtca

SEQ ID NO: 109459 - DNA, 22 bp, Artificial Sequence
  Synthetic oligonucleotide; TTT chr11 5380564 5380585 5380581 5380586 +
atttaggtctgtttctggtcag

SEQ ID NO: 109460 - DNA, 22 bp, Artificial Sequence
  Synthetic oligonucleotide; TTA chr11 5380565 5380586 5380582 5380587 +
tttaggtctgtttctggtcaga

SEQ ID NO: 109461 - DNA, 22 bp, Artificial Sequence
  Synthetic oligonucleotide; TTT chr11 5380568 5380589 5380585 5380590 +
aggtctgtttctggtcagagtg

SEQ ID NO: 109462 - DNA, 22 bp, Artificial Sequence
  Synthetic oligonucleotide; TTA chr11 5380569 5380590 5380586 5380591 +
ggtctgtttctggtcagagtgg

SEQ ID NO: 109463 - DNA, 22 bp, Artificial Sequence
  Synthetic oligonucleotide; CTG chr11 5380575 5380596 5380592 5380597 +
tttctggtcagagtggggattt

SEQ ID NO: 109464 - DNA, 22 bp, Artificial Sequence
  Synthetic oligonucleotide; TTT chr11 5380578 5380599 5380595 5380600 +
ctggtcagagtggggatttaag

SEQ ID NO: 109465 - DNA, 22 bp, Artificial Sequence
  Synthetic oligonucleotide; TTC chr11 5380579 5380600 5380596 5380601 +
tggtcagagtggggatttaagg

SEQ ID NO: 109466 - DNA, 22 bp, Artificial Sequence
  Synthetic oligonucleotide; CTG chr11 5380581 5380602 5380598 5380603 +
gtcagagtggggatttaaggct

SEQ ID NO: 109467 - DNA, 22 bp, Artificial Sequence
  Synthetic oligonucleotide; TTT chr11 5380597 5380618 5380614 5380619 +
aaggcttggtcaatatgattaa

SEQ ID NO: 109468 - DNA, 22 bp, Artificial Sequence
  Synthetic oligonucleotide; TTA chr11 5380598 5380619 5380615 5380620 +
aggcttggtcaatatgattaag

SEQ ID NO: 109469 - DNA, 22 bp, Artificial Sequence
  Synthetic oligonucleotide; CTT chr11 5380604 5380625 5380621 5380626 +
ggtcaatatgattaagactaaa

SEQ ID NO: 109470 - DNA, 22 bp, Artificial Sequence
  Synthetic oligonucleotide; TTG chr11 5380605 5380626 5380622 5380627 +
gtcaatatgattaagactaaag

SEQ ID NO: 109471 - DNA, 22 bp, Artificial Sequence
  Synthetic oligonucleotide; TTA chr11 5380618 5380639 5380635 5380640 +
agactaaaggccacacacatag

SEQ ID NO: 109472 - DNA, 22 bp, Artificial Sequence
  Synthetic oligonucleotide; CTA chr11 5380624 5380645 5380641 5380646 +
aaggccacacacatagatttgt

SEQ ID NO: 109473 - DNA, 22 bp, Artificial Sequence
  Synthetic oligonucleotide; TTT chr11 5380644 5380665 5380661 5380666 +
gtgtgagattaccatctgtaaa

SEQ ID NO: 109474 - DNA, 22 bp, Artificial Sequence
  Synthetic oligonucleotide; TTG chr11 5380645 5380666 5380662 5380667 +
tgtgagattaccatctgtaaaa

SEQ ID NO: 109475 - DNA, 22 bp, Artificial Sequence
  Synthetic oligonucleotide; TTA chr11 5380655 5380676 5380672 5380677 +
ccatctgtaaaaatctgaaaaa

SEQ ID NO: 109476 - DNA, 22 bp, Artificial Sequence
  Synthetic oligonucleotide; CTG chr11 5380662 5380683 5380679 5380684 +
taaaaatctgaaaaagctaaga

SEQ ID NO: 109477 - DNA, 22 bp, Artificial Sequence
  Synthetic oligonucleotide; CTG chr11 5380672 5380693 5380689 5380694 +
aaaaagctaagaaaacctatct

SEQ ID NO: 109478 - DNA, 22 bp, Artificial Sequence
  Synthetic oligonucleotide; CTA chr11 5380681 5380702 5380698 5380703 +
agaaaacctatctctctccatc

SEQ ID NO: 109479 - DNA, 22 bp, Artificial Sequence
  Synthetic oligonucleotide; CTA chr11 5380691 5380712 5380708 5380713 +
tctctctccatcaattttagtt

SEQ ID NO: 109480 - DNA, 22 bp, Artificial Sequence
  Synthetic oligonucleotide; CTC chr11 5380695 5380716 5380712 5380717 +
tctccatcaattttagttttta

SEQ ID NO: 109481 - DNA, 22 bp, Artificial Sequence
  Synthetic oligonucleotide; CTC chr11 5380697 5380718 5380714 5380719 +
tccatcaattttagtttttatg

SEQ ID NO: 109482 - DNA, 22 bp, Artificial Sequence
  Synthetic oligonucleotide; CTC chr11 5380699 5380720 5380716 5380721 +
catcaattttagtttttatgtg

SEQ ID NO: 109483 - DNA, 22 bp, Artificial Sequence
  Synthetic oligonucleotide; TTT chr11 5380708 5380729 5380725 5380730 +
tagtttttatgtgtttgtaaga

SEQ ID NO: 109484 - DNA, 22 bp, Artificial Sequence
  Synthetic oligonucleotide; TTT chr11 5380709 5380730 5380726 5380731 +
agtttttatgtgtttgtaagat

SEQ ID NO: 109485 - DNA, 22 bp, Artificial Sequence
  Synthetic oligonucleotide; TTA chr11 5380710 5380731 5380727 5380732 +
gtttttatgtgtttgtaagatg

SEQ ID NO: 109486 - DNA, 22 bp, Artificial Sequence
  Synthetic oligonucleotide; TTT chr11 5380714 5380735 5380731 5380736 +
ttatgtgtttgtaagatgtaga

SEQ ID NO: 109487 - DNA, 22 bp, Artificial Sequence
  Synthetic oligonucleotide; TTT chr11 5380715 5380736 5380732 5380737 +
tatgtgtttgtaagatgtagat

SEQ ID NO: 109488 - DNA, 22 bp, Artificial Sequence
  Synthetic oligonucleotide; TTT chr11 5380716 5380737 5380733 5380738 +
atgtgtttgtaagatgtagata

SEQ ID NO: 109489 - DNA, 22 bp, Artificial Sequence
  Synthetic oligonucleotide; TTA chr11 5380717 5380738 5380734 5380739 +
tgtgtttgtaagatgtagatat

SEQ ID NO: 109490 - DNA, 22 bp, Artificial Sequence
  Synthetic oligonucleotide; TTT chr11 5380724 5380745 5380741 5380746 +
gtaagatgtagatatgtctatt

SEQ ID NO: 109491 - DNA, 22 bp, Artificial Sequence
  Synthetic oligonucleotide; TTG chr11 5380725 5380746 5380742 5380747 +
taagatgtagatatgtctattt

SEQ ID NO: 109492 - DNA, 22 bp, Artificial Sequence
  Synthetic oligonucleotide; CTA chr11 5380744 5380765 5380761 5380766 +
ttttgtgcatgagagagaggaa

SEQ ID NO: 109493 - DNA, 22 bp, Artificial Sequence
  Synthetic oligonucleotide; TTT chr11 5380747 5380768 5380764 5380769 +
tgtgcatgagagagaggaagat

SEQ ID NO: 109494 - DNA, 22 bp, Artificial Sequence
  Synthetic oligonucleotide; TTT chr11 5380748 5380769 5380765 5380770 +
gtgcatgagagagaggaagatc

SEQ ID NO: 109495 - DNA, 22 bp, Artificial Sequence
  Synthetic oligonucleotide; TTG chr11 5380749 5380770 5380766 5380771 +
tgcatgagagagaggaagatca

SEQ ID NO: 109496 - DNA, 22 bp, Artificial Sequence
  Synthetic oligonucleotide; CTC chr11 5380776 5380797 5380793 5380798 +
aaaggaagaatgaactggttgg

SEQ ID NO: 109497 - DNA, 22 bp, Artificial Sequence
  Synthetic oligonucleotide; CTG chr11 5380793 5380814 5380810 5380815 +
gttggcagctttcagctgtgta

SEQ ID NO: 109498 - DNA, 22 bp, Artificial Sequence
  Synthetic oligonucleotide; TTG chr11 5380797 5380818 5380814 5380819 +
gcagctttcagctgtgtagtgg

SEQ ID NO: 109499 - DNA, 22 bp, Artificial Sequence
  Synthetic oligonucleotide; CTT chr11 5380804 5380825 5380821 5380826 +
tcagctgtgtagtgggtattga

SEQ ID NO: 109500 - DNA, 22 bp, Artificial Sequence
  Synthetic oligonucleotide; TTT chr11 5380805 5380826 5380822 5380827 +
cagctgtgtagtgggtattgag

SEQ ID NO: 109501 - DNA, 22 bp, Artificial Sequence
  Synthetic oligonucleotide; TTC chr11 5380806 5380827 5380823 5380828 +
agctgtgtagtgggtattgagg

SEQ ID NO: 109502 - DNA, 22 bp, Artificial Sequence
  Synthetic oligonucleotide; CTG chr11 5380811 5380832 5380828 5380833 +
tgtagtgggtattgaggacacg

SEQ ID NO: 109503 - DNA, 22 bp, Artificial Sequence
  Synthetic oligonucleotide; TTG chr11 5380825 5380846 5380842 5380847 +
aggacacgggaaggtggtgctg

SEQ ID NO: 109504 - DNA, 22 bp, Artificial Sequence
  Synthetic oligonucleotide; CTG chr11 5380847 5380868 5380864 5380869 +
gaagaaaagccacattttcttg

SEQ ID NO: 109505 - DNA, 22 bp, Artificial Sequence
  Synthetic oligonucleotide; TTT chr11 5380864 5380885 5380881 5380886 +
tcttgtgccctggggatagtag

SEQ ID NO: 109506 - DNA, 22 bp, Artificial Sequence
  Synthetic oligonucleotide; TTT chr11 5380865 5380886 5380882 5380887 +
cttgtgccctggggatagtagg

SEQ ID NO: 109507 - DNA, 22 bp, Artificial Sequence
  Synthetic oligonucleotide; TTC chr11 5380866 5380887 5380883 5380888 +
ttgtgccctggggatagtaggg

SEQ ID NO: 109508 - DNA, 22 bp, Artificial Sequence
  Synthetic oligonucleotide; CTT chr11 5380868 5380889 5380885 5380890 +
gtgccctggggatagtagggcc

SEQ ID NO: 109509 - DNA, 22 bp, Artificial Sequence
  Synthetic oligonucleotide; TTG chr11 5380869 5380890 5380886 5380891 +
tgccctggggatagtagggcct

SEQ ID NO: 109510 - DNA, 22 bp, Artificial Sequence
  Synthetic oligonucleotide; CTG chr11 5380876 5380897 5380893 5380898 +
gggatagtagggccttggtgct

SEQ ID NO: 109511 - DNA, 22 bp, Artificial Sequence
  Synthetic oligonucleotide; CTT chr11 5380892 5380913 5380909 5380914 +
ggtgctggtcagaatttaagcc

SEQ ID NO: 109512 - DNA, 22 bp, Artificial Sequence
  Synthetic oligonucleotide; TTG chr11 5380893 5380914 5380910 5380915 +
gtgctggtcagaatttaagcct

SEQ ID NO: 109513 - DNA, 22 bp, Artificial Sequence
  Synthetic oligonucleotide; CTG chr11 5380899 5380920 5380916 5380921 +
gtcagaatttaagcctatcctt

SEQ ID NO: 109514 - DNA, 22 bp, Artificial Sequence
  Synthetic oligonucleotide; TTT chr11 5380909 5380930 5380926 5380931 +
aagcctatccttgggctgaatg

SEQ ID NO: 109515 - DNA, 22 bp, Artificial Sequence
  Synthetic oligonucleotide; TTA chr11 5380910 5380931 5380927 5380932 +
agcctatccttgggctgaatgc

SEQ ID NO: 109516 - DNA, 22 bp, Artificial Sequence
  Synthetic oligonucleotide; CTA chr11 5380916 5380937 5380933 5380938 +
tccttgggctgaatgctccccc

SEQ ID NO: 109517 - DNA, 22 bp, Artificial Sequence
  Synthetic oligonucleotide; CTT chr11 5380921 5380942 5380938 5380943 +
gggctgaatgctccccctggtg

SEQ ID NO: 109518 - DNA, 22 bp, Artificial Sequence
  Synthetic oligonucleotide; TTG chr11 5380922 5380943 5380939 5380944 +
ggctgaatgctccccctggtgg

SEQ ID NO: 109519 - DNA, 22 bp, Artificial Sequence
  Synthetic oligonucleotide; CTG chr11 5380927 5380948 5380944 5380949 +
aatgctccccctggtggctaca

SEQ ID NO: 109520 - DNA, 22 bp, Artificial Sequence
  Synthetic oligonucleotide; CTC chr11 5380934 5380955 5380951 5380956 +
cccctggtggctacattggaaa

SEQ ID NO: 109521 - DNA, 22 bp, Artificial Sequence
  Synthetic oligonucleotide; CTG chr11 5380940 5380961 5380957 5380962 +
gtggctacattggaaaaccaca

SEQ ID NO: 109522 - DNA, 22 bp, Artificial Sequence
  Synthetic oligonucleotide; CTA chr11 5380947 5380968 5380964 5380969 +
cattggaaaaccacagcatgtg

SEQ ID NO: 109523 - DNA, 22 bp, Artificial Sequence
  Synthetic oligonucleotide; TTG chr11 5380952 5380973 5380969 5380974 +
gaaaaccacagcatgtgtacag

SEQ ID NO: 109524 - DNA, 22 bp, Artificial Sequence
  Synthetic oligonucleotide; CTT chr11 5380979 5381000 5380996 5381001 +
ggggattcagttctcctgaagg

SEQ ID NO: 109525 - DNA, 22 bp, Artificial Sequence
  Synthetic oligonucleotide; TTG chr11 5380980 5381001 5380997 5381002 +
gggattcagttctcctgaagga

SEQ ID NO: 109526 - DNA, 22 bp, Artificial Sequence
  Synthetic oligonucleotide; TTC chr11 5380987 5381008 5381004 5381009 +
agttctcctgaaggaatctcct

SEQ ID NO: 109527 - DNA, 22 bp, Artificial Sequence
  Synthetic oligonucleotide; TTC chr11 5380992 5381013 5381009 5381014 +
tcctgaaggaatctcctacttc

SEQ ID NO: 109528 - DNA, 22 bp, Artificial Sequence
  Synthetic oligonucleotide; CTC chr11 5380994 5381015 5381011 5381016 +
ctgaaggaatctcctacttcac

SEQ ID NO: 109529 - DNA, 22 bp, Artificial Sequence
  Synthetic oligonucleotide; CTG chr11 5380997 5381018 5381014 5381019 +
aaggaatctcctacttcaccaa

SEQ ID NO: 109530 - DNA, 22 bp, Artificial Sequence
  Synthetic oligonucleotide; CTC chr11 5381007 5381028 5381024 5381029 +
ctacttcaccaagcctggctca

SEQ ID NO: 109531 - DNA, 22 bp, Artificial Sequence
  Synthetic oligonucleotide; CTA chr11 5381010 5381031 5381027 5381032 +
cttcaccaagcctggctcagtg

SEQ ID NO: 109532 - DNA, 22 bp, Artificial Sequence
  Synthetic oligonucleotide; CTT chr11 5381013 5381034 5381030 5381035 +
caccaagcctggctcagtgggc

SEQ ID NO: 109533 - DNA, 22 bp, Artificial Sequence
  Synthetic oligonucleotide; TTC chr11 5381014 5381035 5381031 5381036 +
accaagcctggctcagtgggct

SEQ ID NO: 109534 - DNA, 22 bp, Artificial Sequence
  Synthetic oligonucleotide; CTG chr11 5381024 5381045 5381041 5381046 +
gctcagtgggctggctaggtat

SEQ ID NO: 109535 - DNA, 22 bp, Artificial Sequence
  Synthetic oligonucleotide; CTC chr11 5381028 5381049 5381045 5381050 +
agtgggctggctaggtatcaat

SEQ ID NO: 109536 - DNA, 22 bp, Artificial Sequence
  Synthetic oligonucleotide; CTG chr11 5381037 5381058 5381054 5381059 +
gctaggtatcaattctggatag

SEQ ID NO: 109537 - DNA, 22 bp, Artificial Sequence
  Synthetic oligonucleotide; CTA chr11 5381041 5381062 5381058 5381063 +
ggtatcaattctggatagaggt

SEQ ID NO: 109538 - DNA, 22 bp, Artificial Sequence
  Synthetic oligonucleotide; TTC chr11 5381052 5381073 5381069 5381074 +
tggatagaggttccttaaataa

SEQ ID NO: 109539 - DNA, 22 bp, Artificial Sequence
  Synthetic oligonucleotide; CTG chr11 5381054 5381075 5381071 5381076 +
gatagaggttccttaaataaaa

SEQ ID NO: 109540 - DNA, 22 bp, Artificial Sequence
  Synthetic oligonucleotide; TTC chr11 5381065 5381086 5381082 5381087 +
cttaaataaaacttatactggc

SEQ ID NO: 109541 - DNA, 22 bp, Artificial Sequence
  Synthetic oligonucleotide; CTT chr11 5381068 5381089 5381085 5381090 +
aaataaaacttatactggcccc

SEQ ID NO: 109542 - DNA, 22 bp, Artificial Sequence
  Synthetic oligonucleotide; TTA chr11 5381069 5381090 5381086 5381091 +
aataaaacttatactggcccct

SEQ ID NO: 109543 - DNA, 22 bp, Artificial Sequence
  Synthetic oligonucleotide; CTT chr11 5381079 5381100 5381096 5381101 +
atactggccccttgaaagccag

SEQ ID NO: 109544 - DNA, 22 bp, Artificial Sequence
  Synthetic oligonucleotide; TTA chr11 5381080 5381101 5381097 5381102 +
tactggccccttgaaagccagg

SEQ ID NO: 109545 - DNA, 22 bp, Artificial Sequence
  Synthetic oligonucleotide; CTG chr11 5381085 5381106 5381102 5381107 +
gccccttgaaagccaggctttc

SEQ ID NO: 109546 - DNA, 22 bp, Artificial Sequence
  Synthetic oligonucleotide; CTT chr11 5381092 5381113 5381109 5381114 +
gaaagccaggctttccacccca

SEQ ID NO: 109547 - DNA, 22 bp, Artificial Sequence
  Synthetic oligonucleotide; TTG chr11 5381093 5381114 5381110 5381115 +
aaagccaggctttccaccccac

SEQ ID NO: 109548 - DNA, 22 bp, Artificial Sequence
  Synthetic oligonucleotide; CTT chr11 5381105 5381126 5381122 5381127 +
tccaccccaccatacccccacc

SEQ ID NO: 109549 - DNA, 22 bp, Artificial Sequence
  Synthetic oligonucleotide; TTT chr11 5381106 5381127 5381123 5381128 +
ccaccccaccatacccccaccc

SEQ ID NO: 109550 - DNA, 22 bp, Artificial Sequence
  Synthetic oligonucleotide; TTC chr11 5381107 5381128 5381124 5381129 +
caccccaccatacccccacccc

SEQ ID NO: 109551 - DNA, 22 bp, Artificial Sequence
  Synthetic oligonucleotide; CTC chr11 5381134 5381155 5381151 5381156 +
tctctctctgtcgctcgctcgc

SEQ ID NO: 109552 - DNA, 22 bp, Artificial Sequence
  Synthetic oligonucleotide; CTC chr11 5381136 5381157 5381153 5381158 +
tctctctgtcgctcgctcgctg

SEQ ID NO: 109553 - DNA, 22 bp, Artificial Sequence
  Synthetic oligonucleotide; CTC chr11 5381138 5381159 5381155 5381160 +
tctctgtcgctcgctcgctgtt

SEQ ID NO: 109554 - DNA, 22 bp, Artificial Sequence
  Synthetic oligonucleotide; CTC chr11 5381140 5381161 5381157 5381162 +
tctgtcgctcgctcgctgtttc

SEQ ID NO: 109555 - DNA, 22 bp, Artificial Sequence
  Synthetic oligonucleotide; CTC chr11 5381142 5381163 5381159 5381164 +
tgtcgctcgctcgctgtttctc

SEQ ID NO: 109556 - DNA, 22 bp, Artificial Sequence
  Synthetic oligonucleotide; CTG chr11 5381144 5381165 5381161 5381166 +
tcgctcgctcgctgtttctctc

SEQ ID NO: 109557 - DNA, 22 bp, Artificial Sequence
  Synthetic oligonucleotide; CTC chr11 5381150 5381171 5381167 5381172 +
gctcgctgtttctctctctctc

SEQ ID NO: 109558 - DNA, 22 bp, Artificial Sequence
  Synthetic oligonucleotide; CTC chr11 5381154 5381175 5381171 5381176 +
gctgtttctctctctctctctc

SEQ ID NO: 109559 - DNA, 22 bp, Artificial Sequence
  Synthetic oligonucleotide; CTG chr11 5381158 5381179 5381175 5381180 +
tttctctctctctctctcacac

SEQ ID NO: 109560 - DNA, 22 bp, Artificial Sequence
  Synthetic oligonucleotide; TTT chr11 5381161 5381182 5381178 5381183 +
ctctctctctctctcacacaca

SEQ ID NO: 109561 - DNA, 22 bp, Artificial Sequence
  Synthetic oligonucleotide; TTC chr11 5381162 5381183 5381179 5381184 +
tctctctctctctcacacacac

SEQ ID NO: 109562 - DNA, 22 bp, Artificial Sequence
  Synthetic oligonucleotide; CTC chr11 5381164 5381185 5381181 5381186 +
tctctctctctcacacacacac

SEQ ID NO: 109563 - DNA, 22 bp, Artificial Sequence
  Synthetic oligonucleotide; CTC chr11 5381166 5381187 5381183 5381188 +
tctctctctcacacacacacaa

SEQ ID NO: 109564 - DNA, 22 bp, Artificial Sequence
  Synthetic oligonucleotide; CTC chr11 5381168 5381189 5381185 5381190 +
tctctctcacacacacacaaac

SEQ ID NO: 109565 - DNA, 22 bp, Artificial Sequence
  Synthetic oligonucleotide; CTC chr11 5381170 5381191 5381187 5381192 +
tctctcacacacacacaaacaa

SEQ ID NO: 109566 - DNA, 22 bp, Artificial Sequence
  Synthetic oligonucleotide; CTC chr11 5381172 5381193 5381189 5381194 +
tctcacacacacacaaacaata

SEQ ID NO: 109567 - DNA, 22 bp, Artificial Sequence
  Synthetic oligonucleotide; CTC chr11 5381174 5381195 5381191 5381196 +
tcacacacacacaaacaatatt

SEQ ID NO: 109568 - DNA, 22 bp, Artificial Sequence
  Synthetic oligonucleotide; CTC chr11 5381176 5381197 5381193 5381198 +
acacacacacaaacaatattac

SEQ ID NO: 109569 - DNA, 22 bp, Artificial Sequence
  Synthetic oligonucleotide; TTA chr11 5381197 5381218 5381214 5381219 +
catgcaatgaaaaccatttgca

SEQ ID NO: 109570 - DNA, 22 bp, Artificial Sequence
  Synthetic oligonucleotide; TTT chr11 5381216 5381237 5381233 5381238 +
gcacattaacaaataggtacac

SEQ ID NO: 109571 - DNA, 22 bp, Artificial Sequence
  Synthetic oligonucleotide; TTG chr11 5381217 5381238 5381234 5381239 +
cacattaacaaataggtacact

SEQ ID NO: 109572 - DNA, 22 bp, Artificial Sequence
  Synthetic oligonucleotide; TTA chr11 5381224 5381245 5381241 5381246 +
acaaataggtacactgttacag

SEQ ID NO: 109573 - DNA, 22 bp, Artificial Sequence
  Synthetic oligonucleotide; CTG chr11 5381240 5381261 5381257 5381262 +
ttacagtgacacttttcacttt

SEQ ID NO: 109574 - DNA, 22 bp, Artificial Sequence
  Synthetic oligonucleotide; TTA chr11 5381243 5381264 5381260 5381265 +
cagtgacacttttcacttttag

SEQ ID NO: 109575 - DNA, 22 bp, Artificial Sequence
  Synthetic oligonucleotide; CTT chr11 5381254 5381275 5381271 5381276 +
ttcacttttagtaatggattta

SEQ ID NO: 109576 - DNA, 22 bp, Artificial Sequence
  Synthetic oligonucleotide; TTT chr11 5381255 5381276 5381272 5381277 +
tcacttttagtaatggatttag

SEQ ID NO: 109577 - DNA, 22 bp, Artificial Sequence
  Synthetic oligonucleotide; TTT chr11 5381256 5381277 5381273 5381278 +
cacttttagtaatggatttaga

SEQ ID NO: 109578 - DNA, 22 bp, Artificial Sequence
  Synthetic oligonucleotide; TTC chr11 5381257 5381278 5381274 5381279 +
acttttagtaatggatttagat

SEQ ID NO: 109579 - DNA, 22 bp, Artificial Sequence
  Synthetic oligonucleotide; CTT chr11 5381261 5381282 5381278 5381283 +
ttagtaatggatttagattctt

SEQ ID NO: 109580 - DNA, 22 bp, Artificial Sequence
  Synthetic oligonucleotide; TTT chr11 5381262 5381283 5381279 5381284 +
tagtaatggatttagattcttt

SEQ ID NO: 109581 - DNA, 22 bp, Artificial Sequence
  Synthetic oligonucleotide; TTT chr11 5381263 5381284 5381280 5381285 +
agtaatggatttagattcttta

SEQ ID NO: 109582 - DNA, 22 bp, Artificial Sequence
  Synthetic oligonucleotide; TTA chr11 5381264 5381285 5381281 5381286 +
gtaatggatttagattctttaa

SEQ ID NO: 109583 - DNA, 22 bp, Artificial Sequence
  Synthetic oligonucleotide; TTT chr11 5381275 5381296 5381292 5381297 +
agattctttaataatgaattct

SEQ ID NO: 109584 - DNA, 22 bp, Artificial Sequence
  Synthetic oligonucleotide; TTA chr11 5381276 5381297 5381293 5381298 +
gattctttaataatgaattcta

SEQ ID NO: 109585 - DNA, 22 bp, Artificial Sequence
  Synthetic oligonucleotide; TTC chr11 5381281 5381302 5381298 5381303 +
tttaataatgaattctaatacc

SEQ ID NO: 109586 - DNA, 22 bp, Artificial Sequence
  Synthetic oligonucleotide; CTT chr11 5381283 5381304 5381300 5381305 +
taataatgaattctaatacctt

SEQ ID NO: 109587 - DNA, 22 bp, Artificial Sequence
  Synthetic oligonucleotide; TTT chr11 5381284 5381305 5381301 5381306 +
aataatgaattctaatacctta

SEQ ID NO: 109588 - DNA, 22 bp, Artificial Sequence
  Synthetic oligonucleotide; TTA chr11 5381285 5381306 5381302 5381307 +
ataatgaattctaataccttaa

SEQ ID NO: 109589 - DNA, 22 bp, Artificial Sequence
  Synthetic oligonucleotide; TTC chr11 5381296 5381317 5381313 5381318 +
taataccttaaaggttaaggcc

SEQ ID NO: 109590 - DNA, 22 bp, Artificial Sequence
  Synthetic oligonucleotide; CTA chr11 5381298 5381319 5381315 5381320 +
ataccttaaaggttaaggcctg

SEQ ID NO: 109591 - DNA, 22 bp, Artificial Sequence
  Synthetic oligonucleotide; CTT chr11 5381305 5381326 5381322 5381327 +
aaaggttaaggcctgaatgcct

SEQ ID NO: 109592 - DNA, 22 bp, Artificial Sequence
  Synthetic oligonucleotide; TTA chr11 5381306 5381327 5381323 5381328 +
aaggttaaggcctgaatgcctc

SEQ ID NO: 109593 - DNA, 22 bp, Artificial Sequence
  Synthetic oligonucleotide; TTA chr11 5381313 5381334 5381330 5381335 +
aggcctgaatgcctcacactaa

SEQ ID NO: 109594 - DNA, 22 bp, Artificial Sequence
  Synthetic oligonucleotide; CTG chr11 5381320 5381341 5381337 5381342 +
aatgcctcacactaatgtgttg

SEQ ID NO: 109595 - DNA, 22 bp, Artificial Sequence
  Synthetic oligonucleotide; CTC chr11 5381328 5381349 5381345 5381350 +
acactaatgtgttgatacttca

SEQ ID NO: 109596 - DNA, 22 bp, Artificial Sequence
  Synthetic oligonucleotide; CTA chr11 5381334 5381355 5381351 5381356 +
atgtgttgatacttcaccttcc

SEQ ID NO: 109597 - DNA, 22 bp, Artificial Sequence
  Synthetic oligonucleotide; TTG chr11 5381342 5381363 5381359 5381364 +
atacttcaccttccccaaccat

SEQ ID NO: 109598 - DNA, 22 bp, Artificial Sequence
  Synthetic oligonucleotide; CTT chr11 5381348 5381369 5381365 5381370 +
caccttccccaaccatcatgca

SEQ ID NO: 109599 - DNA, 22 bp, Artificial Sequence
  Synthetic oligonucleotide; TTC chr11 5381349 5381370 5381366 5381371 +
accttccccaaccatcatgcac

SEQ ID NO: 109600 - DNA, 22 bp, Artificial Sequence
  Synthetic oligonucleotide; CTT chr11 5381354 5381375 5381371 5381376 +
ccccaaccatcatgcacccaca

SEQ ID NO: 109601 - DNA, 22 bp, Artificial Sequence
  Synthetic oligonucleotide; TTC chr11 5381355 5381376 5381372 5381377 +
cccaaccatcatgcacccacat

SEQ ID NO: 109602 - DNA, 22 bp, Artificial Sequence
  Synthetic oligonucleotide; TTC chr11 5381379 5381400 5381396 5381401 +
acttcacctaatattcgcatga

SEQ ID NO: 109603 - DNA, 22 bp, Artificial Sequence
  Synthetic oligonucleotide; CTT chr11 5381383 5381404 5381400 5381405 +
cacctaatattcgcatgattac

SEQ ID NO: 109604 - DNA, 22 bp, Artificial Sequence
  Synthetic oligonucleotide; TTC chr11 5381384 5381405 5381401 5381406 +
acctaatattcgcatgattacc

SEQ ID NO: 109605 - DNA, 22 bp, Artificial Sequence
  Synthetic oligonucleotide; CTA chr11 5381389 5381410 5381406 5381411 +
atattcgcatgattacccacag

SEQ ID NO: 109606 - DNA, 22 bp, Artificial Sequence
  Synthetic oligonucleotide; TTC chr11 5381395 5381416 5381412 5381417 +
gcatgattacccacagtgatag

SEQ ID NO: 109607 - DNA, 22 bp, Artificial Sequence
  Synthetic oligonucleotide; TTA chr11 5381404 5381425 5381421 5381426 +
cccacagtgatagagataggtc

SEQ ID NO: 109608 - DNA, 22 bp, Artificial Sequence
  Synthetic oligonucleotide; CTT chr11 5381435 5381456 5381452 5381457 +
gctccttcattgtccccatcat

SEQ ID NO: 109609 - DNA, 22 bp, Artificial Sequence
  Synthetic oligonucleotide; TTG chr11 5381436 5381457 5381453 5381458 +
ctccttcattgtccccatcatc

SEQ ID NO: 109610 - DNA, 22 bp, Artificial Sequence
  Synthetic oligonucleotide; CTC chr11 5381439 5381460 5381456 5381461 +
cttcattgtccccatcatcctc

SEQ ID NO: 109611 - DNA, 22 bp, Artificial Sequence
  Synthetic oligonucleotide; CTT chr11 5381442 5381463 5381459 5381464 +
cattgtccccatcatcctcctc

SEQ ID NO: 109612 - DNA, 22 bp, Artificial Sequence
  Synthetic oligonucleotide; TTC chr11 5381443 5381464 5381460 5381465 +
attgtccccatcatcctcctct

SEQ ID NO: 109613 - DNA, 22 bp, Artificial Sequence
  Synthetic oligonucleotide; TTG chr11 5381447 5381468 5381464 5381469 +
tccccatcatcctcctcttggc

SEQ ID NO: 109614 - DNA, 22 bp, Artificial Sequence
  Synthetic oligonucleotide; CTC chr11 5381461 5381482 5381478 5381483 +
ctcttggcctccaggcttcaga

SEQ ID NO: 109615 - DNA, 22 bp, Artificial Sequence
  Synthetic oligonucleotide; CTC chr11 5381464 5381485 5381481 5381486 +
ttggcctccaggcttcagaaac

SEQ ID NO: 109616 - DNA, 22 bp, Artificial Sequence
  Synthetic oligonucleotide; CTT chr11 5381466 5381487 5381483 5381488 +
ggcctccaggcttcagaaacta

SEQ ID NO: 109617 - DNA, 22 bp, Artificial Sequence
  Synthetic oligonucleotide; TTG chr11 5381467 5381488 5381484 5381489 +
gcctccaggcttcagaaactac

SEQ ID NO: 109618 - DNA, 22 bp, Artificial Sequence
  Synthetic oligonucleotide; CTC chr11 5381472 5381493 5381489 5381494 +
caggcttcagaaactacctctg

SEQ ID NO: 109619 - DNA, 22 bp, Artificial Sequence
  Synthetic oligonucleotide; CTT chr11 5381479 5381500 5381496 5381501 +
cagaaactacctctgccttcct

SEQ ID NO: 109620 - DNA, 22 bp, Artificial Sequence
  Synthetic oligonucleotide; TTC chr11 5381480 5381501 5381497 5381502 +
agaaactacctctgccttccta

SEQ ID NO: 109621 - DNA, 22 bp, Artificial Sequence
  Synthetic oligonucleotide; CTA chr11 5381488 5381509 5381505 5381510 +
cctctgccttcctagcctgggc

SEQ ID NO: 109622 - DNA, 22 bp, Artificial Sequence
  Synthetic oligonucleotide; CTC chr11 5381492 5381513 5381509 5381514 +
tgccttcctagcctgggctagt

SEQ ID NO: 109623 - DNA, 22 bp, Artificial Sequence
  Synthetic oligonucleotide; CTG chr11 5381494 5381515 5381511 5381516 +
ccttcctagcctgggctagtga

SEQ ID NO: 109624 - DNA, 22 bp, Artificial Sequence
  Synthetic oligonucleotide; CTT chr11 5381498 5381519 5381515 5381520 +
cctagcctgggctagtgaccct

SEQ ID NO: 109625 - DNA, 22 bp, Artificial Sequence
  Synthetic oligonucleotide; TTC chr11 5381499 5381520 5381516 5381521 +
ctagcctgggctagtgacccta

SEQ ID NO: 109626 - DNA, 22 bp, Artificial Sequence
  Synthetic oligonucleotide; CTA chr11 5381502 5381523 5381519 5381524 +
gcctgggctagtgaccctattt

SEQ ID NO: 109627 - DNA, 22 bp, Artificial Sequence
  Synthetic oligonucleotide; CTG chr11 5381507 5381528 5381524 5381529 +
ggctagtgaccctattttggaa

SEQ ID NO: 109628 - DNA, 22 bp, Artificial Sequence
  Synthetic oligonucleotide; CTA chr11 5381512 5381533 5381529 5381534 +
gtgaccctattttggaaacttc

SEQ ID NO: 109629 - DNA, 22 bp, Artificial Sequence
  Synthetic oligonucleotide; CTA chr11 5381521 5381542 5381538 5381543 +
ttttggaaacttcgttgaacaa

SEQ ID NO: 109630 - DNA, 22 bp, Artificial Sequence
  Synthetic oligonucleotide; TTT chr11 5381524 5381545 5381541 5381546 +
tggaaacttcgttgaacaatct

SEQ ID NO: 109631 - DNA, 22 bp, Artificial Sequence
  Synthetic oligonucleotide; TTT chr11 5381525 5381546 5381542 5381547 +
ggaaacttcgttgaacaatcta

SEQ ID NO: 109632 - DNA, 22 bp, Artificial Sequence
  Synthetic oligonucleotide; TTG chr11 5381526 5381547 5381543 5381548 +
gaaacttcgttgaacaatctaa

SEQ ID NO: 109633 - DNA, 22 bp, Artificial Sequence
  Synthetic oligonucleotide; CTT chr11 5381533 5381554 5381550 5381555 +
cgttgaacaatctaacatcttt

SEQ ID NO: 109634 - DNA, 22 bp, Artificial Sequence
  Synthetic oligonucleotide; TTC chr11 5381534 5381555 5381551 5381556 +
gttgaacaatctaacatcttta

SEQ ID NO: 109635 - DNA, 22 bp, Artificial Sequence
  Synthetic oligonucleotide; TTG chr11 5381538 5381559 5381555 5381560 +
aacaatctaacatctttactca

SEQ ID NO: 109636 - DNA, 22 bp, Artificial Sequence
  Synthetic oligonucleotide; CTA chr11 5381547 5381568 5381564 5381569 +
acatctttactcaatgtgagct

SEQ ID NO: 109637 - DNA, 22 bp, Artificial Sequence
  Synthetic oligonucleotide; CTT chr11 5381554 5381575 5381571 5381576 +
tactcaatgtgagcttcataaa

SEQ ID NO: 109638 - DNA, 22 bp, Artificial Sequence
  Synthetic oligonucleotide; TTT chr11 5381555 5381576 5381572 5381577 +
actcaatgtgagcttcataaag

SEQ ID NO: 109639 - DNA, 22 bp, Artificial Sequence
  Synthetic oligonucleotide; TTA chr11 5381556 5381577 5381573 5381578 +
ctcaatgtgagcttcataaagg

SEQ ID NO: 109640 - DNA, 22 bp, Artificial Sequence
  Synthetic oligonucleotide; CTC chr11 5381559 5381580 5381576 5381581 +
aatgtgagcttcataaaggcaa

SEQ ID NO: 109641 - DNA, 22 bp, Artificial Sequence
  Synthetic oligonucleotide; CTT chr11 5381570 5381591 5381587 5381592 +
cataaaggcaagaccatgacat

SEQ ID NO: 109642 - DNA, 22 bp, Artificial Sequence
  Synthetic oligonucleotide; TTC chr11 5381571 5381592 5381588 5381593 +
ataaaggcaagaccatgacatg

SEQ ID NO: 109643 - DNA, 22 bp, Artificial Sequence
  Synthetic oligonucleotide; TTA chr11 5381596 5381617 5381613 5381618 +
atctgtctatcttcaagttctt

SEQ ID NO: 109644 - DNA, 22 bp, Artificial Sequence
  Synthetic oligonucleotide; CTG chr11 5381601 5381622 5381618 5381623 +
tctatcttcaagttcttgatca

SEQ ID NO: 109645 - DNA, 22 bp, Artificial Sequence
  Synthetic oligonucleotide; CTA chr11 5381605 5381626 5381622 5381627 +
tcttcaagttcttgatcagagt

SEQ ID NO: 109646 - DNA, 22 bp, Artificial Sequence
  Synthetic oligonucleotide; CTT chr11 5381609 5381630 5381626 5381631 +
caagttcttgatcagagtttct

SEQ ID NO: 109647 - DNA, 22 bp, Artificial Sequence
  Synthetic oligonucleotide; TTC chr11 5381610 5381631 5381627 5381632 +
aagttcttgatcagagtttctc

SEQ ID NO: 109648 - DNA, 22 bp, Artificial Sequence
  Synthetic oligonucleotide; TTC chr11 5381616 5381637 5381633 5381638 +
ttgatcagagtttctcacagga

SEQ ID NO: 109649 - DNA, 22 bp, Artificial Sequence
  Synthetic oligonucleotide; CTT chr11 5381618 5381639 5381635 5381640 +
gatcagagtttctcacaggacg

SEQ ID NO: 109650 - DNA, 22 bp, Artificial Sequence
  Synthetic oligonucleotide; TTG chr11 5381619 5381640 5381636 5381641 +
atcagagtttctcacaggacgc

SEQ ID NO: 109651 - DNA, 22 bp, Artificial Sequence
  Synthetic oligonucleotide; TTT chr11 5381629 5381650 5381646 5381651 +
ctcacaggacgcacttaatgca

SEQ ID NO: 109652 - DNA, 22 bp, Artificial Sequence
  Synthetic oligonucleotide; TTC chr11 5381630 5381651 5381647 5381652 +
tcacaggacgcacttaatgcac

SEQ ID NO: 109653 - DNA, 22 bp, Artificial Sequence
  Synthetic oligonucleotide; CTC chr11 5381632 5381653 5381649 5381654 +
acaggacgcacttaatgcacgt

SEQ ID NO: 109654 - DNA, 22 bp, Artificial Sequence
  Synthetic oligonucleotide; CTT chr11 5381645 5381666 5381662 5381667 +
aatgcacgtcaatgaaaattga

SEQ ID NO: 109655 - DNA, 22 bp, Artificial Sequence
  Synthetic oligonucleotide; TTA chr11 5381646 5381667 5381663 5381668 +
atgcacgtcaatgaaaattgat

SEQ ID NO: 109656 - DNA, 22 bp, Artificial Sequence
  Synthetic oligonucleotide; TTG chr11 5381666 5381687 5381683 5381688 +
atgagaatgtttaatgtaattt

SEQ ID NO: 109657 - DNA, 22 bp, Artificial Sequence
  Synthetic oligonucleotide; TTT chr11 5381678 5381699 5381695 5381700 +
aatgtaatttcagtcacacttc

SEQ ID NO: 109658 - DNA, 22 bp, Artificial Sequence
  Synthetic oligonucleotide; TTA chr11 5381679 5381700 5381696 5381701 +
atgtaatttcagtcacacttca

SEQ ID NO: 109659 - DNA, 22 bp, Artificial Sequence
  Synthetic oligonucleotide; TTT chr11 5381688 5381709 5381705 5381710 +
cagtcacacttcaaagaggact

SEQ ID NO: 109660 - DNA, 22 bp, Artificial Sequence
  Synthetic oligonucleotide; TTC chr11 5381689 5381710 5381706 5381711 +
agtcacacttcaaagaggacta

SEQ ID NO: 109661 - DNA, 22 bp, Artificial Sequence
  Synthetic oligonucleotide; CTT chr11 5381699 5381720 5381716 5381721 +
caaagaggactattttgtgata

SEQ ID NO: 109662 - DNA, 22 bp, Artificial Sequence
  Synthetic oligonucleotide; TTC chr11 5381700 5381721 5381717 5381722 +
aaagaggactattttgtgatat

SEQ ID NO: 109663 - DNA, 22 bp, Artificial Sequence
  Synthetic oligonucleotide; CTA chr11 5381711 5381732 5381728 5381733 +
ttttgtgatatgataaaacaaa

SEQ ID NO: 109664 - DNA, 22 bp, Artificial Sequence
  Synthetic oligonucleotide; TTT chr11 5381714 5381735 5381731 5381736 +
tgtgatatgataaaacaaatct

SEQ ID NO: 109665 - DNA, 22 bp, Artificial Sequence
  Synthetic oligonucleotide; TTT chr11 5381715 5381736 5381732 5381737 +
gtgatatgataaaacaaatcta

SEQ ID NO: 109666 - DNA, 22 bp, Artificial Sequence
  Synthetic oligonucleotide; TTG chr11 5381716 5381737 5381733 5381738 +
tgatatgataaaacaaatctaa

SEQ ID NO: 109667 - DNA, 22 bp, Artificial Sequence
  Synthetic oligonucleotide; CTA chr11 5381737 5381758 5381754 5381759 +
aaggtcatttagagcaataaag

SEQ ID NO: 109668 - DNA, 22 bp, Artificial Sequence
  Synthetic oligonucleotide; TTT chr11 5381747 5381768 5381764 5381769 +
agagcaataaagaatcaaaaat

SEQ ID NO: 109669 - DNA, 22 bp, Artificial Sequence
  Synthetic oligonucleotide; TTA chr11 5381748 5381769 5381765 5381770 +
gagcaataaagaatcaaaaatg

SEQ ID NO: 109670 - DNA, 22 bp, Artificial Sequence
  Synthetic oligonucleotide; CTG chr11 5381773 5381794 5381790 5381795 +
agttctttcatttggttttcaa

SEQ ID NO: 109671 - DNA, 22 bp, Artificial Sequence
  Synthetic oligonucleotide; TTC chr11 5381778 5381799 5381795 5381800 +
tttcatttggttttcaaataaa

SEQ ID NO: 109672 - DNA, 22 bp, Artificial Sequence
  Synthetic oligonucleotide; CTT chr11 5381780 5381801 5381797 5381802 +
tcatttggttttcaaataaatc

SEQ ID NO: 109673 - DNA, 22 bp, Artificial Sequence
  Synthetic oligonucleotide; TTT chr11 5381781 5381802 5381798 5381803 +
catttggttttcaaataaatct

SEQ ID NO: 109674 - DNA, 22 bp, Artificial Sequence
  Synthetic oligonucleotide; TTC chr11 5381782 5381803 5381799 5381804 +
atttggttttcaaataaatcta

SEQ ID NO: 109675 - DNA, 22 bp, Artificial Sequence
  Synthetic oligonucleotide; TTT chr11 5381786 5381807 5381803 5381808 +
ggttttcaaataaatctattgc

SEQ ID NO: 109676 - DNA, 22 bp, Artificial Sequence
  Synthetic oligonucleotide; TTG chr11 5381787 5381808 5381804 5381809 +
gttttcaaataaatctattgct

SEQ ID NO: 109677 - DNA, 22 bp, Artificial Sequence
  Synthetic oligonucleotide; TTT chr11 5381791 5381812 5381808 5381813 +
tcaaataaatctattgcttgga

SEQ ID NO: 109678 - DNA, 22 bp, Artificial Sequence
  Synthetic oligonucleotide; TTT chr11 5381792 5381813 5381809 5381814 +
caaataaatctattgcttggaa

SEQ ID NO: 109679 - DNA, 22 bp, Artificial Sequence
  Synthetic oligonucleotide; TTC chr11 5381793 5381814 5381810 5381815 +
aaataaatctattgcttggaaa

SEQ ID NO: 109680 - DNA, 22 bp, Artificial Sequence
  Synthetic oligonucleotide; CTA chr11 5381804 5381825 5381821 5381826 +
ttgcttggaaactggtccttca

SEQ ID NO: 109681 - DNA, 22 bp, Artificial Sequence
  Synthetic oligonucleotide; TTG chr11 5381807 5381828 5381824 5381829 +
cttggaaactggtccttcaatt

SEQ ID NO: 109682 - DNA, 22 bp, Artificial Sequence
  Synthetic oligonucleotide; CTT chr11 5381810 5381831 5381827 5381832 +
ggaaactggtccttcaattata

SEQ ID NO: 109683 - DNA, 22 bp, Artificial Sequence
  Synthetic oligonucleotide; TTG chr11 5381811 5381832 5381828 5381833 +
gaaactggtccttcaattatat

SEQ ID NO: 109684 - DNA, 22 bp, Artificial Sequence
  Synthetic oligonucleotide; CTG chr11 5381818 5381839 5381835 5381840 +
gtccttcaattatataattcag

SEQ ID NO: 109685 - DNA, 22 bp, Artificial Sequence
  Synthetic oligonucleotide; CTT chr11 5381824 5381845 5381841 5381846 +
caattatataattcagagaaat

SEQ ID NO: 109686 - DNA, 22 bp, Artificial Sequence
  Synthetic oligonucleotide; TTC chr11 5381825 5381846 5381842 5381847 +
aattatataattcagagaaata

SEQ ID NO: 109687 - DNA, 22 bp, Artificial Sequence
  Synthetic oligonucleotide; TTA chr11 5381830 5381851 5381847 5381852 +
tataattcagagaaatagaata

SEQ ID NO: 109688 - DNA, 22 bp, Artificial Sequence
  Synthetic oligonucleotide; TTC chr11 5381838 5381859 5381855 5381860 +
agagaaatagaatataaagcta

SEQ ID NO: 109689 - DNA, 22 bp, Artificial Sequence
  Synthetic oligonucleotide; CTA chr11 5381860 5381881 5381877 5381882 +
ttatacagatgttagtttaaaa

SEQ ID NO: 109690 - DNA, 22 bp, Artificial Sequence
  Synthetic oligonucleotide; TTA chr11 5381863 5381884 5381880 5381885 +
tacagatgttagtttaaaaaag

SEQ ID NO: 109691 - DNA, 22 bp, Artificial Sequence
  Synthetic oligonucleotide; TTA chr11 5381874 5381895 5381891 5381896 +
gtttaaaaaagtaagcaaatat

SEQ ID NO: 109692 - DNA, 22 bp, Artificial Sequence
  Synthetic oligonucleotide; TTT chr11 5381878 5381899 5381895 5381900 +
aaaaaagtaagcaaatattaga

SEQ ID NO: 109693 - DNA, 22 bp, Artificial Sequence
  Synthetic oligonucleotide; TTA chr11 5381879 5381900 5381896 5381901 +
aaaaagtaagcaaatattagag

SEQ ID NO: 109694 - DNA, 22 bp, Artificial Sequence
  Synthetic oligonucleotide; TTA chr11 5381898 5381919 5381915 5381920 +
gagatctctaaatggtaggtta

SEQ ID NO: 109695 - DNA, 22 bp, Artificial Sequence
  Synthetic oligonucleotide; CTC chr11 5381906 5381927 5381923 5381928 +
taaatggtaggttatccactaa

SEQ ID NO: 109696 - DNA, 22 bp, Artificial Sequence
  Synthetic oligonucleotide; CTA chr11 5381908 5381929 5381925 5381930 +
aatggtaggttatccactaaac

SEQ ID NO: 109697 - DNA, 22 bp, Artificial Sequence
  Synthetic oligonucleotide; TTA chr11 5381920 5381941 5381937 5381942 +
tccactaaacagtattgtttat

SEQ ID NO: 109698 - DNA, 22 bp, Artificial Sequence
  Synthetic oligonucleotide; CTA chr11 5381927 5381948 5381944 5381949 +
aacagtattgtttatctacgta

SEQ ID NO: 109699 - DNA, 22 bp, Artificial Sequence
  Synthetic oligonucleotide; TTG chr11 5381937 5381958 5381954 5381959 +
tttatctacgtaaaaagctgtc

SEQ ID NO: 109700 - DNA, 22 bp, Artificial Sequence
  Synthetic oligonucleotide; TTT chr11 5381940 5381961 5381957 5381962 +
atctacgtaaaaagctgtcaat

SEQ ID NO: 109701 - DNA, 22 bp, Artificial Sequence
  Synthetic oligonucleotide; TTA chr11 5381941 5381962 5381958 5381963 +
tctacgtaaaaagctgtcaatt

SEQ ID NO: 109702 - DNA, 22 bp, Artificial Sequence
  Synthetic oligonucleotide; CTA chr11 5381945 5381966 5381962 5381967 +
cgtaaaaagctgtcaattacat

SEQ ID NO: 109703 - DNA, 22 bp, Artificial Sequence
  Synthetic oligonucleotide; CTG chr11 5381957 5381978 5381974 5381979 +
tcaattacatatctgcatccag

SEQ ID NO: 109704 - DNA, 22 bp, Artificial Sequence
  Synthetic oligonucleotide; TTA chr11 5381964 5381985 5381981 5381986 +
catatctgcatccagctccata

SEQ ID NO: 109705 - DNA, 22 bp, Artificial Sequence
  Synthetic oligonucleotide; CTG chr11 5381972 5381993 5381989 5381994 +
catccagctccatacaccaaaa

SEQ ID NO: 109706 - DNA, 22 bp, Artificial Sequence
  Synthetic oligonucleotide; CTC chr11 5381982 5382003 5381999 5382004 +
catacaccaaaataacatctgt

SEQ ID NO: 109707 - DNA, 22 bp, Artificial Sequence
  Synthetic oligonucleotide; CTG chr11 5382003 5382024 5382020 5382025 +
tttccagtgcagactttaaatc

SEQ ID NO: 109708 - DNA, 22 bp, Artificial Sequence
  Synthetic oligonucleotide; TTT chr11 5382006 5382027 5382023 5382028 +
ccagtgcagactttaaatcctt

SEQ ID NO: 109709 - DNA, 22 bp, Artificial Sequence
  Synthetic oligonucleotide; TTC chr11 5382007 5382028 5382024 5382029 +
cagtgcagactttaaatccttc

SEQ ID NO: 109710 - DNA, 22 bp, Artificial Sequence
  Synthetic oligonucleotide; CTT chr11 5382019 5382040 5382036 5382041 +
taaatccttcctgcatattgtt

SEQ ID NO: 109711 - DNA, 22 bp, Artificial Sequence
  Synthetic oligonucleotide; TTT chr11 5382020 5382041 5382037 5382042 +
aaatccttcctgcatattgtta

SEQ ID NO: 109712 - DNA, 22 bp, Artificial Sequence
  Synthetic oligonucleotide; TTA chr11 5382021 5382042 5382038 5382043 +
aatccttcctgcatattgttaa

SEQ ID NO: 109713 - DNA, 22 bp, Artificial Sequence
  Synthetic oligonucleotide; CTT chr11 5382028 5382049 5382045 5382050 +
cctgcatattgttaacaatgta

SEQ ID NO: 109714 - DNA, 22 bp, Artificial Sequence
  Synthetic oligonucleotide; TTC chr11 5382029 5382050 5382046 5382051 +
ctgcatattgttaacaatgtac

SEQ ID NO: 109715 - DNA, 22 bp, Artificial Sequence
  Synthetic oligonucleotide; CTG chr11 5382032 5382053 5382049 5382054 +
catattgttaacaatgtactct

SEQ ID NO: 109716 - DNA, 22 bp, Artificial Sequence
  Synthetic oligonucleotide; TTG chr11 5382039 5382060 5382056 5382061 +
ttaacaatgtactctggaaaat

SEQ ID NO: 109717 - DNA, 22 bp, Artificial Sequence
  Synthetic oligonucleotide; TTA chr11 5382042 5382063 5382059 5382064 +
acaatgtactctggaaaatatg

SEQ ID NO: 109718 - DNA, 22 bp, Artificial Sequence
  Synthetic oligonucleotide; CTC chr11 5382053 5382074 5382070 5382075 +
tggaaaatatgattgttatctc

SEQ ID NO: 109719 - DNA, 22 bp, Artificial Sequence
  Synthetic oligonucleotide; CTG chr11 5382055 5382076 5382072 5382077 +
gaaaatatgattgttatctcct

SEQ ID NO: 109720 - DNA, 22 bp, Artificial Sequence
  Synthetic oligonucleotide; TTG chr11 5382068 5382089 5382085 5382090 +
ttatctcctgcctttttaaacc

SEQ ID NO: 109721 - DNA, 22 bp, Artificial Sequence
  Synthetic oligonucleotide; TTA chr11 5382071 5382092 5382088 5382093 +
tctcctgcctttttaaacccaa

SEQ ID NO: 109722 - DNA, 22 bp, Artificial Sequence
  Synthetic oligonucleotide; CTC chr11 5382075 5382096 5382092 5382097 +
ctgcctttttaaacccaaccat

SEQ ID NO: 109723 - DNA, 22 bp, Artificial Sequence
  Synthetic oligonucleotide; CTG chr11 5382078 5382099 5382095 5382100 +
cctttttaaacccaaccatcaa

SEQ ID NO: 109724 - DNA, 22 bp, Artificial Sequence
  Synthetic oligonucleotide; CTT chr11 5382082 5382103 5382099 5382104 +
tttaaacccaaccatcaaaatg

SEQ ID NO: 109725 - DNA, 22 bp, Artificial Sequence
  Synthetic oligonucleotide; TTT chr11 5382083 5382104 5382100 5382105 +
ttaaacccaaccatcaaaatgt

SEQ ID NO: 109726 - DNA, 22 bp, Artificial Sequence
  Synthetic oligonucleotide; TTT chr11 5382084 5382105 5382101 5382106 +
taaacccaaccatcaaaatgtg

SEQ ID NO: 109727 - DNA, 22 bp, Artificial Sequence
  Synthetic oligonucleotide; TTT chr11 5382085 5382106 5382102 5382107 +
aaacccaaccatcaaaatgtgt

SEQ ID NO: 109728 - DNA, 22 bp, Artificial Sequence
  Synthetic oligonucleotide; TTA chr11 5382086 5382107 5382103 5382108 +
aacccaaccatcaaaatgtgta

SEQ ID NO: 109729 - DNA, 22 bp, Artificial Sequence
  Synthetic oligonucleotide; TTT chr11 5382116 5382137 5382133 5382138 +
gacatgtcatataaactcattc

SEQ ID NO: 109730 - DNA, 22 bp, Artificial Sequence
  Synthetic oligonucleotide; TTG chr11 5382117 5382138 5382134 5382139 +
acatgtcatataaactcattca

SEQ ID NO: 109731 - DNA, 22 bp, Artificial Sequence
  Synthetic oligonucleotide; CTC chr11 5382134 5382155 5382151 5382156 +
attcagggtcttgcccctgcct

SEQ ID NO: 109732 - DNA, 22 bp, Artificial Sequence
  Synthetic oligonucleotide; TTC chr11 5382138 5382159 5382155 5382160 +
agggtcttgcccctgcctacct

SEQ ID NO: 109733 - DNA, 22 bp, Artificial Sequence
  Synthetic oligonucleotide; CTT chr11 5382146 5382167 5382163 5382168 +
gcccctgcctacctctactgtt

SEQ ID NO: 109734 - DNA, 22 bp, Artificial Sequence
  Synthetic oligonucleotide; TTG chr11 5382147 5382168 5382164 5382169 +
cccctgcctacctctactgttt

SEQ ID NO: 109735 - DNA, 22 bp, Artificial Sequence
  Synthetic oligonucleotide; CTG chr11 5382153 5382174 5382170 5382175 +
cctacctctactgttttattcc

SEQ ID NO: 109736 - DNA, 22 bp, Artificial Sequence
  Synthetic oligonucleotide; CTA chr11 5382157 5382178 5382174 5382179 +
cctctactgttttattccaagg

SEQ ID NO: 109737 - DNA, 22 bp, Artificial Sequence
  Synthetic oligonucleotide; CTC chr11 5382161 5382182 5382178 5382183 +
tactgttttattccaaggtatt

SEQ ID NO: 109738 - DNA, 22 bp, Artificial Sequence
  Synthetic oligonucleotide; CTA chr11 5382163 5382184 5382180 5382185 +
ctgttttattccaaggtattaa

SEQ ID NO: 109739 - DNA, 22 bp, Artificial Sequence
  Synthetic oligonucleotide; CTG chr11 5382166 5382187 5382183 5382188 +
ttttattccaaggtattaactc

SEQ ID NO: 109740 - DNA, 22 bp, Artificial Sequence
  Synthetic oligonucleotide; TTT chr11 5382169 5382190 5382186 5382191 +
tattccaaggtattaactctct

SEQ ID NO: 109741 - DNA, 22 bp, Artificial Sequence
  Synthetic oligonucleotide; TTT chr11 5382170 5382191 5382187 5382192 +
attccaaggtattaactctctt

SEQ ID NO: 109742 - DNA, 22 bp, Artificial Sequence
  Synthetic oligonucleotide; TTA chr11 5382171 5382192 5382188 5382193 +
ttccaaggtattaactctctta

SEQ ID NO: 109743 - DNA, 22 bp, Artificial Sequence
  Synthetic oligonucleotide; TTC chr11 5382174 5382195 5382191 5382196 +
caaggtattaactctcttaaat

SEQ ID NO: 109744 - DNA, 22 bp, Artificial Sequence
  Synthetic oligonucleotide; TTA chr11 5382184 5382205 5382201 5382206 +
actctcttaaatgttatatttg

SEQ ID NO: 109745 - DNA, 22 bp, Artificial Sequence
  Synthetic oligonucleotide; CTC chr11 5382188 5382209 5382205 5382210 +
tcttaaatgttatatttgatca

SEQ ID NO: 109746 - DNA, 22 bp, Artificial Sequence
  Synthetic oligonucleotide; CTC chr11 5382190 5382211 5382207 5382212 +
ttaaatgttatatttgatcacc

SEQ ID NO: 109747 - DNA, 22 bp, Artificial Sequence
  Synthetic oligonucleotide; CTT chr11 5382192 5382213 5382209 5382214 +
aaatgttatatttgatcaccgg

SEQ ID NO: 109748 - DNA, 22 bp, Artificial Sequence
  Synthetic oligonucleotide; TTA chr11 5382193 5382214 5382210 5382215 +
aatgttatatttgatcaccgga

SEQ ID NO: 109749 - DNA, 22 bp, Artificial Sequence
  Synthetic oligonucleotide; TTA chr11 5382200 5382221 5382217 5382222 +
tatttgatcaccggaaaatctt

SEQ ID NO: 109750 - DNA, 22 bp, Artificial Sequence
  Synthetic oligonucleotide; TTT chr11 5382205 5382226 5382222 5382227 +
gatcaccggaaaatcttatagt

SEQ ID NO: 109751 - DNA, 22 bp, Artificial Sequence
  Synthetic oligonucleotide; TTG chr11 5382206 5382227 5382223 5382228 +
atcaccggaaaatcttatagtt

SEQ ID NO: 109752 - DNA, 22 bp, Artificial Sequence
  Synthetic oligonucleotide; CTT chr11 5382222 5382243 5382239 5382244 +
atagttctcaaaacacataaac

SEQ ID NO: 109753 - DNA, 22 bp, Artificial Sequence
  Synthetic oligonucleotide; TTA chr11 5382223 5382244 5382240 5382245 +
tagttctcaaaacacataaaca

SEQ ID NO: 109754 - DNA, 22 bp, Artificial Sequence
  Synthetic oligonucleotide; TTC chr11 5382229 5382250 5382246 5382251 +
tcaaaacacataaacaactttt

SEQ ID NO: 109755 - DNA, 22 bp, Artificial Sequence
  Synthetic oligonucleotide; CTC chr11 5382231 5382252 5382248 5382253 +
aaaacacataaacaacttttcc

SEQ ID NO: 109756 - DNA, 22 bp, Artificial Sequence
  Synthetic oligonucleotide; CTT chr11 5382249 5382270 5382266 5382271 +
ttcctcacctccatgcccttgc

SEQ ID NO: 109757 - DNA, 22 bp, Artificial Sequence
  Synthetic oligonucleotide; TTT chr11 5382250 5382271 5382267 5382272 +
tcctcacctccatgcccttgct

SEQ ID NO: 109758 - DNA, 22 bp, Artificial Sequence
  Synthetic oligonucleotide; TTT chr11 5382251 5382272 5382268 5382273 +
cctcacctccatgcccttgctt

SEQ ID NO: 109759 - DNA, 22 bp, Artificial Sequence
  Synthetic oligonucleotide; TTC chr11 5382252 5382273 5382269 5382274 +
ctcacctccatgcccttgctta

SEQ ID NO: 109760 - DNA, 22 bp, Artificial Sequence
  Synthetic oligonucleotide; CTC chr11 5382255 5382276 5382272 5382277 +
acctccatgcccttgcttacac

SEQ ID NO: 109761 - DNA, 22 bp, Artificial Sequence
  Synthetic oligonucleotide; CTC chr11 5382260 5382281 5382277 5382282 +
catgcccttgcttacactaccc

SEQ ID NO: 109762 - DNA, 22 bp, Artificial Sequence
  Synthetic oligonucleotide; CTT chr11 5382269 5382290 5382286 5382291 +
gcttacactacccctccttttt

SEQ ID NO: 109763 - DNA, 22 bp, Artificial Sequence
  Synthetic oligonucleotide; TTG chr11 5382270 5382291 5382287 5382292 +
cttacactacccctcctttttg

SEQ ID NO: 109764 - DNA, 22 bp, Artificial Sequence
  Synthetic oligonucleotide; CTT chr11 5382273 5382294 5382290 5382295 +
acactacccctcctttttggaa

SEQ ID NO: 109765 - DNA, 22 bp, Artificial Sequence
  Synthetic oligonucleotide; TTA chr11 5382274 5382295 5382291 5382296 +
cactacccctcctttttggaaa

SEQ ID NO: 109766 - DNA, 22 bp, Artificial Sequence
  Synthetic oligonucleotide; CTA chr11 5382279 5382300 5382296 5382301 +
cccctcctttttggaaatacct

SEQ ID NO: 109767 - DNA, 22 bp, Artificial Sequence
  Synthetic oligonucleotide; CTC chr11 5382285 5382306 5382302 5382307 +
ctttttggaaatacctttctat

SEQ ID NO: 109768 - DNA, 22 bp, Artificial Sequence
  Synthetic oligonucleotide; CTT chr11 5382288 5382309 5382305 5382310 +
tttggaaatacctttctataaa

SEQ ID NO: 109769 - DNA, 22 bp, Artificial Sequence
  Synthetic oligonucleotide; TTT chr11 5382289 5382310 5382306 5382311 +
ttggaaatacctttctataaag

SEQ ID NO: 109770 - DNA, 22 bp, Artificial Sequence
  Synthetic oligonucleotide; TTT chr11 5382290 5382311 5382307 5382312 +
tggaaatacctttctataaagc

SEQ ID NO: 109771 - DNA, 22 bp, Artificial Sequence
  Synthetic oligonucleotide; TTT chr11 5382291 5382312 5382308 5382313 +
ggaaatacctttctataaagcc

SEQ ID NO: 109772 - DNA, 22 bp, Artificial Sequence
  Synthetic oligonucleotide; TTG chr11 5382292 5382313 5382309 5382314 +
gaaatacctttctataaagccc

SEQ ID NO: 109773 - DNA, 22 bp, Artificial Sequence
  Synthetic oligonucleotide; CTT chr11 5382302 5382323 5382319 5382324 +
tctataaagccctatctgtggt

SEQ ID NO: 109774 - DNA, 22 bp, Artificial Sequence
  Synthetic oligonucleotide; TTT chr11 5382303 5382324 5382320 5382325 +
ctataaagccctatctgtggtt

SEQ ID NO: 109775 - DNA, 22 bp, Artificial Sequence
  Synthetic oligonucleotide; TTC chr11 5382304 5382325 5382321 5382326 +
tataaagccctatctgtggttg

SEQ ID NO: 109776 - DNA, 22 bp, Artificial Sequence
  Synthetic oligonucleotide; CTA chr11 5382306 5382327 5382323 5382328 +
taaagccctatctgtggttgat

SEQ ID NO: 109777 - DNA, 22 bp, Artificial Sequence
  Synthetic oligonucleotide; CTA chr11 5382316 5382337 5382333 5382338 +
tctgtggttgattcttaattag

SEQ ID NO: 109778 - DNA, 22 bp, Artificial Sequence
  Synthetic oligonucleotide; CTG chr11 5382320 5382341 5382337 5382342 +
tggttgattcttaattagtctt

SEQ ID NO: 109779 - DNA, 22 bp, Artificial Sequence
  Synthetic oligonucleotide; TTG chr11 5382326 5382347 5382343 5382348 +
attcttaattagtcttcatagc

SEQ ID NO: 109780 - DNA, 22 bp, Artificial Sequence
  Synthetic oligonucleotide; TTC chr11 5382330 5382351 5382347 5382352 +
ttaattagtcttcatagctcag

SEQ ID NO: 109781 - DNA, 22 bp, Artificial Sequence
  Synthetic oligonucleotide; CTT chr11 5382332 5382353 5382349 5382354 +
aattagtcttcatagctcaggt

SEQ ID NO: 109782 - DNA, 22 bp, Artificial Sequence
  Synthetic oligonucleotide; TTA chr11 5382333 5382354 5382350 5382355 +
attagtcttcatagctcaggtt

SEQ ID NO: 109783 - DNA, 22 bp, Artificial Sequence
  Synthetic oligonucleotide; TTA chr11 5382337 5382358 5382354 5382359 +
gtcttcatagctcaggttgggg

SEQ ID NO: 109784 - DNA, 22 bp, Artificial Sequence
  Synthetic oligonucleotide; CTT chr11 5382342 5382363 5382359 5382364 +
catagctcaggttggggccttc

SEQ ID NO: 109785 - DNA, 22 bp, Artificial Sequence
  Synthetic oligonucleotide; TTC chr11 5382343 5382364 5382360 5382365 +
atagctcaggttggggccttcc

SEQ ID NO: 109786 - DNA, 22 bp, Artificial Sequence
  Synthetic oligonucleotide; CTC chr11 5382350 5382371 5382367 5382372 +
aggttggggccttccctggccc

SEQ ID NO: 109787 - DNA, 22 bp, Artificial Sequence
  Synthetic oligonucleotide; TTG chr11 5382356 5382377 5382373 5382378 +
gggccttccctggccctcacct

SEQ ID NO: 109788 - DNA, 22 bp, Artificial Sequence
  Synthetic oligonucleotide; CTT chr11 5382363 5382384 5382380 5382385 +
ccctggccctcacctgtgggcc

SEQ ID NO: 109789 - DNA, 22 bp, Artificial Sequence
  Synthetic oligonucleotide; TTC chr11 5382364 5382385 5382381 5382386 +
cctggccctcacctgtgggcca

SEQ ID NO: 109790 - DNA, 22 bp, Artificial Sequence
  Synthetic oligonucleotide; CTG chr11 5382368 5382389 5382385 5382390 +
gccctcacctgtgggccaggtg

SEQ ID NO: 109791 - DNA, 22 bp, Artificial Sequence
  Synthetic oligonucleotide; CTC chr11 5382374 5382395 5382391 5382396 +
acctgtgggccaggtgctaccc

SEQ ID NO: 109792 - DNA, 22 bp, Artificial Sequence
  Synthetic oligonucleotide; CTG chr11 5382379 5382400 5382396 5382401 +
tgggccaggtgctacccacaaa

SEQ ID NO: 109793 - DNA, 22 bp, Artificial Sequence
  Synthetic oligonucleotide; CTA chr11 5382393 5382414 5382410 5382415 +
cccacaaatattaatataattg

SEQ ID NO: 109794 - DNA, 22 bp, Artificial Sequence
  Synthetic oligonucleotide; TTA chr11 5382406 5382427 5382423 5382428 +
atataattgccatgtccatctc

SEQ ID NO: 109795 - DNA, 22 bp, Artificial Sequence
  Synthetic oligonucleotide; TTG chr11 5382415 5382436 5382432 5382437 +
ccatgtccatctcttacattgc

SEQ ID NO: 109796 - DNA, 22 bp, Artificial Sequence
  Synthetic oligonucleotide; CTC chr11 5382428 5382449 5382445 5382450 +
ttacattgcgctaagatagttg

SEQ ID NO: 109797 - DNA, 22 bp, Artificial Sequence
  Synthetic oligonucleotide; CTT chr11 5382430 5382451 5382447 5382452 +
acattgcgctaagatagttgtt

SEQ ID NO: 109798 - DNA, 22 bp, Artificial Sequence
  Synthetic oligonucleotide; TTA chr11 5382431 5382452 5382448 5382453 +
cattgcgctaagatagttgttt

SEQ ID NO: 109799 - DNA, 22 bp, Artificial Sequence
  Synthetic oligonucleotide; TTG chr11 5382436 5382457 5382453 5382458 +
cgctaagatagttgttttccta

SEQ ID NO: 109800 - DNA, 22 bp, Artificial Sequence
  Synthetic oligonucleotide; CTA chr11 5382441 5382462 5382458 5382463 +
agatagttgttttcctatctta

SEQ ID NO: 109801 - DNA, 22 bp, Artificial Sequence
  Synthetic oligonucleotide; TTG chr11 5382450 5382471 5382467 5382472 +
ttttcctatcttatgtgtgata

SEQ ID NO: 109802 - DNA, 22 bp, Artificial Sequence
  Synthetic oligonucleotide; TTT chr11 5382453 5382474 5382470 5382475 +
tcctatcttatgtgtgatagat

SEQ ID NO: 109803 - DNA, 22 bp, Artificial Sequence
  Synthetic oligonucleotide; TTT chr11 5382454 5382475 5382471 5382476 +
cctatcttatgtgtgatagatg

SEQ ID NO: 109804 - DNA, 22 bp, Artificial Sequence
  Synthetic oligonucleotide; TTC chr11 5382455 5382476 5382472 5382477 +
ctatcttatgtgtgatagatgc

SEQ ID NO: 109805 - DNA, 22 bp, Artificial Sequence
  Synthetic oligonucleotide; CTA chr11 5382458 5382479 5382475 5382480 +
tcttatgtgtgatagatgcccc

SEQ ID NO: 109806 - DNA, 22 bp, Artificial Sequence
  Synthetic oligonucleotide; CTT chr11 5382462 5382483 5382479 5382484 +
atgtgtgatagatgcccctgaa

SEQ ID NO: 109807 - DNA, 22 bp, Artificial Sequence
  Synthetic oligonucleotide; TTA chr11 5382463 5382484 5382480 5382485 +
tgtgtgatagatgcccctgaat

SEQ ID NO: 109808 - DNA, 22 bp, Artificial Sequence
  Synthetic oligonucleotide; CTG chr11 5382482 5382503 5382499 5382504 +
aataatagcaatatttgctgtt

SEQ ID NO: 109809 - DNA, 22 bp, Artificial Sequence
  Synthetic oligonucleotide; TTT chr11 5382498 5382519 5382515 5382520 +
gctgttgctggtaataatagca

SEQ ID NO: 109810 - DNA, 22 bp, Artificial Sequence
  Synthetic oligonucleotide; TTG chr11 5382499 5382520 5382516 5382521 +
ctgttgctggtaataatagcag

SEQ ID NO: 109811 - DNA, 22 bp, Artificial Sequence
  Synthetic oligonucleotide; CTG chr11 5382502 5382523 5382519 5382524 +
ttgctggtaataatagcagcat

SEQ ID NO: 109812 - DNA, 22 bp, Artificial Sequence
  Synthetic oligonucleotide; TTG chr11 5382505 5382526 5382522 5382527 +
ctggtaataatagcagcattgt

SEQ ID NO: 109813 - DNA, 22 bp, Artificial Sequence
  Synthetic oligonucleotide; CTG chr11 5382508 5382529 5382525 5382530 +
gtaataatagcagcattgttgc

SEQ ID NO: 109814 - DNA, 22 bp, Artificial Sequence
  Synthetic oligonucleotide; TTG chr11 5382526 5382547 5382543 5382548 +
ttgctgttatactgtccttggc

SEQ ID NO: 109815 - DNA, 22 bp, Artificial Sequence
  Synthetic oligonucleotide; TTG chr11 5382529 5382550 5382546 5382551 +
ctgttatactgtccttggctag

SEQ ID NO: 109816 - DNA, 22 bp, Artificial Sequence
  Synthetic oligonucleotide; CTG chr11 5382532 5382553 5382549 5382554 +
ttatactgtccttggctaggat

SEQ ID NO: 109817 - DNA, 22 bp, Artificial Sequence
  Synthetic oligonucleotide; TTA chr11 5382535 5382556 5382552 5382557 +
tactgtccttggctaggatccc

SEQ ID NO: 109818 - DNA, 22 bp, Artificial Sequence
  Synthetic oligonucleotide; CTG chr11 5382540 5382561 5382557 5382562 +
tccttggctaggatcccagtga

SEQ ID NO: 109819 - DNA, 22 bp, Artificial Sequence
  Synthetic oligonucleotide; CTT chr11 5382545 5382566 5382562 5382567 +
ggctaggatcccagtgaaatag

SEQ ID NO: 109820 - DNA, 22 bp, Artificial Sequence
  Synthetic oligonucleotide; TTG chr11 5382546 5382567 5382563 5382568 +
gctaggatcccagtgaaatagg

SEQ ID NO: 109821 - DNA, 22 bp, Artificial Sequence
  Synthetic oligonucleotide; CTA chr11 5382550 5382571 5382567 5382572 +
ggatcccagtgaaataggctaa

SEQ ID NO: 109822 - DNA, 22 bp, Artificial Sequence
  Synthetic oligonucleotide; CTA chr11 5382571 5382592 5382588 5382593 +
aaatcatgttcttaataaatgc

SEQ ID NO: 109823 - DNA, 22 bp, Artificial Sequence
  Synthetic oligonucleotide; TTC chr11 5382582 5382603 5382599 5382604 +
ttaataaatgcaggattttctg

SEQ ID NO: 109824 - DNA, 22 bp, Artificial Sequence
  Synthetic oligonucleotide; CTT chr11 5382584 5382605 5382601 5382606 +
aataaatgcaggattttctgaa

SEQ ID NO: 109825 - DNA, 22 bp, Artificial Sequence
  Synthetic oligonucleotide; TTA chr11 5382585 5382606 5382602 5382607 +
ataaatgcaggattttctgaaa

SEQ ID NO: 109826 - DNA, 22 bp, Artificial Sequence
  Synthetic oligonucleotide; TTT chr11 5382600 5382621 5382617 5382622 +
tctgaaatttttctggtagtgg

SEQ ID NO: 109827 - DNA, 22 bp, Artificial Sequence
  Synthetic oligonucleotide; TTT chr11 5382601 5382622 5382618 5382623 +
ctgaaatttttctggtagtggt

SEQ ID NO: 109828 - DNA, 22 bp, Artificial Sequence
  Synthetic oligonucleotide; TTC chr11 5382602 5382623 5382619 5382624 +
tgaaatttttctggtagtggtg

SEQ ID NO: 109829 - DNA, 22 bp, Artificial Sequence
  Synthetic oligonucleotide; CTG chr11 5382604 5382625 5382621 5382626 +
aaatttttctggtagtggtgcc

SEQ ID NO: 109830 - DNA, 22 bp, Artificial Sequence
  Synthetic oligonucleotide; TTT chr11 5382610 5382631 5382627 5382632 +
ttctggtagtggtgccctctcc

SEQ ID NO: 109831 - DNA, 22 bp, Artificial Sequence
  Synthetic oligonucleotide; TTT chr11 5382611 5382632 5382628 5382633 +
tctggtagtggtgccctctcct

SEQ ID NO: 109832 - DNA, 22 bp, Artificial Sequence
  Synthetic oligonucleotide; TTT chr11 5382612 5382633 5382629 5382634 +
ctggtagtggtgccctctccta

SEQ ID NO: 109833 - DNA, 22 bp, Artificial Sequence
  Synthetic oligonucleotide; TTC chr11 5382613 5382634 5382630 5382635 +
tggtagtggtgccctctcctac

SEQ ID NO: 109834 - DNA, 22 bp, Artificial Sequence
  Synthetic oligonucleotide; CTG chr11 5382615 5382636 5382632 5382637 +
gtagtggtgccctctcctacaa

SEQ ID NO: 109835 - DNA, 22 bp, Artificial Sequence
  Synthetic oligonucleotide; CTC chr11 5382629 5382650 5382646 5382651 +
tcctacaagcctaaatgaagat

SEQ ID NO: 109836 - DNA, 22 bp, Artificial Sequence
  Synthetic oligonucleotide; CTC chr11 5382631 5382652 5382648 5382653 +
ctacaagcctaaatgaagatgc

SEQ ID NO: 109837 - DNA, 22 bp, Artificial Sequence
  Synthetic oligonucleotide; CTA chr11 5382634 5382655 5382651 5382656 +
caagcctaaatgaagatgctca

SEQ ID NO: 109838 - DNA, 22 bp, Artificial Sequence
  Synthetic oligonucleotide; CTA chr11 5382642 5382663 5382659 5382664 +
aatgaagatgctcagctccttc

SEQ ID NO: 109839 - DNA, 22 bp, Artificial Sequence
  Synthetic oligonucleotide; CTC chr11 5382655 5382676 5382672 5382677 +
agctccttcctattgtaccgaa

SEQ ID NO: 109840 - DNA, 22 bp, Artificial Sequence
  Synthetic oligonucleotide; CTC chr11 5382660 5382681 5382677 5382682 +
cttcctattgtaccgaagccag

SEQ ID NO: 109841 - DNA, 22 bp, Artificial Sequence
  Synthetic oligonucleotide; CTT chr11 5382663 5382684 5382680 5382685 +
cctattgtaccgaagccagaac

SEQ ID NO: 109842 - DNA, 22 bp, Artificial Sequence
  Synthetic oligonucleotide; TTC chr11 5382664 5382685 5382681 5382686 +
ctattgtaccgaagccagaacc

SEQ ID NO: 109843 - DNA, 22 bp, Artificial Sequence
  Synthetic oligonucleotide; CTA chr11 5382667 5382688 5382684 5382689 +
ttgtaccgaagccagaaccttc

SEQ ID NO: 109844 - DNA, 22 bp, Artificial Sequence
  Synthetic oligonucleotide; TTG chr11 5382670 5382691 5382687 5382692 +
taccgaagccagaaccttcctc

SEQ ID NO: 109845 - DNA, 22 bp, Artificial Sequence
  Synthetic oligonucleotide; CTT chr11 5382688 5382709 5382705 5382710 +
cctcataactacaatttaataa

SEQ ID NO: 109846 - DNA, 22 bp, Artificial Sequence
  Synthetic oligonucleotide; TTC chr11 5382689 5382710 5382706 5382711 +
ctcataactacaatttaataag

SEQ ID NO: 109847 - DNA, 22 bp, Artificial Sequence
  Synthetic oligonucleotide; CTC chr11 5382692 5382713 5382709 5382714 +
ataactacaatttaataagaca

SEQ ID NO: 109848 - DNA, 22 bp, Artificial Sequence
  Synthetic oligonucleotide; CTA chr11 5382699 5382720 5382716 5382721 +
caatttaataagacatcctgct

SEQ ID NO: 109849 - DNA, 22 bp, Artificial Sequence
  Synthetic oligonucleotide; TTT chr11 5382705 5382726 5382722 5382727 +
aataagacatcctgctctctgc

SEQ ID NO: 109850 - DNA, 22 bp, Artificial Sequence
  Synthetic oligonucleotide; TTA chr11 5382706 5382727 5382723 5382728 +
ataagacatcctgctctctgca

SEQ ID NO: 109851 - DNA, 22 bp, Artificial Sequence
  Synthetic oligonucleotide; CTG chr11 5382719 5382740 5382736 5382741 +
ctctctgcatcttgtcctatca

SEQ ID NO: 109852 - DNA, 22 bp, Artificial Sequence
  Synthetic oligonucleotide; CTC chr11 5382722 5382743 5382739 5382744 +
tctgcatcttgtcctatcaccc

SEQ ID NO: 109853 - DNA, 22 bp, Artificial Sequence
  Synthetic oligonucleotide; CTC chr11 5382724 5382745 5382741 5382746 +
tgcatcttgtcctatcaccctg

SEQ ID NO: 109854 - DNA, 22 bp, Artificial Sequence
  Synthetic oligonucleotide; CTG chr11 5382726 5382747 5382743 5382748 +
catcttgtcctatcaccctgac

SEQ ID NO: 109855 - DNA, 22 bp, Artificial Sequence
  Synthetic oligonucleotide; CTT chr11 5382732 5382753 5382749 5382754 +
gtcctatcaccctgactctcct

SEQ ID NO: 109856 - DNA, 22 bp, Artificial Sequence
  Synthetic oligonucleotide; TTG chr11 5382733 5382754 5382750 5382755 +
tcctatcaccctgactctccta

SEQ ID NO: 109857 - DNA, 22 bp, Artificial Sequence
  Synthetic oligonucleotide; CTA chr11 5382738 5382759 5382755 5382760 +
tcaccctgactctcctacactc

SEQ ID NO: 109858 - DNA, 22 bp, Artificial Sequence
  Synthetic oligonucleotide; CTG chr11 5382746 5382767 5382763 5382768 +
actctcctacactctggcccta

SEQ ID NO: 109859 - DNA, 22 bp, Artificial Sequence
  Synthetic oligonucleotide; CTC chr11 5382750 5382771 5382767 5382772 +
tcctacactctggccctaacaa

SEQ ID NO: 109860 - DNA, 22 bp, Artificial Sequence
  Synthetic oligonucleotide; CTC chr11 5382752 5382773 5382769 5382774 +
ctacactctggccctaacaacc

SEQ ID NO: 109861 - DNA, 22 bp, Artificial Sequence
  Synthetic oligonucleotide; CTA chr11 5382755 5382776 5382772 5382777 +
cactctggccctaacaaccagt

SEQ ID NO: 109862 - DNA, 22 bp, Artificial Sequence
  Synthetic oligonucleotide; CTC chr11 5382760 5382781 5382777 5382782 +
tggccctaacaaccagttactt

SEQ ID NO: 109863 - DNA, 22 bp, Artificial Sequence
  Synthetic oligonucleotide; CTG chr11 5382762 5382783 5382779 5382784 +
gccctaacaaccagttacttac

SEQ ID NO: 109864 - DNA, 22 bp, Artificial Sequence
  Synthetic oligonucleotide; CTA chr11 5382768 5382789 5382785 5382790 +
acaaccagttacttacccggtg

SEQ ID NO: 109865 - DNA, 22 bp, Artificial Sequence
  Synthetic oligonucleotide; TTA chr11 5382779 5382800 5382796 5382801 +
cttacccggtgtaaggtggtgc

SEQ ID NO: 109866 - DNA, 22 bp, Artificial Sequence
  Synthetic oligonucleotide; CTT chr11 5382782 5382803 5382799 5382804 +
acccggtgtaaggtggtgccac

SEQ ID NO: 109867 - DNA, 22 bp, Artificial Sequence
  Synthetic oligonucleotide; TTA chr11 5382783 5382804 5382800 5382805 +
cccggtgtaaggtggtgccact

SEQ ID NO: 109868 - DNA, 22 bp, Artificial Sequence
  Synthetic oligonucleotide; CTT chr11 5382806 5382827 5382823 5382828 +
ctgtctgggtgtggtctgatca

SEQ ID NO: 109869 - DNA, 22 bp, Artificial Sequence
  Synthetic oligonucleotide; TTC chr11 5382807 5382828 5382824 5382829 +
tgtctgggtgtggtctgatcac

SEQ ID NO: 109870 - DNA, 22 bp, Artificial Sequence
  Synthetic oligonucleotide; CTG chr11 5382809 5382830 5382826 5382831 +
tctgggtgtggtctgatcacaa

SEQ ID NO: 109871 - DNA, 22 bp, Artificial Sequence
  Synthetic oligonucleotide; CTG chr11 5382813 5382834 5382830 5382835 +
ggtgtggtctgatcacaatggc

SEQ ID NO: 109872 - DNA, 22 bp, Artificial Sequence
  Synthetic oligonucleotide; CTG chr11 5382824 5382845 5382841 5382846 +
atcacaatggcatgtcataaac

SEQ ID NO: 109873 - DNA, 22 bp, Artificial Sequence
  Synthetic oligonucleotide; CTT chr11 5382848 5382869 5382865 5382870 +
catgggtctctgtcctggtttt

SEQ ID NO: 109874 - DNA, 22 bp, Artificial Sequence
  Synthetic oligonucleotide; TTC chr11 5382849 5382870 5382866 5382871 +
atgggtctctgtcctggtttta

SEQ ID NO: 109875 - DNA, 22 bp, Artificial Sequence
  Synthetic oligonucleotide; CTC chr11 5382858 5382879 5382875 5382880 +
tgtcctggttttagatctgtat

SEQ ID NO: 109876 - DNA, 22 bp, Artificial Sequence
  Synthetic oligonucleotide; CTG chr11 5382860 5382881 5382877 5382882 +
tcctggttttagatctgtatgc

SEQ ID NO: 109877 - DNA, 22 bp, Artificial Sequence
  Synthetic oligonucleotide; CTG chr11 5382865 5382886 5382882 5382887 +
gttttagatctgtatgccccgt

SEQ ID NO: 109878 - DNA, 22 bp, Artificial Sequence
  Synthetic oligonucleotide; TTT chr11 5382869 5382890 5382886 5382891 +
tagatctgtatgccccgttttg

SEQ ID NO: 109879 - DNA, 22 bp, Artificial Sequence
  Synthetic oligonucleotide; TTT chr11 5382870 5382891 5382887 5382892 +
agatctgtatgccccgttttgg

SEQ ID NO: 109880 - DNA, 22 bp, Artificial Sequence
  Synthetic oligonucleotide; TTA chr11 5382871 5382892 5382888 5382893 +
gatctgtatgccccgttttgga

SEQ ID NO: 109881 - DNA, 22 bp, Artificial Sequence
  Synthetic oligonucleotide; CTG chr11 5382877 5382898 5382894 5382899 +
tatgccccgttttggagctcat

SEQ ID NO: 109882 - DNA, 22 bp, Artificial Sequence
  Synthetic oligonucleotide; TTT chr11 5382889 5382910 5382906 5382911 +
tggagctcatccccacacaact

SEQ ID NO: 109883 - DNA, 22 bp, Artificial Sequence
  Synthetic oligonucleotide; TTT chr11 5382890 5382911 5382907 5382912 +
ggagctcatccccacacaactc

SEQ ID NO: 109884 - DNA, 22 bp, Artificial Sequence
  Synthetic oligonucleotide; TTG chr11 5382891 5382912 5382908 5382913 +
gagctcatccccacacaactct

SEQ ID NO: 109885 - DNA, 22 bp, Artificial Sequence
  Synthetic oligonucleotide; CTC chr11 5382897 5382918 5382914 5382919 +
atccccacacaactctaatcaa

SEQ ID NO: 109886 - DNA, 22 bp, Artificial Sequence
  Synthetic oligonucleotide; CTC chr11 5382912 5382933 5382929 5382934 +
taatcaaccatgccctatttaa

SEQ ID NO: 109887 - DNA, 22 bp, Artificial Sequence
  Synthetic oligonucleotide; CTA chr11 5382914 5382935 5382931 5382936 +
atcaaccatgccctatttaaag

SEQ ID NO: 109888 - DNA, 22 bp, Artificial Sequence
  Synthetic oligonucleotide; CTA chr11 5382929 5382950 5382946 5382951 +
tttaaaggatgtaataccttgc

SEQ ID NO: 109889 - DNA, 22 bp, Artificial Sequence
  Synthetic oligonucleotide; TTT chr11 5382932 5382953 5382949 5382954 +
aaaggatgtaataccttgcttc

SEQ ID NO: 109890 - DNA, 22 bp, Artificial Sequence
  Synthetic oligonucleotide; TTA chr11 5382933 5382954 5382950 5382955 +
aaggatgtaataccttgcttca

SEQ ID NO: 109891 - DNA, 22 bp, Artificial Sequence
  Synthetic oligonucleotide; CTT chr11 5382949 5382970 5382966 5382971 +
gcttcatgccagtctccaagag

SEQ ID NO: 109892 - DNA, 22 bp, Artificial Sequence
  Synthetic oligonucleotide; TTG chr11 5382950 5382971 5382967 5382972 +
cttcatgccagtctccaagagt

SEQ ID NO: 109893 - DNA, 22 bp, Artificial Sequence
  Synthetic oligonucleotide; CTT chr11 5382953 5382974 5382970 5382975 +
catgccagtctccaagagtgtg

SEQ ID NO: 109894 - DNA, 22 bp, Artificial Sequence
  Synthetic oligonucleotide; TTC chr11 5382954 5382975 5382971 5382976 +
atgccagtctccaagagtgtgt

SEQ ID NO: 109895 - DNA, 22 bp, Artificial Sequence
  Synthetic oligonucleotide; CTC chr11 5382965 5382986 5382982 5382987 +
caagagtgtgtgtgtgtttgtg

SEQ ID NO: 109896 - DNA, 22 bp, Artificial Sequence
  Synthetic oligonucleotide; TTT chr11 5382984 5383005 5383001 5383006 +
gtggtggagaggttgtgtgtga

SEQ ID NO: 109897 - DNA, 22 bp, Artificial Sequence
  Synthetic oligonucleotide; TTG chr11 5382985 5383006 5383002 5383007 +
tggtggagaggttgtgtgtgag

SEQ ID NO: 109898 - DNA, 22 bp, Artificial Sequence
  Synthetic oligonucleotide; TTG chr11 5382999 5383020 5383016 5383021 +
tgtgtgagttttgaaagaaaag

SEQ ID NO: 109899 - DNA, 22 bp, Artificial Sequence
  Synthetic oligonucleotide; TTT chr11 5383010 5383031 5383027 5383032 +
tgaaagaaaagagaaatgtaca

SEQ ID NO: 109900 - DNA, 22 bp, Artificial Sequence
  Synthetic oligonucleotide; TTT chr11 5383011 5383032 5383028 5383033 +
gaaagaaaagagaaatgtacac

SEQ ID NO: 109901 - DNA, 22 bp, Artificial Sequence
  Synthetic oligonucleotide; TTG chr11 5383012 5383033 5383029 5383034 +
aaagaaaagagaaatgtacaca

SEQ ID NO: 109902 - DNA, 22 bp, Artificial Sequence
  Synthetic oligonucleotide; CTG chr11 5383041 5383062 5383058 5383063 +
atcacattaactcaggttctgt

SEQ ID NO: 109903 - DNA, 22 bp, Artificial Sequence
  Synthetic oligonucleotide; TTA chr11 5383050 5383071 5383067 5383072 +
actcaggttctgtagcatagtc

SEQ ID NO: 109904 - DNA, 22 bp, Artificial Sequence
  Synthetic oligonucleotide; CTC chr11 5383054 5383075 5383071 5383076 +
aggttctgtagcatagtctggg

SEQ ID NO: 109905 - DNA, 22 bp, Artificial Sequence
  Synthetic oligonucleotide; TTC chr11 5383060 5383081 5383077 5383082 +
tgtagcatagtctggggaagaa

SEQ ID NO: 109906 - DNA, 22 bp, Artificial Sequence
  Synthetic oligonucleotide; CTG chr11 5383062 5383083 5383079 5383084 +
tagcatagtctggggaagaagt

SEQ ID NO: 109907 - DNA, 22 bp, Artificial Sequence
  Synthetic oligonucleotide; CTG chr11 5383074 5383095 5383091 5383096 +
gggaagaagtacaagactattt

SEQ ID NO: 109908 - DNA, 22 bp, Artificial Sequence
  Synthetic oligonucleotide; CTA chr11 5383093 5383114 5383110 5383115 +
tttttttttttctaaatgttga

SEQ ID NO: 109909 - DNA, 22 bp, Artificial Sequence
  Synthetic oligonucleotide; TTT chr11 5383096 5383117 5383113 5383118 +
ttttttttctaaatgttgatgg

SEQ ID NO: 109910 - DNA, 22 bp, Artificial Sequence
  Synthetic oligonucleotide; TTT chr11 5383097 5383118 5383114 5383119 +
tttttttctaaatgttgatggc

SEQ ID NO: 109911 - DNA, 22 bp, Artificial Sequence
  Synthetic oligonucleotide; TTT chr11 5383098 5383119 5383115 5383120 +
ttttttctaaatgttgatggca

SEQ ID NO: 109912 - DNA, 22 bp, Artificial Sequence
  Synthetic oligonucleotide; TTT chr11 5383099 5383120 5383116 5383121 +
tttttctaaatgttgatggcat

SEQ ID NO: 109913 - DNA, 22 bp, Artificial Sequence
  Synthetic oligonucleotide; TTT chr11 5383100 5383121 5383117 5383122 +
ttttctaaatgttgatggcatt

SEQ ID NO: 109914 - DNA, 22 bp, Artificial Sequence
  Synthetic oligonucleotide; TTT chr11 5383101 5383122 5383118 5383123 +
tttctaaatgttgatggcattt

SEQ ID NO: 109915 - DNA, 22 bp, Artificial Sequence
  Synthetic oligonucleotide; TTT chr11 5383102 5383123 5383119 5383124 +
ttctaaatgttgatggcatttg

SEQ ID NO: 109916 - DNA, 22 bp, Artificial Sequence
  Synthetic oligonucleotide; TTT chr11 5383103 5383124 5383120 5383125 +
tctaaatgttgatggcatttgc

SEQ ID NO: 109917 - DNA, 22 bp, Artificial Sequence
  Synthetic oligonucleotide; TTT chr11 5383104 5383125 5383121 5383126 +
ctaaatgttgatggcatttgct

SEQ ID NO: 109918 - DNA, 22 bp, Artificial Sequence
  Synthetic oligonucleotide; TTC chr11 5383105 5383126 5383122 5383127 +
taaatgttgatggcatttgcta

SEQ ID NO: 109919 - DNA, 22 bp, Artificial Sequence
  Synthetic oligonucleotide; CTA chr11 5383107 5383128 5383124 5383129 +
aatgttgatggcatttgctacc

SEQ ID NO: 109920 - DNA, 22 bp, Artificial Sequence
  Synthetic oligonucleotide; TTG chr11 5383114 5383135 5383131 5383136 +
atggcatttgctaccagaaaag

SEQ ID NO: 109921 - DNA, 22 bp, Artificial Sequence
  Synthetic oligonucleotide; TTT chr11 5383123 5383144 5383140 5383145 +
gctaccagaaaagaaggaaaaa

SEQ ID NO: 109922 - DNA, 22 bp, Artificial Sequence
  Synthetic oligonucleotide; TTG chr11 5383124 5383145 5383141 5383146 +
ctaccagaaaagaaggaaaaaa

SEQ ID NO: 109923 - DNA, 22 bp, Artificial Sequence
  Synthetic oligonucleotide; CTA chr11 5383127 5383148 5383144 5383149 +
ccagaaaagaaggaaaaaagtt

SEQ ID NO: 109924 - DNA, 22 bp, Artificial Sequence
  Synthetic oligonucleotide; TTT chr11 5383150 5383171 5383167 5383172 +
tgtaaaggctacttgttgtagg

SEQ ID NO: 109925 - DNA, 22 bp, Artificial Sequence
  Synthetic oligonucleotide; TTT chr11 5383151 5383172 5383168 5383173 +
gtaaaggctacttgttgtaggg

SEQ ID NO: 109926 - DNA, 22 bp, Artificial Sequence
  Synthetic oligonucleotide; TTG chr11 5383152 5383173 5383169 5383174 +
taaaggctacttgttgtagggc

SEQ ID NO: 109927 - DNA, 22 bp, Artificial Sequence
  Synthetic oligonucleotide; CTA chr11 5383161 5383182 5383178 5383183 +
cttgttgtagggctcattgaag

SEQ ID NO: 109928 - DNA, 22 bp, Artificial Sequence
  Synthetic oligonucleotide; CTT chr11 5383164 5383185 5383181 5383186 +
gttgtagggctcattgaaggaa

SEQ ID NO: 109929 - DNA, 22 bp, Artificial Sequence
  Synthetic oligonucleotide; TTG chr11 5383165 5383186 5383182 5383187 +
ttgtagggctcattgaaggaaa

SEQ ID NO: 109930 - DNA, 22 bp, Artificial Sequence
  Synthetic oligonucleotide; TTG chr11 5383168 5383189 5383185 5383190 +
tagggctcattgaaggaaagtc

SEQ ID NO: 109931 - DNA, 22 bp, Artificial Sequence
  Synthetic oligonucleotide; CTC chr11 5383176 5383197 5383193 5383198 +
attgaaggaaagtccagtgcat

SEQ ID NO: 109932 - DNA, 22 bp, Artificial Sequence
  Synthetic oligonucleotide; TTG chr11 5383180 5383201 5383197 5383202 +
aaggaaagtccagtgcattcaa

SEQ ID NO: 109933 - DNA, 22 bp, Artificial Sequence
  Synthetic oligonucleotide; TTC chr11 5383200 5383221 5383217 5383222 +
aaagatgaagtagagagctttg

SEQ ID NO: 109934 - DNA, 22 bp, Artificial Sequence
  Synthetic oligonucleotide; CTT chr11 5383220 5383241 5383237 5383242 +
tgggaaagcctgagacactgac

SEQ ID NO: 109935 - DNA, 22 bp, Artificial Sequence
  Synthetic oligonucleotide; TTT chr11 5383221 5383242 5383238 5383243 +
gggaaagcctgagacactgacc

SEQ ID NO: 109936 - DNA, 22 bp, Artificial Sequence
  Synthetic oligonucleotide; TTG chr11 5383222 5383243 5383239 5383244 +
ggaaagcctgagacactgacct

SEQ ID NO: 109937 - DNA, 22 bp, Artificial Sequence
  Synthetic oligonucleotide; CTG chr11 5383232 5383253 5383249 5383254 +
agacactgacctggacatttgt

SEQ ID NO: 109938 - DNA, 22 bp, Artificial Sequence
  Synthetic oligonucleotide; CTG chr11 5383240 5383261 5383257 5383262 +
acctggacatttgtttggggta

SEQ ID NO: 109939 - DNA, 22 bp, Artificial Sequence
  Synthetic oligonucleotide; CTG chr11 5383245 5383266 5383262 5383267 +
gacatttgtttggggtaggatt

SEQ ID NO: 109940 - DNA, 22 bp, Artificial Sequence
  Synthetic oligonucleotide; TTT chr11 5383252 5383273 5383269 5383274 +
gtttggggtaggattgaatatg

SEQ ID NO: 109941 - DNA, 22 bp, Artificial Sequence
  Synthetic oligonucleotide; TTG chr11 5383253 5383274 5383270 5383275 +
tttggggtaggattgaatatgc

SEQ ID NO: 109942 - DNA, 22 bp, Artificial Sequence
  Synthetic oligonucleotide; TTT chr11 5383256 5383277 5383273 5383278 +
ggggtaggattgaatatgcaag

SEQ ID NO: 109943 - DNA, 22 bp, Artificial Sequence
  Synthetic oligonucleotide; TTG chr11 5383257 5383278 5383274 5383279 +
gggtaggattgaatatgcaaga

SEQ ID NO: 109944 - DNA, 22 bp, Artificial Sequence
  Synthetic oligonucleotide; TTG chr11 5383268 5383289 5383285 5383290 +
aatatgcaagattgacttctag

SEQ ID NO: 109945 - DNA, 22 bp, Artificial Sequence
  Synthetic oligonucleotide; TTG chr11 5383282 5383303 5383299 5383304 +
acttctaggtccaaagatatag

SEQ ID NO: 109946 - DNA, 22 bp, Artificial Sequence
  Synthetic oligonucleotide; CTT chr11 5383286 5383307 5383303 5383308 +
ctaggtccaaagatatagaggc

SEQ ID NO: 109947 - DNA, 22 bp, Artificial Sequence
  Synthetic oligonucleotide; TTC chr11 5383287 5383308 5383304 5383309 +
taggtccaaagatatagaggct

SEQ ID NO: 109948 - DNA, 22 bp, Artificial Sequence
  Synthetic oligonucleotide; CTA chr11 5383289 5383310 5383306 5383311 +
ggtccaaagatatagaggctgg

SEQ ID NO: 109949 - DNA, 22 bp, Artificial Sequence
  Synthetic oligonucleotide; CTG chr11 5383310 5383331 5383327 5383332 +
gcagagatggagggcaatttaa

SEQ ID NO: 109950 - DNA, 22 bp, Artificial Sequence
  Synthetic oligonucleotide; TTT chr11 5383330 5383351 5383347 5383352 +
aattatctgcagtaaatggaaa

SEQ ID NO: 109951 - DNA, 22 bp, Artificial Sequence
  Synthetic oligonucleotide; TTA chr11 5383331 5383352 5383348 5383353 +
attatctgcagtaaatggaaat

SEQ ID NO: 109952 - DNA, 22 bp, Artificial Sequence
  Synthetic oligonucleotide; TTA chr11 5383335 5383356 5383352 5383357 +
tctgcagtaaatggaaatataa

SEQ ID NO: 109953 - DNA, 22 bp, Artificial Sequence
  Synthetic oligonucleotide; CTG chr11 5383339 5383360 5383356 5383361 +
cagtaaatggaaatataaaaat

SEQ ID NO: 109954 - DNA, 22 bp, Artificial Sequence
  Synthetic oligonucleotide; CTT chr11 5383396 5383417 5383413 5383418 +
gaagtagtggtgattgtggtgc

SEQ ID NO: 109955 - DNA, 22 bp, Artificial Sequence
  Synthetic oligonucleotide; TTG chr11 5383397 5383418 5383414 5383419 +
aagtagtggtgattgtggtgct

SEQ ID NO: 109956 - DNA, 22 bp, Artificial Sequence
  Synthetic oligonucleotide; TTG chr11 5383412 5383433 5383429 5383434 +
tggtgcttcaaggcagatgtgc

SEQ ID NO: 109957 - DNA, 22 bp, Artificial Sequence
  Synthetic oligonucleotide; CTT chr11 5383420 5383441 5383437 5383442 +
caaggcagatgtgcaatttaaa

SEQ ID NO: 109958 - DNA, 22 bp, Artificial Sequence
  Synthetic oligonucleotide; TTC chr11 5383421 5383442 5383438 5383443 +
aaggcagatgtgcaatttaaaa

SEQ ID NO: 109959 - DNA, 22 bp, Artificial Sequence
  Synthetic oligonucleotide; TTT chr11 5383439 5383460 5383456 5383461 +
aaaagccactgtgaacatcaca

SEQ ID NO: 109960 - DNA, 22 bp, Artificial Sequence
  Synthetic oligonucleotide; TTA chr11 5383440 5383461 5383457 5383462 +
aaagccactgtgaacatcacat

SEQ ID NO: 109961 - DNA, 22 bp, Artificial Sequence
  Synthetic oligonucleotide; CTG chr11 5383450 5383471 5383467 5383472 +
tgaacatcacatggataatcct

SEQ ID NO: 109962 - DNA, 22 bp, Artificial Sequence
  Synthetic oligonucleotide; CTC chr11 5383473 5383494 5383490 5383495 +
ttcatatactacatccgacctc

SEQ ID NO: 109963 - DNA, 22 bp, Artificial Sequence
  Synthetic oligonucleotide; CTT chr11 5383475 5383496 5383492 5383497 +
catatactacatccgacctctc

SEQ ID NO: 109964 - DNA, 22 bp, Artificial Sequence
  Synthetic oligonucleotide; TTC chr11 5383476 5383497 5383493 5383498 +
atatactacatccgacctctct

SEQ ID NO: 109965 - DNA, 22 bp, Artificial Sequence
  Synthetic oligonucleotide; CTA chr11 5383484 5383505 5383501 5383506 +
catccgacctctctggaaaacg

SEQ ID NO: 109966 - DNA, 22 bp, Artificial Sequence
  Synthetic oligonucleotide; CTC chr11 5383495 5383516 5383512 5383517 +
tctggaaaacgacgggtccatt

SEQ ID NO: 109967 - DNA, 22 bp, Artificial Sequence
  Synthetic oligonucleotide; CTC chr11 5383497 5383518 5383514 5383519 +
tggaaaacgacgggtccattac

SEQ ID NO: 109968 - DNA, 22 bp, Artificial Sequence
  Synthetic oligonucleotide; CTG chr11 5383499 5383520 5383516 5383521 +
gaaaacgacgggtccattacta

SEQ ID NO: 109969 - DNA, 22 bp, Artificial Sequence
  Synthetic oligonucleotide; TTA chr11 5383518 5383539 5383535 5383540 +
ctagtggataacagaagacagt

SEQ ID NO: 109970 - DNA, 22 bp, Artificial Sequence
  Synthetic oligonucleotide; CTA chr11 5383521 5383542 5383538 5383543 +
gtggataacagaagacagtaaa

SEQ ID NO: 109971 - DNA, 22 bp, Artificial Sequence
  Synthetic oligonucleotide; TTG chr11 5383567 5383588 5383584 5383589 +
acttctttatgaaattaaaaat

SEQ ID NO: 109972 - DNA, 22 bp, Artificial Sequence
  Synthetic oligonucleotide; CTT chr11 5383571 5383592 5383588 5383593 +
ctttatgaaattaaaaataaac

SEQ ID NO: 109973 - DNA, 22 bp, Artificial Sequence
  Synthetic oligonucleotide; TTC chr11 5383572 5383593 5383589 5383594 +
tttatgaaattaaaaataaaca

SEQ ID NO: 109974 - DNA, 22 bp, Artificial Sequence
  Synthetic oligonucleotide; CTT chr11 5383574 5383595 5383591 5383596 +
tatgaaattaaaaataaacaga

SEQ ID NO: 109975 - DNA, 22 bp, Artificial Sequence
  Synthetic oligonucleotide; TTT chr11 5383575 5383596 5383592 5383597 +
atgaaattaaaaataaacagat

SEQ ID NO: 109976 - DNA, 22 bp, Artificial Sequence
  Synthetic oligonucleotide; TTA chr11 5383576 5383597 5383593 5383598 +
tgaaattaaaaataaacagata

SEQ ID NO: 109977 - DNA, 22 bp, Artificial Sequence
  Synthetic oligonucleotide; TTA chr11 5383584 5383605 5383601 5383606 +
aaaataaacagataaggcagta

SEQ ID NO: 109978 - DNA, 22 bp, Artificial Sequence
  Synthetic oligonucleotide; CTT chr11 5383612 5383633 5383629 5383634 +
ttgttgcagcagatgtctgtgt

SEQ ID NO: 109979 - DNA, 22 bp, Artificial Sequence
  Synthetic oligonucleotide; TTT chr11 5383613 5383634 5383630 5383635 +
tgttgcagcagatgtctgtgta

SEQ ID NO: 109980 - DNA, 22 bp, Artificial Sequence
  Synthetic oligonucleotide; TTT chr11 5383614 5383635 5383631 5383636 +
gttgcagcagatgtctgtgtag

SEQ ID NO: 109981 - DNA, 22 bp, Artificial Sequence
  Synthetic oligonucleotide; TTG chr11 5383615 5383636 5383632 5383637 +
ttgcagcagatgtctgtgtagc

SEQ ID NO: 109982 - DNA, 22 bp, Artificial Sequence
  Synthetic oligonucleotide; TTG chr11 5383618 5383639 5383635 5383640 +
cagcagatgtctgtgtagccaa

SEQ ID NO: 109983 - DNA, 22 bp, Artificial Sequence
  Synthetic oligonucleotide; CTG chr11 5383631 5383652 5383648 5383653 +
tgtagccaaaacctggggactg

SEQ ID NO: 109984 - DNA, 22 bp, Artificial Sequence
  Synthetic oligonucleotide; CTG chr11 5383646 5383667 5383663 5383668 +
gggactgaatgctaaaaagtta

SEQ ID NO: 109985 - DNA, 22 bp, Artificial Sequence
  Synthetic oligonucleotide; CTG chr11 5383653 5383674 5383670 5383675 +
aatgctaaaaagttagggctct

SEQ ID NO: 109986 - DNA, 22 bp, Artificial Sequence
  Synthetic oligonucleotide; CTA chr11 5383660 5383681 5383677 5383682 +
aaaagttagggctcttcagctt

SEQ ID NO: 109987 - DNA, 22 bp, Artificial Sequence
  Synthetic oligonucleotide; TTA chr11 5383668 5383689 5383685 5383690 +
gggctcttcagcttcaggagac

SEQ ID NO: 109988 - DNA, 22 bp, Artificial Sequence
  Synthetic oligonucleotide; CTC chr11 5383674 5383695 5383691 5383696 +
ttcagcttcaggagacaggggt

SEQ ID NO: 109989 - DNA, 22 bp, Artificial Sequence
  Synthetic oligonucleotide; CTT chr11 5383676 5383697 5383693 5383698 +
cagcttcaggagacaggggtgg

SEQ ID NO: 109990 - DNA, 22 bp, Artificial Sequence
  Synthetic oligonucleotide; TTC chr11 5383677 5383698 5383694 5383699 +
agcttcaggagacaggggtgga

SEQ ID NO: 109991 - DNA, 22 bp, Artificial Sequence
  Synthetic oligonucleotide; CTT chr11 5383682 5383703 5383699 5383704 +
caggagacaggggtggagataa

SEQ ID NO: 109992 - DNA, 22 bp, Artificial Sequence
  Synthetic oligonucleotide; TTC chr11 5383683 5383704 5383700 5383705 +
aggagacaggggtggagataaa

SEQ ID NO: 109993 - DNA, 22 bp, Artificial Sequence
  Synthetic oligonucleotide; TTT chr11 5383713 5383734 5383730 5383735 +
cctgcccataggattcccagcc

SEQ ID NO: 109994 - DNA, 22 bp, Artificial Sequence
  Synthetic oligonucleotide; TTC chr11 5383714 5383735 5383731 5383736 +
ctgcccataggattcccagccc

SEQ ID NO: 109995 - DNA, 22 bp, Artificial Sequence
  Synthetic oligonucleotide; CTG chr11 5383717 5383738 5383734 5383739 +
cccataggattcccagccctgg

SEQ ID NO: 109996 - DNA, 22 bp, Artificial Sequence
  Synthetic oligonucleotide; TTC chr11 5383729 5383750 5383746 5383751 +
ccagccctggggaccctttgtt

SEQ ID NO: 109997 - DNA, 22 bp, Artificial Sequence
  Synthetic oligonucleotide; CTG chr11 5383738 5383759 5383755 5383760 +
gggaccctttgtttaccattaa

SEQ ID NO: 109998 - DNA, 22 bp, Artificial Sequence
  Synthetic oligonucleotide; CTT chr11 5383747 5383768 5383764 5383769 +
tgtttaccattaagttctccca

SEQ ID NO: 109999 - DNA, 22 bp, Artificial Sequence
  Synthetic oligonucleotide; TTT chr11 5383748 5383769 5383765 5383770 +
gtttaccattaagttctcccag

SEQ ID NO: 110000 - DNA, 22 bp, Artificial Sequence
  Synthetic oligonucleotide; TTG chr11 5383749 5383770 5383766 5383771 +
tttaccattaagttctcccagc

SEQ ID NO: 110001 - DNA, 22 bp, Artificial Sequence
  Synthetic oligonucleotide; TTT chr11 5383752 5383773 5383769 5383774 +
accattaagttctcccagctgg

SEQ ID NO: 110002 - DNA, 22 bp, Artificial Sequence
  Synthetic oligonucleotide; TTA chr11 5383753 5383774 5383770 5383775 +
ccattaagttctcccagctgga

SEQ ID NO: 110003 - DNA, 22 bp, Artificial Sequence
  Synthetic oligonucleotide; TTA chr11 5383759 5383780 5383776 5383781 +
agttctcccagctggagccatg

SEQ ID NO: 110004 - DNA, 22 bp, Artificial Sequence
  Synthetic oligonucleotide; TTC chr11 5383764 5383785 5383781 5383786 +
tcccagctggagccatggtctt

SEQ ID NO: 110005 - DNA, 22 bp, Artificial Sequence
  Synthetic oligonucleotide; CTC chr11 5383766 5383787 5383783 5383788 +
ccagctggagccatggtcttta

SEQ ID NO: 110006 - DNA, 22 bp, Artificial Sequence
  Synthetic oligonucleotide; CTG chr11 5383773 5383794 5383790 5383795 +
gagccatggtctttaggaggat

SEQ ID NO: 110007 - DNA, 22 bp, Artificial Sequence
  Synthetic oligonucleotide; CTT chr11 5383786 5383807 5383803 5383808 +
taggaggataaatccttctgtg

SEQ ID NO: 110008 - DNA, 22 bp, Artificial Sequence
  Synthetic oligonucleotide; TTT chr11 5383787 5383808 5383804 5383809 +
aggaggataaatccttctgtga

SEQ ID NO: 110009 - DNA, 22 bp, Artificial Sequence
  Synthetic oligonucleotide; TTA chr11 5383788 5383809 5383805 5383810 +
ggaggataaatccttctgtgac

SEQ ID NO: 110010 - DNA, 22 bp, Artificial Sequence
  Synthetic oligonucleotide; CTT chr11 5383803 5383824 5383820 5383825 +
ctgtgacagccacagccttgtg

SEQ ID NO: 110011 - DNA, 22 bp, Artificial Sequence
  Synthetic oligonucleotide; TTC chr11 5383804 5383825 5383821 5383826 +
tgtgacagccacagccttgtgc

SEQ ID NO: 110012 - DNA, 22 bp, Artificial Sequence
  Synthetic oligonucleotide; CTG chr11 5383806 5383827 5383823 5383828 +
tgacagccacagccttgtgcct

SEQ ID NO: 110013 - DNA, 22 bp, Artificial Sequence
  Synthetic oligonucleotide; CTT chr11 5383822 5383843 5383839 5383844 +
gtgcctctcagtgacccttgtg

SEQ ID NO: 110014 - DNA, 22 bp, Artificial Sequence
  Synthetic oligonucleotide; TTG chr11 5383823 5383844 5383840 5383845 +
tgcctctcagtgacccttgtgt

SEQ ID NO: 110015 - DNA, 22 bp, Artificial Sequence
  Synthetic oligonucleotide; CTC chr11 5383829 5383850 5383846 5383851 +
tcagtgacccttgtgtcatcct

SEQ ID NO: 110016 - DNA, 22 bp, Artificial Sequence
  Synthetic oligonucleotide; CTC chr11 5383831 5383852 5383848 5383853 +
agtgacccttgtgtcatcctta

SEQ ID NO: 110017 - DNA, 22 bp, Artificial Sequence
  Synthetic oligonucleotide; CTT chr11 5383841 5383862 5383858 5383863 +
gtgtcatccttatctatactct

SEQ ID NO: 110018 - DNA, 22 bp, Artificial Sequence
  Synthetic oligonucleotide; TTG chr11 5383842 5383863 5383859 5383864 +
tgtcatccttatctatactctt

SEQ ID NO: 110019 - DNA, 22 bp, Artificial Sequence
  Synthetic oligonucleotide; CTT chr11 5383852 5383873 5383869 5383874 +
atctatactcttctttcttcct

SEQ ID NO: 110020 - DNA, 22 bp, Artificial Sequence
  Synthetic oligonucleotide; TTA chr11 5383853 5383874 5383870 5383875 +
tctatactcttctttcttcctt

SEQ ID NO: 110021 - DNA, 22 bp, Artificial Sequence
  Synthetic oligonucleotide; CTA chr11 5383857 5383878 5383874 5383879 +
tactcttctttcttcctttgga

SEQ ID NO: 110022 - DNA, 22 bp, Artificial Sequence
  Synthetic oligonucleotide; CTC chr11 5383862 5383883 5383879 5383884 +
ttctttcttcctttggaaccta

SEQ ID NO: 110023 - DNA, 22 bp, Artificial Sequence
  Synthetic oligonucleotide; CTT chr11 5383864 5383885 5383881 5383886 +
ctttcttcctttggaacctact

SEQ ID NO: 110024 - DNA, 22 bp, Artificial Sequence
  Synthetic oligonucleotide; TTC chr11 5383865 5383886 5383882 5383887 +
tttcttcctttggaacctactc

SEQ ID NO: 110025 - DNA, 22 bp, Artificial Sequence
  Synthetic oligonucleotide; CTT chr11 5383867 5383888 5383884 5383889 +
tcttcctttggaacctactcat

SEQ ID NO: 110026 - DNA, 22 bp, Artificial Sequence
  Synthetic oligonucleotide; TTT chr11 5383868 5383889 5383885 5383890 +
cttcctttggaacctactcatt

SEQ ID NO: 110027 - DNA, 22 bp, Artificial Sequence
  Synthetic oligonucleotide; TTC chr11 5383869 5383890 5383886 5383891 +
ttcctttggaacctactcattg

SEQ ID NO: 110028 - DNA, 22 bp, Artificial Sequence
  Synthetic oligonucleotide; CTT chr11 5383871 5383892 5383888 5383893 +
cctttggaacctactcattggc

SEQ ID NO: 110029 - DNA, 22 bp, Artificial Sequence
  Synthetic oligonucleotide; TTC chr11 5383872 5383893 5383889 5383894 +
ctttggaacctactcattggct

SEQ ID NO: 110030 - DNA, 22 bp, Artificial Sequence
  Synthetic oligonucleotide; CTT chr11 5383875 5383896 5383892 5383897 +
tggaacctactcattggcttca

SEQ ID NO: 110031 - DNA, 22 bp, Artificial Sequence
  Synthetic oligonucleotide; TTT chr11 5383876 5383897 5383893 5383898 +
ggaacctactcattggcttcac

SEQ ID NO: 110032 - DNA, 22 bp, Artificial Sequence
  Synthetic oligonucleotide; TTG chr11 5383877 5383898 5383894 5383899 +
gaacctactcattggcttcaca

SEQ ID NO: 110033 - DNA, 22 bp, Artificial Sequence
  Synthetic oligonucleotide; CTA chr11 5383884 5383905 5383901 5383906 +
ctcattggcttcacatttttgt

SEQ ID NO: 110034 - DNA, 22 bp, Artificial Sequence
  Synthetic oligonucleotide; CTC chr11 5383887 5383908 5383904 5383909 +
attggcttcacatttttgttat

SEQ ID NO: 110035 - DNA, 22 bp, Artificial Sequence
  Synthetic oligonucleotide; TTG chr11 5383891 5383912 5383908 5383913 +
gcttcacatttttgttattacc

SEQ ID NO: 110036 - DNA, 22 bp, Artificial Sequence
  Synthetic oligonucleotide; CTT chr11 5383895 5383916 5383912 5383917 +
cacatttttgttattacctgct

SEQ ID NO: 110037 - DNA, 22 bp, Artificial Sequence
  Synthetic oligonucleotide; TTC chr11 5383896 5383917 5383913 5383918 +
acatttttgttattacctgctg

SEQ ID NO: 110038 - DNA, 22 bp, Artificial Sequence
  Synthetic oligonucleotide; TTT chr11 5383902 5383923 5383919 5383924 +
ttgttattacctgctggtgagt

SEQ ID NO: 110039 - DNA, 22 bp, Artificial Sequence
  Synthetic oligonucleotide; TTT chr11 5383903 5383924 5383920 5383925 +
tgttattacctgctggtgagtc

SEQ ID NO: 110040 - DNA, 22 bp, Artificial Sequence
  Synthetic oligonucleotide; TTT chr11 5383904 5383925 5383921 5383926 +
gttattacctgctggtgagtct

SEQ ID NO: 110041 - DNA, 22 bp, Artificial Sequence
  Synthetic oligonucleotide; TTG chr11 5383905 5383926 5383922 5383927 +
ttattacctgctggtgagtctc

SEQ ID NO: 110042 - DNA, 22 bp, Artificial Sequence
  Synthetic oligonucleotide; TTA chr11 5383908 5383929 5383925 5383930 +
ttacctgctggtgagtctcact

SEQ ID NO: 110043 - DNA, 22 bp, Artificial Sequence
  Synthetic oligonucleotide; TTA chr11 5383911 5383932 5383928 5383933 +
cctgctggtgagtctcactact

SEQ ID NO: 110044 - DNA, 22 bp, Artificial Sequence
  Synthetic oligonucleotide; CTG chr11 5383915 5383936 5383932 5383937 +
ctggtgagtctcactactgtct

SEQ ID NO: 110045 - DNA, 22 bp, Artificial Sequence
  Synthetic oligonucleotide; CTG chr11 5383918 5383939 5383935 5383940 +
gtgagtctcactactgtcttgt

SEQ ID NO: 110046 - DNA, 22 bp, Artificial Sequence
  Synthetic oligonucleotide; CTC chr11 5383927 5383948 5383944 5383949 +
actactgtcttgtgccggggtt

SEQ ID NO: 110047 - DNA, 22 bp, Artificial Sequence
  Synthetic oligonucleotide; CTA chr11 5383931 5383952 5383948 5383953 +
ctgtcttgtgccggggtttcag

SEQ ID NO: 110048 - DNA, 22 bp, Artificial Sequence
  Synthetic oligonucleotide; CTG chr11 5383934 5383955 5383951 5383956 +
tcttgtgccggggtttcaggag

SEQ ID NO: 110049 - DNA, 22 bp, Artificial Sequence
  Synthetic oligonucleotide; CTT chr11 5383938 5383959 5383955 5383960 +
gtgccggggtttcaggagtggg

SEQ ID NO: 110050 - DNA, 22 bp, Artificial Sequence
  Synthetic oligonucleotide; TTG chr11 5383939 5383960 5383956 5383961 +
tgccggggtttcaggagtgggt

SEQ ID NO: 110051 - DNA, 22 bp, Artificial Sequence
  Synthetic oligonucleotide; TTT chr11 5383950 5383971 5383967 5383972 +
caggagtgggtaattaggggga

SEQ ID NO: 110052 - DNA, 22 bp, Artificial Sequence
  Synthetic oligonucleotide; TTC chr11 5383951 5383972 5383968 5383973 +
aggagtgggtaattagggggac

SEQ ID NO: 110053 - DNA, 22 bp, Artificial Sequence
  Synthetic oligonucleotide; TTA chr11 5383966 5383987 5383983 5383988 +
gggggacatgggagagaggagg

SEQ ID NO: 110054 - DNA, 22 bp, Artificial Sequence
  Synthetic oligonucleotide; CTC chr11 5384056 5384077 5384073 5384078 +
agttacaattaaggcttttccc

SEQ ID NO: 110055 - DNA, 22 bp, Artificial Sequence
  Synthetic oligonucleotide; TTA chr11 5384061 5384082 5384078 5384083 +
caattaaggcttttcccccaaa

SEQ ID NO: 110056 - DNA, 22 bp, Artificial Sequence
  Synthetic oligonucleotide; TTA chr11 5384067 5384088 5384084 5384089 +
aggcttttcccccaaatgtttg

SEQ ID NO: 110057 - DNA, 22 bp, Artificial Sequence
  Synthetic oligonucleotide; CTT chr11 5384073 5384094 5384090 5384095 +
ttcccccaaatgtttgaatgtc

SEQ ID NO: 110058 - DNA, 22 bp, Artificial Sequence
  Synthetic oligonucleotide; TTT chr11 5384074 5384095 5384091 5384096 +
tcccccaaatgtttgaatgtcc

SEQ ID NO: 110059 - DNA, 22 bp, Artificial Sequence
  Synthetic oligonucleotide; TTT chr11 5384075 5384096 5384092 5384097 +
cccccaaatgtttgaatgtcct

SEQ ID NO: 110060 - DNA, 22 bp, Artificial Sequence
  Synthetic oligonucleotide; TTC chr11 5384076 5384097 5384093 5384098 +
ccccaaatgtttgaatgtcctt

SEQ ID NO: 110061 - DNA, 22 bp, Artificial Sequence
  Synthetic oligonucleotide; TTT chr11 5384088 5384109 5384105 5384110 +
gaatgtccttagccaaatggat

SEQ ID NO: 110062 - DNA, 22 bp, Artificial Sequence
  Synthetic oligonucleotide; TTG chr11 5384089 5384110 5384106 5384111 +
aatgtccttagccaaatggatt

SEQ ID NO: 110063 - DNA, 22 bp, Artificial Sequence
  Synthetic oligonucleotide; CTT chr11 5384098 5384119 5384115 5384120 +
agccaaatggattccccacatt

SEQ ID NO: 110064 - DNA, 22 bp, Artificial Sequence
  Synthetic oligonucleotide; TTA chr11 5384099 5384120 5384116 5384121 +
gccaaatggattccccacattc

SEQ ID NO: 110065 - DNA, 22 bp, Artificial Sequence
  Synthetic oligonucleotide; TTC chr11 5384112 5384133 5384129 5384134 +
cccacattccctgcactaagcc

SEQ ID NO: 110066 - DNA, 22 bp, Artificial Sequence
  Synthetic oligonucleotide; TTC chr11 5384121 5384142 5384138 5384143 +
cctgcactaagcctaatgggat

SEQ ID NO: 110067 - DNA, 22 bp, Artificial Sequence
  Synthetic oligonucleotide; CTG chr11 5384125 5384146 5384142 5384147 +
cactaagcctaatgggattttt

SEQ ID NO: 110068 - DNA, 22 bp, Artificial Sequence
  Synthetic oligonucleotide; CTA chr11 5384130 5384151 5384147 5384152 +
agcctaatgggatttttttttc

SEQ ID NO: 110069 - DNA, 22 bp, Artificial Sequence
  Synthetic oligonucleotide; CTA chr11 5384136 5384157 5384153 5384158 +
atgggatttttttttctttgtt

SEQ ID NO: 110070 - DNA, 22 bp, Artificial Sequence
  Synthetic oligonucleotide; TTT chr11 5384145 5384166 5384162 5384167 +
ttttttctttgttttcttttgt

SEQ ID NO: 110071 - DNA, 22 bp, Artificial Sequence
  Synthetic oligonucleotide; TTT chr11 5384146 5384167 5384163 5384168 +
tttttctttgttttcttttgtt

SEQ ID NO: 110072 - DNA, 22 bp, Artificial Sequence
  Synthetic oligonucleotide; TTT chr11 5384147 5384168 5384164 5384169 +
ttttctttgttttcttttgttg

SEQ ID NO: 110073 - DNA, 22 bp, Artificial Sequence
  Synthetic oligonucleotide; TTT chr11 5384148 5384169 5384165 5384170 +
tttctttgttttcttttgttgt

SEQ ID NO: 110074 - DNA, 22 bp, Artificial Sequence
  Synthetic oligonucleotide; TTT chr11 5384149 5384170 5384166 5384171 +
ttctttgttttcttttgttgtt

SEQ ID NO: 110075 - DNA, 22 bp, Artificial Sequence
  Synthetic oligonucleotide; TTT chr11 5384150 5384171 5384167 5384172 +
tctttgttttcttttgttgttg

SEQ ID NO: 110076 - DNA, 22 bp, Artificial Sequence
  Synthetic oligonucleotide; TTT chr11 5384151 5384172 5384168 5384173 +
ctttgttttcttttgttgttgt

SEQ ID NO: 110077 - DNA, 22 bp, Artificial Sequence
  Synthetic oligonucleotide; TTC chr11 5384152 5384173 5384169 5384174 +
tttgttttcttttgttgttgtt

SEQ ID NO: 110078 - DNA, 22 bp, Artificial Sequence
  Synthetic oligonucleotide; CTT chr11 5384154 5384175 5384171 5384176 +
tgttttcttttgttgttgtttc

SEQ ID NO: 110079 - DNA, 22 bp, Artificial Sequence
  Synthetic oligonucleotide; TTT chr11 5384155 5384176 5384172 5384177 +
gttttcttttgttgttgtttct

SEQ ID NO: 110080 - DNA, 22 bp, Artificial Sequence
  Synthetic oligonucleotide; TTG chr11 5384156 5384177 5384173 5384178 +
ttttcttttgttgttgtttctt

SEQ ID NO: 110081 - DNA, 22 bp, Artificial Sequence
  Synthetic oligonucleotide; TTT chr11 5384159 5384180 5384176 5384181 +
tcttttgttgttgtttctttgt

SEQ ID NO: 110082 - DNA, 22 bp, Artificial Sequence
  Synthetic oligonucleotide; TTT chr11 5384160 5384181 5384177 5384182 +
cttttgttgttgtttctttgtt

SEQ ID NO: 110083 - DNA, 22 bp, Artificial Sequence
  Synthetic oligonucleotide; TTC chr11 5384161 5384182 5384178 5384183 +
ttttgttgttgtttctttgttt

SEQ ID NO: 110084 - DNA, 22 bp, Artificial Sequence
  Synthetic oligonucleotide; CTT chr11 5384163 5384184 5384180 5384185 +
ttgttgttgtttctttgtttgt

SEQ ID NO: 110085 - DNA, 22 bp, Artificial Sequence
  Synthetic oligonucleotide; TTT chr11 5384164 5384185 5384181 5384186 +
tgttgttgtttctttgtttgtt

SEQ ID NO: 110086 - DNA, 22 bp, Artificial Sequence
  Synthetic oligonucleotide; TTT chr11 5384165 5384186 5384182 5384187 +
gttgttgtttctttgtttgttg

SEQ ID NO: 110087 - DNA, 22 bp, Artificial Sequence
  Synthetic oligonucleotide; TTG chr11 5384166 5384187 5384183 5384188 +
ttgttgtttctttgtttgttgt

SEQ ID NO: 110088 - DNA, 22 bp, Artificial Sequence
  Synthetic oligonucleotide; TTG chr11 5384169 5384190 5384186 5384191 +
ttgtttctttgtttgttgtttt

SEQ ID NO: 110089 - DNA, 22 bp, Artificial Sequence
  Synthetic oligonucleotide; TTG chr11 5384172 5384193 5384189 5384194 +
tttctttgtttgttgtttttag

SEQ ID NO: 110090 - DNA, 22 bp, Artificial Sequence
  Synthetic oligonucleotide; TTT chr11 5384175 5384196 5384192 5384197 +
ctttgtttgttgtttttagaaa

SEQ ID NO: 110091 - DNA, 22 bp, Artificial Sequence
  Synthetic oligonucleotide; TTC chr11 5384176 5384197 5384193 5384198 +
tttgtttgttgtttttagaaat

SEQ ID NO: 110092 - DNA, 22 bp, Artificial Sequence
  Synthetic oligonucleotide; CTT chr11 5384178 5384199 5384195 5384200 +
tgtttgttgtttttagaaatga

SEQ ID NO: 110093 - DNA, 22 bp, Artificial Sequence
  Synthetic oligonucleotide; TTT chr11 5384179 5384200 5384196 5384201 +
gtttgttgtttttagaaatgag

SEQ ID NO: 110094 - DNA, 22 bp, Artificial Sequence
  Synthetic oligonucleotide; TTG chr11 5384180 5384201 5384197 5384202 +
tttgttgtttttagaaatgagg

SEQ ID NO: 110095 - DNA, 22 bp, Artificial Sequence
  Synthetic oligonucleotide; TTT chr11 5384183 5384204 5384200 5384205 +
gttgtttttagaaatgaggtct

SEQ ID NO: 110096 - DNA, 22 bp, Artificial Sequence
  Synthetic oligonucleotide; TTG chr11 5384184 5384205 5384201 5384206 +
ttgtttttagaaatgaggtcta

SEQ ID NO: 110097 - DNA, 22 bp, Artificial Sequence
  Synthetic oligonucleotide; TTG chr11 5384187 5384208 5384204 5384209 +
tttttagaaatgaggtctagct

SEQ ID NO: 110098 - DNA, 22 bp, Artificial Sequence
  Synthetic oligonucleotide; TTT chr11 5384190 5384211 5384207 5384212 +
ttagaaatgaggtctagctctg

SEQ ID NO: 110099 - DNA, 22 bp, Artificial Sequence
  Synthetic oligonucleotide; TTT chr11 5384191 5384212 5384208 5384213 +
tagaaatgaggtctagctctgt

SEQ ID NO: 110100 - DNA, 22 bp, Artificial Sequence
  Synthetic oligonucleotide; TTT chr11 5384192 5384213 5384209 5384214 +
agaaatgaggtctagctctgtt

SEQ ID NO: 110101 - DNA, 22 bp, Artificial Sequence
  Synthetic oligonucleotide; TTA chr11 5384193 5384214 5384210 5384215 +
gaaatgaggtctagctctgtta

SEQ ID NO: 110102 - DNA, 22 bp, Artificial Sequence
  Synthetic oligonucleotide; CTA chr11 5384206 5384227 5384223 5384228 +
gctctgttacccaggctacagt

SEQ ID NO: 110103 - DNA, 22 bp, Artificial Sequence
  Synthetic oligonucleotide; CTC chr11 5384210 5384231 5384227 5384232 +
tgttacccaggctacagtgcag

SEQ ID NO: 110104 - DNA, 22 bp, Artificial Sequence
  Synthetic oligonucleotide; CTG chr11 5384212 5384233 5384229 5384234 +
ttacccaggctacagtgcagtg

SEQ ID NO: 110105 - DNA, 22 bp, Artificial Sequence
  Synthetic oligonucleotide; TTA chr11 5384215 5384236 5384232 5384237 +
cccaggctacagtgcagtggtg

SEQ ID NO: 110106 - DNA, 22 bp, Artificial Sequence
  Synthetic oligonucleotide; CTA chr11 5384224 5384245 5384241 5384246 +
cagtgcagtggtgtaatcatag

SEQ ID NO: 110107 - DNA, 22 bp, Artificial Sequence
  Synthetic oligonucleotide; CTC chr11 5384249 5384270 5384266 5384271 +
actgtaaactcaaaccggattc

SEQ ID NO: 110108 - DNA, 22 bp, Artificial Sequence
  Synthetic oligonucleotide; CTG chr11 5384253 5384274 5384270 5384275 +
taaactcaaaccggattcaagc

SEQ ID NO: 110109 - DNA, 22 bp, Artificial Sequence
  Synthetic oligonucleotide; CTC chr11 5384260 5384281 5384277 5384282 +
aaaccggattcaagcaatcctc

SEQ ID NO: 110110 - DNA, 22 bp, Artificial Sequence
  Synthetic oligonucleotide; TTC chr11 5384271 5384292 5384288 5384293 +
aagcaatcctcccaccttattc

SEQ ID NO: 110111 - DNA, 22 bp, Artificial Sequence
  Synthetic oligonucleotide; CTC chr11 5384282 5384303 5384299 5384304 +
ccaccttattcttccaagttgc

SEQ ID NO: 110112 - DNA, 22 bp, Artificial Sequence
  Synthetic oligonucleotide; CTT chr11 5384289 5384310 5384306 5384311 +
attcttccaagttgccaggatt

SEQ ID NO: 110113 - DNA, 22 bp, Artificial Sequence
  Synthetic oligonucleotide; TTA chr11 5384290 5384311 5384307 5384312 +
ttcttccaagttgccaggatta

SEQ ID NO: 110114 - DNA, 22 bp, Artificial Sequence
  Synthetic oligonucleotide; TTC chr11 5384293 5384314 5384310 5384315 +
ttccaagttgccaggattataa

SEQ ID NO: 110115 - DNA, 22 bp, Artificial Sequence
  Synthetic oligonucleotide; CTT chr11 5384295 5384316 5384312 5384317 +
ccaagttgccaggattataagt

SEQ ID NO: 110116 - DNA, 22 bp, Artificial Sequence
  Synthetic oligonucleotide; TTC chr11 5384296 5384317 5384313 5384318 +
caagttgccaggattataagtg

SEQ ID NO: 110117 - DNA, 22 bp, Artificial Sequence
  Synthetic oligonucleotide; TTG chr11 5384303 5384324 5384320 5384325 +
ccaggattataagtgtgaacca

SEQ ID NO: 110118 - DNA, 22 bp, Artificial Sequence
  Synthetic oligonucleotide; TTA chr11 5384312 5384333 5384329 5384334 +
taagtgtgaaccaccatataca

SEQ ID NO: 110119 - DNA, 22 bp, Artificial Sequence
  Synthetic oligonucleotide; CTG chr11 5384342 5384363 5384359 5384364 +
ggccttagatttttcacttgga

SEQ ID NO: 110120 - DNA, 22 bp, Artificial Sequence
  Synthetic oligonucleotide; CTT chr11 5384348 5384369 5384365 5384370 +
agatttttcacttggaaaatga

SEQ ID NO: 110121 - DNA, 22 bp, Artificial Sequence
  Synthetic oligonucleotide; TTA chr11 5384349 5384370 5384366 5384371 +
gatttttcacttggaaaatgaa

SEQ ID NO: 110122 - DNA, 22 bp, Artificial Sequence
  Synthetic oligonucleotide; TTT chr11 5384354 5384375 5384371 5384376 +
ttcacttggaaaatgaagtctt

SEQ ID NO: 110123 - DNA, 22 bp, Artificial Sequence
  Synthetic oligonucleotide; TTT chr11 5384355 5384376 5384372 5384377 +
tcacttggaaaatgaagtctta

SEQ ID NO: 110124 - DNA, 22 bp, Artificial Sequence
  Synthetic oligonucleotide; TTT chr11 5384356 5384377 5384373 5384378 +
cacttggaaaatgaagtcttag

SEQ ID NO: 110125 - DNA, 22 bp, Artificial Sequence
  Synthetic oligonucleotide; TTC chr11 5384357 5384378 5384374 5384379 +
acttggaaaatgaagtcttaga

SEQ ID NO: 110126 - DNA, 22 bp, Artificial Sequence
  Synthetic oligonucleotide; CTT chr11 5384361 5384382 5384378 5384383 +
ggaaaatgaagtcttagaaacc

SEQ ID NO: 110127 - DNA, 22 bp, Artificial Sequence
  Synthetic oligonucleotide; TTG chr11 5384362 5384383 5384379 5384384 +
gaaaatgaagtcttagaaacca

SEQ ID NO: 110128 - DNA, 22 bp, Artificial Sequence
  Synthetic oligonucleotide; CTT chr11 5384376 5384397 5384393 5384398 +
agaaaccagggttctcacagaa

SEQ ID NO: 110129 - DNA, 22 bp, Artificial Sequence
  Synthetic oligonucleotide; TTA chr11 5384377 5384398 5384394 5384399 +
gaaaccagggttctcacagaat

SEQ ID NO: 110130 - DNA, 22 bp, Artificial Sequence
  Synthetic oligonucleotide; TTC chr11 5384390 5384411 5384407 5384412 +
tcacagaatctcttctgatatt

SEQ ID NO: 110131 - DNA, 22 bp, Artificial Sequence
  Synthetic oligonucleotide; CTC chr11 5384392 5384413 5384409 5384414 +
acagaatctcttctgatattct

SEQ ID NO: 110132 - DNA, 22 bp, Artificial Sequence
  Synthetic oligonucleotide; CTC chr11 5384402 5384423 5384419 5384424 +
ttctgatattctcagagtctat

SEQ ID NO: 110133 - DNA, 22 bp, Artificial Sequence
  Synthetic oligonucleotide; CTT chr11 5384404 5384425 5384421 5384426 +
ctgatattctcagagtctatgc

SEQ ID NO: 110134 - DNA, 22 bp, Artificial Sequence
  Synthetic oligonucleotide; TTC chr11 5384405 5384426 5384422 5384427 +
tgatattctcagagtctatgca

SEQ ID NO: 110135 - DNA, 22 bp, Artificial Sequence
  Synthetic oligonucleotide; CTG chr11 5384407 5384428 5384424 5384429 +
atattctcagagtctatgcaca

SEQ ID NO: 110136 - DNA, 22 bp, Artificial Sequence
  Synthetic oligonucleotide; TTC chr11 5384413 5384434 5384430 5384435 +
tcagagtctatgcacagaacca

SEQ ID NO: 110137 - DNA, 22 bp, Artificial Sequence
  Synthetic oligonucleotide; CTC chr11 5384415 5384436 5384432 5384437 +
agagtctatgcacagaaccaga

SEQ ID NO: 110138 - DNA, 22 bp, Artificial Sequence
  Synthetic oligonucleotide; CTA chr11 5384423 5384444 5384440 5384445 +
tgcacagaaccagagccagaga

SEQ ID NO: 110139 - DNA, 22 bp, Artificial Sequence
  Synthetic oligonucleotide; CTT chr11 5384466 5384487 5384483 5384488 +
ctcttgctggaaaagaggcgag

SEQ ID NO: 110140 - DNA, 22 bp, Artificial Sequence
  Synthetic oligonucleotide; TTC chr11 5384467 5384488 5384484 5384489 +
tcttgctggaaaagaggcgagc

SEQ ID NO: 110141 - DNA, 22 bp, Artificial Sequence
  Synthetic oligonucleotide; CTC chr11 5384469 5384490 5384486 5384491 +
ttgctggaaaagaggcgagctc

SEQ ID NO: 110142 - DNA, 22 bp, Artificial Sequence
  Synthetic oligonucleotide; CTT chr11 5384471 5384492 5384488 5384493 +
gctggaaaagaggcgagctcat

SEQ ID NO: 110143 - DNA, 22 bp, Artificial Sequence
  Synthetic oligonucleotide; TTG chr11 5384472 5384493 5384489 5384494 +
ctggaaaagaggcgagctcatc

SEQ ID NO: 110144 - DNA, 22 bp, Artificial Sequence
  Synthetic oligonucleotide; CTG chr11 5384475 5384496 5384492 5384497 +
gaaaagaggcgagctcatctgc

SEQ ID NO: 110145 - DNA, 22 bp, Artificial Sequence
  Synthetic oligonucleotide; CTC chr11 5384491 5384512 5384508 5384513 +
atctgcagtattctgttaggaa

SEQ ID NO: 110146 - DNA, 22 bp, Artificial Sequence
  Synthetic oligonucleotide; CTG chr11 5384496 5384517 5384513 5384518 +
cagtattctgttaggaaggcca

SEQ ID NO: 110147 - DNA, 22 bp, Artificial Sequence
  Synthetic oligonucleotide; TTC chr11 5384504 5384525 5384521 5384526 +
tgttaggaaggccaggaggcag

SEQ ID NO: 110148 - DNA, 22 bp, Artificial Sequence
  Synthetic oligonucleotide; CTG chr11 5384506 5384527 5384523 5384528 +
ttaggaaggccaggaggcaggg

SEQ ID NO: 110149 - DNA, 22 bp, Artificial Sequence
  Synthetic oligonucleotide; TTA chr11 5384509 5384530 5384526 5384531 +
ggaaggccaggaggcagggctg

SEQ ID NO: 110150 - DNA, 22 bp, Artificial Sequence
  Synthetic oligonucleotide; CTG chr11 5384531 5384552 5384548 5384553 +
cctcactcccctgatgagtgcc

SEQ ID NO: 110151 - DNA, 22 bp, Artificial Sequence
  Synthetic oligonucleotide; CTC chr11 5384535 5384556 5384552 5384557 +
actcccctgatgagtgcctgca

SEQ ID NO: 110152 - DNA, 22 bp, Artificial Sequence
  Synthetic oligonucleotide; CTC chr11 5384539 5384560 5384556 5384561 +
ccctgatgagtgcctgcatggc

SEQ ID NO: 110153 - DNA, 22 bp, Artificial Sequence
  Synthetic oligonucleotide; CTG chr11 5384544 5384565 5384561 5384566 +
atgagtgcctgcatggccaggc

SEQ ID NO: 110154 - DNA, 22 bp, Artificial Sequence
  Synthetic oligonucleotide; CTG chr11 5384555 5384576 5384572 5384577 +
catggccaggccagcccctccc

SEQ ID NO: 110155 - DNA, 22 bp, Artificial Sequence
  Synthetic oligonucleotide; CTC chr11 5384575 5384596 5384592 5384597 +
cctggatcatgtctagaagtca

SEQ ID NO: 110156 - DNA, 22 bp, Artificial Sequence
  Synthetic oligonucleotide; CTG chr11 5384579 5384600 5384596 5384601 +
gatcatgtctagaagtcaggat

SEQ ID NO: 110157 - DNA, 22 bp, Artificial Sequence
  Synthetic oligonucleotide; CTA chr11 5384590 5384611 5384607 5384612 +
gaagtcaggatggcagaagccc

SEQ ID NO: 110158 - DNA, 22 bp, Artificial Sequence
  Synthetic oligonucleotide; CTC chr11 5384614 5384635 5384631 5384636 +
tggtctctatactctttcctgc

SEQ ID NO: 110159 - DNA, 22 bp, Artificial Sequence
  Synthetic oligonucleotide; CTG chr11 5384616 5384637 5384633 5384638 +
gtctctatactctttcctgccg

SEQ ID NO: 110160 - DNA, 22 bp, Artificial Sequence
  Synthetic oligonucleotide; CTC chr11 5384621 5384642 5384638 5384643 +
tatactctttcctgccgagcca

SEQ ID NO: 110161 - DNA, 22 bp, Artificial Sequence
  Synthetic oligonucleotide; CTA chr11 5384623 5384644 5384640 5384645 +
tactctttcctgccgagccatc

SEQ ID NO: 110162 - DNA, 22 bp, Artificial Sequence
  Synthetic oligonucleotide; CTC chr11 5384628 5384649 5384645 5384650 +
tttcctgccgagccatctggta

SEQ ID NO: 110163 - DNA, 22 bp, Artificial Sequence
  Synthetic oligonucleotide; CTT chr11 5384630 5384651 5384647 5384652 +
tcctgccgagccatctggtata

SEQ ID NO: 110164 - DNA, 22 bp, Artificial Sequence
  Synthetic oligonucleotide; TTT chr11 5384631 5384652 5384648 5384653 +
cctgccgagccatctggtatac

SEQ ID NO: 110165 - DNA, 22 bp, Artificial Sequence
  Synthetic oligonucleotide; TTC chr11 5384632 5384653 5384649 5384654 +
ctgccgagccatctggtataca

SEQ ID NO: 110166 - DNA, 22 bp, Artificial Sequence
  Synthetic oligonucleotide; CTG chr11 5384635 5384656 5384652 5384657 +
ccgagccatctggtatacacac

SEQ ID NO: 110167 - DNA, 22 bp, Artificial Sequence
  Synthetic oligonucleotide; CTG chr11 5384647 5384668 5384664 5384669 +
gtatacacaccctctccttact

SEQ ID NO: 110168 - DNA, 22 bp, Artificial Sequence
  Synthetic oligonucleotide; CTC chr11 5384661 5384682 5384678 5384683 +
tccttactctcatcagaaaaac

SEQ ID NO: 110169 - DNA, 22 bp, Artificial Sequence
  Synthetic oligonucleotide; CTC chr11 5384663 5384684 5384680 5384685 +
cttactctcatcagaaaaacag

SEQ ID NO: 110170 - DNA, 22 bp, Artificial Sequence
  Synthetic oligonucleotide; CTT chr11 5384666 5384687 5384683 5384688 +
actctcatcagaaaaacagtca

SEQ ID NO: 110171 - DNA, 22 bp, Artificial Sequence
  Synthetic oligonucleotide; TTA chr11 5384667 5384688 5384684 5384689 +
ctctcatcagaaaaacagtcat

SEQ ID NO: 110172 - DNA, 22 bp, Artificial Sequence
  Synthetic oligonucleotide; CTC chr11 5384670 5384691 5384687 5384692 +
tcatcagaaaaacagtcattca

SEQ ID NO: 110173 - DNA, 22 bp, Artificial Sequence
  Synthetic oligonucleotide; CTC chr11 5384672 5384693 5384689 5384694 +
atcagaaaaacagtcattcact

SEQ ID NO: 110174 - DNA, 22 bp, Artificial Sequence
  Synthetic oligonucleotide; TTC chr11 5384691 5384712 5384708 5384713 +
acttattcaacaaattattaaa

SEQ ID NO: 110175 - DNA, 22 bp, Artificial Sequence
  Synthetic oligonucleotide; CTT chr11 5384695 5384716 5384712 5384717 +
attcaacaaattattaaatgca

SEQ ID NO: 110176 - DNA, 22 bp, Artificial Sequence
  Synthetic oligonucleotide; TTA chr11 5384696 5384717 5384713 5384718 +
ttcaacaaattattaaatgcat

SEQ ID NO: 110177 - DNA, 22 bp, Artificial Sequence
  Synthetic oligonucleotide; TTC chr11 5384699 5384720 5384716 5384721 +
aacaaattattaaatgcatttt

SEQ ID NO: 110178 - DNA, 22 bp, Artificial Sequence
  Synthetic oligonucleotide; TTA chr11 5384708 5384729 5384725 5384730 +
ttaaatgcattttatatgctgg

SEQ ID NO: 110179 - DNA, 22 bp, Artificial Sequence
  Synthetic oligonucleotide; TTA chr11 5384711 5384732 5384728 5384733 +
aatgcattttatatgctggtcc

SEQ ID NO: 110180 - DNA, 22 bp, Artificial Sequence
  Synthetic oligonucleotide; TTT chr11 5384720 5384741 5384737 5384742 +
tatatgctggtccagttaacat

SEQ ID NO: 110181 - DNA, 22 bp, Artificial Sequence
  Synthetic oligonucleotide; TTT chr11 5384721 5384742 5384738 5384743 +
atatgctggtccagttaacata

SEQ ID NO: 110182 - DNA, 22 bp, Artificial Sequence
  Synthetic oligonucleotide; TTA chr11 5384722 5384743 5384739 5384744 +
tatgctggtccagttaacatag

SEQ ID NO: 110183 - DNA, 22 bp, Artificial Sequence
  Synthetic oligonucleotide; CTG chr11 5384729 5384750 5384746 5384751 +
gtccagttaacatagaaaagac

SEQ ID NO: 110184 - DNA, 22 bp, Artificial Sequence
  Synthetic oligonucleotide; TTA chr11 5384738 5384759 5384755 5384760 +
acatagaaaagaccccatcctc

SEQ ID NO: 110185 - DNA, 22 bp, Artificial Sequence
  Synthetic oligonucleotide; CTC chr11 5384760 5384781 5384777 5384782 +
aatctgcttattttaatccaaa

SEQ ID NO: 110186 - DNA, 22 bp, Artificial Sequence
  Synthetic oligonucleotide; CTG chr11 5384766 5384787 5384783 5384788 +
cttattttaatccaaacaacac

SEQ ID NO: 110187 - DNA, 22 bp, Artificial Sequence
  Synthetic oligonucleotide; CTT chr11 5384769 5384790 5384786 5384791 +
attttaatccaaacaacacctt

SEQ ID NO: 110188 - DNA, 22 bp, Artificial Sequence
  Synthetic oligonucleotide; TTA chr11 5384770 5384791 5384787 5384792 +
ttttaatccaaacaacaccttg

SEQ ID NO: 110189 - DNA, 22 bp, Artificial Sequence
  Synthetic oligonucleotide; TTT chr11 5384773 5384794 5384790 5384795 +
taatccaaacaacaccttgtaa

SEQ ID NO: 110190 - DNA, 22 bp, Artificial Sequence
  Synthetic oligonucleotide; TTT chr11 5384774 5384795 5384791 5384796 +
aatccaaacaacaccttgtaac

SEQ ID NO: 110191 - DNA, 22 bp, Artificial Sequence
  Synthetic oligonucleotide; TTA chr11 5384775 5384796 5384792 5384797 +
atccaaacaacaccttgtaact

SEQ ID NO: 110192 - DNA, 22 bp, Artificial Sequence
  Synthetic oligonucleotide; CTT chr11 5384791 5384812 5384808 5384813 +
gtaacttccccagtatccagga

SEQ ID NO: 110193 - DNA, 22 bp, Artificial Sequence
  Synthetic oligonucleotide; TTG chr11 5384792 5384813 5384809 5384814 +
taacttccccagtatccaggat

SEQ ID NO: 110194 - DNA, 22 bp, Artificial Sequence
  Synthetic oligonucleotide; CTT chr11 5384798 5384819 5384815 5384820 +
ccccagtatccaggatatggcc

SEQ ID NO: 110195 - DNA, 22 bp, Artificial Sequence
  Synthetic oligonucleotide; TTC chr11 5384799 5384820 5384816 5384821 +
cccagtatccaggatatggcct

SEQ ID NO: 110196 - DNA, 22 bp, Artificial Sequence
  Synthetic oligonucleotide; CTT chr11 5384822 5384843 5384839 5384844 +
cgccttccaaaatcctcctcta

SEQ ID NO: 110197 - DNA, 22 bp, Artificial Sequence
  Synthetic oligonucleotide; TTC chr11 5384823 5384844 5384840 5384845 +
gccttccaaaatcctcctctat

SEQ ID NO: 110198 - DNA, 22 bp, Artificial Sequence
  Synthetic oligonucleotide; CTT chr11 5384828 5384849 5384845 5384850 +
ccaaaatcctcctctatcctac

SEQ ID NO: 110199 - DNA, 22 bp, Artificial Sequence
  Synthetic oligonucleotide; TTC chr11 5384829 5384850 5384846 5384851 +
caaaatcctcctctatcctact

SEQ ID NO: 110200 - DNA, 22 bp, Artificial Sequence
  Synthetic oligonucleotide; CTC chr11 5384839 5384860 5384856 5384861 +
ctctatcctactaaaaacaggc

SEQ ID NO: 110201 - DNA, 22 bp, Artificial Sequence
  Synthetic oligonucleotide; CTC chr11 5384842 5384863 5384859 5384864 +
tatcctactaaaaacaggcatg

SEQ ID NO: 110202 - DNA, 22 bp, Artificial Sequence
  Synthetic oligonucleotide; CTA chr11 5384844 5384865 5384861 5384866 +
tcctactaaaaacaggcatgtt

SEQ ID NO: 110203 - DNA, 22 bp, Artificial Sequence
  Synthetic oligonucleotide; CTA chr11 5384849 5384870 5384866 5384871 +
ctaaaaacaggcatgtttacag

SEQ ID NO: 110204 - DNA, 22 bp, Artificial Sequence
  Synthetic oligonucleotide; CTA chr11 5384852 5384873 5384869 5384874 +
aaaacaggcatgtttacagatg

SEQ ID NO: 110205 - DNA, 22 bp, Artificial Sequence
  Synthetic oligonucleotide; TTT chr11 5384867 5384888 5384884 5384889 +
acagatgagtttgaccactgtg

SEQ ID NO: 110206 - DNA, 22 bp, Artificial Sequence
  Synthetic oligonucleotide; TTA chr11 5384868 5384889 5384885 5384890 +
cagatgagtttgaccactgtgg

SEQ ID NO: 110207 - DNA, 22 bp, Artificial Sequence
  Synthetic oligonucleotide; TTT chr11 5384879 5384900 5384896 5384901 +
gaccactgtggaaatgttctct

SEQ ID NO: 110208 - DNA, 22 bp, Artificial Sequence
  Synthetic oligonucleotide; TTG chr11 5384880 5384901 5384897 5384902 +
accactgtggaaatgttctcta

SEQ ID NO: 110209 - DNA, 22 bp, Artificial Sequence
  Synthetic oligonucleotide; CTG chr11 5384887 5384908 5384904 5384909 +
tggaaatgttctctaggggttc

SEQ ID NO: 110210 - DNA, 22 bp, Artificial Sequence
  Synthetic oligonucleotide; TTC chr11 5384898 5384919 5384915 5384920 +
tctaggggttcaaaaatgaata

SEQ ID NO: 110211 - DNA, 22 bp, Artificial Sequence
  Synthetic oligonucleotide; CTC chr11 5384900 5384921 5384917 5384922 +
taggggttcaaaaatgaataat

SEQ ID NO: 110212 - DNA, 22 bp, Artificial Sequence
  Synthetic oligonucleotide; CTA chr11 5384902 5384923 5384919 5384924 +
ggggttcaaaaatgaataatct

SEQ ID NO: 110213 - DNA, 22 bp, Artificial Sequence
  Synthetic oligonucleotide; TTC chr11 5384909 5384930 5384926 5384931 +
aaaaatgaataatctggttcaa

SEQ ID NO: 110214 - DNA, 22 bp, Artificial Sequence
  Synthetic oligonucleotide; CTG chr11 5384925 5384946 5384942 5384947 +
gttcaagtccttgtgtttaggt

SEQ ID NO: 110215 - DNA, 22 bp, Artificial Sequence
  Synthetic oligonucleotide; TTC chr11 5384929 5384950 5384946 5384951 +
aagtccttgtgtttaggtgcag

SEQ ID NO: 110216 - DNA, 22 bp, Artificial Sequence
  Synthetic oligonucleotide; CTT chr11 5384937 5384958 5384954 5384959 +
gtgtttaggtgcagcgtctttt

SEQ ID NO: 110217 - DNA, 22 bp, Artificial Sequence
  Synthetic oligonucleotide; TTG chr11 5384938 5384959 5384955 5384960 +
tgtttaggtgcagcgtcttttg

SEQ ID NO: 110218 - DNA, 22 bp, Artificial Sequence
  Synthetic oligonucleotide; TTT chr11 5384943 5384964 5384960 5384965 +
aggtgcagcgtcttttgcatat

SEQ ID NO: 110219 - DNA, 22 bp, Artificial Sequence
  Synthetic oligonucleotide; TTA chr11 5384944 5384965 5384961 5384966 +
ggtgcagcgtcttttgcatatt

SEQ ID NO: 110220 - DNA, 22 bp, Artificial Sequence
  Synthetic oligonucleotide; CTT chr11 5384957 5384978 5384974 5384979 +
ttgcatattctcctatttacaa

SEQ ID NO: 110221 - DNA, 22 bp, Artificial Sequence
  Synthetic oligonucleotide; TTT chr11 5384958 5384979 5384975 5384980 +
tgcatattctcctatttacaag

SEQ ID NO: 110222 - DNA, 22 bp, Artificial Sequence
  Synthetic oligonucleotide; TTT chr11 5384959 5384980 5384976 5384981 +
gcatattctcctatttacaaga

SEQ ID NO: 110223 - DNA, 22 bp, Artificial Sequence
  Synthetic oligonucleotide; TTG chr11 5384960 5384981 5384977 5384982 +
catattctcctatttacaagaa

SEQ ID NO: 110224 - DNA, 22 bp, Artificial Sequence
  Synthetic oligonucleotide; TTC chr11 5384967 5384988 5384984 5384989 +
tcctatttacaagaaacagtat

SEQ ID NO: 110225 - DNA, 22 bp, Artificial Sequence
  Synthetic oligonucleotide; CTC chr11 5384969 5384990 5384986 5384991 +
ctatttacaagaaacagtatcc

SEQ ID NO: 110226 - DNA, 22 bp, Artificial Sequence
  Synthetic oligonucleotide; CTA chr11 5384972 5384993 5384989 5384994 +
tttacaagaaacagtatcctcc

SEQ ID NO: 110227 - DNA, 22 bp, Artificial Sequence
  Synthetic oligonucleotide; TTT chr11 5384975 5384996 5384992 5384997 +
acaagaaacagtatcctccacc

SEQ ID NO: 110228 - DNA, 22 bp, Artificial Sequence
  Synthetic oligonucleotide; TTA chr11 5384976 5384997 5384993 5384998 +
caagaaacagtatcctccacca

SEQ ID NO: 110229 - DNA, 22 bp, Artificial Sequence
  Synthetic oligonucleotide; CTC chr11 5384993 5385014 5385010 5385015 +
caccaatgtagttcattaaaaa

SEQ ID NO: 110230 - DNA, 22 bp, Artificial Sequence
  Synthetic oligonucleotide; TTC chr11 5385007 5385028 5385024 5385029 +
attaaaaaataactaatattaa

SEQ ID NO: 110231 - DNA, 22 bp, Artificial Sequence
  Synthetic oligonucleotide; TTA chr11 5385011 5385032 5385028 5385033 +
aaaaataactaatattaaattc

SEQ ID NO: 110232 - DNA, 22 bp, Artificial Sequence
  Synthetic oligonucleotide; CTA chr11 5385022 5385043 5385039 5385044 +
atattaaattcaaacaaaagaa

SEQ ID NO: 110233 - DNA, 22 bp, Artificial Sequence
  Synthetic oligonucleotide; TTA chr11 5385028 5385049 5385045 5385050 +
aattcaaacaaaagaatattta

SEQ ID NO: 110234 - DNA, 22 bp, Artificial Sequence
  Synthetic oligonucleotide; TTC chr11 5385033 5385054 5385050 5385055 +
aaacaaaagaatatttagacac

SEQ ID NO: 110235 - DNA, 22 bp, Artificial Sequence
  Synthetic oligonucleotide; TTT chr11 5385049 5385070 5385066 5385071 +
agacacaggtgaggtagagagc

SEQ ID NO: 110236 - DNA, 22 bp, Artificial Sequence
  Synthetic oligonucleotide; TTA chr11 5385050 5385071 5385067 5385072 +
gacacaggtgaggtagagagcc

SEQ ID NO: 110237 - DNA, 22 bp, Artificial Sequence
  Synthetic oligonucleotide; TTA chr11 5385077 5385098 5385094 5385099 +
ctcattgtatactgaaaatctc

SEQ ID NO: 110238 - DNA, 22 bp, Artificial Sequence
  Synthetic oligonucleotide; CTC chr11 5385080 5385101 5385097 5385102 +
attgtatactgaaaatctcttt

SEQ ID NO: 110239 - DNA, 22 bp, Artificial Sequence
  Synthetic oligonucleotide; TTG chr11 5385084 5385105 5385101 5385106 +
tatactgaaaatctcttttcag

SEQ ID NO: 110240 - DNA, 22 bp, Artificial Sequence
  Synthetic oligonucleotide; CTG chr11 5385091 5385112 5385108 5385113 +
aaaatctcttttcaggaatttt

SEQ ID NO: 110241 - DNA, 22 bp, Artificial Sequence
  Synthetic oligonucleotide; CTC chr11 5385099 5385120 5385116 5385121 +
ttttcaggaattttctcctgtg

SEQ ID NO: 110242 - DNA, 22 bp, Artificial Sequence
  Synthetic oligonucleotide; CTT chr11 5385101 5385122 5385118 5385123 +
ttcaggaattttctcctgtgat

SEQ ID NO: 110243 - DNA, 22 bp, Artificial Sequence
  Synthetic oligonucleotide; TTT chr11 5385102 5385123 5385119 5385124 +
tcaggaattttctcctgtgatc

SEQ ID NO: 110244 - DNA, 22 bp, Artificial Sequence
  Synthetic oligonucleotide; TTT chr11 5385103 5385124 5385120 5385125 +
caggaattttctcctgtgatct

SEQ ID NO: 110245 - DNA, 22 bp, Artificial Sequence
  Synthetic oligonucleotide; TTC chr11 5385104 5385125 5385121 5385126 +
aggaattttctcctgtgatcta

SEQ ID NO: 110246 - DNA, 22 bp, Artificial Sequence
  Synthetic oligonucleotide; TTT chr11 5385112 5385133 5385129 5385134 +
tctcctgtgatctaagatgaat

SEQ ID NO: 110247 - DNA, 22 bp, Artificial Sequence
  Synthetic oligonucleotide; TTT chr11 5385113 5385134 5385130 5385135 +
ctcctgtgatctaagatgaatc

SEQ ID NO: 110248 - DNA, 22 bp, Artificial Sequence
  Synthetic oligonucleotide; TTC chr11 5385114 5385135 5385131 5385136 +
tcctgtgatctaagatgaatct

SEQ ID NO: 110249 - DNA, 22 bp, Artificial Sequence
  Synthetic oligonucleotide; CTC chr11 5385116 5385137 5385133 5385138 +
ctgtgatctaagatgaatctac

SEQ ID NO: 110250 - DNA, 22 bp, Artificial Sequence
  Synthetic oligonucleotide; CTG chr11 5385119 5385140 5385136 5385141 +
tgatctaagatgaatctactct

SEQ ID NO: 110251 - DNA, 22 bp, Artificial Sequence
  Synthetic oligonucleotide; CTA chr11 5385126 5385147 5385143 5385148 +
agatgaatctactctgccttga

SEQ ID NO: 110252 - DNA, 22 bp, Artificial Sequence
  Synthetic oligonucleotide; CTA chr11 5385137 5385158 5385154 5385159 +
ctctgccttgaatattttaatt

SEQ ID NO: 110253 - DNA, 22 bp, Artificial Sequence
  Synthetic oligonucleotide; CTC chr11 5385140 5385161 5385157 5385162 +
tgccttgaatattttaattatg

SEQ ID NO: 110254 - DNA, 22 bp, Artificial Sequence
  Synthetic oligonucleotide; CTG chr11 5385142 5385163 5385159 5385164 +
ccttgaatattttaattatgtt

SEQ ID NO: 110255 - DNA, 22 bp, Artificial Sequence
  Synthetic oligonucleotide; CTT chr11 5385146 5385167 5385163 5385168 +
gaatattttaattatgttgtaa

SEQ ID NO: 110256 - DNA, 22 bp, Artificial Sequence
  Synthetic oligonucleotide; TTG chr11 5385147 5385168 5385164 5385169 +
aatattttaattatgttgtaat

SEQ ID NO: 110257 - DNA, 22 bp, Artificial Sequence
  Synthetic oligonucleotide; TTT chr11 5385154 5385175 5385171 5385176 +
taattatgttgtaattagatgt

SEQ ID NO: 110258 - DNA, 22 bp, Artificial Sequence
  Synthetic oligonucleotide; TTT chr11 5385155 5385176 5385172 5385177 +
aattatgttgtaattagatgta

SEQ ID NO: 110259 - DNA, 22 bp, Artificial Sequence
  Synthetic oligonucleotide; TTA chr11 5385156 5385177 5385173 5385178 +
attatgttgtaattagatgtaa

SEQ ID NO: 110260 - DNA, 22 bp, Artificial Sequence
  Synthetic oligonucleotide; TTA chr11 5385160 5385181 5385177 5385182 +
tgttgtaattagatgtaactga

SEQ ID NO: 110261 - DNA, 22 bp, Artificial Sequence
  Synthetic oligonucleotide; TTG chr11 5385165 5385186 5385182 5385187 +
taattagatgtaactgactgct

SEQ ID NO: 110262 - DNA, 22 bp, Artificial Sequence
  Synthetic oligonucleotide; TTA chr11 5385171 5385192 5385188 5385193 +
gatgtaactgactgctctgagt

SEQ ID NO: 110263 - DNA, 22 bp, Artificial Sequence
  Synthetic oligonucleotide; CTG chr11 5385181 5385202 5385198 5385203 +
actgctctgagtggactcctcc

SEQ ID NO: 110264 - DNA, 22 bp, Artificial Sequence
  Synthetic oligonucleotide; CTG chr11 5385185 5385206 5385202 5385207 +
ctctgagtggactcctccattg

SEQ ID NO: 110265 - DNA, 22 bp, Artificial Sequence
  Synthetic oligonucleotide; CTC chr11 5385188 5385209 5385205 5385210 +
tgagtggactcctccattgctt

SEQ ID NO: 110266 - DNA, 22 bp, Artificial Sequence
  Synthetic oligonucleotide; CTG chr11 5385190 5385211 5385207 5385212 +
agtggactcctccattgcttag

SEQ ID NO: 110267 - DNA, 22 bp, Artificial Sequence
  Synthetic oligonucleotide; CTC chr11 5385199 5385220 5385216 5385221 +
ctccattgcttagtagacatga

SEQ ID NO: 110268 - DNA, 22 bp, Artificial Sequence
  Synthetic oligonucleotide; CTC chr11 5385202 5385223 5385219 5385224 +
cattgcttagtagacatgaaaa

SEQ ID NO: 110269 - DNA, 22 bp, Artificial Sequence
  Synthetic oligonucleotide; TTG chr11 5385207 5385228 5385224 5385229 +
cttagtagacatgaaaaaatga

SEQ ID NO: 110270 - DNA, 22 bp, Artificial Sequence
  Synthetic oligonucleotide; CTT chr11 5385210 5385231 5385227 5385232 +
agtagacatgaaaaaatgactg

SEQ ID NO: 110271 - DNA, 22 bp, Artificial Sequence
  Synthetic oligonucleotide; TTA chr11 5385211 5385232 5385228 5385233 +
gtagacatgaaaaaatgactgt

SEQ ID NO: 110272 - DNA, 22 bp, Artificial Sequence
  Synthetic oligonucleotide; CTG chr11 5385232 5385253 5385249 5385254 +
ttgctctcctatcatggataat

SEQ ID NO: 110273 - DNA, 22 bp, Artificial Sequence
  Synthetic oligonucleotide; TTG chr11 5385235 5385256 5385252 5385257 +
ctctcctatcatggataattat

SEQ ID NO: 110274 - DNA, 22 bp, Artificial Sequence
  Synthetic oligonucleotide; CTC chr11 5385238 5385259 5385255 5385260 +
tcctatcatggataattatctc

SEQ ID NO: 110275 - DNA, 22 bp, Artificial Sequence
  Synthetic oligonucleotide; CTC chr11 5385240 5385261 5385257 5385262 +
ctatcatggataattatctctc

SEQ ID NO: 110276 - DNA, 22 bp, Artificial Sequence
  Synthetic oligonucleotide; CTA chr11 5385243 5385264 5385260 5385265 +
tcatggataattatctctcttg

SEQ ID NO: 110277 - DNA, 22 bp, Artificial Sequence
  Synthetic oligonucleotide; TTA chr11 5385256 5385277 5385273 5385278 +
tctctcttgctaggagaaatcc

SEQ ID NO: 110278 - DNA, 22 bp, Artificial Sequence
  Synthetic oligonucleotide; CTC chr11 5385260 5385281 5385277 5385282 +
tcttgctaggagaaatccccta

SEQ ID NO: 110279 - DNA, 22 bp, Artificial Sequence
  Synthetic oligonucleotide; CTC chr11 5385262 5385283 5385279 5385284 +
ttgctaggagaaatcccctaaa

SEQ ID NO: 110280 - DNA, 22 bp, Artificial Sequence
  Synthetic oligonucleotide; CTT chr11 5385264 5385285 5385281 5385286 +
gctaggagaaatcccctaaagc

SEQ ID NO: 110281 - DNA, 22 bp, Artificial Sequence
  Synthetic oligonucleotide; TTG chr11 5385265 5385286 5385282 5385287 +
ctaggagaaatcccctaaagct

SEQ ID NO: 110282 - DNA, 22 bp, Artificial Sequence
  Synthetic oligonucleotide; CTA chr11 5385268 5385289 5385285 5385290 +
ggagaaatcccctaaagctttc

SEQ ID NO: 110283 - DNA, 22 bp, Artificial Sequence
  Synthetic oligonucleotide; CTA chr11 5385282 5385303 5385299 5385304 +
aagctttcttcccaagaggaag

SEQ ID NO: 110284 - DNA, 22 bp, Artificial Sequence
  Synthetic oligonucleotide; CTT chr11 5385288 5385309 5385305 5385310 +
tcttcccaagaggaagtatact

SEQ ID NO: 110285 - DNA, 22 bp, Artificial Sequence
  Synthetic oligonucleotide; TTT chr11 5385289 5385310 5385306 5385311 +
cttcccaagaggaagtatactt

SEQ ID NO: 110286 - DNA, 22 bp, Artificial Sequence
  Synthetic oligonucleotide; TTC chr11 5385290 5385311 5385307 5385312 +
ttcccaagaggaagtatacttt

SEQ ID NO: 110287 - DNA, 22 bp, Artificial Sequence
  Synthetic oligonucleotide; CTT chr11 5385292 5385313 5385309 5385314 +
cccaagaggaagtatactttcc

SEQ ID NO: 110288 - DNA, 22 bp, Artificial Sequence
  Synthetic oligonucleotide; TTC chr11 5385293 5385314 5385310 5385315 +
ccaagaggaagtatactttcca

SEQ ID NO: 110289 - DNA, 22 bp, Artificial Sequence
  Synthetic oligonucleotide; CTT chr11 5385311 5385332 5385328 5385333 +
tccaagagaaataatcccagcc

SEQ ID NO: 110290 - DNA, 22 bp, Artificial Sequence
  Synthetic oligonucleotide; TTT chr11 5385312 5385333 5385329 5385334 +
ccaagagaaataatcccagccc

SEQ ID NO: 110291 - DNA, 22 bp, Artificial Sequence
  Synthetic oligonucleotide; TTC chr11 5385313 5385334 5385330 5385335 +
caagagaaataatcccagccct

SEQ ID NO: 110292 - DNA, 22 bp, Artificial Sequence
  Synthetic oligonucleotide; CTG chr11 5385336 5385357 5385353 5385358 +
tcattgtctctgtatagacatc

SEQ ID NO: 110293 - DNA, 22 bp, Artificial Sequence
  Synthetic oligonucleotide; TTG chr11 5385342 5385363 5385359 5385364 +
tctctgtatagacatcttgttt

SEQ ID NO: 110294 - DNA, 22 bp, Artificial Sequence
  Synthetic oligonucleotide; CTC chr11 5385346 5385367 5385363 5385368 +
tgtatagacatcttgtttctac

SEQ ID NO: 110295 - DNA, 22 bp, Artificial Sequence
  Synthetic oligonucleotide; CTG chr11 5385348 5385369 5385365 5385370 +
tatagacatcttgtttctacca

SEQ ID NO: 110296 - DNA, 22 bp, Artificial Sequence
  Synthetic oligonucleotide; CTT chr11 5385360 5385381 5385377 5385382 +
gtttctaccagatccttctccc

SEQ ID NO: 110297 - DNA, 22 bp, Artificial Sequence
  Synthetic oligonucleotide; TTG chr11 5385361 5385382 5385378 5385383 +
tttctaccagatccttctccct

SEQ ID NO: 110298 - DNA, 22 bp, Artificial Sequence
  Synthetic oligonucleotide; TTT chr11 5385364 5385385 5385381 5385386 +
ctaccagatccttctccctgtc

SEQ ID NO: 110299 - DNA, 22 bp, Artificial Sequence
  Synthetic oligonucleotide; TTC chr11 5385365 5385386 5385382 5385387 +
taccagatccttctccctgtcc

SEQ ID NO: 110300 - DNA, 22 bp, Artificial Sequence
  Synthetic oligonucleotide; CTA chr11 5385367 5385388 5385384 5385389 +
ccagatccttctccctgtccat

SEQ ID NO: 110301 - DNA, 22 bp, Artificial Sequence
  Synthetic oligonucleotide; CTT chr11 5385377 5385398 5385394 5385399 +
ctccctgtccatctcatcactc

SEQ ID NO: 110302 - DNA, 22 bp, Artificial Sequence
  Synthetic oligonucleotide; TTC chr11 5385378 5385399 5385395 5385400 +
tccctgtccatctcatcactct

SEQ ID NO: 110303 - DNA, 22 bp, Artificial Sequence
  Synthetic oligonucleotide; CTC chr11 5385380 5385401 5385397 5385402 +
cctgtccatctcatcactctga

SEQ ID NO: 110304 - DNA, 22 bp, Artificial Sequence
  Synthetic oligonucleotide; CTG chr11 5385384 5385405 5385401 5385406 +
tccatctcatcactctgaagtt

SEQ ID NO: 110305 - DNA, 22 bp, Artificial Sequence
  Synthetic oligonucleotide; CTC chr11 5385392 5385413 5385409 5385414 +
atcactctgaagttggtgaaca

SEQ ID NO: 110306 - DNA, 22 bp, Artificial Sequence
  Synthetic oligonucleotide; CTC chr11 5385399 5385420 5385416 5385421 +
tgaagttggtgaacacagagct

SEQ ID NO: 110307 - DNA, 22 bp, Artificial Sequence
  Synthetic oligonucleotide; CTG chr11 5385401 5385422 5385418 5385423 +
aagttggtgaacacagagctga

SEQ ID NO: 110308 - DNA, 22 bp, Artificial Sequence
  Synthetic oligonucleotide; TTG chr11 5385407 5385428 5385424 5385429 +
gtgaacacagagctgacaacag

SEQ ID NO: 110309 - DNA, 22 bp, Artificial Sequence
  Synthetic oligonucleotide; CTG chr11 5385422 5385443 5385439 5385444 +
acaacagaaccccaggcacaaa

SEQ ID NO: 110310 - DNA, 22 bp, Artificial Sequence
  Synthetic oligonucleotide; CTT chr11 5385469 5385490 5385486 5385491 +
tatttattcacccatttagttt

SEQ ID NO: 110311 - DNA, 22 bp, Artificial Sequence
  Synthetic oligonucleotide; TTT chr11 5385470 5385491 5385487 5385492 +
atttattcacccatttagtttt

SEQ ID NO: 110312 - DNA, 22 bp, Artificial Sequence
  Synthetic oligonucleotide; TTA chr11 5385471 5385492 5385488 5385493 +
tttattcacccatttagttttt

SEQ ID NO: 110313 - DNA, 22 bp, Artificial Sequence
  Synthetic oligonucleotide; TTT chr11 5385474 5385495 5385491 5385496 +
attcacccatttagtttttcat

SEQ ID NO: 110314 - DNA, 22 bp, Artificial Sequence
  Synthetic oligonucleotide; TTA chr11 5385475 5385496 5385492 5385497 +
ttcacccatttagtttttcatg

SEQ ID NO: 110315 - DNA, 22 bp, Artificial Sequence
  Synthetic oligonucleotide; TTC chr11 5385478 5385499 5385495 5385500 +
acccatttagtttttcatgcaa

SEQ ID NO: 110316 - DNA, 22 bp, Artificial Sequence
  Synthetic oligonucleotide; TTT chr11 5385486 5385507 5385503 5385508 +
agtttttcatgcaaaaaaatat

SEQ ID NO: 110317 - DNA, 22 bp, Artificial Sequence
  Synthetic oligonucleotide; TTA chr11 5385487 5385508 5385504 5385509 +
gtttttcatgcaaaaaaatata

SEQ ID NO: 110318 - DNA, 22 bp, Artificial Sequence
  Synthetic oligonucleotide; TTT chr11 5385491 5385512 5385508 5385513 +
ttcatgcaaaaaaatatatata

SEQ ID NO: 110319 - DNA, 22 bp, Artificial Sequence
  Synthetic oligonucleotide; TTT chr11 5385492 5385513 5385509 5385514 +
tcatgcaaaaaaatatatatat

SEQ ID NO: 110320 - DNA, 22 bp, Artificial Sequence
  Synthetic oligonucleotide; TTT chr11 5385493 5385514 5385510 5385515 +
catgcaaaaaaatatatatata

SEQ ID NO: 110321 - DNA, 22 bp, Artificial Sequence
  Synthetic oligonucleotide; TTC chr11 5385494 5385515 5385511 5385516 +
atgcaaaaaaatatatatatag

SEQ ID NO: 110322 - DNA, 22 bp, Artificial Sequence
  Synthetic oligonucleotide; CTA chr11 5385525 5385546 5385542 5385547 +
ccacatcttagacactgtcagg

SEQ ID NO: 110323 - DNA, 22 bp, Artificial Sequence
  Synthetic oligonucleotide; CTT chr11 5385534 5385555 5385551 5385556 +
agacactgtcaggctccagggg

SEQ ID NO: 110324 - DNA, 22 bp, Artificial Sequence
  Synthetic oligonucleotide; TTA chr11 5385535 5385556 5385552 5385557 +
gacactgtcaggctccaggggc

SEQ ID NO: 110325 - DNA, 22 bp, Artificial Sequence
  Synthetic oligonucleotide; CTG chr11 5385542 5385563 5385559 5385564 +
tcaggctccaggggcctttaga

SEQ ID NO: 110326 - DNA, 22 bp, Artificial Sequence
  Synthetic oligonucleotide; CTC chr11 5385550 5385571 5385567 5385572 +
caggggcctttagagaattcca

SEQ ID NO: 110327 - DNA, 22 bp, Artificial Sequence
  Synthetic oligonucleotide; CTT chr11 5385560 5385581 5385577 5385582 +
tagagaattccagtctaatcaa

SEQ ID NO: 110328 - DNA, 22 bp, Artificial Sequence
  Synthetic oligonucleotide; TTT chr11 5385561 5385582 5385578 5385583 +
agagaattccagtctaatcaac

SEQ ID NO: 110329 - DNA, 22 bp, Artificial Sequence
  Synthetic oligonucleotide; TTA chr11 5385562 5385583 5385579 5385584 +
gagaattccagtctaatcaact

SEQ ID NO: 110330 - DNA, 22 bp, Artificial Sequence
  Synthetic oligonucleotide; TTC chr11 5385570 5385591 5385587 5385592 +
cagtctaatcaacttaaaaaat

SEQ ID NO: 110331 - DNA, 22 bp, Artificial Sequence
  Synthetic oligonucleotide; CTA chr11 5385577 5385598 5385594 5385599 +
atcaacttaaaaaatgaattat

SEQ ID NO: 110332 - DNA, 22 bp, Artificial Sequence
  Synthetic oligonucleotide; CTT chr11 5385585 5385606 5385602 5385607 +
aaaaaatgaattattaggttgg

SEQ ID NO: 110333 - DNA, 22 bp, Artificial Sequence
  Synthetic oligonucleotide; TTA chr11 5385586 5385607 5385603 5385608 +
aaaaatgaattattaggttggt

SEQ ID NO: 110334 - DNA, 22 bp, Artificial Sequence
  Synthetic oligonucleotide; TTA chr11 5385598 5385619 5385615 5385620 +
ttaggttggtgaaaaattaatg

SEQ ID NO: 110335 - DNA, 22 bp, Artificial Sequence
  Synthetic oligonucleotide; TTA chr11 5385601 5385622 5385618 5385623 +
ggttggtgaaaaattaatggca

SEQ ID NO: 110336 - DNA, 22 bp, Artificial Sequence
  Synthetic oligonucleotide; TTG chr11 5385606 5385627 5385623 5385628 +
gtgaaaaattaatggcagtttt

SEQ ID NO: 110337 - DNA, 22 bp, Artificial Sequence
  Synthetic oligonucleotide; TTA chr11 5385617 5385638 5385634 5385639 +
atggcagtttttgccaatataa

SEQ ID NO: 110338 - DNA, 22 bp, Artificial Sequence
  Synthetic oligonucleotide; TTT chr11 5385627 5385648 5385644 5385649 +
ttgccaatataaatttatgttc

SEQ ID NO: 110339 - DNA, 22 bp, Artificial Sequence
  Synthetic oligonucleotide; TTT chr11 5385628 5385649 5385645 5385650 +
tgccaatataaatttatgttct

SEQ ID NO: 110340 - DNA, 22 bp, Artificial Sequence
  Synthetic oligonucleotide; TTT chr11 5385629 5385650 5385646 5385651 +
gccaatataaatttatgttcta

SEQ ID NO: 110341 - DNA, 22 bp, Artificial Sequence
  Synthetic oligonucleotide; TTG chr11 5385630 5385651 5385647 5385652 +
ccaatataaatttatgttctaa

SEQ ID NO: 110342 - DNA, 22 bp, Artificial Sequence
  Synthetic oligonucleotide; TTT chr11 5385643 5385664 5385660 5385665 +
atgttctaaacatgtataataa

SEQ ID NO: 110343 - DNA, 22 bp, Artificial Sequence
  Synthetic oligonucleotide; TTA chr11 5385644 5385665 5385661 5385666 +
tgttctaaacatgtataataaa

SEQ ID NO: 110344 - DNA, 22 bp, Artificial Sequence
  Synthetic oligonucleotide; TTC chr11 5385649 5385670 5385666 5385671 +
taaacatgtataataaagaata

SEQ ID NO: 110345 - DNA, 22 bp, Artificial Sequence
  Synthetic oligonucleotide; CTA chr11 5385651 5385672 5385668 5385673 +
aacatgtataataaagaatacg

SEQ ID NO: 110346 - DNA, 22 bp, Artificial Sequence
  Synthetic oligonucleotide; CTA chr11 5385684 5385705 5385701 5385706 +
cctataatatatatgttgtaca

SEQ ID NO: 110347 - DNA, 22 bp, Artificial Sequence
  Synthetic oligonucleotide; CTA chr11 5385688 5385709 5385705 5385710 +
taatatatatgttgtacaaagt

SEQ ID NO: 110348 - DNA, 22 bp, Artificial Sequence
  Synthetic oligonucleotide; TTG chr11 5385702 5385723 5385719 5385724 +
tacaaagtatatatatgtgtac

SEQ ID NO: 110349 - DNA, 22 bp, Artificial Sequence
  Synthetic oligonucleotide; CTA chr11 5385733 5385754 5385750 5385755 +
atatttttgtatatttgtttac

SEQ ID NO: 110350 - DNA, 22 bp, Artificial Sequence
  Synthetic oligonucleotide; TTT chr11 5385739 5385760 5385756 5385761 +
ttgtatatttgtttacatatat

SEQ ID NO: 110351 - DNA, 22 bp, Artificial Sequence
  Synthetic oligonucleotide; TTT chr11 5385740 5385761 5385757 5385762 +
tgtatatttgtttacatatata

SEQ ID NO: 110352 - DNA, 22 bp, Artificial Sequence
  Synthetic oligonucleotide; TTT chr11 5385741 5385762 5385758 5385763 +
gtatatttgtttacatatataa

SEQ ID NO: 110353 - DNA, 22 bp, Artificial Sequence
  Synthetic oligonucleotide; TTG chr11 5385742 5385763 5385759 5385764 +
tatatttgtttacatatataaa

SEQ ID NO: 110354 - DNA, 22 bp, Artificial Sequence
  Synthetic oligonucleotide; TTT chr11 5385749 5385770 5385766 5385771 +
gtttacatatataaatatacag

SEQ ID NO: 110355 - DNA, 22 bp, Artificial Sequence
  Synthetic oligonucleotide; TTG chr11 5385750 5385771 5385767 5385772 +
tttacatatataaatatacaga

SEQ ID NO: 110356 - DNA, 22 bp, Artificial Sequence
  Synthetic oligonucleotide; TTT chr11 5385753 5385774 5385770 5385775 +
acatatataaatatacagacac

SEQ ID NO: 110357 - DNA, 22 bp, Artificial Sequence
  Synthetic oligonucleotide; TTA chr11 5385754 5385775 5385771 5385776 +
catatataaatatacagacaca

SEQ ID NO: 110358 - DNA, 22 bp, Artificial Sequence
  Synthetic oligonucleotide; CTA chr11 5385791 5385812 5385808 5385813 +
tacttatatataaaaaatctat

SEQ ID NO: 110359 - DNA, 22 bp, Artificial Sequence
  Synthetic oligonucleotide; CTT chr11 5385796 5385817 5385813 5385818 +
atatataaaaaatctataaagt

SEQ ID NO: 110360 - DNA, 22 bp, Artificial Sequence
  Synthetic oligonucleotide; TTA chr11 5385797 5385818 5385814 5385819 +
tatataaaaaatctataaagta

SEQ ID NO: 110361 - DNA, 22 bp, Artificial Sequence
  Synthetic oligonucleotide; CTA chr11 5385812 5385833 5385829 5385834 +
taaagtatataaagaatatata

SEQ ID NO: 110362 - DNA, 22 bp, Artificial Sequence
  Synthetic oligonucleotide; CTA chr11 5385846 5385867 5385863 5385868 +
aaatgtatattctataaagtat

SEQ ID NO: 110363 - DNA, 22 bp, Artificial Sequence
  Synthetic oligonucleotide; TTC chr11 5385858 5385879 5385875 5385880 +
tataaagtatttatgagtaaat

SEQ ID NO: 110364 - DNA, 22 bp, Artificial Sequence
  Synthetic oligonucleotide; CTA chr11 5385860 5385881 5385877 5385882 +
taaagtatttatgagtaaatct

SEQ ID NO: 110365 - DNA, 22 bp, Artificial Sequence
  Synthetic oligonucleotide; TTT chr11 5385870 5385891 5385887 5385892 +
atgagtaaatctatacacttat

SEQ ID NO: 110366 - DNA, 22 bp, Artificial Sequence
  Synthetic oligonucleotide; TTA chr11 5385871 5385892 5385888 5385893 +
tgagtaaatctatacacttata

SEQ ID NO: 110367 - DNA, 22 bp, Artificial Sequence
  Synthetic oligonucleotide; CTA chr11 5385883 5385904 5385900 5385905 +
tacacttatatgttatttaaac

SEQ ID NO: 110368 - DNA, 22 bp, Artificial Sequence
  Synthetic oligonucleotide; CTT chr11 5385890 5385911 5385907 5385912 +
atatgttatttaaacttataca

SEQ ID NO: 110369 - DNA, 22 bp, Artificial Sequence
  Synthetic oligonucleotide; TTA chr11 5385891 5385912 5385908 5385913 +
tatgttatttaaacttatacat

SEQ ID NO: 110370 - DNA, 22 bp, Artificial Sequence
  Synthetic oligonucleotide; TTA chr11 5385898 5385919 5385915 5385920 +
tttaaacttatacatatgtgta

SEQ ID NO: 110371 - DNA, 22 bp, Artificial Sequence
  Synthetic oligonucleotide; TTT chr11 5385901 5385922 5385918 5385923 +
aaacttatacatatgtgtactt

SEQ ID NO: 110372 - DNA, 22 bp, Artificial Sequence
  Synthetic oligonucleotide; TTA chr11 5385902 5385923 5385919 5385924 +
aacttatacatatgtgtactta

SEQ ID NO: 110373 - DNA, 22 bp, Artificial Sequence
  Synthetic oligonucleotide; CTT chr11 5385907 5385928 5385924 5385929 +
atacatatgtgtacttatatgg

SEQ ID NO: 110374 - DNA, 22 bp, Artificial Sequence
  Synthetic oligonucleotide; TTA chr11 5385908 5385929 5385925 5385930 +
tacatatgtgtacttatatgga

SEQ ID NO: 110375 - DNA, 22 bp, Artificial Sequence
  Synthetic oligonucleotide; CTT chr11 5385923 5385944 5385940 5385945 +
atatggatgtataagtatgttc

SEQ ID NO: 110376 - DNA, 22 bp, Artificial Sequence
  Synthetic oligonucleotide; TTA chr11 5385924 5385945 5385941 5385946 +
tatggatgtataagtatgttct

SEQ ID NO: 110377 - DNA, 22 bp, Artificial Sequence
  Synthetic oligonucleotide; TTC chr11 5385945 5385966 5385962 5385967 +
tatatatatatcaataagtata

SEQ ID NO: 110378 - DNA, 22 bp, Artificial Sequence
  Synthetic oligonucleotide; CTA chr11 5385947 5385968 5385964 5385969 +
tatatatatcaataagtatata

SEQ ID NO: 110379 - DNA, 22 bp, Artificial Sequence
  Synthetic oligonucleotide; TTT chr11 5386005 5386026 5386022 5386027 +
acaccttaatagtacattacag

SEQ ID NO: 110380 - DNA, 22 bp, Artificial Sequence
  Synthetic oligonucleotide; TTA chr11 5386006 5386027 5386023 5386028 +
caccttaatagtacattacagg

SEQ ID NO: 110381 - DNA, 22 bp, Artificial Sequence
  Synthetic oligonucleotide; CTT chr11 5386012 5386033 5386029 5386034 +
aatagtacattacaggtactac

SEQ ID NO: 110382 - DNA, 22 bp, Artificial Sequence
  Synthetic oligonucleotide; TTA chr11 5386013 5386034 5386030 5386035 +
atagtacattacaggtactacg

SEQ ID NO: 110383 - DNA, 22 bp, Artificial Sequence
  Synthetic oligonucleotide; TTA chr11 5386024 5386045 5386041 5386046 +
caggtactacgtgagaacagag

SEQ ID NO: 110384 - DNA, 22 bp, Artificial Sequence
  Synthetic oligonucleotide; CTA chr11 5386033 5386054 5386050 5386055 +
cgtgagaacagagaaagatgta

SEQ ID NO: 110385 - DNA, 22 bp, Artificial Sequence
  Synthetic oligonucleotide; CTA chr11 5386059 5386080 5386076 5386081 +
atgctacagaaggaagtcagga

SEQ ID NO: 110386 - DNA, 22 bp, Artificial Sequence
  Synthetic oligonucleotide; CTA chr11 5386065 5386086 5386082 5386087 +
cagaaggaagtcaggagagatt

SEQ ID NO: 110387 - DNA, 22 bp, Artificial Sequence
  Synthetic oligonucleotide; TTT chr11 5386088 5386109 5386105 5386110 +
gacagaagaagtgatatttgta

SEQ ID NO: 110388 - DNA, 22 bp, Artificial Sequence
  Synthetic oligonucleotide; TTG chr11 5386089 5386110 5386106 5386111 +
acagaagaagtgatatttgtac

SEQ ID NO: 110389 - DNA, 22 bp, Artificial Sequence
  Synthetic oligonucleotide; TTT chr11 5386107 5386128 5386124 5386129 +
gtactaagtcttaaaggatccg

SEQ ID NO: 110390 - DNA, 22 bp, Artificial Sequence
  Synthetic oligonucleotide; TTG chr11 5386108 5386129 5386125 5386130 +
tactaagtcttaaaggatccgc

SEQ ID NO: 110391 - DNA, 22 bp, Artificial Sequence
  Synthetic oligonucleotide; CTA chr11 5386113 5386134 5386130 5386135 +
agtcttaaaggatccgcaagtg

SEQ ID NO: 110392 - DNA, 22 bp, Artificial Sequence
  Synthetic oligonucleotide; CTT chr11 5386119 5386140 5386136 5386141 +
aaaggatccgcaagtgtttact

SEQ ID NO: 110393 - DNA, 22 bp, Artificial Sequence
  Synthetic oligonucleotide; TTA chr11 5386120 5386141 5386137 5386142 +
aaggatccgcaagtgtttactg

SEQ ID NO: 110394 - DNA, 22 bp, Artificial Sequence
  Synthetic oligonucleotide; TTT chr11 5386138 5386159 5386155 5386160 +
actggttggaaaaacaggggtg

SEQ ID NO: 110395 - DNA, 22 bp, Artificial Sequence
  Synthetic oligonucleotide; TTA chr11 5386139 5386160 5386156 5386161 +
ctggttggaaaaacaggggtgg

SEQ ID NO: 110396 - DNA, 22 bp, Artificial Sequence
  Synthetic oligonucleotide; CTG chr11 5386142 5386163 5386159 5386164 +
gttggaaaaacaggggtggttt

SEQ ID NO: 110397 - DNA, 22 bp, Artificial Sequence
  Synthetic oligonucleotide; TTG chr11 5386146 5386167 5386163 5386168 +
gaaaaacaggggtggtttttgc

SEQ ID NO: 110398 - DNA, 22 bp, Artificial Sequence
  Synthetic oligonucleotide; TTT chr11 5386164 5386185 5386181 5386186 +
ttgccaagaaagcaataaatat

SEQ ID NO: 110399 - DNA, 22 bp, Artificial Sequence
  Synthetic oligonucleotide; TTT chr11 5386165 5386186 5386182 5386187 +
tgccaagaaagcaataaatata

SEQ ID NO: 110400 - DNA, 22 bp, Artificial Sequence
  Synthetic oligonucleotide; TTT chr11 5386166 5386187 5386183 5386188 +
gccaagaaagcaataaatatag

SEQ ID NO: 110401 - DNA, 22 bp, Artificial Sequence
  Synthetic oligonucleotide; TTG chr11 5386167 5386188 5386184 5386189 +
ccaagaaagcaataaatataga

SEQ ID NO: 110402 - DNA, 22 bp, Artificial Sequence
  Synthetic oligonucleotide; TTG chr11 5386224 5386245 5386241 5386246 +
aagaaaaaaatgatatgggtgt

SEQ ID NO: 110403 - DNA, 22 bp, Artificial Sequence
  Synthetic oligonucleotide; TTG chr11 5386250 5386271 5386267 5386272 +
actgggaaaagatgggtttgga

SEQ ID NO: 110404 - DNA, 22 bp, Artificial Sequence
  Synthetic oligonucleotide; CTG chr11 5386254 5386275 5386271 5386276 +
ggaaaagatgggtttggaaagg

SEQ ID NO: 110405 - DNA, 22 bp, Artificial Sequence
  Synthetic oligonucleotide; TTT chr11 5386269 5386290 5386286 5386291 +
ggaaaggtgccaaaacaagaag

SEQ ID NO: 110406 - DNA, 22 bp, Artificial Sequence
  Synthetic oligonucleotide; TTG chr11 5386270 5386291 5386287 5386292 +
gaaaggtgccaaaacaagaagg

SEQ ID NO: 110407 - DNA, 22 bp, Artificial Sequence
  Synthetic oligonucleotide; CTA chr11 5386301 5386322 5386318 5386323 +
aagatggtgttacagggtgttt

SEQ ID NO: 110408 - DNA, 22 bp, Artificial Sequence
  Synthetic oligonucleotide; TTA chr11 5386313 5386334 5386330 5386335 +
cagggtgtttgaggctaccagg

SEQ ID NO: 110409 - DNA, 22 bp, Artificial Sequence
  Synthetic oligonucleotide; TTT chr11 5386323 5386344 5386340 5386345 +
gaggctaccagggccatgcata

SEQ ID NO: 110410 - DNA, 22 bp, Artificial Sequence
  Synthetic oligonucleotide; TTG chr11 5386324 5386345 5386341 5386346 +
aggctaccagggccatgcatag

SEQ ID NO: 110411 - DNA, 22 bp, Artificial Sequence
  Synthetic oligonucleotide; CTA chr11 5386330 5386351 5386347 5386352 +
ccagggccatgcatagagagac

SEQ ID NO: 110412 - DNA, 22 bp, Artificial Sequence
  Synthetic oligonucleotide; TTC chr11 5386360 5386381 5386377 5386382 +
atatcttatcctgattttcgct

SEQ ID NO: 110413 - DNA, 22 bp, Artificial Sequence
  Synthetic oligonucleotide; CTT chr11 5386367 5386388 5386384 5386389 +
atcctgattttcgctcactacc

SEQ ID NO: 110414 - DNA, 22 bp, Artificial Sequence
  Synthetic oligonucleotide; TTA chr11 5386368 5386389 5386385 5386390 +
tcctgattttcgctcactacca

SEQ ID NO: 110415 - DNA, 22 bp, Artificial Sequence
  Synthetic oligonucleotide; CTG chr11 5386373 5386394 5386390 5386395 +
attttcgctcactaccaggcct

SEQ ID NO: 110416 - DNA, 22 bp, Artificial Sequence
  Synthetic oligonucleotide; TTT chr11 5386377 5386398 5386394 5386399 +
tcgctcactaccaggccttggg

SEQ ID NO: 110417 - DNA, 22 bp, Artificial Sequence
  Synthetic oligonucleotide; TTT chr11 5386378 5386399 5386395 5386400 +
cgctcactaccaggccttggga

SEQ ID NO: 110418 - DNA, 22 bp, Artificial Sequence
  Synthetic oligonucleotide; TTC chr11 5386379 5386400 5386396 5386401 +
gctcactaccaggccttgggat

SEQ ID NO: 110419 - DNA, 22 bp, Artificial Sequence
  Synthetic oligonucleotide; CTC chr11 5386383 5386404 5386400 5386405 +
actaccaggccttgggatgatt

SEQ ID NO: 110420 - DNA, 22 bp, Artificial Sequence
  Synthetic oligonucleotide; CTA chr11 5386387 5386408 5386404 5386409 +
ccaggccttgggatgattgttt

SEQ ID NO: 110421 - DNA, 22 bp, Artificial Sequence
  Synthetic oligonucleotide; CTT chr11 5386396 5386417 5386413 5386418 +
gggatgattgtttacctttttg

SEQ ID NO: 110422 - DNA, 22 bp, Artificial Sequence
  Synthetic oligonucleotide; TTG chr11 5386397 5386418 5386414 5386419 +
ggatgattgtttacctttttgt

SEQ ID NO: 110423 - DNA, 22 bp, Artificial Sequence
  Synthetic oligonucleotide; TTG chr11 5386406 5386427 5386423 5386428 +
tttacctttttgtagttttctc

SEQ ID NO: 110424 - DNA, 22 bp, Artificial Sequence
  Synthetic oligonucleotide; TTT chr11 5386409 5386430 5386426 5386431 +
acctttttgtagttttctcctt

SEQ ID NO: 110425 - DNA, 22 bp, Artificial Sequence
  Synthetic oligonucleotide; TTA chr11 5386410 5386431 5386427 5386432 +
cctttttgtagttttctccttg

SEQ ID NO: 110426 - DNA, 22 bp, Artificial Sequence
  Synthetic oligonucleotide; CTT chr11 5386414 5386435 5386431 5386436 +
tttgtagttttctccttgtgaa

SEQ ID NO: 110427 - DNA, 22 bp, Artificial Sequence
  Synthetic oligonucleotide; TTT chr11 5386415 5386436 5386432 5386437 +
ttgtagttttctccttgtgaag

SEQ ID NO: 110428 - DNA, 22 bp, Artificial Sequence
  Synthetic oligonucleotide; TTT chr11 5386416 5386437 5386433 5386438 +
tgtagttttctccttgtgaagt

SEQ ID NO: 110429 - DNA, 22 bp, Artificial Sequence
  Synthetic oligonucleotide; TTT chr11 5386417 5386438 5386434 5386439 +
gtagttttctccttgtgaagta

SEQ ID NO: 110430 - DNA, 22 bp, Artificial Sequence
  Synthetic oligonucleotide; TTG chr11 5386418 5386439 5386435 5386440 +
tagttttctccttgtgaagtag

SEQ ID NO: 110431 - DNA, 22 bp, Artificial Sequence
  Synthetic oligonucleotide; TTT chr11 5386424 5386445 5386441 5386446 +
tctccttgtgaagtagtaataa

SEQ ID NO: 110432 - DNA, 22 bp, Artificial Sequence
  Synthetic oligonucleotide; TTT chr11 5386425 5386446 5386442 5386447 +
ctccttgtgaagtagtaataaa

SEQ ID NO: 110433 - DNA, 22 bp, Artificial Sequence
  Synthetic oligonucleotide; TTC chr11 5386426 5386447 5386443 5386448 +
tccttgtgaagtagtaataaaa

SEQ ID NO: 110434 - DNA, 22 bp, Artificial Sequence
  Synthetic oligonucleotide; CTC chr11 5386428 5386449 5386445 5386450 +
cttgtgaagtagtaataaaatg

SEQ ID NO: 110435 - DNA, 22 bp, Artificial Sequence
  Synthetic oligonucleotide; CTT chr11 5386431 5386452 5386448 5386453 +
gtgaagtagtaataaaatgttt

SEQ ID NO: 110436 - DNA, 22 bp, Artificial Sequence
  Synthetic oligonucleotide; TTG chr11 5386432 5386453 5386449 5386454 +
tgaagtagtaataaaatgtttc

SEQ ID NO: 110437 - DNA, 22 bp, Artificial Sequence
  Synthetic oligonucleotide; TTT chr11 5386453 5386474 5386470 5386475 +
catagttacatgaaatattcat

SEQ ID NO: 110438 - DNA, 22 bp, Artificial Sequence
  Synthetic oligonucleotide; TTC chr11 5386454 5386475 5386471 5386476 +
atagttacatgaaatattcatg

SEQ ID NO: 110439 - DNA, 22 bp, Artificial Sequence
  Synthetic oligonucleotide; TTA chr11 5386461 5386482 5386478 5386483 +
catgaaatattcatgattatgt

SEQ ID NO: 110440 - DNA, 22 bp, Artificial Sequence
  Synthetic oligonucleotide; TTC chr11 5386473 5386494 5386490 5386495 +
atgattatgtcaagcttttcac

SEQ ID NO: 110441 - DNA, 22 bp, Artificial Sequence
  Synthetic oligonucleotide; TTA chr11 5386480 5386501 5386497 5386502 +
tgtcaagcttttcacagcatct

SEQ ID NO: 110442 - DNA, 22 bp, Artificial Sequence
  Synthetic oligonucleotide; CTT chr11 5386490 5386511 5386507 5386512 +
ttcacagcatctaaatcatgta

SEQ ID NO: 110443 - DNA, 22 bp, Artificial Sequence
  Synthetic oligonucleotide; TTT chr11 5386491 5386512 5386508 5386513 +
tcacagcatctaaatcatgtat

SEQ ID NO: 110444 - DNA, 22 bp, Artificial Sequence
  Synthetic oligonucleotide; TTT chr11 5386492 5386513 5386509 5386514 +
cacagcatctaaatcatgtatg

SEQ ID NO: 110445 - DNA, 22 bp, Artificial Sequence
  Synthetic oligonucleotide; TTC chr11 5386493 5386514 5386510 5386515 +
acagcatctaaatcatgtatgg

SEQ ID NO: 110446 - DNA, 22 bp, Artificial Sequence
  Synthetic oligonucleotide; CTA chr11 5386503 5386524 5386520 5386525 +
aatcatgtatggcctcaataaa

SEQ ID NO: 110447 - DNA, 22 bp, Artificial Sequence
  Synthetic oligonucleotide; CTC chr11 5386519 5386540 5386536 5386541 +
aataaattggactatcaccaca

SEQ ID NO: 110448 - DNA, 22 bp, Artificial Sequence
  Synthetic oligonucleotide; TTG chr11 5386528 5386549 5386545 5386550 +
gactatcaccacagatctttta

SEQ ID NO: 110449 - DNA, 22 bp, Artificial Sequence
  Synthetic oligonucleotide; CTA chr11 5386533 5386554 5386550 5386555 +
tcaccacagatcttttacaagt

SEQ ID NO: 110450 - DNA, 22 bp, Artificial Sequence
  Synthetic oligonucleotide; CTT chr11 5386547 5386568 5386564 5386569 +
ttacaagtttgaactttattct

SEQ ID NO: 110451 - DNA, 22 bp, Artificial Sequence
  Synthetic oligonucleotide; TTT chr11 5386548 5386569 5386565 5386570 +
tacaagtttgaactttattcta

SEQ ID NO: 110452 - DNA, 22 bp, Artificial Sequence
  Synthetic oligonucleotide; TTT chr11 5386549 5386570 5386566 5386571 +
acaagtttgaactttattctaa

SEQ ID NO: 110453 - DNA, 22 bp, Artificial Sequence
  Synthetic oligonucleotide; TTA chr11 5386550 5386571 5386567 5386572 +
caagtttgaactttattctaat

SEQ ID NO: 110454 - DNA, 22 bp, Artificial Sequence
  Synthetic oligonucleotide; TTT chr11 5386557 5386578 5386574 5386579 +
gaactttattctaatgatagga

SEQ ID NO: 110455 - DNA, 22 bp, Artificial Sequence
  Synthetic oligonucleotide; TTG chr11 5386558 5386579 5386575 5386580 +
aactttattctaatgataggag

SEQ ID NO: 110456 - DNA, 22 bp, Artificial Sequence
  Synthetic oligonucleotide; CTT chr11 5386563 5386584 5386580 5386585 +
tattctaatgataggagctact

SEQ ID NO: 110457 - DNA, 22 bp, Artificial Sequence
  Synthetic oligonucleotide; TTT chr11 5386564 5386585 5386581 5386586 +
attctaatgataggagctactg

SEQ ID NO: 110458 - DNA, 22 bp, Artificial Sequence
  Synthetic oligonucleotide; TTA chr11 5386565 5386586 5386582 5386587 +
ttctaatgataggagctactga

SEQ ID NO: 110459 - DNA, 22 bp, Artificial Sequence
  Synthetic oligonucleotide; TTC chr11 5386568 5386589 5386585 5386590 +
taatgataggagctactgaagt

SEQ ID NO: 110460 - DNA, 22 bp, Artificial Sequence
  Synthetic oligonucleotide; CTA chr11 5386570 5386591 5386587 5386592 +
atgataggagctactgaagtac

SEQ ID NO: 110461 - DNA, 22 bp, Artificial Sequence
  Synthetic oligonucleotide; CTA chr11 5386583 5386604 5386600 5386605 +
ctgaagtactgaaaacagtgca

SEQ ID NO: 110462 - DNA, 22 bp, Artificial Sequence
  Synthetic oligonucleotide; CTG chr11 5386586 5386607 5386603 5386608 +
aagtactgaaaacagtgcagtg

SEQ ID NO: 110463 - DNA, 22 bp, Artificial Sequence
  Synthetic oligonucleotide; CTG chr11 5386594 5386615 5386611 5386616 +
aaaacagtgcagtgattcatag

SEQ ID NO: 110464 - DNA, 22 bp, Artificial Sequence
  Synthetic oligonucleotide; TTC chr11 5386612 5386633 5386629 5386634 +
atagagttagtactttctgcat

SEQ ID NO: 110465 - DNA, 22 bp, Artificial Sequence
  Synthetic oligonucleotide; TTA chr11 5386621 5386642 5386638 5386643 +
gtactttctgcataatctcggt

SEQ ID NO: 110466 - DNA, 22 bp, Artificial Sequence
  Synthetic oligonucleotide; CTT chr11 5386627 5386648 5386644 5386649 +
tctgcataatctcggtggctgc

SEQ ID NO: 110467 - DNA, 22 bp, Artificial Sequence
  Synthetic oligonucleotide; TTT chr11 5386628 5386649 5386645 5386650 +
ctgcataatctcggtggctgca

SEQ ID NO: 110468 - DNA, 22 bp, Artificial Sequence
  Synthetic oligonucleotide; TTC chr11 5386629 5386650 5386646 5386651 +
tgcataatctcggtggctgcag

SEQ ID NO: 110469 - DNA, 22 bp, Artificial Sequence
  Synthetic oligonucleotide; CTG chr11 5386631 5386652 5386648 5386653 +
cataatctcggtggctgcagta

SEQ ID NO: 110470 - DNA, 22 bp, Artificial Sequence
  Synthetic oligonucleotide; CTC chr11 5386640 5386661 5386657 5386662 +
ggtggctgcagtagaggatgga

SEQ ID NO: 110471 - DNA, 22 bp, Artificial Sequence
  Synthetic oligonucleotide; CTG chr11 5386648 5386669 5386665 5386670 +
cagtagaggatggaccaaggga

SEQ ID NO: 110472 - DNA, 22 bp, Artificial Sequence
  Synthetic oligonucleotide; CTG chr11 5386682 5386703 5386699 5386704 +
gctttgcatgttgaatgacagg

SEQ ID NO: 110473 - DNA, 22 bp, Artificial Sequence
  Synthetic oligonucleotide; CTT chr11 5386686 5386707 5386703 5386708 +
tgcatgttgaatgacaggtcag

SEQ ID NO: 110474 - DNA, 22 bp, Artificial Sequence
  Synthetic oligonucleotide; TTT chr11 5386687 5386708 5386704 5386709 +
gcatgttgaatgacaggtcagg

SEQ ID NO: 110475 - DNA, 22 bp, Artificial Sequence
  Synthetic oligonucleotide; TTG chr11 5386688 5386709 5386705 5386710 +
catgttgaatgacaggtcaggc

SEQ ID NO: 110476 - DNA, 22 bp, Artificial Sequence
  Synthetic oligonucleotide; TTG chr11 5386695 5386716 5386712 5386717 +
aatgacaggtcaggcaagcagg

SEQ ID NO: 110477 - DNA, 22 bp, Artificial Sequence
  Synthetic oligonucleotide; CTA chr11 5386730 5386751 5386747 5386752 +
agaacaaggacattggctacag

SEQ ID NO: 110478 - DNA, 22 bp, Artificial Sequence
  Synthetic oligonucleotide; TTG chr11 5386745 5386766 5386762 5386767 +
gctacagagatgaagatgaata

SEQ ID NO: 110479 - DNA, 22 bp, Artificial Sequence
  Synthetic oligonucleotide; CTA chr11 5386749 5386770 5386766 5386771 +
cagagatgaagatgaatagatt

SEQ ID NO: 110480 - DNA, 22 bp, Artificial Sequence
  Synthetic oligonucleotide; TTA chr11 5386772 5386793 5386789 5386794 +
cagggatagattaaaagaactt

SEQ ID NO: 110481 - DNA, 22 bp, Artificial Sequence
  Synthetic oligonucleotide; TTA chr11 5386785 5386806 5386802 5386807 +
aaagaacttagttaaaaattag

SEQ ID NO: 110482 - DNA, 22 bp, Artificial Sequence
  Synthetic oligonucleotide; CTT chr11 5386794 5386815 5386811 5386816 +
agttaaaaattagatacagaaa

SEQ ID NO: 110483 - DNA, 22 bp, Artificial Sequence
  Synthetic oligonucleotide; TTA chr11 5386795 5386816 5386812 5386817 +
gttaaaaattagatacagaaag

SEQ ID NO: 110484 - DNA, 22 bp, Artificial Sequence
  Synthetic oligonucleotide; TTA chr11 5386799 5386820 5386816 5386821 +
aaaattagatacagaaagaggg

SEQ ID NO: 110485 - DNA, 22 bp, Artificial Sequence
  Synthetic oligonucleotide; TTA chr11 5386806 5386827 5386823 5386828 +
gatacagaaagagggagagggt

SEQ ID NO: 110486 - DNA, 22 bp, Artificial Sequence
  Synthetic oligonucleotide; TTG chr11 5386830 5386851 5386847 5386852 +
agtagagcatcagctcaaaaat

SEQ ID NO: 110487 - DNA, 22 bp, Artificial Sequence
  Synthetic oligonucleotide; CTC chr11 5386846 5386867 5386863 5386868 +
aaaaatgttgtcttgaatggca

SEQ ID NO: 110488 - DNA, 22 bp, Artificial Sequence
  Synthetic oligonucleotide; TTG chr11 5386856 5386877 5386873 5386878 +
tcttgaatggcaggaaatggtg

SEQ ID NO: 110489 - DNA, 22 bp, Artificial Sequence
  Synthetic oligonucleotide; CTT chr11 5386860 5386881 5386877 5386882 +
gaatggcaggaaatggtgaata

SEQ ID NO: 110490 - DNA, 22 bp, Artificial Sequence
  Synthetic oligonucleotide; TTG chr11 5386861 5386882 5386878 5386883 +
aatggcaggaaatggtgaataa

SEQ ID NO: 110491 - DNA, 22 bp, Artificial Sequence
  Synthetic oligonucleotide; TTA chr11 5386888 5386909 5386905 5386910 +
taaaaaatgcataaatatgaga

SEQ ID NO: 110492 - DNA, 22 bp, Artificial Sequence
  Synthetic oligonucleotide; CTG chr11 5386938 5386959 5386955 5386960 +
ggctcaatattagacgtgttga

SEQ ID NO: 110493 - DNA, 22 bp, Artificial Sequence
  Synthetic oligonucleotide; CTC chr11 5386943 5386964 5386960 5386965 +
aatattagacgtgttgagtttc

SEQ ID NO: 110494 - DNA, 22 bp, Artificial Sequence
  Synthetic oligonucleotide; TTA chr11 5386950 5386971 5386967 5386972 +
gacgtgttgagtttcatcagta

SEQ ID NO: 110495 - DNA, 22 bp, Artificial Sequence
  Synthetic oligonucleotide; TTG chr11 5386959 5386980 5386976 5386981 +
agtttcatcagtatccttttgg

SEQ ID NO: 110496 - DNA, 22 bp, Artificial Sequence
  Synthetic oligonucleotide; TTT chr11 5386964 5386985 5386981 5386986 +
catcagtatccttttggaaaca

SEQ ID NO: 110497 - DNA, 22 bp, Artificial Sequence
  Synthetic oligonucleotide; TTC chr11 5386965 5386986 5386982 5386987 +
atcagtatccttttggaaacac

SEQ ID NO: 110498 - DNA, 22 bp, Artificial Sequence
  Synthetic oligonucleotide; CTT chr11 5386977 5386998 5386994 5386999 +
ttggaaacacctagtgagaagg

SEQ ID NO: 110499 - DNA, 22 bp, Artificial Sequence
  Synthetic oligonucleotide; TTT chr11 5386978 5386999 5386995 5387000 +
tggaaacacctagtgagaaggc

SEQ ID NO: 110500 - DNA, 22 bp, Artificial Sequence
  Synthetic oligonucleotide; TTT chr11 5386979 5387000 5386996 5387001 +
ggaaacacctagtgagaaggca

SEQ ID NO: 110501 - DNA, 22 bp, Artificial Sequence
  Synthetic oligonucleotide; TTG chr11 5386980 5387001 5386997 5387002 +
gaaacacctagtgagaaggcag

SEQ ID NO: 110502 - DNA, 22 bp, Artificial Sequence
  Synthetic oligonucleotide; CTA chr11 5386990 5387011 5387007 5387012 +
gtgagaaggcagaaactcaggc

SEQ ID NO: 110503 - DNA, 22 bp, Artificial Sequence
  Synthetic oligonucleotide; CTC chr11 5387008 5387029 5387025 5387030 +
aggcctgatatgtaacggagtt

SEQ ID NO: 110504 - DNA, 22 bp, Artificial Sequence
  Synthetic oligonucleotide; CTG chr11 5387015 5387036 5387032 5387037 +
atatgtaacggagttatctgga

SEQ ID NO: 110505 - DNA, 22 bp, Artificial Sequence
  Synthetic oligonucleotide; TTA chr11 5387031 5387052 5387048 5387053 +
tctggactagagattaatgtct

SEQ ID NO: 110506 - DNA, 22 bp, Artificial Sequence
  Synthetic oligonucleotide; CTG chr11 5387035 5387056 5387052 5387057 +
gactagagattaatgtctaaga

SEQ ID NO: 110507 - DNA, 22 bp, Artificial Sequence
  Synthetic oligonucleotide; CTA chr11 5387040 5387061 5387057 5387062 +
gagattaatgtctaagagccac

SEQ ID NO: 110508 - DNA, 22 bp, Artificial Sequence
  Synthetic oligonucleotide; TTA chr11 5387047 5387068 5387064 5387069 +
atgtctaagagccaccactgta

SEQ ID NO: 110509 - DNA, 22 bp, Artificial Sequence
  Synthetic oligonucleotide; CTA chr11 5387054 5387075 5387071 5387076 +
agagccaccactgtataagtaa

SEQ ID NO: 110510 - DNA, 22 bp, Artificial Sequence
  Synthetic oligonucleotide; CTG chr11 5387067 5387088 5387084 5387089 +
tataagtaataataataataga

SEQ ID NO: 110511 - DNA, 22 bp, Artificial Sequence
  Synthetic oligonucleotide; TTA chr11 5387111 5387132 5387128 5387133 +
aggtgttcaaggacagtaaact

SEQ ID NO: 110512 - DNA, 22 bp, Artificial Sequence
  Synthetic oligonucleotide; TTC chr11 5387119 5387140 5387136 5387141 +
aaggacagtaaactgaataaca

SEQ ID NO: 110513 - DNA, 22 bp, Artificial Sequence
  Synthetic oligonucleotide; CTG chr11 5387134 5387155 5387151 5387156 +
aataacataaatatttgagcaa

SEQ ID NO: 110514 - DNA, 22 bp, Artificial Sequence
  Synthetic oligonucleotide; TTT chr11 5387150 5387171 5387167 5387172 +
gagcaatggaaataagagagtg

SEQ ID NO: 110515 - DNA, 22 bp, Artificial Sequence
  Synthetic oligonucleotide; TTG chr11 5387151 5387172 5387168 5387173 +
agcaatggaaataagagagtgc

SEQ ID NO: 110516 - DNA, 22 bp, Artificial Sequence
  Synthetic oligonucleotide; CTA chr11 5387183 5387204 5387200 5387205 +
tcacaaaaatcagaagagaacc

SEQ ID NO: 110517 - DNA, 22 bp, Artificial Sequence
  Synthetic oligonucleotide; CTT chr11 5387215 5387236 5387232 5387237 +
ggcattaagaatttctagagag

SEQ ID NO: 110518 - DNA, 22 bp, Artificial Sequence
  Synthetic oligonucleotide; TTG chr11 5387216 5387237 5387233 5387238 +
gcattaagaatttctagagaga

SEQ ID NO: 110519 - DNA, 22 bp, Artificial Sequence
  Synthetic oligonucleotide; TTA chr11 5387222 5387243 5387239 5387244 +
agaatttctagagagagctcta

SEQ ID NO: 110520 - DNA, 22 bp, Artificial Sequence
  Synthetic oligonucleotide; TTT chr11 5387229 5387250 5387246 5387251 +
ctagagagagctctaaaaagga

SEQ ID NO: 110521 - DNA, 22 bp, Artificial Sequence
  Synthetic oligonucleotide; TTC chr11 5387230 5387251 5387247 5387252 +
tagagagagctctaaaaaggaa

SEQ ID NO: 110522 - DNA, 22 bp, Artificial Sequence
  Synthetic oligonucleotide; CTA chr11 5387232 5387253 5387249 5387254 +
gagagagctctaaaaaggaagg

SEQ ID NO: 110523 - DNA, 22 bp, Artificial Sequence
  Synthetic oligonucleotide; CTC chr11 5387242 5387263 5387259 5387264 +
taaaaaggaaggcatggccaga

SEQ ID NO: 110524 - DNA, 22 bp, Artificial Sequence
  Synthetic oligonucleotide; CTA chr11 5387244 5387265 5387261 5387266 +
aaaaggaaggcatggccagagc

SEQ ID NO: 110525 - DNA, 22 bp, Artificial Sequence
  Synthetic oligonucleotide; CTA chr11 5387275 5387296 5387292 5387297 +
ttgcacaaaaaaatcaataaaa

SEQ ID NO: 110526 - DNA, 22 bp, Artificial Sequence
  Synthetic oligonucleotide; TTG chr11 5387278 5387299 5387295 5387300 +
cacaaaaaaatcaataaaagca

SEQ ID NO: 110527 - DNA, 22 bp, Artificial Sequence
  Synthetic oligonucleotide; TTA chr11 5387310 5387331 5387327 5387332 +
agactctccattgcatttggcc

SEQ ID NO: 110528 - DNA, 22 bp, Artificial Sequence
  Synthetic oligonucleotide; CTC chr11 5387316 5387337 5387333 5387338 +
tccattgcatttggcccctaga

SEQ ID NO: 110529 - DNA, 22 bp, Artificial Sequence
  Synthetic oligonucleotide; CTC chr11 5387318 5387339 5387335 5387340 +
cattgcatttggcccctagaag

SEQ ID NO: 110530 - DNA, 22 bp, Artificial Sequence
  Synthetic oligonucleotide; TTG chr11 5387323 5387344 5387340 5387345 +
catttggcccctagaagtcact

SEQ ID NO: 110531 - DNA, 22 bp, Artificial Sequence
  Synthetic oligonucleotide; TTT chr11 5387328 5387349 5387345 5387350 +
ggcccctagaagtcactggtga

SEQ ID NO: 110532 - DNA, 22 bp, Artificial Sequence
  Synthetic oligonucleotide; TTG chr11 5387329 5387350 5387346 5387351 +
gcccctagaagtcactggtgaa

SEQ ID NO: 110533 - DNA, 22 bp, Artificial Sequence
  Synthetic oligonucleotide; CTA chr11 5387336 5387357 5387353 5387358 +
gaagtcactggtgaatttaagg

SEQ ID NO: 110534 - DNA, 22 bp, Artificial Sequence
  Synthetic oligonucleotide; CTG chr11 5387346 5387367 5387363 5387368 +
gtgaatttaaggagcattgctt

SEQ ID NO: 110535 - DNA, 22 bp, Artificial Sequence
  Synthetic oligonucleotide; TTT chr11 5387354 5387375 5387371 5387376 +
aaggagcattgctttagctaag

SEQ ID NO: 110536 - DNA, 22 bp, Artificial Sequence
  Synthetic oligonucleotide; TTA chr11 5387355 5387376 5387372 5387377 +
aggagcattgctttagctaagt

SEQ ID NO: 110537 - DNA, 22 bp, Artificial Sequence
  Synthetic oligonucleotide; TTG chr11 5387365 5387386 5387382 5387387 +
ctttagctaagtgggttttaaa

SEQ ID NO: 110538 - DNA, 22 bp, Artificial Sequence
  Synthetic oligonucleotide; CTT chr11 5387368 5387389 5387385 5387390 +
tagctaagtgggttttaaaaaa

SEQ ID NO: 110539 - DNA, 22 bp, Artificial Sequence
  Synthetic oligonucleotide; TTT chr11 5387369 5387390 5387386 5387391 +
agctaagtgggttttaaaaaaa

SEQ ID NO: 110540 - DNA, 22 bp, Artificial Sequence
  Synthetic oligonucleotide; TTA chr11 5387370 5387391 5387387 5387392 +
gctaagtgggttttaaaaaaaa

SEQ ID NO: 110541 - DNA, 22 bp, Artificial Sequence
  Synthetic oligonucleotide; CTA chr11 5387374 5387395 5387391 5387396 +
agtgggttttaaaaaaaacatt

SEQ ID NO: 110542 - DNA, 22 bp, Artificial Sequence
  Synthetic oligonucleotide; TTT chr11 5387383 5387404 5387400 5387405 +
taaaaaaaacattatagggtgg

SEQ ID NO: 110543 - DNA, 22 bp, Artificial Sequence
  Synthetic oligonucleotide; TTT chr11 5387384 5387405 5387401 5387406 +
aaaaaaaacattatagggtggt

SEQ ID NO: 110544 - DNA, 22 bp, Artificial Sequence
  Synthetic oligonucleotide; TTA chr11 5387385 5387406 5387402 5387407 +
aaaaaaacattatagggtggtt

SEQ ID NO: 110545 - DNA, 22 bp, Artificial Sequence
  Synthetic oligonucleotide; TTA chr11 5387397 5387418 5387414 5387419 +
tagggtggttggttgagtagta

SEQ ID NO: 110546 - DNA, 22 bp, Artificial Sequence
  Synthetic oligonucleotide; TTG chr11 5387408 5387429 5387425 5387430 +
gttgagtagtaaactgagaagt

SEQ ID NO: 110547 - DNA, 22 bp, Artificial Sequence
  Synthetic oligonucleotide; TTG chr11 5387412 5387433 5387429 5387434 +
agtagtaaactgagaagtaaag

SEQ ID NO: 110548 - DNA, 22 bp, Artificial Sequence
  Synthetic oligonucleotide; CTG chr11 5387424 5387445 5387441 5387446 +
agaagtaaagaaatggaaaaga

SEQ ID NO: 110549 - DNA, 22 bp, Artificial Sequence
  Synthetic oligonucleotide; CTA chr11 5387459 5387480 5387476 5387481 +
ttttttaccccttgccaaagtg

SEQ ID NO: 110550 - DNA, 22 bp, Artificial Sequence
  Synthetic oligonucleotide; TTT chr11 5387462 5387483 5387479 5387484 +
tttaccccttgccaaagtgatg

SEQ ID NO: 110551 - DNA, 22 bp, Artificial Sequence
  Synthetic oligonucleotide; TTT chr11 5387463 5387484 5387480 5387485 +
ttaccccttgccaaagtgatgt

SEQ ID NO: 110552 - DNA, 22 bp, Artificial Sequence
  Synthetic oligonucleotide; TTT chr11 5387464 5387485 5387481 5387486 +
taccccttgccaaagtgatgta

SEQ ID NO: 110553 - DNA, 22 bp, Artificial Sequence
  Synthetic oligonucleotide; TTT chr11 5387465 5387486 5387482 5387487 +
accccttgccaaagtgatgtaa

SEQ ID NO: 110554 - DNA, 22 bp, Artificial Sequence
  Synthetic oligonucleotide; TTA chr11 5387466 5387487 5387483 5387488 +
ccccttgccaaagtgatgtaag

SEQ ID NO: 110555 - DNA, 22 bp, Artificial Sequence
  Synthetic oligonucleotide; CTT chr11 5387472 5387493 5387489 5387494 +
gccaaagtgatgtaagccttat

SEQ ID NO: 110556 - DNA, 22 bp, Artificial Sequence
  Synthetic oligonucleotide; TTG chr11 5387473 5387494 5387490 5387495 +
ccaaagtgatgtaagccttata

SEQ ID NO: 110557 - DNA, 22 bp, Artificial Sequence
  Synthetic oligonucleotide; CTT chr11 5387492 5387513 5387509 5387514 +
atatccatgcagcacctctgct

SEQ ID NO: 110558 - DNA, 22 bp, Artificial Sequence
  Synthetic oligonucleotide; TTA chr11 5387493 5387514 5387510 5387515 +
tatccatgcagcacctctgctc

SEQ ID NO: 110559 - DNA, 22 bp, Artificial Sequence
  Synthetic oligonucleotide; CTC chr11 5387510 5387531 5387527 5387532 +
tgctctcaactcgaagctcaca

SEQ ID NO: 110560 - DNA, 22 bp, Artificial Sequence
  Synthetic oligonucleotide; CTG chr11 5387512 5387533 5387529 5387534 +
ctctcaactcgaagctcacaag

SEQ ID NO: 110561 - DNA, 22 bp, Artificial Sequence
  Synthetic oligonucleotide; CTC chr11 5387515 5387536 5387532 5387537 +
tcaactcgaagctcacaagtat

SEQ ID NO: 110562 - DNA, 22 bp, Artificial Sequence
  Synthetic oligonucleotide; CTC chr11 5387517 5387538 5387534 5387539 +
aactcgaagctcacaagtataa

SEQ ID NO: 110563 - DNA, 22 bp, Artificial Sequence
  Synthetic oligonucleotide; CTC chr11 5387522 5387543 5387539 5387544 +
gaagctcacaagtataataaaa

SEQ ID NO: 110564 - DNA, 22 bp, Artificial Sequence
  Synthetic oligonucleotide; CTC chr11 5387529 5387550 5387546 5387551 +
acaagtataataaaattcaaag

SEQ ID NO: 110565 - DNA, 22 bp, Artificial Sequence
  Synthetic oligonucleotide; TTC chr11 5387547 5387568 5387564 5387569 +
aaagtagcttgcgtgacctgca

SEQ ID NO: 110566 - DNA, 22 bp, Artificial Sequence
  Synthetic oligonucleotide; CTT chr11 5387557 5387578 5387574 5387579 +
gcgtgacctgcaagatcataca

SEQ ID NO: 110567 - DNA, 22 bp, Artificial Sequence
  Synthetic oligonucleotide; TTG chr11 5387558 5387579 5387575 5387580 +
cgtgacctgcaagatcatacat

SEQ ID NO: 110568 - DNA, 22 bp, Artificial Sequence
  Synthetic oligonucleotide; CTG chr11 5387567 5387588 5387584 5387589 +
caagatcatacatgacgtagca

SEQ ID NO: 110569 - DNA, 22 bp, Artificial Sequence
  Synthetic oligonucleotide; TTT chr11 5387592 5387613 5387609 5387614 +
agctgctacttcaagtggattt

SEQ ID NO: 110570 - DNA, 22 bp, Artificial Sequence
  Synthetic oligonucleotide; TTA chr11 5387593 5387614 5387610 5387615 +
gctgctacttcaagtggatttg

SEQ ID NO: 110571 - DNA, 22 bp, Artificial Sequence
  Synthetic oligonucleotide; CTG chr11 5387597 5387618 5387614 5387619 +
ctacttcaagtggatttgccac

SEQ ID NO: 110572 - DNA, 22 bp, Artificial Sequence
  Synthetic oligonucleotide; CTA chr11 5387600 5387621 5387617 5387622 +
cttcaagtggatttgccaccat

SEQ ID NO: 110573 - DNA, 22 bp, Artificial Sequence
  Synthetic oligonucleotide; CTT chr11 5387603 5387624 5387620 5387625 +
caagtggatttgccaccattcc

SEQ ID NO: 110574 - DNA, 22 bp, Artificial Sequence
  Synthetic oligonucleotide; TTC chr11 5387604 5387625 5387621 5387626 +
aagtggatttgccaccattccc

SEQ ID NO: 110575 - DNA, 22 bp, Artificial Sequence
  Synthetic oligonucleotide; TTT chr11 5387614 5387635 5387631 5387636 +
gccaccattccccaccttgctt

SEQ ID NO: 110576 - DNA, 22 bp, Artificial Sequence
  Synthetic oligonucleotide; TTG chr11 5387615 5387636 5387632 5387637 +
ccaccattccccaccttgcttc

SEQ ID NO: 110577 - DNA, 22 bp, Artificial Sequence
  Synthetic oligonucleotide; TTC chr11 5387624 5387645 5387641 5387646 +
cccaccttgcttcctccattga

SEQ ID NO: 110578 - DNA, 22 bp, Artificial Sequence
  Synthetic oligonucleotide; CTT chr11 5387632 5387653 5387649 5387654 +
gcttcctccattgaatatacat

SEQ ID NO: 110579 - DNA, 22 bp, Artificial Sequence
  Synthetic oligonucleotide; TTG chr11 5387633 5387654 5387650 5387655 +
cttcctccattgaatatacatt

SEQ ID NO: 110580 - DNA, 22 bp, Artificial Sequence
  Synthetic oligonucleotide; CTT chr11 5387636 5387657 5387653 5387658 +
cctccattgaatatacattggc

SEQ ID NO: 110581 - DNA, 22 bp, Artificial Sequence
  Synthetic oligonucleotide; TTC chr11 5387637 5387658 5387654 5387659 +
ctccattgaatatacattggcc

SEQ ID NO: 110582 - DNA, 22 bp, Artificial Sequence
  Synthetic oligonucleotide; CTC chr11 5387640 5387661 5387657 5387662 +
cattgaatatacattggccttc

SEQ ID NO: 110583 - DNA, 22 bp, Artificial Sequence
  Synthetic oligonucleotide; TTG chr11 5387645 5387666 5387662 5387667 +
aatatacattggccttcttttg

SEQ ID NO: 110584 - DNA, 22 bp, Artificial Sequence
  Synthetic oligonucleotide; TTG chr11 5387656 5387677 5387673 5387678 +
gccttcttttgtcttttaaact

SEQ ID NO: 110585 - DNA, 22 bp, Artificial Sequence
  Synthetic oligonucleotide; CTT chr11 5387661 5387682 5387678 5387683 +
cttttgtcttttaaacttgtca

SEQ ID NO: 110586 - DNA, 22 bp, Artificial Sequence
  Synthetic oligonucleotide; TTC chr11 5387662 5387683 5387679 5387684 +
ttttgtcttttaaacttgtcaa

SEQ ID NO: 110587 - DNA, 22 bp, Artificial Sequence
  Synthetic oligonucleotide; CTT chr11 5387664 5387685 5387681 5387686 +
ttgtcttttaaacttgtcaagc

SEQ ID NO: 110588 - DNA, 22 bp, Artificial Sequence
  Synthetic oligonucleotide; TTT chr11 5387665 5387686 5387682 5387687 +
tgtcttttaaacttgtcaagct

SEQ ID NO: 110589 - DNA, 22 bp, Artificial Sequence
  Synthetic oligonucleotide; TTT chr11 5387666 5387687 5387683 5387688 +
gtcttttaaacttgtcaagctg

SEQ ID NO: 110590 - DNA, 22 bp, Artificial Sequence
  Synthetic oligonucleotide; TTG chr11 5387667 5387688 5387684 5387689 +
tcttttaaacttgtcaagctgc

SEQ ID NO: 110591 - DNA, 22 bp, Artificial Sequence
  Synthetic oligonucleotide; CTT chr11 5387671 5387692 5387688 5387693 +
ttaaacttgtcaagctgctctc

SEQ ID NO: 110592 - DNA, 22 bp, Artificial Sequence
  Synthetic oligonucleotide; TTT chr11 5387672 5387693 5387689 5387694 +
taaacttgtcaagctgctctct

SEQ ID NO: 110593 - DNA, 22 bp, Artificial Sequence
  Synthetic oligonucleotide; TTT chr11 5387673 5387694 5387690 5387695 +
aaacttgtcaagctgctctctg

SEQ ID NO: 110594 - DNA, 22 bp, Artificial Sequence
  Synthetic oligonucleotide; TTA chr11 5387674 5387695 5387691 5387696 +
aacttgtcaagctgctctctgc

SEQ ID NO: 110595 - DNA, 22 bp, Artificial Sequence
  Synthetic oligonucleotide; CTT chr11 5387679 5387700 5387696 5387701 +
gtcaagctgctctctgcttcag

SEQ ID NO: 110596 - DNA, 22 bp, Artificial Sequence
  Synthetic oligonucleotide; TTG chr11 5387680 5387701 5387697 5387702 +
tcaagctgctctctgcttcagg

SEQ ID NO: 110597 - DNA, 22 bp, Artificial Sequence
  Synthetic oligonucleotide; CTG chr11 5387688 5387709 5387705 5387710 +
ctctctgcttcaggaactttca

SEQ ID NO: 110598 - DNA, 22 bp, Artificial Sequence
  Synthetic oligonucleotide; CTC chr11 5387691 5387712 5387708 5387713 +
tctgcttcaggaactttcactt

SEQ ID NO: 110599 - DNA, 22 bp, Artificial Sequence
  Synthetic oligonucleotide; CTC chr11 5387693 5387714 5387710 5387715 +
tgcttcaggaactttcacttgt

SEQ ID NO: 110600 - DNA, 22 bp, Artificial Sequence
  Synthetic oligonucleotide; CTG chr11 5387695 5387716 5387712 5387717 +
cttcaggaactttcacttgttc

SEQ ID NO: 110601 - DNA, 22 bp, Artificial Sequence
  Synthetic oligonucleotide; CTT chr11 5387698 5387719 5387715 5387720 +
caggaactttcacttgttcttc

SEQ ID NO: 110602 - DNA, 22 bp, Artificial Sequence
  Synthetic oligonucleotide; TTC chr11 5387699 5387720 5387716 5387721 +
aggaactttcacttgttcttcc

SEQ ID NO: 110603 - DNA, 22 bp, Artificial Sequence
  Synthetic oligonucleotide; CTT chr11 5387707 5387728 5387724 5387729 +
tcacttgttcttcctccttcct

SEQ ID NO: 110604 - DNA, 22 bp, Artificial Sequence
  Synthetic oligonucleotide; TTT chr11 5387708 5387729 5387725 5387730 +
cacttgttcttcctccttcctt

SEQ ID NO: 110605 - DNA, 22 bp, Artificial Sequence
  Synthetic oligonucleotide; TTC chr11 5387709 5387730 5387726 5387731 +
acttgttcttcctccttccttg

SEQ ID NO: 110606 - DNA, 22 bp, Artificial Sequence
  Synthetic oligonucleotide; CTT chr11 5387713 5387734 5387730 5387735 +
gttcttcctccttccttgaatg

SEQ ID NO: 110607 - DNA, 22 bp, Artificial Sequence
  Synthetic oligonucleotide; TTG chr11 5387714 5387735 5387731 5387736 +
ttcttcctccttccttgaatgt

SEQ ID NO: 110608 - DNA, 22 bp, Artificial Sequence
  Synthetic oligonucleotide; TTC chr11 5387717 5387738 5387734 5387739 +
ttcctccttccttgaatgtttt

SEQ ID NO: 110609 - DNA, 22 bp, Artificial Sequence
  Synthetic oligonucleotide; CTT chr11 5387719 5387740 5387736 5387741 +
cctccttccttgaatgtttttc

SEQ ID NO: 110610 - DNA, 22 bp, Artificial Sequence
  Synthetic oligonucleotide; TTC chr11 5387720 5387741 5387737 5387742 +
ctccttccttgaatgtttttcc

SEQ ID NO: 110611 - DNA, 22 bp, Artificial Sequence
  Synthetic oligonucleotide; CTC chr11 5387723 5387744 5387740 5387745 +
cttccttgaatgtttttcccta

SEQ ID NO: 110612 - DNA, 22 bp, Artificial Sequence
  Synthetic oligonucleotide; CTT chr11 5387726 5387747 5387743 5387748 +
ccttgaatgtttttccctaaga

SEQ ID NO: 110613 - DNA, 22 bp, Artificial Sequence
  Synthetic oligonucleotide; TTC chr11 5387727 5387748 5387744 5387749 +
cttgaatgtttttccctaagat

SEQ ID NO: 110614 - DNA, 22 bp, Artificial Sequence
  Synthetic oligonucleotide; CTT chr11 5387730 5387751 5387747 5387752 +
gaatgtttttccctaagatagc

SEQ ID NO: 110615 - DNA, 22 bp, Artificial Sequence
  Synthetic oligonucleotide; TTG chr11 5387731 5387752 5387748 5387753 +
aatgtttttccctaagatagcc

SEQ ID NO: 110616 - DNA, 22 bp, Artificial Sequence
  Synthetic oligonucleotide; TTT chr11 5387738 5387759 5387755 5387760 +
ttccctaagatagccacacact

SEQ ID NO: 110617 - DNA, 22 bp, Artificial Sequence
  Synthetic oligonucleotide; TTT chr11 5387739 5387760 5387756 5387761 +
tccctaagatagccacacactt

SEQ ID NO: 110618 - DNA, 22 bp, Artificial Sequence
  Synthetic oligonucleotide; TTT chr11 5387740 5387761 5387757 5387762 +
ccctaagatagccacacacttg

SEQ ID NO: 110619 - DNA, 22 bp, Artificial Sequence
  Synthetic oligonucleotide; TTC chr11 5387741 5387762 5387758 5387763 +
cctaagatagccacacacttgc

SEQ ID NO: 110620 - DNA, 22 bp, Artificial Sequence
  Synthetic oligonucleotide; CTA chr11 5387745 5387766 5387762 5387767 +
agatagccacacacttgccctc

SEQ ID NO: 110621 - DNA, 22 bp, Artificial Sequence
  Synthetic oligonucleotide; CTT chr11 5387761 5387782 5387778 5387783 +
gccctctgattttgatttcttc

SEQ ID NO: 110622 - DNA, 22 bp, Artificial Sequence
  Synthetic oligonucleotide; TTG chr11 5387762 5387783 5387779 5387784 +
ccctctgattttgatttcttct

SEQ ID NO: 110623 - DNA, 22 bp, Artificial Sequence
  Synthetic oligonucleotide; CTC chr11 5387767 5387788 5387784 5387789 +
tgattttgatttcttctctaaa

SEQ ID NO: 110624 - DNA, 22 bp, Artificial Sequence
  Synthetic oligonucleotide; CTG chr11 5387769 5387790 5387786 5387791 +
attttgatttcttctctaaaat

SEQ ID NO: 110625 - DNA, 22 bp, Artificial Sequence
  Synthetic oligonucleotide; TTT chr11 5387773 5387794 5387790 5387795 +
tgatttcttctctaaaattacc

SEQ ID NO: 110626 - DNA, 22 bp, Artificial Sequence
  Synthetic oligonucleotide; TTT chr11 5387774 5387795 5387791 5387796 +
gatttcttctctaaaattacct

SEQ ID NO: 110627 - DNA, 22 bp, Artificial Sequence
  Synthetic oligonucleotide; TTG chr11 5387775 5387796 5387792 5387797 +
atttcttctctaaaattaccta

SEQ ID NO: 110628 - DNA, 22 bp, Artificial Sequence
  Synthetic oligonucleotide; TTT chr11 5387779 5387800 5387796 5387801 +
cttctctaaaattacctactca

SEQ ID NO: 110629 - DNA, 22 bp, Artificial Sequence
  Synthetic oligonucleotide; TTC chr11 5387780 5387801 5387797 5387802 +
ttctctaaaattacctactcag

SEQ ID NO: 110630 - DNA, 22 bp, Artificial Sequence
  Synthetic oligonucleotide; CTT chr11 5387782 5387803 5387799 5387804 +
ctctaaaattacctactcagag

SEQ ID NO: 110631 - DNA, 22 bp, Artificial Sequence
  Synthetic oligonucleotide; TTC chr11 5387783 5387804 5387800 5387805 +
tctaaaattacctactcagaga

SEQ ID NO: 110632 - DNA, 22 bp, Artificial Sequence
  Synthetic oligonucleotide; CTC chr11 5387785 5387806 5387802 5387807 +
taaaattacctactcagagagg

SEQ ID NO: 110633 - DNA, 22 bp, Artificial Sequence
  Synthetic oligonucleotide; CTA chr11 5387787 5387808 5387804 5387809 +
aaattacctactcagagaggtc

SEQ ID NO: 110634 - DNA, 22 bp, Artificial Sequence
  Synthetic oligonucleotide; TTA chr11 5387793 5387814 5387810 5387815 +
cctactcagagaggtcttctct

SEQ ID NO: 110635 - DNA, 22 bp, Artificial Sequence
  Synthetic oligonucleotide; CTA chr11 5387797 5387818 5387814 5387819 +
ctcagagaggtcttctctgact

SEQ ID NO: 110636 - DNA, 22 bp, Artificial Sequence
  Synthetic oligonucleotide; CTC chr11 5387800 5387821 5387817 5387822 +
agagaggtcttctctgactacc

SEQ ID NO: 110637 - DNA, 22 bp, Artificial Sequence
  Synthetic oligonucleotide; CTT chr11 5387811 5387832 5387828 5387833 +
ctctgactaccctatataaaat

SEQ ID NO: 110638 - DNA, 22 bp, Artificial Sequence
  Synthetic oligonucleotide; TTC chr11 5387812 5387833 5387829 5387834 +
tctgactaccctatataaaatg

SEQ ID NO: 110639 - DNA, 22 bp, Artificial Sequence
  Synthetic oligonucleotide; CTC chr11 5387814 5387835 5387831 5387836 +
tgactaccctatataaaatgca

SEQ ID NO: 110640 - DNA, 22 bp, Artificial Sequence
  Synthetic oligonucleotide; CTG chr11 5387816 5387837 5387833 5387838 +
actaccctatataaaatgcatc

SEQ ID NO: 110641 - DNA, 22 bp, Artificial Sequence
  Synthetic oligonucleotide; CTA chr11 5387820 5387841 5387837 5387842 +
ccctatataaaatgcatcactc

SEQ ID NO: 110642 - DNA, 22 bp, Artificial Sequence
  Synthetic oligonucleotide; CTA chr11 5387825 5387846 5387842 5387847 +
tataaaatgcatcactcttacc

SEQ ID NO: 110643 - DNA, 22 bp, Artificial Sequence
  Synthetic oligonucleotide; CTC chr11 5387842 5387863 5387859 5387864 +
ttaccttcctcctttgctccct

SEQ ID NO: 110644 - DNA, 22 bp, Artificial Sequence
  Synthetic oligonucleotide; CTT chr11 5387844 5387865 5387861 5387866 +
accttcctcctttgctccctac

SEQ ID NO: 110645 - DNA, 22 bp, Artificial Sequence
  Synthetic oligonucleotide; TTA chr11 5387845 5387866 5387862 5387867 +
ccttcctcctttgctccctact

SEQ ID NO: 110646 - DNA, 22 bp, Artificial Sequence
  Synthetic oligonucleotide; CTT chr11 5387849 5387870 5387866 5387871 +
cctcctttgctccctacttctt

SEQ ID NO: 110647 - DNA, 22 bp, Artificial Sequence
  Synthetic oligonucleotide; TTC chr11 5387850 5387871 5387867 5387872 +
ctcctttgctccctacttcttt

SEQ ID NO: 110648 - DNA, 22 bp, Artificial Sequence
  Synthetic oligonucleotide; CTC chr11 5387853 5387874 5387870 5387875 +
ctttgctccctacttctttatt

SEQ ID NO: 110649 - DNA, 22 bp, Artificial Sequence
  Synthetic oligonucleotide; CTT chr11 5387856 5387877 5387873 5387878 +
tgctccctacttctttattgca

SEQ ID NO: 110650 - DNA, 22 bp, Artificial Sequence
  Synthetic oligonucleotide; TTT chr11 5387857 5387878 5387874 5387879 +
gctccctacttctttattgcat

SEQ ID NO: 110651 - DNA, 22 bp, Artificial Sequence
  Synthetic oligonucleotide; TTG chr11 5387858 5387879 5387875 5387880 +
ctccctacttctttattgcatt

SEQ ID NO: 110652 - DNA, 22 bp, Artificial Sequence
  Synthetic oligonucleotide; CTC chr11 5387861 5387882 5387878 5387883 +
cctacttctttattgcattaca

SEQ ID NO: 110653 - DNA, 22 bp, Artificial Sequence
  Synthetic oligonucleotide; CTA chr11 5387865 5387886 5387882 5387887 +
cttctttattgcattacattac

SEQ ID NO: 110654 - DNA, 22 bp, Artificial Sequence
  Synthetic oligonucleotide; CTT chr11 5387868 5387889 5387885 5387890 +
ctttattgcattacattacctt

SEQ ID NO: 110655 - DNA, 22 bp, Artificial Sequence
  Synthetic oligonucleotide; TTC chr11 5387869 5387890 5387886 5387891 +
tttattgcattacattaccttg

SEQ ID NO: 110656 - DNA, 22 bp, Artificial Sequence
  Synthetic oligonucleotide; CTT chr11 5387871 5387892 5387888 5387893 +
tattgcattacattaccttgca

SEQ ID NO: 110657 - DNA, 22 bp, Artificial Sequence
  Synthetic oligonucleotide; TTT chr11 5387872 5387893 5387889 5387894 +
attgcattacattaccttgcat

SEQ ID NO: 110658 - DNA, 22 bp, Artificial Sequence
  Synthetic oligonucleotide; TTA chr11 5387873 5387894 5387890 5387895 +
ttgcattacattaccttgcatt

SEQ ID NO: 110659 - DNA, 22 bp, Artificial Sequence
  Synthetic oligonucleotide; TTG chr11 5387876 5387897 5387893 5387898 +
cattacattaccttgcattgca

SEQ ID NO: 110660 - DNA, 22 bp, Artificial Sequence
  Synthetic oligonucleotide; TTA chr11 5387881 5387902 5387898 5387903 +
cattaccttgcattgcagtatg

SEQ ID NO: 110661 - DNA, 22 bp, Artificial Sequence
  Synthetic oligonucleotide; TTA chr11 5387886 5387907 5387903 5387908 +
ccttgcattgcagtatgtatgt

SEQ ID NO: 110662 - DNA, 22 bp, Artificial Sequence
  Synthetic oligonucleotide; CTT chr11 5387890 5387911 5387907 5387912 +
gcattgcagtatgtatgtatgt

SEQ ID NO: 110663 - DNA, 22 bp, Artificial Sequence
  Synthetic oligonucleotide; TTG chr11 5387891 5387912 5387908 5387913 +
cattgcagtatgtatgtatgtg

SEQ ID NO: 110664 - DNA, 22 bp, Artificial Sequence
  Synthetic oligonucleotide; TTG chr11 5387896 5387917 5387913 5387918 +
cagtatgtatgtatgtgtttat

SEQ ID NO: 110665 - DNA, 22 bp, Artificial Sequence
  Synthetic oligonucleotide; TTT chr11 5387916 5387937 5387933 5387938 +
atttttgtctctgttctgtttc

SEQ ID NO: 110666 - DNA, 22 bp, Artificial Sequence
  Synthetic oligonucleotide; TTA chr11 5387917 5387938 5387934 5387939 +
tttttgtctctgttctgtttct

SEQ ID NO: 110667 - DNA, 22 bp, Artificial Sequence
  Synthetic oligonucleotide; TTT chr11 5387920 5387941 5387937 5387942 +
ttgtctctgttctgtttctgtt

SEQ ID NO: 110668 - DNA, 22 bp, Artificial Sequence
  Synthetic oligonucleotide; TTT chr11 5387921 5387942 5387938 5387943 +
tgtctctgttctgtttctgttc

SEQ ID NO: 110669 - DNA, 22 bp, Artificial Sequence
  Synthetic oligonucleotide; TTT chr11 5387922 5387943 5387939 5387944 +
gtctctgttctgtttctgttca

SEQ ID NO: 110670 - DNA, 22 bp, Artificial Sequence
  Synthetic oligonucleotide; TTG chr11 5387923 5387944 5387940 5387945 +
tctctgttctgtttctgttcat

SEQ ID NO: 110671 - DNA, 22 bp, Artificial Sequence
  Synthetic oligonucleotide; CTC chr11 5387927 5387948 5387944 5387949 +
tgttctgtttctgttcattgta

SEQ ID NO: 110672 - DNA, 22 bp, Artificial Sequence
  Synthetic oligonucleotide; CTG chr11 5387929 5387950 5387946 5387951 +
ttctgtttctgttcattgtatt

SEQ ID NO: 110673 - DNA, 22 bp, Artificial Sequence
  Synthetic oligonucleotide; TTC chr11 5387932 5387953 5387949 5387954 +
tgtttctgttcattgtattttc

SEQ ID NO: 110674 - DNA, 22 bp, Artificial Sequence
  Synthetic oligonucleotide; CTG chr11 5387934 5387955 5387951 5387956 +
tttctgttcattgtattttcag

SEQ ID NO: 110675 - DNA, 22 bp, Artificial Sequence
  Synthetic oligonucleotide; TTT chr11 5387937 5387958 5387954 5387959 +
ctgttcattgtattttcagtac

SEQ ID NO: 110676 - DNA, 22 bp, Artificial Sequence
  Synthetic oligonucleotide; TTC chr11 5387938 5387959 5387955 5387960 +
tgttcattgtattttcagtacc

SEQ ID NO: 110677 - DNA, 22 bp, Artificial Sequence
  Synthetic oligonucleotide; CTG chr11 5387940 5387961 5387957 5387962 +
ttcattgtattttcagtaccta

SEQ ID NO: 110678 - DNA, 22 bp, Artificial Sequence
  Synthetic oligonucleotide; TTC chr11 5387943 5387964 5387960 5387965 +
attgtattttcagtacctaggt

SEQ ID NO: 110679 - DNA, 22 bp, Artificial Sequence
  Synthetic oligonucleotide; TTG chr11 5387947 5387968 5387964 5387969 +
tattttcagtacctaggtgtaa

SEQ ID NO: 110680 - DNA, 22 bp, Artificial Sequence
  Synthetic oligonucleotide; TTT chr11 5387952 5387973 5387969 5387974 +
tcagtacctaggtgtaaaagta

SEQ ID NO: 110681 - DNA, 22 bp, Artificial Sequence
  Synthetic oligonucleotide; TTT chr11 5387953 5387974 5387970 5387975 +
cagtacctaggtgtaaaagtaa

SEQ ID NO: 110682 - DNA, 22 bp, Artificial Sequence
  Synthetic oligonucleotide; TTC chr11 5387954 5387975 5387971 5387976 +
agtacctaggtgtaaaagtaat

SEQ ID NO: 110683 - DNA, 22 bp, Artificial Sequence
  Synthetic oligonucleotide; CTA chr11 5387962 5387983 5387979 5387984 +
ggtgtaaaagtaattgcagttc

SEQ ID NO: 110684 - DNA, 22 bp, Artificial Sequence
  Synthetic oligonucleotide; TTG chr11 5387978 5387999 5387995 5388000 +
cagttcttgccattgaaagtaa

SEQ ID NO: 110685 - DNA, 22 bp, Artificial Sequence
  Synthetic oligonucleotide; TTC chr11 5387984 5388005 5388001 5388006 +
ttgccattgaaagtaatggtaa

SEQ ID NO: 110686 - DNA, 22 bp, Artificial Sequence
  Synthetic oligonucleotide; CTT chr11 5387986 5388007 5388003 5388008 +
gccattgaaagtaatggtaaaa

SEQ ID NO: 110687 - DNA, 22 bp, Artificial Sequence
  Synthetic oligonucleotide; TTG chr11 5387987 5388008 5388004 5388009 +
ccattgaaagtaatggtaaaaa

SEQ ID NO: 110688 - DNA, 22 bp, Artificial Sequence
  Synthetic oligonucleotide; TTG chr11 5387993 5388014 5388010 5388015 +
aaagtaatggtaaaaaccacaa

SEQ ID NO: 110689 - DNA, 22 bp, Artificial Sequence
  Synthetic oligonucleotide; TTA chr11 5388018 5388039 5388035 5388040 +
cttttgcaccaacctaatagaa

SEQ ID NO: 110690 - DNA, 22 bp, Artificial Sequence
  Synthetic oligonucleotide; CTT chr11 5388021 5388042 5388038 5388043 +
ttgcaccaacctaatagaatta

SEQ ID NO: 110691 - DNA, 22 bp, Artificial Sequence
  Synthetic oligonucleotide; TTT chr11 5388022 5388043 5388039 5388044 +
tgcaccaacctaatagaattat

SEQ ID NO: 110692 - DNA, 22 bp, Artificial Sequence
  Synthetic oligonucleotide; TTT chr11 5388023 5388044 5388040 5388045 +
gcaccaacctaatagaattatg

SEQ ID NO: 110693 - DNA, 22 bp, Artificial Sequence
  Synthetic oligonucleotide; TTG chr11 5388024 5388045 5388041 5388046 +
caccaacctaatagaattatgt

SEQ ID NO: 110694 - DNA, 22 bp, Artificial Sequence
  Synthetic oligonucleotide; CTA chr11 5388034 5388055 5388051 5388056 +
atagaattatgtctgccatgta

SEQ ID NO: 110695 - DNA, 22 bp, Artificial Sequence
  Synthetic oligonucleotide; TTA chr11 5388043 5388064 5388060 5388065 +
tgtctgccatgtaatacaattt

SEQ ID NO: 110696 - DNA, 22 bp, Artificial Sequence
  Synthetic oligonucleotide; CTG chr11 5388049 5388070 5388066 5388071 +
ccatgtaatacaatttcaatat

SEQ ID NO: 110697 - DNA, 22 bp, Artificial Sequence
  Synthetic oligonucleotide; TTT chr11 5388065 5388086 5388082 5388087 +
caatatgtatttattgaatcaa

SEQ ID NO: 110698 - DNA, 22 bp, Artificial Sequence
  Synthetic oligonucleotide; TTC chr11 5388066 5388087 5388083 5388088 +
aatatgtatttattgaatcaat

SEQ ID NO: 110699 - DNA, 22 bp, Artificial Sequence
  Synthetic oligonucleotide; TTT chr11 5388077 5388098 5388094 5388099 +
attgaatcaattaatgaataat

SEQ ID NO: 110700 - DNA, 22 bp, Artificial Sequence
  Synthetic oligonucleotide; TTA chr11 5388078 5388099 5388095 5388100 +
ttgaatcaattaatgaataatt

SEQ ID NO: 110701 - DNA, 22 bp, Artificial Sequence
  Synthetic oligonucleotide; TTG chr11 5388081 5388102 5388098 5388103 +
aatcaattaatgaataattatt

SEQ ID NO: 110702 - DNA, 22 bp, Artificial Sequence
  Synthetic oligonucleotide; TTA chr11 5388090 5388111 5388107 5388112 +
atgaataattattgaaataatt

SEQ ID NO: 110703 - DNA, 22 bp, Artificial Sequence
  Synthetic oligonucleotide; TTA chr11 5388101 5388122 5388118 5388123 +
ttgaaataattgaatattgaaa

SEQ ID NO: 110704 - DNA, 22 bp, Artificial Sequence
  Synthetic oligonucleotide; TTG chr11 5388104 5388125 5388121 5388126 +
aaataattgaatattgaaataa

SEQ ID NO: 110705 - DNA, 22 bp, Artificial Sequence
  Synthetic oligonucleotide; TTG chr11 5388113 5388134 5388130 5388135 +
aatattgaaataattattgaaa

SEQ ID NO: 110706 - DNA, 22 bp, Artificial Sequence
  Synthetic oligonucleotide; TTG chr11 5388120 5388141 5388137 5388142 +
aaataattattgaaataagatt

SEQ ID NO: 110707 - DNA, 22 bp, Artificial Sequence
  Synthetic oligonucleotide; TTA chr11 5388129 5388150 5388146 5388151 +
ttgaaataagattaatggtaat

SEQ ID NO: 110708 - DNA, 22 bp, Artificial Sequence
  Synthetic oligonucleotide; TTG chr11 5388132 5388153 5388149 5388154 +
aaataagattaatggtaatgat

SEQ ID NO: 110709 - DNA, 22 bp, Artificial Sequence
  Synthetic oligonucleotide; TTA chr11 5388143 5388164 5388160 5388165 +
atggtaatgatacatatttaat

SEQ ID NO: 110710 - DNA, 22 bp, Artificial Sequence
  Synthetic oligonucleotide; TTT chr11 5388162 5388183 5388179 5388184 +
aataatttattcaaataatatt

SEQ ID NO: 110711 - DNA, 22 bp, Artificial Sequence
  Synthetic oligonucleotide; TTA chr11 5388163 5388184 5388180 5388185 +
ataatttattcaaataatattt

SEQ ID NO: 110712 - DNA, 22 bp, Artificial Sequence
  Synthetic oligonucleotide; TTT chr11 5388170 5388191 5388187 5388192 +
attcaaataatatttaaaggat

SEQ ID NO: 110713 - DNA, 22 bp, Artificial Sequence
  Synthetic oligonucleotide; TTA chr11 5388171 5388192 5388188 5388193 +
ttcaaataatatttaaaggatt

SEQ ID NO: 110714 - DNA, 22 bp, Artificial Sequence
  Synthetic oligonucleotide; TTC chr11 5388174 5388195 5388191 5388196 +
aaataatatttaaaggattcca

SEQ ID NO: 110715 - DNA, 22 bp, Artificial Sequence
  Synthetic oligonucleotide; TTT chr11 5388185 5388206 5388202 5388207 +
aaaggattccaatgatatggtg

SEQ ID NO: 110716 - DNA, 22 bp, Artificial Sequence
  Synthetic oligonucleotide; TTA chr11 5388186 5388207 5388203 5388208 +
aaggattccaatgatatggtgg

SEQ ID NO: 110717 - DNA, 22 bp, Artificial Sequence
  Synthetic oligonucleotide; TTC chr11 5388194 5388215 5388211 5388216 +
caatgatatggtggctaaaaaa

SEQ ID NO: 110718 - DNA, 22 bp, Artificial Sequence
  Synthetic oligonucleotide; CTA chr11 5388211 5388232 5388228 5388233 +
aaaaagtcaatccctagagcta

SEQ ID NO: 110719 - DNA, 22 bp, Artificial Sequence
  Synthetic oligonucleotide; CTA chr11 5388227 5388248 5388244 5388249 +
gagctaatattaaaattaaaaa

SEQ ID NO: 110720 - DNA, 22 bp, Artificial Sequence
  Synthetic oligonucleotide; CTA chr11 5388233 5388254 5388250 5388255 +
atattaaaattaaaaaagagac

SEQ ID NO: 110721 - DNA, 22 bp, Artificial Sequence
  Synthetic oligonucleotide; TTA chr11 5388239 5388260 5388256 5388261 +
aaattaaaaaagagacagtcat

SEQ ID NO: 110722 - DNA, 22 bp, Artificial Sequence
  Synthetic oligonucleotide; TTA chr11 5388245 5388266 5388262 5388267 +
aaaaagagacagtcatggttta

SEQ ID NO: 110723 - DNA, 22 bp, Artificial Sequence
  Synthetic oligonucleotide; TTT chr11 5388266 5388287 5388283 5388288 +
atgtccacaaggaattcacatt

SEQ ID NO: 110724 - DNA, 22 bp, Artificial Sequence
  Synthetic oligonucleotide; TTA chr11 5388267 5388288 5388284 5388289 +
tgtccacaaggaattcacatta

SEQ ID NO: 110725 - DNA, 22 bp, Artificial Sequence
  Synthetic oligonucleotide; TTC chr11 5388283 5388304 5388300 5388305 +
acattatagaagcaatacagaa

SEQ ID NO: 110726 - DNA, 22 bp, Artificial Sequence
  Synthetic oligonucleotide; TTA chr11 5388289 5388310 5388306 5388311 +
tagaagcaatacagaaattgac

SEQ ID NO: 110727 - DNA, 22 bp, Artificial Sequence
  Synthetic oligonucleotide; TTG chr11 5388309 5388330 5388326 5388331 +
acaatgctgcagggaaaatatc

SEQ ID NO: 110728 - DNA, 22 bp, Artificial Sequence
  Synthetic oligonucleotide; CTG chr11 5388318 5388339 5388335 5388340 +
cagggaaaatatcatggtaatt

SEQ ID NO: 110729 - DNA, 22 bp, Artificial Sequence
  Synthetic oligonucleotide; TTA chr11 5388341 5388362 5388358 5388363 +
gtgcatagtgaactacaggaac

SEQ ID NO: 110730 - DNA, 22 bp, Artificial Sequence
  Synthetic oligonucleotide; CTA chr11 5388356 5388377 5388373 5388378 +
caggaacacataggagagggta

SEQ ID NO: 110731 - DNA, 22 bp, Artificial Sequence
  Synthetic oligonucleotide; TTC chr11 5388381 5388402 5388398 5388403 +
aaactaaacttggggaatttaa

SEQ ID NO: 110732 - DNA, 22 bp, Artificial Sequence
  Synthetic oligonucleotide; CTA chr11 5388387 5388408 5388404 5388409 +
aacttggggaatttaagaaggc

SEQ ID NO: 110733 - DNA, 22 bp, Artificial Sequence
  Synthetic oligonucleotide; CTT chr11 5388392 5388413 5388409 5388414 +
ggggaatttaagaaggccttct

SEQ ID NO: 110734 - DNA, 22 bp, Artificial Sequence
  Synthetic oligonucleotide; TTG chr11 5388393 5388414 5388410 5388415 +
gggaatttaagaaggccttctg

SEQ ID NO: 110735 - DNA, 22 bp, Artificial Sequence
  Synthetic oligonucleotide; TTT chr11 5388401 5388422 5388418 5388423 +
aagaaggccttctgaaggacat

SEQ ID NO: 110736 - DNA, 22 bp, Artificial Sequence
  Synthetic oligonucleotide; TTA chr11 5388402 5388423 5388419 5388424 +
agaaggccttctgaaggacatc

SEQ ID NO: 110737 - DNA, 22 bp, Artificial Sequence
  Synthetic oligonucleotide; CTT chr11 5388412 5388433 5388429 5388434 +
ctgaaggacatcatatctaagc

SEQ ID NO: 110738 - DNA, 22 bp, Artificial Sequence
  Synthetic oligonucleotide; TTC chr11 5388413 5388434 5388430 5388435 +
tgaaggacatcatatctaagct

SEQ ID NO: 110739 - DNA, 22 bp, Artificial Sequence
  Synthetic oligonucleotide; CTG chr11 5388415 5388436 5388432 5388437 +
aaggacatcatatctaagctaa

SEQ ID NO: 110740 - DNA, 22 bp, Artificial Sequence
  Synthetic oligonucleotide; CTA chr11 5388431 5388452 5388448 5388453 +
agctaaggtgggttatattagt

SEQ ID NO: 110741 - DNA, 22 bp, Artificial Sequence
  Synthetic oligonucleotide; CTA chr11 5388436 5388457 5388453 5388458 +
aggtgggttatattagtagaag

SEQ ID NO: 110742 - DNA, 22 bp, Artificial Sequence
  Synthetic oligonucleotide; TTA chr11 5388446 5388467 5388463 5388468 +
tattagtagaagttaactagac

SEQ ID NO: 110743 - DNA, 22 bp, Artificial Sequence
  Synthetic oligonucleotide; TTA chr11 5388451 5388472 5388468 5388473 +
gtagaagttaactagacaaaga

SEQ ID NO: 110744 - DNA, 22 bp, Artificial Sequence
  Synthetic oligonucleotide; TTA chr11 5388461 5388482 5388478 5388483 +
actagacaaagattaagggaaa

SEQ ID NO: 110745 - DNA, 22 bp, Artificial Sequence
  Synthetic oligonucleotide; CTA chr11 5388465 5388486 5388482 5388487 +
gacaaagattaagggaaagcta

SEQ ID NO: 110746 - DNA, 22 bp, Artificial Sequence
  Synthetic oligonucleotide; TTA chr11 5388476 5388497 5388493 5388498 +
agggaaagctatttcaggaaaa

SEQ ID NO: 110747 - DNA, 22 bp, Artificial Sequence
  Synthetic oligonucleotide; CTA chr11 5388487 5388508 5388504 5388509 +
tttcaggaaaaaatgtttttat

SEQ ID NO: 110748 - DNA, 22 bp, Artificial Sequence
  Synthetic oligonucleotide; TTT chr11 5388490 5388511 5388507 5388512 +
caggaaaaaatgtttttattcc

SEQ ID NO: 110749 - DNA, 22 bp, Artificial Sequence
  Synthetic oligonucleotide; TTC chr11 5388491 5388512 5388508 5388513 +
aggaaaaaatgtttttattcca

SEQ ID NO: 110750 - DNA, 22 bp, Artificial Sequence
  Synthetic oligonucleotide; TTT chr11 5388505 5388526 5388522 5388527 +
ttattccaggaagaatgaaaat

SEQ ID NO: 110751 - DNA, 22 bp, Artificial Sequence
  Synthetic oligonucleotide; TTT chr11 5388506 5388527 5388523 5388528 +
tattccaggaagaatgaaaata

SEQ ID NO: 110752 - DNA, 22 bp, Artificial Sequence
  Synthetic oligonucleotide; TTT chr11 5388507 5388528 5388524 5388529 +
attccaggaagaatgaaaatac

SEQ ID NO: 110753 - DNA, 22 bp, Artificial Sequence
  Synthetic oligonucleotide; TTA chr11 5388508 5388529 5388525 5388530 +
ttccaggaagaatgaaaataca

SEQ ID NO: 110754 - DNA, 22 bp, Artificial Sequence
  Synthetic oligonucleotide; TTC chr11 5388511 5388532 5388528 5388533 +
caggaagaatgaaaatacaaat

SEQ ID NO: 110755 - DNA, 22 bp, Artificial Sequence
  Synthetic oligonucleotide; TTT chr11 5388537 5388558 5388554 5388559 +
acctatgagcaagcatactaga

SEQ ID NO: 110756 - DNA, 22 bp, Artificial Sequence
  Synthetic oligonucleotide; TTA chr11 5388538 5388559 5388555 5388560 +
cctatgagcaagcatactagat

SEQ ID NO: 110757 - DNA, 22 bp, Artificial Sequence
  Synthetic oligonucleotide; CTA chr11 5388542 5388563 5388559 5388564 +
tgagcaagcatactagataaac

SEQ ID NO: 110758 - DNA, 22 bp, Artificial Sequence
  Synthetic oligonucleotide; CTA chr11 5388557 5388578 5388574 5388579 +
gataaactggaagaattgttta

SEQ ID NO: 110759 - DNA, 22 bp, Artificial Sequence
  Synthetic oligonucleotide; CTG chr11 5388566 5388587 5388583 5388588 +
gaagaattgtttagtgtcatta

SEQ ID NO: 110760 - DNA, 22 bp, Artificial Sequence
  Synthetic oligonucleotide; TTG chr11 5388575 5388596 5388592 5388597 +
tttagtgtcattaacaccgtga

SEQ ID NO: 110761 - DNA, 22 bp, Artificial Sequence
  Synthetic oligonucleotide; TTT chr11 5388578 5388599 5388595 5388600 +
agtgtcattaacaccgtgaata

SEQ ID NO: 110762 - DNA, 22 bp, Artificial Sequence
  Synthetic oligonucleotide; TTA chr11 5388579 5388600 5388596 5388601 +
gtgtcattaacaccgtgaatat

SEQ ID NO: 110763 - DNA, 22 bp, Artificial Sequence
  Synthetic oligonucleotide; TTA chr11 5388588 5388609 5388605 5388610 +
acaccgtgaatatacagaggaa

SEQ ID NO: 110764 - DNA, 22 bp, Artificial Sequence
  Synthetic oligonucleotide; TTA chr11 5388614 5388635 5388631 5388636 +
ggatagataagaaaataggata

SEQ ID NO: 110765 - DNA, 22 bp, Artificial Sequence
  Synthetic oligonucleotide; CTT chr11 5388665 5388686 5388682 5388687 +
gaatgtcattttaaaccttttt

SEQ ID NO: 110766 - DNA, 22 bp, Artificial Sequence
  Synthetic oligonucleotide; TTG chr11 5388666 5388687 5388683 5388688 +
aatgtcattttaaacctttttt

SEQ ID NO: 110767 - DNA, 22 bp, Artificial Sequence
  Synthetic oligonucleotide; TTT chr11 5388676 5388697 5388693 5388698 +
taaaccttttttacttcattaa

SEQ ID NO: 110768 - DNA, 22 bp, Artificial Sequence
  Synthetic oligonucleotide; TTT chr11 5388677 5388698 5388694 5388699 +
aaaccttttttacttcattaaa

SEQ ID NO: 110769 - DNA, 22 bp, Artificial Sequence
  Synthetic oligonucleotide; TTA chr11 5388678 5388699 5388695 5388700 +
aaccttttttacttcattaaaa

SEQ ID NO: 110770 - DNA, 22 bp, Artificial Sequence
  Synthetic oligonucleotide; CTT chr11 5388684 5388705 5388701 5388706 +
ttttacttcattaaaaacttgt

SEQ ID NO: 110771 - DNA, 22 bp, Artificial Sequence
  Synthetic oligonucleotide; TTT chr11 5388685 5388706 5388702 5388707 +
tttacttcattaaaaacttgtt

SEQ ID NO: 110772 - DNA, 22 bp, Artificial Sequence
  Synthetic oligonucleotide; TTT chr11 5388686 5388707 5388703 5388708 +
ttacttcattaaaaacttgttt

SEQ ID NO: 110773 - DNA, 22 bp, Artificial Sequence
  Synthetic oligonucleotide; TTT chr11 5388687 5388708 5388704 5388709 +
tacttcattaaaaacttgttta

SEQ ID NO: 110774 - DNA, 22 bp, Artificial Sequence
  Synthetic oligonucleotide; TTT chr11 5388688 5388709 5388705 5388710 +
acttcattaaaaacttgtttat

SEQ ID NO: 110775 - DNA, 22 bp, Artificial Sequence
  Synthetic oligonucleotide; TTA chr11 5388689 5388710 5388706 5388711 +
cttcattaaaaacttgtttatg

SEQ ID NO: 110776 - DNA, 22 bp, Artificial Sequence
  Synthetic oligonucleotide; CTT chr11 5388692 5388713 5388709 5388714 +
cattaaaaacttgtttatgtat

SEQ ID NO: 110777 - DNA, 22 bp, Artificial Sequence
  Synthetic oligonucleotide; TTC chr11 5388693 5388714 5388710 5388715 +
attaaaaacttgtttatgtata

SEQ ID NO: 110778 - DNA, 22 bp, Artificial Sequence
  Synthetic oligonucleotide; TTA chr11 5388697 5388718 5388714 5388719 +
aaaacttgtttatgtatacgtc

SEQ ID NO: 110779 - DNA, 22 bp, Artificial Sequence
  Synthetic oligonucleotide; CTT chr11 5388704 5388725 5388721 5388726 +
gtttatgtatacgtctctcttg

SEQ ID NO: 110780 - DNA, 22 bp, Artificial Sequence
  Synthetic oligonucleotide; TTG chr11 5388705 5388726 5388722 5388727 +
tttatgtatacgtctctcttgc

SEQ ID NO: 110781 - DNA, 22 bp, Artificial Sequence
  Synthetic oligonucleotide; TTT chr11 5388708 5388729 5388725 5388730 +
atgtatacgtctctcttgctat

SEQ ID NO: 110782 - DNA, 22 bp, Artificial Sequence
  Synthetic oligonucleotide; TTA chr11 5388709 5388730 5388726 5388731 +
tgtatacgtctctcttgctata

SEQ ID NO: 110783 - DNA, 22 bp, Artificial Sequence
  Synthetic oligonucleotide; CTC chr11 5388721 5388742 5388738 5388743 +
tcttgctatatagtagtcaact

SEQ ID NO: 110784 - DNA, 22 bp, Artificial Sequence
  Synthetic oligonucleotide; CTC chr11 5388723 5388744 5388740 5388745 +
ttgctatatagtagtcaactga

SEQ ID NO: 110785 - DNA, 22 bp, Artificial Sequence
  Synthetic oligonucleotide; CTT chr11 5388725 5388746 5388742 5388747 +
gctatatagtagtcaactgaat

SEQ ID NO: 110786 - DNA, 22 bp, Artificial Sequence
  Synthetic oligonucleotide; TTG chr11 5388726 5388747 5388743 5388748 +
ctatatagtagtcaactgaata

SEQ ID NO: 110787 - DNA, 22 bp, Artificial Sequence
  Synthetic oligonucleotide; CTA chr11 5388729 5388750 5388746 5388751 +
tatagtagtcaactgaatacag

SEQ ID NO: 110788 - DNA, 22 bp, Artificial Sequence
  Synthetic oligonucleotide; CTG chr11 5388744 5388765 5388761 5388766 +
aatacagtagtacaaaagatga

SEQ ID NO: 110789 - DNA, 22 bp, Artificial Sequence
  Synthetic oligonucleotide; CTG chr11 5388773 5388794 5388790 5388795 +
gaatagtcctgaaagagtgatc

SEQ ID NO: 110790 - DNA, 22 bp, Artificial Sequence
  Synthetic oligonucleotide; CTG chr11 5388784 5388805 5388801 5388806 +
aaagagtgatctgaattagaat

SEQ ID NO: 110791 - DNA, 22 bp, Artificial Sequence
  Synthetic oligonucleotide; CTG chr11 5388797 5388818 5388814 5388819 +
aattagaatagcatcaatgaag

SEQ ID NO: 110792 - DNA, 22 bp, Artificial Sequence
  Synthetic oligonucleotide; TTA chr11 5388802 5388823 5388819 5388824 +
gaatagcatcaatgaaggtgac

SEQ ID NO: 110793 - DNA, 22 bp, Artificial Sequence
  Synthetic oligonucleotide; CTT chr11 5388841 5388862 5388858 5388863 +
gaggtattcagtaaacagaaac

SEQ ID NO: 110794 - DNA, 22 bp, Artificial Sequence
  Synthetic oligonucleotide; TTG chr11 5388842 5388863 5388859 5388864 +
aggtattcagtaaacagaaacc

SEQ ID NO: 110795 - DNA, 22 bp, Artificial Sequence
  Synthetic oligonucleotide; TTC chr11 5388850 5388871 5388867 5388872 +
agtaaacagaaaccctaggact

SEQ ID NO: 110796 - DNA, 22 bp, Artificial Sequence
  Synthetic oligonucleotide; CTA chr11 5388867 5388888 5388884 5388889 +
ggacttggtgattggttgatta

SEQ ID NO: 110797 - DNA, 22 bp, Artificial Sequence
  Synthetic oligonucleotide; CTT chr11 5388873 5388894 5388890 5388895 +
ggtgattggttgattagatact

SEQ ID NO: 110798 - DNA, 22 bp, Artificial Sequence
  Synthetic oligonucleotide; TTG chr11 5388874 5388895 5388891 5388896 +
gtgattggttgattagatacta

SEQ ID NO: 110799 - DNA, 22 bp, Artificial Sequence
  Synthetic oligonucleotide; TTG chr11 5388881 5388902 5388898 5388903 +
gttgattagatactatggagag

SEQ ID NO: 110800 - DNA, 22 bp, Artificial Sequence
  Synthetic oligonucleotide; TTG chr11 5388885 5388906 5388902 5388907 +
attagatactatggagagatgt

SEQ ID NO: 110801 - DNA, 22 bp, Artificial Sequence
  Synthetic oligonucleotide; TTA chr11 5388889 5388910 5388906 5388911 +
gatactatggagagatgtgata

SEQ ID NO: 110802 - DNA, 22 bp, Artificial Sequence
  Synthetic oligonucleotide; CTA chr11 5388896 5388917 5388913 5388918 +
tggagagatgtgatatggagaa

SEQ ID NO: 110803 - DNA, 22 bp, Artificial Sequence
  Synthetic oligonucleotide; CTA chr11 5388923 5388944 5388940 5388945 +
acataaaacatgacatttgact

SEQ ID NO: 110804 - DNA, 22 bp, Artificial Sequence
  Synthetic oligonucleotide; TTT chr11 5388941 5388962 5388958 5388963 +
gacttgagccactgagataatg

SEQ ID NO: 110805 - DNA, 22 bp, Artificial Sequence
  Synthetic oligonucleotide; TTG chr11 5388942 5388963 5388959 5388964 +
acttgagccactgagataatga

SEQ ID NO: 110806 - DNA, 22 bp, Artificial Sequence
  Synthetic oligonucleotide; CTT chr11 5388946 5388967 5388963 5388968 +
gagccactgagataatgaaaag

SEQ ID NO: 110807 - DNA, 22 bp, Artificial Sequence
  Synthetic oligonucleotide; TTG chr11 5388947 5388968 5388964 5388969 +
agccactgagataatgaaaagt

SEQ ID NO: 110808 - DNA, 22 bp, Artificial Sequence
  Synthetic oligonucleotide; CTG chr11 5388955 5388976 5388972 5388977 +
agataatgaaaagtacagatgt

SEQ ID NO: 110809 - DNA, 22 bp, Artificial Sequence
  Synthetic oligonucleotide; TTG chr11 5388979 5389000 5388996 5389001 +
ctagagtctggaaatcaaaaga

SEQ ID NO: 110810 - DNA, 22 bp, Artificial Sequence
  Synthetic oligonucleotide; CTA chr11 5388982 5389003 5388999 5389004 +
gagtctggaaatcaaaagagag

SEQ ID NO: 110811 - DNA, 22 bp, Artificial Sequence
  Synthetic oligonucleotide; CTG chr11 5388989 5389010 5389006 5389011 +
gaaatcaaaagagagaaagaca

SEQ ID NO: 110812 - DNA, 22 bp, Artificial Sequence
  Synthetic oligonucleotide; TTC chr11 5389016 5389037 5389033 5389038 +
tggaattatatatttgttattt

SEQ ID NO: 110813 - DNA, 22 bp, Artificial Sequence
  Synthetic oligonucleotide; CTG chr11 5389018 5389039 5389035 5389040 +
gaattatatatttgttatttat

SEQ ID NO: 110814 - DNA, 22 bp, Artificial Sequence
  Synthetic oligonucleotide; TTA chr11 5389024 5389045 5389041 5389046 +
tatatttgttatttatcaatat

SEQ ID NO: 110815 - DNA, 22 bp, Artificial Sequence
  Synthetic oligonucleotide; TTT chr11 5389031 5389052 5389048 5389053 +
gttatttatcaatatatggatg

SEQ ID NO: 110816 - DNA, 22 bp, Artificial Sequence
  Synthetic oligonucleotide; TTG chr11 5389032 5389053 5389049 5389054 +
ttatttatcaatatatggatgg

SEQ ID NO: 110817 - DNA, 22 bp, Artificial Sequence
  Synthetic oligonucleotide; TTA chr11 5389035 5389056 5389052 5389057 +
tttatcaatatatggatggtaa

SEQ ID NO: 110818 - DNA, 22 bp, Artificial Sequence
  Synthetic oligonucleotide; TTT chr11 5389038 5389059 5389055 5389060 +
atcaatatatggatggtaaatg

SEQ ID NO: 110819 - DNA, 22 bp, Artificial Sequence
  Synthetic oligonucleotide; TTA chr11 5389039 5389060 5389056 5389061 +
tcaatatatggatggtaaatga

SEQ ID NO: 110820 - DNA, 22 bp, Artificial Sequence
  Synthetic oligonucleotide; TTA chr11 5389084 5389105 5389101 5389106 +
agaagaaataatagaatatggc

SEQ ID NO: 110821 - DNA, 22 bp, Artificial Sequence
  Synthetic oligonucleotide; TTG chr11 5389116 5389137 5389133 5389138 +
ccaaggatgggaagaactatac

SEQ ID NO: 110822 - DNA, 22 bp, Artificial Sequence
  Synthetic oligonucleotide; CTA chr11 5389135 5389156 5389152 5389157 +
tacttaagggttgagcaataaa

SEQ ID NO: 110823 - DNA, 22 bp, Artificial Sequence
  Synthetic oligonucleotide; CTT chr11 5389140 5389161 5389157 5389162 +
aagggttgagcaataaaggcac

SEQ ID NO: 110824 - DNA, 22 bp, Artificial Sequence
  Synthetic oligonucleotide; TTA chr11 5389141 5389162 5389158 5389163 +
agggttgagcaataaaggcaca

SEQ ID NO: 110825 - DNA, 22 bp, Artificial Sequence
  Synthetic oligonucleotide; TTG chr11 5389148 5389169 5389165 5389170 +
agcaataaaggcacaccagcaa

SEQ ID NO: 110826 - DNA, 22 bp, Artificial Sequence
  Synthetic oligonucleotide; CTG chr11 5389188 5389209 5389205 5389210 +
aaataattgaaatacagaggaa

SEQ ID NO: 110827 - DNA, 22 bp, Artificial Sequence
  Synthetic oligonucleotide; TTG chr11 5389197 5389218 5389214 5389219 +
aaatacagaggaaaactggtga

SEQ ID NO: 110828 - DNA, 22 bp, Artificial Sequence
  Synthetic oligonucleotide; CTG chr11 5389215 5389236 5389232 5389237 +
gtgagggcgaggttatcaaaga

SEQ ID NO: 110829 - DNA, 22 bp, Artificial Sequence
  Synthetic oligonucleotide; TTA chr11 5389230 5389251 5389247 5389252 +
tcaaagaaagttcaataaagta

SEQ ID NO: 110830 - DNA, 22 bp, Artificial Sequence
  Synthetic oligonucleotide; TTC chr11 5389243 5389264 5389260 5389265 +
aataaagtagtgagattggcag

SEQ ID NO: 110831 - DNA, 22 bp, Artificial Sequence
  Synthetic oligonucleotide; TTG chr11 5389261 5389282 5389278 5389283 +
gcagaattcataagggtggagt

SEQ ID NO: 110832 - DNA, 22 bp, Artificial Sequence
  Synthetic oligonucleotide; TTC chr11 5389270 5389291 5389287 5389292 +
ataagggtggagtagataatac

SEQ ID NO: 110833 - DNA, 22 bp, Artificial Sequence
  Synthetic oligonucleotide; CTA chr11 5389294 5389315 5389311 5389316 +
aaggtgatgatgaccatggtac

SEQ ID NO: 110834 - DNA, 22 bp, Artificial Sequence
  Synthetic oligonucleotide; CTG chr11 5389318 5389339 5389335 5389340 +
cttgtgatgttgtgaatgttag

SEQ ID NO: 110835 - DNA, 22 bp, Artificial Sequence
  Synthetic oligonucleotide; CTT chr11 5389321 5389342 5389338 5389343 +
gtgatgttgtgaatgttagtga

SEQ ID NO: 110836 - DNA, 22 bp, Artificial Sequence
  Synthetic oligonucleotide; TTG chr11 5389322 5389343 5389339 5389344 +
tgatgttgtgaatgttagtgaa

SEQ ID NO: 110837 - DNA, 22 bp, Artificial Sequence
  Synthetic oligonucleotide; TTG chr11 5389330 5389351 5389347 5389352 +
tgaatgttagtgaagctgaaga

SEQ ID NO: 110838 - DNA, 22 bp, Artificial Sequence
  Synthetic oligonucleotide; TTA chr11 5389339 5389360 5389356 5389361 +
gtgaagctgaagaattaataac

SEQ ID NO: 110839 - DNA, 22 bp, Artificial Sequence
  Synthetic oligonucleotide; CTG chr11 5389348 5389369 5389365 5389370 +
aagaattaataaccagaaatat

SEQ ID NO: 110840 - DNA, 22 bp, Artificial Sequence
  Synthetic oligonucleotide; TTA chr11 5389356 5389377 5389373 5389378 +
ataaccagaaatatccatttat

SEQ ID NO: 110841 - DNA, 22 bp, Artificial Sequence
  Synthetic oligonucleotide; TTT chr11 5389376 5389397 5389393 5389398 +
attttcagctcaatccccgagg

SEQ ID NO: 110842 - DNA, 22 bp, Artificial Sequence
  Synthetic oligonucleotide; TTA chr11 5389377 5389398 5389394 5389399 +
ttttcagctcaatccccgagga

SEQ ID NO: 110843 - DNA, 22 bp, Artificial Sequence
  Synthetic oligonucleotide; TTT chr11 5389380 5389401 5389397 5389402 +
tcagctcaatccccgaggaatg

SEQ ID NO: 110844 - DNA, 22 bp, Artificial Sequence
  Synthetic oligonucleotide; TTT chr11 5389381 5389402 5389398 5389403 +
cagctcaatccccgaggaatgt

SEQ ID NO: 110845 - DNA, 22 bp, Artificial Sequence
  Synthetic oligonucleotide; TTC chr11 5389382 5389403 5389399 5389404 +
agctcaatccccgaggaatgtc

SEQ ID NO: 110846 - DNA, 22 bp, Artificial Sequence
  Synthetic oligonucleotide; CTC chr11 5389387 5389408 5389404 5389409 +
aatccccgaggaatgtcagtcc

SEQ ID NO: 110847 - DNA, 22 bp, Artificial Sequence
  Synthetic oligonucleotide; TTC chr11 5389416 5389437 5389433 5389438 +
gctcagtcctcaattcatgctg

SEQ ID NO: 110848 - DNA, 22 bp, Artificial Sequence
  Synthetic oligonucleotide; CTC chr11 5389420 5389441 5389437 5389442 +
agtcctcaattcatgctgctat

SEQ ID NO: 110849 - DNA, 22 bp, Artificial Sequence
  Synthetic oligonucleotide; CTC chr11 5389427 5389448 5389444 5389449 +
aattcatgctgctatccaacat

SEQ ID NO: 110850 - DNA, 22 bp, Artificial Sequence
  Synthetic oligonucleotide; TTC chr11 5389432 5389453 5389449 5389454 +
atgctgctatccaacattactc

SEQ ID NO: 110851 - DNA, 22 bp, Artificial Sequence
  Synthetic oligonucleotide; CTG chr11 5389438 5389459 5389455 5389460 +
ctatccaacattactcagttta

SEQ ID NO: 110852 - DNA, 22 bp, Artificial Sequence
  Synthetic oligonucleotide; CTA chr11 5389441 5389462 5389458 5389463 +
tccaacattactcagtttagcc

SEQ ID NO: 110853 - DNA, 22 bp, Artificial Sequence
  Synthetic oligonucleotide; TTA chr11 5389451 5389472 5389468 5389473 +
ctcagtttagccccatattcta

SEQ ID NO: 110854 - DNA, 22 bp, Artificial Sequence
  Synthetic oligonucleotide; CTC chr11 5389454 5389475 5389471 5389476 +
agtttagccccatattctatct

SEQ ID NO: 110855 - DNA, 22 bp, Artificial Sequence
  Synthetic oligonucleotide; TTT chr11 5389459 5389480 5389476 5389481 +
agccccatattctatctcacca

SEQ ID NO: 110856 - DNA, 22 bp, Artificial Sequence
  Synthetic oligonucleotide; TTA chr11 5389460 5389481 5389477 5389482 +
gccccatattctatctcaccag

SEQ ID NO: 110857 - DNA, 22 bp, Artificial Sequence
  Synthetic oligonucleotide; TTC chr11 5389471 5389492 5389488 5389493 +
tatctcaccagctttcctggat

SEQ ID NO: 110858 - DNA, 22 bp, Artificial Sequence
  Synthetic oligonucleotide; CTA chr11 5389473 5389494 5389490 5389495 +
tctcaccagctttcctggattg

SEQ ID NO: 110859 - DNA, 22 bp, Artificial Sequence
  Synthetic oligonucleotide; CTC chr11 5389477 5389498 5389494 5389499 +
accagctttcctggattggaag

SEQ ID NO: 110860 - DNA, 22 bp, Artificial Sequence
  Synthetic oligonucleotide; CTT chr11 5389485 5389506 5389502 5389507 +
tcctggattggaaggcatcaaa

SEQ ID NO: 110861 - DNA, 22 bp, Artificial Sequence
  Synthetic oligonucleotide; TTT chr11 5389486 5389507 5389503 5389508 +
cctggattggaaggcatcaaac

SEQ ID NO: 110862 - DNA, 22 bp, Artificial Sequence
  Synthetic oligonucleotide; TTC chr11 5389487 5389508 5389504 5389509 +
ctggattggaaggcatcaaaca

SEQ ID NO: 110863 - DNA, 22 bp, Artificial Sequence
  Synthetic oligonucleotide; CTG chr11 5389490 5389511 5389507 5389512 +
gattggaaggcatcaaacactg

SEQ ID NO: 110864 - DNA, 22 bp, Artificial Sequence
  Synthetic oligonucleotide; TTG chr11 5389495 5389516 5389512 5389517 +
gaaggcatcaaacactggattt

SEQ ID NO: 110865 - DNA, 22 bp, Artificial Sequence
  Synthetic oligonucleotide; CTG chr11 5389512 5389533 5389529 5389534 +
gattttcatcccctttttcttt

SEQ ID NO: 110866 - DNA, 22 bp, Artificial Sequence
  Synthetic oligonucleotide; TTT chr11 5389517 5389538 5389534 5389539 +
tcatcccctttttctttatgta

SEQ ID NO: 110867 - DNA, 22 bp, Artificial Sequence
  Synthetic oligonucleotide; TTT chr11 5389518 5389539 5389535 5389540 +
catcccctttttctttatgtac

SEQ ID NO: 110868 - DNA, 22 bp, Artificial Sequence
  Synthetic oligonucleotide; TTC chr11 5389519 5389540 5389536 5389541 +
atcccctttttctttatgtaca

SEQ ID NO: 110869 - DNA, 22 bp, Artificial Sequence
  Synthetic oligonucleotide; CTT chr11 5389527 5389548 5389544 5389549 +
tttctttatgtacatggttgcc

SEQ ID NO: 110870 - DNA, 22 bp, Artificial Sequence
  Synthetic oligonucleotide; TTT chr11 5389528 5389549 5389545 5389550 +
ttctttatgtacatggttgcca

SEQ ID NO: 110871 - DNA, 22 bp, Artificial Sequence
  Synthetic oligonucleotide; TTT chr11 5389529 5389550 5389546 5389551 +
tctttatgtacatggttgccat

SEQ ID NO: 110872 - DNA, 22 bp, Artificial Sequence
  Synthetic oligonucleotide; TTT chr11 5389530 5389551 5389547 5389552 +
ctttatgtacatggttgccatc

SEQ ID NO: 110873 - DNA, 22 bp, Artificial Sequence
  Synthetic oligonucleotide; TTC chr11 5389531 5389552 5389548 5389553 +
tttatgtacatggttgccatct

SEQ ID NO: 110874 - DNA, 22 bp, Artificial Sequence
  Synthetic oligonucleotide; CTT chr11 5389533 5389554 5389550 5389555 +
tatgtacatggttgccatctca

SEQ ID NO: 110875 - DNA, 22 bp, Artificial Sequence
  Synthetic oligonucleotide; TTT chr11 5389534 5389555 5389551 5389556 +
atgtacatggttgccatctcag

SEQ ID NO: 110876 - DNA, 22 bp, Artificial Sequence
  Synthetic oligonucleotide; TTA chr11 5389535 5389556 5389552 5389557 +
tgtacatggttgccatctcagg

SEQ ID NO: 110877 - DNA, 22 bp, Artificial Sequence
  Synthetic oligonucleotide; TTG chr11 5389547 5389568 5389564 5389569 +
ccatctcaggcaattgtttcat

SEQ ID NO: 110878 - DNA, 22 bp, Artificial Sequence
  Synthetic oligonucleotide; CTC chr11 5389554 5389575 5389571 5389576 +
aggcaattgtttcattctgatc

SEQ ID NO: 110879 - DNA, 22 bp, Artificial Sequence
  Synthetic oligonucleotide; TTG chr11 5389563 5389584 5389580 5389585 +
tttcattctgatcattattaag

SEQ ID NO: 110880 - DNA, 22 bp, Artificial Sequence
  Synthetic oligonucleotide; TTT chr11 5389566 5389587 5389583 5389588 +
cattctgatcattattaagacc

SEQ ID NO: 110881 - DNA, 22 bp, Artificial Sequence
  Synthetic oligonucleotide; TTC chr11 5389567 5389588 5389584 5389589 +
attctgatcattattaagacca

SEQ ID NO: 110882 - DNA, 22 bp, Artificial Sequence
  Synthetic oligonucleotide; TTC chr11 5389571 5389592 5389588 5389593 +
tgatcattattaagaccaaccc

SEQ ID NO: 110883 - DNA, 22 bp, Artificial Sequence
  Synthetic oligonucleotide; CTG chr11 5389573 5389594 5389590 5389595 +
atcattattaagaccaaccctc

SEQ ID NO: 110884 - DNA, 22 bp, Artificial Sequence
  Synthetic oligonucleotide; TTA chr11 5389580 5389601 5389597 5389602 +
ttaagaccaaccctcgtctgca

SEQ ID NO: 110885 - DNA, 22 bp, Artificial Sequence
  Synthetic oligonucleotide; TTA chr11 5389583 5389604 5389600 5389605 +
agaccaaccctcgtctgcacac

SEQ ID NO: 110886 - DNA, 22 bp, Artificial Sequence
  Synthetic oligonucleotide; CTC chr11 5389595 5389616 5389612 5389617 +
gtctgcacacacccatgtacta

SEQ ID NO: 110887 - DNA, 22 bp, Artificial Sequence
  Synthetic oligonucleotide; CTG chr11 5389600 5389621 5389617 5389622 +
cacacacccatgtactatctac

SEQ ID NO: 110888 - DNA, 22 bp, Artificial Sequence
  Synthetic oligonucleotide; CTA chr11 5389617 5389638 5389634 5389639 +
tctactatccttgctggccctc

SEQ ID NO: 110889 - DNA, 22 bp, Artificial Sequence
  Synthetic oligonucleotide; CTA chr11 5389621 5389642 5389638 5389643 +
ctatccttgctggccctcactg

SEQ ID NO: 110890 - DNA, 22 bp, Artificial Sequence
  Synthetic oligonucleotide; CTA chr11 5389624 5389645 5389641 5389646 +
tccttgctggccctcactgacc

SEQ ID NO: 110891 - DNA, 22 bp, Artificial Sequence
  Synthetic oligonucleotide; CTT chr11 5389629 5389650 5389646 5389651 +
gctggccctcactgacctgggg

SEQ ID NO: 110892 - DNA, 22 bp, Artificial Sequence
  Synthetic oligonucleotide; TTG chr11 5389630 5389651 5389647 5389652 +
ctggccctcactgacctggggc

SEQ ID NO: 110893 - DNA, 22 bp, Artificial Sequence
  Synthetic oligonucleotide; CTG chr11 5389633 5389654 5389650 5389655 +
gccctcactgacctggggctgt

SEQ ID NO: 110894 - DNA, 22 bp, Artificial Sequence
  Synthetic oligonucleotide; CTC chr11 5389639 5389660 5389656 5389661 +
actgacctggggctgtgtgtgt

SEQ ID NO: 110895 - DNA, 22 bp, Artificial Sequence
  Synthetic oligonucleotide; CTG chr11 5389643 5389664 5389660 5389665 +
acctggggctgtgtgtgtccac

SEQ ID NO: 110896 - DNA, 22 bp, Artificial Sequence
  Synthetic oligonucleotide; CTG chr11 5389648 5389669 5389665 5389670 +
gggctgtgtgtgtccacgttgc

SEQ ID NO: 110897 - DNA, 22 bp, Artificial Sequence
  Synthetic oligonucleotide; CTG chr11 5389654 5389675 5389671 5389676 +
tgtgtgtccacgttgcccacca

SEQ ID NO: 110898 - DNA, 22 bp, Artificial Sequence
  Synthetic oligonucleotide; TTG chr11 5389669 5389690 5389686 5389691 +
cccaccactatggggatcttct

SEQ ID NO: 110899 - DNA, 22 bp, Artificial Sequence
  Synthetic oligonucleotide; CTA chr11 5389679 5389700 5389696 5389701 +
tggggatcttctggtttaactc

SEQ ID NO: 110900 - DNA, 22 bp, Artificial Sequence
  Synthetic oligonucleotide; CTT chr11 5389689 5389710 5389706 5389711 +
ctggtttaactcccatagtatc

SEQ ID NO: 110901 - DNA, 22 bp, Artificial Sequence
  Synthetic oligonucleotide; TTC chr11 5389690 5389711 5389707 5389712 +
tggtttaactcccatagtatct

SEQ ID NO: 110902 - DNA, 22 bp, Artificial Sequence
  Synthetic oligonucleotide; CTG chr11 5389692 5389713 5389709 5389714 +
gtttaactcccatagtatctac

SEQ ID NO: 110903 - DNA, 22 bp, Artificial Sequence
  Synthetic oligonucleotide; TTT chr11 5389696 5389717 5389713 5389718 +
aactcccatagtatctactttg

SEQ ID NO: 110904 - DNA, 22 bp, Artificial Sequence
  Synthetic oligonucleotide; TTA chr11 5389697 5389718 5389714 5389719 +
actcccatagtatctactttgg

SEQ ID NO: 110905 - DNA, 22 bp, Artificial Sequence
  Synthetic oligonucleotide; CTC chr11 5389701 5389722 5389718 5389723 +
ccatagtatctactttggagcg

SEQ ID NO: 110906 - DNA, 22 bp, Artificial Sequence
  Synthetic oligonucleotide; CTA chr11 5389713 5389734 5389730 5389735 +
ctttggagcgtgtcaaatccag

SEQ ID NO: 110907 - DNA, 22 bp, Artificial Sequence
  Synthetic oligonucleotide; CTT chr11 5389716 5389737 5389733 5389738 +
tggagcgtgtcaaatccagatg

SEQ ID NO: 110908 - DNA, 22 bp, Artificial Sequence
  Synthetic oligonucleotide; TTT chr11 5389717 5389738 5389734 5389739 +
ggagcgtgtcaaatccagatgt

SEQ ID NO: 110909 - DNA, 22 bp, Artificial Sequence
  Synthetic oligonucleotide; TTG chr11 5389718 5389739 5389735 5389740 +
gagcgtgtcaaatccagatgtt

SEQ ID NO: 110910 - DNA, 22 bp, Artificial Sequence
  Synthetic oligonucleotide; TTC chr11 5389741 5389762 5389758 5389763 +
tgcatccactctttttccttca

SEQ ID NO: 110911 - DNA, 22 bp, Artificial Sequence
  Synthetic oligonucleotide; CTG chr11 5389743 5389764 5389760 5389765 +
catccactctttttccttcatg

SEQ ID NO: 110912 - DNA, 22 bp, Artificial Sequence
  Synthetic oligonucleotide; CTC chr11 5389752 5389773 5389769 5389774 +
tttttccttcatggagtcctca

SEQ ID NO: 110913 - DNA, 22 bp, Artificial Sequence
  Synthetic oligonucleotide; CTT chr11 5389754 5389775 5389771 5389776 +
tttccttcatggagtcctcagt

SEQ ID NO: 110914 - DNA, 22 bp, Artificial Sequence
  Synthetic oligonucleotide; TTT chr11 5389755 5389776 5389772 5389777 +
ttccttcatggagtcctcagtg

SEQ ID NO: 110915 - DNA, 22 bp, Artificial Sequence
  Synthetic oligonucleotide; TTT chr11 5389756 5389777 5389773 5389778 +
tccttcatggagtcctcagtgc

SEQ ID NO: 110916 - DNA, 22 bp, Artificial Sequence
  Synthetic oligonucleotide; TTT chr11 5389757 5389778 5389774 5389779 +
ccttcatggagtcctcagtgct

SEQ ID NO: 110917 - DNA, 22 bp, Artificial Sequence
  Synthetic oligonucleotide; TTC chr11 5389758 5389779 5389775 5389780 +
cttcatggagtcctcagtgctc

SEQ ID NO: 110918 - DNA, 22 bp, Artificial Sequence
  Synthetic oligonucleotide; CTT chr11 5389761 5389782 5389778 5389783 +
catggagtcctcagtgctcctc

SEQ ID NO: 110919 - DNA, 22 bp, Artificial Sequence
  Synthetic oligonucleotide; TTC chr11 5389762 5389783 5389779 5389784 +
atggagtcctcagtgctcctca

SEQ ID NO: 110920 - DNA, 22 bp, Artificial Sequence
  Synthetic oligonucleotide; CTC chr11 5389773 5389794 5389790 5389795 +
agtgctcctcatgatgtccttt

SEQ ID NO: 110921 - DNA, 22 bp, Artificial Sequence
  Synthetic oligonucleotide; CTC chr11 5389780 5389801 5389797 5389802 +
ctcatgatgtcctttgaccgcc

SEQ ID NO: 110922 - DNA, 22 bp, Artificial Sequence
  Synthetic oligonucleotide; CTC chr11 5389783 5389804 5389800 5389805 +
atgatgtcctttgaccgccttg

SEQ ID NO: 110923 - DNA, 22 bp, Artificial Sequence
  Synthetic oligonucleotide; CTT chr11 5389794 5389815 5389811 5389816 +
tgaccgccttgtggccatctgc

SEQ ID NO: 110924 - DNA, 22 bp, Artificial Sequence
  Synthetic oligonucleotide; TTT chr11 5389795 5389816 5389812 5389817 +
gaccgccttgtggccatctgcc

SEQ ID NO: 110925 - DNA, 22 bp, Artificial Sequence
  Synthetic oligonucleotide; TTG chr11 5389796 5389817 5389813 5389818 +
accgccttgtggccatctgcca

SEQ ID NO: 110926 - DNA, 22 bp, Artificial Sequence
  Synthetic oligonucleotide; CTT chr11 5389804 5389825 5389821 5389826 +
gtggccatctgccaccctctga

SEQ ID NO: 110927 - DNA, 22 bp, Artificial Sequence
  Synthetic oligonucleotide; TTG chr11 5389805 5389826 5389822 5389827 +
tggccatctgccaccctctgag

SEQ ID NO: 110928 - DNA, 22 bp, Artificial Sequence
  Synthetic oligonucleotide; CTG chr11 5389815 5389836 5389832 5389837 +
ccaccctctgaggtattcggtc

SEQ ID NO: 110929 - DNA, 22 bp, Artificial Sequence
  Synthetic oligonucleotide; CTC chr11 5389823 5389844 5389840 5389845 +
tgaggtattcggtcattatcac

SEQ ID NO: 110930 - DNA, 22 bp, Artificial Sequence
  Synthetic oligonucleotide; CTG chr11 5389825 5389846 5389842 5389847 +
aggtattcggtcattatcactg

SEQ ID NO: 110931 - DNA, 22 bp, Artificial Sequence
  Synthetic oligonucleotide; TTC chr11 5389833 5389854 5389850 5389855 +
ggtcattatcactggccagcaa

SEQ ID NO: 110932 - DNA, 22 bp, Artificial Sequence
  Synthetic oligonucleotide; TTA chr11 5389841 5389862 5389858 5389863 +
tcactggccagcaagtggtcag

SEQ ID NO: 110933 - DNA, 22 bp, Artificial Sequence
  Synthetic oligonucleotide; CTG chr11 5389847 5389868 5389864 5389869 +
gccagcaagtggtcagagcagg

SEQ ID NO: 110934 - DNA, 22 bp, Artificial Sequence
  Synthetic oligonucleotide; CTA chr11 5389873 5389894 5389890 5389895 +
attgtcatcttccggggacctg

SEQ ID NO: 110935 - DNA, 22 bp, Artificial Sequence
  Synthetic oligonucleotide; TTG chr11 5389877 5389898 5389894 5389899 +
tcatcttccggggacctgtggc

SEQ ID NO: 110936 - DNA, 22 bp, Artificial Sequence
  Synthetic oligonucleotide; CTT chr11 5389884 5389905 5389901 5389906 +
ccggggacctgtggccactatc

SEQ ID NO: 110937 - DNA, 22 bp, Artificial Sequence
  Synthetic oligonucleotide; TTC chr11 5389885 5389906 5389902 5389907 +
cggggacctgtggccactatcc

SEQ ID NO: 110938 - DNA, 22 bp, Artificial Sequence
  Synthetic oligonucleotide; CTG chr11 5389895 5389916 5389912 5389917 +
tggccactatccctattgtcct

SEQ ID NO: 110939 - DNA, 22 bp, Artificial Sequence
  Synthetic oligonucleotide; CTA chr11 5389904 5389925 5389921 5389926 +
tccctattgtcctcctcctgaa

SEQ ID NO: 110940 - DNA, 22 bp, Artificial Sequence
  Synthetic oligonucleotide; CTA chr11 5389910 5389931 5389927 5389932 +
ttgtcctcctcctgaaggcttt

SEQ ID NO: 110941 - DNA, 22 bp, Artificial Sequence
  Synthetic oligonucleotide; TTG chr11 5389913 5389934 5389930 5389935 +
tcctcctcctgaaggcttttcc

SEQ ID NO: 110942 - DNA, 22 bp, Artificial Sequence
  Synthetic oligonucleotide; CTC chr11 5389918 5389939 5389935 5389940 +
ctcctgaaggcttttccctact

SEQ ID NO: 110943 - DNA, 22 bp, Artificial Sequence
  Synthetic oligonucleotide; CTC chr11 5389921 5389942 5389938 5389943 +
ctgaaggcttttccctactgtg

SEQ ID NO: 110944 - DNA, 22 bp, Artificial Sequence
  Synthetic oligonucleotide; CTG chr11 5389924 5389945 5389941 5389946 +
aaggcttttccctactgtggat

SEQ ID NO: 110945 - DNA, 22 bp, Artificial Sequence
  Synthetic oligonucleotide; CTT chr11 5389931 5389952 5389948 5389953 +
ttccctactgtggatctgtggt

SEQ ID NO: 110946 - DNA, 22 bp, Artificial Sequence
  Synthetic oligonucleotide; TTT chr11 5389932 5389953 5389949 5389954 +
tccctactgtggatctgtggtc

SEQ ID NO: 110947 - DNA, 22 bp, Artificial Sequence
  Synthetic oligonucleotide; TTT chr11 5389933 5389954 5389950 5389955 +
ccctactgtggatctgtggtcc

SEQ ID NO: 110948 - DNA, 22 bp, Artificial Sequence
  Synthetic oligonucleotide; TTC chr11 5389934 5389955 5389951 5389956 +
cctactgtggatctgtggtcct

SEQ ID NO: 110949 - DNA, 22 bp, Artificial Sequence
  Synthetic oligonucleotide; CTA chr11 5389938 5389959 5389955 5389960 +
ctgtggatctgtggtcctctcc

SEQ ID NO: 110950 - DNA, 22 bp, Artificial Sequence
  Synthetic oligonucleotide; CTG chr11 5389941 5389962 5389958 5389963 +
tggatctgtggtcctctcccac

SEQ ID NO: 110951 - DNA, 22 bp, Artificial Sequence
  Synthetic oligonucleotide; CTG chr11 5389949 5389970 5389966 5389971 +
tggtcctctcccactcattttg

SEQ ID NO: 110952 - DNA, 22 bp, Artificial Sequence
  Synthetic oligonucleotide; CTC chr11 5389957 5389978 5389974 5389979 +
tcccactcattttgcctgcacc

SEQ ID NO: 110953 - DNA, 22 bp, Artificial Sequence
  Synthetic oligonucleotide; CTC chr11 5389959 5389980 5389976 5389981 +
ccactcattttgcctgcaccag

SEQ ID NO: 110954 - DNA, 22 bp, Artificial Sequence
  Synthetic oligonucleotide; CTC chr11 5389965 5389986 5389982 5389987 +
attttgcctgcaccaggaagtg

SEQ ID NO: 110955 - DNA, 22 bp, Artificial Sequence
  Synthetic oligonucleotide; TTT chr11 5389969 5389990 5389986 5389991 +
tgcctgcaccaggaagtgatac

SEQ ID NO: 110956 - DNA, 22 bp, Artificial Sequence
  Synthetic oligonucleotide; TTT chr11 5389970 5389991 5389987 5389992 +
gcctgcaccaggaagtgataca

SEQ ID NO: 110957 - DNA, 22 bp, Artificial Sequence
  Synthetic oligonucleotide; TTG chr11 5389971 5389992 5389988 5389993 +
cctgcaccaggaagtgatacag

SEQ ID NO: 110958 - DNA, 22 bp, Artificial Sequence
  Synthetic oligonucleotide; CTG chr11 5389975 5389996 5389992 5389997 +
caccaggaagtgatacagctgg

SEQ ID NO: 110959 - DNA, 22 bp, Artificial Sequence
  Synthetic oligonucleotide; CTG chr11 5389996 5390017 5390013 5390018 +
gcctgcacagatatcaccttca

SEQ ID NO: 110960 - DNA, 22 bp, Artificial Sequence
  Synthetic oligonucleotide; CTG chr11 5390001 5390022 5390018 5390023 +
cacagatatcaccttcaataat

SEQ ID NO: 110961 - DNA, 22 bp, Artificial Sequence
  Synthetic oligonucleotide; CTT chr11 5390016 5390037 5390033 5390038 +
caataatctgtatggactgatg

SEQ ID NO: 110962 - DNA, 22 bp, Artificial Sequence
  Synthetic oligonucleotide; TTC chr11 5390017 5390038 5390034 5390039 +
aataatctgtatggactgatgg

SEQ ID NO: 110963 - DNA, 22 bp, Artificial Sequence
  Synthetic oligonucleotide; CTG chr11 5390026 5390047 5390043 5390048 +
tatggactgatggtggtagttt

SEQ ID NO: 110964 - DNA, 22 bp, Artificial Sequence
  Synthetic oligonucleotide; CTG chr11 5390035 5390056 5390052 5390057 +
atggtggtagttttcactgtga

SEQ ID NO: 110965 - DNA, 22 bp, Artificial Sequence
  Synthetic oligonucleotide; TTT chr11 5390048 5390069 5390065 5390070 +
tcactgtgatgctggacctggt

SEQ ID NO: 110966 - DNA, 22 bp, Artificial Sequence
  Synthetic oligonucleotide; TTT chr11 5390049 5390070 5390066 5390071 +
cactgtgatgctggacctggtg

SEQ ID NO: 110967 - DNA, 22 bp, Artificial Sequence
  Synthetic oligonucleotide; TTC chr11 5390050 5390071 5390067 5390072 +
actgtgatgctggacctggtgc

SEQ ID NO: 110968 - DNA, 22 bp, Artificial Sequence
  Synthetic oligonucleotide; CTG chr11 5390054 5390075 5390071 5390076 +
tgatgctggacctggtgctcat

SEQ ID NO: 110969 - DNA, 22 bp, Artificial Sequence
  Synthetic oligonucleotide; CTG chr11 5390062 5390083 5390079 5390084 +
gacctggtgctcatcgcactgt

SEQ ID NO: 110970 - DNA, 22 bp, Artificial Sequence
  Synthetic oligonucleotide; CTG chr11 5390068 5390089 5390085 5390090 +
gtgctcatcgcactgtcctatg

SEQ ID NO: 110971 - DNA, 22 bp, Artificial Sequence
  Synthetic oligonucleotide; CTC chr11 5390074 5390095 5390091 5390096 +
atcgcactgtcctatggactca

SEQ ID NO: 110972 - DNA, 22 bp, Artificial Sequence
  Synthetic oligonucleotide; CTG chr11 5390083 5390104 5390100 5390105 +
tcctatggactcatcctgcaca

SEQ ID NO: 110973 - DNA, 22 bp, Artificial Sequence
  Synthetic oligonucleotide; CTA chr11 5390088 5390109 5390105 5390110 +
tggactcatcctgcacacagta

SEQ ID NO: 110974 - DNA, 22 bp, Artificial Sequence
  Synthetic oligonucleotide; CTC chr11 5390095 5390116 5390112 5390117 +
atcctgcacacagtagcaggcc

SEQ ID NO: 110975 - DNA, 22 bp, Artificial Sequence
  Synthetic oligonucleotide; CTG chr11 5390101 5390122 5390118 5390123 +
cacacagtagcaggcctggcct

SEQ ID NO: 110976 - DNA, 22 bp, Artificial Sequence
  Synthetic oligonucleotide; CTG chr11 5390119 5390140 5390136 5390141 +
gcctcccaagaggagcagcgcc

SEQ ID NO: 110977 - DNA, 22 bp, Artificial Sequence
  Synthetic oligonucleotide; CTC chr11 5390124 5390145 5390141 5390146 +
ccaagaggagcagcgccgtgcc

SEQ ID NO: 110978 - DNA, 22 bp, Artificial Sequence
  Synthetic oligonucleotide; CTT chr11 5390148 5390169 5390165 5390170 +
tcagacatgcaccgctcctctc

SEQ ID NO: 110979 - DNA, 22 bp, Artificial Sequence
  Synthetic oligonucleotide; TTT chr11 5390149 5390170 5390166 5390171 +
cagacatgcaccgctcctctct

SEQ ID NO: 110980 - DNA, 22 bp, Artificial Sequence
  Synthetic oligonucleotide; TTC chr11 5390150 5390171 5390167 5390172 +
agacatgcaccgctcctctctg

SEQ ID NO: 110981 - DNA, 22 bp, Artificial Sequence
  Synthetic oligonucleotide; CTC chr11 5390165 5390186 5390182 5390187 +
ctctctgtgctgtgctagtatt

SEQ ID NO: 110982 - DNA, 22 bp, Artificial Sequence
  Synthetic oligonucleotide; CTC chr11 5390168 5390189 5390185 5390190 +
tctgtgctgtgctagtattctt

SEQ ID NO: 110983 - DNA, 22 bp, Artificial Sequence
  Synthetic oligonucleotide; CTC chr11 5390170 5390191 5390187 5390192 +
tgtgctgtgctagtattctttg

SEQ ID NO: 110984 - DNA, 22 bp, Artificial Sequence
  Synthetic oligonucleotide; CTG chr11 5390172 5390193 5390189 5390194 +
tgctgtgctagtattctttgtg

SEQ ID NO: 110985 - DNA, 22 bp, Artificial Sequence
  Synthetic oligonucleotide; CTG chr11 5390177 5390198 5390194 5390199 +
tgctagtattctttgtgcccat

SEQ ID NO: 110986 - DNA, 22 bp, Artificial Sequence
  Synthetic oligonucleotide; CTA chr11 5390182 5390203 5390199 5390204 +
gtattctttgtgcccatgatgg

SEQ ID NO: 110987 - DNA, 22 bp, Artificial Sequence
  Synthetic oligonucleotide; TTC chr11 5390188 5390209 5390205 5390210 +
tttgtgcccatgatggggctgt

SEQ ID NO: 110988 - DNA, 22 bp, Artificial Sequence
  Synthetic oligonucleotide; CTT chr11 5390190 5390211 5390207 5390212 +
tgtgcccatgatggggctgtcc

SEQ ID NO: 110989 - DNA, 22 bp, Artificial Sequence
  Synthetic oligonucleotide; TTT chr11 5390191 5390212 5390208 5390213 +
gtgcccatgatggggctgtccc

SEQ ID NO: 110990 - DNA, 22 bp, Artificial Sequence
  Synthetic oligonucleotide; TTG chr11 5390192 5390213 5390209 5390214 +
tgcccatgatggggctgtccct

SEQ ID NO: 110991 - DNA, 22 bp, Artificial Sequence
  Synthetic oligonucleotide; CTG chr11 5390209 5390230 5390226 5390231 +
tccctggtgcaccgttttggga

SEQ ID NO: 110992 - DNA, 22 bp, Artificial Sequence
  Synthetic oligonucleotide; CTG chr11 5390215 5390236 5390232 5390237 +
gtgcaccgttttgggaagcatg

SEQ ID NO: 110993 - DNA, 22 bp, Artificial Sequence
  Synthetic oligonucleotide; TTT chr11 5390226 5390247 5390243 5390248 +
tgggaagcatgccccacctgct

SEQ ID NO: 110994 - DNA, 22 bp, Artificial Sequence
  Synthetic oligonucleotide; TTT chr11 5390227 5390248 5390244 5390249 +
gggaagcatgccccacctgcta

SEQ ID NO: 110995 - DNA, 22 bp, Artificial Sequence
  Synthetic oligonucleotide; TTG chr11 5390228 5390249 5390245 5390250 +
ggaagcatgccccacctgctat

SEQ ID NO: 110996 - DNA, 22 bp, Artificial Sequence
  Synthetic oligonucleotide; CTG chr11 5390246 5390267 5390263 5390268 +
ctattcatcttcttatggccaa

SEQ ID NO: 110997 - DNA, 22 bp, Artificial Sequence
  Synthetic oligonucleotide; CTA chr11 5390249 5390270 5390266 5390271 +
ttcatcttcttatggccaatgt

SEQ ID NO: 110998 - DNA, 22 bp, Artificial Sequence
  Synthetic oligonucleotide; TTC chr11 5390252 5390273 5390269 5390274 +
atcttcttatggccaatgtcta

SEQ ID NO: 110999 - DNA, 22 bp, Artificial Sequence
  Synthetic oligonucleotide; CTT chr11 5390257 5390278 5390274 5390279 +
cttatggccaatgtctaccttt

SEQ ID NO: 111000 - DNA, 22 bp, Artificial Sequence
  Synthetic oligonucleotide; TTC chr11 5390258 5390279 5390275 5390280 +
ttatggccaatgtctacctttt

SEQ ID NO: 111001 - DNA, 22 bp, Artificial Sequence
  Synthetic oligonucleotide; CTT chr11 5390260 5390281 5390277 5390282 +
atggccaatgtctacctttttg

SEQ ID NO: 111002 - DNA, 22 bp, Artificial Sequence
  Synthetic oligonucleotide; TTA chr11 5390261 5390282 5390278 5390283 +
tggccaatgtctacctttttgt

SEQ ID NO: 111003 - DNA, 22 bp, Artificial Sequence
  Synthetic oligonucleotide; CTA chr11 5390274 5390295 5390291 5390296 +
cctttttgtgcctcccatgctt

SEQ ID NO: 111004 - DNA, 22 bp, Artificial Sequence
  Synthetic oligonucleotide; CTT chr11 5390278 5390299 5390295 5390300 +
tttgtgcctcccatgcttaacc

SEQ ID NO: 111005 - DNA, 22 bp, Artificial Sequence
  Synthetic oligonucleotide; TTT chr11 5390279 5390300 5390296 5390301 +
ttgtgcctcccatgcttaaccc

SEQ ID NO: 111006 - DNA, 22 bp, Artificial Sequence
  Synthetic oligonucleotide; TTT chr11 5390280 5390301 5390297 5390302 +
tgtgcctcccatgcttaaccca

SEQ ID NO: 111007 - DNA, 22 bp, Artificial Sequence
  Synthetic oligonucleotide; TTT chr11 5390281 5390302 5390298 5390303 +
gtgcctcccatgcttaacccaa

SEQ ID NO: 111008 - DNA, 22 bp, Artificial Sequence
  Synthetic oligonucleotide; TTG chr11 5390282 5390303 5390299 5390304 +
tgcctcccatgcttaacccaat

SEQ ID NO: 111009 - DNA, 22 bp, Artificial Sequence
  Synthetic oligonucleotide; CTC chr11 5390288 5390309 5390305 5390310 +
ccatgcttaacccaatcatata

SEQ ID NO: 111010 - DNA, 22 bp, Artificial Sequence
  Synthetic oligonucleotide; CTT chr11 5390296 5390317 5390313 5390318 +
aacccaatcatatacagcatta

SEQ ID NO: 111011 - DNA, 22 bp, Artificial Sequence
  Synthetic oligonucleotide; TTA chr11 5390297 5390318 5390314 5390319 +
acccaatcatatacagcattaa

SEQ ID NO: 111012 - DNA, 22 bp, Artificial Sequence
  Synthetic oligonucleotide; TTA chr11 5390318 5390339 5390335 5390340 +
agaccaaggagatccaccgtgc

SEQ ID NO: 111013 - DNA, 22 bp, Artificial Sequence
  Synthetic oligonucleotide; TTA chr11 5390345 5390366 5390362 5390367 +
tcaagttcctaggtcttaaaaa

SEQ ID NO: 111014 - DNA, 22 bp, Artificial Sequence
  Synthetic oligonucleotide; TTC chr11 5390353 5390374 5390370 5390375 +
ctaggtcttaaaaaggccagta

SEQ ID NO: 111015 - DNA, 22 bp, Artificial Sequence
  Synthetic oligonucleotide; CTA chr11 5390356 5390377 5390373 5390378 +
ggtcttaaaaaggccagtaaat

SEQ ID NO: 111016 - DNA, 22 bp, Artificial Sequence
  Synthetic oligonucleotide; CTT chr11 5390362 5390383 5390379 5390384 +
aaaaaggccagtaaatgagtcc

SEQ ID NO: 111017 - DNA, 22 bp, Artificial Sequence
  Synthetic oligonucleotide; TTA chr11 5390363 5390384 5390380 5390385 +
aaaaggccagtaaatgagtcct

SEQ ID NO: 111018 - DNA, 22 bp, Artificial Sequence
  Synthetic oligonucleotide; CTG chr11 5390386 5390407 5390403 5390408 +
gggctaaaactccccctagagg

SEQ ID NO: 111019 - DNA, 22 bp, Artificial Sequence
  Synthetic oligonucleotide; CTA chr11 5390392 5390413 5390409 5390414 +
aaactccccctagaggcctata

SEQ ID NO: 111020 - DNA, 22 bp, Artificial Sequence
  Synthetic oligonucleotide; CTC chr11 5390398 5390419 5390415 5390420 +
cccctagaggcctataagaagg

SEQ ID NO: 111021 - DNA, 22 bp, Artificial Sequence
  Synthetic oligonucleotide; CTA chr11 5390404 5390425 5390421 5390426 +
gaggcctataagaaggccccaa

SEQ ID NO: 111022 - DNA, 22 bp, Artificial Sequence
  Synthetic oligonucleotide; CTA chr11 5390412 5390433 5390429 5390434 +
taagaaggccccaaattggact

SEQ ID NO: 111023 - DNA, 22 bp, Artificial Sequence
  Synthetic oligonucleotide; TTG chr11 5390430 5390451 5390447 5390452 +
gactgaaaatttggagtattga

SEQ ID NO: 111024 - DNA, 22 bp, Artificial Sequence
  Synthetic oligonucleotide; CTG chr11 5390435 5390456 5390452 5390457 +
aaaatttggagtattgagtata

SEQ ID NO: 111025 - DNA, 22 bp, Artificial Sequence
  Synthetic oligonucleotide; TTT chr11 5390442 5390463 5390459 5390464 +
ggagtattgagtatatagcatg

SEQ ID NO: 111026 - DNA, 22 bp, Artificial Sequence
  Synthetic oligonucleotide; TTG chr11 5390443 5390464 5390460 5390465 +
gagtattgagtatatagcatgc

SEQ ID NO: 111027 - DNA, 22 bp, Artificial Sequence
  Synthetic oligonucleotide; TTG chr11 5390451 5390472 5390468 5390473 +
agtatatagcatgctcttaaag

SEQ ID NO: 111028 - DNA, 22 bp, Artificial Sequence
  Synthetic oligonucleotide; CTC chr11 5390467 5390488 5390484 5390489 +
ttaaagattttttgcccctgtc

SEQ ID NO: 111029 - DNA, 22 bp, Artificial Sequence
  Synthetic oligonucleotide; CTT chr11 5390469 5390490 5390486 5390491 +
aaagattttttgcccctgtcct

SEQ ID NO: 111030 - DNA, 22 bp, Artificial Sequence
  Synthetic oligonucleotide; TTA chr11 5390470 5390491 5390487 5390492 +
aagattttttgcccctgtccta

SEQ ID NO: 111031 - DNA, 22 bp, Artificial Sequence
  Synthetic oligonucleotide; TTT chr11 5390477 5390498 5390494 5390499 +
tttgcccctgtcctaaataaaa

SEQ ID NO: 111032 - DNA, 22 bp, Artificial Sequence
  Synthetic oligonucleotide; TTT chr11 5390478 5390499 5390495 5390500 +
ttgcccctgtcctaaataaaat

SEQ ID NO: 111033 - DNA, 22 bp, Artificial Sequence
  Synthetic oligonucleotide; TTT chr11 5390479 5390500 5390496 5390501 +
tgcccctgtcctaaataaaata

SEQ ID NO: 111034 - DNA, 22 bp, Artificial Sequence
  Synthetic oligonucleotide; TTT chr11 5390480 5390501 5390497 5390502 +
gcccctgtcctaaataaaatat

SEQ ID NO: 111035 - DNA, 22 bp, Artificial Sequence
  Synthetic oligonucleotide; TTG chr11 5390481 5390502 5390498 5390503 +
cccctgtcctaaataaaatatg

SEQ ID NO: 111036 - DNA, 22 bp, Artificial Sequence
  Synthetic oligonucleotide; CTG chr11 5390487 5390508 5390504 5390509 +
tcctaaataaaatatgggcaaa

SEQ ID NO: 111037 - DNA, 22 bp, Artificial Sequence
  Synthetic oligonucleotide; CTA chr11 5390492 5390513 5390509 5390514 +
aataaaatatgggcaaatttat

SEQ ID NO: 111038 - DNA, 22 bp, Artificial Sequence
  Synthetic oligonucleotide; TTT chr11 5390512 5390533 5390529 5390534 +
atgtctggagttgtggctttaa

SEQ ID NO: 111039 - DNA, 22 bp, Artificial Sequence
  Synthetic oligonucleotide; TTA chr11 5390513 5390534 5390530 5390535 +
tgtctggagttgtggctttaaa

SEQ ID NO: 111040 - DNA, 22 bp, Artificial Sequence
  Synthetic oligonucleotide; CTG chr11 5390519 5390540 5390536 5390541 +
gagttgtggctttaaaaaactg

SEQ ID NO: 111041 - DNA, 22 bp, Artificial Sequence
  Synthetic oligonucleotide; TTG chr11 5390525 5390546 5390542 5390547 +
tggctttaaaaaactgaacttc

SEQ ID NO: 111042 - DNA, 22 bp, Artificial Sequence
  Synthetic oligonucleotide; CTT chr11 5390531 5390552 5390548 5390553 +
taaaaaactgaacttctcttgc

SEQ ID NO: 111043 - DNA, 22 bp, Artificial Sequence
  Synthetic oligonucleotide; TTT chr11 5390532 5390553 5390549 5390554 +
aaaaaactgaacttctcttgct

SEQ ID NO: 111044 - DNA, 22 bp, Artificial Sequence
  Synthetic oligonucleotide; TTA chr11 5390533 5390554 5390550 5390555 +
aaaaactgaacttctcttgctt

SEQ ID NO: 111045 - DNA, 22 bp, Artificial Sequence
  Synthetic oligonucleotide; CTG chr11 5390541 5390562 5390558 5390563 +
aacttctcttgcttagatttta

SEQ ID NO: 111046 - DNA, 22 bp, Artificial Sequence
  Synthetic oligonucleotide; CTT chr11 5390546 5390567 5390563 5390568 +
ctcttgcttagattttaatggc

SEQ ID NO: 111047 - DNA, 22 bp, Artificial Sequence
  Synthetic oligonucleotide; TTC chr11 5390547 5390568 5390564 5390569 +
tcttgcttagattttaatggct

SEQ ID NO: 111048 - DNA, 22 bp, Artificial Sequence
  Synthetic oligonucleotide; CTC chr11 5390549 5390570 5390566 5390571 +
ttgcttagattttaatggctcc

SEQ ID NO: 111049 - DNA, 22 bp, Artificial Sequence
  Synthetic oligonucleotide; CTT chr11 5390551 5390572 5390568 5390573 +
gcttagattttaatggctcctc

SEQ ID NO: 111050 - DNA, 22 bp, Artificial Sequence
  Synthetic oligonucleotide; TTG chr11 5390552 5390573 5390569 5390574 +
cttagattttaatggctcctcc

SEQ ID NO: 111051 - DNA, 22 bp, Artificial Sequence
  Synthetic oligonucleotide; CTT chr11 5390555 5390576 5390572 5390577 +
agattttaatggctcctcctac

SEQ ID NO: 111052 - DNA, 22 bp, Artificial Sequence
  Synthetic oligonucleotide; TTA chr11 5390556 5390577 5390573 5390578 +
gattttaatggctcctcctaca

SEQ ID NO: 111053 - DNA, 22 bp, Artificial Sequence
  Synthetic oligonucleotide; TTT chr11 5390561 5390582 5390578 5390583 +
taatggctcctcctacagctga

SEQ ID NO: 111054 - DNA, 22 bp, Artificial Sequence
  Synthetic oligonucleotide; TTT chr11 5390562 5390583 5390579 5390584 +
aatggctcctcctacagctgag

SEQ ID NO: 111055 - DNA, 22 bp, Artificial Sequence
  Synthetic oligonucleotide; TTA chr11 5390563 5390584 5390580 5390585 +
atggctcctcctacagctgaga

SEQ ID NO: 111056 - DNA, 22 bp, Artificial Sequence
  Synthetic oligonucleotide; CTC chr11 5390570 5390591 5390587 5390592 +
ctcctacagctgagaactggca

SEQ ID NO: 111057 - DNA, 22 bp, Artificial Sequence
  Synthetic oligonucleotide; CTC chr11 5390573 5390594 5390590 5390595 +
ctacagctgagaactggcattt

SEQ ID NO: 111058 - DNA, 22 bp, Artificial Sequence
  Synthetic oligonucleotide; CTA chr11 5390576 5390597 5390593 5390598 +
cagctgagaactggcatttttg

SEQ ID NO: 111059 - DNA, 22 bp, Artificial Sequence
  Synthetic oligonucleotide; CTG chr11 5390582 5390603 5390599 5390604 +
agaactggcatttttggtagca

SEQ ID NO: 111060 - DNA, 22 bp, Artificial Sequence
  Synthetic oligonucleotide; CTG chr11 5390589 5390610 5390606 5390611 +
gcatttttggtagcatcaaagc

SEQ ID NO: 111061 - DNA, 22 bp, Artificial Sequence
  Synthetic oligonucleotide; TTT chr11 5390595 5390616 5390612 5390617 +
ttggtagcatcaaagctatcca

SEQ ID NO: 111062 - DNA, 22 bp, Artificial Sequence
  Synthetic oligonucleotide; TTT chr11 5390596 5390617 5390613 5390618 +
tggtagcatcaaagctatccag

SEQ ID NO: 111063 - DNA, 22 bp, Artificial Sequence
  Synthetic oligonucleotide; TTT chr11 5390597 5390618 5390614 5390619 +
ggtagcatcaaagctatccaga

SEQ ID NO: 111064 - DNA, 22 bp, Artificial Sequence
  Synthetic oligonucleotide; TTG chr11 5390598 5390619 5390615 5390620 +
gtagcatcaaagctatccagaa

SEQ ID NO: 111065 - DNA, 22 bp, Artificial Sequence
  Synthetic oligonucleotide; CTA chr11 5390613 5390634 5390630 5390635 +
tccagaaggcaactttattgaa

SEQ ID NO: 111066 - DNA, 22 bp, Artificial Sequence
  Synthetic oligonucleotide; CTT chr11 5390628 5390649 5390645 5390650 +
tattgaaggtcatcatcaatgt

SEQ ID NO: 111067 - DNA, 22 bp, Artificial Sequence
  Synthetic oligonucleotide; TTT chr11 5390629 5390650 5390646 5390651 +
attgaaggtcatcatcaatgta

SEQ ID NO: 111068 - DNA, 22 bp, Artificial Sequence
  Synthetic oligonucleotide; TTA chr11 5390630 5390651 5390647 5390652 +
ttgaaggtcatcatcaatgtaa

SEQ ID NO: 111069 - DNA, 22 bp, Artificial Sequence
  Synthetic oligonucleotide; TTG chr11 5390633 5390654 5390650 5390655 +
aaggtcatcatcaatgtaacta

SEQ ID NO: 111070 - DNA, 22 bp, Artificial Sequence
  Synthetic oligonucleotide; CTA chr11 5390655 5390676 5390672 5390677 +
aaactaaaatgaaactaaataa

SEQ ID NO: 111071 - DNA, 22 bp, Artificial Sequence
  Synthetic oligonucleotide; CTA chr11 5390661 5390682 5390678 5390683 +
aaatgaaactaaataaaaacta

SEQ ID NO: 111072 - DNA, 22 bp, Artificial Sequence
  Synthetic oligonucleotide; CTA chr11 5390672 5390693 5390689 5390694 +
aataaaaactaaaaagaacaat

SEQ ID NO: 111073 - DNA, 22 bp, Artificial Sequence
  Synthetic oligonucleotide; CTA chr11 5390683 5390704 5390700 5390705 +
aaaagaacaataaataccagag

SEQ ID NO: 111074 - DNA, 22 bp, Artificial Sequence
  Synthetic oligonucleotide; CTG chr11 5390723 5390744 5390740 5390745 +
gcagagaccaggtaaatgccat

SEQ ID NO: 111075 - DNA, 22 bp, Artificial Sequence
  Synthetic oligonucleotide; TTT chr11 5390747 5390768 5390764 5390769 +
gctctaactcacctccggaaat

SEQ ID NO: 111076 - DNA, 22 bp, Artificial Sequence
  Synthetic oligonucleotide; TTG chr11 5390748 5390769 5390765 5390770 +
ctctaactcacctccggaaata

SEQ ID NO: 111077 - DNA, 22 bp, Artificial Sequence
  Synthetic oligonucleotide; CTC chr11 5390751 5390772 5390768 5390773 +
taactcacctccggaaatacac

SEQ ID NO: 111078 - DNA, 22 bp, Artificial Sequence
  Synthetic oligonucleotide; CTA chr11 5390753 5390774 5390770 5390775 +
actcacctccggaaatacacct

SEQ ID NO: 111079 - DNA, 22 bp, Artificial Sequence
  Synthetic oligonucleotide; CTC chr11 5390757 5390778 5390774 5390779 +
acctccggaaatacacctcctt

SEQ ID NO: 111080 - DNA, 22 bp, Artificial Sequence
  Synthetic oligonucleotide; CTC chr11 5390762 5390783 5390779 5390784 +
cggaaatacacctccttccatg

SEQ ID NO: 111081 - DNA, 22 bp, Artificial Sequence
  Synthetic oligonucleotide; CTC chr11 5390776 5390797 5390793 5390798 +
cttccatggttccttgggactg

SEQ ID NO: 111082 - DNA, 22 bp, Artificial Sequence
  Synthetic oligonucleotide; CTT chr11 5390779 5390800 5390796 5390801 +
ccatggttccttgggactgctt

SEQ ID NO: 111083 - DNA, 22 bp, Artificial Sequence
  Synthetic oligonucleotide; TTC chr11 5390780 5390801 5390797 5390802 +
catggttccttgggactgcttc

SEQ ID NO: 111084 - DNA, 22 bp, Artificial Sequence
  Synthetic oligonucleotide; TTC chr11 5390788 5390809 5390805 5390810 +
cttgggactgcttccatcttat

SEQ ID NO: 111085 - DNA, 22 bp, Artificial Sequence
  Synthetic oligonucleotide; CTT chr11 5390791 5390812 5390808 5390813 +
gggactgcttccatcttatcta

SEQ ID NO: 111086 - DNA, 22 bp, Artificial Sequence
  Synthetic oligonucleotide; TTG chr11 5390792 5390813 5390809 5390814 +
ggactgcttccatcttatctac

SEQ ID NO: 111087 - DNA, 22 bp, Artificial Sequence
  Synthetic oligonucleotide; CTG chr11 5390798 5390819 5390815 5390820 +
cttccatcttatctacctggcc

SEQ ID NO: 111088 - DNA, 22 bp, Artificial Sequence
  Synthetic oligonucleotide; CTT chr11 5390801 5390822 5390818 5390823 +
ccatcttatctacctggccaag

SEQ ID NO: 111089 - DNA, 22 bp, Artificial Sequence
  Synthetic oligonucleotide; TTC chr11 5390802 5390823 5390819 5390824 +
catcttatctacctggccaagt

SEQ ID NO: 111090 - DNA, 22 bp, Artificial Sequence
  Synthetic oligonucleotide; CTT chr11 5390808 5390829 5390825 5390830 +
atctacctggccaagtttcttc

SEQ ID NO: 111091 - DNA, 22 bp, Artificial Sequence
  Synthetic oligonucleotide; TTA chr11 5390809 5390830 5390826 5390831 +
tctacctggccaagtttcttct

SEQ ID NO: 111092 - DNA, 22 bp, Artificial Sequence
  Synthetic oligonucleotide; CTA chr11 5390813 5390834 5390830 5390835 +
cctggccaagtttcttctcatc

SEQ ID NO: 111093 - DNA, 22 bp, Artificial Sequence
  Synthetic oligonucleotide; CTG chr11 5390817 5390838 5390834 5390839 +
gccaagtttcttctcatctttt

SEQ ID NO: 111094 - DNA, 22 bp, Artificial Sequence
  Synthetic oligonucleotide; TTT chr11 5390826 5390847 5390843 5390848 +
cttctcatctttttctatcctg

SEQ ID NO: 111095 - DNA, 22 bp, Artificial Sequence
  Synthetic oligonucleotide; TTC chr11 5390827 5390848 5390844 5390849 +
ttctcatctttttctatcctgg

SEQ ID NO: 111096 - DNA, 22 bp, Artificial Sequence
  Synthetic oligonucleotide; CTT chr11 5390829 5390850 5390846 5390851 +
ctcatctttttctatcctggtc

SEQ ID NO: 111097 - DNA, 22 bp, Artificial Sequence
  Synthetic oligonucleotide; TTC chr11 5390830 5390851 5390847 5390852 +
tcatctttttctatcctggtca

SEQ ID NO: 111098 - DNA, 22 bp, Artificial Sequence
  Synthetic oligonucleotide; CTC chr11 5390832 5390853 5390849 5390854 +
atctttttctatcctggtcagc

SEQ ID NO: 111099 - DNA, 22 bp, Artificial Sequence
  Synthetic oligonucleotide; CTT chr11 5390837 5390858 5390854 5390859 +
tttctatcctggtcagcagtaa

SEQ ID NO: 111100 - DNA, 22 bp, Artificial Sequence
  Synthetic oligonucleotide; TTT chr11 5390838 5390859 5390855 5390860 +
ttctatcctggtcagcagtaac

SEQ ID NO: 111101 - DNA, 22 bp, Artificial Sequence
  Synthetic oligonucleotide; TTT chr11 5390839 5390860 5390856 5390861 +
tctatcctggtcagcagtaact

SEQ ID NO: 111102 - DNA, 22 bp, Artificial Sequence
  Synthetic oligonucleotide; TTT chr11 5390840 5390861 5390857 5390862 +
ctatcctggtcagcagtaactt

SEQ ID NO: 111103 - DNA, 22 bp, Artificial Sequence
  Synthetic oligonucleotide; TTC chr11 5390841 5390862 5390858 5390863 +
tatcctggtcagcagtaacttt

SEQ ID NO: 111104 - DNA, 22 bp, Artificial Sequence
  Synthetic oligonucleotide; CTA chr11 5390843 5390864 5390860 5390865 +
tcctggtcagcagtaactttca

SEQ ID NO: 111105 - DNA, 22 bp, Artificial Sequence
  Synthetic oligonucleotide; CTG chr11 5390848 5390869 5390865 5390870 +
gtcagcagtaactttcagaccc

SEQ ID NO: 111106 - DNA, 22 bp, Artificial Sequence
  Synthetic oligonucleotide; CTT chr11 5390862 5390883 5390879 5390884 +
tcagacccccaagtcacatcag

SEQ ID NO: 111107 - DNA, 22 bp, Artificial Sequence
  Synthetic oligonucleotide; TTT chr11 5390863 5390884 5390880 5390885 +
cagacccccaagtcacatcaga

SEQ ID NO: 111108 - DNA, 22 bp, Artificial Sequence
  Synthetic oligonucleotide; TTC chr11 5390864 5390885 5390881 5390886 +
agacccccaagtcacatcagaa

SEQ ID NO: 111109 - DNA, 22 bp, Artificial Sequence
  Synthetic oligonucleotide; CTC chr11 5390891 5390912 5390908 5390913 +
agaactcctgcattcttcctca

SEQ ID NO: 111110 - DNA, 22 bp, Artificial Sequence
  Synthetic oligonucleotide; CTC chr11 5390898 5390919 5390915 5390920 +
ctgcattcttcctcaacacctg

SEQ ID NO: 111111 - DNA, 22 bp, Artificial Sequence
  Synthetic oligonucleotide; CTG chr11 5390901 5390922 5390918 5390923 +
cattcttcctcaacacctgttt

SEQ ID NO: 111112 - DNA, 22 bp, Artificial Sequence
  Synthetic oligonucleotide; TTC chr11 5390906 5390927 5390923 5390928 +
ttcctcaacacctgtttcaagc

SEQ ID NO: 111113 - DNA, 22 bp, Artificial Sequence
  Synthetic oligonucleotide; CTT chr11 5390908 5390929 5390925 5390930 +
cctcaacacctgtttcaagcaa

SEQ ID NO: 111114 - DNA, 22 bp, Artificial Sequence
  Synthetic oligonucleotide; TTC chr11 5390909 5390930 5390926 5390931 +
ctcaacacctgtttcaagcaac

SEQ ID NO: 111115 - DNA, 22 bp, Artificial Sequence
  Synthetic oligonucleotide; CTC chr11 5390912 5390933 5390929 5390934 +
aacacctgtttcaagcaacacc

SEQ ID NO: 111116 - DNA, 22 bp, Artificial Sequence
  Synthetic oligonucleotide; CTG chr11 5390920 5390941 5390937 5390942 +
tttcaagcaacacccccccaaa

SEQ ID NO: 111117 - DNA, 22 bp, Artificial Sequence
  Synthetic oligonucleotide; TTT chr11 5390923 5390944 5390940 5390945 +
caagcaacacccccccaaattt

SEQ ID NO: 111118 - DNA, 22 bp, Artificial Sequence
  Synthetic oligonucleotide; TTC chr11 5390924 5390945 5390941 5390946 +
aagcaacacccccccaaatttc

SEQ ID NO: 111119 - DNA, 22 bp, Artificial Sequence
  Synthetic oligonucleotide; TTT chr11 5390945 5390966 5390962 5390967 +
ctaaggttgtgctctctcctga

SEQ ID NO: 111120 - DNA, 22 bp, Artificial Sequence
  Synthetic oligonucleotide; TTC chr11 5390946 5390967 5390963 5390968 +
taaggttgtgctctctcctgac

SEQ ID NO: 111121 - DNA, 22 bp, Artificial Sequence
  Synthetic oligonucleotide; CTA chr11 5390948 5390969 5390965 5390970 +
aggttgtgctctctcctgacca

SEQ ID NO: 111122 - DNA, 22 bp, Artificial Sequence
  Synthetic oligonucleotide; TTG chr11 5390954 5390975 5390971 5390976 +
tgctctctcctgaccatattcc

SEQ ID NO: 111123 - DNA, 22 bp, Artificial Sequence
  Synthetic oligonucleotide; CTC chr11 5390959 5390980 5390976 5390981 +
tctcctgaccatattcctctag

SEQ ID NO: 111124 - DNA, 22 bp, Artificial Sequence
  Synthetic oligonucleotide; CTC chr11 5390961 5390982 5390978 5390983 +
tcctgaccatattcctctagaa

SEQ ID NO: 111125 - DNA, 22 bp, Artificial Sequence
  Synthetic oligonucleotide; CTC chr11 5390963 5390984 5390980 5390985 +
ctgaccatattcctctagaaga

SEQ ID NO: 111126 - DNA, 22 bp, Artificial Sequence
  Synthetic oligonucleotide; CTG chr11 5390966 5390987 5390983 5390988 +
accatattcctctagaagaaga

SEQ ID NO: 111127 - DNA, 22 bp, Artificial Sequence
  Synthetic oligonucleotide; TTC chr11 5390975 5390996 5390992 5390997 +
ctctagaagaagagactttgat

SEQ ID NO: 111128 - DNA, 22 bp, Artificial Sequence
  Synthetic oligonucleotide; CTC chr11 5390978 5390999 5390995 5391000 +
tagaagaagagactttgatcct

SEQ ID NO: 111129 - DNA, 22 bp, Artificial Sequence
  Synthetic oligonucleotide; CTA chr11 5390980 5391001 5390997 5391002 +
gaagaagagactttgatcctat

SEQ ID NO: 111130 - DNA, 22 bp, Artificial Sequence
  Synthetic oligonucleotide; CTT chr11 5390993 5391014 5391010 5391015 +
tgatcctatccttgactcctct

SEQ ID NO: 111131 - DNA, 22 bp, Artificial Sequence
  Synthetic oligonucleotide; TTT chr11 5390994 5391015 5391011 5391016 +
gatcctatccttgactcctctc

SEQ ID NO: 111132 - DNA, 22 bp, Artificial Sequence
  Synthetic oligonucleotide; TTG chr11 5390995 5391016 5391012 5391017 +
atcctatccttgactcctctca

SEQ ID NO: 111133 - DNA, 22 bp, Artificial Sequence
  Synthetic oligonucleotide; CTA chr11 5391001 5391022 5391018 5391023 +
tccttgactcctctcatctctg

SEQ ID NO: 111134 - DNA, 22 bp, Artificial Sequence
  Synthetic oligonucleotide; CTT chr11 5391006 5391027 5391023 5391028 +
gactcctctcatctctgatttt

SEQ ID NO: 111135 - DNA, 22 bp, Artificial Sequence
  Synthetic oligonucleotide; TTG chr11 5391007 5391028 5391024 5391029 +
actcctctcatctctgatttta

SEQ ID NO: 111136 - DNA, 22 bp, Artificial Sequence
  Synthetic oligonucleotide; CTC chr11 5391011 5391032 5391028 5391033 +
ctctcatctctgattttacctt

SEQ ID NO: 111137 - DNA, 22 bp, Artificial Sequence
  Synthetic oligonucleotide; CTC chr11 5391014 5391035 5391031 5391036 +
tcatctctgattttaccttaca

SEQ ID NO: 111138 - DNA, 22 bp, Artificial Sequence
  Synthetic oligonucleotide; CTC chr11 5391016 5391037 5391033 5391038 +
atctctgattttaccttacaac

SEQ ID NO: 111139 - DNA, 22 bp, Artificial Sequence
  Synthetic oligonucleotide; CTC chr11 5391021 5391042 5391038 5391043 +
tgattttaccttacaacctcaa

SEQ ID NO: 111140 - DNA, 22 bp, Artificial Sequence
  Synthetic oligonucleotide; CTG chr11 5391023 5391044 5391040 5391045 +
attttaccttacaacctcaagt

SEQ ID NO: 111141 - DNA, 22 bp, Artificial Sequence
  Synthetic oligonucleotide; TTT chr11 5391027 5391048 5391044 5391049 +
taccttacaacctcaagtctga

SEQ ID NO: 111142 - DNA, 22 bp, Artificial Sequence
  Synthetic oligonucleotide; TTT chr11 5391028 5391049 5391045 5391050 +
accttacaacctcaagtctgac

SEQ ID NO: 111143 - DNA, 22 bp, Artificial Sequence
  Synthetic oligonucleotide; TTA chr11 5391029 5391050 5391046 5391051 +
ccttacaacctcaagtctgaca

SEQ ID NO: 111144 - DNA, 22 bp, Artificial Sequence
  Synthetic oligonucleotide; CTT chr11 5391033 5391054 5391050 5391055 +
acaacctcaagtctgacattaa

SEQ ID NO: 111145 - DNA, 22 bp, Artificial Sequence
  Synthetic oligonucleotide; TTA chr11 5391034 5391055 5391051 5391056 +
caacctcaagtctgacattaag

SEQ ID NO: 111146 - DNA, 22 bp, Artificial Sequence
  Synthetic oligonucleotide; CTC chr11 5391041 5391062 5391058 5391063 +
aagtctgacattaagctacagt

SEQ ID NO: 111147 - DNA, 22 bp, Artificial Sequence
  Synthetic oligonucleotide; CTG chr11 5391048 5391069 5391065 5391070 +
acattaagctacagtcagtatt

SEQ ID NO: 111148 - DNA, 22 bp, Artificial Sequence
  Synthetic oligonucleotide; TTA chr11 5391054 5391075 5391071 5391076 +
agctacagtcagtatttacttg

SEQ ID NO: 111149 - DNA, 22 bp, Artificial Sequence
  Synthetic oligonucleotide; CTA chr11 5391059 5391080 5391076 5391081 +
cagtcagtatttacttgtaggt

SEQ ID NO: 111150 - DNA, 22 bp, Artificial Sequence
  Synthetic oligonucleotide; TTT chr11 5391071 5391092 5391088 5391093 +
acttgtaggtgttttagttgtg

SEQ ID NO: 111151 - DNA, 22 bp, Artificial Sequence
  Synthetic oligonucleotide; TTA chr11 5391072 5391093 5391089 5391094 +
cttgtaggtgttttagttgtgt

SEQ ID NO: 111152 - DNA, 22 bp, Artificial Sequence
  Synthetic oligonucleotide; CTT chr11 5391075 5391096 5391092 5391097 +
gtaggtgttttagttgtgtgat

SEQ ID NO: 111153 - DNA, 22 bp, Artificial Sequence
  Synthetic oligonucleotide; TTG chr11 5391076 5391097 5391093 5391098 +
taggtgttttagttgtgtgata

SEQ ID NO: 111154 - DNA, 22 bp, Artificial Sequence
  Synthetic oligonucleotide; TTT chr11 5391085 5391106 5391102 5391107 +
tagttgtgtgatattgaacaat

SEQ ID NO: 111155 - DNA, 22 bp, Artificial Sequence
  Synthetic oligonucleotide; TTT chr11 5391086 5391107 5391103 5391108 +
agttgtgtgatattgaacaatg

SEQ ID NO: 111156 - DNA, 22 bp, Artificial Sequence
  Synthetic oligonucleotide; TTA chr11 5391087 5391108 5391104 5391109 +
gttgtgtgatattgaacaatga

SEQ ID NO: 111157 - DNA, 22 bp, Artificial Sequence
  Synthetic oligonucleotide; TTG chr11 5391091 5391112 5391108 5391113 +
tgtgatattgaacaatgacatg

SEQ ID NO: 111158 - DNA, 22 bp, Artificial Sequence
  Synthetic oligonucleotide; TTG chr11 5391101 5391122 5391118 5391123 +
aacaatgacatgtaacgtgaga

SEQ ID NO: 111159 - DNA, 22 bp, Artificial Sequence
  Synthetic oligonucleotide; CTT chr11 5391129 5391150 5391146 5391151 +
cagccaaggaaactcacacaaa

SEQ ID NO: 111160 - DNA, 22 bp, Artificial Sequence
  Synthetic oligonucleotide; TTC chr11 5391130 5391151 5391147 5391152 +
agccaaggaaactcacacaaac

SEQ ID NO: 111161 - DNA, 22 bp, Artificial Sequence
  Synthetic oligonucleotide; CTC chr11 5391144 5391165 5391161 5391166 +
acacaaacatattgaagtcaca

SEQ ID NO: 111162 - DNA, 22 bp, Artificial Sequence
  Synthetic oligonucleotide; TTG chr11 5391158 5391179 5391175 5391180 +
aagtcacaatcccattgctcag

SEQ ID NO: 111163 - DNA, 22 bp, Artificial Sequence
  Synthetic oligonucleotide; TTG chr11 5391175 5391196 5391192 5391197 +
ctcaggaggaaataaactttac

SEQ ID NO: 111164 - DNA, 22 bp, Artificial Sequence
  Synthetic oligonucleotide; CTC chr11 5391178 5391199 5391195 5391200 +
aggaggaaataaactttacatt

SEQ ID NO: 111165 - DNA, 22 bp, Artificial Sequence
  Synthetic oligonucleotide; CTT chr11 5391194 5391215 5391211 5391216 +
tacattggctgatcagcctgtc

SEQ ID NO: 111166 - DNA, 22 bp, Artificial Sequence
  Synthetic oligonucleotide; TTT chr11 5391195 5391216 5391212 5391217 +
acattggctgatcagcctgtcc

SEQ ID NO: 111167 - DNA, 22 bp, Artificial Sequence
  Synthetic oligonucleotide; TTA chr11 5391196 5391217 5391213 5391218 +
cattggctgatcagcctgtccc

SEQ ID NO: 111168 - DNA, 22 bp, Artificial Sequence
  Synthetic oligonucleotide; TTG chr11 5391201 5391222 5391218 5391223 +
gctgatcagcctgtccctacga

SEQ ID NO: 111169 - DNA, 22 bp, Artificial Sequence
  Synthetic oligonucleotide; CTG chr11 5391205 5391226 5391222 5391227 +
atcagcctgtccctacgagtga

SEQ ID NO: 111170 - DNA, 22 bp, Artificial Sequence
  Synthetic oligonucleotide; CTG chr11 5391214 5391235 5391231 5391236 +
tccctacgagtgactaaatgca

SEQ ID NO: 111171 - DNA, 22 bp, Artificial Sequence
  Synthetic oligonucleotide; CTA chr11 5391220 5391241 5391237 5391242 +
cgagtgactaaatgcaatcctt

SEQ ID NO: 111172 - DNA, 22 bp, Artificial Sequence
  Synthetic oligonucleotide; CTA chr11 5391230 5391251 5391247 5391252 +
aatgcaatccttgcaggggtct

SEQ ID NO: 111173 - DNA, 22 bp, Artificial Sequence
  Synthetic oligonucleotide; CTT chr11 5391242 5391263 5391259 5391264 +
gcaggggtctcagctttgaaat

SEQ ID NO: 111174 - DNA, 22 bp, Artificial Sequence
  Synthetic oligonucleotide; TTG chr11 5391243 5391264 5391260 5391265 +
caggggtctcagctttgaaatt

SEQ ID NO: 111175 - DNA, 22 bp, Artificial Sequence
  Synthetic oligonucleotide; CTC chr11 5391253 5391274 5391270 5391275 +
agctttgaaattgcttcctcaa

SEQ ID NO: 111176 - DNA, 22 bp, Artificial Sequence
  Synthetic oligonucleotide; CTT chr11 5391258 5391279 5391275 5391280 +
tgaaattgcttcctcaaggaca

SEQ ID NO: 111177 - DNA, 22 bp, Artificial Sequence
  Synthetic oligonucleotide; TTT chr11 5391259 5391280 5391276 5391281 +
gaaattgcttcctcaaggacat

SEQ ID NO: 111178 - DNA, 22 bp, Artificial Sequence
  Synthetic oligonucleotide; TTG chr11 5391260 5391281 5391277 5391282 +
aaattgcttcctcaaggacatt

SEQ ID NO: 111179 - DNA, 22 bp, Artificial Sequence
  Synthetic oligonucleotide; TTG chr11 5391266 5391287 5391283 5391288 +
cttcctcaaggacattttcaca

SEQ ID NO: 111180 - DNA, 22 bp, Artificial Sequence
  Synthetic oligonucleotide; CTT chr11 5391269 5391290 5391286 5391291 +
cctcaaggacattttcacagat

SEQ ID NO: 111181 - DNA, 22 bp, Artificial Sequence
  Synthetic oligonucleotide; TTC chr11 5391270 5391291 5391287 5391292 +
ctcaaggacattttcacagata

SEQ ID NO: 111182 - DNA, 22 bp, Artificial Sequence
  Synthetic oligonucleotide; CTC chr11 5391273 5391294 5391290 5391295 +
aaggacattttcacagatagct

SEQ ID NO: 111183 - DNA, 22 bp, Artificial Sequence
  Synthetic oligonucleotide; TTT chr11 5391283 5391304 5391300 5391305 +
tcacagatagctcctccctttc

SEQ ID NO: 111184 - DNA, 22 bp, Artificial Sequence
  Synthetic oligonucleotide; TTT chr11 5391284 5391305 5391301 5391306 +
cacagatagctcctccctttcc

SEQ ID NO: 111185 - DNA, 22 bp, Artificial Sequence
  Synthetic oligonucleotide; TTC chr11 5391285 5391306 5391302 5391307 +
acagatagctcctccctttcca

SEQ ID NO: 111186 - DNA, 22 bp, Artificial Sequence
  Synthetic oligonucleotide; CTC chr11 5391296 5391317 5391313 5391318 +
ctccctttccaatggtaaagca

SEQ ID NO: 111187 - DNA, 22 bp, Artificial Sequence
  Synthetic oligonucleotide; CTC chr11 5391299 5391320 5391316 5391321 +
cctttccaatggtaaagcacca

SEQ ID NO: 111188 - DNA, 22 bp, Artificial Sequence
  Synthetic oligonucleotide; CTT chr11 5391303 5391324 5391320 5391325 +
tccaatggtaaagcaccaaatg

SEQ ID NO: 111189 - DNA, 22 bp, Artificial Sequence
  Synthetic oligonucleotide; TTT chr11 5391304 5391325 5391321 5391326 +
ccaatggtaaagcaccaaatgc

SEQ ID NO: 111190 - DNA, 22 bp, Artificial Sequence
  Synthetic oligonucleotide; TTC chr11 5391305 5391326 5391322 5391327 +
caatggtaaagcaccaaatgct

SEQ ID NO: 111191 - DNA, 22 bp, Artificial Sequence
  Synthetic oligonucleotide; CTC chr11 5391328 5391349 5391345 5391350 +
catcggtttccttccacagtgc

SEQ ID NO: 111192 - DNA, 22 bp, Artificial Sequence
  Synthetic oligonucleotide; TTT chr11 5391337 5391358 5391354 5391359 +
ccttccacagtgccctgcattt

SEQ ID NO: 111193 - DNA, 22 bp, Artificial Sequence
  Synthetic oligonucleotide; TTC chr11 5391338 5391359 5391355 5391360 +
cttccacagtgccctgcatttc

SEQ ID NO: 111194 - DNA, 22 bp, Artificial Sequence
  Synthetic oligonucleotide; CTT chr11 5391341 5391362 5391358 5391363 +
ccacagtgccctgcatttcccg

SEQ ID NO: 111195 - DNA, 22 bp, Artificial Sequence
  Synthetic oligonucleotide; TTC chr11 5391342 5391363 5391359 5391364 +
cacagtgccctgcatttcccgt

SEQ ID NO: 111196 - DNA, 22 bp, Artificial Sequence
  Synthetic oligonucleotide; CTG chr11 5391354 5391375 5391371 5391376 +
catttcccgttgtaacatttgt

SEQ ID NO: 111197 - DNA, 22 bp, Artificial Sequence
  Synthetic oligonucleotide; TTT chr11 5391359 5391380 5391376 5391381 +
cccgttgtaacatttgtcacac

SEQ ID NO: 111198 - DNA, 22 bp, Artificial Sequence
  Synthetic oligonucleotide; TTC chr11 5391360 5391381 5391377 5391382 +
ccgttgtaacatttgtcacaca

SEQ ID NO: 111199 - DNA, 22 bp, Artificial Sequence
  Synthetic oligonucleotide; TTG chr11 5391366 5391387 5391383 5391388 +
taacatttgtcacacagtaatg

SEQ ID NO: 111200 - DNA, 22 bp, Artificial Sequence
  Synthetic oligonucleotide; TTT chr11 5391374 5391395 5391391 5391396 +
gtcacacagtaatgtcctgttt

SEQ ID NO: 111201 - DNA, 22 bp, Artificial Sequence
  Synthetic oligonucleotide; TTG chr11 5391375 5391396 5391392 5391397 +
tcacacagtaatgtcctgttta

SEQ ID NO: 111202 - DNA, 22 bp, Artificial Sequence
  Synthetic oligonucleotide; CTG chr11 5391393 5391414 5391410 5391415 +
tttatgaaggtgtgtgcatgtg

SEQ ID NO: 111203 - DNA, 22 bp, Artificial Sequence
  Synthetic oligonucleotide; TTT chr11 5391396 5391417 5391413 5391418 +
atgaaggtgtgtgcatgtgtcc

SEQ ID NO: 111204 - DNA, 22 bp, Artificial Sequence
  Synthetic oligonucleotide; TTA chr11 5391397 5391418 5391414 5391419 +
tgaaggtgtgtgcatgtgtcca

SEQ ID NO: 111205 - DNA, 22 bp, Artificial Sequence
  Synthetic oligonucleotide; TTA chr11 5391422 5391443 5391439 5391444 +
gaatgactaaatcaagatccct

SEQ ID NO: 111206 - DNA, 22 bp, Artificial Sequence
  Synthetic oligonucleotide; CTA chr11 5391431 5391452 5391448 5391453 +
aatcaagatccctggaggaatt

SEQ ID NO: 111207 - DNA, 22 bp, Artificial Sequence
  Synthetic oligonucleotide; CTG chr11 5391445 5391466 5391462 5391467 +
gaggaattaggcatgtcttgct

SEQ ID NO: 111208 - DNA, 22 bp, Artificial Sequence
  Synthetic oligonucleotide; TTA chr11 5391454 5391475 5391471 5391476 +
ggcatgtcttgctcgccagtaa

SEQ ID NO: 111209 - DNA, 22 bp, Artificial Sequence
  Synthetic oligonucleotide; CTT chr11 5391464 5391485 5391481 5391486 +
gctcgccagtaaatgtatataa

SEQ ID NO: 111210 - DNA, 22 bp, Artificial Sequence
  Synthetic oligonucleotide; TTG chr11 5391465 5391486 5391482 5391487 +
ctcgccagtaaatgtatataaa

SEQ ID NO: 111211 - DNA, 22 bp, Artificial Sequence
  Synthetic oligonucleotide; CTC chr11 5391468 5391489 5391485 5391490 +
gccagtaaatgtatataaatac

SEQ ID NO: 111212 - DNA, 22 bp, Artificial Sequence
  Synthetic oligonucleotide; CTA chr11 5391498 5391519 5391515 5391520 +
gcacatgccatatactcaataa

SEQ ID NO: 111213 - DNA, 22 bp, Artificial Sequence
  Synthetic oligonucleotide; CTC chr11 5391515 5391536 5391532 5391537 +
aataaatattaaatgtatgcgt

SEQ ID NO: 111214 - DNA, 22 bp, Artificial Sequence
  Synthetic oligonucleotide; TTA chr11 5391526 5391547 5391543 5391548 +
aatgtatgcgtggacatataga

SEQ ID NO: 111215 - DNA, 22 bp, Artificial Sequence
  Synthetic oligonucleotide; CTA chr11 5391572 5391593 5391589 5391594 +
acagaagttctcttcttgtctc

SEQ ID NO: 111216 - DNA, 22 bp, Artificial Sequence
  Synthetic oligonucleotide; TTC chr11 5391582 5391603 5391599 5391604 +
tcttcttgtctcgaggaactcc

SEQ ID NO: 111217 - DNA, 22 bp, Artificial Sequence
  Synthetic oligonucleotide; CTC chr11 5391584 5391605 5391601 5391606 +
ttcttgtctcgaggaactcctc

SEQ ID NO: 111218 - DNA, 22 bp, Artificial Sequence
  Synthetic oligonucleotide; CTT chr11 5391586 5391607 5391603 5391608 +
cttgtctcgaggaactcctcct

SEQ ID NO: 111219 - DNA, 22 bp, Artificial Sequence
  Synthetic oligonucleotide; TTC chr11 5391587 5391608 5391604 5391609 +
ttgtctcgaggaactcctcctc

SEQ ID NO: 111220 - DNA, 22 bp, Artificial Sequence
  Synthetic oligonucleotide; CTT chr11 5391589 5391610 5391606 5391611 +
gtctcgaggaactcctcctctt

SEQ ID NO: 111221 - DNA, 22 bp, Artificial Sequence
  Synthetic oligonucleotide; TTG chr11 5391590 5391611 5391607 5391612 +
tctcgaggaactcctcctcttc

SEQ ID NO: 111222 - DNA, 22 bp, Artificial Sequence
  Synthetic oligonucleotide; CTC chr11 5391594 5391615 5391611 5391616 +
gaggaactcctcctcttcacat

SEQ ID NO: 111223 - DNA, 22 bp, Artificial Sequence
  Synthetic oligonucleotide; CTC chr11 5391603 5391624 5391620 5391625 +
ctcctcttcacattcagaagcc

SEQ ID NO: 111224 - DNA, 22 bp, Artificial Sequence
  Synthetic oligonucleotide; CTC chr11 5391606 5391627 5391623 5391628 +
ctcttcacattcagaagcccaa

SEQ ID NO: 111225 - DNA, 22 bp, Artificial Sequence
  Synthetic oligonucleotide; CTC chr11 5391609 5391630 5391626 5391631 +
ttcacattcagaagcccaagaa

SEQ ID NO: 111226 - DNA, 22 bp, Artificial Sequence
  Synthetic oligonucleotide; CTT chr11 5391611 5391632 5391628 5391633 +
cacattcagaagcccaagaaga

SEQ ID NO: 111227 - DNA, 22 bp, Artificial Sequence
  Synthetic oligonucleotide; TTC chr11 5391612 5391633 5391629 5391634 +
acattcagaagcccaagaagac

SEQ ID NO: 111228 - DNA, 22 bp, Artificial Sequence
  Synthetic oligonucleotide; TTC chr11 5391618 5391639 5391635 5391640 +
agaagcccaagaagacaccttt

SEQ ID NO: 111229 - DNA, 22 bp, Artificial Sequence
  Synthetic oligonucleotide; CTT chr11 5391639 5391660 5391656 5391661 +
tctgctggcatccatcaaggtg

SEQ ID NO: 111230 - DNA, 22 bp, Artificial Sequence
  Synthetic oligonucleotide; TTT chr11 5391640 5391661 5391657 5391662 +
ctgctggcatccatcaaggtgg

SEQ ID NO: 111231 - DNA, 22 bp, Artificial Sequence
  Synthetic oligonucleotide; TTC chr11 5391641 5391662 5391658 5391663 +
tgctggcatccatcaaggtggt

SEQ ID NO: 111232 - DNA, 22 bp, Artificial Sequence
  Synthetic oligonucleotide; CTG chr11 5391643 5391664 5391660 5391665 +
ctggcatccatcaaggtggtat

SEQ ID NO: 111233 - DNA, 22 bp, Artificial Sequence
  Synthetic oligonucleotide; CTG chr11 5391646 5391667 5391663 5391668 +
gcatccatcaaggtggtatatc

SEQ ID NO: 111234 - DNA, 22 bp, Artificial Sequence
  Synthetic oligonucleotide; CTT chr11 5391670 5391691 5391687 5391692 +
cattgtcccagttctactttac

SEQ ID NO: 111235 - DNA, 22 bp, Artificial Sequence
  Synthetic oligonucleotide; TTC chr11 5391671 5391692 5391688 5391693 +
attgtcccagttctactttact

SEQ ID NO: 111236 - DNA, 22 bp, Artificial Sequence
  Synthetic oligonucleotide; TTG chr11 5391675 5391696 5391692 5391697 +
tcccagttctactttactcagg

SEQ ID NO: 111237 - DNA, 22 bp, Artificial Sequence
  Synthetic oligonucleotide; TTC chr11 5391684 5391705 5391701 5391706 +
tactttactcaggccctctgga

SEQ ID NO: 111238 - DNA, 22 bp, Artificial Sequence
  Synthetic oligonucleotide; CTA chr11 5391686 5391707 5391703 5391708 +
ctttactcaggccctctggatc

SEQ ID NO: 111239 - DNA, 22 bp, Artificial Sequence
  Synthetic oligonucleotide; CTT chr11 5391689 5391710 5391706 5391711 +
tactcaggccctctggatcctc

SEQ ID NO: 111240 - DNA, 22 bp, Artificial Sequence
  Synthetic oligonucleotide; TTT chr11 5391690 5391711 5391707 5391712 +
actcaggccctctggatcctcc

SEQ ID NO: 111241 - DNA, 22 bp, Artificial Sequence
  Synthetic oligonucleotide; TTA chr11 5391691 5391712 5391708 5391713 +
ctcaggccctctggatcctccc

SEQ ID NO: 111242 - DNA, 22 bp, Artificial Sequence
  Synthetic oligonucleotide; CTC chr11 5391694 5391715 5391711 5391716 +
aggccctctggatcctcccacc

SEQ ID NO: 111243 - DNA, 22 bp, Artificial Sequence
  Synthetic oligonucleotide; CTC chr11 5391702 5391723 5391719 5391724 +
tggatcctcccacccattctcc

SEQ ID NO: 111244 - DNA, 22 bp, Artificial Sequence
  Synthetic oligonucleotide; CTG chr11 5391704 5391725 5391721 5391726 +
gatcctcccacccattctccta

SEQ ID NO: 111245 - DNA, 22 bp, Artificial Sequence
  Synthetic oligonucleotide; CTC chr11 5391711 5391732 5391728 5391733 +
ccacccattctcctacaggtta

SEQ ID NO: 111246 - DNA, 22 bp, Artificial Sequence
  Synthetic oligonucleotide; TTC chr11 5391721 5391742 5391738 5391743 +
tcctacaggttaaaattaccat

SEQ ID NO: 111247 - DNA, 22 bp, Artificial Sequence
  Synthetic oligonucleotide; CTC chr11 5391723 5391744 5391740 5391745 +
ctacaggttaaaattaccatga

SEQ ID NO: 111248 - DNA, 22 bp, Artificial Sequence
  Synthetic oligonucleotide; CTA chr11 5391726 5391747 5391743 5391748 +
caggttaaaattaccatgaggc

SEQ ID NO: 111249 - DNA, 22 bp, Artificial Sequence
  Synthetic oligonucleotide; TTA chr11 5391733 5391754 5391750 5391755 +
aaattaccatgaggccaggcac

SEQ ID NO: 111250 - DNA, 22 bp, Artificial Sequence
  Synthetic oligonucleotide; TTA chr11 5391739 5391760 5391756 5391761 +
ccatgaggccaggcacggtggc

SEQ ID NO: 111251 - DNA, 22 bp, Artificial Sequence
  Synthetic oligonucleotide; CTT chr11 5391763 5391784 5391780 5391785 +
atgctataatcccagcactttg

SEQ ID NO: 111252 - DNA, 22 bp, Artificial Sequence
  Synthetic oligonucleotide; TTA chr11 5391764 5391785 5391781 5391786 +
tgctataatcccagcactttgg

SEQ ID NO: 111253 - DNA, 22 bp, Artificial Sequence
  Synthetic oligonucleotide; CTA chr11 5391769 5391790 5391786 5391791 +
taatcccagcactttgggagac

SEQ ID NO: 111254 - DNA, 22 bp, Artificial Sequence
  Synthetic oligonucleotide; CTT chr11 5391783 5391804 5391800 5391805 +
tgggagaccaaggtgggaggat

SEQ ID NO: 111255 - DNA, 22 bp, Artificial Sequence
  Synthetic oligonucleotide; TTT chr11 5391784 5391805 5391801 5391806 +
gggagaccaaggtgggaggatt

SEQ ID NO: 111256 - DNA, 22 bp, Artificial Sequence
  Synthetic oligonucleotide; TTG chr11 5391785 5391806 5391802 5391807 +
ggagaccaaggtgggaggattg

SEQ ID NO: 111257 - DNA, 22 bp, Artificial Sequence
  Synthetic oligonucleotide; TTG chr11 5391807 5391828 5391824 5391829 +
ctgaaggccaggagtttgagac

SEQ ID NO: 111258 - DNA, 22 bp, Artificial Sequence
  Synthetic oligonucleotide; CTG chr11 5391810 5391831 5391827 5391832 +
aaggccaggagtttgagaccaa

SEQ ID NO: 111259 - DNA, 22 bp, Artificial Sequence
  Synthetic oligonucleotide; TTT chr11 5391824 5391845 5391841 5391846 +
gagaccaacttcaggcaagaag

SEQ ID NO: 111260 - DNA, 22 bp, Artificial Sequence
  Synthetic oligonucleotide; TTG chr11 5391825 5391846 5391842 5391847 +
agaccaacttcaggcaagaaga

SEQ ID NO: 111261 - DNA, 22 bp, Artificial Sequence
  Synthetic oligonucleotide; CTT chr11 5391835 5391856 5391852 5391857 +
caggcaagaagattacttgagt

SEQ ID NO: 111262 - DNA, 22 bp, Artificial Sequence
  Synthetic oligonucleotide; TTC chr11 5391836 5391857 5391853 5391858 +
aggcaagaagattacttgagtc

SEQ ID NO: 111263 - DNA, 22 bp, Artificial Sequence
  Synthetic oligonucleotide; TTA chr11 5391850 5391871 5391867 5391872 +
cttgagtccaggagtttgagac

SEQ ID NO: 111264 - DNA, 22 bp, Artificial Sequence
  Synthetic oligonucleotide; CTT chr11 5391853 5391874 5391870 5391875 +
gagtccaggagtttgagaccag

SEQ ID NO: 111265 - DNA, 22 bp, Artificial Sequence
  Synthetic oligonucleotide; TTG chr11 5391854 5391875 5391871 5391876 +
agtccaggagtttgagaccagc

SEQ ID NO: 111266 - DNA, 22 bp, Artificial Sequence
  Synthetic oligonucleotide; TTT chr11 5391867 5391888 5391884 5391889 +
gagaccagcctgaacaatacag

SEQ ID NO: 111267 - DNA, 22 bp, Artificial Sequence
  Synthetic oligonucleotide; TTG chr11 5391868 5391889 5391885 5391890 +
agaccagcctgaacaatacagc

SEQ ID NO: 111268 - DNA, 22 bp, Artificial Sequence
  Synthetic oligonucleotide; CTG chr11 5391879 5391900 5391896 5391901 +
aacaatacagcaagaccctatc

SEQ ID NO: 111269 - DNA, 22 bp, Artificial Sequence
  Synthetic oligonucleotide; CTA chr11 5391899 5391920 5391916 5391921 +
tctctacaaaaaaaattaaaat

SEQ ID NO: 111270 - DNA, 22 bp, Artificial Sequence
  Synthetic oligonucleotide; CTC chr11 5391903 5391924 5391920 5391925 +
tacaaaaaaaattaaaattagc

SEQ ID NO: 111271 - DNA, 22 bp, Artificial Sequence
  Synthetic oligonucleotide; CTA chr11 5391905 5391926 5391922 5391927 +
caaaaaaaattaaaattagcca

SEQ ID NO: 111272 - DNA, 22 bp, Artificial Sequence
  Synthetic oligonucleotide; TTA chr11 5391917 5391938 5391934 5391939 +
aaattagccatgtgtggcggtg

SEQ ID NO: 111273 - DNA, 22 bp, Artificial Sequence
  Synthetic oligonucleotide; TTA chr11 5391923 5391944 5391940 5391945 +
gccatgtgtggcggtgcacgtc

SEQ ID NO: 111274 - DNA, 22 bp, Artificial Sequence
  Synthetic oligonucleotide; CTG chr11 5391947 5391968 5391964 5391969 +
tagtctcagctacctgggaggc

SEQ ID NO: 111275 - DNA, 22 bp, Artificial Sequence
  Synthetic oligonucleotide; CTC chr11 5391954 5391975 5391971 5391976 +
agctacctgggaggctgaggtg

SEQ ID NO: 111276 - DNA, 22 bp, Artificial Sequence
  Synthetic oligonucleotide; CTA chr11 5391959 5391980 5391976 5391981 +
cctgggaggctgaggtgggaag

SEQ ID NO: 111277 - DNA, 22 bp, Artificial Sequence
  Synthetic oligonucleotide; CTG chr11 5391963 5391984 5391980 5391985 +
ggaggctgaggtgggaagaatg

SEQ ID NO: 111278 - DNA, 22 bp, Artificial Sequence
  Synthetic oligonucleotide; CTG chr11 5391971 5391992 5391988 5391993 +
aggtgggaagaatgcttgagcc

SEQ ID NO: 111279 - DNA, 22 bp, Artificial Sequence
  Synthetic oligonucleotide; CTT chr11 5391988 5392009 5392005 5392010 +
gagcccaggaggttgaggctgc

SEQ ID NO: 111280 - DNA, 22 bp, Artificial Sequence
  Synthetic oligonucleotide; TTG chr11 5391989 5392010 5392006 5392011 +
agcccaggaggttgaggctgca

SEQ ID NO: 111281 - DNA, 22 bp, Artificial Sequence
  Synthetic oligonucleotide; TTG chr11 5392003 5392024 5392020 5392025 +
aggctgcagtgagccataatca

SEQ ID NO: 111282 - DNA, 22 bp, Artificial Sequence
  Synthetic oligonucleotide; CTG chr11 5392009 5392030 5392026 5392031 +
cagtgagccataatcacactac

SEQ ID NO: 111283 - DNA, 22 bp, Artificial Sequence
  Synthetic oligonucleotide; CTA chr11 5392030 5392051 5392047 5392052 +
ctgcctgggtgaccaagtgaga

SEQ ID NO: 111284 - DNA, 22 bp, Artificial Sequence
  Synthetic oligonucleotide; CTG chr11 5392033 5392054 5392050 5392055 +
cctgggtgaccaagtgagaccc

SEQ ID NO: 111285 - DNA, 22 bp, Artificial Sequence
  Synthetic oligonucleotide; CTG chr11 5392037 5392058 5392054 5392059 +
ggtgaccaagtgagaccccgat

SEQ ID NO: 111286 - DNA, 22 bp, Artificial Sequence
  Synthetic oligonucleotide; TTC chr11 5392061 5392082 5392078 5392083 +
aaaaataaaaaggaaaacaaac

SEQ ID NO: 111287 - DNA, 22 bp, Artificial Sequence
  Synthetic oligonucleotide; TTA chr11 5392090 5392111 5392107 5392112 +
caaagcgaaatttaaaaaagaa

SEQ ID NO: 111288 - DNA, 22 bp, Artificial Sequence
  Synthetic oligonucleotide; TTT chr11 5392103 5392124 5392120 5392125 +
aaaaaagaaccaaactctaaaa

SEQ ID NO: 111289 - DNA, 22 bp, Artificial Sequence
  Synthetic oligonucleotide; TTA chr11 5392104 5392125 5392121 5392126 +
aaaaagaaccaaactctaaaaa

SEQ ID NO: 111290 - DNA, 22 bp, Artificial Sequence
  Synthetic oligonucleotide; CTC chr11 5392120 5392141 5392137 5392142 +
taaaaatatgtatgtatgtttg

SEQ ID NO: 111291 - DNA, 22 bp, Artificial Sequence
  Synthetic oligonucleotide; CTA chr11 5392122 5392143 5392139 5392144 +
aaaatatgtatgtatgtttgtg

SEQ ID NO: 111292 - DNA, 22 bp, Artificial Sequence
  Synthetic oligonucleotide; TTT chr11 5392141 5392162 5392158 5392163 +
gtgcggtttcttgtgtatgttt

SEQ ID NO: 111293 - DNA, 22 bp, Artificial Sequence
  Synthetic oligonucleotide; TTG chr11 5392142 5392163 5392159 5392164 +
tgcggtttcttgtgtatgtttg

SEQ ID NO: 111294 - DNA, 22 bp, Artificial Sequence
  Synthetic oligonucleotide; TTT chr11 5392150 5392171 5392167 5392172 +
cttgtgtatgtttgtgtggtat

SEQ ID NO: 111295 - DNA, 22 bp, Artificial Sequence
  Synthetic oligonucleotide; TTC chr11 5392151 5392172 5392168 5392173 +
ttgtgtatgtttgtgtggtatc

SEQ ID NO: 111296 - DNA, 22 bp, Artificial Sequence
  Synthetic oligonucleotide; CTT chr11 5392153 5392174 5392170 5392175 +
gtgtatgtttgtgtggtatctc

SEQ ID NO: 111297 - DNA, 22 bp, Artificial Sequence
  Synthetic oligonucleotide; TTG chr11 5392154 5392175 5392171 5392176 +
tgtatgtttgtgtggtatctca

SEQ ID NO: 111298 - DNA, 22 bp, Artificial Sequence
  Synthetic oligonucleotide; TTT chr11 5392163 5392184 5392180 5392185 +
gtgtggtatctcatgtttgtat

SEQ ID NO: 111299 - DNA, 22 bp, Artificial Sequence
  Synthetic oligonucleotide; TTG chr11 5392164 5392185 5392181 5392186 +
tgtggtatctcatgtttgtatg

SEQ ID NO: 111300 - DNA, 22 bp, Artificial Sequence
  Synthetic oligonucleotide; CTC chr11 5392175 5392196 5392192 5392197 +
atgtttgtatgtgtgggtgtta

SEQ ID NO: 111301 - DNA, 22 bp, Artificial Sequence
  Synthetic oligonucleotide; TTT chr11 5392181 5392202 5392198 5392203 +
gtatgtgtgggtgttatcagac

SEQ ID NO: 111302 - DNA, 22 bp, Artificial Sequence
  Synthetic oligonucleotide; TTG chr11 5392182 5392203 5392199 5392204 +
tatgtgtgggtgttatcagact

SEQ ID NO: 111303 - DNA, 22 bp, Artificial Sequence
  Synthetic oligonucleotide; TTA chr11 5392197 5392218 5392214 5392219 +
tcagactctcaggcttgggagc

SEQ ID NO: 111304 - DNA, 22 bp, Artificial Sequence
  Synthetic oligonucleotide; CTC chr11 5392205 5392226 5392222 5392227 +
tcaggcttgggagcccctctgg

SEQ ID NO: 111305 - DNA, 22 bp, Artificial Sequence
  Synthetic oligonucleotide; CTC chr11 5392207 5392228 5392224 5392229 +
aggcttgggagcccctctggaa

SEQ ID NO: 111306 - DNA, 22 bp, Artificial Sequence
  Synthetic oligonucleotide; CTT chr11 5392213 5392234 5392230 5392235 +
gggagcccctctggaacccagc

SEQ ID NO: 111307 - DNA, 22 bp, Artificial Sequence
  Synthetic oligonucleotide; TTG chr11 5392214 5392235 5392231 5392236 +
ggagcccctctggaacccagca

SEQ ID NO: 111308 - DNA, 22 bp, Artificial Sequence
  Synthetic oligonucleotide; CTC chr11 5392224 5392245 5392241 5392246 +
tggaacccagcagtttctgcag

SEQ ID NO: 111309 - DNA, 22 bp, Artificial Sequence
  Synthetic oligonucleotide; CTG chr11 5392226 5392247 5392243 5392248 +
gaacccagcagtttctgcagcc

SEQ ID NO: 111310 - DNA, 22 bp, Artificial Sequence
  Synthetic oligonucleotide; TTT chr11 5392240 5392261 5392257 5392262 +
ctgcagccttacaggctggcac

SEQ ID NO: 111311 - DNA, 22 bp, Artificial Sequence
  Synthetic oligonucleotide; TTC chr11 5392241 5392262 5392258 5392263 +
tgcagccttacaggctggcact

SEQ ID NO: 111312 - DNA, 22 bp, Artificial Sequence
  Synthetic oligonucleotide; CTG chr11 5392243 5392264 5392260 5392265 +
cagccttacaggctggcactcc

SEQ ID NO: 111313 - DNA, 22 bp, Artificial Sequence
  Synthetic oligonucleotide; CTT chr11 5392250 5392271 5392267 5392272 +
acaggctggcactccttaaaca

SEQ ID NO: 111314 - DNA, 22 bp, Artificial Sequence
  Synthetic oligonucleotide; TTA chr11 5392251 5392272 5392268 5392273 +
caggctggcactccttaaacat

SEQ ID NO: 111315 - DNA, 22 bp, Artificial Sequence
  Synthetic oligonucleotide; CTG chr11 5392258 5392279 5392275 5392280 +
gcactccttaaacataggttcc

SEQ ID NO: 111316 - DNA, 22 bp, Artificial Sequence
  Synthetic oligonucleotide; CTC chr11 5392264 5392285 5392281 5392286 +
cttaaacataggttccattcta

SEQ ID NO: 111317 - DNA, 22 bp, Artificial Sequence
  Synthetic oligonucleotide; CTT chr11 5392267 5392288 5392284 5392289 +
aaacataggttccattctaaac

SEQ ID NO: 111318 - DNA, 22 bp, Artificial Sequence
  Synthetic oligonucleotide; TTA chr11 5392268 5392289 5392285 5392290 +
aacataggttccattctaaact

SEQ ID NO: 111319 - DNA, 22 bp, Artificial Sequence
  Synthetic oligonucleotide; TTC chr11 5392279 5392300 5392296 5392301 +
cattctaaactttaatttacat

SEQ ID NO: 111320 - DNA, 22 bp, Artificial Sequence
  Synthetic oligonucleotide; TTC chr11 5392284 5392305 5392301 5392306 +
taaactttaatttacatccaca

SEQ ID NO: 111321 - DNA, 22 bp, Artificial Sequence
  Synthetic oligonucleotide; CTA chr11 5392286 5392307 5392303 5392308 +
aactttaatttacatccacata

SEQ ID NO: 111322 - DNA, 22 bp, Artificial Sequence
  Synthetic oligonucleotide; CTT chr11 5392291 5392312 5392308 5392313 +
taatttacatccacatagtagg

SEQ ID NO: 111323 - DNA, 22 bp, Artificial Sequence
  Synthetic oligonucleotide; TTT chr11 5392292 5392313 5392309 5392314 +
aatttacatccacatagtaggc

SEQ ID NO: 111324 - DNA, 22 bp, Artificial Sequence
  Synthetic oligonucleotide; TTA chr11 5392293 5392314 5392310 5392315 +
atttacatccacatagtaggcc

SEQ ID NO: 111325 - DNA, 22 bp, Artificial Sequence
  Synthetic oligonucleotide; TTT chr11 5392297 5392318 5392314 5392319 +
acatccacatagtaggccacat

SEQ ID NO: 111326 - DNA, 22 bp, Artificial Sequence
  Synthetic oligonucleotide; TTA chr11 5392298 5392319 5392315 5392320 +
catccacatagtaggccacatt

SEQ ID NO: 111327 - DNA, 22 bp, Artificial Sequence
  Synthetic oligonucleotide; TTA chr11 5392321 5392342 5392338 5392343 +
ctcaatagcagttccgagactt

SEQ ID NO: 111328 - DNA, 22 bp, Artificial Sequence
  Synthetic oligonucleotide; CTC chr11 5392324 5392345 5392341 5392346 +
aatagcagttccgagacttaga

SEQ ID NO: 111329 - DNA, 22 bp, Artificial Sequence
  Synthetic oligonucleotide; TTC chr11 5392335 5392356 5392352 5392357 +
cgagacttagaatattcttctc

SEQ ID NO: 111330 - DNA, 22 bp, Artificial Sequence
  Synthetic oligonucleotide; CTT chr11 5392343 5392364 5392360 5392365 +
agaatattcttctccatgttga

SEQ ID NO: 111331 - DNA, 22 bp, Artificial Sequence
  Synthetic oligonucleotide; TTA chr11 5392344 5392365 5392361 5392366 +
gaatattcttctccatgttgag

SEQ ID NO: 111332 - DNA, 22 bp, Artificial Sequence
  Synthetic oligonucleotide; TTC chr11 5392352 5392373 5392369 5392374 +
ttctccatgttgagaggaaatt

SEQ ID NO: 111333 - DNA, 22 bp, Artificial Sequence
  Synthetic oligonucleotide; CTT chr11 5392354 5392375 5392371 5392376 +
ctccatgttgagaggaaattcc

SEQ ID NO: 111334 - DNA, 22 bp, Artificial Sequence
  Synthetic oligonucleotide; TTC chr11 5392355 5392376 5392372 5392377 +
tccatgttgagaggaaattcct

SEQ ID NO: 111335 - DNA, 22 bp, Artificial Sequence
  Synthetic oligonucleotide; CTC chr11 5392357 5392378 5392374 5392379 +
catgttgagaggaaattcctat

SEQ ID NO: 111336 - DNA, 22 bp, Artificial Sequence
  Synthetic oligonucleotide; TTG chr11 5392364 5392385 5392381 5392386 +
agaggaaattcctattctatag

SEQ ID NO: 111337 - DNA, 22 bp, Artificial Sequence
  Synthetic oligonucleotide; TTC chr11 5392375 5392396 5392392 5392397 +
ctattctatagatctcatttgg

SEQ ID NO: 111338 - DNA, 22 bp, Artificial Sequence
  Synthetic oligonucleotide; CTA chr11 5392378 5392399 5392395 5392400 +
ttctatagatctcatttggtag

SEQ ID NO: 111339 - DNA, 22 bp, Artificial Sequence
  Synthetic oligonucleotide; TTC chr11 5392381 5392402 5392398 5392403 +
tatagatctcatttggtagaat

SEQ ID NO: 111340 - DNA, 22 bp, Artificial Sequence
  Synthetic oligonucleotide; CTA chr11 5392383 5392404 5392400 5392405 +
tagatctcatttggtagaatgg

SEQ ID NO: 111341 - DNA, 22 bp, Artificial Sequence
  Synthetic oligonucleotide; CTC chr11 5392391 5392412 5392408 5392413 +
atttggtagaatggggtacaaa

SEQ ID NO: 111342 - DNA, 22 bp, Artificial Sequence
  Synthetic oligonucleotide; TTT chr11 5392395 5392416 5392412 5392417 +
ggtagaatggggtacaaaaaat

SEQ ID NO: 111343 - DNA, 22 bp, Artificial Sequence
  Synthetic oligonucleotide; TTG chr11 5392396 5392417 5392413 5392418 +
gtagaatggggtacaaaaaatt

SEQ ID NO: 111344 - DNA, 22 bp, Artificial Sequence
  Synthetic oligonucleotide; TTT chr11 5392419 5392440 5392436 5392441 +
aggatttggatttagattagca

SEQ ID NO: 111345 - DNA, 22 bp, Artificial Sequence
  Synthetic oligonucleotide; TTA chr11 5392420 5392441 5392437 5392442 +
ggatttggatttagattagcac

SEQ ID NO: 111346 - DNA, 22 bp, Artificial Sequence
  Synthetic oligonucleotide; TTT chr11 5392426 5392447 5392443 5392448 +
ggatttagattagcactgaagt

SEQ ID NO: 111347 - DNA, 22 bp, Artificial Sequence
  Synthetic oligonucleotide; TTG chr11 5392427 5392448 5392444 5392449 +
gatttagattagcactgaagtc

SEQ ID NO: 111348 - DNA, 22 bp, Artificial Sequence
  Synthetic oligonucleotide; TTT chr11 5392432 5392453 5392449 5392454 +
agattagcactgaagtcccatt

SEQ ID NO: 111349 - DNA, 22 bp, Artificial Sequence
  Synthetic oligonucleotide; TTA chr11 5392433 5392454 5392450 5392455 +
gattagcactgaagtcccattt

SEQ ID NO: 111350 - DNA, 22 bp, Artificial Sequence
  Synthetic oligonucleotide; TTA chr11 5392438 5392459 5392455 5392460 +
gcactgaagtcccattttgcct

SEQ ID NO: 111351 - DNA, 22 bp, Artificial Sequence
  Synthetic oligonucleotide; CTG chr11 5392444 5392465 5392461 5392466 +
aagtcccattttgcctcttatt

SEQ ID NO: 111352 - DNA, 22 bp, Artificial Sequence
  Synthetic oligonucleotide; TTT chr11 5392455 5392476 5392472 5392477 +
tgcctcttattaacaaatagac

SEQ ID NO: 111353 - DNA, 22 bp, Artificial Sequence
  Synthetic oligonucleotide; TTT chr11 5392456 5392477 5392473 5392478 +
gcctcttattaacaaatagacc

SEQ ID NO: 111354 - DNA, 22 bp, Artificial Sequence
  Synthetic oligonucleotide; TTG chr11 5392457 5392478 5392474 5392479 +
cctcttattaacaaatagacca

SEQ ID NO: 111355 - DNA, 22 bp, Artificial Sequence
  Synthetic oligonucleotide; CTC chr11 5392461 5392482 5392478 5392483 +
ttattaacaaatagaccactga

SEQ ID NO: 111356 - DNA, 22 bp, Artificial Sequence
  Synthetic oligonucleotide; CTT chr11 5392463 5392484 5392480 5392485 +
attaacaaatagaccactgaca

SEQ ID NO: 111357 - DNA, 22 bp, Artificial Sequence
  Synthetic oligonucleotide; TTA chr11 5392464 5392485 5392481 5392486 +
ttaacaaatagaccactgacat

SEQ ID NO: 111358 - DNA, 22 bp, Artificial Sequence
  Synthetic oligonucleotide; TTA chr11 5392467 5392488 5392484 5392489 +
acaaatagaccactgacatcta

SEQ ID NO: 111359 - DNA, 22 bp, Artificial Sequence
  Synthetic oligonucleotide; CTG chr11 5392482 5392503 5392499 5392504 +
acatctaaatttcattttcaaa

SEQ ID NO: 111360 - DNA, 22 bp, Artificial Sequence
  Synthetic oligonucleotide; CTA chr11 5392489 5392510 5392506 5392511 +
aatttcattttcaaattaggaa

SEQ ID NO: 111361 - DNA, 22 bp, Artificial Sequence
  Synthetic oligonucleotide; TTT chr11 5392494 5392515 5392511 5392516 +
cattttcaaattaggaaatacg

SEQ ID NO: 111362 - DNA, 22 bp, Artificial Sequence
  Synthetic oligonucleotide; TTC chr11 5392495 5392516 5392512 5392517 +
attttcaaattaggaaatacgt

SEQ ID NO: 111363 - DNA, 22 bp, Artificial Sequence
  Synthetic oligonucleotide; TTT chr11 5392499 5392520 5392516 5392521 +
tcaaattaggaaatacgtacag

SEQ ID NO: 111364 - DNA, 22 bp, Artificial Sequence
  Synthetic oligonucleotide; TTT chr11 5392500 5392521 5392517 5392522 +
caaattaggaaatacgtacagg

SEQ ID NO: 111365 - DNA, 22 bp, Artificial Sequence
  Synthetic oligonucleotide; TTC chr11 5392501 5392522 5392518 5392523 +
aaattaggaaatacgtacaggt

SEQ ID NO: 111366 - DNA, 22 bp, Artificial Sequence
  Synthetic oligonucleotide; TTA chr11 5392507 5392528 5392524 5392529 +
ggaaatacgtacaggtaataac

SEQ ID NO: 111367 - DNA, 22 bp, Artificial Sequence
  Synthetic oligonucleotide; TTT chr11 5392535 5392556 5392552 5392557 +
gaaaacttctaccttactcaaa

SEQ ID NO: 111368 - DNA, 22 bp, Artificial Sequence
  Synthetic oligonucleotide; TTG chr11 5392536 5392557 5392553 5392558 +
aaaacttctaccttactcaaat

SEQ ID NO: 111369 - DNA, 22 bp, Artificial Sequence
  Synthetic oligonucleotide; CTT chr11 5392543 5392564 5392560 5392565 +
ctaccttactcaaatttaaaat

SEQ ID NO: 111370 - DNA, 22 bp, Artificial Sequence
  Synthetic oligonucleotide; TTC chr11 5392544 5392565 5392561 5392566 +
taccttactcaaatttaaaatg

SEQ ID NO: 111371 - DNA, 22 bp, Artificial Sequence
  Synthetic oligonucleotide; CTA chr11 5392546 5392567 5392563 5392568 +
ccttactcaaatttaaaatgca

SEQ ID NO: 111372 - DNA, 22 bp, Artificial Sequence
  Synthetic oligonucleotide; CTT chr11 5392550 5392571 5392567 5392572 +
actcaaatttaaaatgcaaatt

SEQ ID NO: 111373 - DNA, 22 bp, Artificial Sequence
  Synthetic oligonucleotide; TTA chr11 5392551 5392572 5392568 5392573 +
ctcaaatttaaaatgcaaatta

SEQ ID NO: 111374 - DNA, 22 bp, Artificial Sequence
  Synthetic oligonucleotide; CTC chr11 5392554 5392575 5392571 5392576 +
aaatttaaaatgcaaattaaca

SEQ ID NO: 111375 - DNA, 22 bp, Artificial Sequence
  Synthetic oligonucleotide; TTT chr11 5392560 5392581 5392577 5392582 +
aaaatgcaaattaacatatctt

SEQ ID NO: 111376 - DNA, 22 bp, Artificial Sequence
  Synthetic oligonucleotide; TTA chr11 5392561 5392582 5392578 5392583 +
aaatgcaaattaacatatctta

SEQ ID NO: 111377 - DNA, 22 bp, Artificial Sequence
  Synthetic oligonucleotide; TTA chr11 5392573 5392594 5392590 5392595 +
acatatcttaatttgttactaa

SEQ ID NO: 111378 - DNA, 22 bp, Artificial Sequence
  Synthetic oligonucleotide; CTT chr11 5392582 5392603 5392599 5392604 +
aatttgttactaaacgaatatt

SEQ ID NO: 111379 - DNA, 22 bp, Artificial Sequence
  Synthetic oligonucleotide; TTA chr11 5392583 5392604 5392600 5392605 +
atttgttactaaacgaatattg

SEQ ID NO: 111380 - DNA, 22 bp, Artificial Sequence
  Synthetic oligonucleotide; TTT chr11 5392587 5392608 5392604 5392609 +
gttactaaacgaatattgaaga

SEQ ID NO: 111381 - DNA, 22 bp, Artificial Sequence
  Synthetic oligonucleotide; TTG chr11 5392588 5392609 5392605 5392610 +
ttactaaacgaatattgaagaa

SEQ ID NO: 111382 - DNA, 22 bp, Artificial Sequence
  Synthetic oligonucleotide; TTA chr11 5392591 5392612 5392608 5392613 +
ctaaacgaatattgaagaatag

SEQ ID NO: 111383 - DNA, 22 bp, Artificial Sequence
  Synthetic oligonucleotide; CTA chr11 5392594 5392615 5392611 5392616 +
aacgaatattgaagaatagagt

SEQ ID NO: 111384 - DNA, 22 bp, Artificial Sequence
  Synthetic oligonucleotide; TTG chr11 5392605 5392626 5392622 5392627 +
aagaatagagttaacaatcaat

SEQ ID NO: 111385 - DNA, 22 bp, Artificial Sequence
  Synthetic oligonucleotide; TTA chr11 5392618 5392639 5392635 5392640 +
acaatcaatatctggctgggcg

SEQ ID NO: 111386 - DNA, 22 bp, Artificial Sequence
  Synthetic oligonucleotide; CTG chr11 5392632 5392653 5392649 5392654 +
gctgggcgcggtggctcacgcc

SEQ ID NO: 111387 - DNA, 22 bp, Artificial Sequence
  Synthetic oligonucleotide; CTG chr11 5392636 5392657 5392653 5392658 +
ggcgcggtggctcacgcctgta

SEQ ID NO: 111388 - DNA, 22 bp, Artificial Sequence
  Synthetic oligonucleotide; CTC chr11 5392649 5392670 5392666 5392671 +
acgcctgtaatcccagcactct

SEQ ID NO: 111389 - DNA, 22 bp, Artificial Sequence
  Synthetic oligonucleotide; CTG chr11 5392656 5392677 5392673 5392678 +
taatcccagcactctgggaggc

SEQ ID NO: 111390 - DNA, 22 bp, Artificial Sequence
  Synthetic oligonucleotide; CTC chr11 5392670 5392691 5392687 5392692 +
tgggaggccgaggcgggtggat

SEQ ID NO: 111391 - DNA, 22 bp, Artificial Sequence
  Synthetic oligonucleotide; CTG chr11 5392672 5392693 5392689 5392694 +
ggaggccgaggcgggtggatca

SEQ ID NO: 111392 - DNA, 22 bp, Artificial Sequence
  Synthetic oligonucleotide; CTG chr11 5392721 5392742 5392738 5392743 +
gctaacacggtggaacccagtc

SEQ ID NO: 111393 - DNA, 22 bp, Artificial Sequence
  Synthetic oligonucleotide; CTA chr11 5392725 5392746 5392742 5392747 +
acacggtggaacccagtctcta

SEQ ID NO: 111394 - DNA, 22 bp, Artificial Sequence
  Synthetic oligonucleotide; CTC chr11 5392745 5392766 5392762 5392767 +
tactaaaaatacaaaaagttag

SEQ ID NO: 111395 - DNA, 22 bp, Artificial Sequence
  Synthetic oligonucleotide; CTA chr11 5392747 5392768 5392764 5392769 +
ctaaaaatacaaaaagttagcc

SEQ ID NO: 111396 - DNA, 22 bp, Artificial Sequence
  Synthetic oligonucleotide; CTA chr11 5392750 5392771 5392767 5392772 +
aaaatacaaaaagttagccggg

SEQ ID NO: 111397 - DNA, 22 bp, Artificial Sequence
  Synthetic oligonucleotide; TTA chr11 5392766 5392787 5392783 5392788 +
gccgggcatggtggtgggcacc

SEQ ID NO: 111398 - DNA, 22 bp, Artificial Sequence
  Synthetic oligonucleotide; CTG chr11 5392790 5392811 5392807 5392812 +
tagtcccagctactcaggaggc

SEQ ID NO: 111399 - DNA, 22 bp, Artificial Sequence
  Synthetic oligonucleotide; CTA chr11 5392802 5392823 5392819 5392824 +
ctcaggaggctggggcagcaga

SEQ ID NO: 111400 - DNA, 22 bp, Artificial Sequence
  Synthetic oligonucleotide; CTC chr11 5392805 5392826 5392822 5392827 +
aggaggctggggcagcagaatg

SEQ ID NO: 111401 - DNA, 22 bp, Artificial Sequence
  Synthetic oligonucleotide; CTG chr11 5392814 5392835 5392831 5392836 +
gggcagcagaatggcgtgaacc

SEQ ID NO: 111402 - DNA, 22 bp, Artificial Sequence
  Synthetic oligonucleotide; CTT chr11 5392851 5392872 5392868 5392873 +
gcagtgagccgagatcgtgcca

SEQ ID NO: 111403 - DNA, 22 bp, Artificial Sequence
  Synthetic oligonucleotide; TTG chr11 5392852 5392873 5392869 5392874 +
cagtgagccgagatcgtgccac

SEQ ID NO: 111404 - DNA, 22 bp, Artificial Sequence
  Synthetic oligonucleotide; CTG chr11 5392876 5392897 5392893 5392898 +
cactccagcctgggcaacagag

SEQ ID NO: 111405 - DNA, 22 bp, Artificial Sequence
  Synthetic oligonucleotide; CTC chr11 5392881 5392902 5392898 5392903 +
cagcctgggcaacagagcaaga

SEQ ID NO: 111406 - DNA, 22 bp, Artificial Sequence
  Synthetic oligonucleotide; CTG chr11 5392888 5392909 5392905 5392910 +
ggcaacagagcaagactccttc

SEQ ID NO: 111407 - DNA, 22 bp, Artificial Sequence
  Synthetic oligonucleotide; CTC chr11 5392906 5392927 5392923 5392928 +
cttctcaaaaacaaaaaaaaag

SEQ ID NO: 111408 - DNA, 22 bp, Artificial Sequence
  Synthetic oligonucleotide; CTT chr11 5392909 5392930 5392926 5392931 +
ctcaaaaacaaaaaaaaagaaa

SEQ ID NO: 111409 - DNA, 22 bp, Artificial Sequence
  Synthetic oligonucleotide; TTC chr11 5392910 5392931 5392927 5392932 +
tcaaaaacaaaaaaaaagaaaa

SEQ ID NO: 111410 - DNA, 22 bp, Artificial Sequence
  Synthetic oligonucleotide; CTC chr11 5392912 5392933 5392929 5392934 +
aaaaacaaaaaaaaagaaaaat

SEQ ID NO: 111411 - DNA, 22 bp, Artificial Sequence
  Synthetic oligonucleotide; CTG chr11 5392947 5392968 5392964 5392969 +
tgctgttaagtatgtggtaaaa

SEQ ID NO: 111412 - DNA, 22 bp, Artificial Sequence
  Synthetic oligonucleotide; CTG chr11 5392952 5392973 5392969 5392974 +
ttaagtatgtggtaaaagaggt

SEQ ID NO: 111413 - DNA, 22 bp, Artificial Sequence
  Synthetic oligonucleotide; TTA chr11 5392955 5392976 5392972 5392977 +
agtatgtggtaaaagaggtatt

SEQ ID NO: 111414 - DNA, 22 bp, Artificial Sequence
  Synthetic oligonucleotide; TTT chr11 5392978 5392999 5392995 5393000 +
tcacataccagaatgaaaacat

SEQ ID NO: 111415 - DNA, 22 bp, Artificial Sequence
  Synthetic oligonucleotide; TTT chr11 5392979 5393000 5392996 5393001 +
cacataccagaatgaaaacata

SEQ ID NO: 111416 - DNA, 22 bp, Artificial Sequence
  Synthetic oligonucleotide; TTC chr11 5392980 5393001 5392997 5393002 +
acataccagaatgaaaacataa

SEQ ID NO: 111417 - DNA, 22 bp, Artificial Sequence
  Synthetic oligonucleotide; TTT chr11 5393005 5393026 5393022 5393027 +
aatttgccttttataaaaaaca

SEQ ID NO: 111418 - DNA, 22 bp, Artificial Sequence
  Synthetic oligonucleotide; TTA chr11 5393006 5393027 5393023 5393028 +
atttgccttttataaaaaacaa

SEQ ID NO: 111419 - DNA, 22 bp, Artificial Sequence
  Synthetic oligonucleotide; TTT chr11 5393010 5393031 5393027 5393032 +
gccttttataaaaaacaaaata

SEQ ID NO: 111420 - DNA, 22 bp, Artificial Sequence
  Synthetic oligonucleotide; TTG chr11 5393011 5393032 5393028 5393033 +
ccttttataaaaaacaaaatac

SEQ ID NO: 111421 - DNA, 22 bp, Artificial Sequence
  Synthetic oligonucleotide; CTT chr11 5393015 5393036 5393032 5393037 +
ttataaaaaacaaaatacatca

SEQ ID NO: 111422 - DNA, 22 bp, Artificial Sequence
  Synthetic oligonucleotide; TTT chr11 5393016 5393037 5393033 5393038 +
tataaaaaacaaaatacatcaa

SEQ ID NO: 111423 - DNA, 22 bp, Artificial Sequence
  Synthetic oligonucleotide; TTT chr11 5393017 5393038 5393034 5393039 +
ataaaaaacaaaatacatcaaa

SEQ ID NO: 111424 - DNA, 22 bp, Artificial Sequence
  Synthetic oligonucleotide; TTA chr11 5393018 5393039 5393035 5393040 +
taaaaaacaaaatacatcaaaa

SEQ ID NO: 111425 - DNA, 22 bp, Artificial Sequence
  Synthetic oligonucleotide; CTT chr11 5393045 5393066 5393062 5393067 +
gaaaatattcatgctctgtgtc

SEQ ID NO: 111426 - DNA, 22 bp, Artificial Sequence
  Synthetic oligonucleotide; TTG chr11 5393046 5393067 5393063 5393068 +
aaaatattcatgctctgtgtct

SEQ ID NO: 111427 - DNA, 22 bp, Artificial Sequence
  Synthetic oligonucleotide; TTC chr11 5393055 5393076 5393072 5393077 +
atgctctgtgtctcagaaatgc

SEQ ID NO: 111428 - DNA, 22 bp, Artificial Sequence
  Synthetic oligonucleotide; CTC chr11 5393061 5393082 5393078 5393083 +
tgtgtctcagaaatgccacttc

SEQ ID NO: 111429 - DNA, 22 bp, Artificial Sequence
  Synthetic oligonucleotide; CTG chr11 5393063 5393084 5393080 5393085 +
tgtctcagaaatgccacttcta

SEQ ID NO: 111430 - DNA, 22 bp, Artificial Sequence
  Synthetic oligonucleotide; CTC chr11 5393069 5393090 5393086 5393091 +
agaaatgccacttctaaaaatc

SEQ ID NO: 111431 - DNA, 22 bp, Artificial Sequence
  Synthetic oligonucleotide; CTT chr11 5393082 5393103 5393099 5393104 +
ctaaaaatctgtcctaaataaa

SEQ ID NO: 111432 - DNA, 22 bp, Artificial Sequence
  Synthetic oligonucleotide; TTC chr11 5393083 5393104 5393100 5393105 +
taaaaatctgtcctaaataaat

SEQ ID NO: 111433 - DNA, 22 bp, Artificial Sequence
  Synthetic oligonucleotide; CTA chr11 5393085 5393106 5393102 5393107 +
aaaatctgtcctaaataaatga

SEQ ID NO: 111434 - DNA, 22 bp, Artificial Sequence
  Synthetic oligonucleotide; CTG chr11 5393093 5393114 5393110 5393115 +
tcctaaataaatgataaattaa

SEQ ID NO: 111435 - DNA, 22 bp, Artificial Sequence
  Synthetic oligonucleotide; CTA chr11 5393098 5393119 5393115 5393120 +
aataaatgataaattaaaaatt

SEQ ID NO: 111436 - DNA, 22 bp, Artificial Sequence
  Synthetic oligonucleotide; TTA chr11 5393114 5393135 5393131 5393136 +
aaaatttaggatgtaagctgtt

SEQ ID NO: 111437 - DNA, 22 bp, Artificial Sequence
  Synthetic oligonucleotide; TTT chr11 5393121 5393142 5393138 5393143 +
aggatgtaagctgtttgtggca

SEQ ID NO: 111438 - DNA, 22 bp, Artificial Sequence
  Synthetic oligonucleotide; TTA chr11 5393122 5393143 5393139 5393144 +
ggatgtaagctgtttgtggcaa

SEQ ID NO: 111439 - DNA, 22 bp, Artificial Sequence
  Synthetic oligonucleotide; CTG chr11 5393134 5393155 5393151 5393156 +
tttgtggcaaaatttttttcct

SEQ ID NO: 111440 - DNA, 22 bp, Artificial Sequence
  Synthetic oligonucleotide; TTT chr11 5393137 5393158 5393154 5393159 +
gtggcaaaatttttttcctgtt

SEQ ID NO: 111441 - DNA, 22 bp, Artificial Sequence
  Synthetic oligonucleotide; TTG chr11 5393138 5393159 5393155 5393160 +
tggcaaaatttttttcctgttt

SEQ ID NO: 111442 - DNA, 22 bp, Artificial Sequence
  Synthetic oligonucleotide; TTT chr11 5393149 5393170 5393166 5393171 +
ttttcctgtttgctcacagttc

SEQ ID NO: 111443 - DNA, 22 bp, Artificial Sequence
  Synthetic oligonucleotide; TTT chr11 5393150 5393171 5393167 5393172 +
tttcctgtttgctcacagttct

SEQ ID NO: 111444 - DNA, 22 bp, Artificial Sequence
  Synthetic oligonucleotide; TTT chr11 5393151 5393172 5393168 5393173 +
ttcctgtttgctcacagttcta

SEQ ID NO: 111445 - DNA, 22 bp, Artificial Sequence
  Synthetic oligonucleotide; TTT chr11 5393152 5393173 5393169 5393174 +
tcctgtttgctcacagttctaa

SEQ ID NO: 111446 - DNA, 22 bp, Artificial Sequence
  Synthetic oligonucleotide; TTT chr11 5393153 5393174 5393170 5393175 +
cctgtttgctcacagttctaaa

SEQ ID NO: 111447 - DNA, 22 bp, Artificial Sequence
  Synthetic oligonucleotide; TTC chr11 5393154 5393175 5393171 5393176 +
ctgtttgctcacagttctaaat

SEQ ID NO: 111448 - DNA, 22 bp, Artificial Sequence
  Synthetic oligonucleotide; CTG chr11 5393157 5393178 5393174 5393179 +
tttgctcacagttctaaatcca

SEQ ID NO: 111449 - DNA, 22 bp, Artificial Sequence
  Synthetic oligonucleotide; TTT chr11 5393160 5393181 5393177 5393182 +
gctcacagttctaaatccatct

SEQ ID NO: 111450 - DNA, 22 bp, Artificial Sequence
  Synthetic oligonucleotide; TTG chr11 5393161 5393182 5393178 5393183 +
ctcacagttctaaatccatctc

SEQ ID NO: 111451 - DNA, 22 bp, Artificial Sequence
  Synthetic oligonucleotide; CTC chr11 5393164 5393185 5393181 5393186 +
acagttctaaatccatctccta

SEQ ID NO: 111452 - DNA, 22 bp, Artificial Sequence
  Synthetic oligonucleotide; TTC chr11 5393171 5393192 5393188 5393193 +
taaatccatctcctaggtcagt

SEQ ID NO: 111453 - DNA, 22 bp, Artificial Sequence
  Synthetic oligonucleotide; CTA chr11 5393173 5393194 5393190 5393195 +
aatccatctcctaggtcagtga

SEQ ID NO: 111454 - DNA, 22 bp, Artificial Sequence
  Synthetic oligonucleotide; CTC chr11 5393183 5393204 5393200 5393205 +
ctaggtcagtgatcaataaata

SEQ ID NO: 111455 - DNA, 22 bp, Artificial Sequence
  Synthetic oligonucleotide; CTA chr11 5393186 5393207 5393203 5393208 +
ggtcagtgatcaataaatatgt

SEQ ID NO: 111456 - DNA, 22 bp, Artificial Sequence
  Synthetic oligonucleotide; TTG chr11 5393212 5393233 5393229 5393234 +
aactatttaataagtgaatatt

SEQ ID NO: 111457 - DNA, 22 bp, Artificial Sequence
  Synthetic oligonucleotide; CTA chr11 5393217 5393238 5393234 5393239 +
tttaataagtgaatattataat

SEQ ID NO: 111458 - DNA, 22 bp, Artificial Sequence
  Synthetic oligonucleotide; TTT chr11 5393220 5393241 5393237 5393242 +
aataagtgaatattataatttg

SEQ ID NO: 111459 - DNA, 22 bp, Artificial Sequence
  Synthetic oligonucleotide; TTA chr11 5393221 5393242 5393238 5393243 +
ataagtgaatattataatttgt

SEQ ID NO: 111460 - DNA, 22 bp, Artificial Sequence
  Synthetic oligonucleotide; TTA chr11 5393235 5393256 5393252 5393257 +
taatttgtgttattgttcataa

SEQ ID NO: 111461 - DNA, 22 bp, Artificial Sequence
  Synthetic oligonucleotide; TTT chr11 5393241 5393262 5393258 5393263 +
gtgttattgttcataattttaa

SEQ ID NO: 111462 - DNA, 22 bp, Artificial Sequence
  Synthetic oligonucleotide; TTG chr11 5393242 5393263 5393259 5393264 +
tgttattgttcataattttaag

SEQ ID NO: 111463 - DNA, 22 bp, Artificial Sequence
  Synthetic oligonucleotide; TTA chr11 5393247 5393268 5393264 5393269 +
ttgttcataattttaagaatgt

SEQ ID NO: 111464 - DNA, 22 bp, Artificial Sequence
  Synthetic oligonucleotide; TTG chr11 5393250 5393271 5393267 5393272 +
ttcataattttaagaatgtaag

SEQ ID NO: 111465 - DNA, 22 bp, Artificial Sequence
  Synthetic oligonucleotide; TTC chr11 5393253 5393274 5393270 5393275 +
ataattttaagaatgtaagcat

SEQ ID NO: 111466 - DNA, 22 bp, Artificial Sequence
  Synthetic oligonucleotide; TTT chr11 5393260 5393281 5393277 5393282 +
taagaatgtaagcatacaaaat

SEQ ID NO: 111467 - DNA, 22 bp, Artificial Sequence
  Synthetic oligonucleotide; TTT chr11 5393261 5393282 5393278 5393283 +
aagaatgtaagcatacaaaatg

SEQ ID NO: 111468 - DNA, 22 bp, Artificial Sequence
  Synthetic oligonucleotide; TTA chr11 5393262 5393283 5393279 5393284 +
agaatgtaagcatacaaaatgt

SEQ ID NO: 111469 - DNA, 22 bp, Artificial Sequence
  Synthetic oligonucleotide; CTA chr11 5393287 5393308 5393304 5393309 +
gaataaaaatattacataaatc

SEQ ID NO: 111470 - DNA, 22 bp, Artificial Sequence
  Synthetic oligonucleotide; TTA chr11 5393301 5393322 5393318 5393323 +
cataaatcaaagcatattcatt

SEQ ID NO: 111471 - DNA, 22 bp, Artificial Sequence
  Synthetic oligonucleotide; TTC chr11 5393320 5393341 5393337 5393342 +
atttgatacactattattaaaa

SEQ ID NO: 111472 - DNA, 22 bp, Artificial Sequence
  Synthetic oligonucleotide; TTT chr11 5393324 5393345 5393341 5393346 +
gatacactattattaaaatgac

SEQ ID NO: 111473 - DNA, 22 bp, Artificial Sequence
  Synthetic oligonucleotide; TTG chr11 5393325 5393346 5393342 5393347 +
atacactattattaaaatgaca

SEQ ID NO: 111474 - DNA, 22 bp, Artificial Sequence
  Synthetic oligonucleotide; CTA chr11 5393333 5393354 5393350 5393355 +
ttattaaaatgacatttaaatg

SEQ ID NO: 111475 - DNA, 22 bp, Artificial Sequence
  Synthetic oligonucleotide; TTA chr11 5393336 5393357 5393353 5393358 +
ttaaaatgacatttaaatgctt

SEQ ID NO: 111476 - DNA, 22 bp, Artificial Sequence
  Synthetic oligonucleotide; TTA chr11 5393339 5393360 5393356 5393361 +
aaatgacatttaaatgcttagg

SEQ ID NO: 111477 - DNA, 22 bp, Artificial Sequence
  Synthetic oligonucleotide; TTT chr11 5393350 5393371 5393367 5393372 +
aaatgcttaggaaactgttggc

SEQ ID NO: 111478 - DNA, 22 bp, Artificial Sequence
  Synthetic oligonucleotide; TTA chr11 5393351 5393372 5393368 5393373 +
aatgcttaggaaactgttggca

SEQ ID NO: 111479 - DNA, 22 bp, Artificial Sequence
  Synthetic oligonucleotide; CTT chr11 5393358 5393379 5393375 5393380 +
aggaaactgttggcaaaatatt

SEQ ID NO: 111480 - DNA, 22 bp, Artificial Sequence
  Synthetic oligonucleotide; TTA chr11 5393359 5393380 5393376 5393381 +
ggaaactgttggcaaaatatta

SEQ ID NO: 111481 - DNA, 22 bp, Artificial Sequence
  Synthetic oligonucleotide; CTG chr11 5393367 5393388 5393384 5393389 +
ttggcaaaatattaaataaaaa

SEQ ID NO: 111482 - DNA, 22 bp, Artificial Sequence
  Synthetic oligonucleotide; TTG chr11 5393370 5393391 5393387 5393392 +
gcaaaatattaaataaaaataa

SEQ ID NO: 111483 - DNA, 22 bp, Artificial Sequence
  Synthetic oligonucleotide; TTA chr11 5393381 5393402 5393398 5393403 +
aataaaaataagcaaaattagg

SEQ ID NO: 111484 - DNA, 22 bp, Artificial Sequence
  Synthetic oligonucleotide; TTA chr11 5393401 5393422 5393418 5393423 +
ggtacagaacaatcactatgta

SEQ ID NO: 111485 - DNA, 22 bp, Artificial Sequence
  Synthetic oligonucleotide; CTA chr11 5393419 5393440 5393436 5393441 +
tgtaaaaggctataaatatttg

SEQ ID NO: 111486 - DNA, 22 bp, Artificial Sequence
  Synthetic oligonucleotide; CTA chr11 5393431 5393452 5393448 5393453 +
taaatatttgtatcaaaagaaa

SEQ ID NO: 111487 - DNA, 22 bp, Artificial Sequence
  Synthetic oligonucleotide; TTT chr11 5393440 5393461 5393457 5393462 +
gtatcaaaagaaaaacagctgt

SEQ ID NO: 111488 - DNA, 22 bp, Artificial Sequence
  Synthetic oligonucleotide; TTG chr11 5393441 5393462 5393458 5393463 +
tatcaaaagaaaaacagctgtt

SEQ ID NO: 111489 - DNA, 22 bp, Artificial Sequence
  Synthetic oligonucleotide; CTG chr11 5393461 5393482 5393478 5393483 +
ttatatataatcttattttcta

SEQ ID NO: 111490 - DNA, 22 bp, Artificial Sequence
  Synthetic oligonucleotide; TTA chr11 5393464 5393485 5393481 5393486 +
tatataatcttattttctatat

SEQ ID NO: 111491 - DNA, 22 bp, Artificial Sequence
  Synthetic oligonucleotide; CTT chr11 5393475 5393496 5393492 5393497 +
attttctatatagatttctcta

SEQ ID NO: 111492 - DNA, 22 bp, Artificial Sequence
  Synthetic oligonucleotide; TTA chr11 5393476 5393497 5393493 5393498 +
ttttctatatagatttctctat

SEQ ID NO: 111493 - DNA, 22 bp, Artificial Sequence
  Synthetic oligonucleotide; TTT chr11 5393479 5393500 5393496 5393501 +
tctatatagatttctctatctt

SEQ ID NO: 111494 - DNA, 22 bp, Artificial Sequence
  Synthetic oligonucleotide; TTT chr11 5393480 5393501 5393497 5393502 +
ctatatagatttctctatcttt

SEQ ID NO: 111495 - DNA, 22 bp, Artificial Sequence
  Synthetic oligonucleotide; TTC chr11 5393481 5393502 5393498 5393503 +
tatatagatttctctatctttg

SEQ ID NO: 111496 - DNA, 22 bp, Artificial Sequence
  Synthetic oligonucleotide; CTA chr11 5393483 5393504 5393500 5393505 +
tatagatttctctatctttgcc

SEQ ID NO: 111497 - DNA, 22 bp, Artificial Sequence
  Synthetic oligonucleotide; TTT chr11 5393492 5393513 5393509 5393514 +
ctctatctttgccgtatacaaa

SEQ ID NO: 111498 - DNA, 22 bp, Artificial Sequence
  Synthetic oligonucleotide; TTC chr11 5393493 5393514 5393510 5393515 +
tctatctttgccgtatacaaat

SEQ ID NO: 111499 - DNA, 22 bp, Artificial Sequence
  Synthetic oligonucleotide; CTC chr11 5393495 5393516 5393512 5393517 +
tatctttgccgtatacaaattt

SEQ ID NO: 111500 - DNA, 22 bp, Artificial Sequence
  Synthetic oligonucleotide; CTA chr11 5393497 5393518 5393514 5393519 +
tctttgccgtatacaaattttc

SEQ ID NO: 111501 - DNA, 22 bp, Artificial Sequence
  Synthetic oligonucleotide; CTT chr11 5393501 5393522 5393518 5393523 +
tgccgtatacaaattttctgaa

SEQ ID NO: 111502 - DNA, 22 bp, Artificial Sequence
  Synthetic oligonucleotide; TTT chr11 5393502 5393523 5393519 5393524 +
gccgtatacaaattttctgaag

SEQ ID NO: 111503 - DNA, 22 bp, Artificial Sequence
  Synthetic oligonucleotide; TTG chr11 5393503 5393524 5393520 5393525 +
ccgtatacaaattttctgaaga

SEQ ID NO: 111504 - DNA, 22 bp, Artificial Sequence
  Synthetic oligonucleotide; TTT chr11 5393517 5393538 5393534 5393539 +
tctgaagaagacatttcggttt

SEQ ID NO: 111505 - DNA, 22 bp, Artificial Sequence
  Synthetic oligonucleotide; TTT chr11 5393518 5393539 5393535 5393540 +
ctgaagaagacatttcggtttt

SEQ ID NO: 111506 - DNA, 22 bp, Artificial Sequence
  Synthetic oligonucleotide; TTC chr11 5393519 5393540 5393536 5393541 +
tgaagaagacatttcggtttta

SEQ ID NO: 111507 - DNA, 22 bp, Artificial Sequence
  Synthetic oligonucleotide; CTG chr11 5393521 5393542 5393538 5393543 +
aagaagacatttcggttttata

SEQ ID NO: 111508 - DNA, 22 bp, Artificial Sequence
  Synthetic oligonucleotide; TTT chr11 5393533 5393554 5393550 5393555 +
cggttttataatctaaaaagag

SEQ ID NO: 111509 - DNA, 22 bp, Artificial Sequence
  Synthetic oligonucleotide; TTC chr11 5393534 5393555 5393551 5393556 +
ggttttataatctaaaaagagc

SEQ ID NO: 111510 - DNA, 22 bp, Artificial Sequence
  Synthetic oligonucleotide; TTT chr11 5393539 5393560 5393556 5393561 +
tataatctaaaaagagcatttt

SEQ ID NO: 111511 - DNA, 22 bp, Artificial Sequence
  Synthetic oligonucleotide; TTT chr11 5393540 5393561 5393557 5393562 +
ataatctaaaaagagcatttta

SEQ ID NO: 111512 - DNA, 22 bp, Artificial Sequence
  Synthetic oligonucleotide; TTA chr11 5393541 5393562 5393558 5393563 +
taatctaaaaagagcattttac

SEQ ID NO: 111513 - DNA, 22 bp, Artificial Sequence
  Synthetic oligonucleotide; CTA chr11 5393548 5393569 5393565 5393570 +
aaaagagcattttacaatgact

SEQ ID NO: 111514 - DNA, 22 bp, Artificial Sequence
  Synthetic oligonucleotide; TTT chr11 5393560 5393581 5393577 5393582 +
tacaatgactataaaaagttat

SEQ ID NO: 111515 - DNA, 22 bp, Artificial Sequence
  Synthetic oligonucleotide; TTT chr11 5393561 5393582 5393578 5393583 +
acaatgactataaaaagttata

SEQ ID NO: 111516 - DNA, 22 bp, Artificial Sequence
  Synthetic oligonucleotide; TTA chr11 5393562 5393583 5393579 5393584 +
caatgactataaaaagttatat

SEQ ID NO: 111517 - DNA, 22 bp, Artificial Sequence
  Synthetic oligonucleotide; CTA chr11 5393571 5393592 5393588 5393593 +
taaaaagttatatacgattatg

SEQ ID NO: 111518 - DNA, 22 bp, Artificial Sequence
  Synthetic oligonucleotide; TTA chr11 5393581 5393602 5393598 5393603 +
tatacgattatgctgaagatga

SEQ ID NO: 111519 - DNA, 22 bp, Artificial Sequence
  Synthetic oligonucleotide; TTA chr11 5393591 5393612 5393608 5393613 +
tgctgaagatgacaatgaagat

SEQ ID NO: 111520 - DNA, 22 bp, Artificial Sequence
  Synthetic oligonucleotide; CTG chr11 5393596 5393617 5393613 5393618 +
aagatgacaatgaagatgataa

SEQ ID NO: 111521 - DNA, 22 bp, Artificial Sequence
  Synthetic oligonucleotide; TTA chr11 5393621 5393642 5393638 5393643 +
tgatcatgataaatgctaatgt

SEQ ID NO: 111522 - DNA, 22 bp, Artificial Sequence
  Synthetic oligonucleotide; CTA chr11 5393639 5393660 5393656 5393661 +
atgtttattaagcatttaactc

SEQ ID NO: 111523 - DNA, 22 bp, Artificial Sequence
  Synthetic oligonucleotide; TTT chr11 5393645 5393666 5393662 5393667 +
attaagcatttaactcacggta

SEQ ID NO: 111524 - DNA, 22 bp, Artificial Sequence
  Synthetic oligonucleotide; TTA chr11 5393646 5393667 5393663 5393668 +
ttaagcatttaactcacggtag

SEQ ID NO: 111525 - DNA, 22 bp, Artificial Sequence
  Synthetic oligonucleotide; TTA chr11 5393649 5393670 5393666 5393671 +
agcatttaactcacggtagaga

SEQ ID NO: 111526 - DNA, 22 bp, Artificial Sequence
  Synthetic oligonucleotide; TTT chr11 5393656 5393677 5393673 5393678 +
aactcacggtagagagggctga

SEQ ID NO: 111527 - DNA, 22 bp, Artificial Sequence
  Synthetic oligonucleotide; TTA chr11 5393657 5393678 5393674 5393679 +
actcacggtagagagggctgag

SEQ ID NO: 111528 - DNA, 22 bp, Artificial Sequence
  Synthetic oligonucleotide; CTC chr11 5393661 5393682 5393678 5393683 +
acggtagagagggctgagtact

SEQ ID NO: 111529 - DNA, 22 bp, Artificial Sequence
  Synthetic oligonucleotide; CTG chr11 5393677 5393698 5393694 5393699 +
agtactttttattttcattatt

SEQ ID NO: 111530 - DNA, 22 bp, Artificial Sequence
  Synthetic oligonucleotide; CTT chr11 5393684 5393705 5393701 5393706 +
tttattttcattattttacatt

SEQ ID NO: 111531 - DNA, 22 bp, Artificial Sequence
  Synthetic oligonucleotide; TTT chr11 5393685 5393706 5393702 5393707 +
ttattttcattattttacatta

SEQ ID NO: 111532 - DNA, 22 bp, Artificial Sequence
  Synthetic oligonucleotide; TTT chr11 5393686 5393707 5393703 5393708 +
tattttcattattttacattat

SEQ ID NO: 111533 - DNA, 22 bp, Artificial Sequence
  Synthetic oligonucleotide; TTT chr11 5393687 5393708 5393704 5393709 +
attttcattattttacattatt

SEQ ID NO: 111534 - DNA, 22 bp, Artificial Sequence
  Synthetic oligonucleotide; TTA chr11 5393688 5393709 5393705 5393710 +
ttttcattattttacattattt

SEQ ID NO: 111535 - DNA, 22 bp, Artificial Sequence
  Synthetic oligonucleotide; TTT chr11 5393691 5393712 5393708 5393713 +
tcattattttacattatttcat

SEQ ID NO: 111536 - DNA, 22 bp, Artificial Sequence
  Synthetic oligonucleotide; TTT chr11 5393692 5393713 5393709 5393714 +
cattattttacattatttcatt

SEQ ID NO: 111537 - DNA, 22 bp, Artificial Sequence
  Synthetic oligonucleotide; TTC chr11 5393693 5393714 5393710 5393715 +
attattttacattatttcattt

SEQ ID NO: 111538 - DNA, 22 bp, Artificial Sequence
  Synthetic oligonucleotide; TTA chr11 5393697 5393718 5393714 5393719 +
ttttacattatttcatttaatt

SEQ ID NO: 111539 - DNA, 22 bp, Artificial Sequence
  Synthetic oligonucleotide; TTT chr11 5393700 5393721 5393717 5393722 +
tacattatttcatttaattttc

SEQ ID NO: 111540 - DNA, 22 bp, Artificial Sequence
  Synthetic oligonucleotide; TTT chr11 5393701 5393722 5393718 5393723 +
acattatttcatttaattttct

SEQ ID NO: 111541 - DNA, 22 bp, Artificial Sequence
  Synthetic oligonucleotide; TTA chr11 5393702 5393723 5393719 5393724 +
cattatttcatttaattttctc

SEQ ID NO: 111542 - DNA, 22 bp, Artificial Sequence
  Synthetic oligonucleotide; TTA chr11 5393707 5393728 5393724 5393729 +
tttcatttaattttctcaccaa

SEQ ID NO: 111543 - DNA, 22 bp, Artificial Sequence
  Synthetic oligonucleotide; TTT chr11 5393710 5393731 5393727 5393732 +
catttaattttctcaccaaacc

SEQ ID NO: 111544 - DNA, 22 bp, Artificial Sequence
  Synthetic oligonucleotide; TTC chr11 5393711 5393732 5393728 5393733 +
atttaattttctcaccaaacct

SEQ ID NO: 111545 - DNA, 22 bp, Artificial Sequence
  Synthetic oligonucleotide; TTT chr11 5393715 5393736 5393732 5393737 +
aattttctcaccaaacctgtga

SEQ ID NO: 111546 - DNA, 22 bp, Artificial Sequence
  Synthetic oligonucleotide; TTA chr11 5393716 5393737 5393733 5393738 +
attttctcaccaaacctgtgaa

SEQ ID NO: 111547 - DNA, 22 bp, Artificial Sequence
  Synthetic oligonucleotide; TTT chr11 5393720 5393741 5393737 5393742 +
tctcaccaaacctgtgaagtag

SEQ ID NO: 111548 - DNA, 22 bp, Artificial Sequence
  Synthetic oligonucleotide; TTT chr11 5393721 5393742 5393738 5393743 +
ctcaccaaacctgtgaagtagg

SEQ ID NO: 111549 - DNA, 22 bp, Artificial Sequence
  Synthetic oligonucleotide; TTC chr11 5393722 5393743 5393739 5393744 +
tcaccaaacctgtgaagtaggg

SEQ ID NO: 111550 - DNA, 22 bp, Artificial Sequence
  Synthetic oligonucleotide; CTC chr11 5393724 5393745 5393741 5393746 +
accaaacctgtgaagtagggag

SEQ ID NO: 111551 - DNA, 22 bp, Artificial Sequence
  Synthetic oligonucleotide; CTG chr11 5393734 5393755 5393751 5393756 +
tgaagtagggaggtattattat

SEQ ID NO: 111552 - DNA, 22 bp, Artificial Sequence
  Synthetic oligonucleotide; TTA chr11 5393752 5393773 5393769 5393774 +
ttattttcaatgttttaaaatt

SEQ ID NO: 111553 - DNA, 22 bp, Artificial Sequence
  Synthetic oligonucleotide; TTA chr11 5393755 5393776 5393772 5393777 +
ttttcaatgttttaaaattagg

SEQ ID NO: 111554 - DNA, 22 bp, Artificial Sequence
  Synthetic oligonucleotide; TTT chr11 5393758 5393779 5393775 5393780 +
tcaatgttttaaaattaggaaa

SEQ ID NO: 111555 - DNA, 22 bp, Artificial Sequence
  Synthetic oligonucleotide; TTT chr11 5393759 5393780 5393776 5393781 +
caatgttttaaaattaggaaac

SEQ ID NO: 111556 - DNA, 22 bp, Artificial Sequence
  Synthetic oligonucleotide; TTC chr11 5393760 5393781 5393777 5393782 +
aatgttttaaaattaggaaact

SEQ ID NO: 111557 - DNA, 22 bp, Artificial Sequence
  Synthetic oligonucleotide; TTT chr11 5393767 5393788 5393784 5393789 +
taaaattaggaaactgaggctc

SEQ ID NO: 111558 - DNA, 22 bp, Artificial Sequence
  Synthetic oligonucleotide; TTT chr11 5393768 5393789 5393785 5393790 +
aaaattaggaaactgaggctca

SEQ ID NO: 111559 - DNA, 22 bp, Artificial Sequence
  Synthetic oligonucleotide; TTA chr11 5393769 5393790 5393786 5393791 +
aaattaggaaactgaggctcac

SEQ ID NO: 111560 - DNA, 22 bp, Artificial Sequence
  Synthetic oligonucleotide; TTA chr11 5393775 5393796 5393792 5393797 +
ggaaactgaggctcacagagga

SEQ ID NO: 111561 - DNA, 22 bp, Artificial Sequence
  Synthetic oligonucleotide; CTG chr11 5393783 5393804 5393800 5393805 +
aggctcacagaggaaagcaact

SEQ ID NO: 111562 - DNA, 22 bp, Artificial Sequence
  Synthetic oligonucleotide; CTC chr11 5393789 5393810 5393806 5393811 +
acagaggaaagcaactttcctt

SEQ ID NO: 111563 - DNA, 22 bp, Artificial Sequence
  Synthetic oligonucleotide; CTT chr11 5393806 5393827 5393823 5393828 +
tccttagttaaatcattaatgt

SEQ ID NO: 111564 - DNA, 22 bp, Artificial Sequence
  Synthetic oligonucleotide; TTT chr11 5393807 5393828 5393824 5393829 +
ccttagttaaatcattaatgta

SEQ ID NO: 111565 - DNA, 22 bp, Artificial Sequence
  Synthetic oligonucleotide; TTC chr11 5393808 5393829 5393825 5393830 +
cttagttaaatcattaatgtaa

SEQ ID NO: 111566 - DNA, 22 bp, Artificial Sequence
  Synthetic oligonucleotide; CTT chr11 5393811 5393832 5393828 5393833 +
agttaaatcattaatgtaagtc

SEQ ID NO: 111567 - DNA, 22 bp, Artificial Sequence
  Synthetic oligonucleotide; TTA chr11 5393812 5393833 5393829 5393834 +
gttaaatcattaatgtaagtca

SEQ ID NO: 111568 - DNA, 22 bp, Artificial Sequence
  Synthetic oligonucleotide; TTA chr11 5393816 5393837 5393833 5393838 +
aatcattaatgtaagtcagaac

SEQ ID NO: 111569 - DNA, 22 bp, Artificial Sequence
  Synthetic oligonucleotide; TTA chr11 5393824 5393845 5393841 5393846 +
atgtaagtcagaactgaaattc

SEQ ID NO: 111570 - DNA, 22 bp, Artificial Sequence
  Synthetic oligonucleotide; CTG chr11 5393840 5393861 5393857 5393862 +
aaattcaatatcaagcgcatct

SEQ ID NO: 111571 - DNA, 22 bp, Artificial Sequence
  Synthetic oligonucleotide; TTC chr11 5393846 5393867 5393863 5393868 +
aatatcaagcgcatctgatttt

SEQ ID NO: 111572 - DNA, 22 bp, Artificial Sequence
  Synthetic oligonucleotide; CTG chr11 5393863 5393884 5393880 5393885 +
attttcttaaaccattatgctg

SEQ ID NO: 111573 - DNA, 22 bp, Artificial Sequence
  Synthetic oligonucleotide; TTT chr11 5393867 5393888 5393884 5393889 +
tcttaaaccattatgctggact

SEQ ID NO: 111574 - DNA, 22 bp, Artificial Sequence
  Synthetic oligonucleotide; TTT chr11 5393868 5393889 5393885 5393890 +
cttaaaccattatgctggactc

SEQ ID NO: 111575 - DNA, 22 bp, Artificial Sequence
  Synthetic oligonucleotide; TTC chr11 5393869 5393890 5393886 5393891 +
ttaaaccattatgctggactcc

SEQ ID NO: 111576 - DNA, 22 bp, Artificial Sequence
  Synthetic oligonucleotide; CTT chr11 5393871 5393892 5393888 5393893 +
aaaccattatgctggactcctc

SEQ ID NO: 111577 - DNA, 22 bp, Artificial Sequence
  Synthetic oligonucleotide; TTA chr11 5393872 5393893 5393889 5393894 +
aaccattatgctggactcctct

SEQ ID NO: 111578 - DNA, 22 bp, Artificial Sequence
  Synthetic oligonucleotide; TTA chr11 5393880 5393901 5393897 5393902 +
tgctggactcctctccaaacag

SEQ ID NO: 111579 - DNA, 22 bp, Artificial Sequence
  Synthetic oligonucleotide; CTG chr11 5393885 5393906 5393902 5393907 +
gactcctctccaaacaggacca

SEQ ID NO: 111580 - DNA, 22 bp, Artificial Sequence
  Synthetic oligonucleotide; CTC chr11 5393890 5393911 5393907 5393912 +
ctctccaaacaggaccactcgt

SEQ ID NO: 111581 - DNA, 22 bp, Artificial Sequence
  Synthetic oligonucleotide; CTC chr11 5393893 5393914 5393910 5393915 +
tccaaacaggaccactcgtttc

SEQ ID NO: 111582 - DNA, 22 bp, Artificial Sequence
  Synthetic oligonucleotide; CTC chr11 5393895 5393916 5393912 5393917 +
caaacaggaccactcgtttcag

SEQ ID NO: 111583 - DNA, 22 bp, Artificial Sequence
  Synthetic oligonucleotide; CTC chr11 5393910 5393931 5393927 5393932 +
gtttcagggccatgttttccat

SEQ ID NO: 111584 - DNA, 22 bp, Artificial Sequence
  Synthetic oligonucleotide; TTT chr11 5393914 5393935 5393931 5393936 +
cagggccatgttttccatgtta

SEQ ID NO: 111585 - DNA, 22 bp, Artificial Sequence
  Synthetic oligonucleotide; TTC chr11 5393915 5393936 5393932 5393937 +
agggccatgttttccatgttat

SEQ ID NO: 111586 - DNA, 22 bp, Artificial Sequence
  Synthetic oligonucleotide; TTT chr11 5393927 5393948 5393944 5393949 +
tccatgttatactgaaggaagt

SEQ ID NO: 111587 - DNA, 22 bp, Artificial Sequence
  Synthetic oligonucleotide; TTT chr11 5393928 5393949 5393945 5393950 +
ccatgttatactgaaggaagtc

SEQ ID NO: 111588 - DNA, 22 bp, Artificial Sequence
  Synthetic oligonucleotide; TTC chr11 5393929 5393950 5393946 5393951 +
catgttatactgaaggaagtcc

SEQ ID NO: 111589 - DNA, 22 bp, Artificial Sequence
  Synthetic oligonucleotide; TTA chr11 5393936 5393957 5393953 5393958 +
tactgaaggaagtcccatcatt

SEQ ID NO: 111590 - DNA, 22 bp, Artificial Sequence
  Synthetic oligonucleotide; CTG chr11 5393941 5393962 5393958 5393963 +
aaggaagtcccatcattggctt

SEQ ID NO: 111591 - DNA, 22 bp, Artificial Sequence
  Synthetic oligonucleotide; TTG chr11 5393959 5393980 5393976 5393981 +
gcttctccctaactttttgttc

SEQ ID NO: 111592 - DNA, 22 bp, Artificial Sequence
  Synthetic oligonucleotide; CTT chr11 5393963 5393984 5393980 5393985 +
ctccctaactttttgttccctt

SEQ ID NO: 111593 - DNA, 22 bp, Artificial Sequence
  Synthetic oligonucleotide; TTC chr11 5393964 5393985 5393981 5393986 +
tccctaactttttgttcccttt

SEQ ID NO: 111594 - DNA, 22 bp, Artificial Sequence
  Synthetic oligonucleotide; CTC chr11 5393966 5393987 5393983 5393988 +
cctaactttttgttccctttcc

SEQ ID NO: 111595 - DNA, 22 bp, Artificial Sequence
  Synthetic oligonucleotide; CTA chr11 5393970 5393991 5393987 5393992 +
actttttgttccctttcctaga

SEQ ID NO: 111596 - DNA, 22 bp, Artificial Sequence
  Synthetic oligonucleotide; CTT chr11 5393974 5393995 5393991 5393996 +
tttgttccctttcctagaatat

SEQ ID NO: 111597 - DNA, 22 bp, Artificial Sequence
  Synthetic oligonucleotide; TTT chr11 5393975 5393996 5393992 5393997 +
ttgttccctttcctagaatatg

SEQ ID NO: 111598 - DNA, 22 bp, Artificial Sequence
  Synthetic oligonucleotide; TTT chr11 5393976 5393997 5393993 5393998 +
tgttccctttcctagaatatgt

SEQ ID NO: 111599 - DNA, 22 bp, Artificial Sequence
  Synthetic oligonucleotide; TTT chr11 5393977 5393998 5393994 5393999 +
gttccctttcctagaatatgtt

SEQ ID NO: 111600 - DNA, 22 bp, Artificial Sequence
  Synthetic oligonucleotide; TTG chr11 5393978 5393999 5393995 5394000 +
ttccctttcctagaatatgtta

SEQ ID NO: 111601 - DNA, 22 bp, Artificial Sequence
  Synthetic oligonucleotide; TTC chr11 5393981 5394002 5393998 5394003 +
cctttcctagaatatgttatct

SEQ ID NO: 111602 - DNA, 22 bp, Artificial Sequence
  Synthetic oligonucleotide; CTT chr11 5393985 5394006 5394002 5394007 +
tcctagaatatgttatctattt

SEQ ID NO: 111603 - DNA, 22 bp, Artificial Sequence
  Synthetic oligonucleotide; TTT chr11 5393986 5394007 5394003 5394008 +
cctagaatatgttatctatttt

SEQ ID NO: 111604 - DNA, 22 bp, Artificial Sequence
  Synthetic oligonucleotide; TTC chr11 5393987 5394008 5394004 5394009 +
ctagaatatgttatctattttt

SEQ ID NO: 111605 - DNA, 22 bp, Artificial Sequence
  Synthetic oligonucleotide; CTA chr11 5393990 5394011 5394007 5394012 +
gaatatgttatctatttttcca

SEQ ID NO: 111606 - DNA, 22 bp, Artificial Sequence
  Synthetic oligonucleotide; TTA chr11 5394000 5394021 5394017 5394022 +
tctatttttccatttagtatca

SEQ ID NO: 111607 - DNA, 22 bp, Artificial Sequence
  Synthetic oligonucleotide; CTA chr11 5394004 5394025 5394021 5394026 +
tttttccatttagtatcaggaa

SEQ ID NO: 111608 - DNA, 22 bp, Artificial Sequence
  Synthetic oligonucleotide; TTT chr11 5394007 5394028 5394024 5394029 +
ttccatttagtatcaggaaaag

SEQ ID NO: 111609 - DNA, 22 bp, Artificial Sequence
  Synthetic oligonucleotide; TTT chr11 5394008 5394029 5394025 5394030 +
tccatttagtatcaggaaaaga

SEQ ID NO: 111610 - DNA, 22 bp, Artificial Sequence
  Synthetic oligonucleotide; TTT chr11 5394009 5394030 5394026 5394031 +
ccatttagtatcaggaaaagat

SEQ ID NO: 111611 - DNA, 22 bp, Artificial Sequence
  Synthetic oligonucleotide; TTC chr11 5394010 5394031 5394027 5394032 +
catttagtatcaggaaaagata

SEQ ID NO: 111612 - DNA, 22 bp, Artificial Sequence
  Synthetic oligonucleotide; TTT chr11 5394015 5394036 5394032 5394037 +
agtatcaggaaaagatagcaac

SEQ ID NO: 111613 - DNA, 22 bp, Artificial Sequence
  Synthetic oligonucleotide; TTA chr11 5394016 5394037 5394033 5394038 +
gtatcaggaaaagatagcaaca

SEQ ID NO: 111614 - DNA, 22 bp, Artificial Sequence
  Synthetic oligonucleotide; TTA chr11 5394059 5394080 5394076 5394081 +
ttgtattaaatactttttaata

SEQ ID NO: 111615 - DNA, 22 bp, Artificial Sequence
  Synthetic oligonucleotide; TTG chr11 5394062 5394083 5394079 5394084 +
tattaaatactttttaatagac

SEQ ID NO: 111616 - DNA, 22 bp, Artificial Sequence
  Synthetic oligonucleotide; TTA chr11 5394067 5394088 5394084 5394089 +
aatactttttaatagacttgat

SEQ ID NO: 111617 - DNA, 22 bp, Artificial Sequence
  Synthetic oligonucleotide; CTT chr11 5394074 5394095 5394091 5394096 +
tttaatagacttgattttaaga

SEQ ID NO: 111618 - DNA, 22 bp, Artificial Sequence
  Synthetic oligonucleotide; TTT chr11 5394075 5394096 5394092 5394097 +
ttaatagacttgattttaagag

SEQ ID NO: 111619 - DNA, 22 bp, Artificial Sequence
  Synthetic oligonucleotide; TTT chr11 5394076 5394097 5394093 5394098 +
taatagacttgattttaagagt

SEQ ID NO: 111620 - DNA, 22 bp, Artificial Sequence
  Synthetic oligonucleotide; TTT chr11 5394077 5394098 5394094 5394099 +
aatagacttgattttaagagtt

SEQ ID NO: 111621 - DNA, 22 bp, Artificial Sequence
  Synthetic oligonucleotide; TTA chr11 5394078 5394099 5394095 5394100 +
atagacttgattttaagagtta

SEQ ID NO: 111622 - DNA, 22 bp, Artificial Sequence
  Synthetic oligonucleotide; CTT chr11 5394086 5394107 5394103 5394108 +
gattttaagagttatagattca

SEQ ID NO: 111623 - DNA, 22 bp, Artificial Sequence
  Synthetic oligonucleotide; TTG chr11 5394087 5394108 5394104 5394109 +
attttaagagttatagattcac

SEQ ID NO: 111624 - DNA, 22 bp, Artificial Sequence
  Synthetic oligonucleotide; TTT chr11 5394091 5394112 5394108 5394113 +
taagagttatagattcacagaa

SEQ ID NO: 111625 - DNA, 22 bp, Artificial Sequence
  Synthetic oligonucleotide; TTT chr11 5394092 5394113 5394109 5394114 +
aagagttatagattcacagaaa

SEQ ID NO: 111626 - DNA, 22 bp, Artificial Sequence
  Synthetic oligonucleotide; TTA chr11 5394093 5394114 5394110 5394115 +
agagttatagattcacagaaaa

SEQ ID NO: 111627 - DNA, 22 bp, Artificial Sequence
  Synthetic oligonucleotide; TTA chr11 5394100 5394121 5394117 5394122 +
tagattcacagaaaaactcagt

SEQ ID NO: 111628 - DNA, 22 bp, Artificial Sequence
  Synthetic oligonucleotide; TTC chr11 5394107 5394128 5394124 5394129 +
acagaaaaactcagtagaaggt

SEQ ID NO: 111629 - DNA, 22 bp, Artificial Sequence
  Synthetic oligonucleotide; CTC chr11 5394119 5394140 5394136 5394141 +
agtagaaggtactgagtacctt

SEQ ID NO: 111630 - DNA, 22 bp, Artificial Sequence
  Synthetic oligonucleotide; CTG chr11 5394133 5394154 5394150 5394155 +
agtaccttctattttgcatatc

SEQ ID NO: 111631 - DNA, 22 bp, Artificial Sequence
  Synthetic oligonucleotide; CTT chr11 5394141 5394162 5394158 5394163 +
ctattttgcatatcatggtttt

SEQ ID NO: 111632 - DNA, 22 bp, Artificial Sequence
  Synthetic oligonucleotide; TTC chr11 5394142 5394163 5394159 5394164 +
tattttgcatatcatggttttt

SEQ ID NO: 111633 - DNA, 22 bp, Artificial Sequence
  Synthetic oligonucleotide; CTA chr11 5394144 5394165 5394161 5394166 +
ttttgcatatcatggtttttta

SEQ ID NO: 111634 - DNA, 22 bp, Artificial Sequence
  Synthetic oligonucleotide; TTT chr11 5394147 5394168 5394164 5394169 +
tgcatatcatggttttttaagc

SEQ ID NO: 111635 - DNA, 22 bp, Artificial Sequence
  Synthetic oligonucleotide; TTT chr11 5394148 5394169 5394165 5394170 +
gcatatcatggttttttaagca

SEQ ID NO: 111636 - DNA, 22 bp, Artificial Sequence
  Synthetic oligonucleotide; TTG chr11 5394149 5394170 5394166 5394171 +
catatcatggttttttaagcac

SEQ ID NO: 111637 - DNA, 22 bp, Artificial Sequence
  Synthetic oligonucleotide; TTT chr11 5394162 5394183 5394179 5394184 +
tttaagcacatattataaccta

SEQ ID NO: 111638 - DNA, 22 bp, Artificial Sequence
  Synthetic oligonucleotide; TTT chr11 5394163 5394184 5394180 5394185 +
ttaagcacatattataacctag

SEQ ID NO: 111639 - DNA, 22 bp, Artificial Sequence
  Synthetic oligonucleotide; TTT chr11 5394164 5394185 5394181 5394186 +
taagcacatattataacctagg

SEQ ID NO: 111640 - DNA, 22 bp, Artificial Sequence
  Synthetic oligonucleotide; TTT chr11 5394165 5394186 5394182 5394187 +
aagcacatattataacctaggt

SEQ ID NO: 111641 - DNA, 22 bp, Artificial Sequence
  Synthetic oligonucleotide; TTA chr11 5394166 5394187 5394183 5394188 +
agcacatattataacctaggta

SEQ ID NO: 111642 - DNA, 22 bp, Artificial Sequence
  Synthetic oligonucleotide; TTA chr11 5394177 5394198 5394194 5394199 +
taacctaggtattattctaagg

SEQ ID NO: 111643 - DNA, 22 bp, Artificial Sequence
  Synthetic oligonucleotide; CTA chr11 5394184 5394205 5394201 5394206 +
ggtattattctaagggcataat

SEQ ID NO: 111644 - DNA, 22 bp, Artificial Sequence
  Synthetic oligonucleotide; TTA chr11 5394191 5394212 5394208 5394213 +
ttctaagggcataatacactat

SEQ ID NO: 111645 - DNA, 22 bp, Artificial Sequence
  Synthetic oligonucleotide; TTC chr11 5394194 5394215 5394211 5394216 +
taagggcataatacactataag

SEQ ID NO: 111646 - DNA, 22 bp, Artificial Sequence
  Synthetic oligonucleotide; CTA chr11 5394196 5394217 5394213 5394218 +
agggcataatacactataagtc

SEQ ID NO: 111647 - DNA, 22 bp, Artificial Sequence
  Synthetic oligonucleotide; CTA chr11 5394212 5394233 5394229 5394234 +
taagtcactttatcttgacaat

SEQ ID NO: 111648 - DNA, 22 bp, Artificial Sequence
  Synthetic oligonucleotide; CTT chr11 5394222 5394243 5394239 5394244 +
tatcttgacaataaccttatga

SEQ ID NO: 111649 - DNA, 22 bp, Artificial Sequence
  Synthetic oligonucleotide; TTT chr11 5394223 5394244 5394240 5394245 +
atcttgacaataaccttatgag

SEQ ID NO: 111650 - DNA, 22 bp, Artificial Sequence
  Synthetic oligonucleotide; TTA chr11 5394224 5394245 5394241 5394246 +
tcttgacaataaccttatgaga

SEQ ID NO: 111651 - DNA, 22 bp, Artificial Sequence
  Synthetic oligonucleotide; CTT chr11 5394228 5394249 5394245 5394250 +
gacaataaccttatgagatgga

SEQ ID NO: 111652 - DNA, 22 bp, Artificial Sequence
  Synthetic oligonucleotide; TTG chr11 5394229 5394250 5394246 5394251 +
acaataaccttatgagatggat

SEQ ID NO: 111653 - DNA, 22 bp, Artificial Sequence
  Synthetic oligonucleotide; CTT chr11 5394240 5394261 5394257 5394262 +
atgagatggatactactagatt

SEQ ID NO: 111654 - DNA, 22 bp, Artificial Sequence
  Synthetic oligonucleotide; TTA chr11 5394241 5394262 5394258 5394263 +
tgagatggatactactagatta

SEQ ID NO: 111655 - DNA, 22 bp, Artificial Sequence
  Synthetic oligonucleotide; CTA chr11 5394255 5394276 5394272 5394277 +
ctagattacccattttacagat

SEQ ID NO: 111656 - DNA, 22 bp, Artificial Sequence
  Synthetic oligonucleotide; CTA chr11 5394258 5394279 5394275 5394280 +
gattacccattttacagataag

SEQ ID NO: 111657 - DNA, 22 bp, Artificial Sequence
  Synthetic oligonucleotide; TTA chr11 5394263 5394284 5394280 5394285 +
cccattttacagataagtacac

SEQ ID NO: 111658 - DNA, 22 bp, Artificial Sequence
  Synthetic oligonucleotide; TTT chr11 5394270 5394291 5394287 5394292 +
tacagataagtacactgaggct

SEQ ID NO: 111659 - DNA, 22 bp, Artificial Sequence
  Synthetic oligonucleotide; TTT chr11 5394271 5394292 5394288 5394293 +
acagataagtacactgaggctc

SEQ ID NO: 111660 - DNA, 22 bp, Artificial Sequence
  Synthetic oligonucleotide; TTA chr11 5394272 5394293 5394289 5394294 +
cagataagtacactgaggctca

SEQ ID NO: 111661 - DNA, 22 bp, Artificial Sequence
  Synthetic oligonucleotide; CTG chr11 5394287 5394308 5394304 5394309 +
aggctcagagacaaaatatctt

SEQ ID NO: 111662 - DNA, 22 bp, Artificial Sequence
  Synthetic oligonucleotide; CTC chr11 5394293 5394314 5394310 5394315 +
agagacaaaatatcttgcccaa

SEQ ID NO: 111663 - DNA, 22 bp, Artificial Sequence
  Synthetic oligonucleotide; CTT chr11 5394309 5394330 5394326 5394331 +
gcccaatattataccaagtttg

SEQ ID NO: 111664 - DNA, 22 bp, Artificial Sequence
  Synthetic oligonucleotide; TTG chr11 5394310 5394331 5394327 5394332 +
cccaatattataccaagtttga

SEQ ID NO: 111665 - DNA, 22 bp, Artificial Sequence
  Synthetic oligonucleotide; TTA chr11 5394320 5394341 5394337 5394342 +
taccaagtttgacagttctgac

SEQ ID NO: 111666 - DNA, 22 bp, Artificial Sequence
  Synthetic oligonucleotide; TTT chr11 5394330 5394351 5394347 5394352 +
gacagttctgactgtggtgctt

SEQ ID NO: 111667 - DNA, 22 bp, Artificial Sequence
  Synthetic oligonucleotide; TTG chr11 5394331 5394352 5394348 5394353 +
acagttctgactgtggtgcttg

SEQ ID NO: 111668 - DNA, 22 bp, Artificial Sequence
  Synthetic oligonucleotide; TTC chr11 5394338 5394359 5394355 5394360 +
tgactgtggtgcttgtagtttt

SEQ ID NO: 111669 - DNA, 22 bp, Artificial Sequence
  Synthetic oligonucleotide; CTG chr11 5394340 5394361 5394357 5394362 +
actgtggtgcttgtagttttaa

SEQ ID NO: 111670 - DNA, 22 bp, Artificial Sequence
  Synthetic oligonucleotide; CTG chr11 5394344 5394365 5394361 5394366 +
tggtgcttgtagttttaactat

SEQ ID NO: 111671 - DNA, 22 bp, Artificial Sequence
  Synthetic oligonucleotide; CTT chr11 5394352 5394373 5394369 5394374 +
gtagttttaactatgctccact

SEQ ID NO: 111672 - DNA, 22 bp, Artificial Sequence
  Synthetic oligonucleotide; TTG chr11 5394353 5394374 5394370 5394375 +
tagttttaactatgctccactg

SEQ ID NO: 111673 - DNA, 22 bp, Artificial Sequence
  Synthetic oligonucleotide; TTT chr11 5394359 5394380 5394376 5394381 +
taactatgctccactgattcaa

SEQ ID NO: 111674 - DNA, 22 bp, Artificial Sequence
  Synthetic oligonucleotide; TTT chr11 5394360 5394381 5394377 5394382 +
aactatgctccactgattcaac

SEQ ID NO: 111675 - DNA, 22 bp, Artificial Sequence
  Synthetic oligonucleotide; TTA chr11 5394361 5394382 5394378 5394383 +
actatgctccactgattcaaca

SEQ ID NO: 111676 - DNA, 22 bp, Artificial Sequence
  Synthetic oligonucleotide; CTA chr11 5394365 5394386 5394382 5394387 +
tgctccactgattcaacaacaa

SEQ ID NO: 111677 - DNA, 22 bp, Artificial Sequence
  Synthetic oligonucleotide; CTC chr11 5394370 5394391 5394387 5394392 +
cactgattcaacaacaacaaca

SEQ ID NO: 111678 - DNA, 22 bp, Artificial Sequence
  Synthetic oligonucleotide; CTG chr11 5394375 5394396 5394392 5394397 +
attcaacaacaacaacaaacca

SEQ ID NO: 111679 - DNA, 22 bp, Artificial Sequence
  Synthetic oligonucleotide; TTC chr11 5394379 5394400 5394396 5394401 +
aacaacaacaacaaaccaaaaa

SEQ ID NO: 111680 - DNA, 22 bp, Artificial Sequence
  Synthetic oligonucleotide; CTG chr11 5394424 5394445 5394441 5394446 +
tacatattcctgctaatgacag

SEQ ID NO: 111681 - DNA, 22 bp, Artificial Sequence
  Synthetic oligonucleotide; TTC chr11 5394433 5394454 5394450 5394455 +
ctgctaatgacagtatctgctt

SEQ ID NO: 111682 - DNA, 22 bp, Artificial Sequence
  Synthetic oligonucleotide; CTG chr11 5394436 5394457 5394453 5394458 +
ctaatgacagtatctgctttaa

SEQ ID NO: 111683 - DNA, 22 bp, Artificial Sequence
  Synthetic oligonucleotide; CTA chr11 5394439 5394460 5394456 5394461 +
atgacagtatctgctttaaatc

SEQ ID NO: 111684 - DNA, 22 bp, Artificial Sequence
  Synthetic oligonucleotide; CTG chr11 5394452 5394473 5394469 5394474 +
ctttaaatcatctggcccattc

SEQ ID NO: 111685 - DNA, 22 bp, Artificial Sequence
  Synthetic oligonucleotide; CTT chr11 5394455 5394476 5394472 5394477 +
taaatcatctggcccattcctc

SEQ ID NO: 111686 - DNA, 22 bp, Artificial Sequence
  Synthetic oligonucleotide; TTT chr11 5394456 5394477 5394473 5394478 +
aaatcatctggcccattcctca

SEQ ID NO: 111687 - DNA, 22 bp, Artificial Sequence
  Synthetic oligonucleotide; TTA chr11 5394457 5394478 5394474 5394479 +
aatcatctggcccattcctcag

SEQ ID NO: 111688 - DNA, 22 bp, Artificial Sequence
  Synthetic oligonucleotide; CTG chr11 5394466 5394487 5394483 5394488 +
gcccattcctcagcacaagcct

SEQ ID NO: 111689 - DNA, 22 bp, Artificial Sequence
  Synthetic oligonucleotide; TTC chr11 5394474 5394495 5394491 5394496 +
ctcagcacaagcctatattcct

SEQ ID NO: 111690 - DNA, 22 bp, Artificial Sequence
  Synthetic oligonucleotide; CTC chr11 5394477 5394498 5394494 5394499 +
agcacaagcctatattcctgca

SEQ ID NO: 111691 - DNA, 22 bp, Artificial Sequence
  Synthetic oligonucleotide; CTA chr11 5394489 5394510 5394506 5394511 +
tattcctgcaggcaaaaatctt

SEQ ID NO: 111692 - DNA, 22 bp, Artificial Sequence
  Synthetic oligonucleotide; TTC chr11 5394494 5394515 5394511 5394516 +
ctgcaggcaaaaatctttacaa

SEQ ID NO: 111693 - DNA, 22 bp, Artificial Sequence
  Synthetic oligonucleotide; CTG chr11 5394497 5394518 5394514 5394519 +
caggcaaaaatctttacaacta

SEQ ID NO: 111694 - DNA, 22 bp, Artificial Sequence
  Synthetic oligonucleotide; CTT chr11 5394511 5394532 5394528 5394533 +
tacaactatcccgttatttaat

SEQ ID NO: 111695 - DNA, 22 bp, Artificial Sequence
  Synthetic oligonucleotide; TTT chr11 5394512 5394533 5394529 5394534 +
acaactatcccgttatttaata

SEQ ID NO: 111696 - DNA, 22 bp, Artificial Sequence
  Synthetic oligonucleotide; TTA chr11 5394513 5394534 5394530 5394535 +
caactatcccgttatttaatat

SEQ ID NO: 111697 - DNA, 22 bp, Artificial Sequence
  Synthetic oligonucleotide; CTA chr11 5394519 5394540 5394536 5394541 +
tcccgttatttaatatccacaa

SEQ ID NO: 111698 - DNA, 22 bp, Artificial Sequence
  Synthetic oligonucleotide; TTA chr11 5394527 5394548 5394544 5394549 +
tttaatatccacaagcctctct

SEQ ID NO: 111699 - DNA, 22 bp, Artificial Sequence
  Synthetic oligonucleotide; TTT chr11 5394530 5394551 5394547 5394552 +
aatatccacaagcctctctaag

SEQ ID NO: 111700 - DNA, 22 bp, Artificial Sequence
  Synthetic oligonucleotide; TTA chr11 5394531 5394552 5394548 5394553 +
atatccacaagcctctctaagc

SEQ ID NO: 111701 - DNA, 22 bp, Artificial Sequence
  Synthetic oligonucleotide; CTC chr11 5394546 5394567 5394563 5394568 +
tctaagcctttgaaattgatac

SEQ ID NO: 111702 - DNA, 22 bp, Artificial Sequence
  Synthetic oligonucleotide; CTC chr11 5394548 5394569 5394565 5394570 +
taagcctttgaaattgatactg

SEQ ID NO: 111703 - DNA, 22 bp, Artificial Sequence
  Synthetic oligonucleotide; CTA chr11 5394550 5394571 5394567 5394572 +
agcctttgaaattgatactgta

SEQ ID NO: 111704 - DNA, 22 bp, Artificial Sequence
  Synthetic oligonucleotide; CTT chr11 5394556 5394577 5394573 5394578 +
tgaaattgatactgtatttgta

SEQ ID NO: 111705 - DNA, 22 bp, Artificial Sequence
  Synthetic oligonucleotide; TTT chr11 5394557 5394578 5394574 5394579 +
gaaattgatactgtatttgtaa

SEQ ID NO: 111706 - DNA, 22 bp, Artificial Sequence
  Synthetic oligonucleotide; TTG chr11 5394558 5394579 5394575 5394580 +
aaattgatactgtatttgtaaa

SEQ ID NO: 111707 - DNA, 22 bp, Artificial Sequence
  Synthetic oligonucleotide; TTG chr11 5394564 5394585 5394581 5394586 +
atactgtatttgtaaaacacag

SEQ ID NO: 111708 - DNA, 22 bp, Artificial Sequence
  Synthetic oligonucleotide; CTG chr11 5394570 5394591 5394587 5394592 +
tatttgtaaaacacagatggct

SEQ ID NO: 111709 - DNA, 22 bp, Artificial Sequence
  Synthetic oligonucleotide; TTT chr11 5394575 5394596 5394592 5394597 +
gtaaaacacagatggctcatgt

SEQ ID NO: 111710 - DNA, 22 bp, Artificial Sequence
  Synthetic oligonucleotide; TTG chr11 5394576 5394597 5394593 5394598 +
taaaacacagatggctcatgta

SEQ ID NO: 111711 - DNA, 22 bp, Artificial Sequence
  Synthetic oligonucleotide; CTC chr11 5394593 5394614 5394610 5394615 +
atgtaattgaagttcacagaat

SEQ ID NO: 111712 - DNA, 22 bp, Artificial Sequence
  Synthetic oligonucleotide; TTG chr11 5394602 5394623 5394619 5394624 +
aagttcacagaattttatgttt

SEQ ID NO: 111713 - DNA, 22 bp, Artificial Sequence
  Synthetic oligonucleotide; TTC chr11 5394608 5394629 5394625 5394630 +
acagaattttatgttttgcttt

SEQ ID NO: 111714 - DNA, 22 bp, Artificial Sequence
  Synthetic oligonucleotide; TTT chr11 5394617 5394638 5394634 5394639 +
tatgttttgctttgtgacaact

SEQ ID NO: 111715 - DNA, 22 bp, Artificial Sequence
  Synthetic oligonucleotide; TTT chr11 5394618 5394639 5394635 5394640 +
atgttttgctttgtgacaactc

SEQ ID NO: 111716 - DNA, 22 bp, Artificial Sequence
  Synthetic oligonucleotide; TTA chr11 5394619 5394640 5394636 5394641 +
tgttttgctttgtgacaactct

SEQ ID NO: 111717 - DNA, 22 bp, Artificial Sequence
  Synthetic oligonucleotide; TTT chr11 5394624 5394645 5394641 5394646 +
tgctttgtgacaactctgagcc

SEQ ID NO: 111718 - DNA, 22 bp, Artificial Sequence
  Synthetic oligonucleotide; TTT chr11 5394625 5394646 5394642 5394647 +
gctttgtgacaactctgagcct

SEQ ID NO: 111719 - DNA, 22 bp, Artificial Sequence
  Synthetic oligonucleotide; TTG chr11 5394626 5394647 5394643 5394648 +
ctttgtgacaactctgagcctt

SEQ ID NO: 111720 - DNA, 22 bp, Artificial Sequence
  Synthetic oligonucleotide; CTT chr11 5394629 5394650 5394646 5394651 +
tgtgacaactctgagcctttgt

SEQ ID NO: 111721 - DNA, 22 bp, Artificial Sequence
  Synthetic oligonucleotide; TTT chr11 5394630 5394651 5394647 5394652 +
gtgacaactctgagcctttgta

SEQ ID NO: 111722 - DNA, 22 bp, Artificial Sequence
  Synthetic oligonucleotide; TTG chr11 5394631 5394652 5394648 5394653 +
tgacaactctgagcctttgtac

SEQ ID NO: 111723 - DNA, 22 bp, Artificial Sequence
  Synthetic oligonucleotide; CTC chr11 5394640 5394661 5394657 5394662 +
tgagcctttgtacatgttttcc

SEQ ID NO: 111724 - DNA, 22 bp, Artificial Sequence
  Synthetic oligonucleotide; CTG chr11 5394642 5394663 5394659 5394664 +
agcctttgtacatgttttcccc

SEQ ID NO: 111725 - DNA, 22 bp, Artificial Sequence
  Synthetic oligonucleotide; CTT chr11 5394648 5394669 5394665 5394670 +
tgtacatgttttcccctctatc

SEQ ID NO: 111726 - DNA, 22 bp, Artificial Sequence
  Synthetic oligonucleotide; TTT chr11 5394649 5394670 5394666 5394671 +
gtacatgttttcccctctatct

SEQ ID NO: 111727 - DNA, 22 bp, Artificial Sequence
  Synthetic oligonucleotide; TTG chr11 5394650 5394671 5394667 5394672 +
tacatgttttcccctctatcta

SEQ ID NO: 111728 - DNA, 22 bp, Artificial Sequence
  Synthetic oligonucleotide; TTT chr11 5394659 5394680 5394676 5394681 +
tcccctctatctaaaatgttac

SEQ ID NO: 111729 - DNA, 22 bp, Artificial Sequence
  Synthetic oligonucleotide; TTT chr11 5394660 5394681 5394677 5394682 +
cccctctatctaaaatgttacc

SEQ ID NO: 111730 - DNA, 22 bp, Artificial Sequence
  Synthetic oligonucleotide; TTC chr11 5394661 5394682 5394678 5394683 +
ccctctatctaaaatgttacct

SEQ ID NO: 111731 - DNA, 22 bp, Artificial Sequence
  Synthetic oligonucleotide; CTC chr11 5394666 5394687 5394683 5394688 +
tatctaaaatgttacctatttt

SEQ ID NO: 111732 - DNA, 22 bp, Artificial Sequence
  Synthetic oligonucleotide; CTA chr11 5394668 5394689 5394685 5394690 +
tctaaaatgttacctattttga

SEQ ID NO: 111733 - DNA, 22 bp, Artificial Sequence
  Synthetic oligonucleotide; CTA chr11 5394672 5394693 5394689 5394694 +
aaatgttacctattttgaatga

SEQ ID NO: 111734 - DNA, 22 bp, Artificial Sequence
  Synthetic oligonucleotide; TTA chr11 5394680 5394701 5394697 5394702 +
cctattttgaatgatagtgcag

SEQ ID NO: 111735 - DNA, 22 bp, Artificial Sequence
  Synthetic oligonucleotide; CTA chr11 5394684 5394705 5394701 5394706 +
ttttgaatgatagtgcagacat

SEQ ID NO: 111736 - DNA, 22 bp, Artificial Sequence
  Synthetic oligonucleotide; TTT chr11 5394687 5394708 5394704 5394709 +
tgaatgatagtgcagacattag

SEQ ID NO: 111737 - DNA, 22 bp, Artificial Sequence
  Synthetic oligonucleotide; TTT chr11 5394688 5394709 5394705 5394710 +
gaatgatagtgcagacattagt

SEQ ID NO: 111738 - DNA, 22 bp, Artificial Sequence
  Synthetic oligonucleotide; TTG chr11 5394689 5394710 5394706 5394711 +
aatgatagtgcagacattagta

SEQ ID NO: 111739 - DNA, 22 bp, Artificial Sequence
  Synthetic oligonucleotide; TTA chr11 5394708 5394729 5394725 5394730 +
gtaaggaaagcttgctaaatat

SEQ ID NO: 111740 - DNA, 22 bp, Artificial Sequence
  Synthetic oligonucleotide; CTT chr11 5394721 5394742 5394738 5394743 +
gctaaatatttgtatcacctgg

SEQ ID NO: 111741 - DNA, 22 bp, Artificial Sequence
  Synthetic oligonucleotide; TTG chr11 5394722 5394743 5394739 5394744 +
ctaaatatttgtatcacctggg

SEQ ID NO: 111742 - DNA, 22 bp, Artificial Sequence
  Synthetic oligonucleotide; CTA chr11 5394725 5394746 5394742 5394747 +
aatatttgtatcacctgggaag

SEQ ID NO: 111743 - DNA, 22 bp, Artificial Sequence
  Synthetic oligonucleotide; TTT chr11 5394732 5394753 5394749 5394754 +
gtatcacctgggaagcctgttt

SEQ ID NO: 111744 - DNA, 22 bp, Artificial Sequence
  Synthetic oligonucleotide; TTG chr11 5394733 5394754 5394750 5394755 +
tatcacctgggaagcctgtttt

SEQ ID NO: 111745 - DNA, 22 bp, Artificial Sequence
  Synthetic oligonucleotide; CTG chr11 5394742 5394763 5394759 5394764 +
ggaagcctgtttttgcttcatc

SEQ ID NO: 111746 - DNA, 22 bp, Artificial Sequence
  Synthetic oligonucleotide; CTG chr11 5394751 5394772 5394768 5394773 +
tttttgcttcatcaggggacgt

SEQ ID NO: 111747 - DNA, 22 bp, Artificial Sequence
  Synthetic oligonucleotide; TTT chr11 5394754 5394775 5394771 5394776 +
ttgcttcatcaggggacgttag

SEQ ID NO: 111748 - DNA, 22 bp, Artificial Sequence
  Synthetic oligonucleotide; TTT chr11 5394755 5394776 5394772 5394777 +
tgcttcatcaggggacgttagt

SEQ ID NO: 111749 - DNA, 22 bp, Artificial Sequence
  Synthetic oligonucleotide; TTT chr11 5394756 5394777 5394773 5394778 +
gcttcatcaggggacgttagtt

SEQ ID NO: 111750 - DNA, 22 bp, Artificial Sequence
  Synthetic oligonucleotide; TTG chr11 5394757 5394778 5394774 5394779 +
cttcatcaggggacgttagttt

SEQ ID NO: 111751 - DNA, 22 bp, Artificial Sequence
  Synthetic oligonucleotide; CTT chr11 5394760 5394781 5394777 5394782 +
catcaggggacgttagtttttt

SEQ ID NO: 111752 - DNA, 22 bp, Artificial Sequence
  Synthetic oligonucleotide; TTC chr11 5394761 5394782 5394778 5394783 +
atcaggggacgttagttttttt

SEQ ID NO: 111753 - DNA, 22 bp, Artificial Sequence
  Synthetic oligonucleotide; TTA chr11 5394775 5394796 5394792 5394797 +
gtttttttcacatcaacctcct

SEQ ID NO: 111754 - DNA, 22 bp, Artificial Sequence
  Synthetic oligonucleotide; TTT chr11 5394779 5394800 5394796 5394801 +
ttttcacatcaacctcctgcag

SEQ ID NO: 111755 - DNA, 22 bp, Artificial Sequence
  Synthetic oligonucleotide; TTT chr11 5394780 5394801 5394797 5394802 +
tttcacatcaacctcctgcaga

SEQ ID NO: 111756 - DNA, 22 bp, Artificial Sequence
  Synthetic oligonucleotide; TTT chr11 5394781 5394802 5394798 5394803 +
ttcacatcaacctcctgcagaa

SEQ ID NO: 111757 - DNA, 22 bp, Artificial Sequence
  Synthetic oligonucleotide; TTT chr11 5394782 5394803 5394799 5394804 +
tcacatcaacctcctgcagaag

SEQ ID NO: 111758 - DNA, 22 bp, Artificial Sequence
  Synthetic oligonucleotide; TTT chr11 5394783 5394804 5394800 5394805 +
cacatcaacctcctgcagaaga

SEQ ID NO: 111759 - DNA, 22 bp, Artificial Sequence
  Synthetic oligonucleotide; TTC chr11 5394784 5394805 5394801 5394806 +
acatcaacctcctgcagaagac

SEQ ID NO: 111760 - DNA, 22 bp, Artificial Sequence
  Synthetic oligonucleotide; CTC chr11 5394795 5394816 5394812 5394817 +
ctgcagaagacaatgctttctg

SEQ ID NO: 111761 - DNA, 22 bp, Artificial Sequence
  Synthetic oligonucleotide; CTG chr11 5394798 5394819 5394815 5394820 +
cagaagacaatgctttctgaaa

SEQ ID NO: 111762 - DNA, 22 bp, Artificial Sequence
  Synthetic oligonucleotide; CTT chr11 5394813 5394834 5394830 5394835 +
tctgaaagacagagtttgtgtc

SEQ ID NO: 111763 - DNA, 22 bp, Artificial Sequence
  Synthetic oligonucleotide; TTT chr11 5394814 5394835 5394831 5394836 +
ctgaaagacagagtttgtgtct

SEQ ID NO: 111764 - DNA, 22 bp, Artificial Sequence
  Synthetic oligonucleotide; TTC chr11 5394815 5394836 5394832 5394837 +
tgaaagacagagtttgtgtctt

SEQ ID NO: 111765 - DNA, 22 bp, Artificial Sequence
  Synthetic oligonucleotide; CTG chr11 5394817 5394838 5394834 5394839 +
aaagacagagtttgtgtcttat

SEQ ID NO: 111766 - DNA, 22 bp, Artificial Sequence
  Synthetic oligonucleotide; TTT chr11 5394830 5394851 5394847 5394852 +
gtgtcttattaatgcttgcatt

SEQ ID NO: 111767 - DNA, 22 bp, Artificial Sequence
  Synthetic oligonucleotide; TTG chr11 5394831 5394852 5394848 5394853 +
tgtcttattaatgcttgcattc

SEQ ID NO: 111768 - DNA, 22 bp, Artificial Sequence
  Synthetic oligonucleotide; CTT chr11 5394837 5394858 5394854 5394859 +
attaatgcttgcattcaaatat

SEQ ID NO: 111769 - DNA, 22 bp, Artificial Sequence
  Synthetic oligonucleotide; TTA chr11 5394838 5394859 5394855 5394860 +
ttaatgcttgcattcaaatatc

SEQ ID NO: 111770 - DNA, 22 bp, Artificial Sequence
  Synthetic oligonucleotide; TTA chr11 5394841 5394862 5394858 5394863 +
atgcttgcattcaaatatctga

SEQ ID NO: 111771 - DNA, 22 bp, Artificial Sequence
  Synthetic oligonucleotide; CTT chr11 5394847 5394868 5394864 5394869 +
gcattcaaatatctgacccaaa

SEQ ID NO: 111772 - DNA, 22 bp, Artificial Sequence
  Synthetic oligonucleotide; TTG chr11 5394848 5394869 5394865 5394870 +
cattcaaatatctgacccaaag

SEQ ID NO: 111773 - DNA, 22 bp, Artificial Sequence
  Synthetic oligonucleotide; TTC chr11 5394853 5394874 5394870 5394875 +
aaatatctgacccaaagcttgt

SEQ ID NO: 111774 - DNA, 22 bp, Artificial Sequence
  Synthetic oligonucleotide; CTG chr11 5394862 5394883 5394879 5394884 +
acccaaagcttgtgatctttac

SEQ ID NO: 111775 - DNA, 22 bp, Artificial Sequence
  Synthetic oligonucleotide; CTT chr11 5394873 5394894 5394890 5394895 +
gtgatctttacatacttgctca

SEQ ID NO: 111776 - DNA, 22 bp, Artificial Sequence
  Synthetic oligonucleotide; TTG chr11 5394874 5394895 5394891 5394896 +
tgatctttacatacttgctcag

SEQ ID NO: 111777 - DNA, 22 bp, Artificial Sequence
  Synthetic oligonucleotide; CTT chr11 5394881 5394902 5394898 5394903 +
tacatacttgctcagtgaatga

SEQ ID NO: 111778 - DNA, 22 bp, Artificial Sequence
  Synthetic oligonucleotide; TTT chr11 5394882 5394903 5394899 5394904 +
acatacttgctcagtgaatgac

SEQ ID NO: 111779 - DNA, 22 bp, Artificial Sequence
  Synthetic oligonucleotide; TTA chr11 5394883 5394904 5394900 5394905 +
catacttgctcagtgaatgaca

SEQ ID NO: 111780 - DNA, 22 bp, Artificial Sequence
  Synthetic oligonucleotide; CTT chr11 5394890 5394911 5394907 5394912 +
gctcagtgaatgacagtgaata

SEQ ID NO: 111781 - DNA, 22 bp, Artificial Sequence
  Synthetic oligonucleotide; TTG chr11 5394891 5394912 5394908 5394913 +
ctcagtgaatgacagtgaataa

SEQ ID NO: 111782 - DNA, 22 bp, Artificial Sequence
  Synthetic oligonucleotide; CTC chr11 5394894 5394915 5394911 5394916 +
agtgaatgacagtgaataacta

SEQ ID NO: 111783 - DNA, 22 bp, Artificial Sequence
  Synthetic oligonucleotide; CTA chr11 5394916 5394937 5394933 5394938 +
cctggttgtaaagactgtctca

SEQ ID NO: 111784 - DNA, 22 bp, Artificial Sequence
  Synthetic oligonucleotide; CTG chr11 5394920 5394941 5394937 5394942 +
gttgtaaagactgtctcaaggg

SEQ ID NO: 111785 - DNA, 22 bp, Artificial Sequence
  Synthetic oligonucleotide; TTG chr11 5394924 5394945 5394941 5394946 +
taaagactgtctcaaggggact

SEQ ID NO: 111786 - DNA, 22 bp, Artificial Sequence
  Synthetic oligonucleotide; CTG chr11 5394933 5394954 5394950 5394955 +
tctcaaggggacttttgtctgg

SEQ ID NO: 111787 - DNA, 22 bp, Artificial Sequence
  Synthetic oligonucleotide; CTC chr11 5394937 5394958 5394954 5394959 +
aaggggacttttgtctgggaaa

SEQ ID NO: 111788 - DNA, 22 bp, Artificial Sequence
  Synthetic oligonucleotide; CTT chr11 5394947 5394968 5394964 5394969 +
ttgtctgggaaaagaaaagaaa

SEQ ID NO: 111789 - DNA, 22 bp, Artificial Sequence
  Synthetic oligonucleotide; TTT chr11 5394948 5394969 5394965 5394970 +
tgtctgggaaaagaaaagaaag

SEQ ID NO: 111790 - DNA, 22 bp, Artificial Sequence
  Synthetic oligonucleotide; TTT chr11 5394949 5394970 5394966 5394971 +
gtctgggaaaagaaaagaaaga

SEQ ID NO: 111791 - DNA, 22 bp, Artificial Sequence
  Synthetic oligonucleotide; TTG chr11 5394950 5394971 5394967 5394972 +
tctgggaaaagaaaagaaagac

SEQ ID NO: 111792 - DNA, 22 bp, Artificial Sequence
  Synthetic oligonucleotide; CTG chr11 5394954 5394975 5394971 5394976 +
ggaaaagaaaagaaagacaaaa

SEQ ID NO: 111793 - DNA, 22 bp, Artificial Sequence
  Synthetic oligonucleotide; TTG chr11 5394986 5395007 5395003 5395008 +
agaagcacccaataaattttct

SEQ ID NO: 111794 - DNA, 22 bp, Artificial Sequence
  Synthetic oligonucleotide; TTT chr11 5395005 5395026 5395022 5395027 +
tcttatgaagttggcagctggg

SEQ ID NO: 111795 - DNA, 22 bp, Artificial Sequence
  Synthetic oligonucleotide; TTT chr11 5395006 5395027 5395023 5395028 +
cttatgaagttggcagctgggg

SEQ ID NO: 111796 - DNA, 22 bp, Artificial Sequence
  Synthetic oligonucleotide; TTC chr11 5395007 5395028 5395024 5395029 +
ttatgaagttggcagctgggga

SEQ ID NO: 111797 - DNA, 22 bp, Artificial Sequence
  Synthetic oligonucleotide; CTT chr11 5395009 5395030 5395026 5395031 +
atgaagttggcagctggggaga

SEQ ID NO: 111798 - DNA, 22 bp, Artificial Sequence
  Synthetic oligonucleotide; TTA chr11 5395010 5395031 5395027 5395032 +
tgaagttggcagctggggagag

SEQ ID NO: 111799 - DNA, 22 bp, Artificial Sequence
  Synthetic oligonucleotide; TTG chr11 5395018 5395039 5395035 5395040 +
gcagctggggagagaagacagt

SEQ ID NO: 111800 - DNA, 22 bp, Artificial Sequence
  Synthetic oligonucleotide; CTG chr11 5395025 5395046 5395042 5395047 +
gggagagaagacagtcaaggat

SEQ ID NO: 111801 - DNA, 22 bp, Artificial Sequence
  Synthetic oligonucleotide; CTC chr11 5395051 5395072 5395068 5395073 +
tggctcactgaaatacctccta

SEQ ID NO: 111802 - DNA, 22 bp, Artificial Sequence
  Synthetic oligonucleotide; CTG chr11 5395053 5395074 5395070 5395075 +
gctcactgaaatacctcctaga

SEQ ID NO: 111803 - DNA, 22 bp, Artificial Sequence
  Synthetic oligonucleotide; CTC chr11 5395057 5395078 5395074 5395079 +
actgaaatacctcctagaggta

SEQ ID NO: 111804 - DNA, 22 bp, Artificial Sequence
  Synthetic oligonucleotide; CTG chr11 5395061 5395082 5395078 5395083 +
aaatacctcctagaggtactca

SEQ ID NO: 111805 - DNA, 22 bp, Artificial Sequence
  Synthetic oligonucleotide; CTC chr11 5395070 5395091 5395087 5395092 +
ctagaggtactcatggttcact

SEQ ID NO: 111806 - DNA, 22 bp, Artificial Sequence
  Synthetic oligonucleotide; CTA chr11 5395073 5395094 5395090 5395095 +
gaggtactcatggttcactaaa

SEQ ID NO: 111807 - DNA, 22 bp, Artificial Sequence
  Synthetic oligonucleotide; CTC chr11 5395082 5395103 5395099 5395104 +
atggttcactaaatttccattt

SEQ ID NO: 111808 - DNA, 22 bp, Artificial Sequence
  Synthetic oligonucleotide; TTC chr11 5395089 5395110 5395106 5395111 +
actaaatttccatttaagataa

SEQ ID NO: 111809 - DNA, 22 bp, Artificial Sequence
  Synthetic oligonucleotide; CTA chr11 5395093 5395114 5395110 5395115 +
aatttccatttaagataactgg

SEQ ID NO: 111810 - DNA, 22 bp, Artificial Sequence
  Synthetic oligonucleotide; TTT chr11 5395098 5395119 5395115 5395120 +
ccatttaagataactgggcatc

SEQ ID NO: 111811 - DNA, 22 bp, Artificial Sequence
  Synthetic oligonucleotide; TTC chr11 5395099 5395120 5395116 5395121 +
catttaagataactgggcatct

SEQ ID NO: 111812 - DNA, 22 bp, Artificial Sequence
  Synthetic oligonucleotide; TTT chr11 5395104 5395125 5395121 5395126 +
aagataactgggcatctcaaat

SEQ ID NO: 111813 - DNA, 22 bp, Artificial Sequence
  Synthetic oligonucleotide; TTA chr11 5395105 5395126 5395122 5395127 +
agataactgggcatctcaaatg

SEQ ID NO: 111814 - DNA, 22 bp, Artificial Sequence
  Synthetic oligonucleotide; CTG chr11 5395114 5395135 5395131 5395136 +
ggcatctcaaatgctttggtct

SEQ ID NO: 111815 - DNA, 22 bp, Artificial Sequence
  Synthetic oligonucleotide; CTC chr11 5395122 5395143 5395139 5395144 +
aaatgctttggtctaggaggat

SEQ ID NO: 111816 - DNA, 22 bp, Artificial Sequence
  Synthetic oligonucleotide; CTT chr11 5395130 5395151 5395147 5395152 +
tggtctaggaggatgctaatcc

SEQ ID NO: 111817 - DNA, 22 bp, Artificial Sequence
  Synthetic oligonucleotide; TTT chr11 5395131 5395152 5395148 5395153 +
ggtctaggaggatgctaatccc

SEQ ID NO: 111818 - DNA, 22 bp, Artificial Sequence
  Synthetic oligonucleotide; TTG chr11 5395132 5395153 5395149 5395154 +
gtctaggaggatgctaatccct

SEQ ID NO: 111819 - DNA, 22 bp, Artificial Sequence
  Synthetic oligonucleotide; CTA chr11 5395137 5395158 5395154 5395159 +
ggaggatgctaatccctctttg

SEQ ID NO: 111820 - DNA, 22 bp, Artificial Sequence
  Synthetic oligonucleotide; CTA chr11 5395148 5395169 5395165 5395170 +
atccctctttgacattcatcaa

SEQ ID NO: 111821 - DNA, 22 bp, Artificial Sequence
  Synthetic oligonucleotide; CTC chr11 5395155 5395176 5395172 5395177 +
tttgacattcatcaagtctgcg

SEQ ID NO: 111822 - DNA, 22 bp, Artificial Sequence
  Synthetic oligonucleotide; CTT chr11 5395157 5395178 5395174 5395179 +
tgacattcatcaagtctgcgtc

SEQ ID NO: 111823 - DNA, 22 bp, Artificial Sequence
  Synthetic oligonucleotide; TTT chr11 5395158 5395179 5395175 5395180 +
gacattcatcaagtctgcgtcc

SEQ ID NO: 111824 - DNA, 22 bp, Artificial Sequence
  Synthetic oligonucleotide; TTG chr11 5395159 5395180 5395176 5395181 +
acattcatcaagtctgcgtcca

SEQ ID NO: 111825 - DNA, 22 bp, Artificial Sequence
  Synthetic oligonucleotide; TTC chr11 5395165 5395186 5395182 5395187 +
atcaagtctgcgtccatctagg

SEQ ID NO: 111826 - DNA, 22 bp, Artificial Sequence
  Synthetic oligonucleotide; CTG chr11 5395175 5395196 5395192 5395197 +
cgtccatctagggagattcctt

SEQ ID NO: 111827 - DNA, 22 bp, Artificial Sequence
  Synthetic oligonucleotide; CTA chr11 5395185 5395206 5395202 5395207 +
gggagattcctttgagggccaa

SEQ ID NO: 111828 - DNA, 22 bp, Artificial Sequence
  Synthetic oligonucleotide; TTC chr11 5395194 5395215 5395211 5395216 +
ctttgagggccaaagacccaag

SEQ ID NO: 111829 - DNA, 22 bp, Artificial Sequence
  Synthetic oligonucleotide; CTT chr11 5395197 5395218 5395214 5395219 +
tgagggccaaagacccaaggaa

SEQ ID NO: 111830 - DNA, 22 bp, Artificial Sequence
  Synthetic oligonucleotide; TTT chr11 5395198 5395219 5395215 5395220 +
gagggccaaagacccaaggaag

SEQ ID NO: 111831 - DNA, 22 bp, Artificial Sequence
  Synthetic oligonucleotide; TTG chr11 5395199 5395220 5395216 5395221 +
agggccaaagacccaaggaaga

SEQ ID NO: 111832 - DNA, 22 bp, Artificial Sequence
  Synthetic oligonucleotide; CTT chr11 5395231 5395252 5395248 5395253 +
tataagtgccagtgcagcccac

SEQ ID NO: 111833 - DNA, 22 bp, Artificial Sequence
  Synthetic oligonucleotide; TTT chr11 5395232 5395253 5395249 5395254 +
ataagtgccagtgcagcccacg

SEQ ID NO: 111834 - DNA, 22 bp, Artificial Sequence
  Synthetic oligonucleotide; TTA chr11 5395233 5395254 5395250 5395255 +
taagtgccagtgcagcccacgt

SEQ ID NO: 111835 - DNA, 22 bp, Artificial Sequence
  Synthetic oligonucleotide; CTG chr11 5395269 5395290 5395286 5395291 +
agtcaaatggaagatgctggca

SEQ ID NO: 111836 - DNA, 22 bp, Artificial Sequence
  Synthetic oligonucleotide; CTG chr11 5395288 5395309 5395305 5395310 +
gcatggagtggaagggctgcat

SEQ ID NO: 111837 - DNA, 22 bp, Artificial Sequence
  Synthetic oligonucleotide; CTG chr11 5395307 5395328 5395324 5395329 +
catgagaaagaagctacagaga

SEQ ID NO: 111838 - DNA, 22 bp, Artificial Sequence
  Synthetic oligonucleotide; CTA chr11 5395323 5395344 5395340 5395345 +
cagagaagaaaggaccagtaag

SEQ ID NO: 111839 - DNA, 22 bp, Artificial Sequence
  Synthetic oligonucleotide; TTG chr11 5395348 5395369 5395365 5395370 +
ctgaaggtcctttgttttgtgg

SEQ ID NO: 111840 - DNA, 22 bp, Artificial Sequence
  Synthetic oligonucleotide; CTG chr11 5395351 5395372 5395368 5395373 +
aaggtcctttgttttgtggata

SEQ ID NO: 111841 - DNA, 22 bp, Artificial Sequence
  Synthetic oligonucleotide; CTT chr11 5395360 5395381 5395377 5395382 +
tgttttgtggataaaggaagtc

SEQ ID NO: 111842 - DNA, 22 bp, Artificial Sequence
  Synthetic oligonucleotide; TTT chr11 5395361 5395382 5395378 5395383 +
gttttgtggataaaggaagtca

SEQ ID NO: 111843 - DNA, 22 bp, Artificial Sequence
  Synthetic oligonucleotide; TTG chr11 5395362 5395383 5395379 5395384 +
ttttgtggataaaggaagtcat

SEQ ID NO: 111844 - DNA, 22 bp, Artificial Sequence
  Synthetic oligonucleotide; TTT chr11 5395365 5395386 5395382 5395387 +
tgtggataaaggaagtcattgg

SEQ ID NO: 111845 - DNA, 22 bp, Artificial Sequence
  Synthetic oligonucleotide; TTT chr11 5395366 5395387 5395383 5395388 +
gtggataaaggaagtcattgga

SEQ ID NO: 111846 - DNA, 22 bp, Artificial Sequence
  Synthetic oligonucleotide; TTG chr11 5395367 5395388 5395384 5395389 +
tggataaaggaagtcattggag

SEQ ID NO: 111847 - DNA, 22 bp, Artificial Sequence
  Synthetic oligonucleotide; TTG chr11 5395386 5395407 5395403 5395408 +
gagtgacctctctaatatccct

SEQ ID NO: 111848 - DNA, 22 bp, Artificial Sequence
  Synthetic oligonucleotide; CTC chr11 5395396 5395417 5395413 5395418 +
tctaatatcccttatctagcat

SEQ ID NO: 111849 - DNA, 22 bp, Artificial Sequence
  Synthetic oligonucleotide; CTC chr11 5395398 5395419 5395415 5395420 +
taatatcccttatctagcatga

SEQ ID NO: 111850 - DNA, 22 bp, Artificial Sequence
  Synthetic oligonucleotide; CTA chr11 5395400 5395421 5395417 5395422 +
atatcccttatctagcatgact

SEQ ID NO: 111851 - DNA, 22 bp, Artificial Sequence
  Synthetic oligonucleotide; CTT chr11 5395409 5395430 5395426 5395431 +
atctagcatgactatatgcagg

SEQ ID NO: 111852 - DNA, 22 bp, Artificial Sequence
  Synthetic oligonucleotide; TTA chr11 5395410 5395431 5395427 5395432 +
tctagcatgactatatgcaggg

SEQ ID NO: 111853 - DNA, 22 bp, Artificial Sequence
  Synthetic oligonucleotide; CTA chr11 5395414 5395435 5395431 5395436 +
gcatgactatatgcagggttat

SEQ ID NO: 111854 - DNA, 22 bp, Artificial Sequence
  Synthetic oligonucleotide; CTA chr11 5395423 5395444 5395440 5395445 +
tatgcagggttatggaataggg

SEQ ID NO: 111855 - DNA, 22 bp, Artificial Sequence
  Synthetic oligonucleotide; TTA chr11 5395435 5395456 5395452 5395457 +
tggaatagggcagcttccagga

SEQ ID NO: 111856 - DNA, 22 bp, Artificial Sequence
  Synthetic oligonucleotide; CTT chr11 5395451 5395472 5395468 5395473 +
ccaggaagatggccaatctgtt

SEQ ID NO: 111857 - DNA, 22 bp, Artificial Sequence
  Synthetic oligonucleotide; TTC chr11 5395452 5395473 5395469 5395474 +
caggaagatggccaatctgttg

SEQ ID NO: 111858 - DNA, 22 bp, Artificial Sequence
  Synthetic oligonucleotide; CTG chr11 5395471 5395492 5395488 5395493 +
ttgttagggctgctgttctatc

SEQ ID NO: 111859 - DNA, 22 bp, Artificial Sequence
  Synthetic oligonucleotide; TTG chr11 5395474 5395495 5395491 5395496 +
ttagggctgctgttctatcata

SEQ ID NO: 111860 - DNA, 22 bp, Artificial Sequence
  Synthetic oligonucleotide; TTA chr11 5395477 5395498 5395494 5395499 +
gggctgctgttctatcatatct

SEQ ID NO: 111861 - DNA, 22 bp, Artificial Sequence
  Synthetic oligonucleotide; CTG chr11 5395483 5395504 5395500 5395505 +
ctgttctatcatatctcccgtg

SEQ ID NO: 111862 - DNA, 22 bp, Artificial Sequence
  Synthetic oligonucleotide; CTG chr11 5395486 5395507 5395503 5395508 +
ttctatcatatctcccgtgatg

SEQ ID NO: 111863 - DNA, 22 bp, Artificial Sequence
  Synthetic oligonucleotide; TTC chr11 5395489 5395510 5395506 5395511 +
tatcatatctcccgtgatgttt

SEQ ID NO: 111864 - DNA, 22 bp, Artificial Sequence
  Synthetic oligonucleotide; CTA chr11 5395491 5395512 5395508 5395513 +
tcatatctcccgtgatgttttt

SEQ ID NO: 111865 - DNA, 22 bp, Artificial Sequence
  Synthetic oligonucleotide; CTC chr11 5395500 5395521 5395517 5395522 +
ccgtgatgtttttgatggggaa

SEQ ID NO: 111866 - DNA, 22 bp, Artificial Sequence
  Synthetic oligonucleotide; TTT chr11 5395511 5395532 5395528 5395533 +
ttgatggggaagacagatctgg

SEQ ID NO: 111867 - DNA, 22 bp, Artificial Sequence
  Synthetic oligonucleotide; TTT chr11 5395512 5395533 5395529 5395534 +
tgatggggaagacagatctgga

SEQ ID NO: 111868 - DNA, 22 bp, Artificial Sequence
  Synthetic oligonucleotide; TTT chr11 5395513 5395534 5395530 5395535 +
gatggggaagacagatctggac

SEQ ID NO: 111869 - DNA, 22 bp, Artificial Sequence
  Synthetic oligonucleotide; TTG chr11 5395514 5395535 5395531 5395536 +
atggggaagacagatctggact

SEQ ID NO: 111870 - DNA, 22 bp, Artificial Sequence
  Synthetic oligonucleotide; CTG chr11 5395532 5395553 5395549 5395554 +
gacttgttactgggctatgcct

SEQ ID NO: 111871 - DNA, 22 bp, Artificial Sequence
  Synthetic oligonucleotide; CTT chr11 5395537 5395558 5395554 5395559 +
gttactgggctatgccttgtag

SEQ ID NO: 111872 - DNA, 22 bp, Artificial Sequence
  Synthetic oligonucleotide; TTG chr11 5395538 5395559 5395555 5395560 +
ttactgggctatgccttgtaga

SEQ ID NO: 111873 - DNA, 22 bp, Artificial Sequence
  Synthetic oligonucleotide; TTA chr11 5395541 5395562 5395558 5395563 +
ctgggctatgccttgtagagaa

SEQ ID NO: 111874 - DNA, 22 bp, Artificial Sequence
  Synthetic oligonucleotide; CTG chr11 5395544 5395565 5395561 5395566 +
ggctatgccttgtagagaatga

SEQ ID NO: 111875 - DNA, 22 bp, Artificial Sequence
  Synthetic oligonucleotide; CTA chr11 5395549 5395570 5395566 5395571 +
tgccttgtagagaatgatacag

SEQ ID NO: 111876 - DNA, 22 bp, Artificial Sequence
  Synthetic oligonucleotide; CTT chr11 5395555 5395576 5395572 5395577 +
gtagagaatgatacagggttgt

SEQ ID NO: 111877 - DNA, 22 bp, Artificial Sequence
  Synthetic oligonucleotide; TTG chr11 5395556 5395577 5395573 5395578 +
tagagaatgatacagggttgtg

SEQ ID NO: 111878 - DNA, 22 bp, Artificial Sequence
  Synthetic oligonucleotide; TTG chr11 5395576 5395597 5395593 5395598 +
tggcaggcaaggaaacataatc

SEQ ID NO: 111879 - DNA, 22 bp, Artificial Sequence
  Synthetic oligonucleotide; CTC chr11 5395600 5395621 5395617 5395622 +
agcaattgctccaattgatgaa

SEQ ID NO: 111880 - DNA, 22 bp, Artificial Sequence
  Synthetic oligonucleotide; TTG chr11 5395608 5395629 5395625 5395630 +
ctccaattgatgaagcttctaa

SEQ ID NO: 111881 - DNA, 22 bp, Artificial Sequence
  Synthetic oligonucleotide; CTC chr11 5395611 5395632 5395628 5395633 +
caattgatgaagcttctaacat

SEQ ID NO: 111882 - DNA, 22 bp, Artificial Sequence
  Synthetic oligonucleotide; TTG chr11 5395617 5395638 5395634 5395639 +
atgaagcttctaacatttcaga

SEQ ID NO: 111883 - DNA, 22 bp, Artificial Sequence
  Synthetic oligonucleotide; CTT chr11 5395626 5395647 5395643 5395648 +
ctaacatttcagagtgctttcc

SEQ ID NO: 111884 - DNA, 22 bp, Artificial Sequence
  Synthetic oligonucleotide; TTC chr11 5395627 5395648 5395644 5395649 +
taacatttcagagtgctttcct

SEQ ID NO: 111885 - DNA, 22 bp, Artificial Sequence
  Synthetic oligonucleotide; CTA chr11 5395629 5395650 5395646 5395651 +
acatttcagagtgctttcctcc

SEQ ID NO: 111886 - DNA, 22 bp, Artificial Sequence
  Synthetic oligonucleotide; TTT chr11 5395635 5395656 5395652 5395657 +
cagagtgctttcctccacagcc

SEQ ID NO: 111887 - DNA, 22 bp, Artificial Sequence
  Synthetic oligonucleotide; TTC chr11 5395636 5395657 5395653 5395658 +
agagtgctttcctccacagccc

SEQ ID NO: 111888 - DNA, 22 bp, Artificial Sequence
  Synthetic oligonucleotide; CTT chr11 5395645 5395666 5395662 5395667 +
tcctccacagccccattaaacc

SEQ ID NO: 111889 - DNA, 22 bp, Artificial Sequence
  Synthetic oligonucleotide; TTT chr11 5395646 5395667 5395663 5395668 +
cctccacagccccattaaacct

SEQ ID NO: 111890 - DNA, 22 bp, Artificial Sequence
  Synthetic oligonucleotide; TTC chr11 5395647 5395668 5395664 5395669 +
ctccacagccccattaaaccta

SEQ ID NO: 111891 - DNA, 22 bp, Artificial Sequence
  Synthetic oligonucleotide; CTC chr11 5395650 5395671 5395667 5395672 +
cacagccccattaaacctaatc

SEQ ID NO: 111892 - DNA, 22 bp, Artificial Sequence
  Synthetic oligonucleotide; TTA chr11 5395663 5395684 5395680 5395685 +
aacctaatcatttctctcgaaa

SEQ ID NO: 111893 - DNA, 22 bp, Artificial Sequence
  Synthetic oligonucleotide; CTA chr11 5395669 5395690 5395686 5395691 +
atcatttctctcgaaaagaggc

SEQ ID NO: 111894 - DNA, 22 bp, Artificial Sequence
  Synthetic oligonucleotide; TTT chr11 5395676 5395697 5395693 5395698 +
ctctcgaaaagaggcagggccc

SEQ ID NO: 111895 - DNA, 22 bp, Artificial Sequence
  Synthetic oligonucleotide; TTC chr11 5395677 5395698 5395694 5395699 +
tctcgaaaagaggcagggccca

SEQ ID NO: 111896 - DNA, 22 bp, Artificial Sequence
  Synthetic oligonucleotide; CTC chr11 5395679 5395700 5395696 5395701 +
tcgaaaagaggcagggcccatg

SEQ ID NO: 111897 - DNA, 22 bp, Artificial Sequence
  Synthetic oligonucleotide; CTC chr11 5395681 5395702 5395698 5395703 +
gaaaagaggcagggcccatgtg

SEQ ID NO: 111898 - DNA, 22 bp, Artificial Sequence
  Synthetic oligonucleotide; CTT chr11 5395711 5395732 5395728 5395733 +
tcaacatagtaaaaaagctaag

SEQ ID NO: 111899 - DNA, 22 bp, Artificial Sequence
  Synthetic oligonucleotide; TTT chr11 5395712 5395733 5395729 5395734 +
caacatagtaaaaaagctaagg

SEQ ID NO: 111900 - DNA, 22 bp, Artificial Sequence
  Synthetic oligonucleotide; TTC chr11 5395713 5395734 5395730 5395735 +
aacatagtaaaaaagctaaggt

SEQ ID NO: 111901 - DNA, 22 bp, Artificial Sequence
  Synthetic oligonucleotide; CTA chr11 5395731 5395752 5395748 5395753 +
aggtttagaaagattcagtaac

SEQ ID NO: 111902 - DNA, 22 bp, Artificial Sequence
  Synthetic oligonucleotide; TTT chr11 5395737 5395758 5395754 5395759 +
agaaagattcagtaactttgcc

SEQ ID NO: 111903 - DNA, 22 bp, Artificial Sequence
  Synthetic oligonucleotide; TTA chr11 5395738 5395759 5395755 5395760 +
gaaagattcagtaactttgcca

SEQ ID NO: 111904 - DNA, 22 bp, Artificial Sequence
  Synthetic oligonucleotide; TTC chr11 5395747 5395768 5395764 5395769 +
agtaactttgccaaagccatat

SEQ ID NO: 111905 - DNA, 22 bp, Artificial Sequence
  Synthetic oligonucleotide; CTT chr11 5395755 5395776 5395772 5395777 +
tgccaaagccatatggaaggat

SEQ ID NO: 111906 - DNA, 22 bp, Artificial Sequence
  Synthetic oligonucleotide; TTT chr11 5395756 5395777 5395773 5395778 +
gccaaagccatatggaaggatt

SEQ ID NO: 111907 - DNA, 22 bp, Artificial Sequence
  Synthetic oligonucleotide; TTG chr11 5395757 5395778 5395774 5395779 +
ccaaagccatatggaaggattg

SEQ ID NO: 111908 - DNA, 22 bp, Artificial Sequence
  Synthetic oligonucleotide; TTG chr11 5395779 5395800 5395796 5395801 +
tccaaaaacctgtgcaagagct

SEQ ID NO: 111909 - DNA, 22 bp, Artificial Sequence
  Synthetic oligonucleotide; CTG chr11 5395791 5395812 5395808 5395813 +
tgcaagagctcatggcttccca

SEQ ID NO: 111910 - DNA, 22 bp, Artificial Sequence
  Synthetic oligonucleotide; CTC chr11 5395802 5395823 5395819 5395824 +
atggcttcccactccaaatacc

SEQ ID NO: 111911 - DNA, 22 bp, Artificial Sequence
  Synthetic oligonucleotide; CTT chr11 5395809 5395830 5395826 5395831 +
cccactccaaataccttacgct

SEQ ID NO: 111912 - DNA, 22 bp, Artificial Sequence
  Synthetic oligonucleotide; TTC chr11 5395810 5395831 5395827 5395832 +
ccactccaaataccttacgctt

SEQ ID NO: 111913 - DNA, 22 bp, Artificial Sequence
  Synthetic oligonucleotide; CTC chr11 5395816 5395837 5395833 5395838 +
caaataccttacgcttcattgt

SEQ ID NO: 111914 - DNA, 22 bp, Artificial Sequence
  Synthetic oligonucleotide; CTT chr11 5395826 5395847 5395843 5395848 +
acgcttcattgttgtcagatta

SEQ ID NO: 111915 - DNA, 22 bp, Artificial Sequence
  Synthetic oligonucleotide; TTA chr11 5395827 5395848 5395844 5395849 +
cgcttcattgttgtcagattat

SEQ ID NO: 111916 - DNA, 22 bp, Artificial Sequence
  Synthetic oligonucleotide; CTT chr11 5395832 5395853 5395849 5395854 +
cattgttgtcagattatttttc

SEQ ID NO: 111917 - DNA, 22 bp, Artificial Sequence
  Synthetic oligonucleotide; TTC chr11 5395833 5395854 5395850 5395855 +
attgttgtcagattatttttca

SEQ ID NO: 111918 - DNA, 22 bp, Artificial Sequence
  Synthetic oligonucleotide; TTG chr11 5395837 5395858 5395854 5395859 +
ttgtcagattatttttcaatct

SEQ ID NO: 111919 - DNA, 22 bp, Artificial Sequence
  Synthetic oligonucleotide; TTG chr11 5395840 5395861 5395857 5395862 +
tcagattatttttcaatctttt

SEQ ID NO: 111920 - DNA, 22 bp, Artificial Sequence
  Synthetic oligonucleotide; TTA chr11 5395848 5395869 5395865 5395870 +
tttttcaatcttttcttagagc

SEQ ID NO: 111921 - DNA, 22 bp, Artificial Sequence
  Synthetic oligonucleotide; TTT chr11 5395851 5395872 5395868 5395873 +
ttcaatcttttcttagagctca

SEQ ID NO: 111922 - DNA, 22 bp, Artificial Sequence
  Synthetic oligonucleotide; TTT chr11 5395852 5395873 5395869 5395874 +
tcaatcttttcttagagctcac

SEQ ID NO: 111923 - DNA, 22 bp, Artificial Sequence
  Synthetic oligonucleotide; TTT chr11 5395853 5395874 5395870 5395875 +
caatcttttcttagagctcact

SEQ ID NO: 111924 - DNA, 22 bp, Artificial Sequence
  Synthetic oligonucleotide; TTC chr11 5395854 5395875 5395871 5395876 +
aatcttttcttagagctcactg

SEQ ID NO: 111925 - DNA, 22 bp, Artificial Sequence
  Synthetic oligonucleotide; CTT chr11 5395860 5395881 5395877 5395882 +
ttcttagagctcactgcaacat

SEQ ID NO: 111926 - DNA, 22 bp, Artificial Sequence
  Synthetic oligonucleotide; TTT chr11 5395861 5395882 5395878 5395883 +
tcttagagctcactgcaacatt

SEQ ID NO: 111927 - DNA, 22 bp, Artificial Sequence
  Synthetic oligonucleotide; TTT chr11 5395862 5395883 5395879 5395884 +
cttagagctcactgcaacattg

SEQ ID NO: 111928 - DNA, 22 bp, Artificial Sequence
  Synthetic oligonucleotide; TTC chr11 5395863 5395884 5395880 5395885 +
ttagagctcactgcaacattgc

SEQ ID NO: 111929 - DNA, 22 bp, Artificial Sequence
  Synthetic oligonucleotide; CTT chr11 5395865 5395886 5395882 5395887 +
agagctcactgcaacattgctc

SEQ ID NO: 111930 - DNA, 22 bp, Artificial Sequence
  Synthetic oligonucleotide; TTA chr11 5395866 5395887 5395883 5395888 +
gagctcactgcaacattgctca

SEQ ID NO: 111931 - DNA, 22 bp, Artificial Sequence
  Synthetic oligonucleotide; CTC chr11 5395872 5395893 5395889 5395894 +
actgcaacattgctcactggaa

SEQ ID NO: 111932 - DNA, 22 bp, Artificial Sequence
  Synthetic oligonucleotide; CTG chr11 5395876 5395897 5395893 5395898 +
caacattgctcactggaatgct

SEQ ID NO: 111933 - DNA, 22 bp, Artificial Sequence
  Synthetic oligonucleotide; TTG chr11 5395884 5395905 5395901 5395906 +
ctcactggaatgctggaaagta

SEQ ID NO: 111934 - DNA, 22 bp, Artificial Sequence
  Synthetic oligonucleotide; CTC chr11 5395887 5395908 5395904 5395909 +
actggaatgctggaaagtacaa

SEQ ID NO: 111935 - DNA, 22 bp, Artificial Sequence
  Synthetic oligonucleotide; CTG chr11 5395891 5395912 5395908 5395913 +
gaatgctggaaagtacaactaa

SEQ ID NO: 111936 - DNA, 22 bp, Artificial Sequence
  Synthetic oligonucleotide; CTG chr11 5395899 5395920 5395916 5395921 +
gaaagtacaactaataaaatgt

SEQ ID NO: 111937 - DNA, 22 bp, Artificial Sequence
  Synthetic oligonucleotide; CTA chr11 5395912 5395933 5395929 5395934 +
ataaaatgtgtctattgagtat

SEQ ID NO: 111938 - DNA, 22 bp, Artificial Sequence
  Synthetic oligonucleotide; CTA chr11 5395926 5395947 5395943 5395948 +
ttgagtatttgcttctaactgt

SEQ ID NO: 111939 - DNA, 22 bp, Artificial Sequence
  Synthetic oligonucleotide; TTG chr11 5395929 5395950 5395946 5395951 +
agtatttgcttctaactgtact

SEQ ID NO: 111940 - DNA, 22 bp, Artificial Sequence
  Synthetic oligonucleotide; TTT chr11 5395936 5395957 5395953 5395958 +
gcttctaactgtactccattta

SEQ ID NO: 111941 - DNA, 22 bp, Artificial Sequence
  Synthetic oligonucleotide; TTG chr11 5395937 5395958 5395954 5395959 +
cttctaactgtactccatttaa

SEQ ID NO: 111942 - DNA, 22 bp, Artificial Sequence
  Synthetic oligonucleotide; CTT chr11 5395940 5395961 5395957 5395962 +
ctaactgtactccatttaaaat

SEQ ID NO: 111943 - DNA, 22 bp, Artificial Sequence
  Synthetic oligonucleotide; TTC chr11 5395941 5395962 5395958 5395963 +
taactgtactccatttaaaatt

SEQ ID NO: 111944 - DNA, 22 bp, Artificial Sequence
  Synthetic oligonucleotide; CTA chr11 5395943 5395964 5395960 5395965 +
actgtactccatttaaaattgc

SEQ ID NO: 111945 - DNA, 22 bp, Artificial Sequence
  Synthetic oligonucleotide; CTG chr11 5395947 5395968 5395964 5395969 +
tactccatttaaaattgcatat

SEQ ID NO: 111946 - DNA, 22 bp, Artificial Sequence
  Synthetic oligonucleotide; CTC chr11 5395952 5395973 5395969 5395974 +
catttaaaattgcatatgaatg

SEQ ID NO: 111947 - DNA, 22 bp, Artificial Sequence
  Synthetic oligonucleotide; TTT chr11 5395957 5395978 5395974 5395979 +
aaaattgcatatgaatggctct

SEQ ID NO: 111948 - DNA, 22 bp, Artificial Sequence
  Synthetic oligonucleotide; TTA chr11 5395958 5395979 5395975 5395980 +
aaattgcatatgaatggctctc

SEQ ID NO: 111949 - DNA, 22 bp, Artificial Sequence
  Synthetic oligonucleotide; TTG chr11 5395964 5395985 5395981 5395986 +
catatgaatggctctctaatct

SEQ ID NO: 111950 - DNA, 22 bp, Artificial Sequence
  Synthetic oligonucleotide; CTC chr11 5395978 5395999 5395995 5396000 +
tctaatctatggagtaggtaga

SEQ ID NO: 111951 - DNA, 22 bp, Artificial Sequence
  Synthetic oligonucleotide; CTC chr11 5395980 5396001 5395997 5396002 +
taatctatggagtaggtagaat

SEQ ID NO: 111952 - DNA, 22 bp, Artificial Sequence
  Synthetic oligonucleotide; CTA chr11 5395982 5396003 5395999 5396004 +
atctatggagtaggtagaattg

SEQ ID NO: 111953 - DNA, 22 bp, Artificial Sequence
  Synthetic oligonucleotide; CTA chr11 5395987 5396008 5396004 5396009 +
tggagtaggtagaattgtctca

SEQ ID NO: 111954 - DNA, 22 bp, Artificial Sequence
  Synthetic oligonucleotide; TTG chr11 5396004 5396025 5396021 5396026 +
tctcaatttttcagatgaagaa

SEQ ID NO: 111955 - DNA, 22 bp, Artificial Sequence
  Synthetic oligonucleotide; CTC chr11 5396008 5396029 5396025 5396030 +
aatttttcagatgaagaaacta

SEQ ID NO: 111956 - DNA, 22 bp, Artificial Sequence
  Synthetic oligonucleotide; TTT chr11 5396013 5396034 5396030 5396035 +
ttcagatgaagaaactaagatt

SEQ ID NO: 111957 - DNA, 22 bp, Artificial Sequence
  Synthetic oligonucleotide; TTT chr11 5396014 5396035 5396031 5396036 +
tcagatgaagaaactaagatta

SEQ ID NO: 111958 - DNA, 22 bp, Artificial Sequence
  Synthetic oligonucleotide; TTT chr11 5396015 5396036 5396032 5396037 +
cagatgaagaaactaagattaa

SEQ ID NO: 111959 - DNA, 22 bp, Artificial Sequence
  Synthetic oligonucleotide; TTC chr11 5396016 5396037 5396033 5396038 +
agatgaagaaactaagattaat

SEQ ID NO: 111960 - DNA, 22 bp, Artificial Sequence
  Synthetic oligonucleotide; CTA chr11 5396030 5396051 5396047 5396052 +
agattaatcagatactttgcac

SEQ ID NO: 111961 - DNA, 22 bp, Artificial Sequence
  Synthetic oligonucleotide; TTA chr11 5396036 5396057 5396053 5396058 +
atcagatactttgcacaatcat

SEQ ID NO: 111962 - DNA, 22 bp, Artificial Sequence
  Synthetic oligonucleotide; CTT chr11 5396047 5396068 5396064 5396069 +
tgcacaatcatagagtgaagag

SEQ ID NO: 111963 - DNA, 22 bp, Artificial Sequence
  Synthetic oligonucleotide; TTT chr11 5396048 5396069 5396065 5396070 +
gcacaatcatagagtgaagagc

SEQ ID NO: 111964 - DNA, 22 bp, Artificial Sequence
  Synthetic oligonucleotide; TTG chr11 5396049 5396070 5396066 5396071 +
cacaatcatagagtgaagagct

SEQ ID NO: 111965 - DNA, 22 bp, Artificial Sequence
  Synthetic oligonucleotide; CTA chr11 5396072 5396093 5396089 5396094 +
ttgaagttatgattgtaataca

SEQ ID NO: 111966 - DNA, 22 bp, Artificial Sequence
  Synthetic oligonucleotide; TTG chr11 5396075 5396096 5396092 5396097 +
aagttatgattgtaatacagat

SEQ ID NO: 111967 - DNA, 22 bp, Artificial Sequence
  Synthetic oligonucleotide; TTA chr11 5396081 5396102 5396098 5396103 +
tgattgtaatacagatctggtc

SEQ ID NO: 111968 - DNA, 22 bp, Artificial Sequence
  Synthetic oligonucleotide; TTG chr11 5396087 5396108 5396104 5396109 +
taatacagatctggtcccagag

SEQ ID NO: 111969 - DNA, 22 bp, Artificial Sequence
  Synthetic oligonucleotide; CTG chr11 5396100 5396121 5396117 5396122 +
gtcccagagacactgctcttaa

SEQ ID NO: 111970 - DNA, 22 bp, Artificial Sequence
  Synthetic oligonucleotide; CTG chr11 5396115 5396136 5396132 5396137 +
ctcttaaccacactgcactgcc

SEQ ID NO: 111971 - DNA, 22 bp, Artificial Sequence
  Synthetic oligonucleotide; CTC chr11 5396118 5396139 5396135 5396140 +
ttaaccacactgcactgcctaa

SEQ ID NO: 111972 - DNA, 22 bp, Artificial Sequence
  Synthetic oligonucleotide; CTT chr11 5396120 5396141 5396137 5396142 +
aaccacactgcactgcctaatg

SEQ ID NO: 111973 - DNA, 22 bp, Artificial Sequence
  Synthetic oligonucleotide; TTA chr11 5396121 5396142 5396138 5396143 +
accacactgcactgcctaatga

SEQ ID NO: 111974 - DNA, 22 bp, Artificial Sequence
  Synthetic oligonucleotide; CTG chr11 5396130 5396151 5396147 5396152 +
cactgcctaatgaaaatgtgcc

SEQ ID NO: 111975 - DNA, 22 bp, Artificial Sequence
  Synthetic oligonucleotide; CTG chr11 5396135 5396156 5396152 5396157 +
cctaatgaaaatgtgcctaggc

SEQ ID NO: 111976 - DNA, 22 bp, Artificial Sequence
  Synthetic oligonucleotide; CTA chr11 5396139 5396160 5396156 5396161 +
atgaaaatgtgcctaggctgca

SEQ ID NO: 111977 - DNA, 22 bp, Artificial Sequence
  Synthetic oligonucleotide; CTA chr11 5396154 5396175 5396171 5396176 +
ggctgcaagacagggatgccct

SEQ ID NO: 111978 - DNA, 22 bp, Artificial Sequence
  Synthetic oligonucleotide; CTG chr11 5396159 5396180 5396176 5396181 +
caagacagggatgccctctctc

SEQ ID NO: 111979 - DNA, 22 bp, Artificial Sequence
  Synthetic oligonucleotide; CTC chr11 5396177 5396198 5396194 5396199 +
tctcaccactcctattcaacat

SEQ ID NO: 111980 - DNA, 22 bp, Artificial Sequence
  Synthetic oligonucleotide; CTC chr11 5396179 5396200 5396196 5396201 +
tcaccactcctattcaacatag

SEQ ID NO: 111981 - DNA, 22 bp, Artificial Sequence
  Synthetic oligonucleotide; CTC chr11 5396181 5396202 5396198 5396203 +
accactcctattcaacatagtg

SEQ ID NO: 111982 - DNA, 22 bp, Artificial Sequence
  Synthetic oligonucleotide; CTC chr11 5396188 5396209 5396205 5396210 +
ctattcaacatagtgttggaag

SEQ ID NO: 111983 - DNA, 22 bp, Artificial Sequence
  Synthetic oligonucleotide; CTA chr11 5396191 5396212 5396208 5396213 +
ttcaacatagtgttggaagttc

SEQ ID NO: 111984 - DNA, 22 bp, Artificial Sequence
  Synthetic oligonucleotide; TTC chr11 5396194 5396215 5396211 5396216 +
aacatagtgttggaagttctgg

SEQ ID NO: 111985 - DNA, 22 bp, Artificial Sequence
  Synthetic oligonucleotide; TTG chr11 5396206 5396227 5396223 5396228 +
gaagttctggcccgggcaatcg

SEQ ID NO: 111986 - DNA, 22 bp, Artificial Sequence
  Synthetic oligonucleotide; TTC chr11 5396213 5396234 5396230 5396235 +
tggcccgggcaatcgggcagga

SEQ ID NO: 111987 - DNA, 22 bp, Artificial Sequence
  Synthetic oligonucleotide; CTG chr11 5396215 5396236 5396232 5396237 +
gcccgggcaatcgggcaggaga

SEQ ID NO: 111988 - DNA, 22 bp, Artificial Sequence
  Synthetic oligonucleotide; TTC chr11 5396255 5396276 5396272 5396277 +
aattatgtaaagagaaagtcaa

SEQ ID NO: 111989 - DNA, 22 bp, Artificial Sequence
  Synthetic oligonucleotide; TTA chr11 5396260 5396281 5396277 5396282 +
tgtaaagagaaagtcaaattgt

SEQ ID NO: 111990 - DNA, 22 bp, Artificial Sequence
  Synthetic oligonucleotide; TTG chr11 5396281 5396302 5396298 5396303 +
tccctgtttgcagatgacgtga

SEQ ID NO: 111991 - DNA, 22 bp, Artificial Sequence
  Synthetic oligonucleotide; CTG chr11 5396287 5396308 5396304 5396309 +
tttgcagatgacgtgattgcat

SEQ ID NO: 111992 - DNA, 22 bp, Artificial Sequence
  Synthetic oligonucleotide; TTT chr11 5396290 5396311 5396307 5396312 +
gcagatgacgtgattgcatatc

SEQ ID NO: 111993 - DNA, 22 bp, Artificial Sequence
  Synthetic oligonucleotide; TTG chr11 5396291 5396312 5396308 5396313 +
cagatgacgtgattgcatatct

SEQ ID NO: 111994 - DNA, 22 bp, Artificial Sequence
  Synthetic oligonucleotide; TTG chr11 5396306 5396327 5396323 5396328 +
catatctagaaaaccccattgt

SEQ ID NO: 111995 - DNA, 22 bp, Artificial Sequence
  Synthetic oligonucleotide; CTA chr11 5396314 5396335 5396331 5396336 +
gaaaaccccattgtctcagccc

SEQ ID NO: 111996 - DNA, 22 bp, Artificial Sequence
  Synthetic oligonucleotide; TTG chr11 5396327 5396348 5396344 5396349 +
tctcagcccaaaatccccttaa

SEQ ID NO: 111997 - DNA, 22 bp, Artificial Sequence
  Synthetic oligonucleotide; CTC chr11 5396331 5396352 5396348 5396353 +
agcccaaaatccccttaagctg

SEQ ID NO: 111998 - DNA, 22 bp, Artificial Sequence
  Synthetic oligonucleotide; CTT chr11 5396347 5396368 5396364 5396369 +
aagctgataagcaacttcagca

SEQ ID NO: 111999 - DNA, 22 bp, Artificial Sequence
  Synthetic oligonucleotide; TTA chr11 5396348 5396369 5396365 5396370 +
agctgataagcaacttcagcaa

SEQ ID NO: 112000 - DNA, 22 bp, Artificial Sequence
  Synthetic oligonucleotide; CTG chr11 5396353 5396374 5396370 5396375 +
ataagcaacttcagcaaagtct

SEQ ID NO: 112001 - DNA, 22 bp, Artificial Sequence
  Synthetic oligonucleotide; CTT chr11 5396364 5396385 5396381 5396386 +
cagcaaagtctcaggatacaaa

SEQ ID NO: 112002 - DNA, 22 bp, Artificial Sequence
  Synthetic oligonucleotide; TTC chr11 5396365 5396386 5396382 5396387 +
agcaaagtctcaggatacaaaa

SEQ ID NO: 112003 - DNA, 22 bp, Artificial Sequence
  Synthetic oligonucleotide; CTC chr11 5396376 5396397 5396393 5396398 +
aggatacaaaatcaatgtgcaa

SEQ ID NO: 112004 - DNA, 22 bp, Artificial Sequence
  Synthetic oligonucleotide; TTC chr11 5396413 5396434 5396430 5396435 +
ttatacaccaataacagacaaa

SEQ ID NO: 112005 - DNA, 22 bp, Artificial Sequence
  Synthetic oligonucleotide; CTT chr11 5396415 5396436 5396432 5396437 +
atacaccaataacagacaaaca

SEQ ID NO: 112006 - DNA, 22 bp, Artificial Sequence
  Synthetic oligonucleotide; TTA chr11 5396416 5396437 5396433 5396438 +
tacaccaataacagacaaacag

SEQ ID NO: 112007 - DNA, 22 bp, Artificial Sequence
  Synthetic oligonucleotide; CTC chr11 5396449 5396470 5396466 5396471 +
ccattcacaattgcttcagaga

SEQ ID NO: 112008 - DNA, 22 bp, Artificial Sequence
  Synthetic oligonucleotide; TTC chr11 5396455 5396476 5396472 5396477 +
acaattgcttcagagagaatat

SEQ ID NO: 112009 - DNA, 22 bp, Artificial Sequence
  Synthetic oligonucleotide; TTG chr11 5396462 5396483 5396479 5396484 +
cttcagagagaatataatacct

SEQ ID NO: 112010 - DNA, 22 bp, Artificial Sequence
  Synthetic oligonucleotide; CTT chr11 5396465 5396486 5396482 5396487 +
cagagagaatataatacctagg

SEQ ID NO: 112011 - DNA, 22 bp, Artificial Sequence
  Synthetic oligonucleotide; TTC chr11 5396466 5396487 5396483 5396488 +
agagagaatataatacctagga

SEQ ID NO: 112012 - DNA, 22 bp, Artificial Sequence
  Synthetic oligonucleotide; CTA chr11 5396485 5396506 5396502 5396507 +
ggaatccaacttacaagggatg

SEQ ID NO: 112013 - DNA, 22 bp, Artificial Sequence
  Synthetic oligonucleotide; CTT chr11 5396497 5396518 5396514 5396519 +
acaagggatgtgaaggacctct

SEQ ID NO: 112014 - DNA, 22 bp, Artificial Sequence
  Synthetic oligonucleotide; TTA chr11 5396498 5396519 5396515 5396520 +
caagggatgtgaaggacctctt

SEQ ID NO: 112015 - DNA, 22 bp, Artificial Sequence
  Synthetic oligonucleotide; CTC chr11 5396518 5396539 5396535 5396540 +
ttcaaggagaactacaaaccac

SEQ ID NO: 112016 - DNA, 22 bp, Artificial Sequence
  Synthetic oligonucleotide; CTT chr11 5396520 5396541 5396537 5396542 +
caaggagaactacaaaccactg

SEQ ID NO: 112017 - DNA, 22 bp, Artificial Sequence
  Synthetic oligonucleotide; TTC chr11 5396521 5396542 5396538 5396543 +
aaggagaactacaaaccactgc

SEQ ID NO: 112018 - DNA, 22 bp, Artificial Sequence
  Synthetic oligonucleotide; CTA chr11 5396532 5396553 5396549 5396554 +
caaaccactgctcaaggaaata

SEQ ID NO: 112019 - DNA, 22 bp, Artificial Sequence
  Synthetic oligonucleotide; CTG chr11 5396542 5396563 5396559 5396564 +
ctcaaggaaataagatacaaac

SEQ ID NO: 112020 - DNA, 22 bp, Artificial Sequence
  Synthetic oligonucleotide; CTC chr11 5396545 5396566 5396562 5396567 +
aaggaaataagatacaaacaaa

SEQ ID NO: 112021 - DNA, 22 bp, Artificial Sequence
  Synthetic oligonucleotide; TTC chr11 5396580 5396601 5396597 5396602 +
catgctcatggataggaagaaa

SEQ ID NO: 112022 - DNA, 22 bp, Artificial Sequence
  Synthetic oligonucleotide; CTC chr11 5396587 5396608 5396604 5396609 +
atggataggaagaaacaatatc

SEQ ID NO: 112023 - DNA, 22 bp, Artificial Sequence
  Synthetic oligonucleotide; CTG chr11 5396627 5396648 5396644 5396649 +
cccaaggtaatttatagattca

SEQ ID NO: 112024 - DNA, 22 bp, Artificial Sequence
  Synthetic oligonucleotide; TTT chr11 5396640 5396661 5396657 5396662 +
atagattcaatgccatccccat

SEQ ID NO: 112025 - DNA, 22 bp, Artificial Sequence
  Synthetic oligonucleotide; TTA chr11 5396641 5396662 5396658 5396663 +
tagattcaatgccatccccatc

SEQ ID NO: 112026 - DNA, 22 bp, Artificial Sequence
  Synthetic oligonucleotide; TTC chr11 5396648 5396669 5396665 5396670 +
aatgccatccccatcaagctac

SEQ ID NO: 112027 - DNA, 22 bp, Artificial Sequence
  Synthetic oligonucleotide; CTA chr11 5396669 5396690 5396686 5396691 +
ccaatgactttcttcacagaat

SEQ ID NO: 112028 - DNA, 22 bp, Artificial Sequence
  Synthetic oligonucleotide; CTT chr11 5396679 5396700 5396696 5396701 +
tcttcacagaattggaaaaaac

SEQ ID NO: 112029 - DNA, 22 bp, Artificial Sequence
  Synthetic oligonucleotide; TTT chr11 5396680 5396701 5396697 5396702 +
cttcacagaattggaaaaaact

SEQ ID NO: 112030 - DNA, 22 bp, Artificial Sequence
  Synthetic oligonucleotide; TTC chr11 5396681 5396702 5396698 5396703 +
ttcacagaattggaaaaaacta

SEQ ID NO: 112031 - DNA, 22 bp, Artificial Sequence
  Synthetic oligonucleotide; CTT chr11 5396683 5396704 5396700 5396705 +
cacagaattggaaaaaactact

SEQ ID NO: 112032 - DNA, 22 bp, Artificial Sequence
  Synthetic oligonucleotide; TTC chr11 5396684 5396705 5396701 5396706 +
acagaattggaaaaaactactt

SEQ ID NO: 112033 - DNA, 22 bp, Artificial Sequence
  Synthetic oligonucleotide; TTG chr11 5396693 5396714 5396710 5396715 +
gaaaaaactactttaaagttca

SEQ ID NO: 112034 - DNA, 22 bp, Artificial Sequence
  Synthetic oligonucleotide; CTA chr11 5396703 5396724 5396720 5396725 +
ctttaaagttcatatggaacca

SEQ ID NO: 112035 - DNA, 22 bp, Artificial Sequence
  Synthetic oligonucleotide; CTT chr11 5396706 5396727 5396723 5396728 +
taaagttcatatggaaccaaaa

SEQ ID NO: 112036 - DNA, 22 bp, Artificial Sequence
  Synthetic oligonucleotide; TTT chr11 5396707 5396728 5396724 5396729 +
aaagttcatatggaaccaaaaa

SEQ ID NO: 112037 - DNA, 22 bp, Artificial Sequence
  Synthetic oligonucleotide; TTA chr11 5396708 5396729 5396725 5396730 +
aagttcatatggaaccaaaaaa

SEQ ID NO: 112038 - DNA, 22 bp, Artificial Sequence
  Synthetic oligonucleotide; TTC chr11 5396714 5396735 5396731 5396736 +
atatggaaccaaaaaagagccc

SEQ ID NO: 112039 - DNA, 22 bp, Artificial Sequence
  Synthetic oligonucleotide; CTA chr11 5396756 5396777 5396773 5396778 +
agccaaaagaacaaagctggag

SEQ ID NO: 112040 - DNA, 22 bp, Artificial Sequence
  Synthetic oligonucleotide; CTG chr11 5396775 5396796 5396792 5396797 +
gaggcatcacactacctgattt

SEQ ID NO: 112041 - DNA, 22 bp, Artificial Sequence
  Synthetic oligonucleotide; CTA chr11 5396789 5396810 5396806 5396811 +
cctgatttcaaactatactaca

SEQ ID NO: 112042 - DNA, 22 bp, Artificial Sequence
  Synthetic oligonucleotide; CTG chr11 5396793 5396814 5396810 5396815 +
atttcaaactatactacaaggc

SEQ ID NO: 112043 - DNA, 22 bp, Artificial Sequence
  Synthetic oligonucleotide; TTT chr11 5396797 5396818 5396814 5396819 +
caaactatactacaaggctaca

SEQ ID NO: 112044 - DNA, 22 bp, Artificial Sequence
  Synthetic oligonucleotide; TTC chr11 5396798 5396819 5396815 5396820 +
aaactatactacaaggctacag

SEQ ID NO: 112045 - DNA, 22 bp, Artificial Sequence
  Synthetic oligonucleotide; CTA chr11 5396804 5396825 5396821 5396826 +
tactacaaggctacagtaacca

SEQ ID NO: 112046 - DNA, 22 bp, Artificial Sequence
  Synthetic oligonucleotide; CTA chr11 5396809 5396830 5396826 5396831 +
caaggctacagtaaccaaaaca

SEQ ID NO: 112047 - DNA, 22 bp, Artificial Sequence
  Synthetic oligonucleotide; CTA chr11 5396817 5396838 5396834 5396839 +
cagtaaccaaaacagcatagta

SEQ ID NO: 112048 - DNA, 22 bp, Artificial Sequence
  Synthetic oligonucleotide; CTG chr11 5396842 5396863 5396859 5396864 +
gtaccaaaacagagatatagac

SEQ ID NO: 112049 - DNA, 22 bp, Artificial Sequence
  Synthetic oligonucleotide; CTC chr11 5396887 5396908 5396904 5396909 +
agaaataatgctgtctatctac

SEQ ID NO: 112050 - DNA, 22 bp, Artificial Sequence
  Synthetic oligonucleotide; CTG chr11 5396900 5396921 5396917 5396922 +
tctatctacaactatctgatct

SEQ ID NO: 112051 - DNA, 22 bp, Artificial Sequence
  Synthetic oligonucleotide; CTA chr11 5396904 5396925 5396921 5396926 +
tctacaactatctgatctttga

SEQ ID NO: 112052 - DNA, 22 bp, Artificial Sequence
  Synthetic oligonucleotide; CTA chr11 5396908 5396929 5396925 5396930 +
caactatctgatctttgacaaa

SEQ ID NO: 112053 - DNA, 22 bp, Artificial Sequence
  Synthetic oligonucleotide; CTA chr11 5396914 5396935 5396931 5396936 +
tctgatctttgacaaacctgag

SEQ ID NO: 112054 - DNA, 22 bp, Artificial Sequence
  Synthetic oligonucleotide; CTG chr11 5396918 5396939 5396935 5396940 +
atctttgacaaacctgagaaaa

SEQ ID NO: 112055 - DNA, 22 bp, Artificial Sequence
  Synthetic oligonucleotide; CTT chr11 5396923 5396944 5396940 5396945 +
tgacaaacctgagaaaaacaag

SEQ ID NO: 112056 - DNA, 22 bp, Artificial Sequence
  Synthetic oligonucleotide; TTT chr11 5396924 5396945 5396941 5396946 +
gacaaacctgagaaaaacaaga

SEQ ID NO: 112057 - DNA, 22 bp, Artificial Sequence
  Synthetic oligonucleotide; TTG chr11 5396925 5396946 5396942 5396947 +
acaaacctgagaaaaacaagaa

SEQ ID NO: 112058 - DNA, 22 bp, Artificial Sequence
  Synthetic oligonucleotide; CTG chr11 5396934 5396955 5396951 5396956 +
agaaaaacaagaaatggggaaa

SEQ ID NO: 112059 - DNA, 22 bp, Artificial Sequence
  Synthetic oligonucleotide; TTC chr11 5396962 5396983 5396979 5396984 +
cctgtttaataaatggtgctgg

SEQ ID NO: 112060 - DNA, 22 bp, Artificial Sequence
  Synthetic oligonucleotide; CTG chr11 5396966 5396987 5396983 5396988 +
tttaataaatggtgctgggaaa

SEQ ID NO: 112061 - DNA, 22 bp, Artificial Sequence
  Synthetic oligonucleotide; TTT chr11 5396969 5396990 5396986 5396991 +
aataaatggtgctgggaaaact

SEQ ID NO: 112062 - DNA, 22 bp, Artificial Sequence
  Synthetic oligonucleotide; TTA chr11 5396970 5396991 5396987 5396992 +
ataaatggtgctgggaaaactg

SEQ ID NO: 112063 - DNA, 22 bp, Artificial Sequence
  Synthetic oligonucleotide; CTG chr11 5396983 5397004 5397000 5397005 +
ggaaaactggctagccaaatgt

SEQ ID NO: 112064 - DNA, 22 bp, Artificial Sequence
  Synthetic oligonucleotide; CTG chr11 5396992 5397013 5397009 5397014 +
gctagccaaatgtaggaagctg

SEQ ID NO: 112065 - DNA, 22 bp, Artificial Sequence
  Synthetic oligonucleotide; CTA chr11 5396996 5397017 5397013 5397018 +
gccaaatgtaggaagctgaaac

SEQ ID NO: 112066 - DNA, 22 bp, Artificial Sequence
  Synthetic oligonucleotide; CTG chr11 5397014 5397035 5397031 5397036 +
aaactggatcccttccttacac

SEQ ID NO: 112067 - DNA, 22 bp, Artificial Sequence
  Synthetic oligonucleotide; CTG chr11 5397020 5397041 5397037 5397042 +
gatcccttccttacaccttata

SEQ ID NO: 112068 - DNA, 22 bp, Artificial Sequence
  Synthetic oligonucleotide; CTT chr11 5397028 5397049 5397045 5397050 +
ccttacaccttatacaaaaatt

SEQ ID NO: 112069 - DNA, 22 bp, Artificial Sequence
  Synthetic oligonucleotide; TTC chr11 5397029 5397050 5397046 5397051 +
cttacaccttatacaaaaatta

SEQ ID NO: 112070 - DNA, 22 bp, Artificial Sequence
  Synthetic oligonucleotide; CTT chr11 5397032 5397053 5397049 5397054 +
acaccttatacaaaaattaact

SEQ ID NO: 112071 - DNA, 22 bp, Artificial Sequence
  Synthetic oligonucleotide; TTA chr11 5397033 5397054 5397050 5397055 +
caccttatacaaaaattaactc

SEQ ID NO: 112072 - DNA, 22 bp, Artificial Sequence
  Synthetic oligonucleotide; CTT chr11 5397039 5397060 5397056 5397061 +
atacaaaaattaactcaagatg

SEQ ID NO: 112073 - DNA, 22 bp, Artificial Sequence
  Synthetic oligonucleotide; TTA chr11 5397040 5397061 5397057 5397062 +
tacaaaaattaactcaagatgg

SEQ ID NO: 112074 - DNA, 22 bp, Artificial Sequence
  Synthetic oligonucleotide; TTA chr11 5397051 5397072 5397068 5397073 +
actcaagatggattaaagactt

SEQ ID NO: 112075 - DNA, 22 bp, Artificial Sequence
  Synthetic oligonucleotide; CTC chr11 5397055 5397076 5397072 5397077 +
aagatggattaaagacttaaat

SEQ ID NO: 112076 - DNA, 22 bp, Artificial Sequence
  Synthetic oligonucleotide; TTA chr11 5397066 5397087 5397083 5397088 +
aagacttaaatgttagacctaa

SEQ ID NO: 112077 - DNA, 22 bp, Artificial Sequence
  Synthetic oligonucleotide; CTT chr11 5397073 5397094 5397090 5397095 +
aaatgttagacctaaaaccata

SEQ ID NO: 112078 - DNA, 22 bp, Artificial Sequence
  Synthetic oligonucleotide; TTA chr11 5397074 5397095 5397091 5397096 +
aatgttagacctaaaaccataa

SEQ ID NO: 112079 - DNA, 22 bp, Artificial Sequence
  Synthetic oligonucleotide; TTA chr11 5397081 5397102 5397098 5397103 +
gacctaaaaccataaaaactct

SEQ ID NO: 112080 - DNA, 22 bp, Artificial Sequence
  Synthetic oligonucleotide; CTA chr11 5397087 5397108 5397104 5397109 +
aaaccataaaaactctagaaga

SEQ ID NO: 112081 - DNA, 22 bp, Artificial Sequence
  Synthetic oligonucleotide; CTC chr11 5397102 5397123 5397119 5397124 +
tagaagaaaacctaagcaatac

SEQ ID NO: 112082 - DNA, 22 bp, Artificial Sequence
  Synthetic oligonucleotide; CTA chr11 5397104 5397125 5397121 5397126 +
gaagaaaacctaagcaatacca

SEQ ID NO: 112083 - DNA, 22 bp, Artificial Sequence
  Synthetic oligonucleotide; CTA chr11 5397116 5397137 5397133 5397138 +
agcaataccattcaggacatag

SEQ ID NO: 112084 - DNA, 22 bp, Artificial Sequence
  Synthetic oligonucleotide; TTC chr11 5397129 5397150 5397146 5397151 +
aggacataggcatgggcatgga

SEQ ID NO: 112085 - DNA, 22 bp, Artificial Sequence
  Synthetic oligonucleotide; CTT chr11 5397154 5397175 5397171 5397176 +
catgtctaaaacaccaaaagca

SEQ ID NO: 112086 - DNA, 22 bp, Artificial Sequence
  Synthetic oligonucleotide; TTC chr11 5397155 5397176 5397172 5397177 +
atgtctaaaacaccaaaagcaa

SEQ ID NO: 112087 - DNA, 22 bp, Artificial Sequence
  Synthetic oligonucleotide; CTA chr11 5397162 5397183 5397179 5397184 +
aaacaccaaaagcaatggcaac

SEQ ID NO: 112088 - DNA, 22 bp, Artificial Sequence
  Synthetic oligonucleotide; TTC chr11 5397198 5397219 5397215 5397220 +
actaatgggatctaattaaact

SEQ ID NO: 112089 - DNA, 22 bp, Artificial Sequence
  Synthetic oligonucleotide; CTA chr11 5397202 5397223 5397219 5397224 +
atgggatctaattaaactaaag

SEQ ID NO: 112090 - DNA, 22 bp, Artificial Sequence
  Synthetic oligonucleotide; CTA chr11 5397212 5397233 5397229 5397234 +
attaaactaaagatcttctgca

SEQ ID NO: 112091 - DNA, 22 bp, Artificial Sequence
  Synthetic oligonucleotide; TTA chr11 5397216 5397237 5397233 5397238 +
aactaaagatcttctgcacagc

SEQ ID NO: 112092 - DNA, 22 bp, Artificial Sequence
  Synthetic oligonucleotide; CTA chr11 5397221 5397242 5397238 5397243 +
aagatcttctgcacagcaaaag

SEQ ID NO: 112093 - DNA, 22 bp, Artificial Sequence
  Synthetic oligonucleotide; CTT chr11 5397229 5397250 5397246 5397251 +
ctgcacagcaaaagaaactacc

SEQ ID NO: 112094 - DNA, 22 bp, Artificial Sequence
  Synthetic oligonucleotide; TTC chr11 5397230 5397251 5397247 5397252 +
tgcacagcaaaagaaactacca

SEQ ID NO: 112095 - DNA, 22 bp, Artificial Sequence
  Synthetic oligonucleotide; CTG chr11 5397232 5397253 5397249 5397254 +
cacagcaaaagaaactaccatc

SEQ ID NO: 112096 - DNA, 22 bp, Artificial Sequence
  Synthetic oligonucleotide; CTA chr11 5397249 5397270 5397266 5397271 +
ccatcagagtgaacaggcaacc

SEQ ID NO: 112097 - DNA, 22 bp, Artificial Sequence
  Synthetic oligonucleotide; CTA chr11 5397273 5397294 5397290 5397295 +
cacaatgggagaaaatttttgc

SEQ ID NO: 112098 - DNA, 22 bp, Artificial Sequence
  Synthetic oligonucleotide; TTT chr11 5397291 5397312 5397308 5397313 +
ttgcaatctactcatctgacaa

SEQ ID NO: 112099 - DNA, 22 bp, Artificial Sequence
  Synthetic oligonucleotide; TTT chr11 5397292 5397313 5397309 5397314 +
tgcaatctactcatctgacaaa

SEQ ID NO: 112100 - DNA, 22 bp, Artificial Sequence
  Synthetic oligonucleotide; TTT chr11 5397293 5397314 5397310 5397315 +
gcaatctactcatctgacaaag

SEQ ID NO: 112101 - DNA, 22 bp, Artificial Sequence
  Synthetic oligonucleotide; TTG chr11 5397294 5397315 5397311 5397316 +
caatctactcatctgacaaagg

SEQ ID NO: 112102 - DNA, 22 bp, Artificial Sequence
  Synthetic oligonucleotide; CTA chr11 5397301 5397322 5397318 5397323 +
ctcatctgacaaagggctaata

SEQ ID NO: 112103 - DNA, 22 bp, Artificial Sequence
  Synthetic oligonucleotide; CTC chr11 5397304 5397325 5397321 5397326 +
atctgacaaagggctaatatcc

SEQ ID NO: 112104 - DNA, 22 bp, Artificial Sequence
  Synthetic oligonucleotide; CTG chr11 5397309 5397330 5397326 5397331 +
acaaagggctaatatccagaat

SEQ ID NO: 112105 - DNA, 22 bp, Artificial Sequence
  Synthetic oligonucleotide; CTA chr11 5397320 5397341 5397337 5397342 +
atatccagaatctacaatgaac

SEQ ID NO: 112106 - DNA, 22 bp, Artificial Sequence
  Synthetic oligonucleotide; CTA chr11 5397334 5397355 5397351 5397356 +
caatgaactcaaacaaatttac

SEQ ID NO: 112107 - DNA, 22 bp, Artificial Sequence
  Synthetic oligonucleotide; CTC chr11 5397344 5397365 5397361 5397366 +
aaacaaatttacaagagaaaaa

SEQ ID NO: 112108 - DNA, 22 bp, Artificial Sequence
  Synthetic oligonucleotide; TTT chr11 5397354 5397375 5397371 5397376 +
acaagagaaaaaaaaccccatc

SEQ ID NO: 112109 - DNA, 22 bp, Artificial Sequence
  Synthetic oligonucleotide; TTA chr11 5397355 5397376 5397372 5397377 +
caagagaaaaaaaaccccatca

SEQ ID NO: 112110 - DNA, 22 bp, Artificial Sequence
  Synthetic oligonucleotide; CTT chr11 5397408 5397429 5397425 5397430 +
ctcaaaagaagacatttatgca

SEQ ID NO: 112111 - DNA, 22 bp, Artificial Sequence
  Synthetic oligonucleotide; TTC chr11 5397409 5397430 5397426 5397431 +
tcaaaagaagacatttatgcag

SEQ ID NO: 112112 - DNA, 22 bp, Artificial Sequence
  Synthetic oligonucleotide; CTC chr11 5397411 5397432 5397428 5397433 +
aaaagaagacatttatgcagcc

SEQ ID NO: 112113 - DNA, 22 bp, Artificial Sequence
  Synthetic oligonucleotide; TTT chr11 5397425 5397446 5397442 5397447 +
atgcagccaaaagacacatgaa

SEQ ID NO: 112114 - DNA, 22 bp, Artificial Sequence
  Synthetic oligonucleotide; TTA chr11 5397426 5397447 5397443 5397448 +
tgcagccaaaagacacatgaaa

SEQ ID NO: 112115 - DNA, 22 bp, Artificial Sequence
  Synthetic oligonucleotide; CTC chr11 5397456 5397477 5397473 5397478 +
atcatcactggccatcagagaa

SEQ ID NO: 112116 - DNA, 22 bp, Artificial Sequence
  Synthetic oligonucleotide; CTG chr11 5397466 5397487 5397483 5397488 +
gccatcagagaaatgcaaatca

SEQ ID NO: 112117 - DNA, 22 bp, Artificial Sequence
  Synthetic oligonucleotide; CTC chr11 5397511 5397532 5397528 5397533 +
acaccagttagaatggcaatca

SEQ ID NO: 112118 - DNA, 22 bp, Artificial Sequence
  Synthetic oligonucleotide; TTA chr11 5397521 5397542 5397538 5397543 +
gaatggcaatcattaaaaagtc

SEQ ID NO: 112119 - DNA, 22 bp, Artificial Sequence
  Synthetic oligonucleotide; TTA chr11 5397536 5397557 5397553 5397558 +
aaaagtcaggaaacaacaggtg

SEQ ID NO: 112120 - DNA, 22 bp, Artificial Sequence
  Synthetic oligonucleotide; CTG chr11 5397561 5397582 5397578 5397583 +
gagaggatgtggagaaatagga

SEQ ID NO: 112121 - DNA, 22 bp, Artificial Sequence
  Synthetic oligonucleotide; CTT chr11 5397589 5397610 5397606 5397611 +
ttacactgttggtgggactgta

SEQ ID NO: 112122 - DNA, 22 bp, Artificial Sequence
  Synthetic oligonucleotide; TTT chr11 5397590 5397611 5397607 5397612 +
tacactgttggtgggactgtaa

SEQ ID NO: 112123 - DNA, 22 bp, Artificial Sequence
  Synthetic oligonucleotide; TTT chr11 5397591 5397612 5397608 5397613 +
acactgttggtgggactgtaaa

SEQ ID NO: 112124 - DNA, 22 bp, Artificial Sequence
  Synthetic oligonucleotide; TTA chr11 5397592 5397613 5397609 5397614 +
cactgttggtgggactgtaaac

SEQ ID NO: 112125 - DNA, 22 bp, Artificial Sequence
  Synthetic oligonucleotide; CTG chr11 5397597 5397618 5397614 5397619 +
ttggtgggactgtaaactagtt

SEQ ID NO: 112126 - DNA, 22 bp, Artificial Sequence
  Synthetic oligonucleotide; TTG chr11 5397600 5397621 5397617 5397622 +
gtgggactgtaaactagttcaa

SEQ ID NO: 112127 - DNA, 22 bp, Artificial Sequence
  Synthetic oligonucleotide; CTG chr11 5397609 5397630 5397626 5397631 +
taaactagttcaaacattgtgg

SEQ ID NO: 112128 - DNA, 22 bp, Artificial Sequence
  Synthetic oligonucleotide; CTA chr11 5397616 5397637 5397633 5397638 +
gttcaaacattgtggaagtcag

SEQ ID NO: 112129 - DNA, 22 bp, Artificial Sequence
  Synthetic oligonucleotide; TTC chr11 5397620 5397641 5397637 5397642 +
aaacattgtggaagtcagtgtg

SEQ ID NO: 112130 - DNA, 22 bp, Artificial Sequence
  Synthetic oligonucleotide; TTG chr11 5397628 5397649 5397645 5397650 +
tggaagtcagtgtggtgattcc

SEQ ID NO: 112131 - DNA, 22 bp, Artificial Sequence
  Synthetic oligonucleotide; TTC chr11 5397649 5397670 5397666 5397671 +
ctcagggatctagaactagaaa

SEQ ID NO: 112132 - DNA, 22 bp, Artificial Sequence
  Synthetic oligonucleotide; CTC chr11 5397652 5397673 5397669 5397674 +
agggatctagaactagaaatac

SEQ ID NO: 112133 - DNA, 22 bp, Artificial Sequence
  Synthetic oligonucleotide; CTA chr11 5397661 5397682 5397678 5397683 +
gaactagaaataccatttgacc

SEQ ID NO: 112134 - DNA, 22 bp, Artificial Sequence
  Synthetic oligonucleotide; CTA chr11 5397667 5397688 5397684 5397689 +
gaaataccatttgacccagcca

SEQ ID NO: 112135 - DNA, 22 bp, Artificial Sequence
  Synthetic oligonucleotide; TTT chr11 5397679 5397700 5397696 5397701 +
gacccagccatcccattactgg

SEQ ID NO: 112136 - DNA, 22 bp, Artificial Sequence
  Synthetic oligonucleotide; TTG chr11 5397680 5397701 5397697 5397702 +
acccagccatcccattactggg

SEQ ID NO: 112137 - DNA, 22 bp, Artificial Sequence
  Synthetic oligonucleotide; TTA chr11 5397697 5397718 5397714 5397719 +
ctgggtatacacccaaaggatt

SEQ ID NO: 112138 - DNA, 22 bp, Artificial Sequence
  Synthetic oligonucleotide; CTG chr11 5397700 5397721 5397717 5397722 +
ggtatacacccaaaggattata

SEQ ID NO: 112139 - DNA, 22 bp, Artificial Sequence
  Synthetic oligonucleotide; TTA chr11 5397720 5397741 5397737 5397742 +
taaatcatgctgctataaagac

SEQ ID NO: 112140 - DNA, 22 bp, Artificial Sequence
  Synthetic oligonucleotide; CTG chr11 5397732 5397753 5397749 5397754 +
ctataaagacacatgcacacgt

SEQ ID NO: 112141 - DNA, 22 bp, Artificial Sequence
  Synthetic oligonucleotide; CTA chr11 5397735 5397756 5397752 5397757 +
taaagacacatgcacacgtatg

SEQ ID NO: 112142 - DNA, 22 bp, Artificial Sequence
  Synthetic oligonucleotide; TTT chr11 5397760 5397781 5397777 5397782 +
attgcggcactattcacaatag

SEQ ID NO: 112143 - DNA, 22 bp, Artificial Sequence
  Synthetic oligonucleotide; TTA chr11 5397761 5397782 5397778 5397783 +
ttgcggcactattcacaatagc

SEQ ID NO: 112144 - DNA, 22 bp, Artificial Sequence
  Synthetic oligonucleotide; TTG chr11 5397764 5397785 5397781 5397786 +
cggcactattcacaatagcaaa

SEQ ID NO: 112145 - DNA, 22 bp, Artificial Sequence
  Synthetic oligonucleotide; CTA chr11 5397772 5397793 5397789 5397794 +
ttcacaatagcaaagacttgga

SEQ ID NO: 112146 - DNA, 22 bp, Artificial Sequence
  Synthetic oligonucleotide; TTC chr11 5397775 5397796 5397792 5397797 +
acaatagcaaagacttggaacc

SEQ ID NO: 112147 - DNA, 22 bp, Artificial Sequence
  Synthetic oligonucleotide; CTT chr11 5397791 5397812 5397808 5397813 +
ggaaccaacccaaatgtccaac

SEQ ID NO: 112148 - DNA, 22 bp, Artificial Sequence
  Synthetic oligonucleotide; TTG chr11 5397792 5397813 5397809 5397814 +
gaaccaacccaaatgtccaaca

SEQ ID NO: 112149 - DNA, 22 bp, Artificial Sequence
  Synthetic oligonucleotide; CTG chr11 5397825 5397846 5397842 5397847 +
gattaagaaaatgtggcacata

SEQ ID NO: 112150 - DNA, 22 bp, Artificial Sequence
  Synthetic oligonucleotide; TTA chr11 5397830 5397851 5397847 5397852 +
agaaaatgtggcacatatacac

SEQ ID NO: 112151 - DNA, 22 bp, Artificial Sequence
  Synthetic oligonucleotide; CTA chr11 5397864 5397885 5397881 5397886 +
tgcagccataaaaaatgatgag

SEQ ID NO: 112152 - DNA, 22 bp, Artificial Sequence
  Synthetic oligonucleotide; TTC chr11 5397889 5397910 5397906 5397911 +
atgtcctttgtagggacatgga

SEQ ID NO: 112153 - DNA, 22 bp, Artificial Sequence
  Synthetic oligonucleotide; CTT chr11 5397897 5397918 5397914 5397919 +
tgtagggacatggatgaagctg

SEQ ID NO: 112154 - DNA, 22 bp, Artificial Sequence
  Synthetic oligonucleotide; TTT chr11 5397898 5397919 5397915 5397920 +
gtagggacatggatgaagctgg

SEQ ID NO: 112155 - DNA, 22 bp, Artificial Sequence
  Synthetic oligonucleotide; TTG chr11 5397899 5397920 5397916 5397921 +
tagggacatggatgaagctgga

SEQ ID NO: 112156 - DNA, 22 bp, Artificial Sequence
  Synthetic oligonucleotide; CTG chr11 5397919 5397940 5397936 5397941 +
gaaaccatcattctcagcaaac

SEQ ID NO: 112157 - DNA, 22 bp, Artificial Sequence
  Synthetic oligonucleotide; TTC chr11 5397932 5397953 5397949 5397954 +
tcagcaaactatcacaaggaca

SEQ ID NO: 112158 - DNA, 22 bp, Artificial Sequence
  Synthetic oligonucleotide; CTC chr11 5397934 5397955 5397951 5397956 +
agcaaactatcacaaggacaaa

SEQ ID NO: 112159 - DNA, 22 bp, Artificial Sequence
  Synthetic oligonucleotide; CTA chr11 5397943 5397964 5397960 5397965 +
tcacaaggacaaaaagccaaac

SEQ ID NO: 112160 - DNA, 22 bp, Artificial Sequence
  Synthetic oligonucleotide; TTC chr11 5397976 5397997 5397993 5397998 +
tcactcataggtgggaactgaa

SEQ ID NO: 112161 - DNA, 22 bp, Artificial Sequence
  Synthetic oligonucleotide; CTC chr11 5397978 5397999 5397995 5398000 +
actcataggtgggaactgaaca

SEQ ID NO: 112162 - DNA, 22 bp, Artificial Sequence
  Synthetic oligonucleotide; CTC chr11 5397982 5398003 5397999 5398004 +
ataggtgggaactgaacaatga

SEQ ID NO: 112163 - DNA, 22 bp, Artificial Sequence
  Synthetic oligonucleotide; CTG chr11 5397996 5398017 5398013 5398018 +
aacaatgagaacacatggacac

SEQ ID NO: 112164 - DNA, 22 bp, Artificial Sequence
  Synthetic oligonucleotide; CTG chr11 5398048 5398069 5398065 5398070 +
ttgtggggtgggaggagggggc

SEQ ID NO: 112165 - DNA, 22 bp, Artificial Sequence
  Synthetic oligonucleotide; TTG chr11 5398051 5398072 5398068 5398073 +
tggggtgggaggagggggcagg

SEQ ID NO: 112166 - DNA, 22 bp, Artificial Sequence
  Synthetic oligonucleotide; TTA chr11 5398083 5398104 5398100 5398105 +
ggagatatacctaatgttaaat

SEQ ID NO: 112167 - DNA, 22 bp, Artificial Sequence
  Synthetic oligonucleotide; CTA chr11 5398096 5398117 5398113 5398118 +
atgttaaatggtgagttaatgg

SEQ ID NO: 112168 - DNA, 22 bp, Artificial Sequence
  Synthetic oligonucleotide; TTA chr11 5398102 5398123 5398119 5398124 +
aatggtgagttaatgggtgcag

SEQ ID NO: 112169 - DNA, 22 bp, Artificial Sequence
  Synthetic oligonucleotide; TTA chr11 5398114 5398135 5398131 5398136 +
atgggtgcagcacaccaacatg

SEQ ID NO: 112170 - DNA, 22 bp, Artificial Sequence
  Synthetic oligonucleotide; CTA chr11 5398159 5398180 5398176 5398181 +
acctgcaccttgtgcacatgta

SEQ ID NO: 112171 - DNA, 22 bp, Artificial Sequence
  Synthetic oligonucleotide; CTG chr11 5398164 5398185 5398181 5398186 +
caccttgtgcacatgtacccta

SEQ ID NO: 112172 - DNA, 22 bp, Artificial Sequence
  Synthetic oligonucleotide; CTT chr11 5398170 5398191 5398187 5398192 +
gtgcacatgtaccctaaaactt

SEQ ID NO: 112173 - DNA, 22 bp, Artificial Sequence
  Synthetic oligonucleotide; TTG chr11 5398171 5398192 5398188 5398193 +
tgcacatgtaccctaaaactta

SEQ ID NO: 112174 - DNA, 22 bp, Artificial Sequence
  Synthetic oligonucleotide; CTA chr11 5398186 5398207 5398203 5398208 +
aaacttaaaagtataacaaaaa

SEQ ID NO: 112175 - DNA, 22 bp, Artificial Sequence
  Synthetic oligonucleotide; CTT chr11 5398192 5398213 5398209 5398214 +
aaaagtataacaaaaaataagt

SEQ ID NO: 112176 - DNA, 22 bp, Artificial Sequence
  Synthetic oligonucleotide; TTA chr11 5398193 5398214 5398210 5398215 +
aaagtataacaaaaaataagtt

SEQ ID NO: 112177 - DNA, 22 bp, Artificial Sequence
  Synthetic oligonucleotide; TTA chr11 5398216 5398237 5398233 5398238 +
gaaaaaagaaatttacatatat

SEQ ID NO: 112178 - DNA, 22 bp, Artificial Sequence
  Synthetic oligonucleotide; TTT chr11 5398230 5398251 5398247 5398252 +
acatatattagttatttaaata

SEQ ID NO: 112179 - DNA, 22 bp, Artificial Sequence
  Synthetic oligonucleotide; TTA chr11 5398231 5398252 5398248 5398253 +
catatattagttatttaaatat

SEQ ID NO: 112180 - DNA, 22 bp, Artificial Sequence
  Synthetic oligonucleotide; TTA chr11 5398240 5398261 5398257 5398262 +
gttatttaaatatgctggataa

SEQ ID NO: 112181 - DNA, 22 bp, Artificial Sequence
  Synthetic oligonucleotide; TTA chr11 5398244 5398265 5398261 5398266 +
tttaaatatgctggataaatac

SEQ ID NO: 112182 - DNA, 22 bp, Artificial Sequence
  Synthetic oligonucleotide; TTT chr11 5398247 5398268 5398264 5398269 +
aaatatgctggataaatactat

SEQ ID NO: 112183 - DNA, 22 bp, Artificial Sequence
  Synthetic oligonucleotide; TTA chr11 5398248 5398269 5398265 5398270 +
aatatgctggataaatactatt

SEQ ID NO: 112184 - DNA, 22 bp, Artificial Sequence
  Synthetic oligonucleotide; CTG chr11 5398257 5398278 5398274 5398279 +
gataaatactattacactcatt

SEQ ID NO: 112185 - DNA, 22 bp, Artificial Sequence
  Synthetic oligonucleotide; CTA chr11 5398268 5398289 5398285 5398290 +
ttacactcatttcacaaagata

SEQ ID NO: 112186 - DNA, 22 bp, Artificial Sequence
  Synthetic oligonucleotide; TTA chr11 5398271 5398292 5398288 5398293 +
cactcatttcacaaagatactg

SEQ ID NO: 112187 - DNA, 22 bp, Artificial Sequence
  Synthetic oligonucleotide; CTC chr11 5398276 5398297 5398293 5398298 +
atttcacaaagatactgactct

SEQ ID NO: 112188 - DNA, 22 bp, Artificial Sequence
  Synthetic oligonucleotide; TTT chr11 5398280 5398301 5398297 5398302 +
cacaaagatactgactctatat

SEQ ID NO: 112189 - DNA, 22 bp, Artificial Sequence
  Synthetic oligonucleotide; TTC chr11 5398281 5398302 5398298 5398303 +
acaaagatactgactctatatc

SEQ ID NO: 112190 - DNA, 22 bp, Artificial Sequence
  Synthetic oligonucleotide; CTG chr11 5398293 5398314 5398310 5398315 +
actctatatctttgcttgtttc

SEQ ID NO: 112191 - DNA, 22 bp, Artificial Sequence
  Synthetic oligonucleotide; CTC chr11 5398297 5398318 5398314 5398319 +
tatatctttgcttgtttccctt

SEQ ID NO: 112192 - DNA, 22 bp, Artificial Sequence
  Synthetic oligonucleotide; CTA chr11 5398299 5398320 5398316 5398321 +
tatctttgcttgtttcccttag

SEQ ID NO: 112193 - DNA, 22 bp, Artificial Sequence
  Synthetic oligonucleotide; CTT chr11 5398305 5398326 5398322 5398327 +
tgcttgtttcccttaggttctc

SEQ ID NO: 112194 - DNA, 22 bp, Artificial Sequence
  Synthetic oligonucleotide; TTT chr11 5398306 5398327 5398323 5398328 +
gcttgtttcccttaggttctct

SEQ ID NO: 112195 - DNA, 22 bp, Artificial Sequence
  Synthetic oligonucleotide; TTG chr11 5398307 5398328 5398324 5398329 +
cttgtttcccttaggttctctg

SEQ ID NO: 112196 - DNA, 22 bp, Artificial Sequence
  Synthetic oligonucleotide; CTT chr11 5398310 5398331 5398327 5398332 +
gtttcccttaggttctctggat

SEQ ID NO: 112197 - DNA, 22 bp, Artificial Sequence
  Synthetic oligonucleotide; TTG chr11 5398311 5398332 5398328 5398333 +
tttcccttaggttctctggata

SEQ ID NO: 112198 - DNA, 22 bp, Artificial Sequence
  Synthetic oligonucleotide; TTT chr11 5398314 5398335 5398331 5398336 +
cccttaggttctctggatattg

SEQ ID NO: 112199 - DNA, 22 bp, Artificial Sequence
  Synthetic oligonucleotide; TTC chr11 5398315 5398336 5398332 5398337 +
ccttaggttctctggatattga

SEQ ID NO: 112200 - DNA, 22 bp, Artificial Sequence
  Synthetic oligonucleotide; CTT chr11 5398319 5398340 5398336 5398341 +
aggttctctggatattgagaga

SEQ ID NO: 112201 - DNA, 22 bp, Artificial Sequence
  Synthetic oligonucleotide; TTA chr11 5398320 5398341 5398337 5398342 +
ggttctctggatattgagagag

SEQ ID NO: 112202 - DNA, 22 bp, Artificial Sequence
  Synthetic oligonucleotide; TTC chr11 5398325 5398346 5398342 5398347 +
tctggatattgagagaggctaa

SEQ ID NO: 112203 - DNA, 22 bp, Artificial Sequence
  Synthetic oligonucleotide; CTC chr11 5398327 5398348 5398344 5398349 +
tggatattgagagaggctaatg

SEQ ID NO: 112204 - DNA, 22 bp, Artificial Sequence
  Synthetic oligonucleotide; CTG chr11 5398329 5398350 5398346 5398351 +
gatattgagagaggctaatgta

SEQ ID NO: 112205 - DNA, 22 bp, Artificial Sequence
  Synthetic oligonucleotide; TTG chr11 5398336 5398357 5398353 5398358 +
agagaggctaatgtaattacct

SEQ ID NO: 112206 - DNA, 22 bp, Artificial Sequence
  Synthetic oligonucleotide; CTA chr11 5398346 5398367 5398363 5398368 +
atgtaattacctgggtaattgc

SEQ ID NO: 112207 - DNA, 22 bp, Artificial Sequence
  Synthetic oligonucleotide; TTA chr11 5398355 5398376 5398372 5398377 +
cctgggtaattgctcctcaggg

SEQ ID NO: 112208 - DNA, 22 bp, Artificial Sequence
  Synthetic oligonucleotide; CTG chr11 5398359 5398380 5398376 5398381 +
ggtaattgctcctcagggaacc

SEQ ID NO: 112209 - DNA, 22 bp, Artificial Sequence
  Synthetic oligonucleotide; TTG chr11 5398367 5398388 5398384 5398389 +
ctcctcagggaacctaactttc

SEQ ID NO: 112210 - DNA, 22 bp, Artificial Sequence
  Synthetic oligonucleotide; CTC chr11 5398370 5398391 5398387 5398392 +
ctcagggaacctaactttctcc

SEQ ID NO: 112211 - DNA, 22 bp, Artificial Sequence
  Synthetic oligonucleotide; CTC chr11 5398373 5398394 5398390 5398395 +
agggaacctaactttctcccca

SEQ ID NO: 112212 - DNA, 22 bp, Artificial Sequence
  Synthetic oligonucleotide; CTA chr11 5398383 5398404 5398400 5398405 +
actttctccccattactctact

SEQ ID NO: 112213 - DNA, 22 bp, Artificial Sequence
  Synthetic oligonucleotide; CTT chr11 5398387 5398408 5398404 5398409 +
tctccccattactctactccta

SEQ ID NO: 112214 - DNA, 22 bp, Artificial Sequence
  Synthetic oligonucleotide; TTT chr11 5398388 5398409 5398405 5398410 +
ctccccattactctactcctag

SEQ ID NO: 112215 - DNA, 22 bp, Artificial Sequence
  Synthetic oligonucleotide; TTC chr11 5398389 5398410 5398406 5398411 +
tccccattactctactcctaga

SEQ ID NO: 112216 - DNA, 22 bp, Artificial Sequence
  Synthetic oligonucleotide; CTC chr11 5398391 5398412 5398408 5398413 +
cccattactctactcctagaga

SEQ ID NO: 112217 - DNA, 22 bp, Artificial Sequence
  Synthetic oligonucleotide; TTA chr11 5398398 5398419 5398415 5398420 +
ctctactcctagagactctgat

SEQ ID NO: 112218 - DNA, 22 bp, Artificial Sequence
  Synthetic oligonucleotide; CTC chr11 5398401 5398422 5398418 5398423 +
tactcctagagactctgatcag

SEQ ID NO: 112219 - DNA, 22 bp, Artificial Sequence
  Synthetic oligonucleotide; CTA chr11 5398403 5398424 5398420 5398425 +
ctcctagagactctgatcagct

SEQ ID NO: 112220 - DNA, 22 bp, Artificial Sequence
  Synthetic oligonucleotide; CTC chr11 5398406 5398427 5398423 5398428 +
ctagagactctgatcagctttt

SEQ ID NO: 112221 - DNA, 22 bp, Artificial Sequence
  Synthetic oligonucleotide; CTA chr11 5398409 5398430 5398426 5398431 +
gagactctgatcagctttttca

SEQ ID NO: 112222 - DNA, 22 bp, Artificial Sequence
  Synthetic oligonucleotide; CTC chr11 5398416 5398437 5398433 5398438 +
tgatcagctttttcaaaaaatg

SEQ ID NO: 112223 - DNA, 22 bp, Artificial Sequence
  Synthetic oligonucleotide; CTG chr11 5398418 5398439 5398435 5398440 +
atcagctttttcaaaaaatggg

SEQ ID NO: 112224 - DNA, 22 bp, Artificial Sequence
  Synthetic oligonucleotide; CTT chr11 5398426 5398447 5398443 5398448 +
tttcaaaaaatgggcagcattc

SEQ ID NO: 112225 - DNA, 22 bp, Artificial Sequence
  Synthetic oligonucleotide; TTT chr11 5398427 5398448 5398444 5398449 +
ttcaaaaaatgggcagcattcc

SEQ ID NO: 112226 - DNA, 22 bp, Artificial Sequence
  Synthetic oligonucleotide; TTT chr11 5398428 5398449 5398445 5398450 +
tcaaaaaatgggcagcattcca

SEQ ID NO: 112227 - DNA, 22 bp, Artificial Sequence
  Synthetic oligonucleotide; TTT chr11 5398429 5398450 5398446 5398451 +
caaaaaatgggcagcattccag

SEQ ID NO: 112228 - DNA, 22 bp, Artificial Sequence
  Synthetic oligonucleotide; TTC chr11 5398430 5398451 5398447 5398452 +
aaaaaatgggcagcattccagc

SEQ ID NO: 112229 - DNA, 22 bp, Artificial Sequence
  Synthetic oligonucleotide; TTC chr11 5398448 5398469 5398465 5398470 +
cagccccaggactaagaagata

SEQ ID NO: 112230 - DNA, 22 bp, Artificial Sequence
  Synthetic oligonucleotide; CTA chr11 5398462 5398483 5398479 5398484 +
agaagatatgaatgccacagtg

SEQ ID NO: 112231 - DNA, 22 bp, Artificial Sequence
  Synthetic oligonucleotide; CTT chr11 5398494 5398515 5398511 5398516 +
gctgaagtgagcttccccatcc

SEQ ID NO: 112232 - DNA, 22 bp, Artificial Sequence
  Synthetic oligonucleotide; TTG chr11 5398495 5398516 5398512 5398517 +
ctgaagtgagcttccccatccc

SEQ ID NO: 112233 - DNA, 22 bp, Artificial Sequence
  Synthetic oligonucleotide; CTG chr11 5398498 5398519 5398515 5398520 +
aagtgagcttccccatcccacc

SEQ ID NO: 112234 - DNA, 22 bp, Artificial Sequence
  Synthetic oligonucleotide; CTT chr11 5398508 5398529 5398525 5398530 +
ccccatcccacctgaggctcag

SEQ ID NO: 112235 - DNA, 22 bp, Artificial Sequence
  Synthetic oligonucleotide; TTC chr11 5398509 5398530 5398526 5398531 +
cccatcccacctgaggctcaga

SEQ ID NO: 112236 - DNA, 22 bp, Artificial Sequence
  Synthetic oligonucleotide; CTG chr11 5398522 5398543 5398539 5398544 +
aggctcagaggccagtttcact

SEQ ID NO: 112237 - DNA, 22 bp, Artificial Sequence
  Synthetic oligonucleotide; CTC chr11 5398528 5398549 5398545 5398550 +
agaggccagtttcacttgtggt

SEQ ID NO: 112238 - DNA, 22 bp, Artificial Sequence
  Synthetic oligonucleotide; TTT chr11 5398540 5398561 5398557 5398562 +
cacttgtggtgagtgcacaagc

SEQ ID NO: 112239 - DNA, 22 bp, Artificial Sequence
  Synthetic oligonucleotide; TTC chr11 5398541 5398562 5398558 5398563 +
acttgtggtgagtgcacaagcc

SEQ ID NO: 112240 - DNA, 22 bp, Artificial Sequence
  Synthetic oligonucleotide; CTT chr11 5398545 5398566 5398562 5398567 +
gtggtgagtgcacaagcccatg

SEQ ID NO: 112241 - DNA, 22 bp, Artificial Sequence
  Synthetic oligonucleotide; TTG chr11 5398546 5398567 5398563 5398568 +
tggtgagtgcacaagcccatga

SEQ ID NO: 112242 - DNA, 22 bp, Artificial Sequence
  Synthetic oligonucleotide; CTG chr11 5398574 5398595 5398591 5398596 +
atatggcttggctctgtgtctc

SEQ ID NO: 112243 - DNA, 22 bp, Artificial Sequence
  Synthetic oligonucleotide; CTT chr11 5398583 5398604 5398600 5398605 +
ggctctgtgtctccacccaaat

SEQ ID NO: 112244 - DNA, 22 bp, Artificial Sequence
  Synthetic oligonucleotide; TTG chr11 5398584 5398605 5398601 5398606 +
gctctgtgtctccacccaaatt

SEQ ID NO: 112245 - DNA, 22 bp, Artificial Sequence
  Synthetic oligonucleotide; CTC chr11 5398588 5398609 5398605 5398610 +
tgtgtctccacccaaatttcat

SEQ ID NO: 112246 - DNA, 22 bp, Artificial Sequence
  Synthetic oligonucleotide; CTG chr11 5398590 5398611 5398607 5398612 +
tgtctccacccaaatttcatat

SEQ ID NO: 112247 - DNA, 22 bp, Artificial Sequence
  Synthetic oligonucleotide; CTC chr11 5398596 5398617 5398613 5398618 +
cacccaaatttcatattgaatt

SEQ ID NO: 112248 - DNA, 22 bp, Artificial Sequence
  Synthetic oligonucleotide; TTT chr11 5398607 5398628 5398624 5398629 +
catattgaattgtaatccccat

SEQ ID NO: 112249 - DNA, 22 bp, Artificial Sequence
  Synthetic oligonucleotide; TTC chr11 5398608 5398629 5398625 5398630 +
atattgaattgtaatccccata

SEQ ID NO: 112250 - DNA, 22 bp, Artificial Sequence
  Synthetic oligonucleotide; TTG chr11 5398614 5398635 5398631 5398636 +
aattgtaatccccataatccct

SEQ ID NO: 112251 - DNA, 22 bp, Artificial Sequence
  Synthetic oligonucleotide; TTG chr11 5398619 5398640 5398636 5398641 +
taatccccataatccctatatg

SEQ ID NO: 112252 - DNA, 22 bp, Artificial Sequence
  Synthetic oligonucleotide; CTA chr11 5398637 5398658 5398654 5398659 +
tatgtcgggggagggaccaggt

SEQ ID NO: 112253 - DNA, 22 bp, Artificial Sequence
  Synthetic oligonucleotide; TTA chr11 5398668 5398689 5398685 5398690 +
ttggatcatgggagcagtttcc

SEQ ID NO: 112254 - DNA, 22 bp, Artificial Sequence
  Synthetic oligonucleotide; TTG chr11 5398671 5398692 5398688 5398693 +
gatcatgggagcagtttccccc

SEQ ID NO: 112255 - DNA, 22 bp, Artificial Sequence
  Synthetic oligonucleotide; TTT chr11 5398688 5398709 5398705 5398710 +
cccccatgcagttctcgtgata

SEQ ID NO: 112256 - DNA, 22 bp, Artificial Sequence
  Synthetic oligonucleotide; TTC chr11 5398689 5398710 5398706 5398711 +
ccccatgcagttctcgtgatac

SEQ ID NO: 112257 - DNA, 22 bp, Artificial Sequence
  Synthetic oligonucleotide; TTC chr11 5398702 5398723 5398719 5398724 +
tcgtgatactgagtgagttttc

SEQ ID NO: 112258 - DNA, 22 bp, Artificial Sequence
  Synthetic oligonucleotide; CTC chr11 5398704 5398725 5398721 5398726 +
gtgatactgagtgagttttcat

SEQ ID NO: 112259 - DNA, 22 bp, Artificial Sequence
  Synthetic oligonucleotide; CTG chr11 5398713 5398734 5398730 5398735 +
agtgagttttcatgagatctga

SEQ ID NO: 112260 - DNA, 22 bp, Artificial Sequence
  Synthetic oligonucleotide; TTT chr11 5398722 5398743 5398739 5398744 +
tcatgagatctgatggttttat

SEQ ID NO: 112261 - DNA, 22 bp, Artificial Sequence
  Synthetic oligonucleotide; TTT chr11 5398723 5398744 5398740 5398745 +
catgagatctgatggttttata

SEQ ID NO: 112262 - DNA, 22 bp, Artificial Sequence
  Synthetic oligonucleotide; TTC chr11 5398724 5398745 5398741 5398746 +
atgagatctgatggttttataa

SEQ ID NO: 112263 - DNA, 22 bp, Artificial Sequence
  Synthetic oligonucleotide; CTG chr11 5398734 5398755 5398751 5398756 +
atggttttataaggcagttttc

SEQ ID NO: 112264 - DNA, 22 bp, Artificial Sequence
  Synthetic oligonucleotide; TTT chr11 5398741 5398762 5398758 5398763 +
tataaggcagttttccctcttc

SEQ ID NO: 112265 - DNA, 22 bp, Artificial Sequence
  Synthetic oligonucleotide; TTT chr11 5398742 5398763 5398759 5398764 +
ataaggcagttttccctcttct

SEQ ID NO: 112266 - DNA, 22 bp, Artificial Sequence
  Synthetic oligonucleotide; TTA chr11 5398743 5398764 5398760 5398765 +
taaggcagttttccctcttctt

SEQ ID NO: 112267 - DNA, 22 bp, Artificial Sequence
  Synthetic oligonucleotide; TTT chr11 5398754 5398775 5398771 5398776 +
tccctcttcttgctcactctct

SEQ ID NO: 112268 - DNA, 22 bp, Artificial Sequence
  Synthetic oligonucleotide; TTT chr11 5398755 5398776 5398772 5398777 +
ccctcttcttgctcactctctc

SEQ ID NO: 112269 - DNA, 22 bp, Artificial Sequence
  Synthetic oligonucleotide; TTC chr11 5398756 5398777 5398773 5398778 +
cctcttcttgctcactctctct

SEQ ID NO: 112270 - DNA, 22 bp, Artificial Sequence
  Synthetic oligonucleotide; CTC chr11 5398760 5398781 5398777 5398782 +
ttcttgctcactctctcttgcc

SEQ ID NO: 112271 - DNA, 22 bp, Artificial Sequence
  Synthetic oligonucleotide; CTT chr11 5398762 5398783 5398779 5398784 +
cttgctcactctctcttgcctg

SEQ ID NO: 112272 - DNA, 22 bp, Artificial Sequence
  Synthetic oligonucleotide; TTC chr11 5398763 5398784 5398780 5398785 +
ttgctcactctctcttgcctgc

SEQ ID NO: 112273 - DNA, 22 bp, Artificial Sequence
  Synthetic oligonucleotide; CTT chr11 5398765 5398786 5398782 5398787 +
gctcactctctcttgcctgcca

SEQ ID NO: 112274 - DNA, 22 bp, Artificial Sequence
  Synthetic oligonucleotide; TTG chr11 5398766 5398787 5398783 5398788 +
ctcactctctcttgcctgccac

SEQ ID NO: 112275 - DNA, 22 bp, Artificial Sequence
  Synthetic oligonucleotide; CTC chr11 5398769 5398790 5398786 5398791 +
actctctcttgcctgccaccaa

SEQ ID NO: 112276 - DNA, 22 bp, Artificial Sequence
  Synthetic oligonucleotide; CTC chr11 5398773 5398794 5398790 5398795 +
tctcttgcctgccaccaagtaa

SEQ ID NO: 112277 - DNA, 22 bp, Artificial Sequence
  Synthetic oligonucleotide; CTC chr11 5398775 5398796 5398792 5398797 +
tcttgcctgccaccaagtaaga

SEQ ID NO: 112278 - DNA, 22 bp, Artificial Sequence
  Synthetic oligonucleotide; CTC chr11 5398777 5398798 5398794 5398799 +
ttgcctgccaccaagtaagatg

SEQ ID NO: 112279 - DNA, 22 bp, Artificial Sequence
  Synthetic oligonucleotide; CTT chr11 5398779 5398800 5398796 5398801 +
gcctgccaccaagtaagatgtg

SEQ ID NO: 112280 - DNA, 22 bp, Artificial Sequence
  Synthetic oligonucleotide; TTG chr11 5398780 5398801 5398797 5398802 +
cctgccaccaagtaagatgtgc

SEQ ID NO: 112281 - DNA, 22 bp, Artificial Sequence
  Synthetic oligonucleotide; CTG chr11 5398784 5398805 5398801 5398806 +
ccaccaagtaagatgtgcctgc

SEQ ID NO: 112282 - DNA, 22 bp, Artificial Sequence
  Synthetic oligonucleotide; CTG chr11 5398805 5398826 5398822 5398827 +
cttctccttctgccataattgt

SEQ ID NO: 112283 - DNA, 22 bp, Artificial Sequence
  Synthetic oligonucleotide; CTT chr11 5398808 5398829 5398825 5398830 +
ctccttctgccataattgtaag

SEQ ID NO: 112284 - DNA, 22 bp, Artificial Sequence
  Synthetic oligonucleotide; TTC chr11 5398809 5398830 5398826 5398831 +
tccttctgccataattgtaagt

SEQ ID NO: 112285 - DNA, 22 bp, Artificial Sequence
  Synthetic oligonucleotide; CTC chr11 5398811 5398832 5398828 5398833 +
cttctgccataattgtaagttt

SEQ ID NO: 112286 - DNA, 22 bp, Artificial Sequence
  Synthetic oligonucleotide; CTT chr11 5398814 5398835 5398831 5398836 +
ctgccataattgtaagtttcct

SEQ ID NO: 112287 - DNA, 22 bp, Artificial Sequence
  Synthetic oligonucleotide; TTC chr11 5398815 5398836 5398832 5398837 +
tgccataattgtaagtttcctg

SEQ ID NO: 112288 - DNA, 22 bp, Artificial Sequence
  Synthetic oligonucleotide; CTG chr11 5398817 5398838 5398834 5398839 +
ccataattgtaagtttcctgag

SEQ ID NO: 112289 - DNA, 22 bp, Artificial Sequence
  Synthetic oligonucleotide; TTG chr11 5398826 5398847 5398843 5398848 +
taagtttcctgaggcctcccca

SEQ ID NO: 112290 - DNA, 22 bp, Artificial Sequence
  Synthetic oligonucleotide; TTT chr11 5398833 5398854 5398850 5398855 +
cctgaggcctccccagctatgt

SEQ ID NO: 112291 - DNA, 22 bp, Artificial Sequence
  Synthetic oligonucleotide; TTC chr11 5398834 5398855 5398851 5398856 +
ctgaggcctccccagctatgtg

SEQ ID NO: 112292 - DNA, 22 bp, Artificial Sequence
  Synthetic oligonucleotide; CTG chr11 5398837 5398858 5398854 5398859 +
aggcctccccagctatgtggaa

SEQ ID NO: 112293 - DNA, 22 bp, Artificial Sequence
  Synthetic oligonucleotide; CTC chr11 5398844 5398865 5398861 5398866 +
cccagctatgtggaaatgtgag

SEQ ID NO: 112294 - DNA, 22 bp, Artificial Sequence
  Synthetic oligonucleotide; CTA chr11 5398852 5398873 5398869 5398874 +
tgtggaaatgtgagtcaattaa

SEQ ID NO: 112295 - DNA, 22 bp, Artificial Sequence
  Synthetic oligonucleotide; TTA chr11 5398873 5398894 5398890 5398895 +
aacctcctttgttaataaatta

SEQ ID NO: 112296 - DNA, 22 bp, Artificial Sequence
  Synthetic oligonucleotide; CTC chr11 5398879 5398900 5398896 5398901 +
ctttgttaataaattacccagt

SEQ ID NO: 112297 - DNA, 22 bp, Artificial Sequence
  Synthetic oligonucleotide; CTT chr11 5398882 5398903 5398899 5398904 +
tgttaataaattacccagtctc

SEQ ID NO: 112298 - DNA, 22 bp, Artificial Sequence
  Synthetic oligonucleotide; TTT chr11 5398883 5398904 5398900 5398905 +
gttaataaattacccagtctca

SEQ ID NO: 112299 - DNA, 22 bp, Artificial Sequence
  Synthetic oligonucleotide; TTG chr11 5398884 5398905 5398901 5398906 +
ttaataaattacccagtctcag

SEQ ID NO: 112300 - DNA, 22 bp, Artificial Sequence
  Synthetic oligonucleotide; TTA chr11 5398887 5398908 5398904 5398909 +
ataaattacccagtctcaggta

SEQ ID NO: 112301 - DNA, 22 bp, Artificial Sequence
  Synthetic oligonucleotide; TTA chr11 5398895 5398916 5398912 5398917 +
cccagtctcaggtagtatcttt

SEQ ID NO: 112302 - DNA, 22 bp, Artificial Sequence
  Synthetic oligonucleotide; CTC chr11 5398904 5398925 5398921 5398926 +
aggtagtatctttagagcagtg

SEQ ID NO: 112303 - DNA, 22 bp, Artificial Sequence
  Synthetic oligonucleotide; CTT chr11 5398916 5398937 5398933 5398938 +
tagagcagtgtgagaatgaact

SEQ ID NO: 112304 - DNA, 22 bp, Artificial Sequence
  Synthetic oligonucleotide; TTT chr11 5398917 5398938 5398934 5398939 +
agagcagtgtgagaatgaacta

SEQ ID NO: 112305 - DNA, 22 bp, Artificial Sequence
  Synthetic oligonucleotide; TTA chr11 5398918 5398939 5398935 5398940 +
gagcagtgtgagaatgaactaa

SEQ ID NO: 112306 - DNA, 22 bp, Artificial Sequence
  Synthetic oligonucleotide; CTA chr11 5398939 5398960 5398956 5398961 +
atacaatccccaagccctgcct

SEQ ID NO: 112307 - DNA, 22 bp, Artificial Sequence
  Synthetic oligonucleotide; CTG chr11 5398958 5398979 5398975 5398980 +
ccttctgaagcagcattcagga

SEQ ID NO: 112308 - DNA, 22 bp, Artificial Sequence
  Synthetic oligonucleotide; CTT chr11 5398962 5398983 5398979 5398984 +
ctgaagcagcattcaggactcc

SEQ ID NO: 112309 - DNA, 22 bp, Artificial Sequence
  Synthetic oligonucleotide; TTC chr11 5398963 5398984 5398980 5398985 +
tgaagcagcattcaggactccc

SEQ ID NO: 112310 - DNA, 22 bp, Artificial Sequence
  Synthetic oligonucleotide; CTG chr11 5398965 5398986 5398982 5398987 +
aagcagcattcaggactcccaa

SEQ ID NO: 112311 - DNA, 22 bp, Artificial Sequence
  Synthetic oligonucleotide; TTC chr11 5398976 5398997 5398993 5398998 +
aggactcccaaccccatgtcac

SEQ ID NO: 112312 - DNA, 22 bp, Artificial Sequence
  Synthetic oligonucleotide; CTC chr11 5398983 5399004 5399000 5399005 +
ccaaccccatgtcacagtgtga

SEQ ID NO: 112313 - DNA, 22 bp, Artificial Sequence
  Synthetic oligonucleotide; CTT chr11 5399012 5399033 5399029 5399034 +
agcatttttcctaagacagtag

SEQ ID NO: 112314 - DNA, 22 bp, Artificial Sequence
  Synthetic oligonucleotide; TTA chr11 5399013 5399034 5399030 5399035 +
gcatttttcctaagacagtagt

SEQ ID NO: 112315 - DNA, 22 bp, Artificial Sequence
  Synthetic oligonucleotide; TTT chr11 5399019 5399040 5399036 5399041 +
ttcctaagacagtagtcacctc

SEQ ID NO: 112316 - DNA, 22 bp, Artificial Sequence
  Synthetic oligonucleotide; TTT chr11 5399020 5399041 5399037 5399042 +
tcctaagacagtagtcacctcc

SEQ ID NO: 112317 - DNA, 22 bp, Artificial Sequence
  Synthetic oligonucleotide; TTT chr11 5399021 5399042 5399038 5399043 +
cctaagacagtagtcacctccc
